United States Patent Application Publication US 2022/0213167 A1 - sequence listing, part 31

SEQ ID NO: 655748 - protein, 16 aa, Homo sapiens
  CDR3 for beta chain variable domain of TCR clone 327874 (TRBV12-4, TRBJ2-7)
CASSLIGATGTYEQYF

SEQ ID NO: 655749 - protein, 12 aa, Homo sapiens
  CDR3 for alpha chain variable domain of TCR clone 327875 (TRAV23/DV6, TRAJ17)
CSAKAAGNKLTF

SEQ ID NO: 655750 - protein, 17 aa, Homo sapiens
  CDR3 for beta chain variable domain of TCR clone 327875 (TRBV5-5, TRBJ1-1)
CASSLRFRGLMNTEAFF

SEQ ID NO: 655751 - protein, 17 aa, Homo sapiens
  CDR3 for alpha chain variable domain of TCR clone 327876 (TRAV13-1, TRAJ52)
CAASSGAGGTSFGRLTF

SEQ ID NO: 655752 - protein, 12 aa, Homo sapiens
  CDR3 for beta chain variable domain of TCR clone 327876 (TRBV11-2, TRBJ2-2)
CASSLGGGELFF

SEQ ID NO: 655753 - protein, 15 aa, Homo sapiens
  CDR3 for alpha chain variable domain of TCR clone 327877 (TRAV13-1, TRAJ5)
CAVSPIDTGRRALTF

SEQ ID NO: 655754 - protein, 18 aa, Homo sapiens
  CDR3 for beta chain variable domain of TCR clone 327877 (TRBV4-1, TRBJ2-2)
CASSFRTSGGEGPGEQFF

SEQ ID NO: 655755 - protein, 16 aa, Homo sapiens
  CDR3 for alpha chain variable domain of TCR clone 327878 (TRAV1-1, TRAJ29)
CAVRSPRNSGNTPLVF

SEQ ID NO: 655756 - protein, 15 aa, Homo sapiens
  CDR3 for beta chain variable domain of TCR clone 327878 (TRBV29-1, TRBJ2-1)
CSVGRHALFYNEQFF

SEQ ID NO: 655757 - protein, 16 aa, Homo sapiens
  CDR3 for alpha chain variable domain of TCR clone 327879 (TRAV30, TRAJ24)
CGTEIVDADSWGKFQC

SEQ ID NO: 655758 - protein, 14 aa, Homo sapiens
  CDR3 for beta chain variable domain of TCR clone 327879 (TRBV12-5, TRBJ2-5)
CASGSRTHHETQYF

SEQ ID NO: 655759 - protein, 11 aa, Homo sapiens
  CDR3 for alpha chain variable domain of TCR clone 327880 (TRAV2, TRAJ20)
CAVEYDYKLSF

SEQ ID NO: 655760 - protein, 15 aa, Homo sapiens
  CDR3 for beta chain variable domain of TCR clone 327880 (TRBV6-3, TRBJ2-7)
CASSSPGTVFYEQYF

SEQ ID NO: 655761 - protein, 14 aa, Homo sapiens
  CDR3 for alpha chain variable domain of TCR clone 327881 (TRAV17, TRAJ57)
CATDPQGGSEKLVF

SEQ ID NO: 655762 - protein, 14 aa, Homo sapiens
  CDR3 for beta chain variable domain of TCR clone 327881 (TRBV7-9, TRBJ2-1)
CAGSPRDSLYEQFF

SEQ ID NO: 655763 - protein, 15 aa, Homo sapiens
  CDR3 for alpha chain variable domain of TCR clone 327882 (TRAV13-1, TRAJ9)
CAASTLNTGGFKTIF

SEQ ID NO: 655764 - protein, 16 aa, Homo sapiens
  CDR3 for beta chain variable domain of TCR clone 327882 (TRBV9, TRBJ2-1)
CASSVGGGGNYNEQFF

SEQ ID NO: 655765 - protein, 14 aa, Homo sapiens
  CDR3 for alpha chain variable domain of TCR clone 327883 (TRAV12-2, TRAJ13)
WALKKTGCYQKVTF

SEQ ID NO: 655766 - protein, 15 aa, Homo sapiens
  CDR3 for beta chain variable domain of TCR clone 327883 (TRBV27, TRBJ2-1)
CASSNGGGSSNEQFF

SEQ ID NO: 655767 - protein, 12 aa, Homo sapiens
  CDR3 for alpha chain variable domain of TCR clone 327884 (TRAV12-3, TRAJ17)
CSMTLTGNKLNF

SEQ ID NO: 655768 - protein, 15 aa, Homo sapiens
  CDR3 for beta chain variable domain of TCR clone 327884 (TRBV20-1, TRBJ2-7)
CSARDRVSGMDEQYF

SEQ ID NO: 655769 - protein, 16 aa, Homo sapiens
  CDR3 for alpha chain variable domain of TCR clone 327885 (TRAV3, TRAJ37)
CAVRPHGSGNTGKLIF

SEQ ID NO: 655770 - protein, 13 aa, Homo sapiens
  CDR3 for beta chain variable domain of TCR clone 327885 (TRBV7-2, TRBJ2-7)
CASSSPSGSEQYF

SEQ ID NO: 655771 - protein, 12 aa, Homo sapiens
  CDR3 for alpha chain variable domain of TCR clone 327886 (TRAV12-3, TRAJ42)
CAPGGSQGNLIF

SEQ ID NO: 655772 - protein, 13 aa, Homo sapiens
  CDR3 for beta chain variable domain of TCR clone 327886 (TRBV5-7, TRBJ2-6)
CASTSGGANDLTF

SEQ ID NO: 655773 - protein, 18 aa, Homo sapiens
  CDR3 for alpha chain variable domain of TCR clone 327887 (TRAV12-3, TRAJ52)
CAMSRTNAGGTSYGKLTL

SEQ ID NO: 655774 - protein, 15 aa, Homo sapiens
  CDR3 for beta chain variable domain of TCR clone 327887 (TRBV19, TRBJ1-2)
CASSVGHVLNYGYTF

SEQ ID NO: 655775 - protein, 14 aa, Homo sapiens
  CDR3 for alpha chain variable domain of TCR clone 327888 (TRAV35, TRAJ22)
CAGLRPGSARQLTF

SEQ ID NO: 655776 - protein, 14 aa, Homo sapiens
  CDR3 for beta chain variable domain of TCR clone 327888 (TRBV5-8, TRBJ2-3)
CASSLGQGTDTQYF

SEQ ID NO: 655777 - protein, 15 aa, Homo sapiens
  CDR3 for alpha chain variable domain of TCR clone 327889 (TRAV26-1, TRAJ29)
CIVRVEGSGNTPLVF

SEQ ID NO: 655778 - protein, 12 aa, Homo sapiens
  CDR3 for beta chain variable domain of TCR clone 327889 (TRBV7-3, TRBJ2-1)
CASSFINNEQFF

SEQ ID NO: 655779 - protein, 12 aa, Homo sapiens
  CDR3 for alpha chain variable domain of TCR clone 327890 (TRAV12-3, TRAJ17)
CAMTLTGNKLTF

SEQ ID NO: 655780 - protein, 15 aa, Homo sapiens
  CDR3 for beta chain variable domain of TCR clone 327890 (TRBV19, TRBJ2-7)
CASSFNSGGVWEQYF

SEQ ID NO: 655781 - protein, 14 aa, Homo sapiens
  CDR3 for alpha chain variable domain of TCR clone 327891 (TRAV17, TRAJ31)
CATVLRTNNARLMF

SEQ ID NO: 655782 - protein, 14 aa, Homo sapiens
  CDR3 for beta chain variable domain of TCR clone 327891 (TRBV12-4, TRBJ2-5)
CASSLGQKQETQYF

SEQ ID NO: 655783 - protein, 14 aa, Homo sapiens
  CDR3 for alpha chain variable domain of TCR clone 327892 (TRAV2, TRAJ9)
CAVEDRSGGFKTIF

SEQ ID NO: 655784 - protein, 17 aa, Homo sapiens
  CDR3 for beta chain variable domain of TCR clone 327892 (TRBV9, TRBJ2-2)
CASSVGGQGTDTGELFF

SEQ ID NO: 655785 - protein, 12 aa, Homo sapiens
  CDR3 for alpha chain variable domain of TCR clone 327893 (TRAV27, TRAJ13)
CAGVRGYKKVTF

SEQ ID NO: 655786 - protein, 16 aa, Homo sapiens
  CDR3 for beta chain variable domain of TCR clone 327893 (TRBV28, TRBJ2-1)
CASSSSYSGSLNEQFF

SEQ ID NO: 655787 - protein, 14 aa, Homo sapiens
  CDR3 for alpha chain variable domain of TCR clone 327894 (TRAV27, TRAJ22)
CAGLPSGSARQLTF

SEQ ID NO: 655788 - protein, 16 aa, Homo sapiens
  CDR3 for beta chain variable domain of TCR clone 327894 (TRBV12-5, TRBJ2-5)
CASGPRTSGNQETQYF

SEQ ID NO: 655789 - protein, 13 aa, Homo sapiens
  CDR3 for alpha chain variable domain of TCR clone 327895 (TRAV38-2/DV8, TRAJ34)
CAYRTWNTDKLIF

SEQ ID NO: 655790 - protein, 13 aa, Homo sapiens
  CDR3 for beta chain variable domain of TCR clone 327895 (TRBV10-3, TRBJ1-2)
CAISERDSYGYTF

SEQ ID NO: 655791 - protein, 15 aa, Homo sapiens
  CDR3 for alpha chain variable domain of TCR clone 327896 (TRAV27, TRAJ38)
CAARRNAGNNRKLIW

SEQ ID NO: 655792 - protein, 15 aa, Homo sapiens
  CDR3 for beta chain variable domain of TCR clone 327896 (TRBV12-4, TRBJ2-2)
CASSRQGANTGELFF

SEQ ID NO: 655793 - protein, 14 aa, Homo sapiens
  CDR3 for alpha chain variable domain of TCR clone 327897 (TRAV13-1, TRAJ6)
CAASITGGSYIPTF

SEQ ID NO: 655794 - protein, 14 aa, Homo sapiens
  CDR3 for beta chain variable domain of TCR clone 327897 (TRBV6-3, TRBJ2-1)
CASLHSAYCNEQFF

SEQ ID NO: 655795 - protein, 12 aa, Homo sapiens
  CDR3 for alpha chain variable domain of TCR clone 327898 (TRAV12-2, TRAJ4)
GWPEGGYNKLIF

SEQ ID NO: 655796 - protein, 16 aa, Homo sapiens
  CDR3 for beta chain variable domain of TCR clone 327898 (TRBV6-1, TRBJ2-5)
CASSETLDRGAGTQYF

SEQ ID NO: 655797 - protein, 16 aa, Homo sapiens
  CDR3 for alpha chain variable domain of TCR clone 327899 (TRAV3, TRAJ37)
CAVRGKGSGNTGKLIF

SEQ ID NO: 655798 - protein, 16 aa, Homo sapiens
  CDR3 for beta chain variable domain of TCR clone 327899 (TRBV20-1, TRBJ1-2)
CSASMGQGVANYGYTF

SEQ ID NO: 655799 - protein, 12 aa, Homo sapiens
  CDR3 for alpha chain variable domain of TCR clone 327900 (TRAV3, TRAJ43)
CAVRDPNNDMRF

SEQ ID NO: 655800 - protein, 11 aa, Homo sapiens
  CDR3 for beta chain variable domain of TCR clone 327900 (TRBV11-2, TRBJ2-2)
CASSLPGELFF

SEQ ID NO: 655801 - protein, 13 aa, Homo sapiens
  CDR3 for alpha chain variable domain of TCR clone 327901 (TRAV12-3, TRAJ35)
CAMAIGFGNVLHC

SEQ ID NO: 655802 - protein, 15 aa, Homo sapiens
  CDR3 for beta chain variable domain of TCR clone 327901 (TRBV20-1, TRBJ2-1)
CSARGSGIYYNEQFF

SEQ ID NO: 655803 - protein, 15 aa, Homo sapiens
  CDR3 for alpha chain variable domain of TCR clone 327902 (TRAV29/DV5, TRAJ42)
CAAKTDGGSQGNLIF

SEQ ID NO: 655804 - protein, 18 aa, Homo sapiens
  CDR3 for beta chain variable domain of TCR clone 327902 (TRBV20-1, TRBJ2-6)
CSAETTPTHGSGANDLTF

SEQ ID NO: 655805 - protein, 13 aa, Homo sapiens
  CDR3 for alpha chain variable domain of TCR clone 327903 (TRAV1-2, TRAJ9)
CAALNTGGLKTIF

SEQ ID NO: 655806 - protein, 16 aa, Homo sapiens
  CDR3 for beta chain variable domain of TCR clone 327903 (TRBV19, TRBJ2-1)
CASSKAGPSSYNEQFF

SEQ ID NO: 655807 - protein, 15 aa, Homo sapiens
  CDR3 for alpha chain variable domain of TCR clone 327904 (TRAV21, TRAJ37)
CAVRPTLSNTGKLIF

SEQ ID NO: 655808 - protein, 16 aa, Homo sapiens
  CDR3 for beta chain variable domain of TCR clone 327904 (TRBV24-1, TRBJ2-3)
CATSDRRQDLTDPQYF

SEQ ID NO: 655809 - protein, 11 aa, Homo sapiens
  CDR3 for alpha chain variable domain of TCR clone 327905 (TRAV21, TRAJ11)
CAVNGYSTLTF

SEQ ID NO: 655810 - protein, 16 aa, Homo sapiens
  CDR3 for beta chain variable domain of TCR clone 327905 (TRBV19, TRBJ2-1)
CVSSKAGPSSYNEQFF

SEQ ID NO: 655811 - protein, 16 aa, Homo sapiens
  CDR3 for alpha chain variable domain of TCR clone 327906 (TRAV12-1, TRAJ8)
CVVNGRGNTGFQKLVF

SEQ ID NO: 655812 - protein, 14 aa, Homo sapiens
  CDR3 for beta chain variable domain of TCR clone 327906 (TRBV7-3, TRBJ2-1)
CASSLAGGTNEQFF

SEQ ID NO: 655813 - protein, 17 aa, Homo sapiens
  CDR3 for alpha chain variable domain of TCR clone 327907 (TRAV3, TRAJ38)
CAVRDCLNAGNNRKLIW

SEQ ID NO: 655814 - protein, 15 aa, Homo sapiens
  CDR3 for beta chain variable domain of TCR clone 327907 (TRBV28, TRBJ1-5)
CASSRTGGYVQPQHF

SEQ ID NO: 655815 - protein, 19 aa, Homo sapiens
  CDR3 for alpha chain variable domain of TCR clone 327908 (TRAV2, TRAJ20)
ILQVRKADAAVYRDFKLSF

SEQ ID NO: 655816 - protein, 13 aa, Homo sapiens
  CDR3 for beta chain variable domain of TCR clone 327908 (TRBV15, TRBJ1-6)
CATSGGLNSPLHF

SEQ ID NO: 655817 - protein, 15 aa, Homo sapiens
  CDR3 for alpha chain variable domain of TCR clone 327909 (TRAV17, TRAJ42)
CSTDHYGGSQGNLIF

SEQ ID NO: 655818 - protein, 14 aa, Homo sapiens
  CDR3 for beta chain variable domain of TCR clone 327909 (TRBV19, TRBJ2-5)
CASSIEHSQETQYF

SEQ ID NO: 655819 - protein, 14 aa, Homo sapiens
  CDR3 for alpha chain variable domain of TCR clone 327910 (TRAV39, TRAJ47)
CAVDFVQSGNKLVF

SEQ ID NO: 655820 - protein, 13 aa, Homo sapiens
  CDR3 for beta chain variable domain of TCR clone 327910 (TRBV29-1, TRBJ2-2)
CSTTGVNTGELFF

SEQ ID NO: 655821 - protein, 12 aa, Homo sapiens
  CDR3 for alpha chain variable domain of TCR clone 327911 (TRAV13-2, TRAJ23)
CAERHRGGKLIF

SEQ ID NO: 655822 - protein, 12 aa, Homo sapiens
  CDR3 for beta chain variable domain of TCR clone 327911 (TRBV27, TRBJ2-5)
CASSPTGETQYF

SEQ ID NO: 655823 - protein, 15 aa, Homo sapiens
  CDR3 for alpha chain variable domain of TCR clone 327912 (TRAV26-1, TRAJ29)
RIVRVEGSGNTPLVF

SEQ ID NO: 655824 - protein, 15 aa, Homo sapiens
  CDR3 for beta chain variable domain of TCR clone 327912 (TRBV7-9, TRBJ1-5)
CASSQGHQPNQPQQF

SEQ ID NO: 655825 - protein, 17 aa, Homo sapiens
  CDR3 for alpha chain variable domain of TCR clone 327913 (TRAV3, TRAJ6)
CAVRDGPRAGGDYIPTF

SEQ ID NO: 655826 - protein, 14 aa, Homo sapiens
  CDR3 for beta chain variable domain of TCR clone 327913 (TRBV7-2, TRBJ2-7)
CASSPKTSFYEQYF

SEQ ID NO: 655827 - protein, 15 aa, Homo sapiens
  CDR3 for alpha chain variable domain of TCR clone 327914 (TRAV3, TRAJ3)
CAGRDRDSSASKIIF

SEQ ID NO: 655828 - protein, 12 aa, Homo sapiens
  CDR3 for beta chain variable domain of TCR clone 327914 (TRBV11-2, TRBJ2-2)
CASSLPTGELFF

SEQ ID NO: 655829 - protein, 12 aa, Homo sapiens
  CDR3 for alpha chain variable domain of TCR clone 327915 (TRAV12-3, TRAJ17)
CAMTLTGNKLTF

SEQ ID NO: 655830 - protein, 15 aa, Homo sapiens
  CDR3 for beta chain variable domain of TCR clone 327915 (TRBV4-1, TRBJ2-3)
CASRSTRAGTDTQYF

SEQ ID NO: 655831 - protein, 10 aa, Homo sapiens
  CDR3 for alpha chain variable domain of TCR clone 327916 (TRAV16, TRAJ22)
SAMYLRHLTF

SEQ ID NO: 655832 - protein, 15 aa, Homo sapiens
  CDR3 for beta chain variable domain of TCR clone 327916 (TRBV7-9, TRBJ1-6)
CASSYPGRGNSPLHF

SEQ ID NO: 655833 - protein, 12 aa, Homo sapiens
  CDR3 for alpha chain variable domain of TCR clone 327917 (TRAV13-1, TRAJ52)
HAGGTSYGKLTF

SEQ ID NO: 655834 - protein, 14 aa, Homo sapiens
  CDR3 for beta chain variable domain of TCR clone 327917 (TRBV5-5, TRBJ1-2)
CASSLDPYNYGYTF

SEQ ID NO: 655835 - protein, 16 aa, Homo sapiens
  CDR3 for alpha chain variable domain of TCR clone 327918 (TRAV30, TRAJ24)
YGTEIVDADSWGKFQF

SEQ ID NO: 655836 - protein, 15 aa, Homo sapiens
  CDR3 for beta chain variable domain of TCR clone 327918 (TRBV7-9, TRBJ1-4)
CASSARTGGNEKLFV

SEQ ID NO: 655837 - protein, 15 aa, Homo sapiens
  CDR3 for alpha chain variable domain of TCR clone 327919 (TRAV21, TRAJ38)
FAVRQDAGNNSKLIW

SEQ ID NO: 655838 - protein, 16 aa, Homo sapiens
  CDR3 for beta chain variable domain of TCR clone 327919 (TRBV4-2, TRBJ1-1)
CASRPLDGGGDTEAFF

SEQ ID NO: 655839 - protein, 13 aa, Homo sapiens
  CDR3 for alpha chain variable domain of TCR clone 327920 (TRAV1-2, TRAJ9)
CAALNTGGFKTIF

SEQ ID NO: 655840 - protein, 14 aa, Homo sapiens
  CDR3 for beta chain variable domain of TCR clone 327920 (TRBV19, TRBJ2-3)
CASSIDLGGDTQYF

SEQ ID NO: 655841 - protein, 11 aa, Homo sapiens
  CDR3 for alpha chain variable domain of TCR clone 327921 (TRAV17, TRAJ9)
CGFTGGFKTIF

SEQ ID NO: 655842 - protein, 14 aa, Homo sapiens
  CDR3 for beta chain variable domain of TCR clone 327921 (TRBV7-9, TRBJ2-2)
CASSLVQNTGELFF

SEQ ID NO: 655843 - protein, 15 aa, Homo sapiens
  CDR3 for alpha chain variable domain of TCR clone 327922 (TRAV21, TRAJ53)
CATLNSGGSNYKLTF

SEQ ID NO: 655844 - protein, 16 aa, Homo sapiens
  CDR3 for beta chain variable domain of TCR clone 327922 (TRBV29-1, TRBJ2-6)
CSVEDITYSGANVLTF

SEQ ID NO: 655845 - protein, 14 aa, Homo sapiens
  CDR3 for alpha chain variable domain of TCR clone 327923 (TRAV13-1, TRAJ40)
CAASMTSGTYKYIF

SEQ ID NO: 655846 - protein, 14 aa, Homo sapiens
  CDR3 for beta chain variable domain of TCR clone 327923 (TRBV2, TRBJ2-7)
CASSLTSGGYEQYF

SEQ ID NO: 655847 - protein, 15 aa, Homo sapiens
  CDR3 for alpha chain variable domain of TCR clone 327924 (TRAV23/DV6, TRAJ13)
CAAWPGGGGYQKVTF

SEQ ID NO: 655848 - protein, 17 aa, Homo sapiens
  CDR3 for beta chain variable domain of TCR clone 327924 (TRBV19, TRBJ2-7)
RASSISFYDSYPYEQYF

SEQ ID NO: 655849 - protein, 13 aa, Homo sapiens
  CDR3 for alpha chain variable domain of TCR clone 327925 (TRAV8-3, TRAJ48)
CAVVPFGNEKLTF

SEQ ID NO: 655850 - protein, 14 aa, Homo sapiens
  CDR3 for beta chain variable domain of TCR clone 327925 (TRBV18, TRBJ2-7)
CASSPRGGAYERYF

SEQ ID NO: 655851 - protein, 23 aa, Homo sapiens
  CDR3 for alpha chain variable domain of TCR clone 327926 (TRAV26-1, )
CIADNAGSNHIQNPDPAVYQLRD

SEQ ID NO: 655852 - protein, 13 aa, Homo sapiens
  CDR3 for beta chain variable domain of TCR clone 327926 (TRBV5-4, TRBJ1-1)
CASSVDLGTEAFF

SEQ ID NO: 655853 - protein, 14 aa, Homo sapiens
  CDR3 for alpha chain variable domain of TCR clone 327927 (TRAV17, TRAJ57)
CATAPQGGSEKLVF

SEQ ID NO: 655854 - protein, 15 aa, Homo sapiens
  CDR3 for beta chain variable domain of TCR clone 327927 (TRBV6-5, TRBJ2-7)
CASRPPFRTTREQYV

SEQ ID NO: 655855 - protein, 12 aa, Homo sapiens
  CDR3 for alpha chain variable domain of TCR clone 327928 (TRAV4, TRAJ9)
CLVPTGGFKTIF

SEQ ID NO: 655856 - protein, 13 aa, Homo sapiens
  CDR3 for beta chain variable domain of TCR clone 327928 (TRBV10-2, TRBJ2-7)
CASGASGGYEQYF

SEQ ID NO: 655857 - protein, 18 aa, Homo sapiens
  CDR3 for alpha chain variable domain of TCR clone 327929 (TRAV12-3, TRAJ52)
CAMSVGGAGGTSYGKLTF

SEQ ID NO: 655858 - protein, 14 aa, Homo sapiens
  CDR3 for beta chain variable domain of TCR clone 327929 (TRBV27, TRBJ1-2)
CASKLQGAGYGDTF

SEQ ID NO: 655859 - protein, 14 aa, Homo sapiens
  CDR3 for alpha chain variable domain of TCR clone 327930 (TRAV38-1, TRAJ29)
CAFITPSGNTPLVF

SEQ ID NO: 655860 - protein, 12 aa, Homo sapiens
  CDR3 for beta chain variable domain of TCR clone 327930 (TRBV6-3, TRBJ2-7)
CASSLTPYEQYF

SEQ ID NO: 655861 - protein, 14 aa, Homo sapiens
  CDR3 for alpha chain variable domain of TCR clone 327931 (TRAV12-1, TRAJ24)
CVVRSTDSCGKFQF

SEQ ID NO: 655862 - protein, 13 aa, Homo sapiens
  CDR3 for beta chain variable domain of TCR clone 327931 (TRBV2, TRBJ2-3)
CASILVGGQGQYF

SEQ ID NO: 655863 - protein, 13 aa, Homo sapiens
  CDR3 for alpha chain variable domain of TCR clone 327932 (TRAV12-2, TRAJ54)
CLQEDQGAQKLVF

SEQ ID NO: 655864 - protein, 14 aa, Homo sapiens
  CDR3 for beta chain variable domain of TCR clone 327932 (TRBV20-1, TRBJ1-1)
CSAQTRIGGTEAFF

SEQ ID NO: 655865 - protein, 13 aa, Homo sapiens
  CDR3 for alpha chain variable domain of TCR clone 327933 (TRAV27, TRAJ49)
CAPRPYTGNQFYF

SEQ ID NO: 655866 - protein, 16 aa, Homo sapiens
  CDR3 for beta chain variable domain of TCR clone 327933 (TRBV2, TRBJ2-3)
CASSTSVEGVTDTQYF

SEQ ID NO: 655867 - protein, 12 aa, Homo sapiens
  CDR3 for alpha chain variable domain of TCR clone 327934 (TRAV12-3, TRAJ3)
CAIDSSASKIIF

SEQ ID NO: 655868 - protein, 17 aa, Homo sapiens
  CDR3 for beta chain variable domain of TCR clone 327934 (TRBV7-9, TRBJ2-3)
CASSLEEARAYPDTQYF

SEQ ID NO: 655869 - protein, 14 aa, Homo sapiens
  CDR3 for alpha chain variable domain of TCR clone 327935 (TRAV8-4, TRAJ54)
YAVSEVLGAQKLVF

SEQ ID NO: 655870 - protein, 13 aa, Homo sapiens
  CDR3 for beta chain variable domain of TCR clone 327935 (TRBV27, TRBJ2-7)
CASSFVSSYEQYF

SEQ ID NO: 655871 - protein, 14 aa, Homo sapiens
  CDR3 for alpha chain variable domain of TCR clone 327936 (TRAV12-3, TRAJ6)
CAMSATGGSYIPTF

SEQ ID NO: 655872 - protein, 14 aa, Homo sapiens
  CDR3 for beta chain variable domain of TCR clone 327936 (TRBV4-1, TRBJ2-2)
CASSQAVNAGELFF

SEQ ID NO: 655873 - protein, 16 aa, Homo sapiens
  CDR3 for alpha chain variable domain of TCR clone 327937 (TRAV26-1, TRAJ22)
CIVSLNFFWFCNATDL

SEQ ID NO: 655874 - protein, 15 aa, Homo sapiens
  CDR3 for beta chain variable domain of TCR clone 327937 (TRBV4-2, TRBJ1-2)
CASSQRTGGRDGYTF

SEQ ID NO: 655875 - protein, 16 aa, Homo sapiens
  CDR3 for alpha chain variable domain of TCR clone 327938 (TRAV3, TRAJ10)
CAVRDMRAGGGNKLTF

SEQ ID NO: 655876 - protein, 16 aa, Homo sapiens
  CDR3 for beta chain variable domain of TCR clone 327938 (TRBV5-1, TRBJ2-1)
CASSPWTSGEYNEQCF

SEQ ID NO: 655877 - protein, 14 aa, Homo sapiens
  CDR3 for alpha chain variable domain of TCR clone 327939 (TRAV21, TRAJ57)
CAVSRGGGSEKLVF

SEQ ID NO: 655878 - protein, 17 aa, Homo sapiens
  CDR3 for beta chain variable domain of TCR clone 327939 (TRBV11-2, TRBJ2-1)
CASSLYPPGVEYNEQFF

SEQ ID NO: 655879 - protein, 16 aa, Homo sapiens
  CDR3 for alpha chain variable domain of TCR clone 327940 (TRAV12-3, TRAJ53)
CARSPGSGGSNYKLTF

SEQ ID NO: 655880 - protein, 16 aa, Homo sapiens
  CDR3 for beta chain variable domain of TCR clone 327940 (TRBV4-2, TRBJ1-1)
CASSQAGFGMNTEAFF

SEQ ID NO: 655881 - protein, 17 aa, Homo sapiens
  CDR3 for alpha chain variable domain of TCR clone 327941 (TRAV8-6, TRAJ8)
CAVKEGIENTGFQKLVF

SEQ ID NO: 655882 - protein, 12 aa, Homo sapiens
  CDR3 for beta chain variable domain of TCR clone 327941 (TRBV19, TRBJ1-4)
CAGKDWPGGLFF

SEQ ID NO: 655883 - protein, 15 aa, Homo sapiens
  CDR3 for alpha chain variable domain of TCR clone 327942 (TRAV26-1, TRAJ22)
CIVRVSFWFCNATDL

SEQ ID NO: 655884 - protein, 13 aa, Homo sapiens
  CDR3 for beta chain variable domain of TCR clone 327942 (TRBV7-9, TRBJ1-2)
CASSLKQNDGYTF

SEQ ID NO: 655885 - protein, 14 aa, Homo sapiens
  CDR3 for alpha chain variable domain of TCR clone 327943 (TRAV1-2, TRAJ8)
CPVREDTGFQKLVF

SEQ ID NO: 655886 - protein, 14 aa, Homo sapiens
  CDR3 for beta chain variable domain of TCR clone 327943 (TRBV11-2, TRBJ2-3)
CASSRLARTDTQYF

SEQ ID NO: 655887 - protein, 12 aa, Homo sapiens
  CDR3 for alpha chain variable domain of TCR clone 327944 (TRAV4, TRAJ6)
CLAPGGSYIPTF

SEQ ID NO: 655888 - protein, 18 aa, Homo sapiens
  CDR3 for beta chain variable domain of TCR clone 327944 (TRBV20-1, TRBJ2-3)
CSASGLAGGPGTTDTQYV

SEQ ID NO: 655889 - protein, 13 aa, Homo sapiens
  CDR3 for alpha chain variable domain of TCR clone 327945 (TRAV21, TRAJ27)
CAARPGNAGKSTF

SEQ ID NO: 655890 - protein, 14 aa, Homo sapiens
  CDR3 for beta chain variable domain of TCR clone 327945 (TRBV7-9, TRBJ2-1)
CASSIRQGWDEQFF

SEQ ID NO: 655891 - protein, 15 aa, Homo sapiens
  CDR3 for alpha chain variable domain of TCR clone 327946 (TRAV8-3, TRAJ45)
CASSYSGGGADGLTL

SEQ ID NO: 655892 - protein, 13 aa, Homo sapiens
  CDR3 for beta chain variable domain of TCR clone 327946 (TRBV10-3, TRBJ2-7)
CATKLAVNYEQYF

SEQ ID NO: 655893 - protein, 15 aa, Homo sapiens
  CDR3 for alpha chain variable domain of TCR clone 327947 (TRAV12-1, TRAJ44)
CVLFVNTGTASKLTF

SEQ ID NO: 655894 - protein, 16 aa, Homo sapiens
  CDR3 for beta chain variable domain of TCR clone 327947 (TRBV20-1, TRBJ2-5)
CSPGGTSGGYMETQYF

SEQ ID NO: 655895 - protein, 14 aa, Homo sapiens
  CDR3 for alpha chain variable domain of TCR clone 327948 (TRAV1-2, TRAJ16)
CAVNRFSDGQKLLF

SEQ ID NO: 655896 - protein, 14 aa, Homo sapiens
  CDR3 for beta chain variable domain of TCR clone 327948 (TRBV13, TRBJ2-5)
CASSLGPRGETQYL

SEQ ID NO: 655897 - protein, 14 aa, Homo sapiens
  CDR3 for alpha chain variable domain of TCR clone 327949 (TRAV2, TRAJ9)
CAVEDRSGGFKNIF

SEQ ID NO: 655898 - protein, 16 aa, Homo sapiens
  CDR3 for beta chain variable domain of TCR clone 327949 (TRBV15, TRBJ2-7)
CATSRDGGIPSYEQYF

SEQ ID NO: 655899 - protein, 13 aa, Homo sapiens
  CDR3 for alpha chain variable domain of TCR clone 327950 (TRAV36/DV7, TRAJ49)
CAVEANTGNQFYF

SEQ ID NO: 655900 - protein, 14 aa, Homo sapiens
  CDR3 for beta chain variable domain of TCR clone 327950 (TRBV7-3, TRBJ2-3)
CASSPGASRDTQYF

SEQ ID NO: 655901 - protein, 18 aa, Homo sapiens
  CDR3 for alpha chain variable domain of TCR clone 327951 (TRAV13-1, TRAJ52)
CAAKNPNAGGTSYGKLTF

SEQ ID NO: 655902 - protein, 14 aa, Homo sapiens
  CDR3 for beta chain variable domain of TCR clone 327951 (TRBV11-2, TRBJ1-2)
CASSLYRGNYGYTF

SEQ ID NO: 655903 - protein, 14 aa, Homo sapiens
  CDR3 for alpha chain variable domain of TCR clone 327952 (TRAV26-1, TRAJ34)
CIVTVAYNTDKLIF

SEQ ID NO: 655904 - protein, 15 aa, Homo sapiens
  CDR3 for beta chain variable domain of TCR clone 327952 (TRBV20-1, TRBJ2-7)
CSARVPAAYFYEQYF

SEQ ID NO: 655905 - protein, 12 aa, Homo sapiens
  CDR3 for alpha chain variable domain of TCR clone 327953 (TRAV8-4, TRAJ43)
CAVSVNNNDMLL

SEQ ID NO: 655906 - protein, 14 aa, Homo sapiens
  CDR3 for beta chain variable domain of TCR clone 327953 (TRBV11-2, TRBJ1-2)
CASSLGTANYGYTF

SEQ ID NO: 655907 - protein, 14 aa, Homo sapiens
  CDR3 for alpha chain variable domain of TCR clone 327954 (TRAV12-2, TRAJ45)
CAVNIGGGADGLTF

SEQ ID NO: 655908 - protein, 17 aa, Homo sapiens
  CDR3 for beta chain variable domain of TCR clone 327954 (TRBV20-1, TRBJ2-2)
CSASGSGQGGLTGELFC

SEQ ID NO: 655909 - protein, 14 aa, Homo sapiens
  CDR3 for alpha chain variable domain of TCR clone 327955 (TRAV21, TRAJ45)
CAVVSGGGADGLTF

SEQ ID NO: 655910 - protein, 14 aa, Homo sapiens
  CDR3 for beta chain variable domain of TCR clone 327955 (TRBV20-1, TRBJ2-3)
CSALALEGADTQYF

SEQ ID NO: 655911 - protein, 14 aa, Homo sapiens
  CDR3 for alpha chain variable domain of TCR clone 327956 (TRAV26-1, TRAJ16)
CIVRVPSGGQKLLF

SEQ ID NO: 655912 - protein, 17 aa, Homo sapiens
  CDR3 for beta chain variable domain of TCR clone 327956 (TRBV20-1, TRBJ2-1)
CSASSSGLAGSYNEQFF

SEQ ID NO: 655913 - protein, 16 aa, Homo sapiens
  CDR3 for alpha chain variable domain of TCR clone 327957 (TRAV27, TRAJ52)
CAGAPAGSISYGKLTF

SEQ ID NO: 655914 - protein, 12 aa, Homo sapiens
  CDR3 for beta chain variable domain of TCR clone 327957 (TRBV27, TRBJ2-1)
CASRGFYNEQFF

SEQ ID NO: 655915 - protein, 13 aa, Homo sapiens
  CDR3 for alpha chain variable domain of TCR clone 327958 (TRAV8-6, TRAJ50)
CAVIKTSYDKVIF

SEQ ID NO: 655916 - protein, 13 aa, Homo sapiens
  CDR3 for beta chain variable domain of TCR clone 327958 (TRBV7-3, TRBJ1-1)
CASSQDWGAEAFF

SEQ ID NO: 655917 - protein, 14 aa, Homo sapiens
  CDR3 for alpha chain variable domain of TCR clone 327959 (TRAV12-3, TRAJ10)
SHLPLTGGGNKLTF

SEQ ID NO: 655918 - protein, 14 aa, Homo sapiens
  CDR3 for beta chain variable domain of TCR clone 327959 (TRBV19, TRBJ2-7)
CASTIQGRPYEQYF

SEQ ID NO: 655919 - protein, 15 aa, Homo sapiens
  CDR3 for alpha chain variable domain of TCR clone 327960 (TRAV26-1, TRAJ40)
CVVRAVPSGTYKYIF

SEQ ID NO: 655920 - protein, 14 aa, Homo sapiens
  CDR3 for beta chain variable domain of TCR clone 327960 (TRBV19, TRBJ2-1)
CASKDPGLANEQFF

SEQ ID NO: 655921 - protein, 10 aa, Homo sapiens
  CDR3 for alpha chain variable domain of TCR clone 327961 (TRAV13-1, TRAJ42)
CAASLETTIL

SEQ ID NO: 655922 - protein, 16 aa, Homo sapiens
  CDR3 for beta chain variable domain of TCR clone 327961 (TRBV2, TRBJ2-4)
CASSEAPGEEQNIQYF

SEQ ID NO: 655923 - protein, 16 aa, Homo sapiens
  CDR3 for alpha chain variable domain of TCR clone 327962 (TRAV29/DV5, TRAJ18)
CAASANRGSTLGRLYF

SEQ ID NO: 655924 - protein, 15 aa, Homo sapiens
  CDR3 for beta chain variable domain of TCR clone 327962 (TRBV27, TRBJ2-1)
CASSNGGGSSNEQFF

SEQ ID NO: 655925 - protein, 14 aa, Homo sapiens
  CDR3 for alpha chain variable domain of TCR clone 327963 (TRAV17, TRAJ57)
CATDPQGGSEKLGF

SEQ ID NO: 655926 - protein, 17 aa, Homo sapiens
  CDR3 for beta chain variable domain of TCR clone 327963 (TRBV20-1, TRBJ2-1)
CSARDISGGAPLGEQFF

SEQ ID NO: 655927 - protein, 15 aa, Homo sapiens
  CDR3 for alpha chain variable domain of TCR clone 327964 (TRAV26-1, TRAJ28)
CIVRVAGAGSYQLTF

SEQ ID NO: 655928 - protein, 19 aa, Homo sapiens
  CDR3 for beta chain variable domain of TCR clone 327964 (TRBV7-3, TRBJ2-7)
CASSLTGVAGCWPSYEQYF

SEQ ID NO: 655929 - protein, 15 aa, Homo sapiens
  CDR3 for alpha chain variable domain of TCR clone 327965 (TRAV23/DV6, TRAJ13)
CAAWPGGGGYQKVTF

SEQ ID NO: 655930 - protein, 17 aa, Homo sapiens
  CDR3 for beta chain variable domain of TCR clone 327965 (TRBV19, TRBJ2-7)
CASSISFYDSYPYEQDF

SEQ ID NO: 655931 - protein, 17 aa, Homo sapiens
  CDR3 for alpha chain variable domain of TCR clone 327966 (TRAV3, TRAJ38)
CAVRDCLNAGNNRKLIW

SEQ ID NO: 655932 - protein, 13 aa, Homo sapiens
  CDR3 for beta chain variable domain of TCR clone 327966 (TRBV23-1, TRBJ1-4)
CASRRKFNEELFF

SEQ ID NO: 655933 - protein, 12 aa, Homo sapiens
  CDR3 for alpha chain variable domain of TCR clone 327967 (TRAV1-2, TRAJ39)
TSLLYAGNTLTF

SEQ ID NO: 655934 - protein, 16 aa, Homo sapiens
  CDR3 for beta chain variable domain of TCR clone 327967 (TRBV11-2, TRBJ2-1)
CASSLLLLSSYNEQFF

SEQ ID NO: 655935 - protein, 13 aa, Homo sapiens
  CDR3 for alpha chain variable domain of TCR clone 327968 (TRAV3, TRAJ21)
CAVREPDFNEFYF

SEQ ID NO: 655936 - protein, 16 aa, Homo sapiens
  CDR3 for beta chain variable domain of TCR clone 327968 (TRBV7-3, TRBJ2-2)
CASSLKRGTLSGELFF

SEQ ID NO: 655937 - protein, 16 aa, Homo sapiens
  CDR3 for alpha chain variable domain of TCR clone 327969 (TRAV26-1, TRAJ40)
CIVRGYPTSGTYKYIF

SEQ ID NO: 655938 - protein, 16 aa, Homo sapiens
  CDR3 for beta chain variable domain of TCR clone 327969 (TRBV5-1, TRBJ1-4)
CASSSGQGGGKLFLAV

SEQ ID NO: 655939 - protein, 10 aa, Homo sapiens
  CDR3 for alpha chain variable domain of TCR clone 327970 (TRAV21, TRAJ43)
CAVRSGDMRF

SEQ ID NO: 655940 - protein, 13 aa, Homo sapiens
  CDR3 for beta chain variable domain of TCR clone 327970 (TRBV20-1, TRBJ2-7)
CSAPGLADYEQYF

SEQ ID NO: 655941 - protein, 13 aa, Homo sapiens
  CDR3 for alpha chain variable domain of TCR clone 327971 (TRAV2, TRAJ40)
CAVVTSGTYTYIF

SEQ ID NO: 655942 - protein, 14 aa, Homo sapiens
  CDR3 for beta chain variable domain of TCR clone 327971 (TRBV25-1, TRBJ1-1)
CASTHLGGNTEAFF

SEQ ID NO: 655943 - protein, 13 aa, Homo sapiens
  CDR3 for alpha chain variable domain of TCR clone 327972 (TRAV8-6, TRAJ49)
CAVITNTGNQFYF

SEQ ID NO: 655944 - protein, 12 aa, Homo sapiens
  CDR3 for beta chain variable domain of TCR clone 327972 (TRBV12-4, TRBJ2-7)
CASSLGGYEPYF

SEQ ID NO: 655945 - protein, 14 aa, Homo sapiens
  CDR3 for alpha chain variable domain of TCR clone 327973 (TRAV17, TRAJ6)
CATDASGGSDIPTF

SEQ ID NO: 655946 - protein, 19 aa, Homo sapiens
  CDR3 for beta chain variable domain of TCR clone 327973 (TRBV4-3, TRBJ2-7)
CASSQEFIGWQVTPYEQYF

SEQ ID NO: 655947 - protein, 11 aa, Homo sapiens
  CDR3 for alpha chain variable domain of TCR clone 327974 (TRAV12-1, TRAJ43)
CIEYDNNDMRF

SEQ ID NO: 655948 - protein, 16 aa, Homo sapiens
  CDR3 for beta chain variable domain of TCR clone 327974 (TRBV5-4, TRBJ2-1)
CASSLVGSGQDNEQFF

SEQ ID NO: 655949 - protein, 14 aa, Homo sapiens
  CDR3 for alpha chain variable domain of TCR clone 327975 (TRAV12-2, TRAJ53)
CRERGGGSNYKLTF

SEQ ID NO: 655950 - protein, 14 aa, Homo sapiens
  CDR3 for beta chain variable domain of TCR clone 327975 (TRBV27, TRBJ1-2)
CASSPGQSNYGYTF

SEQ ID NO: 655951 - protein, 17 aa, Homo sapiens
  CDR3 for alpha chain variable domain of TCR clone 327976 (TRAV3, TRAJ42)
CAVRDRADGGSQGNLIF

SEQ ID NO: 655952 - protein, 20 aa, Homo sapiens
  CDR3 for beta chain variable domain of TCR clone 327976 (TRBV28, TRBJ2-1)
CASTPIGRSPGLAGGNEQFF

SEQ ID NO: 655953 - protein, 13 aa, Homo sapiens
  CDR3 for alpha chain variable domain of TCR clone 327977 (TRAV13-1, TRAJ4)
CAARIGGYNKLMF

SEQ ID NO: 655954 - protein, 16 aa, Homo sapiens
  CDR3 for beta chain variable domain of TCR clone 327977 (TRBV20-1, TRBJ2-1)
CSAPGLAGSYSDEQFF

SEQ ID NO: 655955 - protein, 14 aa, Homo sapiens
  CDR3 for alpha chain variable domain of TCR clone 327978 (TRAV12-3, TRAJ10)
SHLPLTGGGNKLTF

SEQ ID NO: 655956 - protein, 15 aa, Homo sapiens
  CDR3 for beta chain variable domain of TCR clone 327978 (TRBV20-1, TRBJ1-6)
CSDRAASSYNSPLHF

SEQ ID NO: 655957 - protein, 13 aa, Homo sapiens
  CDR3 for alpha chain variable domain of TCR clone 327979 (TRAV26-1, TRAJ54)
CIVRVKGAQKLVF

SEQ ID NO: 655958 - protein, 15 aa, Homo sapiens
  CDR3 for beta chain variable domain of TCR clone 327979 (TRBV20-1, TRBJ2-1)
CSAQSGGGPYNEQFF

SEQ ID NO: 655959 - protein, 10 aa, Homo sapiens
  CDR3 for alpha chain variable domain of TCR clone 327980 (TRAV20, TRAJ22)
CAAPARQLTF

SEQ ID NO: 655960 - protein, 14 aa, Homo sapiens
  CDR3 for beta chain variable domain of TCR clone 327980 (TRBV19, TRBJ2-1)
CASSMGSGATERFF

SEQ ID NO: 655961 - protein, 11 aa, Homo sapiens
  CDR3 for alpha chain variable domain of TCR clone 327981 (TRAV1-2, TRAJ31)
CAVINNARLMF

SEQ ID NO: 655962 - protein, 16 aa, Homo sapiens
  CDR3 for beta chain variable domain of TCR clone 327981 (TRBV11-2, TRBJ2-1)
CASSPRLAGVYNEQFF

SEQ ID NO: 655963 - protein, 18 aa, Homo sapiens
  CDR3 for alpha chain variable domain of TCR clone 327982 (TRAV12-3, TRAJ52)
WAMSVGGAGGTSYGKLTF

SEQ ID NO: 655964 - protein, 15 aa, Homo sapiens
  CDR3 for beta chain variable domain of TCR clone 327982 (TRBV27, TRBJ1-6)
CASSFDRGLGSHLHF

SEQ ID NO: 655965 - protein, 12 aa, Homo sapiens
  CDR3 for alpha chain variable domain of TCR clone 327983 (TRAV12-3, TRAJ17)
CAMTLTGNKLAF

SEQ ID NO: 655966 - protein, 15 aa, Homo sapiens
  CDR3 for beta chain variable domain of TCR clone 327983 (TRBV4-1, TRBJ1-2)
CASSKDSTFGYGYAF

SEQ ID NO: 655967 - protein, 15 aa, Homo sapiens
  CDR3 for alpha chain variable domain of TCR clone 327984 (TRAV26-2, TRAJ13)
CILRDLSGGYQKVTF

SEQ ID NO: 655968 - protein, 11 aa, Homo sapiens
  CDR3 for beta chain variable domain of TCR clone 327984 (TRBV7-9, TRBJ2-5)
CASSISATQYF

SEQ ID NO: 655969 - protein, 16 aa, Homo sapiens
  CDR3 for alpha chain variable domain of TCR clone 327985 (TRAV3, TRAJ10)
CAVRDMRAGGGKKLTF

SEQ ID NO: 655970 - protein, 17 aa, Homo sapiens
  CDR3 for beta chain variable domain of TCR clone 327985 (TRBV13, TRBJ2-3)
CASSLSRVAGGRNTQYF

SEQ ID NO: 655971 - protein, 12 aa, Homo sapiens
  CDR3 for alpha chain variable domain of TCR clone 327986 (TRAV1-1, TRAJ15)
CAVGQAVTALIF

SEQ ID NO: 655972 - protein, 16 aa, Homo sapiens
  CDR3 for beta chain variable domain of TCR clone 327986 (TRBV12-4, TRBJ2-7)
CASSPEGQGSSYEQYF

SEQ ID NO: 655973 - protein, 16 aa, Homo sapiens
  CDR3 for alpha chain variable domain of TCR clone 327987 (TRAV2, TRAJ4)
CAVEDRFSGGYNKLIF

SEQ ID NO: 655974 - protein, 17 aa, Homo sapiens
  CDR3 for beta chain variable domain of TCR clone 327987 (TRBV7-7, TRBJ2-5)
CASSRSGQETSTSGQAR

SEQ ID NO: 655975 - protein, 12 aa, Homo sapiens
  CDR3 for alpha chain variable domain of TCR clone 327988 (TRAV1-1, TRAJ24)
CAVRGSWGKFQF

SEQ ID NO: 655976 - protein, 16 aa, Homo sapiens
  CDR3 for beta chain variable domain of TCR clone 327988 (TRBV27, TRBJ2-2)
CASSCRGLVRTGELFF

SEQ ID NO: 655977 - protein, 16 aa, Homo sapiens
  CDR3 for alpha chain variable domain of TCR clone 327989 (TRAV30, TRAJ24)
FGTAIVDADSWGKFQF

SEQ ID NO: 655978 - protein, 14 aa, Homo sapiens
  CDR3 for beta chain variable domain of TCR clone 327989 (TRBV7-2, TRBJ2-7)
CASSPKTSFYEQYF

SEQ ID NO: 655979 - protein, 13 aa, Homo sapiens
  CDR3 for alpha chain variable domain of TCR clone 327990 (TRAV13-1, TRAJ4)
CAASIGGYNKLIF

SEQ ID NO: 655980 - protein, 13 aa, Homo sapiens
  CDR3 for beta chain variable domain of TCR clone 327990 (TRBV7-9, TRBJ1-2)
CASSLKENYGYTF

SEQ ID NO: 655981 - protein, 15 aa, Homo sapiens
  CDR3 for alpha chain variable domain of TCR clone 327991 (TRAV12-1, TRAJ44)
CVVFVNTGTASKLTF

SEQ ID NO: 655982 - protein, 17 aa, Homo sapiens
  CDR3 for beta chain variable domain of TCR clone 327991 (TRBV7-8, TRBJ2-6)
CASGAGTGGAGANVLTF

SEQ ID NO: 655983 - protein, 16 aa, Homo sapiens
  CDR3 for alpha chain variable domain of TCR clone 327992 (TRAV30, TRAJ24)
CGTEIVDADSWGKFQF

SEQ ID NO: 655984 - protein, 14 aa, Homo sapiens
  CDR3 for beta chain variable domain of TCR clone 327992 (TRBV20-1, TRBJ2-5)
CSALVPGYQETQYF

SEQ ID NO: 655985 - protein, 10 aa, Homo sapiens
  CDR3 for alpha chain variable domain of TCR clone 327993 (TRAV8-4, TRAJ43)
CAVSADDIRF

SEQ ID NO: 655986 - protein, 14 aa, Homo sapiens
  CDR3 for beta chain variable domain of TCR clone 327993 (TRBV10-1, TRBJ1-5)
CASRARGAIQPQHF

SEQ ID NO: 655987 - protein, 17 aa, Homo sapiens
  CDR3 for alpha chain variable domain of TCR clone 327994 (TRAV23/DV6, TRAJ57)
CAASSTVSQGGSEKLVF

SEQ ID NO: 655988 - protein, 14 aa, Homo sapiens
  CDR3 for beta chain variable domain of TCR clone 327994 (TRBV25-1, TRBJ1-1)
CASTHLGGNTEAFF

SEQ ID NO: 655989 - protein, 13 aa, Homo sapiens
  CDR3 for alpha chain variable domain of TCR clone 327995 (TRAV21, TRAJ27)
CAVRPLGAGKSTF

SEQ ID NO: 655990 - protein, 13 aa, Homo sapiens
  CDR3 for beta chain variable domain of TCR clone 327995 (TRBV7-9, TRBJ2-3)
CASSPGSTDTQYF

SEQ ID NO: 655991 - protein, 14 aa, Homo sapiens
  CDR3 for alpha chain variable domain of TCR clone 327996 (TRAV1-2, TRAJ16)
CAVNRFSDGQKLLF

SEQ ID NO: 655992 - protein, 16 aa, Homo sapiens
  CDR3 for beta chain variable domain of TCR clone 327996 (TRBV19, TRBJ2-1)
CASSEILAGDGNEQSF

SEQ ID NO: 655993 - protein, 10 aa, Homo sapiens
  CDR3 for alpha chain variable domain of TCR clone 327997 (TRAV30, TRAJ48)
CGIVNEKLTF

SEQ ID NO: 655994 - protein, 16 aa, Homo sapiens
  CDR3 for beta chain variable domain of TCR clone 327997 (TRBV19, TRBJ2-1)
CASSKAGPSSYNEQFF

SEQ ID NO: 655995 - protein, 11 aa, Homo sapiens
  CDR3 for alpha chain variable domain of TCR clone 327998 (TRAV27, TRAJ47)
SIVEYGNKLVF

SEQ ID NO: 655996 - protein, 18 aa, Homo sapiens
  CDR3 for beta chain variable domain of TCR clone 327998 (TRBV2, TRBJ2-1)
CASRGLAGGPRTYNDQFF

SEQ ID NO: 655997 - protein, 15 aa, Homo sapiens
  CDR3 for alpha chain variable domain of TCR clone 327999 (TRAV1-1, TRAJ23)
CLLLLRFAQGGKLIF

SEQ ID NO: 655998 - protein, 20 aa, Homo sapiens
  CDR3 for beta chain variable domain of TCR clone 327999 (TRBV7-8, TRBJ2-2)
CASSHLFPGPTIHITGELFF

SEQ ID NO: 655999 - protein, 13 aa, Homo sapiens
  CDR3 for alpha chain variable domain of TCR clone 328000 (TRAV17, TRAJ40)
CAGALGGAYKYIF

SEQ ID NO: 656000 - protein, 16 aa, Homo sapiens
  CDR3 for beta chain variable domain of TCR clone 328000 (TRBV11-2, TRBJ1-2)
CASSLDTGGADYGYTL

SEQ ID NO: 656001 - protein, 10 aa, Homo sapiens
  CDR3 for alpha chain variable domain of TCR clone 328001 (TRAV26-1, TRAJ22)
CTVSLNFFCF

SEQ ID NO: 656002 - protein, 15 aa, Homo sapiens
  CDR3 for beta chain variable domain of TCR clone 328001 (TRBV4-2, TRBJ1-2)
CASSQRTGGRDGYTF

SEQ ID NO: 656003 - protein, 14 aa, Homo sapiens
  CDR3 for alpha chain variable domain of TCR clone 328002 (TRAV13-1, TRAJ35)
CAASKGGSGNVLHC

SEQ ID NO: 656004 - protein, 13 aa, Homo sapiens
  CDR3 for beta chain variable domain of TCR clone 328002 (TRBV7-3, TRBJ1-1)
CASSQDWGAEAVF

SEQ ID NO: 656005 - protein, 15 aa, Homo sapiens
  CDR3 for alpha chain variable domain of TCR clone 328003 (TRAV2, TRAJ28)
CAVPYSGAGSYQLTF

SEQ ID NO: 656006 - protein, 16 aa, Homo sapiens
  CDR3 for beta chain variable domain of TCR clone 328003 (TRBV7-2, TRBJ2-5)
CASSLESAGGRETQYF

SEQ ID NO: 656007 - protein, 14 aa, Homo sapiens
  CDR3 for alpha chain variable domain of TCR clone 328004 (TRAV21, TRAJ35)
CAVMPIGFGNVLHC

SEQ ID NO: 656008 - protein, 13 aa, Homo sapiens
  CDR3 for beta chain variable domain of TCR clone 328004 (TRBV28, TRBJ2-5)
CASSFAGGETQYF

SEQ ID NO: 656009 - protein, 14 aa, Homo sapiens
  CDR3 for alpha chain variable domain of TCR clone 328005 (TRAV25, TRAJ22)
CAVRSSGSARQLTF

SEQ ID NO: 656010 - protein, 14 aa, Homo sapiens
  CDR3 for beta chain variable domain of TCR clone 328005 (TRBV5-1, TRBJ1-4)
CASSRGGTDEKLFF

SEQ ID NO: 656011 - protein, 15 aa, Homo sapiens
  CDR3 for alpha chain variable domain of TCR clone 328006 (TRAV12-3, TRAJ22)
CAMRTISGSARQLTF

SEQ ID NO: 656012 - protein, 16 aa, Homo sapiens
  CDR3 for beta chain variable domain of TCR clone 328006 (TRBV20-1, TRBJ2-2)
SSARRPGTGNTGELFF

SEQ ID NO: 656013 - protein, 14 aa, Homo sapiens
  CDR3 for alpha chain variable domain of TCR clone 328007 (TRAV13-1, TRAJ35)
CAASKGGLGNVLHC

SEQ ID NO: 656014 - protein, 13 aa, Homo sapiens
  CDR3 for beta chain variable domain of TCR clone 328007 (TRBV7-3, TRBJ1-1)
CASSQDWGAEASF

SEQ ID NO: 656015 - protein, 11 aa, Homo sapiens
  CDR3 for alpha chain variable domain of TCR clone 328008 (TRAV3, TRAJ21)
CAVGNFNKFYF

SEQ ID NO: 656016 - protein, 14 aa, Homo sapiens
  CDR3 for beta chain variable domain of TCR clone 328008 (TRBV11-2, TRBJ1-2)
CASSLGTANFGYTF

SEQ ID NO: 656017 - protein, 17 aa, Homo sapiens
  CDR3 for alpha chain variable domain of TCR clone 328009 (TRAV3, TRAJ6)
CAVRDGPRAGGSYITTF

SEQ ID NO: 656018 - protein, 13 aa, Homo sapiens
  CDR3 for beta chain variable domain of TCR clone 328009 (TRBV15, TRBJ2-7)
CATSTTGHYEQYF

SEQ ID NO: 656019 - protein, 12 aa, Homo sapiens
  CDR3 for alpha chain variable domain of TCR clone 328010 (TRAV2, TRAJ9)
CAVGAGGFKTIF

SEQ ID NO: 656020 - protein, 15 aa, Homo sapiens
  CDR3 for beta chain variable domain of TCR clone 328010 (TRBV7-8, TRBJ2-1)
CASSSGLAGGNEQFF

SEQ ID NO: 656021 - protein, 17 aa, Homo sapiens
  CDR3 for alpha chain variable domain of TCR clone 328011 (TRAV3, TRAJ6)
CSVRDGPRAGGSYIPTF

SEQ ID NO: 656022 - protein, 15 aa, Homo sapiens
  CDR3 for beta chain variable domain of TCR clone 328011 (TRBV10-2, TRBJ2-6)
CASSEQGTGANVLTF

SEQ ID NO: 656023 - protein, 15 aa, Homo sapiens
  CDR3 for alpha chain variable domain of TCR clone 328012 (TRAV23/DV6, TRAJ30)
CAASSQESRDDKIIF

SEQ ID NO: 656024 - protein, 12 aa, Homo sapiens
  CDR3 for beta chain variable domain of TCR clone 328012 (TRBV11-2, TRBJ2-2)
CASSLGGGELFF

SEQ ID NO: 656025 - protein, 13 aa, Homo sapiens
  CDR3 for alpha chain variable domain of TCR clone 328013 (TRAV8-3, TRAJ21)
CAVGAYNFNNFYF

SEQ ID NO: 656026 - protein, 16 aa, Homo sapiens
  CDR3 for beta chain variable domain of TCR clone 328013 (TRBV19, TRBJ2-1)
CASSRGGGSSYNEQFF

SEQ ID NO: 656027 - protein, 14 aa, Homo sapiens
  CDR3 for alpha chain variable domain of TCR clone 328014 (TRAV8-3, TRAJ10)
CAVGNAGGGNKLTF

SEQ ID NO: 656028 - protein, 17 aa, Homo sapiens
  CDR3 for beta chain variable domain of TCR clone 328014 (TRBV27, TRBJ2-7)
CASSTKRPGTGPHEQYF

SEQ ID NO: 656029 - protein, 11 aa, Homo sapiens
  CDR3 for alpha chain variable domain of TCR clone 328015 (TRAV2, TRAJ33)
CAVESNYQLIW

SEQ ID NO: 656030 - protein, 11 aa, Homo sapiens
  CDR3 for beta chain variable domain of TCR clone 328015 (TRBV11-2, TRBJ2-2)
CASSLPRELFF

SEQ ID NO: 656031 - protein, 17 aa, Homo sapiens
  CDR3 for alpha chain variable domain of TCR clone 328016 (TRAV13-2, TRAJ42)
CAEKGKNYGGGQGNLSF

SEQ ID NO: 656032 - protein, 16 aa, Homo sapiens
  CDR3 for beta chain variable domain of TCR clone 328016 (TRBV7-9, TRBJ2-1)
CASSLGTGWDYNEQFF

SEQ ID NO: 656033 - protein, 13 aa, Homo sapiens
  CDR3 for alpha chain variable domain of TCR clone 328017 (TRAV12-3, TRAJ35)
CAMAIRFGNVLHC

SEQ ID NO: 656034 - protein, 15 aa, Homo sapiens
  CDR3 for beta chain variable domain of TCR clone 328017 (TRBV20-1, TRBJ2-1)
CSARGSGTYYNEQFF

SEQ ID NO: 656035 - protein, 18 aa, Homo sapiens
  CDR3 for alpha chain variable domain of TCR clone 328018 (TRAV13-1, TRAJ52)
CAAKNTNAGGTSFGKLTF

SEQ ID NO: 656036 - protein, 12 aa, Homo sapiens
  CDR3 for beta chain variable domain of TCR clone 328018 (TRBV14, TRBJ2-7)
CASSLYKDEQYF

SEQ ID NO: 656037 - protein, 12 aa, Homo sapiens
  CDR3 for alpha chain variable domain of TCR clone 328019 (TRAV24, TRAJ17)
CASKAARNKLTF

SEQ ID NO: 656038 - protein, 20 aa, Homo sapiens
  CDR3 for beta chain variable domain of TCR clone 328019 (TRBV7-8, TRBJ2-2)
CASSHLFPGPTIHITGELFF

SEQ ID NO: 656039 - protein, 15 aa, Homo sapiens
  CDR3 for alpha chain variable domain of TCR clone 328020 (TRAV8-3, TRAJ11)
CAVGRWNSGYSTLTF

SEQ ID NO: 656040 - protein, 16 aa, Homo sapiens
  CDR3 for beta chain variable domain of TCR clone 328020 (TRBV7-9, TRBJ1-2)
CASSLGFSSGEDGYTF

SEQ ID NO: 656041 - protein, 14 aa, Homo sapiens
  CDR3 for alpha chain variable domain of TCR clone 328021 (TRAV26-1, TRAJ38)
CIADNAGNNRKLIW

SEQ ID NO: 656042 - protein, 15 aa, Homo sapiens
  CDR3 for beta chain variable domain of TCR clone 328021 (TRBV7-2, TRBJ2-7)
CASSLKGALTYEQYF

SEQ ID NO: 656043 - protein, 15 aa, Homo sapiens
  CDR3 for alpha chain variable domain of TCR clone 328022 (TRAV17, TRAJ16)
CATAFRFSDGQKLLF

SEQ ID NO: 656044 - protein, 15 aa, Homo sapiens
  CDR3 for beta chain variable domain of TCR clone 328022 (TRBV13, TRBJ1-5)
CASSFGQGGVQRQHF

SEQ ID NO: 656045 - protein, 15 aa, Homo sapiens
  CDR3 for alpha chain variable domain of TCR clone 328023 (TRAV3, TRAJ5)
CAVRDLDTGRRALTF

SEQ ID NO: 656046 - protein, 16 aa, Homo sapiens
  CDR3 for beta chain variable domain of TCR clone 328023 (TRBV19, TRBJ1-6)
CASSVAPVAGNSPLHF

SEQ ID NO: 656047 - protein, 15 aa, Homo sapiens
  CDR3 for alpha chain variable domain of TCR clone 328024 (TRAV3, TRAJ5)
CAVRDRKTGRSALTS

SEQ ID NO: 656048 - protein, 15 aa, Homo sapiens
  CDR3 for beta chain variable domain of TCR clone 328024 (TRBV7-8, TRBJ2-1)
CASSLADSLYNEQFF

SEQ ID NO: 656049 - protein, 13 aa, Homo sapiens
  CDR3 for alpha chain variable domain of TCR clone 328025 (TRAV8-3, TRAJ48)
CAVVRFGHEKLTF

SEQ ID NO: 656050 - protein, 16 aa, Homo sapiens
  CDR3 for beta chain variable domain of TCR clone 328025 (TRBV20-1, TRBJ2-5)
CSARDFASGIQETQYF

SEQ ID NO: 656051 - protein, 13 aa, Homo sapiens
  CDR3 for alpha chain variable domain of TCR clone 328026 (TRAV12-3, TRAJ13)
CAMSSGGYQEVTF

SEQ ID NO: 656052 - protein, 14 aa, Homo sapiens
  CDR3 for beta chain variable domain of TCR clone 328026 (TRBV4-2, TRBJ2-1)
CASGLDRAYNEQFF

SEQ ID NO: 656053 - protein, 12 aa, Homo sapiens
  CDR3 for alpha chain variable domain of TCR clone 328027 (TRAV29/DV5, TRAJ15)
CASNQAGTALIF

SEQ ID NO: 656054 - protein, 14 aa, Homo sapiens
  CDR3 for beta chain variable domain of TCR clone 328027 (TRBV7-2, TRBJ2-1)
CASSLGVGYNEQFF

SEQ ID NO: 656055 - protein, 13 aa, Homo sapiens
  CDR3 for alpha chain variable domain of TCR clone 328028 (TRAV26-2, TRAJ43)
CILRAVNNNDMRF

SEQ ID NO: 656056 - protein, 17 aa, Homo sapiens
  CDR3 for beta chain variable domain of TCR clone 328028 (TRBV7-8, TRBJ2-6)
CASSAGTGGAGANVLTF

SEQ ID NO: 656057 - protein, 15 aa, Homo sapiens
  CDR3 for alpha chain variable domain of TCR clone 328029 (TRAV8-3, TRAJ23)
CAVGDRYNQGGKLIF

SEQ ID NO: 656058 - protein, 13 aa, Homo sapiens
  CDR3 for beta chain variable domain of TCR clone 328029 (TRBV20-1, TRBJ1-1)
CSAPLGGGTEAFF

SEQ ID NO: 656059 - protein, 14 aa, Homo sapiens
  CDR3 for alpha chain variable domain of TCR clone 328030 (TRAV27, TRAJ58)
CAGDGETSGSRLTF

SEQ ID NO: 656060 - protein, 20 aa, Homo sapiens
  CDR3 for beta chain variable domain of TCR clone 328030 (TRBV7-8, TRBJ2-2)
CASSHLFPGPTIHITGELFF

SEQ ID NO: 656061 - protein, 11 aa, Homo sapiens
  CDR3 for alpha chain variable domain of TCR clone 328031 (TRAV3, TRAJ21)
CAVGNFNKFYF

SEQ ID NO: 656062 - protein, 14 aa, Homo sapiens
  CDR3 for beta chain variable domain of TCR clone 328031 (TRBV11-2, TRBJ2-1)
CASSPSRQGGGQFF

SEQ ID NO: 656063 - protein, 10 aa, Homo sapiens
  CDR3 for alpha chain variable domain of TCR clone 328032 (TRAV16, TRAJ26)
CAMSGSEFCL

SEQ ID NO: 656064 - protein, 12 aa, Homo sapiens
  CDR3 for beta chain variable domain of TCR clone 328032 (TRBV11-2, TRBJ2-1)
CASSPGNNEQFF

SEQ ID NO: 656065 - protein, 13 aa, Homo sapiens
  CDR3 for alpha chain variable domain of TCR clone 328033 (TRAV16, TRAJ5)
CSLTNTGRRALTF

SEQ ID NO: 656066 - protein, 15 aa, Homo sapiens
  CDR3 for beta chain variable domain of TCR clone 328033 (TRBV11-2, TRBJ2-4)
CASSRPGTGINIQYF

SEQ ID NO: 656067 - protein, 14 aa, Homo sapiens
  CDR3 for alpha chain variable domain of TCR clone 328034 (TRAV9-2, TRAJ39)
CALYIYNSGNMLTF

SEQ ID NO: 656068 - protein, 13 aa, Homo sapiens
  CDR3 for beta chain variable domain of TCR clone 328034 (TRBV7-9, TRBJ1-2)
CASSLKQNYGYTF

SEQ ID NO: 656069 - protein, 13 aa, Homo sapiens
  CDR3 for alpha chain variable domain of TCR clone 328035 (TRAV16, TRAJ52)
CALRCTSYGKLTF

SEQ ID NO: 656070 - protein, 18 aa, Homo sapiens
  CDR3 for beta chain variable domain of TCR clone 328035 (TRBV13, TRBJ2-6)
CASSPMTSGGSGANVLTF

SEQ ID NO: 656071 - protein, 14 aa, Homo sapiens
  CDR3 for alpha chain variable domain of TCR clone 328036 (TRAV1-1, TRAJ23)
CAVSFYNQGGKLIF

SEQ ID NO: 656072 - protein, 15 aa, Homo sapiens
  CDR3 for beta chain variable domain of TCR clone 328036 (TRBV5-8, TRBJ2-2)
CASSLDRGATGELFF

SEQ ID NO: 656073 - protein, 11 aa, Homo sapiens
  CDR3 for alpha chain variable domain of TCR clone 328037 (TRAV3, TRAJ13)
CAVTSYQKVTF

SEQ ID NO: 656074 - protein, 15 aa, Homo sapiens
  CDR3 for beta chain variable domain of TCR clone 328037 (TRBV6-3, TRBJ2-7)
CASSSPGTVFYEQYF

SEQ ID NO: 656075 - protein, 13 aa, Homo sapiens
  CDR3 for alpha chain variable domain of TCR clone 328038 (TRAV8-3, TRAJ44)
CAVVPGTASKLTF

SEQ ID NO: 656076 - protein, 13 aa, Homo sapiens
  CDR3 for beta chain variable domain of TCR clone 328038 (TRBV7-9, TRBJ1-1)
CASSLSGETEAFF

SEQ ID NO: 656077 - protein, 16 aa, Homo sapiens
  CDR3 for alpha chain variable domain of TCR clone 328039 (TRAV30, TRAJ24)
CGTEIVDADSWGNSSL

SEQ ID NO: 656078 - protein, 17 aa, Homo sapiens
  CDR3 for beta chain variable domain of TCR clone 328039 (TRBV5-1, TRBJ2-1)
CASSLGQISFSYNEQFF

SEQ ID NO: 656079 - protein, 10 aa, Homo sapiens
  CDR3 for alpha chain variable domain of TCR clone 328040 (TRAV23/DV6, TRAJ4)
CAARDFWSRD

SEQ ID NO: 656080 - protein, 13 aa, Homo sapiens
  CDR3 for beta chain variable domain of TCR clone 328040 (TRBV7-2, TRBJ1-1)
CASSRNTNTEASF

SEQ ID NO: 656081 - protein, 13 aa, Homo sapiens
  CDR3 for alpha chain variable domain of TCR clone 328041 (TRAV35, TRAJ42)
CAGFPGSQGDLIF

SEQ ID NO: 656082 - protein, 14 aa, Homo sapiens
  CDR3 for beta chain variable domain of TCR clone 328041 (TRBV4-1, TRBJ2-2)
CASSQAVNTGQLFF

SEQ ID NO: 656083 - protein, 15 aa, Homo sapiens
  CDR3 for alpha chain variable domain of TCR clone 328042 (TRAV35, TRAJ58)
CAGRRQETSGSRLTF

SEQ ID NO: 656084 - protein, 17 aa, Homo sapiens
  CDR3 for beta chain variable domain of TCR clone 328042 (TRBV11-2, TRBJ2-1)
CASSLYPPGVEYNEQFF

SEQ ID NO: 656085 - protein, 14 aa, Homo sapiens
  CDR3 for alpha chain variable domain of TCR clone 328043 (TRAV1-2, TRAJ8)
CAVREDTGFQKLVF

SEQ ID NO: 656086 - protein, 13 aa, Homo sapiens
  CDR3 for beta chain variable domain of TCR clone 328043 (TRBV19, TRBJ1-2)
CASSVPLQDGYTF

SEQ ID NO: 656087 - protein, 12 aa, Homo sapiens
  CDR3 for alpha chain variable domain of TCR clone 328044 (TRAV6, TRAJ36)
CALSIELGQTTS

SEQ ID NO: 656088 - protein, 16 aa, Homo sapiens
  CDR3 for beta chain variable domain of TCR clone 328044 (TRBV7-2, TRBJ1-6)
CASSSFESSYNSPLHF

SEQ ID NO: 656089 - protein, 18 aa, Homo sapiens
  CDR3 for alpha chain variable domain of TCR clone 328045 (TRAV26-2, TRAJ54)
CILRDVEVGIQGAQKLVF

SEQ ID NO: 656090 - protein, 14 aa, Homo sapiens
  CDR3 for beta chain variable domain of TCR clone 328045 (TRBV12-4, TRBJ2-7)
CASSPAGLKYEQYF

SEQ ID NO: 656091 - protein, 13 aa, Homo sapiens
  CDR3 for alpha chain variable domain of TCR clone 328046 (TRAV12-3, TRAJ7)
CVMTPYGNNRLAF

SEQ ID NO: 656092 - protein, 16 aa, Homo sapiens
  CDR3 for beta chain variable domain of TCR clone 328046 (TRBV20-1, TRBJ1-4)
CSARPYGGELNEKLFF

SEQ ID NO: 656093 - protein, 16 aa, Homo sapiens
  CDR3 for alpha chain variable domain of TCR clone 328047 (TRAV26-1, TRAJ53)
CIVRVAMGGSNYKLTF

SEQ ID NO: 656094 - protein, 15 aa, Homo sapiens
  CDR3 for beta chain variable domain of TCR clone 328047 (TRBV29-1, TRBJ2-1)
CSVGRHALFYNEQFF

SEQ ID NO: 656095 - protein, 18 aa, Homo sapiens
  CDR3 for alpha chain variable domain of TCR clone 328048 (TRAV26-2, TRAJ32)
CILRAPLNYGGATNKLIF

SEQ ID NO: 656096 - protein, 15 aa, Homo sapiens
  CDR3 for beta chain variable domain of TCR clone 328048 (TRBV20-1, TRBJ2-7)
CSAESGTSGAYEQYF

SEQ ID NO: 656097 - protein, 13 aa, Homo sapiens
  CDR3 for alpha chain variable domain of TCR clone 328049 (TRAV17, TRAJ29)
CATDAFRKHTSCL

SEQ ID NO: 656098 - protein, 15 aa, Homo sapiens
  CDR3 for beta chain variable domain of TCR clone 328049 (TRBV2, TRBJ2-1)
CASSELAGSYNEQFF

SEQ ID NO: 656099 - protein, 15 aa, Homo sapiens
  CDR3 for alpha chain variable domain of TCR clone 328050 (TRAV26-1, TRAJ23)
CIVRVLNNQGGKLIF

SEQ ID NO: 656100 - protein, 13 aa, Homo sapiens
  CDR3 for beta chain variable domain of TCR clone 328050 (TRBV7-3, TRBJ1-1)
CASSQDWGAEAFF

SEQ ID NO: 656101 - protein, 15 aa, Homo sapiens
  CDR3 for alpha chain variable domain of TCR clone 328051 (TRAV13-1, TRAJ52)
CAATSPRTSFGKLTF

SEQ ID NO: 656102 - protein, 16 aa, Homo sapiens
  CDR3 for beta chain variable domain of TCR clone 328051 (TRBV7-3, TRBJ2-2)
CASSLKRGTLSGELFF

SEQ ID NO: 656103 - protein, 10 aa, Homo sapiens
  CDR3 for alpha chain variable domain of TCR clone 328052 (TRAV30, TRAJ48)
CGIGNEKLTF

SEQ ID NO: 656104 - protein, 14 aa, Homo sapiens
  CDR3 for beta chain variable domain of TCR clone 328052 (TRBV7-6, TRBJ2-3)
CASNVAGGTDTQYF

SEQ ID NO: 656105 - protein, 14 aa, Homo sapiens
  CDR3 for alpha chain variable domain of TCR clone 328053 (TRAV17, TRAJ34)
CATDSLEGTDKLIF

SEQ ID NO: 656106 - protein, 15 aa, Homo sapiens
  CDR3 for beta chain variable domain of TCR clone 328053 (TRBV19, TRBJ2-3)
CAAGDTNAPNDTQYF

SEQ ID NO: 656107 - protein, 12 aa, Homo sapiens
  CDR3 for alpha chain variable domain of TCR clone 328054 (TRAV2, TRAJ9)
CAVGAGGLKTIF

SEQ ID NO: 656108 - protein, 16 aa, Homo sapiens
  CDR3 for beta chain variable domain of TCR clone 328054 (TRBV13, TRBJ2-2)
CASSPRTGEHTRELFF

SEQ ID NO: 656109 - protein, 14 aa, Homo sapiens
  CDR3 for alpha chain variable domain of TCR clone 328055 (TRAV8-3, TRAJ39)
CAVGANNAGNMLTF

SEQ ID NO: 656110 - protein, 14 aa, Homo sapiens
  CDR3 for beta chain variable domain of TCR clone 328055 (TRBV2, TRBJ2-5)
CASSEVLAQETQYF

SEQ ID NO: 656111 - protein, 12 aa, Homo sapiens
  CDR3 for alpha chain variable domain of TCR clone 328056 (TRAV8-3, TRAJ20)
CAVDFNDYKLSF

SEQ ID NO: 656112 - protein, 13 aa, Homo sapiens
  CDR3 for beta chain variable domain of TCR clone 328056 (TRBV7-9, TRBJ2-3)
CASSPGSTDTQYF

SEQ ID NO: 656113 - protein, 15 aa, Homo sapiens
  CDR3 for alpha chain variable domain of TCR clone 328057 (TRAV21, TRAJ24)
CAARSSTDSWGKLQF

SEQ ID NO: 656114 - protein, 13 aa, Homo sapiens
  CDR3 for beta chain variable domain of TCR clone 328057 (TRBV25-1, TRBJ2-7)
CASSEDGDYEQYF

SEQ ID NO: 656115 - protein, 16 aa, Homo sapiens
  CDR3 for alpha chain variable domain of TCR clone 328058 (TRAV26-2, TRAJ57)
CILRDAGSGGSEKLVF

SEQ ID NO: 656116 - protein, 13 aa, Homo sapiens
  CDR3 for beta chain variable domain of TCR clone 328058 (TRBV18, TRBJ2-3)
CASSPGVTDTQYF

SEQ ID NO: 656117 - protein, 14 aa, Homo sapiens
  CDR3 for alpha chain variable domain of TCR clone 328059 (TRAV35, TRAJ50)
CWAAPKTSYDKVIF

SEQ ID NO: 656118 - protein, 12 aa, Homo sapiens
  CDR3 for beta chain variable domain of TCR clone 328059 (TRBV5-1, TRBJ2-5)
CASSLGLETQYF

SEQ ID NO: 656119 - protein, 13 aa, Homo sapiens
  CDR3 for alpha chain variable domain of TCR clone 328060 (TRAV29/DV5, TRAJ48)
CAASSFGNEKLTF

SEQ ID NO: 656120 - protein, 14 aa, Homo sapiens
  CDR3 for beta chain variable domain of TCR clone 328060 (TRBV3-1, TRBJ2-2)
CGSSQDWVQGELFF

SEQ ID NO: 656121 - protein, 14 aa, Homo sapiens
  CDR3 for alpha chain variable domain of TCR clone 328061 (TRAV8-3, TRAJ4)
CAVGAAGGYNKLIF

SEQ ID NO: 656122 - protein, 18 aa, Homo sapiens
  CDR3 for beta chain variable domain of TCR clone 328061 (TRBV13, TRBJ2-6)
CASSPMTSGGSGANVPTF

SEQ ID NO: 656123 - protein, 13 aa, Homo sapiens
  CDR3 for alpha chain variable domain of TCR clone 328062 (TRAV14/DV4, TRAJ15)
CNEADQAGTALIF

SEQ ID NO: 656124 - protein, 16 aa, Homo sapiens
  CDR3 for beta chain variable domain of TCR clone 328062 (TRBV15, TRBJ2-3)
CATSRDLGIVTDTQYF

SEQ ID NO: 656125 - protein, 14 aa, Homo sapiens
  CDR3 for alpha chain variable domain of TCR clone 328063 (TRAV26-2, TRAJ32)
CCVGYGGATNKLLF

SEQ ID NO: 656126 - protein, 14 aa, Homo sapiens
  CDR3 for beta chain variable domain of TCR clone 328063 (TRBV4-2, TRBJ2-1)
CASGLDRAYNEQFF

SEQ ID NO: 656127 - protein, 14 aa, Homo sapiens
  CDR3 for alpha chain variable domain of TCR clone 328064 (TRAV12-3, TRAJ10)
SHLPLTGGGNKLTF

SEQ ID NO: 656128 - protein, 14 aa, Homo sapiens
  CDR3 for beta chain variable domain of TCR clone 328064 (TRBV12-4, TRBJ1-1)
CASSLRSSGTEAFF

SEQ ID NO: 656129 - protein, 16 aa, Homo sapiens
  CDR3 for alpha chain variable domain of TCR clone 328065 (TRAV12-1, TRAJ42)
CVVTPYYGGSQGNLIF

SEQ ID NO: 656130 - protein, 13 aa, Homo sapiens
  CDR3 for beta chain variable domain of TCR clone 328065 (TRBV7-9, TRBJ1-2)
CASSLKQNYGYTF

SEQ ID NO: 656131 - protein, 15 aa, Homo sapiens
  CDR3 for alpha chain variable domain of TCR clone 328066 (TRAV3, TRAJ47)
RAVGDIGEYGNKLVF

SEQ ID NO: 656132 - protein, 14 aa, Homo sapiens
  CDR3 for beta chain variable domain of TCR clone 328066 (TRBV13, TRBJ2-5)
CASSLERVGETQYF

SEQ ID NO: 656133 - protein, 12 aa, Homo sapiens
  CDR3 for alpha chain variable domain of TCR clone 328067 (TRAV12-3, TRAJ17)
CARTLTGNKLTF

SEQ ID NO: 656134 - protein, 17 aa, Homo sapiens
  CDR3 for beta chain variable domain of TCR clone 328067 (TRBV7-3, TRBJ2-3)
CASSLMKRMRGADTQYF

SEQ ID NO: 656135 - protein, 10 aa, Homo sapiens
  CDR3 for alpha chain variable domain of TCR clone 328068 (TRAV21, TRAJ31)
CAVDNARLMF

SEQ ID NO: 656136 - protein, 13 aa, Homo sapiens
  CDR3 for beta chain variable domain of TCR clone 328068 (TRBV4-1, TRBJ1-1)
RASSGKMNTEAFF

SEQ ID NO: 656137 - protein, 12 aa, Homo sapiens
  CDR3 for alpha chain variable domain of TCR clone 328069 (TRAV13-1, TRAJ21)
CAAKEGFNKFYF

SEQ ID NO: 656138 - protein, 13 aa, Homo sapiens
  CDR3 for beta chain variable domain of TCR clone 328069 (TRBV7-2, TRBJ2-5)
CPQLVRGGETQYF

SEQ ID NO: 656139 - protein, 14 aa, Homo sapiens
  CDR3 for alpha chain variable domain of TCR clone 328070 (TRAV16, TRAJ37)
CALDISGNTGKLIF

SEQ ID NO: 656140 - protein, 14 aa, Homo sapiens
  CDR3 for beta chain variable domain of TCR clone 328070 (TRBV4-1, TRBJ2-2)
CASSQAVNTGELFF

SEQ ID NO: 656141 - protein, 14 aa, Homo sapiens
  CDR3 for alpha chain variable domain of TCR clone 328071 (TRAV12-2, TRAJ13)
CAVKKTGGYQKVTF

SEQ ID NO: 656142 - protein, 14 aa, Homo sapiens
  CDR3 for beta chain variable domain of TCR clone 328071 (TRBV19, TRBJ2-1)
CASPTFVLSGEQLF

SEQ ID NO: 656143 - protein, 16 aa, Homo sapiens
  CDR3 for alpha chain variable domain of TCR clone 328072 (TRAV3, TRAJ10)
CAVRDMRAGGGNKLTF

SEQ ID NO: 656144 - protein, 13 aa, Homo sapiens
  CDR3 for beta chain variable domain of TCR clone 328072 (TRBV12-4, TRBJ2-7)
CASSPTEAYEQYF

SEQ ID NO: 656145 - protein, 15 aa, Homo sapiens
  CDR3 for alpha chain variable domain of TCR clone 328073 (TRAV26-1, TRAJ29)
CIVRVEGSVNTPLVF

SEQ ID NO: 656146 - protein, 15 aa, Homo sapiens
  CDR3 for beta chain variable domain of TCR clone 328073 (TRBV7-9, TRBJ1-5)
CASSQGNQPNQPQHF

SEQ ID NO: 656147 - protein, 14 aa, Homo sapiens
  CDR3 for alpha chain variable domain of TCR clone 328074 (TRAV21, TRAJ45)
CAVHSGGGADGLTF

SEQ ID NO: 656148 - protein, 15 aa, Homo sapiens
  CDR3 for beta chain variable domain of TCR clone 328074 (TRBV11-2, TRBJ1-6)
CASTGFGTAVSPLHF

SEQ ID NO: 656149 - protein, 14 aa, Homo sapiens
  CDR3 for alpha chain variable domain of TCR clone 328075 (TRAV3, TRAJ21)
CAVESQANLHKFYF

SEQ ID NO: 656150 - protein, 18 aa, Homo sapiens
  CDR3 for beta chain variable domain of TCR clone 328075 (TRBV7-9, TRBJ2-1)
CASSLAVSGTSGRNEQFF

SEQ ID NO: 656151 - protein, 13 aa, Homo sapiens
  CDR3 for alpha chain variable domain of TCR clone 328076 (TRAV1-2, TRAJ33)
CAVSEESNYQLIW

SEQ ID NO: 656152 - protein, 16 aa, Homo sapiens
  CDR3 for beta chain variable domain of TCR clone 328076 (TRBV4-2, TRBJ2-7)
CASSQDGVARGYEQYF

SEQ ID NO: 656153 - protein, 17 aa, Homo sapiens
  CDR3 for alpha chain variable domain of TCR clone 328077 (TRAV12-2, TRAJ6)
CAPQGPHRAGGSYIPTF

SEQ ID NO: 656154 - protein, 16 aa, Homo sapiens
  CDR3 for beta chain variable domain of TCR clone 328077 (TRBV19, TRBJ2-2)
CASSTARASNTGELFF

SEQ ID NO: 656155 - protein, 12 aa, Homo sapiens
  CDR3 for alpha chain variable domain of TCR clone 328078 (TRAV3, TRAJ31)
CAVRDGNARLMF

SEQ ID NO: 656156 - protein, 18 aa, Homo sapiens
  CDR3 for beta chain variable domain of TCR clone 328078 (TRBV7-2, TRBJ2-3)
CVSSLKREGSGITDTQYF

SEQ ID NO: 656157 - protein, 15 aa, Homo sapiens
  CDR3 for alpha chain variable domain of TCR clone 328079 (TRAV25, TRAJ52)
CAGRPGGTSYGKLTF

SEQ ID NO: 656158 - protein, 18 aa, Homo sapiens
  CDR3 for beta chain variable domain of TCR clone 328079 (TRBV25-1, TRBJ1-2)
CASSGLQNGQGLIFGYTF

SEQ ID NO: 656159 - protein, 13 aa, Homo sapiens
  CDR3 for alpha chain variable domain of TCR clone 328080 (TRAV13-1, TRAJ48)
VSSVTFGNEKLTF

SEQ ID NO: 656160 - protein, 14 aa, Homo sapiens
  CDR3 for beta chain variable domain of TCR clone 328080 (TRBV7-3, TRBJ1-1)
CASSLKGGNTEAFF

SEQ ID NO: 656161 - protein, 16 aa, Homo sapiens
  CDR3 for alpha chain variable domain of TCR clone 328081 (TRAV3, TRAJ37)
CAVGGKGSGNTGKLIF

SEQ ID NO: 656162 - protein, 13 aa, Homo sapiens
  CDR3 for beta chain variable domain of TCR clone 328081 (TRBV7-2, TRBJ2-2)
CASSSVRAGELFF

SEQ ID NO: 656163 - protein, 14 aa, Homo sapiens
  CDR3 for alpha chain variable domain of TCR clone 328082 (TRAV9-2, TRAJ39)
CALYIYNAGNMLAF

SEQ ID NO: 656164 - protein, 15 aa, Homo sapiens
  CDR3 for beta chain variable domain of TCR clone 328082 (TRBV5-1, TRBJ2-1)
CASSPPRAPYNEQFF

SEQ ID NO: 656165 - protein, 14 aa, Homo sapiens
  CDR3 for alpha chain variable domain of TCR clone 328083 (TRAV1-2, TRAJ16)
CAVNRFSDGTKLLF

SEQ ID NO: 656166 - protein, 15 aa, Homo sapiens
  CDR3 for beta chain variable domain of TCR clone 328083 (TRBV9, TRBJ1-6)
CASSVAGTGDSPLHF

SEQ ID NO: 656167 - protein, 15 aa, Homo sapiens
  CDR3 for alpha chain variable domain of TCR clone 328084 (TRAV26-1, TRAJ44)
CIARFPFGTASKLTF

SEQ ID NO: 656168 - protein, 17 aa, Homo sapiens
  CDR3 for beta chain variable domain of TCR clone 328084 (TRBV24-1, TRBJ2-4)
CATSDAEARGVRNIQYF

SEQ ID NO: 656169 - protein, 16 aa, Homo sapiens
  CDR3 for alpha chain variable domain of TCR clone 328085 (TRAV12-1, TRAJ22)
CVVNTISSGSASQLTF

SEQ ID NO: 656170 - protein, 13 aa, Homo sapiens
  CDR3 for beta chain variable domain of TCR clone 328085 (TRBV19, TRBJ2-1)
CASNGGVFSEQFF

SEQ ID NO: 656171 - protein, 15 aa, Homo sapiens
  CDR3 for alpha chain variable domain of TCR clone 328086 (TRAV12-1, TRAJ44)
CVVFVNTGTASKLTF

SEQ ID NO: 656172 - protein, 14 aa, Homo sapiens
  CDR3 for beta chain variable domain of TCR clone 328086 (TRBV7-8, TRBJ2-3)
CASSFKSSTDTQYF

SEQ ID NO: 656173 - protein, 12 aa, Homo sapiens
  CDR3 for alpha chain variable domain of TCR clone 328087 (TRAV3, TRAJ26)
CAVRDYRQNFVF

SEQ ID NO: 656174 - protein, 16 aa, Homo sapiens
  CDR3 for beta chain variable domain of TCR clone 328087 (TRBV11-2, TRBJ1-2)
CASSPSGREANYGYTF

SEQ ID NO: 656175 - protein, 14 aa, Homo sapiens
  CDR3 for alpha chain variable domain of TCR clone 328088 (TRAV13-1, TRAJ39)
CAASKNNAGNMLTF

SEQ ID NO: 656176 - protein, 14 aa, Homo sapiens
  CDR3 for beta chain variable domain of TCR clone 328088 (TRBV12-4, TRBJ1-1)
CASSLGTGGTEAFF

SEQ ID NO: 656177 - protein, 13 aa, Homo sapiens
  CDR3 for alpha chain variable domain of TCR clone 328089 (TRAV35, TRAJ58)
CAGLETSGPRLTI

SEQ ID NO: 656178 - protein, 15 aa, Homo sapiens
  CDR3 for beta chain variable domain of TCR clone 328089 (TRBV20-1, TRBJ2-1)
CSARFSAGGLNEQFF

SEQ ID NO: 656179 - protein, 14 aa, Homo sapiens
  CDR3 for alpha chain variable domain of TCR clone 328090 (TRAV12-3, TRAJ10)
NHLPLTGGGNKLTF

SEQ ID NO: 656180 - protein, 13 aa, Homo sapiens
  CDR3 for beta chain variable domain of TCR clone 328090 (TRBV23-1, TRBJ2-3)
PAEVAGAGDTQYF

SEQ ID NO: 656181 - protein, 14 aa, Homo sapiens
  CDR3 for alpha chain variable domain of TCR clone 328091 (TRAV1-2, TRAJ8)
CAVREDTGFQKLVF

SEQ ID NO: 656182 - protein, 14 aa, Homo sapiens
  CDR3 for beta chain variable domain of TCR clone 328091 (TRBV5-1, TRBJ2-5)
CASSLAGKQETQYF

SEQ ID NO: 656183 - protein, 16 aa, Homo sapiens
  CDR3 for alpha chain variable domain of TCR clone 328092 (TRAV30, TRAJ42)
CGTSKNYGGSQGNLIF

SEQ ID NO: 656184 - protein, 14 aa, Homo sapiens
  CDR3 for beta chain variable domain of TCR clone 328092 (TRBV19, TRBJ1-5)
CASSSYGTHQPQHF

SEQ ID NO: 656185 - protein, 11 aa, Homo sapiens
  CDR3 for alpha chain variable domain of TCR clone 328093 (TRAV13-2, TRAJ39)
CAENAGNMLTF

SEQ ID NO: 656186 - protein, 14 aa, Homo sapiens
  CDR3 for beta chain variable domain of TCR clone 328093 (TRBV25-1, TRBJ1-1)
CASTHLGGNTEAFF

SEQ ID NO: 656187 - protein, 12 aa, Homo sapiens
  CDR3 for alpha chain variable domain of TCR clone 328094 (TRAV3, TRAJ27)
CAVRDKAGKSTF

SEQ ID NO: 656188 - protein, 14 aa, Homo sapiens
  CDR3 for beta chain variable domain of TCR clone 328094 (TRBV4-2, TRBJ1-5)
CASSRDRGNQPQHF

SEQ ID NO: 656189 - protein, 15 aa, Homo sapiens
  CDR3 for alpha chain variable domain of TCR clone 328095 (TRAV38-1, TRAJ28)
CAFWGVGAGSYQLTF

SEQ ID NO: 656190 - protein, 15 aa, Homo sapiens
  CDR3 for beta chain variable domain of TCR clone 328095 (TRBV12-4, TRBJ2-2)
CASSPQPGSTGELCF

SEQ ID NO: 656191 - protein, 14 aa, Homo sapiens
  CDR3 for alpha chain variable domain of TCR clone 328096 (TRAV38-1, TRAJ29)
CAFITPSGNTPLVF

SEQ ID NO: 656192 - protein, 15 aa, Homo sapiens
  CDR3 for beta chain variable domain of TCR clone 328096 (TRBV9, TRBJ2-1)
CASSLAGSSYNEQFF

SEQ ID NO: 656193 - protein, 10 aa, Homo sapiens
  CDR3 for alpha chain variable domain of TCR clone 328097 (TRAV2, TRAJ29)
CAPGNTPLVF

SEQ ID NO: 656194 - protein, 17 aa, Homo sapiens
  CDR3 for beta chain variable domain of TCR clone 328097 (TRBV7-8, TRBJ2-6)
CASSAGTGGAGANVLTF

SEQ ID NO: 656195 - protein, 12 aa, Homo sapiens
  CDR3 for alpha chain variable domain of TCR clone 328098 (TRAV38-1, TRAJ47)
CAFETYGNRLVF

SEQ ID NO: 656196 - protein, 14 aa, Homo sapiens
  CDR3 for beta chain variable domain of TCR clone 328098 (TRBV12-5, TRBJ2-5)
FASGSRTHQETQYF

SEQ ID NO: 656197 - protein, 14 aa, Homo sapiens
  CDR3 for alpha chain variable domain of TCR clone 328099 (TRAV12-2, TRAJ17)
LAGLFKAAGNKLTF

SEQ ID NO: 656198 - protein, 13 aa, Homo sapiens
  CDR3 for beta chain variable domain of TCR clone 328099 (TRBV19, TRBJ1-2)
CASSQGQVYGYTF

SEQ ID NO: 656199 - protein, 18 aa, Homo sapiens
  CDR3 for alpha chain variable domain of TCR clone 328100 (TRAV12-2, )
CAVEDIQNPDPAVYQLRD

SEQ ID NO: 656200 - protein, 14 aa, Homo sapiens
  CDR3 for beta chain variable domain of TCR clone 328100 (TRBV7-2, TRBJ2-7)
CASSPKTSFYEQYF

SEQ ID NO: 656201 - protein, 14 aa, Homo sapiens
  CDR3 for alpha chain variable domain of TCR clone 328101 (TRAV26-1, TRAJ38)
CIADNAGNNRKQIW

SEQ ID NO: 656202 - protein, 13 aa, Homo sapiens
  CDR3 for beta chain variable domain of TCR clone 328101 (TRBV7-9, TRBJ2-3)
CASSPGSTDTQYF

SEQ ID NO: 656203 - protein, 14 aa, Homo sapiens
  CDR3 for alpha chain variable domain of TCR clone 328102 (TRAV8-1, TRAJ9)
CAVNAWTGGFKTIF

SEQ ID NO: 656204 - protein, 16 aa, Homo sapiens
  CDR3 for beta chain variable domain of TCR clone 328102 (TRBV28, TRBJ2-2)
CASSLEGGSNTVELFF

SEQ ID NO: 656205 - protein, 12 aa, Homo sapiens
  CDR3 for alpha chain variable domain of TCR clone 328103 (TRAV1-1, TRAJ39)
CVVPVVGNMLTF

SEQ ID NO: 656206 - protein, 15 aa, Homo sapiens
  CDR3 for beta chain variable domain of TCR clone 328103 (TRBV19, TRBJ1-6)
CASSTQGAVGSPLHF

SEQ ID NO: 656207 - protein, 14 aa, Homo sapiens
  CDR3 for alpha chain variable domain of TCR clone 328104 (TRAV12-1, TRAJ26)
CVVKGSNYGQNFVF

SEQ ID NO: 656208 - protein, 16 aa, Homo sapiens
  CDR3 for beta chain variable domain of TCR clone 328104 (TRBV15, TRBJ2-3)
CATSRDLGIVTDTQYF

SEQ ID NO: 656209 - protein, 13 aa, Homo sapiens
  CDR3 for alpha chain variable domain of TCR clone 328105 (TRAV2, TRAJ40)
CAVVTSGTYEYIF

SEQ ID NO: 656210 - protein, 15 aa, Homo sapiens
  CDR3 for beta chain variable domain of TCR clone 328105 (TRBV11-2, TRBJ2-1)
CASSLGTSGLNEQFF

SEQ ID NO: 656211 - protein, 11 aa, Homo sapiens
  CDR3 for alpha chain variable domain of TCR clone 328106 (TRAV12-3, TRAJ43)
CAMSVSNDMRF

SEQ ID NO: 656212 - protein, 14 aa, Homo sapiens
  CDR3 for beta chain variable domain of TCR clone 328106 (TRBV11-1, TRBJ2-7)
CASSFRQGSYEQYF

SEQ ID NO: 656213 - protein, 17 aa, Homo sapiens
  CDR3 for alpha chain variable domain of TCR clone 328107 (TRAV3, TRAJ6)
CAVRDGPRAGGSYIPTF

SEQ ID NO: 656214 - protein, 15 aa, Homo sapiens
  CDR3 for beta chain variable domain of TCR clone 328107 (TRBV11-3, TRBJ2-7)
CASSPGPASSYEQYF

SEQ ID NO: 656215 - protein, 11 aa, Homo sapiens
  CDR3 for alpha chain variable domain of TCR clone 328108 (TRAV2, TRAJ3)
CAVESASKIIF

SEQ ID NO: 656216 - protein, 15 aa, Homo sapiens
  CDR3 for beta chain variable domain of TCR clone 328108 (TRBV28, TRBJ2-1)
CASSPPGLADHEQFF

SEQ ID NO: 656217 - protein, 15 aa, Homo sapiens
  CDR3 for alpha chain variable domain of TCR clone 328109 (TRAV35, TRAJ41)
CAGQLFSNSGYTLNF

SEQ ID NO: 656218 - protein, 14 aa, Homo sapiens
  CDR3 for beta chain variable domain of TCR clone 328109 (TRBV7-2, TRBJ1-2)
CASSRGGTNYGDTF

SEQ ID NO: 656219 - protein, 14 aa, Homo sapiens
  CDR3 for alpha chain variable domain of TCR clone 328110 (TRAV21, TRAJ58)
CAVSRGRSGSRLTF

SEQ ID NO: 656220 - protein, 13 aa, Homo sapiens
  CDR3 for beta chain variable domain of TCR clone 328110 (TRBV7-2, TRBJ1-6)
CASSLKFDSPLHV

SEQ ID NO: 656221 - protein, 12 aa, Homo sapiens
  CDR3 for alpha chain variable domain of TCR clone 328111 (TRAV1-1, TRAJ39)
CAVPVVGNMLTF

SEQ ID NO: 656222 - protein, 15 aa, Homo sapiens
  CDR3 for beta chain variable domain of TCR clone 328111 (TRBV7-9, TRBJ1-4)
CASSARTGGNEKLFF

SEQ ID NO: 656223 - protein, 13 aa, Homo sapiens
  CDR3 for alpha chain variable domain of TCR clone 328112 (TRAV12-1, TRAJ16)
CVVSGPDGQKLPF

SEQ ID NO: 656224 - protein, 13 aa, Homo sapiens
  CDR3 for beta chain variable domain of TCR clone 328112 (TRBV2, TRBJ1-1)
CARNPTGGFHAFF

SEQ ID NO: 656225 - protein, 11 aa, Homo sapiens
  CDR3 for alpha chain variable domain of TCR clone 328113 (TRAV29/DV5, TRAJ49)
CAAVPGNQFYF

SEQ ID NO: 656226 - protein, 17 aa, Homo sapiens
  CDR3 for beta chain variable domain of TCR clone 328113 (TRBV4-2, TRBJ1-1)
CASTQFGGSSGNTEAFF

SEQ ID NO: 656227 - protein, 14 aa, Homo sapiens
  CDR3 for alpha chain variable domain of TCR clone 328114 (TRAV13-1, TRAJ9)
CAASALIGGFKTIF

SEQ ID NO: 656228 - protein, 13 aa, Homo sapiens
  CDR3 for beta chain variable domain of TCR clone 328114 (TRBV20-1, TRBJ1-1)
CSAGTVGNTEAFF

SEQ ID NO: 656229 - protein, 15 aa, Homo sapiens
  CDR3 for alpha chain variable domain of TCR clone 328115 (TRAV14/DV4, TRAJ12)
CAMREERDSSYKLIF

SEQ ID NO: 656230 - protein, 15 aa, Homo sapiens
  CDR3 for beta chain variable domain of TCR clone 328115 (TRBV11-2, TRBJ1-2)
CSSLDRGGNNYGYTF

SEQ ID NO: 656231 - protein, 12 aa, Homo sapiens
  CDR3 for alpha chain variable domain of TCR clone 328116 (TRAV12-3, TRAJ41)
CAVSYSGYALNF

SEQ ID NO: 656232 - protein, 13 aa, Homo sapiens
  CDR3 for beta chain variable domain of TCR clone 328116 (TRBV7-3, TRBJ2-1)
CASSLDSYNEQFF

SEQ ID NO: 656233 - protein, 12 aa, Homo sapiens
  CDR3 for alpha chain variable domain of TCR clone 328117 (TRAV29/DV5, TRAJ15)
CAFNQAGTALIF

SEQ ID NO: 656234 - protein, 15 aa, Homo sapiens
  CDR3 for beta chain variable domain of TCR clone 328117 (TRBV11-2, TRBJ2-2)
CASSSDRVNAGELFF

SEQ ID NO: 656235 - protein, 19 aa, Homo sapiens
  CDR3 for alpha chain variable domain of TCR clone 328118 (TRAV3, TRAJ6)
CAVRDRNTSRAGGSYIPTF

SEQ ID NO: 656236 - protein, 15 aa, Homo sapiens
  CDR3 for beta chain variable domain of TCR clone 328118 (TRBV18, TRBJ2-7)
CASSPTFMDSYEQYF

SEQ ID NO: 656237 - protein, 12 aa, Homo sapiens
  CDR3 for alpha chain variable domain of TCR clone 328119 (TRAV12-1, TRAJ40)
CVVYSGTYKYIF

SEQ ID NO: 656238 - protein, 12 aa, Homo sapiens
  CDR3 for beta chain variable domain of TCR clone 328119 (TRBV7-3, TRBJ2-1)
CASSFINNEQFF

SEQ ID NO: 656239 - protein, 16 aa, Homo sapiens
  CDR3 for alpha chain variable domain of TCR clone 328120 (TRAV21, TRAJ37)
YAVRPRGSSNTGKLIF

SEQ ID NO: 656240 - protein, 13 aa, Homo sapiens
  CDR3 for beta chain variable domain of TCR clone 328120 (TRBV7-9, TRBJ2-5)
CASLSPGQETQYF

SEQ ID NO: 656241 - protein, 14 aa, Homo sapiens
  CDR3 for alpha chain variable domain of TCR clone 328121 (TRAV17, TRAJ29)
CATDSNSGNTPLVF

SEQ ID NO: 656242 - protein, 18 aa, Homo sapiens
  CDR3 for beta chain variable domain of TCR clone 328121 (TRBV4-1, TRBJ1-5)
CASSQDPRGQGLNQPQHF

SEQ ID NO: 656243 - protein, 12 aa, Homo sapiens
  CDR3 for alpha chain variable domain of TCR clone 328122 (TRAV27, TRAJ36)
ASTPAGANNLFF

SEQ ID NO: 656244 - protein, 13 aa, Homo sapiens
  CDR3 for beta chain variable domain of TCR clone 328122 (TRBV7-9, TRBJ1-2)
CASSLKQNYGYTF

SEQ ID NO: 656245 - protein, 14 aa, Homo sapiens
  CDR3 for alpha chain variable domain of TCR clone 328123 (TRAV12-1, TRAJ3)
CVAARYSSASKIIF

SEQ ID NO: 656246 - protein, 16 aa, Homo sapiens
  CDR3 for beta chain variable domain of TCR clone 328123 (TRBV4-3, TRBJ2-2)
CASSHLQGSGTGELFF

SEQ ID NO: 656247 - protein, 14 aa, Homo sapiens
  CDR3 for alpha chain variable domain of TCR clone 328124 (TRAV30, TRAJ26)
CGTEIVSYGQNFVF

SEQ ID NO: 656248 - protein, 14 aa, Homo sapiens
  CDR3 for beta chain variable domain of TCR clone 328124 (TRBV7-6, TRBJ2-1)
CASSLGGGADEQFF

SEQ ID NO: 656249 - protein, 14 aa, Homo sapiens
  CDR3 for alpha chain variable domain of TCR clone 328125 (TRAV12-2, TRAJ24)
CAVTPADSWGKLQF

SEQ ID NO: 656250 - protein, 18 aa, Homo sapiens
  CDR3 for beta chain variable domain of TCR clone 328125 (TRBV18, TRBJ2-3)
CASSYTSGAAGGTDTQYF

SEQ ID NO: 656251 - protein, 12 aa, Homo sapiens
  CDR3 for alpha chain variable domain of TCR clone 328126 (TRAV12-1, TRAJ23)
CVVNWGGGKLIF

SEQ ID NO: 656252 - protein, 14 aa, Homo sapiens
  CDR3 for beta chain variable domain of TCR clone 328126 (TRBV27, TRBJ2-7)
CASSPQRGTYEKYF

SEQ ID NO: 656253 - protein, 11 aa, Homo sapiens
  CDR3 for alpha chain variable domain of TCR clone 328127 (TRAV1-1, TRAJ16)
CAAGDGQKLLF

SEQ ID NO: 656254 - protein, 15 aa, Homo sapiens
  CDR3 for beta chain variable domain of TCR clone 328127 (TRBV7-3, TRBJ2-2)
CQQLKRGTLSGELFF

SEQ ID NO: 656255 - protein, 17 aa, Homo sapiens
  CDR3 for alpha chain variable domain of TCR clone 328128 (TRAV9-2, TRAJ45)
CALSGYYSGGGADGLTF

SEQ ID NO: 656256 - protein, 14 aa, Homo sapiens
  CDR3 for beta chain variable domain of TCR clone 328128 (TRBV4-2, TRBJ2-1)
CASGLDRAYNEQFF

SEQ ID NO: 656257 - protein, 16 aa, Homo sapiens
  CDR3 for alpha chain variable domain of TCR clone 328129 (TRAV38-2/DV8, TRAJ28)
CAYSPPSGAGSYQLTF

SEQ ID NO: 656258 - protein, 13 aa, Homo sapiens
  CDR3 for beta chain variable domain of TCR clone 328129 (TRBV5-5, TRBJ1-2)
CASSFWRGEDYTF

SEQ ID NO: 656259 - protein, 13 aa, Homo sapiens
  CDR3 for alpha chain variable domain of TCR clone 328130 (TRAV35, TRAJ57)
CAGSQGGSEKLVF

SEQ ID NO: 656260 - protein, 14 aa, Homo sapiens
  CDR3 for beta chain variable domain of TCR clone 328130 (TRBV25-1, TRBJ1-1)
CASTHLWGNTEAFF

SEQ ID NO: 656261 - protein, 12 aa, Homo sapiens
  CDR3 for alpha chain variable domain of TCR clone 328131 (TRAV12-1, TRAJ29)
FVADSGNTPLVF

SEQ ID NO: 656262 - protein, 12 aa, Homo sapiens
  CDR3 for beta chain variable domain of TCR clone 328131 (TRBV2, TRBJ2-7)
CASKRGSYEQYF

SEQ ID NO: 656263 - protein, 16 aa, Homo sapiens
  CDR3 for alpha chain variable domain of TCR clone 328132 (TRAV3, TRAJ10)
CAVRDMNAGGGNKLTF

SEQ ID NO: 656264 - protein, 16 aa, Homo sapiens
  CDR3 for beta chain variable domain of TCR clone 328132 (TRBV6-3, TRBJ1-2)
CASSYSRRASNYGYTV

SEQ ID NO: 656265 - protein, 14 aa, Homo sapiens
  CDR3 for alpha chain variable domain of TCR clone 328133 (TRAV23/DV6, TRAJ4)
CAANLSGGYNKLIF

SEQ ID NO: 656266 - protein, 11 aa, Homo sapiens
  CDR3 for beta chain variable domain of TCR clone 328133 (TRBV7-9, TRBJ2-3)
CASRPTDTQYF

SEQ ID NO: 656267 - protein, 16 aa, Homo sapiens
  CDR3 for alpha chain variable domain of TCR clone 328134 (TRAV3, TRAJ37)
CAVRGKGSGNTGNLIF

SEQ ID NO: 656268 - protein, 14 aa, Homo sapiens
  CDR3 for beta chain variable domain of TCR clone 328134 (TRBV7-2, TRBJ2-7)
CASSPKTSFYEQYF

SEQ ID NO: 656269 - protein, 14 aa, Homo sapiens
  CDR3 for alpha chain variable domain of TCR clone 328135 (TRAV12-2, TRAJ5)
CAVNRSTGRRALTF

SEQ ID NO: 656270 - protein, 14 aa, Homo sapiens
  CDR3 for beta chain variable domain of TCR clone 328135 (TRBV4-2, TRBJ2-1)
CASGLDRAYNEQFF

SEQ ID NO: 656271 - protein, 14 aa, Homo sapiens
  CDR3 for alpha chain variable domain of TCR clone 328136 (TRAV12-2, TRAJ13)
CAVKKAEGYQKVTF

SEQ ID NO: 656272 - protein, 15 aa, Homo sapiens
  CDR3 for beta chain variable domain of TCR clone 328136 (TRBV27, TRBJ2-1)
CASSNGGGSSNEQFF

SEQ ID NO: 656273 - protein, 13 aa, Homo sapiens
  CDR3 for alpha chain variable domain of TCR clone 328137 (TRAV13-1, TRAJ28)
CAANEAGSYQLTF

SEQ ID NO: 656274 - protein, 15 aa, Homo sapiens
  CDR3 for beta chain variable domain of TCR clone 328137 (TRBV7-9, TRBJ1-6)
CASSSPGRGNSPLHL

SEQ ID NO: 656275 - protein, 16 aa, Homo sapiens
  CDR3 for alpha chain variable domain of TCR clone 328138 (TRAV8-3, TRAJ42)
CAVVEGNGGSQGNLIF

SEQ ID NO: 656276 - protein, 15 aa, Homo sapiens
  CDR3 for beta chain variable domain of TCR clone 328138 (TRBV20-1, TRBJ2-7)
CSARDRVSGMDEQYF

SEQ ID NO: 656277 - protein, 13 aa, Homo sapiens
  CDR3 for alpha chain variable domain of TCR clone 328139 (TRAV16, TRAJ27)
CALRRTNAGKSTF

SEQ ID NO: 656278 - protein, 12 aa, Homo sapiens
  CDR3 for beta chain variable domain of TCR clone 328139 (TRBV18, TRBJ1-4)
CASSPSREKLFF

SEQ ID NO: 656279 - protein, 13 aa, Homo sapiens
  CDR3 for alpha chain variable domain of TCR clone 328140 (TRAV3, TRAJ20)
CCVAFCNDYKLSF

SEQ ID NO: 656280 - protein, 15 aa, Homo sapiens
  CDR3 for beta chain variable domain of TCR clone 328140 (TRBV19, TRBJ2-6)
CASVRRDSGANVLTF

SEQ ID NO: 656281 - protein, 16 aa, Homo sapiens
  CDR3 for alpha chain variable domain of TCR clone 328141 (TRAV12-2, TRAJ45)
CAAKRNPGGGADGLTF

SEQ ID NO: 656282 - protein, 12 aa, Homo sapiens
  CDR3 for beta chain variable domain of TCR clone 328141 (TRBV6-1, TRBJ2-5)
CASSEGRETQYF

SEQ ID NO: 656283 - protein, 14 aa, Homo sapiens
  CDR3 for alpha chain variable domain of TCR clone 328142 (TRAV12-2, TRAJ13)
CAVKKTGGYQKVTF

SEQ ID NO: 656284 - protein, 15 aa, Homo sapiens
  CDR3 for beta chain variable domain of TCR clone 328142 (TRBV27, TRBJ2-1)
CASSNGGGASKEQFF

SEQ ID NO: 656285 - protein, 14 aa, Homo sapiens
  CDR3 for alpha chain variable domain of TCR clone 328143 (TRAV12-1, TRAJ17)
CVVNYKAAGNKLTF

SEQ ID NO: 656286 - protein, 17 aa, Homo sapiens
  CDR3 for beta chain variable domain of TCR clone 328143 (TRBV20-1, TRBJ2-1)
CSASSWGLAGAYNEQFF

SEQ ID NO: 656287 - protein, 13 aa, Homo sapiens
  CDR3 for alpha chain variable domain of TCR clone 328144 (TRAV12-3, TRAJ13)
CAMTSGGFQKVTF

SEQ ID NO: 656288 - protein, 13 aa, Homo sapiens
  CDR3 for beta chain variable domain of TCR clone 328144 (TRBV20-1, TRBJ2-2)
CSALSGGAGELFF

SEQ ID NO: 656289 - protein, 15 aa, Homo sapiens
  CDR3 for alpha chain variable domain of TCR clone 328145 (TRAV8-4, TRAJ3)
CAVTGENLVQKCFQD

SEQ ID NO: 656290 - protein, 15 aa, Homo sapiens
  CDR3 for beta chain variable domain of TCR clone 328145 (TRBV6-3, TRBJ2-7)
CASSSPGTVFYEQYF

SEQ ID NO: 656291 - protein, 13 aa, Homo sapiens
  CDR3 for alpha chain variable domain of TCR clone 328146 (TRAV13-1, TRAJ5)
CAARVTGRRALTF

SEQ ID NO: 656292 - protein, 14 aa, Homo sapiens
  CDR3 for beta chain variable domain of TCR clone 328146 (TRBV19, TRBJ2-1)
CARGARSFQREQFF

SEQ ID NO: 656293 - protein, 13 aa, Homo sapiens
  CDR3 for alpha chain variable domain of TCR clone 328147 (TRAV12-1, TRAJ40)
CVVPTAGTYKYIF

SEQ ID NO: 656294 - protein, 18 aa, Homo sapiens
  CDR3 for beta chain variable domain of TCR clone 328147 (TRBV7-6, TRBJ2-1)
CASSPRTSGMSSYNEQFF

SEQ ID NO: 656295 - protein, 14 aa, Homo sapiens
  CDR3 for alpha chain variable domain of TCR clone 328148 (TRAV8-3, TRAJ4)
CAVGAAGGYNKLIF

SEQ ID NO: 656296 - protein, 19 aa, Homo sapiens
  CDR3 for beta chain variable domain of TCR clone 328148 (TRBV28, TRBJ2-1)
CASSFSIRGSGRTRYEQFF

SEQ ID NO: 656297 - protein, 18 aa, Homo sapiens
  CDR3 for alpha chain variable domain of TCR clone 328149 (TRAV9-2, TRAJ52)
CALSRHNAGGTSYGKLTF

SEQ ID NO: 656298 - protein, 14 aa, Homo sapiens
  CDR3 for beta chain variable domain of TCR clone 328149 (TRBV7-9, TRBJ2-1)
CASSPRDSLYEQFC

SEQ ID NO: 656299 - protein, 14 aa, Homo sapiens
  CDR3 for alpha chain variable domain of TCR clone 328150 (TRAV39, TRAJ54)
CAVVLIQEAQKLVF

SEQ ID NO: 656300 - protein, 13 aa, Homo sapiens
  CDR3 for beta chain variable domain of TCR clone 328150 (TRBV29-1, TRBJ2-5)
CSVGGTSAETQYF

SEQ ID NO: 656301 - protein, 15 aa, Homo sapiens
  CDR3 for alpha chain variable domain of TCR clone 328151 (TRAV38-1, TRAJ37)
CAFIHGSGNTGKLIF

SEQ ID NO: 656302 - protein, 17 aa, Homo sapiens
  CDR3 for beta chain variable domain of TCR clone 328151 (TRBV6-5, TRBJ2-1)
CASRLSGRFESYNEQFF

SEQ ID NO: 656303 - protein, 13 aa, Homo sapiens
  CDR3 for alpha chain variable domain of TCR clone 328152 (TRAV4, TRAJ33)
CLVGDMNNYQLIW

SEQ ID NO: 656304 - protein, 14 aa, Homo sapiens
  CDR3 for beta chain variable domain of TCR clone 328152 (TRBV7-9, TRBJ1-1)
CASSLGVANTEAFF

SEQ ID NO: 656305 - protein, 14 aa, Homo sapiens
  CDR3 for alpha chain variable domain of TCR clone 328153 (TRAV1-1, TRAJ27)
CAVIYNTNAGNQPL

SEQ ID NO: 656306 - protein, 15 aa, Homo sapiens
  CDR3 for beta chain variable domain of TCR clone 328153 (TRBV7-2, TRBJ2-1)
CASSSGLAGGNEQFF

SEQ ID NO: 656307 - protein, 11 aa, Homo sapiens
  CDR3 for alpha chain variable domain of TCR clone 328154 (TRAV1-2, TRAJ20)
CAVSNDYKLSF

SEQ ID NO: 656308 - protein, 13 aa, Homo sapiens
  CDR3 for beta chain variable domain of TCR clone 328154 (TRBV10-2, TRBJ2-7)
CASGASGGYEQYF

SEQ ID NO: 656309 - protein, 10 aa, Homo sapiens
  CDR3 for alpha chain variable domain of TCR clone 328155 (TRAV23/DV6, TRAJ57)
CAASPTLSQV

SEQ ID NO: 656310 - protein, 14 aa, Homo sapiens
  CDR3 for beta chain variable domain of TCR clone 328155 (TRBV25-1, TRBJ1-1)
CASTHLGGNTEAFF

SEQ ID NO: 656311 - protein, 14 aa, Homo sapiens
  CDR3 for alpha chain variable domain of TCR clone 328156 (TRAV1-2, TRAJ29)
CAVRELTSATPLVF

SEQ ID NO: 656312 - protein, 15 aa, Homo sapiens
  CDR3 for beta chain variable domain of TCR clone 328156 (TRBV6-1, TRBJ2-4)
CASSEAVWTINIQYF

SEQ ID NO: 656313 - protein, 12 aa, Homo sapiens
  CDR3 for alpha chain variable domain of TCR clone 328157 (TRAV13-1, TRAJ27)
CAAHTNAGKSTC

SEQ ID NO: 656314 - protein, 14 aa, Homo sapiens
  CDR3 for beta chain variable domain of TCR clone 328157 (TRBV19, TRBJ2-2)
CASSGQGIAGELFF

SEQ ID NO: 656315 - protein, 18 aa, Homo sapiens
  CDR3 for alpha chain variable domain of TCR clone 328158 (TRAV12-3, TRAJ52)
CAMSVGGAGGTRYGKLTF

SEQ ID NO: 656316 - protein, 15 aa, Homo sapiens
  CDR3 for beta chain variable domain of TCR clone 328158 (TRBV27, TRBJ1-6)
CASSVDRGLGSPLHF

SEQ ID NO: 656317 - protein, 12 aa, Homo sapiens
  CDR3 for alpha chain variable domain of TCR clone 328159 (TRAV26-1, TRAJ36)
CIVRVRADNLFF

SEQ ID NO: 656318 - protein, 13 aa, Homo sapiens
  CDR3 for beta chain variable domain of TCR clone 328159 (TRBV12-5, TRBJ2-3)
CASGDRQSDTQYF

SEQ ID NO: 656319 - protein, 13 aa, Homo sapiens
  CDR3 for alpha chain variable domain of TCR clone 328160 (TRAV2, TRAJ15)
CAVASQAGTALIF

SEQ ID NO: 656320 - protein, 13 aa, Homo sapiens
  CDR3 for beta chain variable domain of TCR clone 328160 (TRBV27, TRBJ1-1)
CPSSLSIGAEAFF

SEQ ID NO: 656321 - protein, 15 aa, Homo sapiens
  CDR3 for alpha chain variable domain of TCR clone 328161 (TRAV26-1, TRAJ9)
CIVRESNTGGFKPIF

SEQ ID NO: 656322 - protein, 11 aa, Homo sapiens
  CDR3 for beta chain variable domain of TCR clone 328161 (TRBV7-6, TRBJ2-5)
CASSCQETQYF

SEQ ID NO: 656323 - protein, 15 aa, Homo sapiens
  CDR3 for alpha chain variable domain of TCR clone 328162 (TRAV8-2, TRAJ16)
CVVSDGFSDGQMLLF

SEQ ID NO: 656324 - protein, 13 aa, Homo sapiens
  CDR3 for beta chain variable domain of TCR clone 328162 (TRBV20-1, TRBJ1-1)
CSAPPGGHTEAFF

SEQ ID NO: 656325 - protein, 15 aa, Homo sapiens
  CDR3 for alpha chain variable domain of TCR clone 328163 (TRAV35, TRAJ23)
CAGQRGYNQGGKLIF

SEQ ID NO: 656326 - protein, 14 aa, Homo sapiens
  CDR3 for beta chain variable domain of TCR clone 328163 (TRBV11-2, TRBJ1-2)
CASSLGTANYGYTF

SEQ ID NO: 656327 - protein, 13 aa, Homo sapiens
  CDR3 for alpha chain variable domain of TCR clone 328164 (TRAV3, TRAJ8)
CTVRFTGFQKLVF

SEQ ID NO: 656328 - protein, 12 aa, Homo sapiens
  CDR3 for beta chain variable domain of TCR clone 328164 (TRBV2, TRBJ1-2)
CASSGQTYGYTF

SEQ ID NO: 656329 - protein, 14 aa, Homo sapiens
  CDR3 for alpha chain variable domain of TCR clone 328165 (TRAV29/DV5, TRAJ36)
CAARRKTGANNLFF

SEQ ID NO: 656330 - protein, 14 aa, Homo sapiens
  CDR3 for beta chain variable domain of TCR clone 328165 (TRBV7-9, TRBJ2-2)
CASSLVQDTGELFF

SEQ ID NO: 656331 - protein, 15 aa, Homo sapiens
  CDR3 for alpha chain variable domain of TCR clone 328166 (TRAV8-6, TRAJ6)
CAVRDASGGSYIPTF

SEQ ID NO: 656332 - protein, 14 aa, Homo sapiens
  CDR3 for beta chain variable domain of TCR clone 328166 (TRBV7-8, TRBJ2-3)
CASSLEAGTDTQYF

SEQ ID NO: 656333 - protein, 12 aa, Homo sapiens
  CDR3 for alpha chain variable domain of TCR clone 328167 (TRAV3, TRAJ20)
CAVRDPDYKLSF

SEQ ID NO: 656334 - protein, 16 aa, Homo sapiens
  CDR3 for beta chain variable domain of TCR clone 328167 (TRBV28, TRBJ2-1)
CASSSPEYPRDNEQFF

SEQ ID NO: 656335 - protein, 14 aa, Homo sapiens
  CDR3 for alpha chain variable domain of TCR clone 328168 (TRAV12-2, TRAJ13)
CAVKKTGGYQKVTF

SEQ ID NO: 656336 - protein, 17 aa, Homo sapiens
  CDR3 for beta chain variable domain of TCR clone 328168 (TRBV5-4, TRBJ2-3)
CISVPAVLTASTDTQYF

SEQ ID NO: 656337 - protein, 13 aa, Homo sapiens
  CDR3 for alpha chain variable domain of TCR clone 328169 (TRAV13-1, TRAJ39)
CSKYSNSGNMLTF

SEQ ID NO: 656338 - protein, 14 aa, Homo sapiens
  CDR3 for beta chain variable domain of TCR clone 328169 (TRBV18, TRBJ2-7)
CASSPRGGAYEQYF

SEQ ID NO: 656339 - protein, 14 aa, Homo sapiens
  CDR3 for alpha chain variable domain of TCR clone 328170 (TRAV2, TRAJ37)
CAVDFTSNTGKPIF

SEQ ID NO: 656340 - protein, 16 aa, Homo sapiens
  CDR3 for beta chain variable domain of TCR clone 328170 (TRBV19, TRBJ2-1)
CASSKAGPSSYNEQFF

SEQ ID NO: 656341 - protein, 13 aa, Homo sapiens
  CDR3 for alpha chain variable domain of TCR clone 328171 (TRAV3, TRAJ20)
CCEAFCHDYKLSF

SEQ ID NO: 656342 - protein, 15 aa, Homo sapiens
  CDR3 for beta chain variable domain of TCR clone 328171 (TRBV19, TRBJ2-6)
CASVRRDSGDNVLTF

SEQ ID NO: 656343 - protein, 14 aa, Homo sapiens
  CDR3 for alpha chain variable domain of TCR clone 328172 (TRAV38-1, TRAJ45)
CAYYSGGGADGLTF

SEQ ID NO: 656344 - protein, 16 aa, Homo sapiens
  CDR3 for beta chain variable domain of TCR clone 328172 (TRBV6-1, TRBJ1-2)
CASSGAWQGRSHGYTF

SEQ ID NO: 656345 - protein, 16 aa, Homo sapiens
  CDR3 for alpha chain variable domain of TCR clone 328173 (TRAV26-1, TRAJ53)
CIVRVAMGGSNYKLTF

SEQ ID NO: 656346 - protein, 11 aa, Homo sapiens
  CDR3 for beta chain variable domain of TCR clone 328173 (TRBV7-9, TRBJ1-5)
CQQPTGQPQHF

SEQ ID NO: 656347 - protein, 13 aa, Homo sapiens
  CDR3 for alpha chain variable domain of TCR clone 328174 (TRAV27, TRAJ3)
ASLRGSSASKIIF

SEQ ID NO: 656348 - protein, 11 aa, Homo sapiens
  CDR3 for beta chain variable domain of TCR clone 328174 (TRBV29-1, TRBJ2-5)
CSEDRTGTQYF

SEQ ID NO: 656349 - protein, 12 aa, Homo sapiens
  CDR3 for alpha chain variable domain of TCR clone 328175 (TRAV8-3, TRAJ20)
CAVGANDYRLSF

SEQ ID NO: 656350 - protein, 14 aa, Homo sapiens
  CDR3 for beta chain variable domain of TCR clone 328175 (TRBV5-1, TRBJ2-3)
CASSLFGPTDTQYF

SEQ ID NO: 656351 - protein, 13 aa, Homo sapiens
  CDR3 for alpha chain variable domain of TCR clone 328176 (TRAV3, TRAJ36)
CAVRDTGANNLFF

SEQ ID NO: 656352 - protein, 15 aa, Homo sapiens
  CDR3 for beta chain variable domain of TCR clone 328176 (TRBV24-1, TRBJ2-1)
CATSGCGGFYNEQFF

SEQ ID NO: 656353 - protein, 13 aa, Homo sapiens
  CDR3 for alpha chain variable domain of TCR clone 328177 (TRAV2, TRAJ24)
CDLQLTAGGNSSV

SEQ ID NO: 656354 - protein, 13 aa, Homo sapiens
  CDR3 for beta chain variable domain of TCR clone 328177 (TRBV7-9, TRBJ1-2)
CASSLKQNYGYTF

SEQ ID NO: 656355 - protein, 11 aa, Homo sapiens
  CDR3 for alpha chain variable domain of TCR clone 328178 (TRAV13-1, TRAJ49)
RACVGGNQVYF

SEQ ID NO: 656356 - protein, 16 aa, Homo sapiens
  CDR3 for beta chain variable domain of TCR clone 328178 (TRBV11-2, TRBJ2-2)
CASSLRTGNLIGELFF

SEQ ID NO: 656357 - protein, 15 aa, Homo sapiens
  CDR3 for alpha chain variable domain of TCR clone 328179 (TRAV12-3, TRAJ22)
CAMRTLSGSARQLTF

SEQ ID NO: 656358 - protein, 16 aa, Homo sapiens
  CDR3 for beta chain variable domain of TCR clone 328179 (TRBV20-1, TRBJ2-2)
CSARRPGTGNTGELFF

SEQ ID NO: 656359 - protein, 13 aa, Homo sapiens
  CDR3 for alpha chain variable domain of TCR clone 328180 (TRAV29/DV5, TRAJ40)
CAASEAGTYKYIF

SEQ ID NO: 656360 - protein, 18 aa, Homo sapiens
  CDR3 for beta chain variable domain of TCR clone 328180 (TRBV14, TRBJ2-1)
CASSQEHGGAYLRGEQFF

SEQ ID NO: 656361 - protein, 13 aa, Homo sapiens
  CDR3 for alpha chain variable domain of TCR clone 328181 (TRAV1-2, TRAJ20)
CAVRDGNDYKLSF

SEQ ID NO: 656362 - protein, 16 aa, Homo sapiens
  CDR3 for beta chain variable domain of TCR clone 328181 (TRBV12-5, TRBJ2-5)
CASGPRTSGHQETQYF

SEQ ID NO: 656363 - protein, 16 aa, Homo sapiens
  CDR3 for alpha chain variable domain of TCR clone 328182 (TRAV38-2/DV8, TRAJ47)
CAYRSAIMEYGNKLVC

SEQ ID NO: 656364 - protein, 14 aa, Homo sapiens
  CDR3 for beta chain variable domain of TCR clone 328182 (TRBV19, TRBJ2-7)
CASSIFAGTYEQYF

SEQ ID NO: 656365 - protein, 12 aa, Homo sapiens
  CDR3 for alpha chain variable domain of TCR clone 328183 (TRAV30, TRAJ43)
CGTEERGNDMRF

SEQ ID NO: 656366 - protein, 19 aa, Homo sapiens
  CDR3 for beta chain variable domain of TCR clone 328183 (TRBV20-1, TRBJ2-3)
CSARGVSGGTVSSTDTQYF

SEQ ID NO: 656367 - protein, 15 aa, Homo sapiens
  CDR3 for alpha chain variable domain of TCR clone 328184 (TRAV17, TRAJ37)
CATDHGSSNTGKLIF

SEQ ID NO: 656368 - protein, 14 aa, Homo sapiens
  CDR3 for beta chain variable domain of TCR clone 328184 (TRBV7-3, TRBJ2-1)
CASSLAGGTNEQFF

SEQ ID NO: 656369 - protein, 15 aa, Homo sapiens
  CDR3 for alpha chain variable domain of TCR clone 328185 (TRAV27, TRAJ22)
CAGDPLKGSARQLTF

SEQ ID NO: 656370 - protein, 16 aa, Homo sapiens
  CDR3 for beta chain variable domain of TCR clone 328185 (TRBV19, TRBJ2-2)
CASTLGASGAPGELFF

SEQ ID NO: 656371 - protein, 15 aa, Homo sapiens
  CDR3 for alpha chain variable domain of TCR clone 328186 (TRAV26-1, TRAJ44)
CIARVPFGTASKLPF

SEQ ID NO: 656372 - protein, 15 aa, Homo sapiens
  CDR3 for beta chain variable domain of TCR clone 328186 (TRBV20-1, TRBJ1-1)
CSASRGVTGNTEAFF

SEQ ID NO: 656373 - protein, 16 aa, Homo sapiens
  CDR3 for alpha chain variable domain of TCR clone 328187 (TRAV3, TRAJ3)
CAVRDRAKSSASKISF

SEQ ID NO: 656374 - protein, 16 aa, Homo sapiens
  CDR3 for beta chain variable domain of TCR clone 328187 (TRBV20-1, TRBJ2-4)
CSATSLAELAKNIQYF

SEQ ID NO: 656375 - protein, 14 aa, Homo sapiens
  CDR3 for alpha chain variable domain of TCR clone 328188 (TRAV1-2, TRAJ16)
CAVNRCSDGQKLLV

SEQ ID NO: 656376 - protein, 15 aa, Homo sapiens
  CDR3 for beta chain variable domain of TCR clone 328188 (TRBV9, TRBJ1-6)
CASSVAGTGDSPLHF

SEQ ID NO: 656377 - protein, 15 aa, Homo sapiens
  CDR3 for alpha chain variable domain of TCR clone 328189 (TRAV40, TRAJ45)
CLLGDLGGGADGLTF

SEQ ID NO: 656378 - protein, 13 aa, Homo sapiens
  CDR3 for beta chain variable domain of TCR clone 328189 (TRBV7-9, TRBJ1-2)
CASSLKQNYAYTF

SEQ ID NO: 656379 - protein, 15 aa, Homo sapiens
  CDR3 for alpha chain variable domain of TCR clone 328190 (TRAV12-1, TRAJ44)
CVADLPTGTASKLTF

SEQ ID NO: 656380 - protein, 17 aa, Homo sapiens
  CDR3 for beta chain variable domain of TCR clone 328190 (TRBV4-1, TRBJ1-5)
CASSQQPPTVANQPQHF

SEQ ID NO: 656381 - protein, 14 aa, Homo sapiens
  CDR3 for alpha chain variable domain of TCR clone 328191 (TRAV35, TRAJ22)
CAGLRPGSARQLTF

SEQ ID NO: 656382 - protein, 16 aa, Homo sapiens
  CDR3 for beta chain variable domain of TCR clone 328191 (TRBV5-1, TRBJ2-7)
CASSLVAGGPSGEQYF

SEQ ID NO: 656383 - protein, 22 aa, Homo sapiens
  CDR3 for alpha chain variable domain of TCR clone 328192 (TRAV4, )
CLVGPHNYDIQNPDPAVYQLRD

SEQ ID NO: 656384 - protein, 17 aa, Homo sapiens
  CDR3 for beta chain variable domain of TCR clone 328192 (TRBV24-1, TRBJ2-1)
CATSDVSTSGTHNEQFF

SEQ ID NO: 656385 - protein, 14 aa, Homo sapiens
  CDR3 for alpha chain variable domain of TCR clone 328193 (TRAV12-2, TRAJ13)
CAVKKTGGYQQVTF

SEQ ID NO: 656386 - protein, 15 aa, Homo sapiens
  CDR3 for beta chain variable domain of TCR clone 328193 (TRBV20-1, TRBJ2-1)
CSARGIGGTYNEQFF

SEQ ID NO: 656387 - protein, 13 aa, Homo sapiens
  CDR3 for alpha chain variable domain of TCR clone 328194 (TRAV2, TRAJ40)
CAVVTAGTYKYIF

SEQ ID NO: 656388 - protein, 16 aa, Homo sapiens
  CDR3 for beta chain variable domain of TCR clone 328194 (TRBV7-9, TRBJ1-3)
CASSLGAGSSGNTIYF

SEQ ID NO: 656389 - protein, 11 aa, Homo sapiens
  CDR3 for alpha chain variable domain of TCR clone 328195 (TRAV3, TRAJ21)
CAVGNFNKFYF

SEQ ID NO: 656390 - protein, 15 aa, Homo sapiens
  CDR3 for beta chain variable domain of TCR clone 328195 (TRBV19, TRBJ2-1)
CSSKAGPSPYNEQFF

SEQ ID NO: 656391 - protein, 16 aa, Homo sapiens
  CDR3 for alpha chain variable domain of TCR clone 328196 (TRAV27, TRAJ13)
CAGAKSDSGGYQKVTF

SEQ ID NO: 656392 - protein, 15 aa, Homo sapiens
  CDR3 for beta chain variable domain of TCR clone 328196 (TRBV28, TRBJ1-4)
CASSLSAGTNEKLFF

SEQ ID NO: 656393 - protein, 14 aa, Homo sapiens
  CDR3 for alpha chain variable domain of TCR clone 328197 (TRAV12-3, TRAJ42)
CAMNYGGSQGNLIF

SEQ ID NO: 656394 - protein, 15 aa, Homo sapiens
  CDR3 for beta chain variable domain of TCR clone 328197 (TRBV5-7, TRBJ1-5)
CASNYGKLWDQPQHF

SEQ ID NO: 656395 - protein, 15 aa, Homo sapiens
  CDR3 for alpha chain variable domain of TCR clone 328198 (TRAV29/DV5, TRAJ57)
CAASLLSGGSEKLVF

SEQ ID NO: 656396 - protein, 15 aa, Homo sapiens
  CDR3 for beta chain variable domain of TCR clone 328198 (TRBV5-1, TRBJ1-3)
CASSLEGGSGNTIYF

SEQ ID NO: 656397 - protein, 15 aa, Homo sapiens
  CDR3 for alpha chain variable domain of TCR clone 328199 (TRAV26-1, TRAJ29)
CIVRVEGAGNTPLVF

SEQ ID NO: 656398 - protein, 16 aa, Homo sapiens
  CDR3 for beta chain variable domain of TCR clone 328199 (TRBV7-9, TRBJ2-5)
CASSPSGQGVKGTQYF

SEQ ID NO: 656399 - protein, 13 aa, Homo sapiens
  CDR3 for alpha chain variable domain of TCR clone 328200 (TRAV9-2, TRAJ53)
CDLSGGSNYKLTF

SEQ ID NO: 656400 - protein, 17 aa, Homo sapiens
  CDR3 for beta chain variable domain of TCR clone 328200 (TRBV11-2, TRBJ2-1)
CASSLYPPGVEYNEQFF

SEQ ID NO: 656401 - protein, 14 aa, Homo sapiens
  CDR3 for alpha chain variable domain of TCR clone 328201 (TRAV17, TRAJ57)
CATDPQGGAEKLVF

SEQ ID NO: 656402 - protein, 17 aa, Homo sapiens
  CDR3 for beta chain variable domain of TCR clone 328201 (TRBV5-1, TRBJ2-2)
CASSLAGLSGGTGELFF

SEQ ID NO: 656403 - protein, 16 aa, Homo sapiens
  CDR3 for alpha chain variable domain of TCR clone 328202 (TRAV3, TRAJ4)
CAVSPSPSGGYNKLFF

SEQ ID NO: 656404 - protein, 12 aa, Homo sapiens
  CDR3 for beta chain variable domain of TCR clone 328202 (TRBV7-9, TRBJ2-7)
CASSQGVYEQYF

SEQ ID NO: 656405 - protein, 16 aa, Homo sapiens
  CDR3 for alpha chain variable domain of TCR clone 328203 (TRAV12-3, TRAJ53)
CARSPGSGGRNYKLTF

SEQ ID NO: 656406 - protein, 11 aa, Homo sapiens
  CDR3 for beta chain variable domain of TCR clone 328203 (TRBV29-1, TRBJ2-5)
CSEDRTGTQYF

SEQ ID NO: 656407 - protein, 14 aa, Homo sapiens
  CDR3 for alpha chain variable domain of TCR clone 328204 (TRAV12-2, TRAJ13)
CAVKKTGGYQKVTF

SEQ ID NO: 656408 - protein, 15 aa, Homo sapiens
  CDR3 for beta chain variable domain of TCR clone 328204 (TRBV11-3, TRBJ2-3)
CASLKDGREGDKQYF

SEQ ID NO: 656409 - protein, 13 aa, Homo sapiens
  CDR3 for alpha chain variable domain of TCR clone 328205 (TRAV20, TRAJ48)
CAVQGFGNEKLTF

SEQ ID NO: 656410 - protein, 19 aa, Homo sapiens
  CDR3 for beta chain variable domain of TCR clone 328205 (TRBV2, TRBJ2-2)
CASSQPGLAGGGNTGELFF

SEQ ID NO: 656411 - protein, 12 aa, Homo sapiens
  CDR3 for alpha chain variable domain of TCR clone 328206 (TRAV12-3, TRAJ17)
CAMTITGNKLTF

SEQ ID NO: 656412 - protein, 15 aa, Homo sapiens
  CDR3 for beta chain variable domain of TCR clone 328206 (TRBV7-9, TRBJ1-6)
CASSPPGRGNSPLHF

SEQ ID NO: 656413 - protein, 17 aa, Homo sapiens
  CDR3 for alpha chain variable domain of TCR clone 328207 (TRAV3, TRAJ12)
CAVRDGGRMDSSYKLIF

SEQ ID NO: 656414 - protein, 14 aa, Homo sapiens
  CDR3 for beta chain variable domain of TCR clone 328207 (TRBV7-9, TRBJ1-2)
CASSRQGAKYGYTF

SEQ ID NO: 656415 - protein, 19 aa, Homo sapiens
  CDR3 for alpha chain variable domain of TCR clone 328208 (TRAV12-1, TRAJ45)
CVVTHDVGYSGGGADGLTF

SEQ ID NO: 656416 - protein, 14 aa, Homo sapiens
  CDR3 for beta chain variable domain of TCR clone 328208 (TRBV6-1, TRBJ1-2)
CASSAVRGPYGYTF

SEQ ID NO: 656417 - protein, 23 aa, Homo sapiens
  CDR3 for alpha chain variable domain of TCR clone 328209 (TRAV8-4, TRAJ38)
CARLNAGNNHIQNPDPTVYQLRD

SEQ ID NO: 656418 - protein, 14 aa, Homo sapiens
  CDR3 for beta chain variable domain of TCR clone 328209 (TRBV7-8, TRBJ2-3)
CASSLEAGTDTQYF

SEQ ID NO: 656419 - protein, 14 aa, Homo sapiens
  CDR3 for alpha chain variable domain of TCR clone 328210 (TRAV35, TRAJ22)
CAVLRPGSARQLTF

SEQ ID NO: 656420 - protein, 14 aa, Homo sapiens
  CDR3 for beta chain variable domain of TCR clone 328210 (TRBV12-4, TRBJ2-5)
CQQSPTGLQETQYF

SEQ ID NO: 656421 - protein, 15 aa, Homo sapiens
  CDR3 for alpha chain variable domain of TCR clone 328211 (TRAV26-1, TRAJ40)
CIVRVTTSGTYKYIF

SEQ ID NO: 656422 - protein, 21 aa, Homo sapiens
  CDR3 for beta chain variable domain of TCR clone 328211 (TRBV7-9, TRBJ1-4)
CASSTDREKTVFWQWNPALCL

SEQ ID NO: 656423 - protein, 11 aa, Homo sapiens
  CDR3 for alpha chain variable domain of TCR clone 328212 (TRAV2, TRAJ13)
CASGGYQKVTF

SEQ ID NO: 656424 - protein, 13 aa, Homo sapiens
  CDR3 for beta chain variable domain of TCR clone 328212 (TRBV14, TRBJ1-1)
CASSREFGTEAFF

SEQ ID NO: 656425 - protein, 11 aa, Homo sapiens
  CDR3 for alpha chain variable domain of TCR clone 328213 (TRAV12-1, TRAJ34)
CVVDKGRELIF

SEQ ID NO: 656426 - protein, 12 aa, Homo sapiens
  CDR3 for beta chain variable domain of TCR clone 328213 (TRBV7-3, TRBJ1-1)
CQHQDWGAEAFF

SEQ ID NO: 656427 - protein, 14 aa, Homo sapiens
  CDR3 for alpha chain variable domain of TCR clone 328214 (TRAV1-2, TRAJ16)
CAVNRFSDGQKLLF

SEQ ID NO: 656428 - protein, 17 aa, Homo sapiens
  CDR3 for beta chain variable domain of TCR clone 328214 (TRBV11-1, TRBJ2-7)
CASSLLDGGDSAYEQYF

SEQ ID NO: 656429 - protein, 13 aa, Homo sapiens
  CDR3 for alpha chain variable domain of TCR clone 328215 (TRAV27, TRAJ57)
CRSAQGGTEKLVF

SEQ ID NO: 656430 - protein, 11 aa, Homo sapiens
  CDR3 for beta chain variable domain of TCR clone 328215 (TRBV11-2, TRBJ1-1)
CASSINTEAFF

SEQ ID NO: 656431 - protein, 14 aa, Homo sapiens
  CDR3 for alpha chain variable domain of TCR clone 328216 (TRAV26-1, TRAJ38)
CIADNAGNNRKLIW

SEQ ID NO: 656432 - protein, 14 aa, Homo sapiens
  CDR3 for beta chain variable domain of TCR clone 328216 (TRBV6-1, TRBJ1-3)
CASVQGGGGNTRYV

SEQ ID NO: 656433 - protein, 11 aa, Homo sapiens
  CDR3 for alpha chain variable domain of TCR clone 328217 (TRAV21, TRAJ34)
CAHYNTDKLIF

SEQ ID NO: 656434 - protein, 17 aa, Homo sapiens
  CDR3 for beta chain variable domain of TCR clone 328217 (TRBV3-1, TRBJ2-2)
CASSPFRDKVDTGELFF

SEQ ID NO: 656435 - protein, 14 aa, Homo sapiens
  CDR3 for alpha chain variable domain of TCR clone 328218 (TRAV38-1, TRAJ40)
CALRPTSGTYKYIF

SEQ ID NO: 656436 - protein, 18 aa, Homo sapiens
  CDR3 for beta chain variable domain of TCR clone 328218 (TRBV6-5, TRBJ1-1)
CASSYSAPGGTGGTEAFF

SEQ ID NO: 656437 - protein, 12 aa, Homo sapiens
  CDR3 for alpha chain variable domain of TCR clone 328219 (TRAV12-3, TRAJ17)
CAMTLTGDKLTF

SEQ ID NO: 656438 - protein, 13 aa, Homo sapiens
  CDR3 for beta chain variable domain of TCR clone 328219 (TRBV20-1, TRBJ2-7)
QCPELAGVGEQYF

SEQ ID NO: 656439 - protein, 12 aa, Homo sapiens
  CDR3 for alpha chain variable domain of TCR clone 328220 (TRAV2, TRAJ10)
CASMGGGNKLTF

SEQ ID NO: 656440 - protein, 20 aa, Homo sapiens
  CDR3 for beta chain variable domain of TCR clone 328220 (TRBV7-8, TRBJ2-2)
CASSHLFPGPTIHITGELFF

SEQ ID NO: 656441 - protein, 10 aa, Homo sapiens
  CDR3 for alpha chain variable domain of TCR clone 328221 (TRAV12-1, TRAJ37)
GSSNTGKLIF

SEQ ID NO: 656442 - protein, 15 aa, Homo sapiens
  CDR3 for beta chain variable domain of TCR clone 328221 (TRBV4-1, TRBJ2-7)
CASSQQGQGFDEQYF

SEQ ID NO: 656443 - protein, 16 aa, Homo sapiens
  CDR3 for alpha chain variable domain of TCR clone 328222 (TRAV3, TRAJ37)
CAVRGKGSGNTGKLIF

SEQ ID NO: 656444 - protein, 19 aa, Homo sapiens
  CDR3 for beta chain variable domain of TCR clone 328222 (TRBV25-1, TRBJ2-2)
CAILVYRLDRGRKTGELFF

SEQ ID NO: 656445 - protein, 17 aa, Homo sapiens
  CDR3 for alpha chain variable domain of TCR clone 328223 (TRAV3, TRAJ42)
CAVRDRDYGGSQGNLIL

SEQ ID NO: 656446 - protein, 14 aa, Homo sapiens
  CDR3 for beta chain variable domain of TCR clone 328223 (TRBV4-2, TRBJ2-3)
CASSQERGTDTQYF

SEQ ID NO: 656447 - protein, 13 aa, Homo sapiens
  CDR3 for alpha chain variable domain of TCR clone 328224 (TRAV8-3, TRAJ36)
CAVGATGANNLFF

SEQ ID NO: 656448 - protein, 15 aa, Homo sapiens
  CDR3 for beta chain variable domain of TCR clone 328224 (TRBV7-2, TRBJ2-1)
CASSQRGGALSEQFF

SEQ ID NO: 656449 - protein, 13 aa, Homo sapiens
  CDR3 for alpha chain variable domain of TCR clone 328225 (TRAV9-2, TRAJ53)
CALSGGSNYKLTF

SEQ ID NO: 656450 - protein, 15 aa, Homo sapiens
  CDR3 for beta chain variable domain of TCR clone 328225 (TRBV9, TRBJ1-6)
CASSVAGTGDSPRHF

SEQ ID NO: 656451 - protein, 12 aa, Homo sapiens
  CDR3 for alpha chain variable domain of TCR clone 328226 (TRAV38-1, TRAJ34)
CAFMKETDKLIF

SEQ ID NO: 656452 - protein, 14 aa, Homo sapiens
  CDR3 for beta chain variable domain of TCR clone 328226 (TRBV7-2, TRBJ2-7)
CASSPKTSFYEQYF

SEQ ID NO: 656453 - protein, 13 aa, Homo sapiens
  CDR3 for alpha chain variable domain of TCR clone 328227 (TRAV36/DV7, TRAJ54)
CAVDIQGAQKLVF

SEQ ID NO: 656454 - protein, 13 aa, Homo sapiens
  CDR3 for beta chain variable domain of TCR clone 328227 (TRBV19, TRBJ2-1)
CASSRAPYNEQFF

SEQ ID NO: 656455 - protein, 18 aa, Homo sapiens
  CDR3 for alpha chain variable domain of TCR clone 328228 (TRAV21, TRAJ52)
CAVRPSPAGGTSFGKLTF

SEQ ID NO: 656456 - protein, 16 aa, Homo sapiens
  CDR3 for beta chain variable domain of TCR clone 328228 (TRBV13, TRBJ2-3)
CQQPLQGSGGRNTQYF

SEQ ID NO: 656457 - protein, 13 aa, Homo sapiens
  CDR3 for alpha chain variable domain of TCR clone 328229 (TRAV21, TRAJ20)
CPVGLRVDYKLSF

SEQ ID NO: 656458 - protein, 13 aa, Homo sapiens
  CDR3 for beta chain variable domain of TCR clone 328229 (TRBV6-1, TRBJ1-1)
CASSRQGNTEAFF

SEQ ID NO: 656459 - protein, 10 aa, Homo sapiens
  CDR3 for alpha chain variable domain of TCR clone 328230 (TRAV20, TRAJ22)
CAAPARQLTF

SEQ ID NO: 656460 - protein, 15 aa, Homo sapiens
  CDR3 for beta chain variable domain of TCR clone 328230 (TRBV27, TRBJ2-1)
CASSNGGGSSNEQFF

SEQ ID NO: 656461 - protein, 13 aa, Homo sapiens
  CDR3 for alpha chain variable domain of TCR clone 328231 (TRAV3, TRAJ27)
CAVRPLGAGKSTF

SEQ ID NO: 656462 - protein, 12 aa, Homo sapiens
  CDR3 for beta chain variable domain of TCR clone 328231 (TRBV7-9, TRBJ1-1)
CASSLVRGEAFF

SEQ ID NO: 656463 - protein, 13 aa, Homo sapiens
  CDR3 for alpha chain variable domain of TCR clone 328232 (TRAV12-1, TRAJ26)
SATYLCYGQNFVF

SEQ ID NO: 656464 - protein, 15 aa, Homo sapiens
  CDR3 for beta chain variable domain of TCR clone 328232 (TRBV5-1, TRBJ2-6)
CASSLDPSGANVLTF

SEQ ID NO: 656465 - protein, 16 aa, Homo sapiens
  CDR3 for alpha chain variable domain of TCR clone 328233 (TRAV20, TRAJ22)
CAVRASSSGSARQLTF

SEQ ID NO: 656466 - protein, 16 aa, Homo sapiens
  CDR3 for beta chain variable domain of TCR clone 328233 (TRBV20-1, TRBJ1-5)
CSASRGTGYSNQPQHF

SEQ ID NO: 656467 - protein, 14 aa, Homo sapiens
  CDR3 for alpha chain variable domain of TCR clone 328234 (TRAV1-2, TRAJ16)
CAVNRFSDGQKLLF

SEQ ID NO: 656468 - protein, 13 aa, Homo sapiens
  CDR3 for beta chain variable domain of TCR clone 328234 (TRBV18, TRBJ2-5)
CASSPAGKETQYC

SEQ ID NO: 656469 - protein, 14 aa, Homo sapiens
  CDR3 for alpha chain variable domain of TCR clone 328235 (TRAV8-2, TRAJ4)
CVVSPSGGYNKRIF

SEQ ID NO: 656470 - protein, 15 aa, Homo sapiens
  CDR3 for beta chain variable domain of TCR clone 328235 (TRBV10-2, TRBJ2-5)
CASRGSGGPQETQYF

SEQ ID NO: 656471 - protein, 14 aa, Homo sapiens
  CDR3 for alpha chain variable domain of TCR clone 328236 (TRAV38-1, TRAJ40)
CALRPTSGTYKYIF

SEQ ID NO: 656472 - protein, 12 aa, Homo sapiens
  CDR3 for beta chain variable domain of TCR clone 328236 (TRBV6-3, TRBJ2-7)
CASSLTPYEQYF

SEQ ID NO: 656473 - protein, 17 aa, Homo sapiens
  CDR3 for alpha chain variable domain of TCR clone 328237 (TRAV12-2, TRAJ52)
CAVNPYAGGTSYGKLTF

SEQ ID NO: 656474 - protein, 15 aa, Homo sapiens
  CDR3 for beta chain variable domain of TCR clone 328237 (TRBV7-9, TRBJ1-5)
CASSQGHQPNQPQHF

SEQ ID NO: 656475 - protein, 14 aa, Homo sapiens
  CDR3 for alpha chain variable domain of TCR clone 328238 (TRAV12-2, TRAJ3)
CAVSLYSSASKMIF

SEQ ID NO: 656476 - protein, 14 aa, Homo sapiens
  CDR3 for beta chain variable domain of TCR clone 328238 (TRBV27, TRBJ2-1)
CAGSIAETYNEQFF

SEQ ID NO: 656477 - protein, 15 aa, Homo sapiens
  CDR3 for alpha chain variable domain of TCR clone 328239 (TRAV12-3, TRAJ6)
CAMSAASGGSYIPTF

SEQ ID NO: 656478 - protein, 12 aa, Homo sapiens
  CDR3 for beta chain variable domain of TCR clone 328239 (TRBV7-9, TRBJ2-7)
CASSLEGYEQYF

SEQ ID NO: 656479 - protein, 14 aa, Homo sapiens
  CDR3 for alpha chain variable domain of TCR clone 328240 (TRAV8-3, TRAJ10)
CAVGNAGGGNKLTF

SEQ ID NO: 656480 - protein, 15 aa, Homo sapiens
  CDR3 for beta chain variable domain of TCR clone 328240 (TRBV20-1, TRBJ2-7)
CSAESGTSGAYEQYF

SEQ ID NO: 656481 - protein, 14 aa, Homo sapiens
  CDR3 for alpha chain variable domain of TCR clone 328241 (TRAV16, TRAJ57)
CALSSPGGSEKLVF

SEQ ID NO: 656482 - protein, 15 aa, Homo sapiens
  CDR3 for beta chain variable domain of TCR clone 328241 (TRBV7-2, TRBJ2-1)
CASTHGTGIYNEQFF

SEQ ID NO: 656483 - protein, 17 aa, Homo sapiens
  CDR3 for alpha chain variable domain of TCR clone 328242 (TRAV17, TRAJ28)
CATDAVYSGAGSYQITF

SEQ ID NO: 656484 - protein, 16 aa, Homo sapiens
  CDR3 for beta chain variable domain of TCR clone 328242 (TRBV6-1, TRBJ2-5)
CASSETLDRGAETQYF

SEQ ID NO: 656485 - protein, 14 aa, Homo sapiens
  CDR3 for alpha chain variable domain of TCR clone 328243 (TRAV23/DV6, TRAJ40)
CAASLPSGTYKYIF

SEQ ID NO: 656486 - protein, 14 aa, Homo sapiens
  CDR3 for beta chain variable domain of TCR clone 328243 (TRBV5-1, TRBJ2-3)
CASSRGQGGGTQYF

SEQ ID NO: 656487 - protein, 13 aa, Homo sapiens
  CDR3 for alpha chain variable domain of TCR clone 328244 (TRAV8-3, TRAJ28)
CAVGAVGSYQLPF

SEQ ID NO: 656488 - protein, 15 aa, Homo sapiens
  CDR3 for beta chain variable domain of TCR clone 328244 (TRBV7-9, TRBJ1-5)
CASSQGHQPNQTQHF

SEQ ID NO: 656489 - protein, 15 aa, Homo sapiens
  CDR3 for alpha chain variable domain of TCR clone 328245 (TRAV8-3, TRAJ45)
CASSYSGGGADGLTF

SEQ ID NO: 656490 - protein, 14 aa, Homo sapiens
  CDR3 for beta chain variable domain of TCR clone 328245 (TRBV7-2, TRBJ2-1)
CASSLSGVYNEQFF

SEQ ID NO: 656491 - protein, 12 aa, Homo sapiens
  CDR3 for alpha chain variable domain of TCR clone 328246 (TRAV8-3, TRAJ26)
CAGDNYGQNFVF

SEQ ID NO: 656492 - protein, 17 aa, Homo sapiens
  CDR3 for beta chain variable domain of TCR clone 328246 (TRBV7-8, TRBJ2-6)
CASNAGTGGVGANVLTF

SEQ ID NO: 656493 - protein, 12 aa, Homo sapiens
  CDR3 for alpha chain variable domain of TCR clone 328247 (TRAV22, TRAJ20)
CAVGGNDYKLSF

SEQ ID NO: 656494 - protein, 18 aa, Homo sapiens
  CDR3 for beta chain variable domain of TCR clone 328247 (TRBV18, TRBJ1-3)
CASSPRGGAGPSGNTIYF

SEQ ID NO: 656495 - protein, 14 aa, Homo sapiens
  CDR3 for alpha chain variable domain of TCR clone 328248 (TRAV23/DV6, TRAJ11)
CAALIGGGYSTLTF

SEQ ID NO: 656496 - protein, 15 aa, Homo sapiens
  CDR3 for beta chain variable domain of TCR clone 328248 (TRBV11-2, TRBJ2-1)
CASSPAGQSLNEQFF

SEQ ID NO: 656497 - protein, 11 aa, Homo sapiens
  CDR3 for alpha chain variable domain of TCR clone 328249 (TRAV1-1, TRAJ23)
CAVRQGGKLIF

SEQ ID NO: 656498 - protein, 16 aa, Homo sapiens
  CDR3 for beta chain variable domain of TCR clone 328249 (TRBV5-4, TRBJ2-3)
CASRQPGAGGADTQYF

SEQ ID NO: 656499 - protein, 17 aa, Homo sapiens
  CDR3 for alpha chain variable domain of TCR clone 328250 (TRAV23/DV6, TRAJ57)
CAASSTLSQGGSEKLVF

SEQ ID NO: 656500 - protein, 14 aa, Homo sapiens
  CDR3 for beta chain variable domain of TCR clone 328250 (TRBV25-1, TRBJ1-1)
CASTHLGGNTEGFF

SEQ ID NO: 656501 - protein, 11 aa, Homo sapiens
  CDR3 for alpha chain variable domain of TCR clone 328251 (TRAV12-2, TRAJ18)
CAVTTDRGPTL

SEQ ID NO: 656502 - protein, 13 aa, Homo sapiens
  CDR3 for beta chain variable domain of TCR clone 328251 (TRBV19, TRBJ2-3)
CATWDKITDTQYF

SEQ ID NO: 656503 - protein, 14 aa, Homo sapiens
  CDR3 for alpha chain variable domain of TCR clone 328252 (TRAV8-6, TRAJ29)
CAVSRASGNTPFVF

SEQ ID NO: 656504 - protein, 13 aa, Homo sapiens
  CDR3 for beta chain variable domain of TCR clone 328252 (TRBV19, TRBJ1-5)
CASSEGSNQPQHF

SEQ ID NO: 656505 - protein, 14 aa, Homo sapiens
  CDR3 for alpha chain variable domain of TCR clone 328253 (TRAV20, TRAJ56)
CAVQFVGANSKLTF

SEQ ID NO: 656506 - protein, 14 aa, Homo sapiens
  CDR3 for beta chain variable domain of TCR clone 328253 (TRBV20-1, TRBJ2-7)
CSAKRGRGSYEQYF

SEQ ID NO: 656507 - protein, 14 aa, Homo sapiens
  CDR3 for alpha chain variable domain of TCR clone 328254 (TRAV12-1, TRAJ37)
CVVGGVENTGKLIF

SEQ ID NO: 656508 - protein, 16 aa, Homo sapiens
  CDR3 for beta chain variable domain of TCR clone 328254 (TRBV24-1, TRBJ2-2)
CATSDPGTANTGELFF

SEQ ID NO: 656509 - protein, 15 aa, Homo sapiens
  CDR3 for alpha chain variable domain of TCR clone 328255 (TRAV17, TRAJ57)
CATGPSQGGSEKLVF

SEQ ID NO: 656510 - protein, 14 aa, Homo sapiens
  CDR3 for beta chain variable domain of TCR clone 328255 (TRBV12-5, TRBJ2-5)
SASGSRTHQETQYF

SEQ ID NO: 656511 - protein, 17 aa, Homo sapiens
  CDR3 for alpha chain variable domain of TCR clone 328256 (TRAV13-1, TRAJ42)
CAASELWRKPRKSHLWK

SEQ ID NO: 656512 - protein, 15 aa, Homo sapiens
  CDR3 for beta chain variable domain of TCR clone 328256 (TRBV20-1, TRBJ2-1)
CSASSARSSYNEQFF

SEQ ID NO: 656513 - protein, 14 aa, Homo sapiens
  CDR3 for alpha chain variable domain of TCR clone 328257 (TRAV8-3, TRAJ27)
CAGGRNTNAGKSTF

SEQ ID NO: 656514 - protein, 16 aa, Homo sapiens
  CDR3 for beta chain variable domain of TCR clone 328257 (TRBV12-5, TRBJ2-5)
CASGPRTSGNQEAQYF

SEQ ID NO: 656515 - protein, 11 aa, Homo sapiens
  CDR3 for alpha chain variable domain of TCR clone 328258 (TRAV2, TRAJ13)
CASGGYQKVTF

SEQ ID NO: 656516 - protein, 21 aa, Homo sapiens
  CDR3 for beta chain variable domain of TCR clone 328258 (TRBV6-5, TRBJ1-3)
CASSYWEKIAQGMSSGNTIYF

SEQ ID NO: 656517 - protein, 14 aa, Homo sapiens
  CDR3 for alpha chain variable domain of TCR clone 328259 (TRAV12-2, TRAJ13)
CAVKKTGGYQKVTF

SEQ ID NO: 656518 - protein, 15 aa, Homo sapiens
  CDR3 for beta chain variable domain of TCR clone 328259 (TRBV27, TRBJ2-1)
CASINWGGSSNEQFF

SEQ ID NO: 656519 - protein, 16 aa, Homo sapiens
  CDR3 for alpha chain variable domain of TCR clone 328260 (TRAV30, TRAJ24)
CGTEIVDADSWWKFQF

SEQ ID NO: 656520 - protein, 13 aa, Homo sapiens
  CDR3 for beta chain variable domain of TCR clone 328260 (TRBV7-7, TRBJ1-1)
CASSLGANTEAFF

SEQ ID NO: 656521 - protein, 14 aa, Homo sapiens
  CDR3 for alpha chain variable domain of TCR clone 328261 (TRAV35, TRAJ38)
CAGSNAGNNRKLIW

SEQ ID NO: 656522 - protein, 12 aa, Homo sapiens
  CDR3 for beta chain variable domain of TCR clone 328261 (TRBV19, TRBJ2-7)
CASTDRGYEQSF

SEQ ID NO: 656523 - protein, 14 aa, Homo sapiens
  CDR3 for alpha chain variable domain of TCR clone 328262 (TRAV2, TRAJ3)
CAVHPYSSASKIIF

SEQ ID NO: 656524 - protein, 17 aa, Homo sapiens
  CDR3 for beta chain variable domain of TCR clone 328262 (TRBV7-6, TRBJ2-5)
CASSSPQAGDPSETQYF

SEQ ID NO: 656525 - protein, 12 aa, Homo sapiens
  CDR3 for alpha chain variable domain of TCR clone 328263 (TRAV21, TRAJ31)
CAVWGNNARLMF

SEQ ID NO: 656526 - protein, 15 aa, Homo sapiens
  CDR3 for beta chain variable domain of TCR clone 328263 (TRBV19, TRBJ1-6)
CASSTQGAVGSPLHF

SEQ ID NO: 656527 - protein, 14 aa, Homo sapiens
  CDR3 for alpha chain variable domain of TCR clone 328264 (TRAV8-2, TRAJ4)
CVVSPSGGYNKLIF

SEQ ID NO: 656528 - protein, 16 aa, Homo sapiens
  CDR3 for beta chain variable domain of TCR clone 328264 (TRBV4-1, TRBJ2-7)
CASSQNDRDNSYEQYF

SEQ ID NO: 656529 - protein, 13 aa, Homo sapiens
  CDR3 for alpha chain variable domain of TCR clone 328265 (TRAV36/DV7, TRAJ38)
CVANAANNRKLIW

SEQ ID NO: 656530 - protein, 13 aa, Homo sapiens
  CDR3 for beta chain variable domain of TCR clone 328265 (TRBV7-2, TRBJ2-7)
CQSLRWEVNEQYF

SEQ ID NO: 656531 - protein, 15 aa, Homo sapiens
  CDR3 for alpha chain variable domain of TCR clone 328266 (TRAV26-1, TRAJ44)
CIVRANTGTASKLTF

SEQ ID NO: 656532 - protein, 15 aa, Homo sapiens
  CDR3 for beta chain variable domain of TCR clone 328266 (TRBV28, TRBJ1-3)
CASSMGWASGNTIYF

SEQ ID NO: 656533 - protein, 14 aa, Homo sapiens
  CDR3 for alpha chain variable domain of TCR clone 328267 (TRAV6, TRAJ4)
LSLPISGGYNKLIF

SEQ ID NO: 656534 - protein, 13 aa, Homo sapiens
  CDR3 for beta chain variable domain of TCR clone 328267 (TRBV5-8, TRBJ1-2)
CASSLGGNYGYTF

SEQ ID NO: 656535 - protein, 13 aa, Homo sapiens
  CDR3 for alpha chain variable domain of TCR clone 328268 (TRAV13-1, TRAJ21)
CAASIYNFNKFYF

SEQ ID NO: 656536 - protein, 15 aa, Homo sapiens
  CDR3 for beta chain variable domain of TCR clone 328268 (TRBV4-1, TRBJ1-4)
CASSDTGGTNEKLFF

SEQ ID NO: 656537 - protein, 16 aa, Homo sapiens
  CDR3 for alpha chain variable domain of TCR clone 328269 (TRAV3, TRAJ37)
CAVRPHGSGNTGKRIF

SEQ ID NO: 656538 - protein, 15 aa, Homo sapiens
  CDR3 for beta chain variable domain of TCR clone 328269 (TRBV20-1, TRBJ2-7)
CSARDRVSGMDEQYF

SEQ ID NO: 656539 - protein, 14 aa, Homo sapiens
  CDR3 for alpha chain variable domain of TCR clone 328270 (TRAV3, TRAJ22)
CAVRDYGSARQLTF

SEQ ID NO: 656540 - protein, 13 aa, Homo sapiens
  CDR3 for beta chain variable domain of TCR clone 328270 (TRBV11-2, TRBJ2-5)
CACGHGAKETQYF

SEQ ID NO: 656541 - protein, 12 aa, Homo sapiens
  CDR3 for alpha chain variable domain of TCR clone 328271 (TRAV12-3, TRAJ31)
CAMSVPNARLMF

SEQ ID NO: 656542 - protein, 12 aa, Homo sapiens
  CDR3 for beta chain variable domain of TCR clone 328271 (TRBV11-2, TRBJ2-1)
CASSVQREGQFV

SEQ ID NO: 656543 - protein, 14 aa, Homo sapiens
  CDR3 for alpha chain variable domain of TCR clone 328272 (TRAV8-3, TRAJ36)
CAAVGNNGANNLFF

SEQ ID NO: 656544 - protein, 13 aa, Homo sapiens
  CDR3 for beta chain variable domain of TCR clone 328272 (TRBV19, TRBJ1-2)
CASSVPGQDGYTF

SEQ ID NO: 656545 - protein, 14 aa, Homo sapiens
  CDR3 for alpha chain variable domain of TCR clone 328273 (TRAV4, TRAJ30)
CLVGDMNRDDKLIF

SEQ ID NO: 656546 - protein, 15 aa, Homo sapiens
  CDR3 for beta chain variable domain of TCR clone 328273 (TRBV7-2, TRBJ2-7)
CASSLSSGRTYEQYF

SEQ ID NO: 656547 - protein, 13 aa, Homo sapiens
  CDR3 for alpha chain variable domain of TCR clone 328274 (TRAV9-2, TRAJ49)
CALIQIGGNQCYF

SEQ ID NO: 656548 - protein, 13 aa, Homo sapiens
  CDR3 for beta chain variable domain of TCR clone 328274 (TRBV20-1, TRBJ1-1)
CSARGGGNTEAFF

SEQ ID NO: 656549 - protein, 12 aa, Homo sapiens
  CDR3 for alpha chain variable domain of TCR clone 328275 (TRAV3, TRAJ20)
CSVRDPDYKLSF

SEQ ID NO: 656550 - protein, 13 aa, Homo sapiens
  CDR3 for beta chain variable domain of TCR clone 328275 (TRBV9, TRBJ2-1)
CASSVGQGGEQFF

SEQ ID NO: 656551 - protein, 14 aa, Homo sapiens
  CDR3 for alpha chain variable domain of TCR clone 328276 (TRAV1-2, TRAJ16)
CAVNLFSDGQKLLF

SEQ ID NO: 656552 - protein, 15 aa, Homo sapiens
  CDR3 for beta chain variable domain of TCR clone 328276 (TRBV27, TRBJ2-1)
CASSNGGGSSNEQFF

SEQ ID NO: 656553 - protein, 15 aa, Homo sapiens
  CDR3 for alpha chain variable domain of TCR clone 328277 (TRAV4, TRAJ39)
GLVGPNNNAGNMLTF

SEQ ID NO: 656554 - protein, 14 aa, Homo sapiens
  CDR3 for beta chain variable domain of TCR clone 328277 (TRBV19, TRBJ2-7)
CASNFRDTFTGMYF

SEQ ID NO: 656555 - protein, 13 aa, Homo sapiens
  CDR3 for alpha chain variable domain of TCR clone 328278 (TRAV12-3, TRAJ33)
CAMSVNSNYQLIW

SEQ ID NO: 656556 - protein, 16 aa, Homo sapiens
  CDR3 for beta chain variable domain of TCR clone 328278 (TRBV4-2, TRBJ2-7)
CASSQEGLAISYEQYF

SEQ ID NO: 656557 - protein, 12 aa, Homo sapiens
  CDR3 for alpha chain variable domain of TCR clone 328279 (TRAV29/DV5, TRAJ49)
CAATDTGNQFYF

SEQ ID NO: 656558 - protein, 15 aa, Homo sapiens
  CDR3 for beta chain variable domain of TCR clone 328279 (TRBV19, TRBJ2-2)
CASRQTGADTGELFV

SEQ ID NO: 656559 - protein, 14 aa, Homo sapiens
  CDR3 for alpha chain variable domain of TCR clone 328280 (TRAV27, TRAJ23)
CAGLSYNQGGKLIF

SEQ ID NO: 656560 - protein, 15 aa, Homo sapiens
  CDR3 for beta chain variable domain of TCR clone 328280 (TRBV19, TRBJ2-2)
CASSLHRGVTGELFF

SEQ ID NO: 656561 - protein, 14 aa, Homo sapiens
  CDR3 for alpha chain variable domain of TCR clone 328281 (TRAV12-3, TRAJ10)
SHLPLTGGGNKLTF

SEQ ID NO: 656562 - protein, 13 aa, Homo sapiens
  CDR3 for beta chain variable domain of TCR clone 328281 (TRBV7-7, TRBJ2-5)
CARSRSGQETQYF

SEQ ID NO: 656563 - protein, 16 aa, Homo sapiens
  CDR3 for alpha chain variable domain of TCR clone 328282 (TRAV3, TRAJ37)
CAVRPHGSGNTGKLIF

SEQ ID NO: 656564 - protein, 15 aa, Homo sapiens
  CDR3 for beta chain variable domain of TCR clone 328282 (TRBV18, TRBJ2-7)
CASSPLQGRTYEQYF

SEQ ID NO: 656565 - protein, 13 aa, Homo sapiens
  CDR3 for alpha chain variable domain of TCR clone 328283 (TRAV20, TRAJ15)
CATINQAGTVLIF

SEQ ID NO: 656566 - protein, 13 aa, Homo sapiens
  CDR3 for beta chain variable domain of TCR clone 328283 (TRBV12-4, TRBJ2-1)
CASRQPSNNEQFF

SEQ ID NO: 656567 - protein, 10 aa, Homo sapiens
  CDR3 for alpha chain variable domain of TCR clone 328284 (TRAV30, TRAJ48)
CGIGNEKLTF

SEQ ID NO: 656568 - protein, 14 aa, Homo sapiens
  CDR3 for beta chain variable domain of TCR clone 328284 (TRBV7-9, TRBJ2-2)
CASSGLADTGELFF

SEQ ID NO: 656569 - protein, 16 aa, Homo sapiens
  CDR3 for alpha chain variable domain of TCR clone 328285 (TRAV12-3, TRAJ53)
CAMSVGSGGSNYKLTF

SEQ ID NO: 656570 - protein, 15 aa, Homo sapiens
  CDR3 for beta chain variable domain of TCR clone 328285 (TRBV7-8, TRBJ2-7)
CASSPGVSGVYEQYF

SEQ ID NO: 656571 - protein, 11 aa, Homo sapiens
  CDR3 for alpha chain variable domain of TCR clone 328286 (TRAV12-1, TRAJ21)
CVVNNFNKFYF

SEQ ID NO: 656572 - protein, 16 aa, Homo sapiens
  CDR3 for beta chain variable domain of TCR clone 328286 (TRBV19, TRBJ2-1)
CASSKAGPSSYNEQFS

SEQ ID NO: 656573 - protein, 14 aa, Homo sapiens
  CDR3 for alpha chain variable domain of TCR clone 328287 (TRAV16, TRAJ39)
CALSKNNAGNMFTF

SEQ ID NO: 656574 - protein, 19 aa, Homo sapiens
  CDR3 for beta chain variable domain of TCR clone 328287 (TRBV6-6, TRBJ2-1)
AAPSQTSVYFCASSYEQFF

SEQ ID NO: 656575 - protein, 15 aa, Homo sapiens
  CDR3 for alpha chain variable domain of TCR clone 328288 (TRAV14/DV4, TRAJ12)
CVMREERDSSYKLIF

SEQ ID NO: 656576 - protein, 16 aa, Homo sapiens
  CDR3 for beta chain variable domain of TCR clone 328288 (TRBV11-2, TRBJ1-2)
CASSLDRGGNNYGYTF

SEQ ID NO: 656577 - protein, 12 aa, Homo sapiens
  CDR3 for alpha chain variable domain of TCR clone 328289 (TRAV1-1, TRAJ8)
CAGGTGFQKLVF

SEQ ID NO: 656578 - protein, 14 aa, Homo sapiens
  CDR3 for beta chain variable domain of TCR clone 328289 (TRBV19, TRBJ1-3)
CASNRGNSGNTIYF

SEQ ID NO: 656579 - protein, 16 aa, Homo sapiens
  CDR3 for alpha chain variable domain of TCR clone 328290 (TRAV30, TRAJ26)
CGTESVGDNYGQNFVF

SEQ ID NO: 656580 - protein, 17 aa, Homo sapiens
  CDR3 for beta chain variable domain of TCR clone 328290 (TRBV28, TRBJ2-5)
CASSRQGGLAGAETQYF

SEQ ID NO: 656581 - protein, 16 aa, Homo sapiens
  CDR3 for alpha chain variable domain of TCR clone 328291 (TRAV8-3, TRAJ44)
CAVGTLMTGTASKLTF

SEQ ID NO: 656582 - protein, 15 aa, Homo sapiens
  CDR3 for beta chain variable domain of TCR clone 328291 (TRBV20-1, TRBJ2-7)
CSARDRVSGMDEQYF

SEQ ID NO: 656583 - protein, 13 aa, Homo sapiens
  CDR3 for alpha chain variable domain of TCR clone 328292 (TRAV35, TRAJ57)
CWSPQGGSEKLVF

SEQ ID NO: 656584 - protein, 18 aa, Homo sapiens
  CDR3 for beta chain variable domain of TCR clone 328292 (TRBV6-6, TRBJ1-3)
CASSYSKWDSISRNTIYF

SEQ ID NO: 656585 - protein, 13 aa, Homo sapiens
  CDR3 for alpha chain variable domain of TCR clone 328293 (TRAV12-1, TRAJ26)
CVVRRNYGQNFVF

SEQ ID NO: 656586 - protein, 15 aa, Homo sapiens
  CDR3 for beta chain variable domain of TCR clone 328293 (TRBV6-5, TRBJ2-1)
CASSYDAGAGNEQFF

SEQ ID NO: 656587 - protein, 15 aa, Homo sapiens
  CDR3 for alpha chain variable domain of TCR clone 328294 (TRAV26-1, TRAJ40)
CIVSFATSGTYKYIF

SEQ ID NO: 656588 - protein, 15 aa, Homo sapiens
  CDR3 for beta chain variable domain of TCR clone 328294 (TRBV5-7, TRBJ2-3)
CASSPGLATTDTQYV

SEQ ID NO: 656589 - protein, 10 aa, Homo sapiens
  CDR3 for alpha chain variable domain of TCR clone 328295 (TRAV1-2, TRAJ31)
CAFFDARLMF

SEQ ID NO: 656590 - protein, 13 aa, Homo sapiens
  CDR3 for beta chain variable domain of TCR clone 328295 (TRBV11-2, TRBJ2-7)
CASSPLGSYEQYF

SEQ ID NO: 656591 - protein, 12 aa, Homo sapiens
  CDR3 for alpha chain variable domain of TCR clone 328296 (TRAV2, TRAJ15)
CALASQAGTLIF

SEQ ID NO: 656592 - protein, 16 aa, Homo sapiens
  CDR3 for beta chain variable domain of TCR clone 328296 (TRBV18, TRBJ1-5)
CASSPYRVEGNQPQHF

SEQ ID NO: 656593 - protein, 17 aa, Homo sapiens
  CDR3 for alpha chain variable domain of TCR clone 328297 (TRAV26-1, TRAJ53)
CIVRVDDSGGINYKLTL

SEQ ID NO: 656594 - protein, 15 aa, Homo sapiens
  CDR3 for beta chain variable domain of TCR clone 328297 (TRBV20-1, TRBJ2-7)
CSARVPAAYFYEQYF

SEQ ID NO: 656595 - protein, 14 aa, Homo sapiens
  CDR3 for alpha chain variable domain of TCR clone 328298 (TRAV8-2, TRAJ37)
CVVSISGNTGKLIF

SEQ ID NO: 656596 - protein, 15 aa, Homo sapiens
  CDR3 for beta chain variable domain of TCR clone 328298 (TRBV7-8, TRBJ2-1)
CASSPGGQNYNEQFF

SEQ ID NO: 656597 - protein, 12 aa, Homo sapiens
  CDR3 for alpha chain variable domain of TCR clone 328299 (TRAV16, TRAJ10)
CSRTGGGNKLTF

SEQ ID NO: 656598 - protein, 18 aa, Homo sapiens
  CDR3 for beta chain variable domain of TCR clone 328299 (TRBV20-1, TRBJ2-3)
CSASGLAGGPGTTDTQYF

SEQ ID NO: 656599 - protein, 16 aa, Homo sapiens
  CDR3 for alpha chain variable domain of TCR clone 328300 (TRAV8-4, TRAJ5)
CAVSPLTDTGRKALTF

SEQ ID NO: 656600 - protein, 14 aa, Homo sapiens
  CDR3 for beta chain variable domain of TCR clone 328300 (TRBV19, TRBJ1-6)
CASSTDGWNSPLHF

SEQ ID NO: 656601 - protein, 13 aa, Homo sapiens
  CDR3 for alpha chain variable domain of TCR clone 328301 (TRAV3, TRAJ21)
CAVREPDFNKFYF

SEQ ID NO: 656602 - protein, 13 aa, Homo sapiens
  CDR3 for beta chain variable domain of TCR clone 328301 (TRBV12-4, TRBJ1-2)
CASSYRVNYGYSF

SEQ ID NO: 656603 - protein, 12 aa, Homo sapiens
  CDR3 for alpha chain variable domain of TCR clone 328302 (TRAV1-2, TRAJ33)
RAALDSNYQLIW

SEQ ID NO: 656604 - protein, 15 aa, Homo sapiens
  CDR3 for beta chain variable domain of TCR clone 328302 (TRBV5-1, TRBJ2-5)
CASSFKGGDQETQYF

SEQ ID NO: 656605 - protein, 14 aa, Homo sapiens
  CDR3 for alpha chain variable domain of TCR clone 328303 (TRAV2, TRAJ37)
CAVDFTSNTGKLIF

SEQ ID NO: 656606 - protein, 15 aa, Homo sapiens
  CDR3 for beta chain variable domain of TCR clone 328303 (TRBV20-1, TRBJ1-1)
SAVLAEGTGNTEAFF

SEQ ID NO: 656607 - protein, 15 aa, Homo sapiens
  CDR3 for alpha chain variable domain of TCR clone 328304 (TRAV1-2, TRAJ28)
CAVQYSGAGSYQLTF

SEQ ID NO: 656608 - protein, 18 aa, Homo sapiens
  CDR3 for beta chain variable domain of TCR clone 328304 (TRBV11-2, TRBJ2-3)
CASILGGASRGAPNTQYF

SEQ ID NO: 656609 - protein, 17 aa, Homo sapiens
  CDR3 for alpha chain variable domain of TCR clone 328305 (TRAV8-2, TRAJ17)
CVVSDRRFKAAGNKLPF

SEQ ID NO: 656610 - protein, 18 aa, Homo sapiens
  CDR3 for beta chain variable domain of TCR clone 328305 (TRBV7-9, TRBJ2-7)
CASSLTTSGSRTWYEQYF

SEQ ID NO: 656611 - protein, 11 aa, Homo sapiens
  CDR3 for alpha chain variable domain of TCR clone 328306 (TRAV12-3, TRAJ43)
CAMSVSNDMRF

SEQ ID NO: 656612 - protein, 14 aa, Homo sapiens
  CDR3 for beta chain variable domain of TCR clone 328306 (TRBV15, TRBJ2-5)
CATSIGGLGETQYF

SEQ ID NO: 656613 - protein, 14 aa, Homo sapiens
  CDR3 for alpha chain variable domain of TCR clone 328307 (TRAV12-2, TRAJ13)
CAVKKTGGYQKVTS

SEQ ID NO: 656614 - protein, 16 aa, Homo sapiens
  CDR3 for beta chain variable domain of TCR clone 328307 (TRBV4-1, TRBJ1-4)
CASSQDLRRGGEKLFF

SEQ ID NO: 656615 - protein, 12 aa, Homo sapiens
  CDR3 for alpha chain variable domain of TCR clone 328308 (TRAV17, TRAJ20)
CATKSNDYKLSF

SEQ ID NO: 656616 - protein, 13 aa, Homo sapiens
  CDR3 for beta chain variable domain of TCR clone 328308 (TRBV10-3, TRBJ1-1)
CAIIPEGGTEAFF

SEQ ID NO: 656617 - protein, 14 aa, Homo sapiens
  CDR3 for alpha chain variable domain of TCR clone 328309 (TRAV12-2, TRAJ11)
CAVNMNSGYSTLTF

SEQ ID NO: 656618 - protein, 13 aa, Homo sapiens
  CDR3 for beta chain variable domain of TCR clone 328309 (TRBV6-1, TRBJ1-2)
CASSDSPSYGYNF

SEQ ID NO: 656619 - protein, 14 aa, Homo sapiens
  CDR3 for alpha chain variable domain of TCR clone 328310 (TRAV12-2, TRAJ17)
CAVLFRAAGNKLTF

SEQ ID NO: 656620 - protein, 15 aa, Homo sapiens
  CDR3 for beta chain variable domain of TCR clone 328310 (TRBV9, TRBJ1-6)
CASSVAGTGDSPLHF

SEQ ID NO: 656621 - protein, 14 aa, Homo sapiens
  CDR3 for alpha chain variable domain of TCR clone 328311 (TRAV29/DV5, TRAJ44)
CAAFLVGTASKLTF

SEQ ID NO: 656622 - protein, 16 aa, Homo sapiens
  CDR3 for beta chain variable domain of TCR clone 328311 (TRBV19, TRBJ1-5)
CASSIQWGYSNQPQHF

SEQ ID NO: 656623 - protein, 15 aa, Homo sapiens
  CDR3 for alpha chain variable domain of TCR clone 328312 (TRAV4, TRAJ39)
CLVGPNNDAGNMLTF

SEQ ID NO: 656624 - protein, 14 aa, Homo sapiens
  CDR3 for beta chain variable domain of TCR clone 328312 (TRBV11-2, TRBJ2-5)
CASSRTGGIETQYF

SEQ ID NO: 656625 - protein, 15 aa, Homo sapiens
  CDR3 for alpha chain variable domain of TCR clone 328313 (TRAV3, TRAJ3)
CAVRDRDSSASKIIF

SEQ ID NO: 656626 - protein, 12 aa, Homo sapiens
  CDR3 for beta chain variable domain of TCR clone 328313 (TRBV12-4, TRBJ1-1)
CASSPDREGAFF

SEQ ID NO: 656627 - protein, 12 aa, Homo sapiens
  CDR3 for alpha chain variable domain of TCR clone 328314 (TRAV14/DV4, TRAJ44)
CNERGPESKLTF

SEQ ID NO: 656628 - protein, 14 aa, Homo sapiens
  CDR3 for beta chain variable domain of TCR clone 328314 (TRBV2, TRBJ2-1)
CASSEARQGVSEFF

SEQ ID NO: 656629 - protein, 10 aa, Homo sapiens
  CDR3 for alpha chain variable domain of TCR clone 328315 (TRAV12-1, TRAJ41)
CVVPELKFRV

SEQ ID NO: 656630 - protein, 13 aa, Homo sapiens
  CDR3 for beta chain variable domain of TCR clone 328315 (TRBV18, TRBJ2-5)
CASSLQGQETQYF

SEQ ID NO: 656631 - protein, 12 aa, Homo sapiens
  CDR3 for alpha chain variable domain of TCR clone 328316 (TRAV13-2, TRAJ23)
CAERHRGGKLIF

SEQ ID NO: 656632 - protein, 13 aa, Homo sapiens
  CDR3 for beta chain variable domain of TCR clone 328316 (TRBV7-9, TRBJ1-1)
CASRWTVNTEAFF

SEQ ID NO: 656633 - protein, 14 aa, Homo sapiens
  CDR3 for alpha chain variable domain of TCR clone 328317 (TRAV12-1, TRAJ17)
CVVNYKAAGNKLTL

SEQ ID NO: 656634 - protein, 17 aa, Homo sapiens
  CDR3 for beta chain variable domain of TCR clone 328317 (TRBV20-1, TRBJ2-1)
CSSSSSGLAGSYNEQFF

SEQ ID NO: 656635 - protein, 12 aa, Homo sapiens
  CDR3 for alpha chain variable domain of TCR clone 328318 (TRAV8-6, TRAJ33)
CAVTDSNYQLIW

SEQ ID NO: 656636 - protein, 15 aa, Homo sapiens
  CDR3 for beta chain variable domain of TCR clone 328318 (TRBV4-3, TRBJ1-2)
CASSRGHGRNYGYTF

SEQ ID NO: 656637 - protein, 11 aa, Homo sapiens
  CDR3 for alpha chain variable domain of TCR clone 328319 (TRAV1-2, TRAJ40)
CAVPGTYKYIF

SEQ ID NO: 656638 - protein, 16 aa, Homo sapiens
  CDR3 for beta chain variable domain of TCR clone 328319 (TRBV29-1, TRBJ2-7)
CSVEVVGTSGSYEQSF

SEQ ID NO: 656639 - protein, 13 aa, Homo sapiens
  CDR3 for alpha chain variable domain of TCR clone 328320 (TRAV27, TRAJ41)
CAGEGNSGYALNF

SEQ ID NO: 656640 - protein, 16 aa, Homo sapiens
  CDR3 for beta chain variable domain of TCR clone 328320 (TRBV19, TRBJ2-2)
CASRSPGTGATGELFF

SEQ ID NO: 656641 - protein, 10 aa, Homo sapiens
  CDR3 for alpha chain variable domain of TCR clone 328321 (TRAV36/DV7, TRAJ48)
CAVGNENLTF

SEQ ID NO: 656642 - protein, 15 aa, Homo sapiens
  CDR3 for beta chain variable domain of TCR clone 328321 (TRBV6-5, TRBJ1-4)
CASSSVGAAGEKLFF

SEQ ID NO: 656643 - protein, 14 aa, Homo sapiens
  CDR3 for alpha chain variable domain of TCR clone 328322 (TRAV8-3, TRAJ4)
CAVGASGGYNKLIF

SEQ ID NO: 656644 - protein, 20 aa, Homo sapiens
  CDR3 for beta chain variable domain of TCR clone 328322 (TRBV4-3, TRBJ2-2)
GPVSLRQQPPSGVGTGELFF

SEQ ID NO: 656645 - protein, 14 aa, Homo sapiens
  CDR3 for alpha chain variable domain of TCR clone 328323 (TRAV12-2, TRAJ13)
WSVKKTGGYQKVTF

SEQ ID NO: 656646 - protein, 14 aa, Homo sapiens
  CDR3 for beta chain variable domain of TCR clone 328323 (TRBV5-5, TRBJ2-7)
CASSLGQGTYEQYF

SEQ ID NO: 656647 - protein, 14 aa, Homo sapiens
  CDR3 for alpha chain variable domain of TCR clone 328324 (TRAV12-2, TRAJ40)
CAVKIPSGTYKYIF

SEQ ID NO: 656648 - protein, 15 aa, Homo sapiens
  CDR3 for beta chain variable domain of TCR clone 328324 (TRBV2, TRBJ2-5)
CASTRDGGPQETQYF

SEQ ID NO: 656649 - protein, 11 aa, Homo sapiens
  CDR3 for alpha chain variable domain of TCR clone 328325 (TRAV1-2, TRAJ20)
CAVANDYKLGF

SEQ ID NO: 656650 - protein, 18 aa, Homo sapiens
  CDR3 for beta chain variable domain of TCR clone 328325 (TRBV20-1, TRBJ2-6)
CSAEATPTHGSGANVLTF

SEQ ID NO: 656651 - protein, 16 aa, Homo sapiens
  CDR3 for alpha chain variable domain of TCR clone 328326 (TRAV8-3, TRAJ13)
CAVSAYPSGGYQKVTF

SEQ ID NO: 656652 - protein, 10 aa, Homo sapiens
  CDR3 for beta chain variable domain of TCR clone 328326 (TRBV19, TRBJ1-5)
CASSIVWQTI

SEQ ID NO: 656653 - protein, 13 aa, Homo sapiens
  CDR3 for alpha chain variable domain of TCR clone 328327 (TRAV27, TRAJ49)
CAPRPYTGNQFYF

SEQ ID NO: 656654 - protein, 16 aa, Homo sapiens
  CDR3 for beta chain variable domain of TCR clone 328327 (TRBV28, TRBJ2-1)
CASSSPEYPRDNEQFF

SEQ ID NO: 656655 - protein, 16 aa, Homo sapiens
  CDR3 for alpha chain variable domain of TCR clone 328328 (TRAV20, TRAJ53)
CAVQAERGGSKYKLTF

SEQ ID NO: 656656 - protein, 15 aa, Homo sapiens
  CDR3 for beta chain variable domain of TCR clone 328328 (TRBV4-1, TRBJ2-7)
CASSQQGQGFDEQYF

SEQ ID NO: 656657 - protein, 19 aa, Homo sapiens
  CDR3 for alpha chain variable domain of TCR clone 328329 (TRAV26-1, TRAJ52)
CIVRAHRNAGGTSYGKLIF

SEQ ID NO: 656658 - protein, 15 aa, Homo sapiens
  CDR3 for beta chain variable domain of TCR clone 328329 (TRBV11-2, TRBJ2-1)
CASSLAPRAHNEQFF

SEQ ID NO: 656659 - protein, 16 aa, Homo sapiens
  CDR3 for alpha chain variable domain of TCR clone 328330 (TRAV27, TRAJ18)
CAGAGNRGSTLGRLYF

SEQ ID NO: 656660 - protein, 15 aa, Homo sapiens
  CDR3 for beta chain variable domain of TCR clone 328330 (TRBV7-3, TRBJ2-1)
CQQLQTSGRYNEQFF

SEQ ID NO: 656661 - protein, 14 aa, Homo sapiens
  CDR3 for alpha chain variable domain of TCR clone 328331 (TRAV1-2, TRAJ16)
CAVNRFSDGQKLLF

SEQ ID NO: 656662 - protein, 15 aa, Homo sapiens
  CDR3 for beta chain variable domain of TCR clone 328331 (TRBV6-1, TRBJ2-1)
CASSEAAYSYNEQFF

SEQ ID NO: 656663 - protein, 14 aa, Homo sapiens
  CDR3 for alpha chain variable domain of TCR clone 328332 (TRAV1-2, TRAJ16)
CAVNRLSDGQKLLF

SEQ ID NO: 656664 - protein, 15 aa, Homo sapiens
  CDR3 for beta chain variable domain of TCR clone 328332 (TRBV9, TRBJ1-6)
CASSVSGTGDSPLHF

SEQ ID NO: 656665 - protein, 13 aa, Homo sapiens
  CDR3 for alpha chain variable domain of TCR clone 328333 (TRAV12-1, TRAJ9)
CVLRNTGGFKTIF

SEQ ID NO: 656666 - protein, 14 aa, Homo sapiens
  CDR3 for beta chain variable domain of TCR clone 328333 (TRBV20-1, TRBJ2-1)
CSAQIGGSANEQFF

SEQ ID NO: 656667 - protein, 14 aa, Homo sapiens
  CDR3 for alpha chain variable domain of TCR clone 328334 (TRAV30, TRAJ26)
CGTEIVSYGQNFVF

SEQ ID NO: 656668 - protein, 14 aa, Homo sapiens
  CDR3 for beta chain variable domain of TCR clone 328334 (TRBV2, TRBJ2-3)
CASSEGQNTDTQYF

SEQ ID NO: 656669 - protein, 17 aa, Homo sapiens
  CDR3 for alpha chain variable domain of TCR clone 328335 (TRAV8-6, TRAJ8)
CAVKEGIENTGFQRLVF

SEQ ID NO: 656670 - protein, 15 aa, Homo sapiens
  CDR3 for beta chain variable domain of TCR clone 328335 (TRBV7-2, TRBJ2-1)
CASSSGLAGGNEQFF

SEQ ID NO: 656671 - protein, 11 aa, Homo sapiens
  CDR3 for alpha chain variable domain of TCR clone 328336 (TRAV12-1, TRAJ30)
WVVNGQDKIIF

SEQ ID NO: 656672 - protein, 16 aa, Homo sapiens
  CDR3 for beta chain variable domain of TCR clone 328336 (TRBV24-1, TRBJ2-3)
CATSDAISGITDTQYF

SEQ ID NO: 656673 - protein, 16 aa, Homo sapiens
  CDR3 for alpha chain variable domain of TCR clone 328337 (TRAV14/DV4, TRAJ45)
CAMREGERGGADGLTF

SEQ ID NO: 656674 - protein, 17 aa, Homo sapiens
  CDR3 for beta chain variable domain of TCR clone 328337 (TRBV11-2, TRBJ2-1)
CASSLYPPGVEYNEQFF

SEQ ID NO: 656675 - protein, 19 aa, Homo sapiens
  CDR3 for alpha chain variable domain of TCR clone 328338 (TRAV17, TRAJ40)
TASRAANTASYFCASKYIF

SEQ ID NO: 656676 - protein, 17 aa, Homo sapiens
  CDR3 for beta chain variable domain of TCR clone 328338 (TRBV11-2, TRBJ2-4)
CASSFLALGGAGDIQYF

SEQ ID NO: 656677 - protein, 12 aa, Homo sapiens
  CDR3 for alpha chain variable domain of TCR clone 328339 (TRAV8-3, TRAJ22)
FGGQSSARQLTF

SEQ ID NO: 656678 - protein, 18 aa, Homo sapiens
  CDR3 for beta chain variable domain of TCR clone 328339 (TRBV4-1, TRBJ1-4)
CASSPRTGGAWTNEKLFF

SEQ ID NO: 656679 - protein, 15 aa, Homo sapiens
  CDR3 for alpha chain variable domain of TCR clone 328340 (TRAV17, TRAJ37)
CATDGGSSNTGKLIF

SEQ ID NO: 656680 - protein, 15 aa, Homo sapiens
  CDR3 for beta chain variable domain of TCR clone 328340 (TRBV28, TRBJ2-5)
CASSSGRTIQGTQYF

SEQ ID NO: 656681 - protein, 14 aa, Homo sapiens
  CDR3 for alpha chain variable domain of TCR clone 328341 (TRAV1-2, TRAJ16)
CAVNRFSDGQKLLF

SEQ ID NO: 656682 - protein, 17 aa, Homo sapiens
  CDR3 for beta chain variable domain of TCR clone 328341 (TRBV15, TRBJ1-2)
CATSGRVIDVVNYGYTF

SEQ ID NO: 656683 - protein, 23 aa, Homo sapiens
  CDR3 for alpha chain variable domain of TCR clone 328342 (TRAV27, TRAJ44)
TAAQPGDTGLSIINTGTASKLTF

SEQ ID NO: 656684 - protein, 17 aa, Homo sapiens
  CDR3 for beta chain variable domain of TCR clone 328342 (TRBV20-1, TRBJ2-1)
CSASSSGLAGSYNEQFF

SEQ ID NO: 656685 - protein, 15 aa, Homo sapiens
  CDR3 for alpha chain variable domain of TCR clone 328343 (TRAV26-1, TRAJ56)
CIVRVATGANSKLTF

SEQ ID NO: 656686 - protein, 15 aa, Homo sapiens
  CDR3 for beta chain variable domain of TCR clone 328343 (TRBV20-1, TRBJ2-7)
CSARDRVSGMDEQYF

SEQ ID NO: 656687 - protein, 16 aa, Homo sapiens
  CDR3 for alpha chain variable domain of TCR clone 328344 (TRAV26-2, TRAJ31)
CILRDSGLVANARLMF

SEQ ID NO: 656688 - protein, 15 aa, Homo sapiens
  CDR3 for beta chain variable domain of TCR clone 328344 (TRBV27, TRBJ2-1)
CASSNGGGSSNEQFF

SEQ ID NO: 656689 - protein, 12 aa, Homo sapiens
  CDR3 for alpha chain variable domain of TCR clone 328345 (TRAV12-3, TRAJ20)
CAMVRGDNKLSF

SEQ ID NO: 656690 - protein, 14 aa, Homo sapiens
  CDR3 for beta chain variable domain of TCR clone 328345 (TRBV20-1, TRBJ2-7)
CSAISREASYEQYF

SEQ ID NO: 656691 - protein, 14 aa, Homo sapiens
  CDR3 for alpha chain variable domain of TCR clone 328346 (TRAV12-2, TRAJ45)
CAVYSGGGADGLTF

SEQ ID NO: 656692 - protein, 11 aa, Homo sapiens
  CDR3 for beta chain variable domain of TCR clone 328346 (TRBV11-2, TRBJ2-2)
CASSLPGELFL

SEQ ID NO: 656693 - protein, 15 aa, Homo sapiens
  CDR3 for alpha chain variable domain of TCR clone 328347 (TRAV8-3, TRAJ4)
CAVGAYSGGYNKLIF

SEQ ID NO: 656694 - protein, 18 aa, Homo sapiens
  CDR3 for beta chain variable domain of TCR clone 328347 (TRBV12-4, TRBJ2-2)
CASSLVAGTRGRTGELFF

SEQ ID NO: 656695 - protein, 14 aa, Homo sapiens
  CDR3 for alpha chain variable domain of TCR clone 328348 (TRAV12-2, TRAJ9)
CAVSFGTGGFKTIF

SEQ ID NO: 656696 - protein, 17 aa, Homo sapiens
  CDR3 for beta chain variable domain of TCR clone 328348 (TRBV13, TRBJ2-3)
CASSLSRVAGGRNTQYF

SEQ ID NO: 656697 - protein, 13 aa, Homo sapiens
  CDR3 for alpha chain variable domain of TCR clone 328349 (TRAV1-2, TRAJ9)
CAALNTGGFKTIF

SEQ ID NO: 656698 - protein, 13 aa, Homo sapiens
  CDR3 for beta chain variable domain of TCR clone 328349 (TRBV19, TRBJ1-2)
CASSVAGQDDYTF

SEQ ID NO: 656699 - protein, 13 aa, Homo sapiens
  CDR3 for alpha chain variable domain of TCR clone 328350 (TRAV17, TRAJ40)
FAGALGGTYKYIF

SEQ ID NO: 656700 - protein, 16 aa, Homo sapiens
  CDR3 for beta chain variable domain of TCR clone 328350 (TRBV7-2, TRBJ1-4)
CASSLAPGRRDEKLFF

SEQ ID NO: 656701 - protein, 10 aa, Homo sapiens
  CDR3 for alpha chain variable domain of TCR clone 328351 (TRAV1-2, TRAJ31)
CAFFDARLMF

SEQ ID NO: 656702 - protein, 17 aa, Homo sapiens
  CDR3 for beta chain variable domain of TCR clone 328351 (TRBV13, TRBJ2-3)
CASSLSRVAGGRNTQYF

SEQ ID NO: 656703 - protein, 11 aa, Homo sapiens
  CDR3 for alpha chain variable domain of TCR clone 328352 (TRAV29/DV5, TRAJ43)
CAARKNNDMRF

SEQ ID NO: 656704 - protein, 15 aa, Homo sapiens
  CDR3 for beta chain variable domain of TCR clone 328352 (TRBV5-1, TRBJ1-2)
CASSLGQISGRGYTF

SEQ ID NO: 656705 - protein, 14 aa, Homo sapiens
  CDR3 for alpha chain variable domain of TCR clone 328353 (TRAV12-3, TRAJ10)
SHLPLTGGGNKLSF

SEQ ID NO: 656706 - protein, 16 aa, Homo sapiens
  CDR3 for beta chain variable domain of TCR clone 328353 (TRBV19, TRBJ1-1)
CASRFGGPVTGTEAFF

SEQ ID NO: 656707 - protein, 15 aa, Homo sapiens
  CDR3 for alpha chain variable domain of TCR clone 328354 (TRAV12-2, TRAJ53)
CAVHGGGGSNYKLTF

SEQ ID NO: 656708 - protein, 12 aa, Homo sapiens
  CDR3 for beta chain variable domain of TCR clone 328354 (TRBV11-2, TRBJ2-2)
CASSLGGGELFF

SEQ ID NO: 656709 - protein, 14 aa, Homo sapiens
  CDR3 for alpha chain variable domain of TCR clone 328355 (TRAV1-2, TRAJ16)
CAVNRFSAGHKLLF

SEQ ID NO: 656710 - protein, 15 aa, Homo sapiens
  CDR3 for beta chain variable domain of TCR clone 328355 (TRBV9, TRBJ1-6)
CASSVAGTGDSPLHF

SEQ ID NO: 656711 - protein, 14 aa, Homo sapiens
  CDR3 for alpha chain variable domain of TCR clone 328356 (TRAV38-1, TRAJ40)
CALRPTSETYKYIF

SEQ ID NO: 656712 - protein, 16 aa, Homo sapiens
  CDR3 for beta chain variable domain of TCR clone 328356 (TRBV6-1, TRBJ1-2)
CASSGAWQGRSHGYTF

SEQ ID NO: 656713 - protein, 13 aa, Homo sapiens
  CDR3 for alpha chain variable domain of TCR clone 328357 (TRAV13-2, TRAJ48)
CAEIDFGNEKLNF

SEQ ID NO: 656714 - protein, 15 aa, Homo sapiens
  CDR3 for beta chain variable domain of TCR clone 328357 (TRBV7-9, TRBJ1-6)
CASSSPGRGNSPLHF

SEQ ID NO: 656715 - protein, 14 aa, Homo sapiens
  CDR3 for alpha chain variable domain of TCR clone 328358 (TRAV13-1, TRAJ35)
CAASKGGFGNVLHC

SEQ ID NO: 656716 - protein, 15 aa, Homo sapiens
  CDR3 for beta chain variable domain of TCR clone 328358 (TRBV7-2, TRBJ2-3)
CASSLRGGSTDTQYF

SEQ ID NO: 656717 - protein, 15 aa, Homo sapiens
  CDR3 for alpha chain variable domain of TCR clone 328359 (TRAV2, TRAJ45)
YAVDGTGGGADGLTF

SEQ ID NO: 656718 - protein, 12 aa, Homo sapiens
  CDR3 for beta chain variable domain of TCR clone 328359 (TRBV19, TRBJ1-1)
CASSIGTEEAFF

SEQ ID NO: 656719 - protein, 16 aa, Homo sapiens
  CDR3 for alpha chain variable domain of TCR clone 328360 (TRAV30, TRAJ24)
CGTEIVDADSWGKFQF

SEQ ID NO: 656720 - protein, 14 aa, Homo sapiens
  CDR3 for beta chain variable domain of TCR clone 328360 (TRBV28, TRBJ2-7)
CASSLRARGNEQYF

SEQ ID NO: 656721 - protein, 13 aa, Homo sapiens
  CDR3 for alpha chain variable domain of TCR clone 328361 (TRAV12-2, TRAJ6)
CAALKGGSYIPTF

SEQ ID NO: 656722 - protein, 13 aa, Homo sapiens
  CDR3 for beta chain variable domain of TCR clone 328361 (TRBV4-1, TRBJ2-1)
CASSQEVQYEQFF

SEQ ID NO: 656723 - protein, 17 aa, Homo sapiens
  CDR3 for alpha chain variable domain of TCR clone 328362 (TRAV8-3, TRAJ42)
CCGAGMNYGGSQGNLIF

SEQ ID NO: 656724 - protein, 11 aa, Homo sapiens
  CDR3 for beta chain variable domain of TCR clone 328362 (TRBV7-2, TRBJ2-3)
CACSSSDTQYF

SEQ ID NO: 656725 - protein, 14 aa, Homo sapiens
  CDR3 for alpha chain variable domain of TCR clone 328363 (TRAV2, TRAJ9)
CAVEDRSGGFKTNF

SEQ ID NO: 656726 - protein, 16 aa, Homo sapiens
  CDR3 for beta chain variable domain of TCR clone 328363 (TRBV20-1, TRBJ2-3)
CSAVRDRGPIADTQYF

SEQ ID NO: 656727 - protein, 11 aa, Homo sapiens
  CDR3 for alpha chain variable domain of TCR clone 328364 (TRAV12-3, TRAJ27)
CAMANAGKSTF

SEQ ID NO: 656728 - protein, 13 aa, Homo sapiens
  CDR3 for beta chain variable domain of TCR clone 328364 (TRBV9, TRBJ2-7)
CASSVAEYYEHYF

SEQ ID NO: 656729 - protein, 12 aa, Homo sapiens
  CDR3 for alpha chain variable domain of TCR clone 328365 (TRAV21, TRAJ33)
CAVHDSDYQLIW

SEQ ID NO: 656730 - protein, 14 aa, Homo sapiens
  CDR3 for beta chain variable domain of TCR clone 328365 (TRBV28, TRBJ2-1)
CASSPGEGGNEQFF

SEQ ID NO: 656731 - protein, 11 aa, Homo sapiens
  CDR3 for alpha chain variable domain of TCR clone 328366 (TRAV12-2, TRAJ3)
CTVKRASKIIF

SEQ ID NO: 656732 - protein, 14 aa, Homo sapiens
  CDR3 for beta chain variable domain of TCR clone 328366 (TRBV6-5, TRBJ1-1)
CASNRQRSDTEAFL

SEQ ID NO: 656733 - protein, 14 aa, Homo sapiens
  CDR3 for alpha chain variable domain of TCR clone 328367 (TRAV12-2, TRAJ40)
CAVKIPSGTYKYIF

SEQ ID NO: 656734 - protein, 16 aa, Homo sapiens
  CDR3 for beta chain variable domain of TCR clone 328367 (TRBV5-1, TRBJ2-7)
CASSYASTSSGGEQYF

SEQ ID NO: 656735 - protein, 15 aa, Homo sapiens
  CDR3 for alpha chain variable domain of TCR clone 328368 (TRAV3, TRAJ22)
CAVRDRGGSARQLTF

SEQ ID NO: 656736 - protein, 18 aa, Homo sapiens
  CDR3 for beta chain variable domain of TCR clone 328368 (TRBV20-1, TRBJ2-3)
CSASGLAGGPGTTDTQYF

SEQ ID NO: 656737 - protein, 13 aa, Homo sapiens
  CDR3 for alpha chain variable domain of TCR clone 328369 (TRAV3, TRAJ43)
CAVRDTRGGGMRF

SEQ ID NO: 656738 - protein, 15 aa, Homo sapiens
  CDR3 for beta chain variable domain of TCR clone 328369 (TRBV6-5, TRBJ1-5)
CASSYSRRSNQPQHF

SEQ ID NO: 656739 - protein, 15 aa, Homo sapiens
  CDR3 for alpha chain variable domain of TCR clone 328370 (TRAV1-2, TRAJ28)
CAVQYSGAGSYQLTF

SEQ ID NO: 656740 - protein, 13 aa, Homo sapiens
  CDR3 for beta chain variable domain of TCR clone 328370 (TRBV20-1, TRBJ2-7)
YSATHTSGYEQYF

SEQ ID NO: 656741 - protein, 13 aa, Homo sapiens
  CDR3 for alpha chain variable domain of TCR clone 328371 (TRAV8-1, TRAJ28)
CAVPGAGSYQLPF

SEQ ID NO: 656742 - protein, 14 aa, Homo sapiens
  CDR3 for beta chain variable domain of TCR clone 328371 (TRBV7-2, TRBJ2-2)
CASRGQGAAGELFF

SEQ ID NO: 656743 - protein, 14 aa, Homo sapiens
  CDR3 for alpha chain variable domain of TCR clone 328372 (TRAV35, TRAJ33)
CAGSSQDSNYQLIW

SEQ ID NO: 656744 - protein, 13 aa, Homo sapiens
  CDR3 for beta chain variable domain of TCR clone 328372 (TRBV6-1, TRBJ1-1)
CASSRQGNTEAFF

SEQ ID NO: 656745 - protein, 10 aa, Homo sapiens
  CDR3 for alpha chain variable domain of TCR clone 328373 (TRAV20, TRAJ22)
CAAPARQLTF

SEQ ID NO: 656746 - protein, 14 aa, Homo sapiens
  CDR3 for beta chain variable domain of TCR clone 328373 (TRBV19, TRBJ1-5)
CASSQGYSNQPQHF

SEQ ID NO: 656747 - protein, 16 aa, Homo sapiens
  CDR3 for alpha chain variable domain of TCR clone 328374 (TRAV13-1, TRAJ37)
CAASSLGASNTGKLIF

SEQ ID NO: 656748 - protein, 12 aa, Homo sapiens
  CDR3 for beta chain variable domain of TCR clone 328374 (TRBV6-1, TRBJ2-5)
CASSEGRETQYF

SEQ ID NO: 656749 - protein, 16 aa, Homo sapiens
  CDR3 for alpha chain variable domain of TCR clone 328375 (TRAV12-2, TRAJ13)
CAVKKTGGYQKGTLVT

SEQ ID NO: 656750 - protein, 15 aa, Homo sapiens
  CDR3 for beta chain variable domain of TCR clone 328375 (TRBV27, TRBJ2-1)
CASSNGGGSSNEQFF

SEQ ID NO: 656751 - protein, 14 aa, Homo sapiens
  CDR3 for alpha chain variable domain of TCR clone 328376 (TRAV13-1, TRAJ35)
RAASKGGFGNVLHC

SEQ ID NO: 656752 - protein, 13 aa, Homo sapiens
  CDR3 for beta chain variable domain of TCR clone 328376 (TRBV7-3, TRBJ1-1)
CASSQDWGAEAFS

SEQ ID NO: 656753 - protein, 14 aa, Homo sapiens
  CDR3 for alpha chain variable domain of TCR clone 328377 (TRAV8-3, TRAJ4)
CAVGAAGGYNKLIF

SEQ ID NO: 656754 - protein, 15 aa, Homo sapiens
  CDR3 for beta chain variable domain of TCR clone 328377 (TRBV7-8, TRBJ1-1)
CASSLGSGFDTEAFF

SEQ ID NO: 656755 - protein, 11 aa, Homo sapiens
  CDR3 for alpha chain variable domain of TCR clone 328378 (TRAV26-2, TRAJ8)
CILTGFQKLVF

SEQ ID NO: 656756 - protein, 19 aa, Homo sapiens
  CDR3 for beta chain variable domain of TCR clone 328378 (TRBV20-1, TRBJ2-1)
RSARGETSGNSPQIDEQFF

SEQ ID NO: 656757 - protein, 12 aa, Homo sapiens
  CDR3 for alpha chain variable domain of TCR clone 328379 (TRAV8-1, TRAJ40)
CAAVSGTYKYIF

SEQ ID NO: 656758 - protein, 14 aa, Homo sapiens
  CDR3 for beta chain variable domain of TCR clone 328379 (TRBV7-2, TRBJ1-2)
CASSQTGSTYGYTF

SEQ ID NO: 656759 - protein, 15 aa, Homo sapiens
  CDR3 for alpha chain variable domain of TCR clone 328380 (TRAV8-3, TRAJ44)
CAVGAGAGTASKLTF

SEQ ID NO: 656760 - protein, 12 aa, Homo sapiens
  CDR3 for beta chain variable domain of TCR clone 328380 (TRBV7-8, TRBJ2-4)
CASSLGGYIQYF

SEQ ID NO: 656761 - protein, 15 aa, Homo sapiens
  CDR3 for alpha chain variable domain of TCR clone 328381 (TRAV13-1, TRAJ44)
CAASRGGGTASNLTF

SEQ ID NO: 656762 - protein, 14 aa, Homo sapiens
  CDR3 for beta chain variable domain of TCR clone 328381 (TRBV7-2, TRBJ2-5)
CASSPRGSSETQYF

SEQ ID NO: 656763 - protein, 14 aa, Homo sapiens
  CDR3 for alpha chain variable domain of TCR clone 328382 (TRAV13-1, TRAJ44)
CAVKATGTASKLTF

SEQ ID NO: 656764 - protein, 14 aa, Homo sapiens
  CDR3 for beta chain variable domain of TCR clone 328382 (TRBV19, TRBJ2-2)
CASSTLHRSGELFF

SEQ ID NO: 656765 - protein, 14 aa, Homo sapiens
  CDR3 for alpha chain variable domain of TCR clone 328383 (TRAV13-1, TRAJ31)
CAVSSRPNNARLMF

SEQ ID NO: 656766 - protein, 15 aa, Homo sapiens
  CDR3 for beta chain variable domain of TCR clone 328383 (TRBV4-2, TRBJ2-4)
CASSPLGAAKNIQYF

SEQ ID NO: 656767 - protein, 17 aa, Homo sapiens
  CDR3 for alpha chain variable domain of TCR clone 328384 (TRAV29/DV5, TRAJ52)
CAASVNAGGTSYGKLTF

SEQ ID NO: 656768 - protein, 14 aa, Homo sapiens
  CDR3 for beta chain variable domain of TCR clone 328384 (TRBV7-8, TRBJ1-2)
CASSPDSLSYGYTF

SEQ ID NO: 656769 - protein, 15 aa, Homo sapiens
  CDR3 for alpha chain variable domain of TCR clone 328385 (TRAV21, TRAJ24)
CAARSSTDSWGKLQF

SEQ ID NO: 656770 - protein, 12 aa, Homo sapiens
  CDR3 for beta chain variable domain of TCR clone 328385 (TRBV4-1, TRBJ2-1)
CASSAGGIEQFF

SEQ ID NO: 656771 - protein, 14 aa, Homo sapiens
  CDR3 for alpha chain variable domain of TCR clone 328386 (TRAV26-1, TRAJ44)
CIVRPTSTASKLTF

SEQ ID NO: 656772 - protein, 12 aa, Homo sapiens
  CDR3 for beta chain variable domain of TCR clone 328386 (TRBV11-3, TRBJ1-1)
CASSLRDSEAFF

SEQ ID NO: 656773 - protein, 10 aa, Homo sapiens
  CDR3 for alpha chain variable domain of TCR clone 328387 (TRAV2, TRAJ34)
CAVVNDKLIF

SEQ ID NO: 656774 - protein, 14 aa, Homo sapiens
  CDR3 for beta chain variable domain of TCR clone 328387 (TRBV7-9, TRBJ2-2)
CASSGLADTGELFF

SEQ ID NO: 656775 - protein, 11 aa, Homo sapiens
  CDR3 for alpha chain variable domain of TCR clone 328388 (TRAV1-2, TRAJ10)
CFTGGGNKLAF

SEQ ID NO: 656776 - protein, 13 aa, Homo sapiens
  CDR3 for beta chain variable domain of TCR clone 328388 (TRBV5-1, TRBJ1-5)
CASSLGAGQPQHF

SEQ ID NO: 656777 - protein, 13 aa, Homo sapiens
  CDR3 for alpha chain variable domain of TCR clone 328389 (TRAV27, TRAJ56)
CAGKPGANSKRTF

SEQ ID NO: 656778 - protein, 14 aa, Homo sapiens
  CDR3 for beta chain variable domain of TCR clone 328389 (TRBV11-3, TRBJ2-1)
CASSATTSGSIQFF

SEQ ID NO: 656779 - protein, 21 aa, Homo sapiens
  CDR3 for alpha chain variable domain of TCR clone 328390 (TRAV4, TRAJ22)
CTTSSWVTSIISSGSARQLTF

SEQ ID NO: 656780 - protein, 13 aa, Homo sapiens
  CDR3 for beta chain variable domain of TCR clone 328390 (TRBV19, TRBJ1-5)
CASSEGSNQPQHF

SEQ ID NO: 656781 - protein, 13 aa, Homo sapiens
  CDR3 for alpha chain variable domain of TCR clone 328391 (TRAV8-6, TRAJ16)
CAVSRWVGQKLLF

SEQ ID NO: 656782 - protein, 15 aa, Homo sapiens
  CDR3 for beta chain variable domain of TCR clone 328391 (TRBV12-4, TRBJ2-1)
CASSLSTGVSNEQFI

SEQ ID NO: 656783 - protein, 19 aa, Homo sapiens
  CDR3 for alpha chain variable domain of TCR clone 328392 (TRAV36/DV7, TRAJ37)
CAVFSSNTGKTSLWARDNF

SEQ ID NO: 656784 - protein, 16 aa, Homo sapiens
  CDR3 for beta chain variable domain of TCR clone 328392 (TRBV3-1, TRBJ2-5)
CASSPGQFNGFGTQYF

SEQ ID NO: 656785 - protein, 11 aa, Homo sapiens
  CDR3 for alpha chain variable domain of TCR clone 328393 (TRAV12-3, TRAJ16)
LTGGDGQKLLF

SEQ ID NO: 656786 - protein, 13 aa, Homo sapiens
  CDR3 for beta chain variable domain of TCR clone 328393 (TRBV12-4, TRBJ1-4)
CASAMGHNEKLVF

SEQ ID NO: 656787 - protein, 14 aa, Homo sapiens
  CDR3 for alpha chain variable domain of TCR clone 328394 (TRAV1-2, TRAJ8)
CVVREDTGFQKLVF

SEQ ID NO: 656788 - protein, 15 aa, Homo sapiens
  CDR3 for beta chain variable domain of TCR clone 328394 (TRBV7-9, TRBJ1-6)
CASSSPGRGNSPLHF

SEQ ID NO: 656789 - protein, 15 aa, Homo sapiens
  CDR3 for alpha chain variable domain of TCR clone 328395 (TRAV23/DV6, TRAJ44)
CAAMNPTGTASKLTF

SEQ ID NO: 656790 - protein, 16 aa, Homo sapiens
  CDR3 for beta chain variable domain of TCR clone 328395 (TRBV28, TRBJ2-5)
CATSGWPSRLKETQYF

SEQ ID NO: 656791 - protein, 13 aa, Homo sapiens
  CDR3 for alpha chain variable domain of TCR clone 328396 (TRAV3, TRAJ27)
CAVRPLGAGKSTS

SEQ ID NO: 656792 - protein, 15 aa, Homo sapiens
  CDR3 for beta chain variable domain of TCR clone 328396 (TRBV9, TRBJ2-1)
CASSLAGSSYNEQFF

SEQ ID NO: 656793 - protein, 15 aa, Homo sapiens
  CDR3 for alpha chain variable domain of TCR clone 328397 (TRAV8-4, TRAJ3)
CAVTGENLVQQCFQD

SEQ ID NO: 656794 - protein, 13 aa, Homo sapiens
  CDR3 for beta chain variable domain of TCR clone 328397 (TRBV19, TRBJ1-1)
CASSPSNGGEAFF

SEQ ID NO: 656795 - protein, 14 aa, Homo sapiens
  CDR3 for alpha chain variable domain of TCR clone 328398 (TRAV17, TRAJ16)
CATADFSDGQKLLF

SEQ ID NO: 656796 - protein, 14 aa, Homo sapiens
  CDR3 for beta chain variable domain of TCR clone 328398 (TRBV27, TRBJ2-2)
CASSLGAATGELFF

SEQ ID NO: 656797 - protein, 15 aa, Homo sapiens
  CDR3 for alpha chain variable domain of TCR clone 328399 (TRAV8-3, TRAJ23)
CAVGDRYNQGGKLIF

SEQ ID NO: 656798 - protein, 11 aa, Homo sapiens
  CDR3 for beta chain variable domain of TCR clone 328399 (TRBV6-3, TRBJ2-3)
CATGQADTQYF

SEQ ID NO: 656799 - protein, 22 aa, Homo sapiens
  CDR3 for alpha chain variable domain of TCR clone 328400 (TRAV12-1, )
CVVNAPRRIPDIQNPDPAVYQL

SEQ ID NO: 656800 - protein, 13 aa, Homo sapiens
  CDR3 for beta chain variable domain of TCR clone 328400 (TRBV19, TRBJ1-2)
CASSQGQVYGYTF

SEQ ID NO: 656801 - protein, 13 aa, Homo sapiens
  CDR3 for alpha chain variable domain of TCR clone 328401 (TRAV26-2, TRAJ43)
CILRAVNNNHMRF

SEQ ID NO: 656802 - protein, 15 aa, Homo sapiens
  CDR3 for beta chain variable domain of TCR clone 328401 (TRBV7-2, TRBJ2-1)
CASTHGTGIYNEQFF

SEQ ID NO: 656803 - protein, 18 aa, Homo sapiens
  CDR3 for alpha chain variable domain of TCR clone 328402 (TRAV26-1, TRAJ23)
CIVRVGLEVWNQGGKIIL

SEQ ID NO: 656804 - protein, 15 aa, Homo sapiens
  CDR3 for beta chain variable domain of TCR clone 328402 (TRBV10-3, TRBJ2-3)
CAISDWDRDTDTQYF

SEQ ID NO: 656805 - protein, 22 aa, Homo sapiens
  CDR3 for alpha chain variable domain of TCR clone 328403 (TRAV4, )
CLVGPHNYDIQNPDPAVYQLRD

SEQ ID NO: 656806 - protein, 17 aa, Homo sapiens
  CDR3 for beta chain variable domain of TCR clone 328403 (TRBV24-1, TRBJ2-1)
CATSGVSTSGTYNEQFF

SEQ ID NO: 656807 - protein, 15 aa, Homo sapiens
  CDR3 for alpha chain variable domain of TCR clone 328404 (TRAV3, TRAJ5)
CAVRDLDTGRRALTF

SEQ ID NO: 656808 - protein, 13 aa, Homo sapiens
  CDR3 for beta chain variable domain of TCR clone 328404 (TRBV12-4, TRBJ2-7)
CASSPTEAYEQCF

SEQ ID NO: 656809 - protein, 12 aa, Homo sapiens
  CDR3 for alpha chain variable domain of TCR clone 328405 (TRAV21, TRAJ31)
CVLAGNNARRMF

SEQ ID NO: 656810 - protein, 16 aa, Homo sapiens
  CDR3 for beta chain variable domain of TCR clone 328405 (TRBV27, TRBJ2-5)
CASSFGPGGTKETQYF

SEQ ID NO: 656811 - protein, 13 aa, Homo sapiens
  CDR3 for alpha chain variable domain of TCR clone 328406 (TRAV8-6, TRAJ9)
CAVWATGGFKTIF

SEQ ID NO: 656812 - protein, 12 aa, Homo sapiens
  CDR3 for beta chain variable domain of TCR clone 328406 (TRBV14, TRBJ1-1)
CASSQLKGLAFF

SEQ ID NO: 656813 - protein, 14 aa, Homo sapiens
  CDR3 for alpha chain variable domain of TCR clone 328407 (TRAV1-1, TRAJ27)
CAVIYNTNAGKSTF

SEQ ID NO: 656814 - protein, 14 aa, Homo sapiens
  CDR3 for beta chain variable domain of TCR clone 328407 (TRBV13, TRBJ2-7)
CASSLKGASYEQYF

SEQ ID NO: 656815 - protein, 14 aa, Homo sapiens
  CDR3 for alpha chain variable domain of TCR clone 328408 (TRAV36/DV7, TRAJ48)
YAQRRDFGNEKLTF

SEQ ID NO: 656816 - protein, 14 aa, Homo sapiens
  CDR3 for beta chain variable domain of TCR clone 328408 (TRBV28, TRBJ2-4)
CASTQVTGVNIQYF

SEQ ID NO: 656817 - protein, 15 aa, Homo sapiens
  CDR3 for alpha chain variable domain of TCR clone 328409 (TRAV26-1, TRAJ40)
CIVRAVTSGTYKYIF

SEQ ID NO: 656818 - protein, 14 aa, Homo sapiens
  CDR3 for beta chain variable domain of TCR clone 328409 (TRBV19, TRBJ2-1)
CASKDPGLANEQFF

SEQ ID NO: 656819 - protein, 11 aa, Homo sapiens
  CDR3 for alpha chain variable domain of TCR clone 328410 (TRAV1-2, TRAJ11)
CAVRGYSTLTF

SEQ ID NO: 656820 - protein, 13 aa, Homo sapiens
  CDR3 for beta chain variable domain of TCR clone 328410 (TRBV20-1, TRBJ1-1)
CSARGGGNTEAFF

SEQ ID NO: 656821 - protein, 13 aa, Homo sapiens
  CDR3 for alpha chain variable domain of TCR clone 328411 (TRAV12-2, TRAJ52)
CNAGGTSYGKLTF

SEQ ID NO: 656822 - protein, 13 aa, Homo sapiens
  CDR3 for beta chain variable domain of TCR clone 328411 (TRBV4-1, TRBJ2-1)
CASSQEVQYEQFF

SEQ ID NO: 656823 - protein, 11 aa, Homo sapiens
  CDR3 for alpha chain variable domain of TCR clone 328412 (TRAV17, TRAJ49)
CTTDAGNQFYF

SEQ ID NO: 656824 - protein, 16 aa, Homo sapiens
  CDR3 for beta chain variable domain of TCR clone 328412 (TRBV7-2, TRBJ1-2)
CASSPTSGTSLGGYTF

SEQ ID NO: 656825 - protein, 14 aa, Homo sapiens
  CDR3 for alpha chain variable domain of TCR clone 328413 (TRAV8-4, TRAJ43)
CAVSDPRNNNDMRF

SEQ ID NO: 656826 - protein, 14 aa, Homo sapiens
  CDR3 for beta chain variable domain of TCR clone 328413 (TRBV4-2, TRBJ2-1)
CASGLDRAYNEQFF

SEQ ID NO: 656827 - protein, 13 aa, Homo sapiens
  CDR3 for alpha chain variable domain of TCR clone 328414 (TRAV13-1, TRAJ39)
CAASLVMQATCSP

SEQ ID NO: 656828 - protein, 16 aa, Homo sapiens
  CDR3 for beta chain variable domain of TCR clone 328414 (TRBV20-1, TRBJ1-4)
CSAPGQGLLTNEKLFF

SEQ ID NO: 656829 - protein, 15 aa, Homo sapiens
  CDR3 for alpha chain variable domain of TCR clone 328415 (TRAV8-6, TRAJ10)
CAVSDQAGGGNKLTF

SEQ ID NO: 656830 - protein, 12 aa, Homo sapiens
  CDR3 for beta chain variable domain of TCR clone 328415 (TRBV11-2, TRBJ2-2)
CASSLGGGELFL

SEQ ID NO: 656831 - protein, 16 aa, Homo sapiens
  CDR3 for alpha chain variable domain of TCR clone 328416 (TRAV12-3, TRAJ53)
CAMSPGSGGSNYKLTF

SEQ ID NO: 656832 - protein, 17 aa, Homo sapiens
  CDR3 for beta chain variable domain of TCR clone 328416 (TRBV12-4, TRBJ1-1)
CASSLSGFRTMNTEAFF

SEQ ID NO: 656833 - protein, 12 aa, Homo sapiens
  CDR3 for alpha chain variable domain of TCR clone 328417 (TRAV12-3, TRAJ17)
CAMTLTGNKLTF

SEQ ID NO: 656834 - protein, 14 aa, Homo sapiens
  CDR3 for beta chain variable domain of TCR clone 328417 (TRBV5-4, TRBJ2-5)
CASSFSGGQETQYF

SEQ ID NO: 656835 - protein, 13 aa, Homo sapiens
  CDR3 for alpha chain variable domain of TCR clone 328418 (TRAV21, TRAJ10)
CAVPTGGGNKLTF

SEQ ID NO: 656836 - protein, 22 aa, Homo sapiens
  CDR3 for beta chain variable domain of TCR clone 328418 (TRBV19, TRBJ2-1)
CASSVRDRVTGTRGRIYNEQFF

SEQ ID NO: 656837 - protein, 12 aa, Homo sapiens
  CDR3 for alpha chain variable domain of TCR clone 328419 (TRAV9-2, TRAJ26)
CALRGYGENFVF

SEQ ID NO: 656838 - protein, 12 aa, Homo sapiens
  CDR3 for beta chain variable domain of TCR clone 328419 (TRBV29-1, TRBJ2-3)
CSVTGGADTQYF

SEQ ID NO: 656839 - protein, 11 aa, Homo sapiens
  CDR3 for alpha chain variable domain of TCR clone 328420 (TRAV12-3, TRAJ49)
CAANTGNQFYF

SEQ ID NO: 656840 - protein, 16 aa, Homo sapiens
  CDR3 for beta chain variable domain of TCR clone 328420 (TRBV7-9, TRBJ2-3)
CASSPWREAGTDTQYF

SEQ ID NO: 656841 - protein, 13 aa, Homo sapiens
  CDR3 for alpha chain variable domain of TCR clone 328421 (TRAV8-3, TRAJ43)
CAVGPDNNNYMRF

SEQ ID NO: 656842 - protein, 19 aa, Homo sapiens
  CDR3 for beta chain variable domain of TCR clone 328421 (TRBV7-2, TRBJ2-3)
CASSFLARNWGGGTDTQYF

SEQ ID NO: 656843 - protein, 15 aa, Homo sapiens
  CDR3 for alpha chain variable domain of TCR clone 328422 (TRAV2, TRAJ24)
CAVVRLKNSLGKLQF

SEQ ID NO: 656844 - protein, 16 aa, Homo sapiens
  CDR3 for beta chain variable domain of TCR clone 328422 (TRBV7-7, TRBJ2-3)
CASSPGTSGSTDTQYF

SEQ ID NO: 656845 - protein, 13 aa, Homo sapiens
  CDR3 for alpha chain variable domain of TCR clone 328423 (TRAV8-6, TRAJ9)
CAVWDTGVFKTIF

SEQ ID NO: 656846 - protein, 14 aa, Homo sapiens
  CDR3 for beta chain variable domain of TCR clone 328423 (TRBV2, TRBJ2-1)
CASSEALIYNEQFF

SEQ ID NO: 656847 - protein, 15 aa, Homo sapiens
  CDR3 for alpha chain variable domain of TCR clone 328424 (TRAV23/DV6, TRAJ45)
CAASSAGGGADGLTF

SEQ ID NO: 656848 - protein, 12 aa, Homo sapiens
  CDR3 for beta chain variable domain of TCR clone 328424 (TRBV27, TRBJ2-1)
CASSLSQGKQFF

SEQ ID NO: 656849 - protein, 14 aa, Homo sapiens
  CDR3 for alpha chain variable domain of TCR clone 328425 (TRAV12-3, TRAJ10)
SHLPLTGGGNKLTF

SEQ ID NO: 656850 - protein, 14 aa, Homo sapiens
  CDR3 for beta chain variable domain of TCR clone 328425 (TRBV9, TRBJ2-5)
CASSVVPYQETQYF

SEQ ID NO: 656851 - protein, 13 aa, Homo sapiens
  CDR3 for alpha chain variable domain of TCR clone 328426 (TRAV8-3, TRAJ36)
CAVGATGANNLFF

SEQ ID NO: 656852 - protein, 15 aa, Homo sapiens
  CDR3 for beta chain variable domain of TCR clone 328426 (TRBV19, TRBJ2-1)
CASSYSGSPYNEQFF

SEQ ID NO: 656853 - protein, 16 aa, Homo sapiens
  CDR3 for alpha chain variable domain of TCR clone 328427 (TRAV30, TRAJ24)
CGTEIVDADSLGKFQF

SEQ ID NO: 656854 - protein, 17 aa, Homo sapiens
  CDR3 for beta chain variable domain of TCR clone 328427 (TRBV20-1, TRBJ2-2)
CSASGSGQGGLTGELFF

SEQ ID NO: 656855 - protein, 16 aa, Homo sapiens
  CDR3 for alpha chain variable domain of TCR clone 328428 (TRAV13-1, TRAJ48)
CAASIFGNFGNEKLTF

SEQ ID NO: 656856 - protein, 15 aa, Homo sapiens
  CDR3 for beta chain variable domain of TCR clone 328428 (TRBV11-2, TRBJ2-1)
CASSLTSGGYNEQFF

SEQ ID NO: 656857 - protein, 13 aa, Homo sapiens
  CDR3 for alpha chain variable domain of TCR clone 328429 (TRAV13-1, TRAJ6)
CAASSGGSYIPTS

SEQ ID NO: 656858 - protein, 15 aa, Homo sapiens
  CDR3 for beta chain variable domain of TCR clone 328429 (TRBV12-4, TRBJ2-5)
CVSSPPTGLQETQYF

SEQ ID NO: 656859 - protein, 15 aa, Homo sapiens
  CDR3 for alpha chain variable domain of TCR clone 328430 (TRAV12-3, TRAJ11)
CAMSEENSGYSTLTF

SEQ ID NO: 656860 - protein, 14 aa, Homo sapiens
  CDR3 for beta chain variable domain of TCR clone 328430 (TRBV18, TRBJ2-5)
CASSPGVSKETQYF

SEQ ID NO: 656861 - protein, 11 aa, Homo sapiens
  CDR3 for alpha chain variable domain of TCR clone 328431 (TRAV12-3, TRAJ27)
CAMANAGKSTF

SEQ ID NO: 656862 - protein, 13 aa, Homo sapiens
  CDR3 for beta chain variable domain of TCR clone 328431 (TRBV20-1, TRBJ1-1)
CSARVGGYTEAFS

SEQ ID NO: 656863 - protein, 16 aa, Homo sapiens
  CDR3 for alpha chain variable domain of TCR clone 328432 (TRAV21, TRAJ37)
CAVRTAGSSNTGKLIF

SEQ ID NO: 656864 - protein, 13 aa, Homo sapiens
  CDR3 for beta chain variable domain of TCR clone 328432 (TRBV7-9, TRBJ2-5)
CASLPSGRATQYF

SEQ ID NO: 656865 - protein, 11 aa, Homo sapiens
  CDR3 for alpha chain variable domain of TCR clone 328433 (TRAV3, TRAJ21)
CAVGNFNKFYF

SEQ ID NO: 656866 - protein, 17 aa, Homo sapiens
  CDR3 for beta chain variable domain of TCR clone 328433 (TRBV24-1, TRBJ2-1)
CATSDVSTSGTYKEQFF

SEQ ID NO: 656867 - protein, 14 aa, Homo sapiens
  CDR3 for alpha chain variable domain of TCR clone 328434 (TRAV12-2, TRAJ40)
CAVKIPSGTYKYIF

SEQ ID NO: 656868 - protein, 13 aa, Homo sapiens
  CDR3 for beta chain variable domain of TCR clone 328434 (TRBV20-1, TRBJ1-3)
CSARVQGRDAMYF

SEQ ID NO: 656869 - protein, 13 aa, Homo sapiens
  CDR3 for alpha chain variable domain of TCR clone 328435 (TRAV2, TRAJ15)
CAVASQAGTALIF

SEQ ID NO: 656870 - protein, 17 aa, Homo sapiens
  CDR3 for beta chain variable domain of TCR clone 328435 (TRBV4-1, TRBJ2-7)
CASSRDPLGVRGGEQYF

SEQ ID NO: 656871 - protein, 11 aa, Homo sapiens
  CDR3 for alpha chain variable domain of TCR clone 328436 (TRAV21, TRAJ39)
LLVNAGNMLTF

SEQ ID NO: 656872 - protein, 12 aa, Homo sapiens
  CDR3 for beta chain variable domain of TCR clone 328436 (TRBV7-9, TRBJ1-1)
CASSLEGTEAFF

SEQ ID NO: 656873 - protein, 15 aa, Homo sapiens
  CDR3 for alpha chain variable domain of TCR clone 328437 (TRAV13-1, TRAJ44)
CAASRNTGTASKLNF

SEQ ID NO: 656874 - protein, 14 aa, Homo sapiens
  CDR3 for beta chain variable domain of TCR clone 328437 (TRBV2, TRBJ2-7)
CASSLTSGGYEQYF

SEQ ID NO: 656875 - protein, 14 aa, Homo sapiens
  CDR3 for alpha chain variable domain of TCR clone 328438 (TRAV12-1, TRAJ17)
CVVNYKAAGNKLTF

SEQ ID NO: 656876 - protein, 17 aa, Homo sapiens
  CDR3 for beta chain variable domain of TCR clone 328438 (TRBV4-1, TRBJ1-4)
CASSQEGPRGVEEKLFF

SEQ ID NO: 656877 - protein, 13 aa, Homo sapiens
  CDR3 for alpha chain variable domain of TCR clone 328439 (TRAV21, TRAJ27)
RAARPGNAGKSTF

SEQ ID NO: 656878 - protein, 15 aa, Homo sapiens
  CDR3 for beta chain variable domain of TCR clone 328439 (TRBV20-1, TRBJ2-7)
CSARDRVSGMDEQYF

SEQ ID NO: 656879 - protein, 10 aa, Homo sapiens
  CDR3 for alpha chain variable domain of TCR clone 328440 (TRAV5, TRAJ34)
CAEDTDKLIF

SEQ ID NO: 656880 - protein, 11 aa, Homo sapiens
  CDR3 for beta chain variable domain of TCR clone 328440 (TRBV11-2, TRBJ2-2)
CSSLGGGELFF

SEQ ID NO: 656881 - protein, 12 aa, Homo sapiens
  CDR3 for alpha chain variable domain of TCR clone 328441 (TRAV12-2, TRAJ10)
WGVTGGGNKLTF

SEQ ID NO: 656882 - protein, 15 aa, Homo sapiens
  CDR3 for beta chain variable domain of TCR clone 328441 (TRBV27, TRBJ2-1)
CVSSNGGGSSNEQFF

SEQ ID NO: 656883 - protein, 12 aa, Homo sapiens
  CDR3 for alpha chain variable domain of TCR clone 328442 (TRAV12-3, TRAJ40)
CAMTSGTYKYLF

SEQ ID NO: 656884 - protein, 15 aa, Homo sapiens
  CDR3 for beta chain variable domain of TCR clone 328442 (TRBV7-3, TRBJ2-2)
CASSLTGQGTGELFF

SEQ ID NO: 656885 - protein, 13 aa, Homo sapiens
  CDR3 for alpha chain variable domain of TCR clone 328443 (TRAV21, TRAJ27)
CAARPGNAGKSTF

SEQ ID NO: 656886 - protein, 16 aa, Homo sapiens
  CDR3 for beta chain variable domain of TCR clone 328443 (TRBV20-1, TRBJ1-2)
CSASMGQGVANYGHTF

SEQ ID NO: 656887 - protein, 15 aa, Homo sapiens
  CDR3 for alpha chain variable domain of TCR clone 328444 (TRAV21, TRAJ52)
CATRGGGTSYGKLTF

SEQ ID NO: 656888 - protein, 14 aa, Homo sapiens
  CDR3 for beta chain variable domain of TCR clone 328444 (TRBV28, TRBJ2-3)
CAISSAPSTDTQYF

SEQ ID NO: 656889 - protein, 14 aa, Homo sapiens
  CDR3 for alpha chain variable domain of TCR clone 328445 (TRAV8-6, TRAJ39)
CAVSERDAGNMLTF

SEQ ID NO: 656890 - protein, 12 aa, Homo sapiens
  CDR3 for beta chain variable domain of TCR clone 328445 (TRBV18, TRBJ2-1)
CASSPGTSEGFF

SEQ ID NO: 656891 - protein, 21 aa, Homo sapiens
  CDR3 for alpha chain variable domain of TCR clone 328446 (TRAV26-1, TRAJ17)
CCVLLHRQSSGSKAAGNKLTF

SEQ ID NO: 656892 - protein, 20 aa, Homo sapiens
  CDR3 for beta chain variable domain of TCR clone 328446 (TRBV28, TRBJ2-1)
CASTPIGRSPGLAGGNEQFF

SEQ ID NO: 656893 - protein, 15 aa, Homo sapiens
  CDR3 for alpha chain variable domain of TCR clone 328447 (TRAV1-2, TRAJ18)
CAWEGRGPTLGRLYF

SEQ ID NO: 656894 - protein, 14 aa, Homo sapiens
  CDR3 for beta chain variable domain of TCR clone 328447 (TRBV4-3, TRBJ2-7)
CASSQDVAGGEQYF

SEQ ID NO: 656895 - protein, 12 aa, Homo sapiens
  CDR3 for alpha chain variable domain of TCR clone 328448 (TRAV27, TRAJ21)
CAGVRQLQQILV

SEQ ID NO: 656896 - protein, 14 aa, Homo sapiens
  CDR3 for beta chain variable domain of TCR clone 328448 (TRBV7-9, TRBJ1-4)
CASSLEGQSEKLFF

SEQ ID NO: 656897 - protein, 13 aa, Homo sapiens
  CDR3 for alpha chain variable domain of TCR clone 328449 (TRAV12-1, TRAJ22)
CVASVGSARQLTF

SEQ ID NO: 656898 - protein, 12 aa, Homo sapiens
  CDR3 for beta chain variable domain of TCR clone 328449 (TRBV29-1, TRBJ2-3)
CSVTGGADTQYF

SEQ ID NO: 656899 - protein, 13 aa, Homo sapiens
  CDR3 for alpha chain variable domain of TCR clone 328450 (TRAV29/DV5, TRAJ33)
CAASVESNYQLIW

SEQ ID NO: 656900 - protein, 15 aa, Homo sapiens
  CDR3 for beta chain variable domain of TCR clone 328450 (TRBV18, TRBJ1-1)
CASSARGTGDTEAFF

SEQ ID NO: 656901 - protein, 14 aa, Homo sapiens
  CDR3 for alpha chain variable domain of TCR clone 328451 (TRAV13-2, TRAJ11)
CAETGNSGYSTLTF

SEQ ID NO: 656902 - protein, 11 aa, Homo sapiens
  CDR3 for beta chain variable domain of TCR clone 328451 (TRBV10-3, TRBJ2-7)
CAISEGIEQYF

SEQ ID NO: 656903 - protein, 13 aa, Homo sapiens
  CDR3 for alpha chain variable domain of TCR clone 328452 (TRAV21, TRAJ27)
CAARPGNAGKSTF

SEQ ID NO: 656904 - protein, 14 aa, Homo sapiens
  CDR3 for beta chain variable domain of TCR clone 328452 (TRBV7-6, TRBJ2-3)
CAGSLGTGTDTQYF

SEQ ID NO: 656905 - protein, 14 aa, Homo sapiens
  CDR3 for alpha chain variable domain of TCR clone 328453 (TRAV3, TRAJ9)
CAVRGNTGGLKTIF

SEQ ID NO: 656906 - protein, 14 aa, Homo sapiens
  CDR3 for beta chain variable domain of TCR clone 328453 (TRBV15, TRBJ2-1)
CATSGVEDYNEQFF

SEQ ID NO: 656907 - protein, 11 aa, Homo sapiens
  CDR3 for alpha chain variable domain of TCR clone 328454 (TRAV2, TRAJ33)
CAVESNYQLIW

SEQ ID NO: 656908 - protein, 17 aa, Homo sapiens
  CDR3 for beta chain variable domain of TCR clone 328454 (TRBV18, TRBJ2-1)
CASSPRVAGGSYNEQFF

SEQ ID NO: 656909 - protein, 12 aa, Homo sapiens
  CDR3 for alpha chain variable domain of TCR clone 328455 (TRAV29/DV5, TRAJ49)
CAATDTGNQFYF

SEQ ID NO: 656910 - protein, 15 aa, Homo sapiens
  CDR3 for beta chain variable domain of TCR clone 328455 (TRBV20-1, TRBJ1-5)
CSAREVGYSNQPQHF

SEQ ID NO: 656911 - protein, 12 aa, Homo sapiens
  CDR3 for alpha chain variable domain of TCR clone 328456 (TRAV1-1, TRAJ43)
CAPRVSSNDMRF

SEQ ID NO: 656912 - protein, 15 aa, Homo sapiens
  CDR3 for beta chain variable domain of TCR clone 328456 (TRBV5-1, TRBJ2-7)
FASSLGDFTTYEQYF

SEQ ID NO: 656913 - protein, 16 aa, Homo sapiens
  CDR3 for alpha chain variable domain of TCR clone 328457 (TRAV30, TRAJ24)
CGTELVDADSWGKFQF

SEQ ID NO: 656914 - protein, 13 aa, Homo sapiens
  CDR3 for beta chain variable domain of TCR clone 328457 (TRBV6-1, TRBJ2-2)
CANSGHNTGELFF

SEQ ID NO: 656915 - protein, 14 aa, Homo sapiens
  CDR3 for alpha chain variable domain of TCR clone 328458 (TRAV27, TRAJ23)
CAGLSYNQGGKLIF

SEQ ID NO: 656916 - protein, 15 aa, Homo sapiens
  CDR3 for beta chain variable domain of TCR clone 328458 (TRBV19, TRBJ2-2)
CASSLNRGVTRELFF

SEQ ID NO: 656917 - protein, 17 aa, Homo sapiens
  CDR3 for alpha chain variable domain of TCR clone 328459 (TRAV3, TRAJ42)
CAVRDRDYGGSQGNLIF

SEQ ID NO: 656918 - protein, 14 aa, Homo sapiens
  CDR3 for beta chain variable domain of TCR clone 328459 (TRBV7-2, TRBJ2-1)
CASSPRGSSETQYF

SEQ ID NO: 656919 - protein, 13 aa, Homo sapiens
  CDR3 for alpha chain variable domain of TCR clone 328460 (TRAV13-1, TRAJ5)
CAARLTGRRALTF

SEQ ID NO: 656920 - protein, 15 aa, Homo sapiens
  CDR3 for beta chain variable domain of TCR clone 328460 (TRBV7-9, TRBJ2-7)
CASSPGGGVTYEQYF

SEQ ID NO: 656921 - protein, 13 aa, Homo sapiens
  CDR3 for alpha chain variable domain of TCR clone 328461 (TRAV25, TRAJ10)
CAGRTGGGNKLTF

SEQ ID NO: 656922 - protein, 15 aa, Homo sapiens
  CDR3 for beta chain variable domain of TCR clone 328461 (TRBV20-1, TRBJ1-1)
CSASRGATGNTEAFF

SEQ ID NO: 656923 - protein, 14 aa, Homo sapiens
  CDR3 for alpha chain variable domain of TCR clone 328462 (TRAV29/DV5, TRAJ36)
CAPRRKTGANNLFF

SEQ ID NO: 656924 - protein, 13 aa, Homo sapiens
  CDR3 for beta chain variable domain of TCR clone 328462 (TRBV11-2, TRBJ2-5)
CASSSTGEETQYF

SEQ ID NO: 656925 - protein, 14 aa, Homo sapiens
  CDR3 for alpha chain variable domain of TCR clone 328463 (TRAV1-2, TRAJ16)
CAVTGFQMASSCSL

SEQ ID NO: 656926 - protein, 13 aa, Homo sapiens
  CDR3 for beta chain variable domain of TCR clone 328463 (TRBV4-1, TRBJ2-1)
CASSQAGGDEQFF

SEQ ID NO: 656927 - protein, 15 aa, Homo sapiens
  CDR3 for alpha chain variable domain of TCR clone 328464 (TRAV17, TRAJ56)
CATDAHTGANSKLTF

SEQ ID NO: 656928 - protein, 12 aa, Homo sapiens
  CDR3 for beta chain variable domain of TCR clone 328464 (TRBV7-8, TRBJ2-7)
CASSLGDREQSF

SEQ ID NO: 656929 - protein, 11 aa, Homo sapiens
  CDR3 for alpha chain variable domain of TCR clone 328465 (TRAV2, TRAJ13)
CASGGYQKVTF

SEQ ID NO: 656930 - protein, 14 aa, Homo sapiens
  CDR3 for beta chain variable domain of TCR clone 328465 (TRBV18, TRBJ1-2)
YASSPDRVVYGYTF

SEQ ID NO: 656931 - protein, 14 aa, Homo sapiens
  CDR3 for alpha chain variable domain of TCR clone 328466 (TRAV2, TRAJ22)
CAVGRGGSARQLTF

SEQ ID NO: 656932 - protein, 14 aa, Homo sapiens
  CDR3 for beta chain variable domain of TCR clone 328466 (TRBV7-2, TRBJ1-1)
CASSFLTGTTEAFF

SEQ ID NO: 656933 - protein, 14 aa, Homo sapiens
  CDR3 for alpha chain variable domain of TCR clone 328467 (TRAV20, TRAJ10)
CAVRVEGGGDKLTL

SEQ ID NO: 656934 - protein, 18 aa, Homo sapiens
  CDR3 for beta chain variable domain of TCR clone 328467 (TRBV24-1, TRBJ2-1)
CATSDLMFLGRGVHEQFF

SEQ ID NO: 656935 - protein, 16 aa, Homo sapiens
  CDR3 for alpha chain variable domain of TCR clone 328468 (TRAV30, TRAJ24)
CGTEIVDADSWGKCQF

SEQ ID NO: 656936 - protein, 18 aa, Homo sapiens
  CDR3 for beta chain variable domain of TCR clone 328468 (TRBV11-2, TRBJ2-6)
CASSLNPFLGTGANVLTF

SEQ ID NO: 656937 - protein, 14 aa, Homo sapiens
  CDR3 for alpha chain variable domain of TCR clone 328469 (TRAV35, TRAJ33)
CAGSSQDSNYQLIW

SEQ ID NO: 656938 - protein, 15 aa, Homo sapiens
  CDR3 for beta chain variable domain of TCR clone 328469 (TRBV20-1, TRBJ2-7)
CSPESGTSGAYEQYF

SEQ ID NO: 656939 - protein, 14 aa, Homo sapiens
  CDR3 for alpha chain variable domain of TCR clone 328470 (TRAV16, TRAJ31)
CALSGRNNNARIMF

SEQ ID NO: 656940 - protein, 12 aa, Homo sapiens
  CDR3 for beta chain variable domain of TCR clone 328470 (TRBV11-2, TRBJ1-2)
CASSREGDGYTF

SEQ ID NO: 656941 - protein, 14 aa, Homo sapiens
  CDR3 for alpha chain variable domain of TCR clone 328471 (TRAV12-3, TRAJ10)
SHLPLTGGGNKLTF

SEQ ID NO: 656942 - protein, 15 aa, Homo sapiens
  CDR3 for beta chain variable domain of TCR clone 328471 (TRBV7-6, TRBJ1-2)
CASSSGGRGGYGYTF

SEQ ID NO: 656943 - protein, 15 aa, Homo sapiens
  CDR3 for alpha chain variable domain of TCR clone 328472 (TRAV26-1, TRAJ44)
CIVRANTGTASNLTF

SEQ ID NO: 656944 - protein, 13 aa, Homo sapiens
  CDR3 for beta chain variable domain of TCR clone 328472 (TRBV12-5, TRBJ2-3)
CASGDRQSDTQYF

SEQ ID NO: 656945 - protein, 15 aa, Homo sapiens
  CDR3 for alpha chain variable domain of TCR clone 328473 (TRAV17, TRAJ56)
CATDANTGANSKLTF

SEQ ID NO: 656946 - protein, 16 aa, Homo sapiens
  CDR3 for beta chain variable domain of TCR clone 328473 (TRBV7-6, TRBJ2-1)
CASSAPGPSSYNEQFF

SEQ ID NO: 656947 - protein, 15 aa, Homo sapiens
  CDR3 for alpha chain variable domain of TCR clone 328474 (TRAV3, TRAJ3)
CAVRDRDSSASKIIF

SEQ ID NO: 656948 - protein, 18 aa, Homo sapiens
  CDR3 for beta chain variable domain of TCR clone 328474 (TRBV25-1, TRBJ1-2)
CASSGLQNGQCLIFGYTF

SEQ ID NO: 656949 - protein, 14 aa, Homo sapiens
  CDR3 for alpha chain variable domain of TCR clone 328475 (TRAV12-3, TRAJ10)
SHLPLTGGGNKLTF

SEQ ID NO: 656950 - protein, 11 aa, Homo sapiens
  CDR3 for beta chain variable domain of TCR clone 328475 (TRBV19, TRBJ1-1)
CASSIGSEAFS

SEQ ID NO: 656951 - protein, 14 aa, Homo sapiens
  CDR3 for alpha chain variable domain of TCR clone 328476 (TRAV12-2, TRAJ44)
WAVNKAGTASKLTF

SEQ ID NO: 656952 - protein, 12 aa, Homo sapiens
  CDR3 for beta chain variable domain of TCR clone 328476 (TRBV19, TRBJ1-4)
CASKDWPGGLFF

SEQ ID NO: 656953 - protein, 16 aa, Homo sapiens
  CDR3 for alpha chain variable domain of TCR clone 328477 (TRAV21, TRAJ52)
CAVTNACGTSYGKLTF

SEQ ID NO: 656954 - protein, 13 aa, Homo sapiens
  CDR3 for beta chain variable domain of TCR clone 328477 (TRBV20-1, TRBJ2-3)
CSARLAGTDTQYF

SEQ ID NO: 656955 - protein, 17 aa, Homo sapiens
  CDR3 for alpha chain variable domain of TCR clone 328478 (TRAV13-1, TRAJ52)
CAASSGAGGTSYGKLTF

SEQ ID NO: 656956 - protein, 15 aa, Homo sapiens
  CDR3 for beta chain variable domain of TCR clone 328478 (TRBV3-1, TRBJ2-5)
CASSQEVRLEETQYF

SEQ ID NO: 656957 - protein, 12 aa, Homo sapiens
  CDR3 for alpha chain variable domain of TCR clone 328479 (TRAV21, TRAJ13)
PGPSGGYQKLTF

SEQ ID NO: 656958 - protein, 13 aa, Homo sapiens
  CDR3 for beta chain variable domain of TCR clone 328479 (TRBV7-9, TRBJ1-2)
CASSLKQNYGYTF

SEQ ID NO: 656959 - protein, 12 aa, Homo sapiens
  CDR3 for alpha chain variable domain of TCR clone 328480 (TRAV12-3, TRAJ17)
CAMTLTGDKPTF

SEQ ID NO: 656960 - protein, 15 aa, Homo sapiens
  CDR3 for beta chain variable domain of TCR clone 328480 (TRBV20-1, TRBJ2-7)
CSARDRVSGMDEQYF

SEQ ID NO: 656961 - protein, 11 aa, Homo sapiens
  CDR3 for alpha chain variable domain of TCR clone 328481 (TRAV21, TRAJ33)
CAVLSNYQLIW

SEQ ID NO: 656962 - protein, 15 aa, Homo sapiens
  CDR3 for beta chain variable domain of TCR clone 328481 (TRBV11-2, TRBJ2-7)
CASSLRVGGSYEQYF

SEQ ID NO: 656963 - protein, 11 aa, Homo sapiens
  CDR3 for alpha chain variable domain of TCR clone 328482 (TRAV12-2, TRAJ29)
CAVTLRSPLVF

SEQ ID NO: 656964 - protein, 16 aa, Homo sapiens
  CDR3 for beta chain variable domain of TCR clone 328482 (TRBV19, TRBJ1-5)
CASSIDRGGPRQPHHF

SEQ ID NO: 656965 - protein, 14 aa, Homo sapiens
  CDR3 for alpha chain variable domain of TCR clone 328483 (TRAV12-2, TRAJ24)
CAVTPADSWGKLQF

SEQ ID NO: 656966 - protein, 13 aa, Homo sapiens
  CDR3 for beta chain variable domain of TCR clone 328483 (TRBV11-2, TRBJ2-5)
CASSRGPSETQYF

SEQ ID NO: 656967 - protein, 16 aa, Homo sapiens
  CDR3 for alpha chain variable domain of TCR clone 328484 (TRAV3, TRAJ37)
CAVRPHGSGNPGKLLF

SEQ ID NO: 656968 - protein, 16 aa, Homo sapiens
  CDR3 for beta chain variable domain of TCR clone 328484 (TRBV9, TRBJ1-2)
CASSVEEKVSPYGYTF

SEQ ID NO: 656969 - protein, 12 aa, Homo sapiens
  CDR3 for alpha chain variable domain of TCR clone 328485 (TRAV13-1, TRAJ21)
CAAKEGFNKFYF

SEQ ID NO: 656970 - protein, 16 aa, Homo sapiens
  CDR3 for beta chain variable domain of TCR clone 328485 (TRBV7-2, TRBJ2-3)
CASSLVALYSTDTQYF

SEQ ID NO: 656971 - protein, 10 aa, Homo sapiens
  CDR3 for alpha chain variable domain of TCR clone 328486 (TRAV13-1, TRAJ8)
CAAPFQKLVF

SEQ ID NO: 656972 - protein, 14 aa, Homo sapiens
  CDR3 for beta chain variable domain of TCR clone 328486 (TRBV18, TRBJ2-5)
CASSHGVSQETQYF

SEQ ID NO: 656973 - protein, 13 aa, Homo sapiens
  CDR3 for alpha chain variable domain of TCR clone 328487 (TRAV12-2, TRAJ10)
CAVPTGGGDKLTF

SEQ ID NO: 656974 - protein, 11 aa, Homo sapiens
  CDR3 for beta chain variable domain of TCR clone 328487 (TRBV6-1, TRBJ2-1)
CASISSNEQFF

SEQ ID NO: 656975 - protein, 11 aa, Homo sapiens
  CDR3 for alpha chain variable domain of TCR clone 328488 (TRAV13-1, TRAJ39)
CASHAGNMLTF

SEQ ID NO: 656976 - protein, 12 aa, Homo sapiens
  CDR3 for beta chain variable domain of TCR clone 328488 (TRBV5-1, TRBJ2-7)
CASSLDSYEQYF

SEQ ID NO: 656977 - protein, 14 aa, Homo sapiens
  CDR3 for alpha chain variable domain of TCR clone 328489 (TRAV26-1, TRAJ44)
CIVRPTGTASKLTF

SEQ ID NO: 656978 - protein, 13 aa, Homo sapiens
  CDR3 for beta chain variable domain of TCR clone 328489 (TRBV7-9, TRBJ1-2)
CASSLKQNYGDTF

SEQ ID NO: 656979 - protein, 13 aa, Homo sapiens
  CDR3 for alpha chain variable domain of TCR clone 328490 (TRAV21, TRAJ27)
CAARPGNAGKSTF

SEQ ID NO: 656980 - protein, 12 aa, Homo sapiens
  CDR3 for beta chain variable domain of TCR clone 328490 (TRBV7-9, TRBJ1-1)
CASSPSSTEAFF

SEQ ID NO: 656981 - protein, 13 aa, Homo sapiens
  CDR3 for alpha chain variable domain of TCR clone 328491 (TRAV1-2, TRAJ9)
CAALNTGGFKTIF

SEQ ID NO: 656982 - protein, 14 aa, Homo sapiens
  CDR3 for beta chain variable domain of TCR clone 328491 (TRBV20-1, TRBJ2-2)
SAVLVPRAPGSCFF

SEQ ID NO: 656983 - protein, 15 aa, Homo sapiens
  CDR3 for alpha chain variable domain of TCR clone 328492 (TRAV21, TRAJ53)
CATLNIVGSNYKLTF

SEQ ID NO: 656984 - protein, 14 aa, Homo sapiens
  CDR3 for beta chain variable domain of TCR clone 328492 (TRBV12-5, TRBJ2-5)
CASGSRTHQETQYF

SEQ ID NO: 656985 - protein, 17 aa, Homo sapiens
  CDR3 for alpha chain variable domain of TCR clone 328493 (TRAV3, TRAJ28)
CAVREAYSGAGSYQLTF

SEQ ID NO: 656986 - protein, 18 aa, Homo sapiens
  CDR3 for beta chain variable domain of TCR clone 328493 (TRBV27, TRBJ2-1)
CASGNRAVGVGSKNEQYF

SEQ ID NO: 656987 - protein, 12 aa, Homo sapiens
  CDR3 for alpha chain variable domain of TCR clone 328494 (TRAV2, TRAJ9)
CAVGAGGFKTIF

SEQ ID NO: 656988 - protein, 14 aa, Homo sapiens
  CDR3 for beta chain variable domain of TCR clone 328494 (TRBV7-9, TRBJ1-5)
CASTQTGLNQPQHF

SEQ ID NO: 656989 - protein, 15 aa, Homo sapiens
  CDR3 for alpha chain variable domain of TCR clone 328495 (TRAV1-2, TRAJ30)
CAVRPHGNRDDKIIF

SEQ ID NO: 656990 - protein, 16 aa, Homo sapiens
  CDR3 for beta chain variable domain of TCR clone 328495 (TRBV7-3, TRBJ2-2)
CASSLKRGTLSGELFF

SEQ ID NO: 656991 - protein, 13 aa, Homo sapiens
  CDR3 for alpha chain variable domain of TCR clone 328496 (TRAV2, TRAJ40)
CAVVTSGTYKYIF

SEQ ID NO: 656992 - protein, 14 aa, Homo sapiens
  CDR3 for beta chain variable domain of TCR clone 328496 (TRBV19, TRBJ2-1)
CASPPFVLNGEQFF

SEQ ID NO: 656993 - protein, 10 aa, Homo sapiens
  CDR3 for alpha chain variable domain of TCR clone 328497 (TRAV8-4, TRAJ43)
CAVSADELRF

SEQ ID NO: 656994 - protein, 16 aa, Homo sapiens
  CDR3 for beta chain variable domain of TCR clone 328497 (TRBV12-5, TRBJ2-5)
CASGPRTSGNQETQYF

SEQ ID NO: 656995 - protein, 13 aa, Homo sapiens
  CDR3 for alpha chain variable domain of TCR clone 328498 (TRAV3, TRAJ43)
CAVRGVGTMTCTL

SEQ ID NO: 656996 - protein, 12 aa, Homo sapiens
  CDR3 for beta chain variable domain of TCR clone 328498 (TRBV5-1, TRBJ2-7)
CASSLDSYEQYF

SEQ ID NO: 656997 - protein, 11 aa, Homo sapiens
  CDR3 for alpha chain variable domain of TCR clone 328499 (TRAV3, TRAJ32)
CAVRDELVLQT

SEQ ID NO: 656998 - protein, 14 aa, Homo sapiens
  CDR3 for beta chain variable domain of TCR clone 328499 (TRBV7-8, TRBJ2-3)
CASSFPDGQDTQYF

SEQ ID NO: 656999 - protein, 15 aa, Homo sapiens
  CDR3 for alpha chain variable domain of TCR clone 328500 (TRAV30, TRAJ57)
CGTAIPQGGSEKLVF

SEQ ID NO: 657000 - protein, 15 aa, Homo sapiens
  CDR3 for beta chain variable domain of TCR clone 328500 (TRBV7-6, TRBJ1-2)
CASSSGGRGGYGYTF

SEQ ID NO: 657001 - protein, 14 aa, Homo sapiens
  CDR3 for alpha chain variable domain of TCR clone 328501 (TRAV12-3, TRAJ10)
SHLPLTGGGNKLTF

SEQ ID NO: 657002 - protein, 16 aa, Homo sapiens
  CDR3 for beta chain variable domain of TCR clone 328501 (TRBV4-1, TRBJ1-1)
CASSQDAGMGNTEAFF

SEQ ID NO: 657003 - protein, 13 aa, Homo sapiens
  CDR3 for alpha chain variable domain of TCR clone 328502 (TRAV21, TRAJ27)
CAARPGNAGKSTL

SEQ ID NO: 657004 - protein, 14 aa, Homo sapiens
  CDR3 for beta chain variable domain of TCR clone 328502 (TRBV7-6, TRBJ2-3)
CASSLWTVTDTQYF

SEQ ID NO: 657005 - protein, 14 aa, Homo sapiens
  CDR3 for alpha chain variable domain of TCR clone 328503 (TRAV26-1, TRAJ38)
CIADNAGNNRKLIW

SEQ ID NO: 657006 - protein, 13 aa, Homo sapiens
  CDR3 for beta chain variable domain of TCR clone 328503 (TRBV20-1, TRBJ1-1)
CSARAGGNTEAFF

SEQ ID NO: 657007 - protein, 15 aa, Homo sapiens
  CDR3 for alpha chain variable domain of TCR clone 328504 (TRAV3, TRAJ22)
CAVRDRGGSARQLTF

SEQ ID NO: 657008 - protein, 13 aa, Homo sapiens
  CDR3 for beta chain variable domain of TCR clone 328504 (TRBV20-1, TRBJ1-1)
CSAIVGGNTEAFF

SEQ ID NO: 657009 - protein, 14 aa, Homo sapiens
  CDR3 for alpha chain variable domain of TCR clone 328505 (TRAV21, TRAJ35)
CAVMPIGFGNVLHC

SEQ ID NO: 657010 - protein, 13 aa, Homo sapiens
  CDR3 for beta chain variable domain of TCR clone 328505 (TRBV12-4, TRBJ2-7)
CASSPTETYEQYF

SEQ ID NO: 657011 - protein, 13 aa, Homo sapiens
  CDR3 for alpha chain variable domain of TCR clone 328506 (TRAV13-1, TRAJ20)
CAARVSNDYKLSF

SEQ ID NO: 657012 - protein, 18 aa, Homo sapiens
  CDR3 for beta chain variable domain of TCR clone 328506 (TRBV4-1, TRBJ1-5)
CASSQDPRGQGLNQPQHF

SEQ ID NO: 657013 - protein, 16 aa, Homo sapiens
  CDR3 for alpha chain variable domain of TCR clone 328507 (TRAV21, TRAJ37)
FAVRPRGSSNTGKLIF

SEQ ID NO: 657014 - protein, 13 aa, Homo sapiens
  CDR3 for beta chain variable domain of TCR clone 328507 (TRBV7-9, TRBJ2-5)
CASLSPGQETQYF

SEQ ID NO: 657015 - protein, 13 aa, Homo sapiens
  CDR3 for alpha chain variable domain of TCR clone 328508 (TRAV17, TRAJ29)
CATDAFRKHTSCL

SEQ ID NO: 657016 - protein, 13 aa, Homo sapiens
  CDR3 for beta chain variable domain of TCR clone 328508 (TRBV5-7, TRBJ2-6)
CACTSSGANVLTF

SEQ ID NO: 657017 - protein, 15 aa, Homo sapiens
  CDR3 for alpha chain variable domain of TCR clone 328509 (TRAV21, TRAJ53)
CATLNSGGSNYKLTF

SEQ ID NO: 657018 - protein, 17 aa, Homo sapiens
  CDR3 for beta chain variable domain of TCR clone 328509 (TRBV4-1, TRBJ1-4)
CASSPEGPRGVEEKLFF

SEQ ID NO: 657019 - protein, 16 aa, Homo sapiens
  CDR3 for alpha chain variable domain of TCR clone 328510 (TRAV8-4, TRAJ52)
CSAANAGGTSYGKLTF

SEQ ID NO: 657020 - protein, 15 aa, Homo sapiens
  CDR3 for beta chain variable domain of TCR clone 328510 (TRBV6-3, TRBJ2-7)
CASSSPGTVFYEQYF

SEQ ID NO: 657021 - protein, 22 aa, Homo sapiens
  CDR3 for alpha chain variable domain of TCR clone 328511 (TRAV8-2, TRAJ45)
HLTKPSAHMSDAAEYSADGLTF

SEQ ID NO: 657022 - protein, 14 aa, Homo sapiens
  CDR3 for beta chain variable domain of TCR clone 328511 (TRBV19, TRBJ2-1)
CASPTFVLSGEQFF

SEQ ID NO: 657023 - protein, 14 aa, Homo sapiens
  CDR3 for alpha chain variable domain of TCR clone 328512 (TRAV12-3, TRAJ21)
CAMEGHQGINKFYF

SEQ ID NO: 657024 - protein, 14 aa, Homo sapiens
  CDR3 for beta chain variable domain of TCR clone 328512 (TRBV5-1, TRBJ1-4)
CASSLGDRNEKLFF

SEQ ID NO: 657025 - protein, 13 aa, Homo sapiens
  CDR3 for alpha chain variable domain of TCR clone 328513 (TRAV20, TRAJ20)
CAVQNPHDYKLSS

SEQ ID NO: 657026 - protein, 12 aa, Homo sapiens
  CDR3 for beta chain variable domain of TCR clone 328513 (TRBV18, TRBJ2-7)
CASSPNNNEQYF

SEQ ID NO: 657027 - protein, 11 aa, Homo sapiens
  CDR3 for alpha chain variable domain of TCR clone 328514 (TRAV1-2, TRAJ20)
CAESNDYKLSF

SEQ ID NO: 657028 - protein, 16 aa, Homo sapiens
  CDR3 for beta chain variable domain of TCR clone 328514 (TRBV29-1, TRBJ2-6)
CSVEDITYSGANVLTF

SEQ ID NO: 657029 - protein, 16 aa, Homo sapiens
  CDR3 for alpha chain variable domain of TCR clone 328515 (TRAV30, TRAJ24)
CGSEIVDADSWGKFQF

SEQ ID NO: 657030 - protein, 15 aa, Homo sapiens
  CDR3 for beta chain variable domain of TCR clone 328515 (TRBV27, TRBJ2-1)
CASSNGGGSSNEQFF

SEQ ID NO: 657031 - protein, 15 aa, Homo sapiens
  CDR3 for alpha chain variable domain of TCR clone 328516 (TRAV2, TRAJ9)
YAVEDRGTGGFKTIF

SEQ ID NO: 657032 - protein, 16 aa, Homo sapiens
  CDR3 for beta chain variable domain of TCR clone 328516 (TRBV24-1, TRBJ2-3)
CATSDPGTGATDTQYF

SEQ ID NO: 657033 - protein, 14 aa, Homo sapiens
  CDR3 for alpha chain variable domain of TCR clone 328517 (TRAV23/DV6, TRAJ13)
CAASETGGYQKVTF

SEQ ID NO: 657034 - protein, 14 aa, Homo sapiens
  CDR3 for beta chain variable domain of TCR clone 328517 (TRBV7-2, TRBJ2-3)
CASSQTGSSYTQYF

SEQ ID NO: 657035 - protein, 15 aa, Homo sapiens
  CDR3 for alpha chain variable domain of TCR clone 328518 (TRAV21, TRAJ53)
CATLNSGGSNYKMTF

SEQ ID NO: 657036 - protein, 17 aa, Homo sapiens
  CDR3 for beta chain variable domain of TCR clone 328518 (TRBV20-1, TRBJ2-2)
CSASGSGQGGLTGELFF

SEQ ID NO: 657037 - protein, 12 aa, Homo sapiens
  CDR3 for alpha chain variable domain of TCR clone 328519 (TRAV12-3, TRAJ17)
CAMTLTGNKPTF

SEQ ID NO: 657038 - protein, 14 aa, Homo sapiens
  CDR3 for beta chain variable domain of TCR clone 328519 (TRBV3-1, TRBJ2-7)
CASSPSSGTYEQYF

SEQ ID NO: 657039 - protein, 12 aa, Homo sapiens
  CDR3 for alpha chain variable domain of TCR clone 328520 (TRAV2, TRAJ5)
CALDTGRRALTF

SEQ ID NO: 657040 - protein, 12 aa, Homo sapiens
  CDR3 for beta chain variable domain of TCR clone 328520 (TRBV7-9, TRBJ2-7)
CASSIKREEQYF

SEQ ID NO: 657041 - protein, 14 aa, Homo sapiens
  CDR3 for alpha chain variable domain of TCR clone 328521 (TRAV12-1, TRAJ5)
CVVTGDTGRRALTF

SEQ ID NO: 657042 - protein, 18 aa, Homo sapiens
  CDR3 for beta chain variable domain of TCR clone 328521 (TRBV4-1, TRBJ2-7)
CASSQAPGTGTLGDEQYF

SEQ ID NO: 657043 - protein, 16 aa, Homo sapiens
  CDR3 for alpha chain variable domain of TCR clone 328522 (TRAV3, TRAJ10)
CAVRDMRAGGGNKLTF

SEQ ID NO: 657044 - protein, 15 aa, Homo sapiens
  CDR3 for beta chain variable domain of TCR clone 328522 (TRBV20-1, TRBJ2-7)
CSARDRVSGMDGQYF

SEQ ID NO: 657045 - protein, 14 aa, Homo sapiens
  CDR3 for alpha chain variable domain of TCR clone 328523 (TRAV26-1, TRAJ48)
CIVRVPFGNEKSTF

SEQ ID NO: 657046 - protein, 16 aa, Homo sapiens
  CDR3 for beta chain variable domain of TCR clone 328523 (TRBV18, TRBJ2-1)
CASSPYLSIRGDEQFF

SEQ ID NO: 657047 - protein, 12 aa, Homo sapiens
  CDR3 for alpha chain variable domain of TCR clone 328524 (TRAV12-3, TRAJ4)
CAMTGAGTRLAV

SEQ ID NO: 657048 - protein, 17 aa, Homo sapiens
  CDR3 for beta chain variable domain of TCR clone 328524 (TRBV10-3, TRBJ1-1)
CTSVPSVILTGGVEAFF

SEQ ID NO: 657049 - protein, 14 aa, Homo sapiens
  CDR3 for alpha chain variable domain of TCR clone 328525 (TRAV1-2, TRAJ16)
CAVNRFSDGLGGRD

SEQ ID NO: 657050 - protein, 14 aa, Homo sapiens
  CDR3 for beta chain variable domain of TCR clone 328525 (TRBV7-9, TRBJ2-3)
CASSLEDGTDTQYF

SEQ ID NO: 657051 - protein, 18 aa, Homo sapiens
  CDR3 for alpha chain variable domain of TCR clone 328526 (TRAV13-1, TRAJ52)
CAASKGSAGGTSHGRLTF

SEQ ID NO: 657052 - protein, 13 aa, Homo sapiens
  CDR3 for beta chain variable domain of TCR clone 328526 (TRBV12-4, TRBJ1-2)
CASSLRQGKGYTF

SEQ ID NO: 657053 - protein, 13 aa, Homo sapiens
  CDR3 for alpha chain variable domain of TCR clone 328527 (TRAV13-2, TRAJ13)
CAERPGGYQKVTF

SEQ ID NO: 657054 - protein, 13 aa, Homo sapiens
  CDR3 for beta chain variable domain of TCR clone 328527 (TRBV28, TRBJ1-2)
CAGRDRGNHGYTF

SEQ ID NO: 657055 - protein, 14 aa, Homo sapiens
  CDR3 for alpha chain variable domain of TCR clone 328528 (TRAV1-2, TRAJ16)
CAVNRFSDGPKLLF

SEQ ID NO: 657056 - protein, 13 aa, Homo sapiens
  CDR3 for beta chain variable domain of TCR clone 328528 (TRBV20-1, TRBJ1-1)
CSARAGGNTEAFF

SEQ ID NO: 657057 - protein, 12 aa, Homo sapiens
  CDR3 for alpha chain variable domain of TCR clone 328529 (TRAV26-1, TRAJ17)
CIVRSAGNKLTF

SEQ ID NO: 657058 - protein, 13 aa, Homo sapiens
  CDR3 for beta chain variable domain of TCR clone 328529 (TRBV5-5, TRBJ2-7)
CASSSQTRQRQCF

SEQ ID NO: 657059 - protein, 14 aa, Homo sapiens
  CDR3 for alpha chain variable domain of TCR clone 328530 (TRAV1-2, TRAJ16)
CAVNRFSDGQKLLF

SEQ ID NO: 657060 - protein, 14 aa, Homo sapiens
  CDR3 for beta chain variable domain of TCR clone 328530 (TRBV5-1, TRBJ1-1)
CASSTEGMNTEAFF

SEQ ID NO: 657061 - protein, 17 aa, Homo sapiens
  CDR3 for alpha chain variable domain of TCR clone 328531 (TRAV26-1, TRAJ53)
CIVRVDDSGGSNYKLTF

SEQ ID NO: 657062 - protein, 15 aa, Homo sapiens
  CDR3 for beta chain variable domain of TCR clone 328531 (TRBV19, TRBJ1-1)
CASTSGQIQNTEAFF

SEQ ID NO: 657063 - protein, 17 aa, Homo sapiens
  CDR3 for alpha chain variable domain of TCR clone 328532 (TRAV3, TRAJ42)
CAVRDRDDGGSQGNLIF

SEQ ID NO: 657064 - protein, 14 aa, Homo sapiens
  CDR3 for beta chain variable domain of TCR clone 328532 (TRBV25-1, TRBJ1-1)
CASTHLGGNTEAFF

SEQ ID NO: 657065 - protein, 14 aa, Homo sapiens
  CDR3 for alpha chain variable domain of TCR clone 328533 (TRAV17, TRAJ39)
YATDPVRAGNMLTF

SEQ ID NO: 657066 - protein, 15 aa, Homo sapiens
  CDR3 for beta chain variable domain of TCR clone 328533 (TRBV13, TRBJ1-5)
CASSFGQGGVQPQHF

SEQ ID NO: 657067 - protein, 14 aa, Homo sapiens
  CDR3 for alpha chain variable domain of TCR clone 328534 (TRAV12-2, TRAJ13)
CAVKKTGGYQKVTF

SEQ ID NO: 657068 - protein, 23 aa, Homo sapiens
  CDR3 for beta chain variable domain of TCR clone 328534 (TRBV4-2, TRBJ2-3)
CASSQDPPRASSISGGRGVTQYF

SEQ ID NO: 657069 - protein, 14 aa, Homo sapiens
  CDR3 for alpha chain variable domain of TCR clone 328535 (TRAV9-2, TRAJ36)
CALSWRTGANNLFF

SEQ ID NO: 657070 - protein, 14 aa, Homo sapiens
  CDR3 for beta chain variable domain of TCR clone 328535 (TRBV2, TRBJ1-2)
CASSELQVNYGYTF

SEQ ID NO: 657071 - protein, 15 aa, Homo sapiens
  CDR3 for alpha chain variable domain of TCR clone 328536 (TRAV25, TRAJ41)
CAGPWNSNSGYALNF

SEQ ID NO: 657072 - protein, 15 aa, Homo sapiens
  CDR3 for beta chain variable domain of TCR clone 328536 (TRBV11-2, TRBJ2-1)
CASSKNRGLIYEQFF

SEQ ID NO: 657073 - protein, 16 aa, Homo sapiens
  CDR3 for alpha chain variable domain of TCR clone 328537 (TRAV30, TRAJ24)
CGTEIVDADSWGKFQF

SEQ ID NO: 657074 - protein, 13 aa, Homo sapiens
  CDR3 for beta chain variable domain of TCR clone 328537 (TRBV20-1, TRBJ2-7)
CSARTSGNYEQYF

SEQ ID NO: 657075 - protein, 12 aa, Homo sapiens
  CDR3 for alpha chain variable domain of TCR clone 328538 (TRAV12-2, TRAJ7)
CAAMRGNNRLAF

SEQ ID NO: 657076 - protein, 12 aa, Homo sapiens
  CDR3 for beta chain variable domain of TCR clone 328538 (TRBV7-8, TRBJ2-7)
CASRLGDREQYF

SEQ ID NO: 657077 - protein, 18 aa, Homo sapiens
  CDR3 for alpha chain variable domain of TCR clone 328539 (TRAV21, TRAJ52)
CAVRPSPAGGTSYVKLTF

SEQ ID NO: 657078 - protein, 13 aa, Homo sapiens
  CDR3 for beta chain variable domain of TCR clone 328539 (TRBV7-3, TRBJ1-1)
CASSQGWGADAFF

SEQ ID NO: 657079 - protein, 13 aa, Homo sapiens
  CDR3 for alpha chain variable domain of TCR clone 328540 (TRAV12-2, TRAJ3)
CAFQYSSASKIIF

SEQ ID NO: 657080 - protein, 14 aa, Homo sapiens
  CDR3 for beta chain variable domain of TCR clone 328540 (TRBV20-1, TRBJ2-7)
CSAKRGRSSYEQYF

SEQ ID NO: 657081 - protein, 14 aa, Homo sapiens
  CDR3 for alpha chain variable domain of TCR clone 328541 (TRAV8-4, TRAJ34)
GAVSDPGYTDKLIF

SEQ ID NO: 657082 - protein, 13 aa, Homo sapiens
  CDR3 for beta chain variable domain of TCR clone 328541 (TRBV7-9, TRBJ2-5)
CASLSPGQETQYF

SEQ ID NO: 657083 - protein, 14 aa, Homo sapiens
  CDR3 for alpha chain variable domain of TCR clone 328542 (TRAV1-2, TRAJ8)
CAVREDTGFQKLVF

SEQ ID NO: 657084 - protein, 13 aa, Homo sapiens
  CDR3 for beta chain variable domain of TCR clone 328542 (TRBV7-3, TRBJ2-1)
CASSLGSYNEQFF

SEQ ID NO: 657085 - protein, 11 aa, Homo sapiens
  CDR3 for alpha chain variable domain of TCR clone 328543 (TRAV12-2, TRAJ49)
CAVHTGNPFYF

SEQ ID NO: 657086 - protein, 15 aa, Homo sapiens
  CDR3 for beta chain variable domain of TCR clone 328543 (TRBV9, TRBJ1-6)
CASSVAGTGDSPLHF

SEQ ID NO: 657087 - protein, 13 aa, Homo sapiens
  CDR3 for alpha chain variable domain of TCR clone 328544 (TRAV21, TRAJ37)
CAVSSGNTGKLIF

SEQ ID NO: 657088 - protein, 14 aa, Homo sapiens
  CDR3 for beta chain variable domain of TCR clone 328544 (TRBV6-6, TRBJ2-3)
CASRLQREADTQYF

SEQ ID NO: 657089 - protein, 14 aa, Homo sapiens
  CDR3 for alpha chain variable domain of TCR clone 328545 (TRAV17, TRAJ42)
CATDAPGSQGNLIF

SEQ ID NO: 657090 - protein, 13 aa, Homo sapiens
  CDR3 for beta chain variable domain of TCR clone 328545 (TRBV7-7, TRBJ1-5)
CASSPGKDRPQHF

SEQ ID NO: 657091 - protein, 15 aa, Homo sapiens
  CDR3 for alpha chain variable domain of TCR clone 328546 (TRAV8-4, TRAJ47)
CAESDPEEYGNKLVF

SEQ ID NO: 657092 - protein, 15 aa, Homo sapiens
  CDR3 for beta chain variable domain of TCR clone 328546 (TRBV11-2, TRBJ2-1)
CASSLGPDSYNEQFF

SEQ ID NO: 657093 - protein, 13 aa, Homo sapiens
  CDR3 for alpha chain variable domain of TCR clone 328547 (TRAV3, TRAJ29)
CAVRHIIDTPLVF

SEQ ID NO: 657094 - protein, 14 aa, Homo sapiens
  CDR3 for beta chain variable domain of TCR clone 328547 (TRBV27, TRBJ2-1)
CASSATGGYNEQFF

SEQ ID NO: 657095 - protein, 16 aa, Homo sapiens
  CDR3 for alpha chain variable domain of TCR clone 328548 (TRAV27, TRAJ53)
CAAPEGSGGSNYKLTF

SEQ ID NO: 657096 - protein, 13 aa, Homo sapiens
  CDR3 for beta chain variable domain of TCR clone 328548 (TRBV5-1, TRBJ2-1)
CASSSEGFEEQFF

SEQ ID NO: 657097 - protein, 15 aa, Homo sapiens
  CDR3 for alpha chain variable domain of TCR clone 328549 (TRAV2, TRAJ9)
CAVEDRGTGGFKTIF

SEQ ID NO: 657098 - protein, 14 aa, Homo sapiens
  CDR3 for beta chain variable domain of TCR clone 328549 (TRBV7-2, TRBJ1-2)
CASSQTGSTYGDTF

SEQ ID NO: 657099 - protein, 13 aa, Homo sapiens
  CDR3 for alpha chain variable domain of TCR clone 328550 (TRAV3, TRAJ8)
CAVRFTGFQKLVF

SEQ ID NO: 657100 - protein, 15 aa, Homo sapiens
  CDR3 for beta chain variable domain of TCR clone 328550 (TRBV20-1, TRBJ2-7)
CSARDRVSGMDEQYY

SEQ ID NO: 657101 - protein, 13 aa, Homo sapiens
  CDR3 for alpha chain variable domain of TCR clone 328551 (TRAV3, TRAJ4)
CAVRDGGYNKLIF

SEQ ID NO: 657102 - protein, 15 aa, Homo sapiens
  CDR3 for beta chain variable domain of TCR clone 328551 (TRBV5-1, TRBJ2-1)
CASGPPRAPYNEQFF

SEQ ID NO: 657103 - protein, 13 aa, Homo sapiens
  CDR3 for alpha chain variable domain of TCR clone 328552 (TRAV2, TRAJ15)
CAVPSQSGTALIF

SEQ ID NO: 657104 - protein, 16 aa, Homo sapiens
  CDR3 for beta chain variable domain of TCR clone 328552 (TRBV5-1, TRBJ1-1)
CASSSGGNSLNTEAFF

SEQ ID NO: 657105 - protein, 14 aa, Homo sapiens
  CDR3 for alpha chain variable domain of TCR clone 328553 (TRAV38-1, TRAJ40)
CTLRPTSGTYKYIF

SEQ ID NO: 657106 - protein, 14 aa, Homo sapiens
  CDR3 for beta chain variable domain of TCR clone 328553 (TRBV25-1, TRBJ1-1)
CASAHLGGNTEAFF

SEQ ID NO: 657107 - protein, 10 aa, Homo sapiens
  CDR3 for alpha chain variable domain of TCR clone 328554 (TRAV16, TRAJ22)
SAMYLRQLTF

SEQ ID NO: 657108 - protein, 14 aa, Homo sapiens
  CDR3 for beta chain variable domain of TCR clone 328554 (TRBV7-6, TRBJ2-7)
CASSPRAGMYEQYF

SEQ ID NO: 657109 - protein, 14 aa, Homo sapiens
  CDR3 for alpha chain variable domain of TCR clone 328555 (TRAV26-1, TRAJ22)
CIVGVYGSARQLTF

SEQ ID NO: 657110 - protein, 17 aa, Homo sapiens
  CDR3 for beta chain variable domain of TCR clone 328555 (TRBV7-3, TRBJ2-3)
CASSPGGLAGFGDTQYF

SEQ ID NO: 657111 - protein, 14 aa, Homo sapiens
  CDR3 for alpha chain variable domain of TCR clone 328556 (TRAV3, TRAJ9)
CAVRLNTGVFKTIF

SEQ ID NO: 657112 - protein, 11 aa, Homo sapiens
  CDR3 for beta chain variable domain of TCR clone 328556 (TRBV19, TRBJ2-2)
CASRYSGELFF

SEQ ID NO: 657113 - protein, 16 aa, Homo sapiens
  CDR3 for alpha chain variable domain of TCR clone 328557 (TRAV12-3, TRAJ53)
CAMSPGSGGSNYKLTF

SEQ ID NO: 657114 - protein, 15 aa, Homo sapiens
  CDR3 for beta chain variable domain of TCR clone 328557 (TRBV5-4, TRBJ2-1)
CASSPTSGGDVGQFF

SEQ ID NO: 657115 - protein, 12 aa, Homo sapiens
  CDR3 for alpha chain variable domain of TCR clone 328558 (TRAV3, TRAJ39)
CAVIEWSNMLPF

SEQ ID NO: 657116 - protein, 14 aa, Homo sapiens
  CDR3 for beta chain variable domain of TCR clone 328558 (TRBV7-8, TRBJ2-3)
CASSFPDGQDTQYF

SEQ ID NO: 657117 - protein, 14 aa, Homo sapiens
  CDR3 for alpha chain variable domain of TCR clone 328559 (TRAV23/DV6, TRAJ39)
CAASIGNAGNMLTF

SEQ ID NO: 657118 - protein, 13 aa, Homo sapiens
  CDR3 for beta chain variable domain of TCR clone 328559 (TRBV7-3, TRBJ1-1)
CQQLKGGNTEAFF

SEQ ID NO: 657119 - protein, 12 aa, Homo sapiens
  CDR3 for alpha chain variable domain of TCR clone 328560 (TRAV12-3, TRAJ40)
CAMSSGTYKYIF

SEQ ID NO: 657120 - protein, 15 aa, Homo sapiens
  CDR3 for beta chain variable domain of TCR clone 328560 (TRBV7-6, TRBJ2-5)
CASSKPTGPQETQYF

SEQ ID NO: 657121 - protein, 21 aa, Homo sapiens
  CDR3 for alpha chain variable domain of TCR clone 328561 (TRAV3, TRAJ27)
CAVRPLGAGKSTYGDGPPLTV

SEQ ID NO: 657122 - protein, 13 aa, Homo sapiens
  CDR3 for beta chain variable domain of TCR clone 328561 (TRBV7-9, TRBJ2-3)
CASSPGSTDTQYF

SEQ ID NO: 657123 - protein, 17 aa, Homo sapiens
  CDR3 for alpha chain variable domain of TCR clone 328562 (TRAV35, TRAJ52)
CAGQLAAGGTSYGKLTF

SEQ ID NO: 657124 - protein, 17 aa, Homo sapiens
  CDR3 for beta chain variable domain of TCR clone 328562 (TRBV7-8, TRBJ2-6)
CASSAGTGGAGANVLTF

SEQ ID NO: 657125 - protein, 15 aa, Homo sapiens
  CDR3 for alpha chain variable domain of TCR clone 328563 (TRAV17, TRAJ57)
CATGPSQGGSEKLVF

SEQ ID NO: 657126 - protein, 15 aa, Homo sapiens
  CDR3 for beta chain variable domain of TCR clone 328563 (TRBV7-9, TRBJ1-6)
CASSSPGRGNSPLHV

SEQ ID NO: 657127 - protein, 13 aa, Homo sapiens
  CDR3 for alpha chain variable domain of TCR clone 328564 (TRAV2, TRAJ5)
CAVPDTGRRALTF

SEQ ID NO: 657128 - protein, 15 aa, Homo sapiens
  CDR3 for beta chain variable domain of TCR clone 328564 (TRBV7-2, TRBJ2-2)
CASSTRTGYTRELFF

SEQ ID NO: 657129 - protein, 12 aa, Homo sapiens
  CDR3 for alpha chain variable domain of TCR clone 328565 (TRAV12-3, TRAJ5)
CAMDTGRRGLTF

SEQ ID NO: 657130 - protein, 13 aa, Homo sapiens
  CDR3 for beta chain variable domain of TCR clone 328565 (TRBV7-7, TRBJ2-2)
CASSLTSAGELFF

SEQ ID NO: 657131 - protein, 14 aa, Homo sapiens
  CDR3 for alpha chain variable domain of TCR clone 328566 (TRAV8-6, TRAJ57)
CAVRLEGGSEKLVF

SEQ ID NO: 657132 - protein, 16 aa, Homo sapiens
  CDR3 for beta chain variable domain of TCR clone 328566 (TRBV19, TRBJ2-1)
CASSKAGPSSYNEQFF

SEQ ID NO: 657133 - protein, 14 aa, Homo sapiens
  CDR3 for alpha chain variable domain of TCR clone 328567 (TRAV13-1, TRAJ35)
CAASKGGFGNVLHC

SEQ ID NO: 657134 - protein, 13 aa, Homo sapiens
  CDR3 for beta chain variable domain of TCR clone 328567 (TRBV7-3, TRBJ1-1)
CASSQDCWAEAFF

SEQ ID NO: 657135 - protein, 14 aa, Homo sapiens
  CDR3 for alpha chain variable domain of TCR clone 328568 (TRAV13-1, TRAJ35)
CAASKGGFGNVLHC

SEQ ID NO: 657136 - protein, 16 aa, Homo sapiens
  CDR3 for beta chain variable domain of TCR clone 328568 (TRBV2, TRBJ2-3)
CQHRGATRRWTDTQYF

SEQ ID NO: 657137 - protein, 15 aa, Homo sapiens
  CDR3 for alpha chain variable domain of TCR clone 328569 (TRAV21, TRAJ36)
CAVRRKQTGANNLFF

SEQ ID NO: 657138 - protein, 14 aa, Homo sapiens
  CDR3 for beta chain variable domain of TCR clone 328569 (TRBV11-3, TRBJ2-1)
CASSATTSGSIQFF

SEQ ID NO: 657139 - protein, 13 aa, Homo sapiens
  CDR3 for alpha chain variable domain of TCR clone 328570 (TRAV12-1, TRAJ39)
CVVNYNAGNMLTF

SEQ ID NO: 657140 - protein, 14 aa, Homo sapiens
  CDR3 for beta chain variable domain of TCR clone 328570 (TRBV27, TRBJ2-3)
CSSSPLGTTDTQYF

SEQ ID NO: 657141 - protein, 13 aa, Homo sapiens
  CDR3 for alpha chain variable domain of TCR clone 328571 (TRAV2, TRAJ40)
CAVVTSGTYKYIF

SEQ ID NO: 657142 - protein, 13 aa, Homo sapiens
  CDR3 for beta chain variable domain of TCR clone 328571 (TRBV2, TRBJ1-1)
CASSVLMNTEAFF

SEQ ID NO: 657143 - protein, 12 aa, Homo sapiens
  CDR3 for alpha chain variable domain of TCR clone 328572 (TRAV8-3, TRAJ5)
CAVGGGLRALTF

SEQ ID NO: 657144 - protein, 14 aa, Homo sapiens
  CDR3 for beta chain variable domain of TCR clone 328572 (TRBV4-1, TRBJ2-2)
CASSQAVNTGELFF

SEQ ID NO: 657145 - protein, 15 aa, Homo sapiens
  CDR3 for alpha chain variable domain of TCR clone 328573 (TRAV27, TRAJ38)
CAGRFNAANNRKLIW

SEQ ID NO: 657146 - protein, 13 aa, Homo sapiens
  CDR3 for beta chain variable domain of TCR clone 328573 (TRBV20-1, TRBJ1-1)
CSARVGGNTEAFF

SEQ ID NO: 657147 - protein, 15 aa, Homo sapiens
  CDR3 for alpha chain variable domain of TCR clone 328574 (TRAV8-4, TRAJ37)
CAVSEEFSNTGKLIF

SEQ ID NO: 657148 - protein, 13 aa, Homo sapiens
  CDR3 for beta chain variable domain of TCR clone 328574 (TRBV5-1, TRBJ2-7)
CASTLDGAYEQYF

SEQ ID NO: 657149 - protein, 14 aa, Homo sapiens
  CDR3 for alpha chain variable domain of TCR clone 328575 (TRAV13-1, TRAJ44)
CAAKATGTASKLTF

SEQ ID NO: 657150 - protein, 16 aa, Homo sapiens
  CDR3 for beta chain variable domain of TCR clone 328575 (TRBV15, TRBJ1-2)
CATSRGPRTGGGGYTF

SEQ ID NO: 657151 - protein, 13 aa, Homo sapiens
  CDR3 for alpha chain variable domain of TCR clone 328576 (TRAV8-2, TRAJ15)
CVVSGPGRNCSDL

SEQ ID NO: 657152 - protein, 16 aa, Homo sapiens
  CDR3 for beta chain variable domain of TCR clone 328576 (TRBV19, TRBJ2-2)
CASRSPGTGATGELFF

SEQ ID NO: 657153 - protein, 14 aa, Homo sapiens
  CDR3 for alpha chain variable domain of TCR clone 328577 (TRAV16, TRAJ17)
CALSAGAAGNKLTF

SEQ ID NO: 657154 - protein, 14 aa, Homo sapiens
  CDR3 for beta chain variable domain of TCR clone 328577 (TRBV28, TRBJ2-2)
CASRIRSGTGELFF

SEQ ID NO: 657155 - protein, 14 aa, Homo sapiens
  CDR3 for alpha chain variable domain of TCR clone 328578 (TRAV8-2, TRAJ4)
CVLSPSGGSNKLIF

SEQ ID NO: 657156 - protein, 15 aa, Homo sapiens
  CDR3 for beta chain variable domain of TCR clone 328578 (TRBV6-6, TRBJ2-7)
CASSYSYGGSYEQYF

SEQ ID NO: 657157 - protein, 13 aa, Homo sapiens
  CDR3 for alpha chain variable domain of TCR clone 328579 (TRAV12-2, TRAJ37)
CAGGSGKTGKLIF

SEQ ID NO: 657158 - protein, 17 aa, Homo sapiens
  CDR3 for beta chain variable domain of TCR clone 328579 (TRBV11-2, TRBJ2-1)
CASSLYPPGVEYNEQFF

SEQ ID NO: 657159 - protein, 13 aa, Homo sapiens
  CDR3 for alpha chain variable domain of TCR clone 328580 (TRAV38-2/DV8, TRAJ49)
CASRRRTGNQFYF

SEQ ID NO: 657160 - protein, 15 aa, Homo sapiens
  CDR3 for beta chain variable domain of TCR clone 328580 (TRBV24-1, TRBJ1-1)
CATSDSKTVNTEAFF

SEQ ID NO: 657161 - protein, 11 aa, Homo sapiens
  CDR3 for alpha chain variable domain of TCR clone 328581 (TRAV13-2, TRAJ31)
CAENMDARLMF

SEQ ID NO: 657162 - protein, 15 aa, Homo sapiens
  CDR3 for beta chain variable domain of TCR clone 328581 (TRBV7-8, TRBJ1-2)
CASSLVRDGGLGYSF

SEQ ID NO: 657163 - protein, 13 aa, Homo sapiens
  CDR3 for alpha chain variable domain of TCR clone 328582 (TRAV21, TRAJ27)
CAARPGNAGKSTF

SEQ ID NO: 657164 - protein, 13 aa, Homo sapiens
  CDR3 for beta chain variable domain of TCR clone 328582 (TRBV7-6, TRBJ2-3)
CQQLRDSTDTQYF

SEQ ID NO: 657165 - protein, 14 aa, Homo sapiens
  CDR3 for alpha chain variable domain of TCR clone 328583 (TRAV3, TRAJ36)
FAVRDGTGANNLFF

SEQ ID NO: 657166 - protein, 16 aa, Homo sapiens
  CDR3 for beta chain variable domain of TCR clone 328583 (TRBV7-3, TRBJ2-5)
CASIQPGGSVQETQYF

SEQ ID NO: 657167 - protein, 14 aa, Homo sapiens
  CDR3 for alpha chain variable domain of TCR clone 328584 (TRAV12-2, TRAJ9)
CAVNLNTGGFKTIF

SEQ ID NO: 657168 - protein, 14 aa, Homo sapiens
  CDR3 for beta chain variable domain of TCR clone 328584 (TRBV7-9, TRBJ1-1)
CASTPLQSYTEAFF

SEQ ID NO: 657169 - protein, 11 aa, Homo sapiens
  CDR3 for alpha chain variable domain of TCR clone 328585 (TRAV13-1, TRAJ34)
PGPYNTDKLIF

SEQ ID NO: 657170 - protein, 14 aa, Homo sapiens
  CDR3 for beta chain variable domain of TCR clone 328585 (TRBV20-1, TRBJ1-1)
CSAQTRIGGTEAFF

SEQ ID NO: 657171 - protein, 13 aa, Homo sapiens
  CDR3 for alpha chain variable domain of TCR clone 328586 (TRAV20, TRAJ45)
CAVTKRRCRRTHL

SEQ ID NO: 657172 - protein, 14 aa, Homo sapiens
  CDR3 for beta chain variable domain of TCR clone 328586 (TRBV15, TRBJ2-5)
CATSIGGLGETQYF

SEQ ID NO: 657173 - protein, 13 aa, Homo sapiens
  CDR3 for alpha chain variable domain of TCR clone 328587 (TRAV8-3, TRAJ31)
CAVGARNNARLMF

SEQ ID NO: 657174 - protein, 13 aa, Homo sapiens
  CDR3 for beta chain variable domain of TCR clone 328587 (TRBV20-1, TRBJ1-1)
CSARGGGNTEAFF

SEQ ID NO: 657175 - protein, 17 aa, Homo sapiens
  CDR3 for alpha chain variable domain of TCR clone 328588 (TRAV2, TRAJ32)
CCLLLWGGGGATNKLIF

SEQ ID NO: 657176 - protein, 13 aa, Homo sapiens
  CDR3 for beta chain variable domain of TCR clone 328588 (TRBV2, TRBJ1-1)
CASSVLMNTEAFF

SEQ ID NO: 657177 - protein, 13 aa, Homo sapiens
  CDR3 for alpha chain variable domain of TCR clone 328589 (TRAV36/DV7, TRAJ33)
CAMDMDSNYQLIW

SEQ ID NO: 657178 - protein, 16 aa, Homo sapiens
  CDR3 for beta chain variable domain of TCR clone 328589 (TRBV15, TRBJ2-3)
CATRLSGGRAPDTQYF

SEQ ID NO: 657179 - protein, 16 aa, Homo sapiens
  CDR3 for alpha chain variable domain of TCR clone 328590 (TRAV13-1, TRAJ37)
WAASSLGSSNTGKLIF

SEQ ID NO: 657180 - protein, 12 aa, Homo sapiens
  CDR3 for beta chain variable domain of TCR clone 328590 (TRBV6-1, TRBJ2-5)
CASSEGRETQYF

SEQ ID NO: 657181 - protein, 12 aa, Homo sapiens
  CDR3 for alpha chain variable domain of TCR clone 328591 (TRAV35, TRAJ43)
CAGAYNNNYMRF

SEQ ID NO: 657182 - protein, 14 aa, Homo sapiens
  CDR3 for beta chain variable domain of TCR clone 328591 (TRBV2, TRBJ2-2)
CASSWQGATGELFF

SEQ ID NO: 657183 - protein, 13 aa, Homo sapiens
  CDR3 for alpha chain variable domain of TCR clone 328592 (TRAV27, TRAJ41)
CAGEGNSGYVLNF

SEQ ID NO: 657184 - protein, 13 aa, Homo sapiens
  CDR3 for beta chain variable domain of TCR clone 328592 (TRBV27, TRBJ2-7)
CASSFVSSYEQYF

SEQ ID NO: 657185 - protein, 16 aa, Homo sapiens
  CDR3 for alpha chain variable domain of TCR clone 328593 (TRAV30, TRAJ24)
CGTEIVDADSWGKFRF

SEQ ID NO: 657186 - protein, 15 aa, Homo sapiens
  CDR3 for beta chain variable domain of TCR clone 328593 (TRBV27, TRBJ2-1)
CASSNGGGSSNEQFF

SEQ ID NO: 657187 - protein, 15 aa, Homo sapiens
  CDR3 for alpha chain variable domain of TCR clone 328594 (TRAV17, TRAJ57)
CATDCTPGGSEKLVF

SEQ ID NO: 657188 - protein, 15 aa, Homo sapiens
  CDR3 for beta chain variable domain of TCR clone 328594 (TRBV27, TRBJ2-1)
CASSLAGGPFNEQFF

SEQ ID NO: 657189 - protein, 16 aa, Homo sapiens
  CDR3 for alpha chain variable domain of TCR clone 328595 (TRAV3, TRAJ10)
CAVRDMRAGGGNKLTF

SEQ ID NO: 657190 - protein, 13 aa, Homo sapiens
  CDR3 for beta chain variable domain of TCR clone 328595 (TRBV12-4, TRBJ2-5)
CASRKRGKETQYF

SEQ ID NO: 657191 - protein, 16 aa, Homo sapiens
  CDR3 for alpha chain variable domain of TCR clone 328596 (TRAV4, TRAJ8)
CLVGDSGNTGFQKLVF

SEQ ID NO: 657192 - protein, 14 aa, Homo sapiens
  CDR3 for beta chain variable domain of TCR clone 328596 (TRBV18, TRBJ2-3)
CASSGLADTDTQYF

SEQ ID NO: 657193 - protein, 17 aa, Homo sapiens
  CDR3 for alpha chain variable domain of TCR clone 328597 (TRAV3, TRAJ6)
CAVRDGPRAGGRYILTF

SEQ ID NO: 657194 - protein, 14 aa, Homo sapiens
  CDR3 for beta chain variable domain of TCR clone 328597 (TRBV7-2, TRBJ2-7)
CASSPKTSFYEQYF

SEQ ID NO: 657195 - protein, 12 aa, Homo sapiens
  CDR3 for alpha chain variable domain of TCR clone 328598 (TRAV16, TRAJ56)
FAPTGANSKMTF

SEQ ID NO: 657196 - protein, 17 aa, Homo sapiens
  CDR3 for beta chain variable domain of TCR clone 328598 (TRBV27, TRBJ2-6)
CASSLTGFASGANVLTF

SEQ ID NO: 657197 - protein, 14 aa, Homo sapiens
  CDR3 for alpha chain variable domain of TCR clone 328599 (TRAV12-1, TRAJ30)
CVPTGTNRDDKIIF

SEQ ID NO: 657198 - protein, 16 aa, Homo sapiens
  CDR3 for beta chain variable domain of TCR clone 328599 (TRBV12-5, TRBJ2-5)
CASGPRTSGNQETQYF

SEQ ID NO: 657199 - protein, 15 aa, Homo sapiens
  CDR3 for alpha chain variable domain of TCR clone 328600 (TRAV12-2, TRAJ57)
CAVSRGQGGSEKPVF

SEQ ID NO: 657200 - protein, 14 aa, Homo sapiens
  CDR3 for beta chain variable domain of TCR clone 328600 (TRBV20-1, TRBJ2-1)
CSAHPGLPYNEQFF

SEQ ID NO: 657201 - protein, 13 aa, Homo sapiens
  CDR3 for alpha chain variable domain of TCR clone 328601 (TRAV21, TRAJ45)
CAVMGGGADGLTF

SEQ ID NO: 657202 - protein, 16 aa, Homo sapiens
  CDR3 for beta chain variable domain of TCR clone 328601 (TRBV4-1, TRBJ2-7)
CASSQEWTSGPLEQYF

SEQ ID NO: 657203 - protein, 14 aa, Homo sapiens
  CDR3 for alpha chain variable domain of TCR clone 328602 (TRAV25, TRAJ52)
CAGEGGTSYGKLTF

SEQ ID NO: 657204 - protein, 15 aa, Homo sapiens
  CDR3 for beta chain variable domain of TCR clone 328602 (TRBV4-3, TRBJ2-5)
CASSQDLSSGRIQYF

SEQ ID NO: 657205 - protein, 10 aa, Homo sapiens
  CDR3 for alpha chain variable domain of TCR clone 328603 (TRAV1-2, TRAJ20)
CAVTDYKLSF

SEQ ID NO: 657206 - protein, 13 aa, Homo sapiens
  CDR3 for beta chain variable domain of TCR clone 328603 (TRBV7-9, TRBJ1-2)
CASSPSNFWGYTF

SEQ ID NO: 657207 - protein, 12 aa, Homo sapiens
  CDR3 for alpha chain variable domain of TCR clone 328604 (TRAV36/DV7, TRAJ54)
CAVVRGAQKLVF

SEQ ID NO: 657208 - protein, 18 aa, Homo sapiens
  CDR3 for beta chain variable domain of TCR clone 328604 (TRBV7-2, TRBJ2-3)
CASSLETSRGRKADTQYF

SEQ ID NO: 657209 - protein, 16 aa, Homo sapiens
  CDR3 for alpha chain variable domain of TCR clone 328605 (TRAV13-2, TRAJ32)
CAENMNYGGATNKLIF

SEQ ID NO: 657210 - protein, 14 aa, Homo sapiens
  CDR3 for beta chain variable domain of TCR clone 328605 (TRBV15, TRBJ2-5)
CASSSTGYQETQYF

SEQ ID NO: 657211 - protein, 12 aa, Homo sapiens
  CDR3 for alpha chain variable domain of TCR clone 328606 (TRAV17, TRAJ57)
CATDGGSEKLVF

SEQ ID NO: 657212 - protein, 11 aa, Homo sapiens
  CDR3 for beta chain variable domain of TCR clone 328606 (TRBV11-3, TRBJ2-1)
CASSLGNEQFF

SEQ ID NO: 657213 - protein, 13 aa, Homo sapiens
  CDR3 for alpha chain variable domain of TCR clone 328607 (TRAV1-2, TRAJ36)
CAVDQTGANNLFF

SEQ ID NO: 657214 - protein, 14 aa, Homo sapiens
  CDR3 for beta chain variable domain of TCR clone 328607 (TRBV20-1, TRBJ2-5)
CSAREMTKKETQYF

SEQ ID NO: 657215 - protein, 13 aa, Homo sapiens
  CDR3 for alpha chain variable domain of TCR clone 328608 (TRAV12-1, TRAJ26)
CVVRRNYGQNFVF

SEQ ID NO: 657216 - protein, 15 aa, Homo sapiens
  CDR3 for beta chain variable domain of TCR clone 328608 (TRBV9, TRBJ1-6)
CASSVAGTGDSPLHF

SEQ ID NO: 657217 - protein, 14 aa, Homo sapiens
  CDR3 for alpha chain variable domain of TCR clone 328609 (TRAV12-1, TRAJ45)
CVSYSGGGADGLTF

SEQ ID NO: 657218 - protein, 16 aa, Homo sapiens
  CDR3 for beta chain variable domain of TCR clone 328609 (TRBV11-1, TRBJ2-2)
CASSAEGLKNTGELFF

SEQ ID NO: 657219 - protein, 11 aa, Homo sapiens
  CDR3 for alpha chain variable domain of TCR clone 328610 (TRAV8-3, TRAJ15)
WAVGPGTALIF

SEQ ID NO: 657220 - protein, 18 aa, Homo sapiens
  CDR3 for beta chain variable domain of TCR clone 328610 (TRBV18, TRBJ2-3)
CASSYTSRAAGGTDTQYF

SEQ ID NO: 657221 - protein, 14 aa, Homo sapiens
  CDR3 for alpha chain variable domain of TCR clone 328611 (TRAV12-1, TRAJ3)
CVVILYSSASKIIF

SEQ ID NO: 657222 - protein, 16 aa, Homo sapiens
  CDR3 for beta chain variable domain of TCR clone 328611 (TRBV19, TRBJ2-1)
CASSKAGPSSYNEQFF

SEQ ID NO: 657223 - protein, 17 aa, Homo sapiens
  CDR3 for alpha chain variable domain of TCR clone 328612 (TRAV3, TRAJ6)
CAVRDGPREGGSYIPTF

SEQ ID NO: 657224 - protein, 14 aa, Homo sapiens
  CDR3 for beta chain variable domain of TCR clone 328612 (TRBV19, TRBJ2-1)
CASPTFVLSGEQFF

SEQ ID NO: 657225 - protein, 14 aa, Homo sapiens
  CDR3 for alpha chain variable domain of TCR clone 328613 (TRAV8-4, TRAJ54)
CAVSEVLGAQQLVF

SEQ ID NO: 657226 - protein, 14 aa, Homo sapiens
  CDR3 for beta chain variable domain of TCR clone 328613 (TRBV4-1, TRBJ2-2)
CASSQAVNTGELVF

SEQ ID NO: 657227 - protein, 14 aa, Homo sapiens
  CDR3 for alpha chain variable domain of TCR clone 328614 (TRAV35, TRAJ33)
CAGSSQDSNYQLIC

SEQ ID NO: 657228 - protein, 15 aa, Homo sapiens
  CDR3 for beta chain variable domain of TCR clone 328614 (TRBV29-1, TRBJ2-7)
CSVEFFDRGSYEQYF

SEQ ID NO: 657229 - protein, 17 aa, Homo sapiens
  CDR3 for alpha chain variable domain of TCR clone 328615 (TRAV12-2, TRAJ52)
CAVNPYAGGTSYGKLTF

SEQ ID NO: 657230 - protein, 16 aa, Homo sapiens
  CDR3 for beta chain variable domain of TCR clone 328615 (TRBV5-5, TRBJ2-2)
CASSGRREGATVELFF

SEQ ID NO: 657231 - protein, 12 aa, Homo sapiens
  CDR3 for alpha chain variable domain of TCR clone 328616 (TRAV8-3, TRAJ26)
CAGDNYGQNFVF

SEQ ID NO: 657232 - protein, 17 aa, Homo sapiens
  CDR3 for beta chain variable domain of TCR clone 328616 (TRBV7-8, TRBJ2-6)
CASSSGTGGAGANVLTF

SEQ ID NO: 657233 - protein, 16 aa, Homo sapiens
  CDR3 for alpha chain variable domain of TCR clone 328617 (TRAV23/DV6, TRAJ9)
CAASIGGNTGGFKTIF

SEQ ID NO: 657234 - protein, 15 aa, Homo sapiens
  CDR3 for beta chain variable domain of TCR clone 328617 (TRBV20-1, TRBJ2-7)
CSARGPLAGGREQYF

SEQ ID NO: 657235 - protein, 11 aa, Homo sapiens
  CDR3 for alpha chain variable domain of TCR clone 328618 (TRAV1-1, TRAJ23)
CAVRQGGKLIF

SEQ ID NO: 657236 - protein, 17 aa, Homo sapiens
  CDR3 for beta chain variable domain of TCR clone 328618 (TRBV7-2, TRBJ2-2)
CASSPRGAGEGTGELFF

SEQ ID NO: 657237 - protein, 17 aa, Homo sapiens
  CDR3 for alpha chain variable domain of TCR clone 328619 (TRAV4, TRAJ13)
CLVCVQGSSGGYQKVTF

SEQ ID NO: 657238 - protein, 16 aa, Homo sapiens
  CDR3 for beta chain variable domain of TCR clone 328619 (TRBV28, TRBJ2-7)
CASSLFFETGGPEQYF

SEQ ID NO: 657239 - protein, 13 aa, Homo sapiens
  CDR3 for alpha chain variable domain of TCR clone 328620 (TRAV13-1, TRAJ21)
CAASINNFNKFYF

SEQ ID NO: 657240 - protein, 13 aa, Homo sapiens
  CDR3 for beta chain variable domain of TCR clone 328620 (TRBV27, TRBJ1-4)
CASSLMGDEKLVF

SEQ ID NO: 657241 - protein, 19 aa, Homo sapiens
  CDR3 for alpha chain variable domain of TCR clone 328621 (TRAV2, TRAJ20)
IIQVREADAAVYRDCKLSF

SEQ ID NO: 657242 - protein, 13 aa, Homo sapiens
  CDR3 for beta chain variable domain of TCR clone 328621 (TRBV15, TRBJ1-6)
CATSGGLNSPLHF

SEQ ID NO: 657243 - protein, 14 aa, Homo sapiens
  CDR3 for alpha chain variable domain of TCR clone 328622 (TRAV1-2, TRAJ16)
CAFNRFSDGQKLLF

SEQ ID NO: 657244 - protein, 13 aa, Homo sapiens
  CDR3 for beta chain variable domain of TCR clone 328622 (TRBV19, TRBJ2-7)
CASRKAGGSEQYF

SEQ ID NO: 657245 - protein, 18 aa, Homo sapiens
  CDR3 for alpha chain variable domain of TCR clone 328623 (TRAV13-1, TRAJ52)
CAAKNPNAGGTSYGKLTF

SEQ ID NO: 657246 - protein, 18 aa, Homo sapiens
  CDR3 for beta chain variable domain of TCR clone 328623 (TRBV4-1, TRBJ1-4)
CASSPRTGVAWTNEKLFF

SEQ ID NO: 657247 - protein, 17 aa, Homo sapiens
  CDR3 for alpha chain variable domain of TCR clone 328624 (TRAV13-1, TRAJ52)
CAASSGAGGTSYGKLTF

SEQ ID NO: 657248 - protein, 20 aa, Homo sapiens
  CDR3 for beta chain variable domain of TCR clone 328624 (TRBV7-9, TRBJ1-5)
CISVSEAGQGAPYSNQPQHF

SEQ ID NO: 657249 - protein, 17 aa, Homo sapiens
  CDR3 for alpha chain variable domain of TCR clone 328625 (TRAV3, TRAJ6)
CAVRDGPRAGGSEIPTF

SEQ ID NO: 657250 - protein, 14 aa, Homo sapiens
  CDR3 for beta chain variable domain of TCR clone 328625 (TRBV7-2, TRBJ2-7)
CANSPKTSFYEQYF

SEQ ID NO: 657251 - protein, 12 aa, Homo sapiens
  CDR3 for alpha chain variable domain of TCR clone 328626 (TRAV13-2, TRAJ23)
CAERHRGGKLIF

SEQ ID NO: 657252 - protein, 17 aa, Homo sapiens
  CDR3 for beta chain variable domain of TCR clone 328626 (TRBV7-2, TRBJ1-1)
CASSFAGDRDTELSLDK

SEQ ID NO: 657253 - protein, 14 aa, Homo sapiens
  CDR3 for alpha chain variable domain of TCR clone 328627 (TRAV17, TRAJ12)
CATDGVDSSYKLIF

SEQ ID NO: 657254 - protein, 14 aa, Homo sapiens
  CDR3 for beta chain variable domain of TCR clone 328627 (TRBV7-3, TRBJ1-1)
CASSLKGGNTEAFF

SEQ ID NO: 657255 - protein, 15 aa, Homo sapiens
  CDR3 for alpha chain variable domain of TCR clone 328628 (TRAV1-2, TRAJ28)
CAVQYSGAGSYQLTL

SEQ ID NO: 657256 - protein, 13 aa, Homo sapiens
  CDR3 for beta chain variable domain of TCR clone 328628 (TRBV20-1, TRBJ2-7)
CSATHTSGHEQYF

SEQ ID NO: 657257 - protein, 13 aa, Homo sapiens
  CDR3 for alpha chain variable domain of TCR clone 328629 (TRAV8-3, TRAJ21)
CAVGSYNFNKFYF

SEQ ID NO: 657258 - protein, 14 aa, Homo sapiens
  CDR3 for beta chain variable domain of TCR clone 328629 (TRBV5-1, TRBJ2-3)
CASSLFGPTDTQYF

SEQ ID NO: 657259 - protein, 12 aa, Homo sapiens
  CDR3 for alpha chain variable domain of TCR clone 328630 (TRAV2, TRAJ37)
CAVAGNTGKIIF

SEQ ID NO: 657260 - protein, 17 aa, Homo sapiens
  CDR3 for beta chain variable domain of TCR clone 328630 (TRBV28, TRBJ2-5)
CASSTPEGDALQETQYF

SEQ ID NO: 657261 - protein, 18 aa, Homo sapiens
  CDR3 for alpha chain variable domain of TCR clone 328631 (TRAV26-2, TRAJ54)
CILRDVEVGIQGAHKLVF

SEQ ID NO: 657262 - protein, 16 aa, Homo sapiens
  CDR3 for beta chain variable domain of TCR clone 328631 (TRBV6-1, TRBJ2-5)
CASSETLDRGAETQYF

SEQ ID NO: 657263 - protein, 14 aa, Homo sapiens
  CDR3 for alpha chain variable domain of TCR clone 328632 (TRAV13-1, TRAJ28)
CAASKGAGSYQLTF

SEQ ID NO: 657264 - protein, 13 aa, Homo sapiens
  CDR3 for beta chain variable domain of TCR clone 328632 (TRBV2, TRBJ1-4)
CASSERAGEKLFF

SEQ ID NO: 657265 - protein, 16 aa, Homo sapiens
  CDR3 for alpha chain variable domain of TCR clone 328633 (TRAV30, TRAJ24)
CGTEIVDADSWGKFQF

SEQ ID NO: 657266 - protein, 16 aa, Homo sapiens
  CDR3 for beta chain variable domain of TCR clone 328633 (TRBV7-9, TRBJ1-3)
CASSQTSGLRMGTIYF

SEQ ID NO: 657267 - protein, 13 aa, Homo sapiens
  CDR3 for alpha chain variable domain of TCR clone 328634 (TRAV2, TRAJ5)
CAVPHTGRRALTF

SEQ ID NO: 657268 - protein, 15 aa, Homo sapiens
  CDR3 for beta chain variable domain of TCR clone 328634 (TRBV7-2, TRBJ2-2)
CASSTRTGYTGELFF

SEQ ID NO: 657269 - protein, 16 aa, Homo sapiens
  CDR3 for alpha chain variable domain of TCR clone 328635 (TRAV16, TRAJ52)
CSLSAAGGTSYGKLTF

SEQ ID NO: 657270 - protein, 19 aa, Homo sapiens
  CDR3 for beta chain variable domain of TCR clone 328635 (TRBV19, TRBJ2-5)
CASSIGQVTDFFLGETQYF

SEQ ID NO: 657271 - protein, 14 aa, Homo sapiens
  CDR3 for alpha chain variable domain of TCR clone 328636 (TRAV26-1, TRAJ40)
CIVRVARGTYKYIF

SEQ ID NO: 657272 - protein, 12 aa, Homo sapiens
  CDR3 for beta chain variable domain of TCR clone 328636 (TRBV7-3, TRBJ2-5)
CASSLDTQTQYF

SEQ ID NO: 657273 - protein, 13 aa, Homo sapiens
  CDR3 for alpha chain variable domain of TCR clone 328637 (TRAV3, TRAJ21)
CAVREPDFNKFYF

SEQ ID NO: 657274 - protein, 14 aa, Homo sapiens
  CDR3 for beta chain variable domain of TCR clone 328637 (TRBV7-2, TRBJ1-1)
CASSHRQGRTEAFF

SEQ ID NO: 657275 - protein, 15 aa, Homo sapiens
  CDR3 for alpha chain variable domain of TCR clone 328638 (TRAV25, TRAJ53)
CAATGGGGSKYKLTF

SEQ ID NO: 657276 - protein, 19 aa, Homo sapiens
  CDR3 for beta chain variable domain of TCR clone 328638 (TRBV7-2, TRBJ2-3)
CASSFRSRNWGGGTDTQYF

SEQ ID NO: 657277 - protein, 12 aa, Homo sapiens
  CDR3 for alpha chain variable domain of TCR clone 328639 (TRAV12-3, TRAJ17)
CAMTLTGNKLTF

SEQ ID NO: 657278 - protein, 22 aa, Homo sapiens
  CDR3 for beta chain variable domain of TCR clone 328639 (TRBV28, TRBJ1-3)
CASSMGWASGNTIFWRGKLAHC

SEQ ID NO: 657279 - protein, 13 aa, Homo sapiens
  CDR3 for alpha chain variable domain of TCR clone 328640 (TRAV13-1, TRAJ21)
CAASIYNFNKFYF

SEQ ID NO: 657280 - protein, 13 aa, Homo sapiens
  CDR3 for beta chain variable domain of TCR clone 328640 (TRBV27, TRBJ1-4)
CACSLMGDEKLFF

SEQ ID NO: 657281 - protein, 14 aa, Homo sapiens
  CDR3 for alpha chain variable domain of TCR clone 328641 (TRAV12-2, TRAJ13)
CAVKKTGGYRKVTF

SEQ ID NO: 657282 - protein, 15 aa, Homo sapiens
  CDR3 for beta chain variable domain of TCR clone 328641 (TRBV19, TRBJ2-1)
CASSNGGGSSNEQFF

SEQ ID NO: 657283 - protein, 14 aa, Homo sapiens
  CDR3 for alpha chain variable domain of TCR clone 328642 (TRAV12-3, TRAJ13)
CAMKNSGGYQKVTF

SEQ ID NO: 657284 - protein, 13 aa, Homo sapiens
  CDR3 for beta chain variable domain of TCR clone 328642 (TRBV7-9, TRBJ1-2)
CASSLKQNYGYTF

SEQ ID NO: 657285 - protein, 14 aa, Homo sapiens
  CDR3 for alpha chain variable domain of TCR clone 328643 (TRAV1-2, TRAJ8)
CAVREGTGFQKLVF

SEQ ID NO: 657286 - protein, 19 aa, Homo sapiens
  CDR3 for beta chain variable domain of TCR clone 328643 (TRBV28, TRBJ2-4)
CASSFQPGGPAHSKNIQYF

SEQ ID NO: 657287 - protein, 13 aa, Homo sapiens
  CDR3 for alpha chain variable domain of TCR clone 328644 (TRAV12-2, TRAJ20)
CAVYPSNDYKLSF

SEQ ID NO: 657288 - protein, 17 aa, Homo sapiens
  CDR3 for beta chain variable domain of TCR clone 328644 (TRBV6-3, TRBJ2-1)
CASSATGLAGIGNEQFF

SEQ ID NO: 657289 - protein, 14 aa, Homo sapiens
  CDR3 for alpha chain variable domain of TCR clone 328645 (TRAV3, TRAJ7)
CAVREEEREQQTRF

SEQ ID NO: 657290 - protein, 12 aa, Homo sapiens
  CDR3 for beta chain variable domain of TCR clone 328645 (TRBV24-1, TRBJ1-4)
CATSDPKEKLFF

SEQ ID NO: 657291 - protein, 12 aa, Homo sapiens
  CDR3 for alpha chain variable domain of TCR clone 328646 (TRAV30, TRAJ43)
CGTEERGNDMRC

SEQ ID NO: 657292 - protein, 13 aa, Homo sapiens
  CDR3 for beta chain variable domain of TCR clone 328646 (TRBV7-9, TRBJ2-3)
CASSPGSTDTQYF

SEQ ID NO: 657293 - protein, 18 aa, Homo sapiens
  CDR3 for alpha chain variable domain of TCR clone 328647 (TRAV12-2, )
CAVEDIQNPDPAVYQLRD

SEQ ID NO: 657294 - protein, 16 aa, Homo sapiens
  CDR3 for beta chain variable domain of TCR clone 328647 (TRBV20-1, TRBJ1-4)
CSAPGQGLLTNEKLFF

SEQ ID NO: 657295 - protein, 15 aa, Homo sapiens
  CDR3 for alpha chain variable domain of TCR clone 328648 (TRAV3, TRAJ29)
CAWRDLYSGNTPLVF

SEQ ID NO: 657296 - protein, 17 aa, Homo sapiens
  CDR3 for beta chain variable domain of TCR clone 328648 (TRBV20-1, TRBJ2-1)
CSARDPLAGVWDNEQFF

SEQ ID NO: 657297 - protein, 18 aa, Homo sapiens
  CDR3 for alpha chain variable domain of TCR clone 328649 (TRAV13-1, TRAJ52)
CAAKNPNAGGTSYGKLTF

SEQ ID NO: 657298 - protein, 15 aa, Homo sapiens
  CDR3 for beta chain variable domain of TCR clone 328649 (TRBV28, TRBJ2-3)
CASSADRQGANTQYF

SEQ ID NO: 657299 - protein, 14 aa, Homo sapiens
  CDR3 for alpha chain variable domain of TCR clone 328650 (TRAV35, TRAJ46)
CAGPQKSSGDKLTF

SEQ ID NO: 657300 - protein, 15 aa, Homo sapiens
  CDR3 for beta chain variable domain of TCR clone 328650 (TRBV7-9, TRBJ1-6)
CASSSPGRGNSPLHF

SEQ ID NO: 657301 - protein, 16 aa, Homo sapiens
  CDR3 for alpha chain variable domain of TCR clone 328651 (TRAV17, TRAJ9)
CATGEWGGTGGFKTIC

SEQ ID NO: 657302 - protein, 15 aa, Homo sapiens
  CDR3 for beta chain variable domain of TCR clone 328651 (TRBV20-1, TRBJ1-2)
CSARDSRGRNYGYTF

SEQ ID NO: 657303 - protein, 15 aa, Homo sapiens
  CDR3 for alpha chain variable domain of TCR clone 328652 (TRAV21, TRAJ52)
CAVRGGGTSYGKLTF

SEQ ID NO: 657304 - protein, 14 aa, Homo sapiens
  CDR3 for beta chain variable domain of TCR clone 328652 (TRBV7-6, TRBJ2-3)
CASSLGTVTDTQYF

SEQ ID NO: 657305 - protein, 13 aa, Homo sapiens
  CDR3 for alpha chain variable domain of TCR clone 328653 (TRAV23/DV6, TRAJ43)
CAASMGGNNDMRF

SEQ ID NO: 657306 - protein, 15 aa, Homo sapiens
  CDR3 for beta chain variable domain of TCR clone 328653 (TRBV11-3, TRBJ2-7)
CASSPGPASSYEQYF

SEQ ID NO: 657307 - protein, 15 aa, Homo sapiens
  CDR3 for alpha chain variable domain of TCR clone 328654 (TRAV12-2, TRAJ42)
CAVNRHGGSQGNLIF

SEQ ID NO: 657308 - protein, 13 aa, Homo sapiens
  CDR3 for beta chain variable domain of TCR clone 328654 (TRBV27, TRBJ1-1)
CASSVSANTEAFF

SEQ ID NO: 657309 - protein, 15 aa, Homo sapiens
  CDR3 for alpha chain variable domain of TCR clone 328655 (TRAV13-1, TRAJ32)
CAASIYGGATNKLIF

SEQ ID NO: 657310 - protein, 14 aa, Homo sapiens
  CDR3 for beta chain variable domain of TCR clone 328655 (TRBV7-9, TRBJ2-1)
CASSFASGSNEQFF

SEQ ID NO: 657311 - protein, 15 aa, Homo sapiens
  CDR3 for alpha chain variable domain of TCR clone 328656 (TRAV3, TRAJ20)
CAVRDSRSNDYKLSF

SEQ ID NO: 657312 - protein, 18 aa, Homo sapiens
  CDR3 for beta chain variable domain of TCR clone 328656 (TRBV11-2, TRBJ2-3)
CASSLGGASRGAPNTQYF

SEQ ID NO: 657313 - protein, 13 aa, Homo sapiens
  CDR3 for alpha chain variable domain of TCR clone 328657 (TRAV30, TRAJ20)
CGTVVSNDYKLSF

SEQ ID NO: 657314 - protein, 15 aa, Homo sapiens
  CDR3 for beta chain variable domain of TCR clone 328657 (TRBV5-1, TRBJ2-3)
CASSVTSGSTDTQYF

SEQ ID NO: 657315 - protein, 15 aa, Homo sapiens
  CDR3 for alpha chain variable domain of TCR clone 328658 (TRAV8-3, TRAJ27)
CAVGPSKTNAGNSTF

SEQ ID NO: 657316 - protein, 15 aa, Homo sapiens
  CDR3 for beta chain variable domain of TCR clone 328658 (TRBV7-2, TRBJ2-1)
CASSSGLAEGNERFF

SEQ ID NO: 657317 - protein, 13 aa, Homo sapiens
  CDR3 for alpha chain variable domain of TCR clone 328659 (TRAV13-1, TRAJ5)
CAARATGRRALTF

SEQ ID NO: 657318 - protein, 15 aa, Homo sapiens
  CDR3 for beta chain variable domain of TCR clone 328659 (TRBV7-2, TRBJ1-2)
CASSPRAGWNYGYTF

SEQ ID NO: 657319 - protein, 22 aa, Homo sapiens
  CDR3 for alpha chain variable domain of TCR clone 328660 (TRAV3, TRAJ38)
CAVRDCLNAGNNHIQNPDPAVY

SEQ ID NO: 657320 - protein, 19 aa, Homo sapiens
  CDR3 for beta chain variable domain of TCR clone 328660 (TRBV7-2, TRBJ2-3)
CARSFLSRNWGGGTDTQYF

SEQ ID NO: 657321 - protein, 14 aa, Homo sapiens
  CDR3 for alpha chain variable domain of TCR clone 328661 (TRAV12-3, TRAJ57)
CAMSAWGGSEKLVF

SEQ ID NO: 657322 - protein, 16 aa, Homo sapiens
  CDR3 for beta chain variable domain of TCR clone 328661 (TRBV18, TRBJ1-1)
CASSPGVGGRGGEAFF

SEQ ID NO: 657323 - protein, 13 aa, Homo sapiens
  CDR3 for alpha chain variable domain of TCR clone 328662 (TRAV1-1, TRAJ9)
CAAKNTGGFKTIF

SEQ ID NO: 657324 - protein, 13 aa, Homo sapiens
  CDR3 for beta chain variable domain of TCR clone 328662 (TRBV7-9, TRBJ1-2)
CASSLKQNYCYTF

SEQ ID NO: 657325 - protein, 11 aa, Homo sapiens
  CDR3 for alpha chain variable domain of TCR clone 328663 (TRAV12-2, TRAJ49)
CAVNTGNQFYF

SEQ ID NO: 657326 - protein, 14 aa, Homo sapiens
  CDR3 for beta chain variable domain of TCR clone 328663 (TRBV7-3, TRBJ1-1)
CASSLKGGNTEAFF

SEQ ID NO: 657327 - protein, 11 aa, Homo sapiens
  CDR3 for alpha chain variable domain of TCR clone 328664 (TRAV2, TRAJ37)
CAVDNTGKLIF

SEQ ID NO: 657328 - protein, 17 aa, Homo sapiens
  CDR3 for beta chain variable domain of TCR clone 328664 (TRBV13, TRBJ2-3)
CASSLSRVAGGRNTQYF

SEQ ID NO: 657329 - protein, 14 aa, Homo sapiens
  CDR3 for alpha chain variable domain of TCR clone 328665 (TRAV3, TRAJ34)
CAVKDINNTDKLIF

SEQ ID NO: 657330 - protein, 15 aa, Homo sapiens
  CDR3 for beta chain variable domain of TCR clone 328665 (TRBV20-1, TRBJ2-7)
CSARDRVSGMDEQYF

SEQ ID NO: 657331 - protein, 17 aa, Homo sapiens
  CDR3 for alpha chain variable domain of TCR clone 328666 (TRAV3, TRAJ6)
CAVRDGPRAGGSYIPTF

SEQ ID NO: 657332 - protein, 13 aa, Homo sapiens
  CDR3 for beta chain variable domain of TCR clone 328666 (TRBV28, TRBJ2-7)
CASSPSGTYEQYF

SEQ ID NO: 657333 - protein, 15 aa, Homo sapiens
  CDR3 for alpha chain variable domain of TCR clone 328667 (TRAV8-6, TRAJ11)
CAVNFMNSGYSTLTF

SEQ ID NO: 657334 - protein, 12 aa, Homo sapiens
  CDR3 for beta chain variable domain of TCR clone 328667 (TRBV12-4, TRBJ2-7)
CTSSLGGYEQYF

SEQ ID NO: 657335 - protein, 17 aa, Homo sapiens
  CDR3 for alpha chain variable domain of TCR clone 328668 (TRAV23/DV6, TRAJ53)
CAASKLGSGGSNYQLTF

SEQ ID NO: 657336 - protein, 14 aa, Homo sapiens
  CDR3 for beta chain variable domain of TCR clone 328668 (TRBV7-9, TRBJ2-3)
CASSLEQGTNTQYF

SEQ ID NO: 657337 - protein, 23 aa, Homo sapiens
  CDR3 for alpha chain variable domain of TCR clone 328669 (TRAV12-2, TRAJ36)
SLPIRDSQPSDSATLERANNLFF

SEQ ID NO: 657338 - protein, 14 aa, Homo sapiens
  CDR3 for beta chain variable domain of TCR clone 328669 (TRBV7-3, TRBJ1-1)
CASSLKGGNTEAFF

SEQ ID NO: 657339 - protein, 14 aa, Homo sapiens
  CDR3 for alpha chain variable domain of TCR clone 328670 (TRAV26-1, TRAJ39)
RIVRGSRADNMLTF

SEQ ID NO: 657340 - protein, 15 aa, Homo sapiens
  CDR3 for beta chain variable domain of TCR clone 328670 (TRBV7-9, TRBJ1-5)
CASSQGHQPNQPQHF

SEQ ID NO: 657341 - protein, 13 aa, Homo sapiens
  CDR3 for alpha chain variable domain of TCR clone 328671 (TRAV21, TRAJ57)
CAVTQGGSGKLVF

SEQ ID NO: 657342 - protein, 16 aa, Homo sapiens
  CDR3 for beta chain variable domain of TCR clone 328671 (TRBV29-1, TRBJ2-7)
CSVADAEDGTAYEQYF

SEQ ID NO: 657343 - protein, 14 aa, Homo sapiens
  CDR3 for alpha chain variable domain of TCR clone 328672 (TRAV1-2, TRAJ8)
CAVREDTGFQKLVF

SEQ ID NO: 657344 - protein, 14 aa, Homo sapiens
  CDR3 for beta chain variable domain of TCR clone 328672 (TRBV11-2, TRBJ2-3)
CASSRLVRTDTQYF

SEQ ID NO: 657345 - protein, 14 aa, Homo sapiens
  CDR3 for alpha chain variable domain of TCR clone 328673 (TRAV22, TRAJ24)
CAVDSSNSWGELQF

SEQ ID NO: 657346 - protein, 11 aa, Homo sapiens
  CDR3 for beta chain variable domain of TCR clone 328673 (TRBV29-1, TRBJ2-3)
CSVEIGDTQYF

SEQ ID NO: 657347 - protein, 11 aa, Homo sapiens
  CDR3 for alpha chain variable domain of TCR clone 328674 (TRAV16, TRAJ33)
SALHSNYQLIW

SEQ ID NO: 657348 - protein, 15 aa, Homo sapiens
  CDR3 for beta chain variable domain of TCR clone 328674 (TRBV4-1, TRBJ2-7)
CASSQQGQGFDEQYF

SEQ ID NO: 657349 - protein, 15 aa, Homo sapiens
  CDR3 for alpha chain variable domain of TCR clone 328675 (TRAV2, TRAJ9)
CAVAALNTGGFKTIF

SEQ ID NO: 657350 - protein, 13 aa, Homo sapiens
  CDR3 for beta chain variable domain of TCR clone 328675 (TRBV7-9, TRBJ1-2)
CASSLKQNYGDTF

SEQ ID NO: 657351 - protein, 13 aa, Homo sapiens
  CDR3 for alpha chain variable domain of TCR clone 328676 (TRAV35, TRAJ42)
CAGFPVSQGNLIF

SEQ ID NO: 657352 - protein, 14 aa, Homo sapiens
  CDR3 for beta chain variable domain of TCR clone 328676 (TRBV4-1, TRBJ2-2)
CASSQAVNTGELFF

SEQ ID NO: 657353 - protein, 12 aa, Homo sapiens
  CDR3 for alpha chain variable domain of TCR clone 328677 (TRAV12-3, TRAJ17)
CAMTLTGNKLTF

SEQ ID NO: 657354 - protein, 16 aa, Homo sapiens
  CDR3 for beta chain variable domain of TCR clone 328677 (TRBV7-3, TRBJ2-2)
CASSLKRGTLTGELFF

SEQ ID NO: 657355 - protein, 18 aa, Homo sapiens
  CDR3 for alpha chain variable domain of TCR clone 328678 (TRAV21, TRAJ52)
CAVRPSPAGGTSYGKLTF

SEQ ID NO: 657356 - protein, 15 aa, Homo sapiens
  CDR3 for beta chain variable domain of TCR clone 328678 (TRBV7-3, TRBJ2-2)
CQQLKAGDLVRGAVF

SEQ ID NO: 657357 - protein, 14 aa, Homo sapiens
  CDR3 for alpha chain variable domain of TCR clone 328679 (TRAV13-1, TRAJ10)
CAAKEPGGGNKLTF

SEQ ID NO: 657358 - protein, 14 aa, Homo sapiens
  CDR3 for beta chain variable domain of TCR clone 328679 (TRBV6-6, TRBJ2-7)
CASSDSGAGYEQFF

SEQ ID NO: 657359 - protein, 13 aa, Homo sapiens
  CDR3 for alpha chain variable domain of TCR clone 328680 (TRAV13-1, TRAJ39)
CAASIWAGNMLTF

SEQ ID NO: 657360 - protein, 15 aa, Homo sapiens
  CDR3 for beta chain variable domain of TCR clone 328680 (TRBV7-9, TRBJ1-1)
CASSLHEQGGTEAFF

SEQ ID NO: 657361 - protein, 14 aa, Homo sapiens
  CDR3 for alpha chain variable domain of TCR clone 328681 (TRAV1-2, TRAJ16)
CAVNRFSDGQKLPF

SEQ ID NO: 657362 - protein, 14 aa, Homo sapiens
  CDR3 for beta chain variable domain of TCR clone 328681 (TRBV15, TRBJ1-1)
CATSREWGNTEAFF

SEQ ID NO: 657363 - protein, 13 aa, Homo sapiens
  CDR3 for alpha chain variable domain of TCR clone 328682 (TRAV17, TRAJ26)
CATVDNYGQNFVF

SEQ ID NO: 657364 - protein, 15 aa, Homo sapiens
  CDR3 for beta chain variable domain of TCR clone 328682 (TRBV7-2, TRBJ2-3)
CASSLAGAFIDTQYF

SEQ ID NO: 657365 - protein, 12 aa, Homo sapiens
  CDR3 for alpha chain variable domain of TCR clone 328683 (TRAV13-1, TRAJ49)
CAAPNTGNQFYF

SEQ ID NO: 657366 - protein, 17 aa, Homo sapiens
  CDR3 for beta chain variable domain of TCR clone 328683 (TRBV25-1, TRBJ2-7)
CASSDARVVFSSYEQYI

SEQ ID NO: 657367 - protein, 12 aa, Homo sapiens
  CDR3 for alpha chain variable domain of TCR clone 328684 (TRAV2, TRAJ34)
CAVERNTDKLIF

SEQ ID NO: 657368 - protein, 18 aa, Homo sapiens
  CDR3 for beta chain variable domain of TCR clone 328684 (TRBV11-2, TRBJ2-3)
CASSLGGASRGAPNTQYF

SEQ ID NO: 657369 - protein, 12 aa, Homo sapiens
  CDR3 for alpha chain variable domain of TCR clone 328685 (TRAV35, TRAJ12)
CAGMDSSYKLIF

SEQ ID NO: 657370 - protein, 14 aa, Homo sapiens
  CDR3 for beta chain variable domain of TCR clone 328685 (TRBV28, TRBJ2-5)
CASSVYRGTETQYF

SEQ ID NO: 657371 - protein, 11 aa, Homo sapiens
  CDR3 for alpha chain variable domain of TCR clone 328686 (TRAV2, TRAJ13)
CASGGYQKVTF

SEQ ID NO: 657372 - protein, 13 aa, Homo sapiens
  CDR3 for beta chain variable domain of TCR clone 328686 (TRBV6-5, TRBJ2-5)
LASGGSYQETQYF

SEQ ID NO: 657373 - protein, 13 aa, Homo sapiens
  CDR3 for alpha chain variable domain of TCR clone 328687 (TRAV2, TRAJ29)
CAAGNSGNTPFVF

SEQ ID NO: 657374 - protein, 16 aa, Homo sapiens
  CDR3 for beta chain variable domain of TCR clone 328687 (TRBV7-9, TRBJ1-2)
CASSPGGGAINYGYTF

SEQ ID NO: 657375 - protein, 14 aa, Homo sapiens
  CDR3 for alpha chain variable domain of TCR clone 328688 (TRAV2, TRAJ9)
CAVEDRSGGFKTSF

SEQ ID NO: 657376 - protein, 12 aa, Homo sapiens
  CDR3 for beta chain variable domain of TCR clone 328688 (TRBV12-4, TRBJ2-4)
CASSSSGNIQYF

SEQ ID NO: 657377 - protein, 13 aa, Homo sapiens
  CDR3 for alpha chain variable domain of TCR clone 328689 (TRAV1-2, TRAJ24)
CAVTTDSWGKLQF

SEQ ID NO: 657378 - protein, 13 aa, Homo sapiens
  CDR3 for beta chain variable domain of TCR clone 328689 (TRBV20-1, TRBJ1-1)
CSTRGGGNTEAFF

SEQ ID NO: 657379 - protein, 15 aa, Homo sapiens
  CDR3 for alpha chain variable domain of TCR clone 328690 (TRAV8-3, TRAJ41)
CAVESNSNSGYALNF

SEQ ID NO: 657380 - protein, 12 aa, Homo sapiens
  CDR3 for beta chain variable domain of TCR clone 328690 (TRBV7-9, TRBJ1-5)
CASSPQGQPQHF

SEQ ID NO: 657381 - protein, 14 aa, Homo sapiens
  CDR3 for alpha chain variable domain of TCR clone 328691 (TRAV13-2, TRAJ26)
CAENLGNYGKNFVF

SEQ ID NO: 657382 - protein, 14 aa, Homo sapiens
  CDR3 for beta chain variable domain of TCR clone 328691 (TRBV19, TRBJ1-3)
CASNSGNSGNTIYF

SEQ ID NO: 657383 - protein, 14 aa, Homo sapiens
  CDR3 for alpha chain variable domain of TCR clone 328692 (TRAV1-2, TRAJ16)
CAVNRFSDGQKLLF

SEQ ID NO: 657384 - protein, 15 aa, Homo sapiens
  CDR3 for beta chain variable domain of TCR clone 328692 (TRBV19, TRBJ1-5)
CASGIVWADNQPQHF

SEQ ID NO: 657385 - protein, 14 aa, Homo sapiens
  CDR3 for alpha chain variable domain of TCR clone 328693 (TRAV1-2, TRAJ16)
CAVNRFSDGQKLLF

SEQ ID NO: 657386 - protein, 16 aa, Homo sapiens
  CDR3 for beta chain variable domain of TCR clone 328693 (TRBV11-2, TRBJ1-2)
CASSPSGREANYGYTF

SEQ ID NO: 657387 - protein, 18 aa, Homo sapiens
  CDR3 for alpha chain variable domain of TCR clone 328694 (TRAV26-2, TRAJ32)
CILRAPLNYGGATNKLIF

SEQ ID NO: 657388 - protein, 17 aa, Homo sapiens
  CDR3 for beta chain variable domain of TCR clone 328694 (TRBV4-3, TRBJ2-5)
CASSQDGIAGGWATQYF

SEQ ID NO: 657389 - protein, 10 aa, Homo sapiens
  CDR3 for alpha chain variable domain of TCR clone 328695 (TRAV30, TRAJ48)
CGIGNEKLTF

SEQ ID NO: 657390 - protein, 14 aa, Homo sapiens
  CDR3 for beta chain variable domain of TCR clone 328695 (TRBV7-6, TRBJ2-3)
CASIVAGGTDTQYF

SEQ ID NO: 657391 - protein, 13 aa, Homo sapiens
  CDR3 for alpha chain variable domain of TCR clone 328696 (TRAV14/DV4, TRAJ20)
CAMRESNDYKPSF

SEQ ID NO: 657392 - protein, 15 aa, Homo sapiens
  CDR3 for beta chain variable domain of TCR clone 328696 (TRBV7-9, TRBJ1-1)
CASSRPGTANTEAFF

SEQ ID NO: 657393 - protein, 10 aa, Homo sapiens
  CDR3 for alpha chain variable domain of TCR clone 328697 (TRAV12-2, TRAJ48)
CAVTSEKLTF

SEQ ID NO: 657394 - protein, 17 aa, Homo sapiens
  CDR3 for beta chain variable domain of TCR clone 328697 (TRBV11-1, TRBJ2-7)
CASSLTGSVGLDYEQYF

SEQ ID NO: 657395 - protein, 14 aa, Homo sapiens
  CDR3 for alpha chain variable domain of TCR clone 328698 (TRAV4, TRAJ10)
CLVGDTGGGNKLTF

SEQ ID NO: 657396 - protein, 16 aa, Homo sapiens
  CDR3 for beta chain variable domain of TCR clone 328698 (TRBV7-2, TRBJ2-3)
CASSLVALYSTDTQYF

SEQ ID NO: 657397 - protein, 11 aa, Homo sapiens
  CDR3 for alpha chain variable domain of TCR clone 328699 (TRAV3, TRAJ21)
CAVGNFNNFHF

SEQ ID NO: 657398 - protein, 16 aa, Homo sapiens
  CDR3 for beta chain variable domain of TCR clone 328699 (TRBV19, TRBJ2-1)
CASSKAGPSSYNEQFF

SEQ ID NO: 657399 - protein, 14 aa, Homo sapiens
  CDR3 for alpha chain variable domain of TCR clone 328700 (TRAV9-2, TRAJ39)
CALYIYNAGNMLTF

SEQ ID NO: 657400 - protein, 16 aa, Homo sapiens
  CDR3 for beta chain variable domain of TCR clone 328700 (TRBV29-1, TRBJ2-6)
CSVEDITYAGANVLTF

SEQ ID NO: 657401 - protein, 13 aa, Homo sapiens
  CDR3 for alpha chain variable domain of TCR clone 328701 (TRAV8-3, TRAJ28)
CAVGSVGSYQLTF

SEQ ID NO: 657402 - protein, 13 aa, Homo sapiens
  CDR3 for beta chain variable domain of TCR clone 328701 (TRBV29-1, TRBJ2-1)
CSVEGGRVNEQFF

SEQ ID NO: 657403 - protein, 17 aa, Homo sapiens
  CDR3 for alpha chain variable domain of TCR clone 328702 (TRAV9-2, TRAJ45)
CALSGYYSGGGADGLTF

SEQ ID NO: 657404 - protein, 16 aa, Homo sapiens
  CDR3 for beta chain variable domain of TCR clone 328702 (TRBV11-2, TRBJ2-7)
CASSPTTGGVSYEQYF

SEQ ID NO: 657405 - protein, 13 aa, Homo sapiens
  CDR3 for alpha chain variable domain of TCR clone 328703 (TRAV23/DV6, TRAJ27)
CAASKPMHANQPL

SEQ ID NO: 657406 - protein, 12 aa, Homo sapiens
  CDR3 for beta chain variable domain of TCR clone 328703 (TRBV12-4, TRBJ2-7)
CASSLGGYEQYF

SEQ ID NO: 657407 - protein, 13 aa, Homo sapiens
  CDR3 for alpha chain variable domain of TCR clone 328704 (TRAV20, TRAJ15)
CATINQAGTALIL

SEQ ID NO: 657408 - protein, 13 aa, Homo sapiens
  CDR3 for beta chain variable domain of TCR clone 328704 (TRBV12-4, TRBJ2-1)
CASRQPSNNEQFF

SEQ ID NO: 657409 - protein, 12 aa, Homo sapiens
  CDR3 for alpha chain variable domain of TCR clone 328705 (TRAV30, TRAJ20)
CGTESNDYKLSF

SEQ ID NO: 657410 - protein, 14 aa, Homo sapiens
  CDR3 for beta chain variable domain of TCR clone 328705 (TRBV7-2, TRBJ2-7)
CASSPKTSFYEQYF

SEQ ID NO: 657411 - protein, 14 aa, Homo sapiens
  CDR3 for alpha chain variable domain of TCR clone 328706 (TRAV26-1, TRAJ38)
CIADNAGNNRKRIW

SEQ ID NO: 657412 - protein, 16 aa, Homo sapiens
  CDR3 for beta chain variable domain of TCR clone 328706 (TRBV12-5, TRBJ2-5)
CASGPRTSGNQETRYF

SEQ ID NO: 657413 - protein, 13 aa, Homo sapiens
  CDR3 for alpha chain variable domain of TCR clone 328707 (TRAV27, TRAJ56)
CAGKPGANSKLTF

SEQ ID NO: 657414 - protein, 16 aa, Homo sapiens
  CDR3 for beta chain variable domain of TCR clone 328707 (TRBV7-6, TRBJ1-6)
CASSLSSRIGDSPLHF

SEQ ID NO: 657415 - protein, 14 aa, Homo sapiens
  CDR3 for alpha chain variable domain of TCR clone 328708 (TRAV35, TRAJ56)
CAGQLTGANSKLTF

SEQ ID NO: 657416 - protein, 12 aa, Homo sapiens
  CDR3 for beta chain variable domain of TCR clone 328708 (TRBV7-9, TRBJ1-4)
CASSTDREKLFF

SEQ ID NO: 657417 - protein, 15 aa, Homo sapiens
  CDR3 for alpha chain variable domain of TCR clone 328709 (TRAV13-1, TRAJ52)
CAASSPSTSYGKLTS

SEQ ID NO: 657418 - protein, 13 aa, Homo sapiens
  CDR3 for beta chain variable domain of TCR clone 328709 (TRBV27, TRBJ2-5)
CASSLSSLETQYF

SEQ ID NO: 657419 - protein, 18 aa, Homo sapiens
  CDR3 for alpha chain variable domain of TCR clone 328710 (TRAV26-1, TRAJ52)
CIVRVEWAGGTSYGKLTF

SEQ ID NO: 657420 - protein, 13 aa, Homo sapiens
  CDR3 for beta chain variable domain of TCR clone 328710 (TRBV7-3, TRBJ1-2)
CASSLKRGYGYTF

SEQ ID NO: 657421 - protein, 13 aa, Homo sapiens
  CDR3 for alpha chain variable domain of TCR clone 328711 (TRAV13-1, TRAJ12)
CAASPDSSYKLIF

SEQ ID NO: 657422 - protein, 13 aa, Homo sapiens
  CDR3 for beta chain variable domain of TCR clone 328711 (TRBV12-4, TRBJ1-2)
CASSSGLTVISSF

SEQ ID NO: 657423 - protein, 13 aa, Homo sapiens
  CDR3 for alpha chain variable domain of TCR clone 328712 (TRAV2, TRAJ15)
CAVASQAGTALIF

SEQ ID NO: 657424 - protein, 16 aa, Homo sapiens
  CDR3 for beta chain variable domain of TCR clone 328712 (TRBV20-1, TRBJ1-4)
CSAPGLGLLTNEKLFF

SEQ ID NO: 657425 - protein, 14 aa, Homo sapiens
  CDR3 for alpha chain variable domain of TCR clone 328713 (TRAV2, TRAJ37)
CAVDFTSNTGKLIF

SEQ ID NO: 657426 - protein, 14 aa, Homo sapiens
  CDR3 for beta chain variable domain of TCR clone 328713 (TRBV2, TRBJ1-2)
CASSGEARRSGYTF

SEQ ID NO: 657427 - protein, 13 aa, Homo sapiens
  CDR3 for alpha chain variable domain of TCR clone 328714 (TRAV13-2, TRAJ13)
CAGLSGGYQKVTF

SEQ ID NO: 657428 - protein, 15 aa, Homo sapiens
  CDR3 for beta chain variable domain of TCR clone 328714 (TRBV19, TRBJ1-1)
CASSIGGGRNTEAFF

SEQ ID NO: 657429 - protein, 23 aa, Homo sapiens
  CDR3 for alpha chain variable domain of TCR clone 328715 (TRAV16, TRAJ10)
CSRGRLSHVLPRSRTGGGNKLTF

SEQ ID NO: 657430 - protein, 15 aa, Homo sapiens
  CDR3 for beta chain variable domain of TCR clone 328715 (TRBV6-3, TRBJ2-7)
CASSSPGTVFYEQYF

SEQ ID NO: 657431 - protein, 14 aa, Homo sapiens
  CDR3 for alpha chain variable domain of TCR clone 328716 (TRAV12-2, TRAJ36)
CAAKETTGANNLFF

SEQ ID NO: 657432 - protein, 14 aa, Homo sapiens
  CDR3 for beta chain variable domain of TCR clone 328716 (TRBV7-3, TRBJ2-2)
CASSSGGYTGELFF

SEQ ID NO: 657433 - protein, 13 aa, Homo sapiens
  CDR3 for alpha chain variable domain of TCR clone 328717 (TRAV13-1, TRAJ6)
CAASSGGSYIPKF

SEQ ID NO: 657434 - protein, 14 aa, Homo sapiens
  CDR3 for beta chain variable domain of TCR clone 328717 (TRBV20-1, TRBJ2-4)
CSAVAGGPGNIQYF

SEQ ID NO: 657435 - protein, 21 aa, Homo sapiens
  CDR3 for alpha chain variable domain of TCR clone 328718 (TRAV25, TRAJ53)
TATQTTDVGTGSGGSNYKLTF

SEQ ID NO: 657436 - protein, 16 aa, Homo sapiens
  CDR3 for beta chain variable domain of TCR clone 328718 (TRBV4-2, TRBJ2-3)
CARSLSSGGHTDTQYF

SEQ ID NO: 657437 - protein, 15 aa, Homo sapiens
  CDR3 for alpha chain variable domain of TCR clone 328719 (TRAV26-1, TRAJ42)
CIVRVKGGNQGNLIF

SEQ ID NO: 657438 - protein, 14 aa, Homo sapiens
  CDR3 for beta chain variable domain of TCR clone 328719 (TRBV19, TRBJ2-2)
CATTGHANTGELFF

SEQ ID NO: 657439 - protein, 14 aa, Homo sapiens
  CDR3 for alpha chain variable domain of TCR clone 328720 (TRAV30, TRAJ26)
CGTEIVSYGQNFVF

SEQ ID NO: 657440 - protein, 16 aa, Homo sapiens
  CDR3 for beta chain variable domain of TCR clone 328720 (TRBV19, TRBJ2-3)
CASSPGAASRTDTQYF

SEQ ID NO: 657441 - protein, 15 aa, Homo sapiens
  CDR3 for alpha chain variable domain of TCR clone 328721 (TRAV2, TRAJ13)
CAVEPEFWGLPESYL

SEQ ID NO: 657442 - protein, 14 aa, Homo sapiens
  CDR3 for beta chain variable domain of TCR clone 328721 (TRBV28, TRBJ1-5)
CASSGQALYQPQRF

SEQ ID NO: 657443 - protein, 12 aa, Homo sapiens
  CDR3 for alpha chain variable domain of TCR clone 328722 (TRAV16, TRAJ12)
CAHGDSSYKLIL

SEQ ID NO: 657444 - protein, 14 aa, Homo sapiens
  CDR3 for beta chain variable domain of TCR clone 328722 (TRBV25-1, TRBJ1-1)
CASTHLGGNTEAFF

SEQ ID NO: 657445 - protein, 17 aa, Homo sapiens
  CDR3 for alpha chain variable domain of TCR clone 328723 (TRAV3, TRAJ38)
CAVRDCLNAGNNRKLIW

SEQ ID NO: 657446 - protein, 16 aa, Homo sapiens
  CDR3 for beta chain variable domain of TCR clone 328723 (TRBV11-2, TRBJ2-7)
CASSLAPTGVNYEQYF

SEQ ID NO: 657447 - protein, 15 aa, Homo sapiens
  CDR3 for alpha chain variable domain of TCR clone 328724 (TRAV27, TRAJ38)
CAARRNAGNNRKLMW

SEQ ID NO: 657448 - protein, 13 aa, Homo sapiens
  CDR3 for beta chain variable domain of TCR clone 328724 (TRBV12-5, TRBJ2-3)
CASSERQSDTQYF

SEQ ID NO: 657449 - protein, 14 aa, Homo sapiens
  CDR3 for alpha chain variable domain of TCR clone 328725 (TRAV13-1, TRAJ6)
CAASITGGSYVPKF

SEQ ID NO: 657450 - protein, 14 aa, Homo sapiens
  CDR3 for beta chain variable domain of TCR clone 328725 (TRBV6-3, TRBJ2-1)
CASLHSAYYIEQFF

SEQ ID NO: 657451 - protein, 12 aa, Homo sapiens
  CDR3 for alpha chain variable domain of TCR clone 328726 (TRAV20, TRAJ34)
CAVKDNTDKLIF

SEQ ID NO: 657452 - protein, 14 aa, Homo sapiens
  CDR3 for beta chain variable domain of TCR clone 328726 (TRBV7-9, TRBJ2-7)
SASSRPGGPYEQYF

SEQ ID NO: 657453 - protein, 16 aa, Homo sapiens
  CDR3 for alpha chain variable domain of TCR clone 328727 (TRAV3, TRAJ37)
CAVRPHGSGNTGQLIF

SEQ ID NO: 657454 - protein, 16 aa, Homo sapiens
  CDR3 for beta chain variable domain of TCR clone 328727 (TRBV7-9, TRBJ2-3)
CASSPWREVGTDTQYF

SEQ ID NO: 657455 - protein, 13 aa, Homo sapiens
  CDR3 for alpha chain variable domain of TCR clone 328728 (TRAV17, TRAJ41)
CATGRNSGYALNF

SEQ ID NO: 657456 - protein, 13 aa, Homo sapiens
  CDR3 for beta chain variable domain of TCR clone 328728 (TRBV7-3, TRBJ1-1)
CASSQDWGAEAFF

SEQ ID NO: 657457 - protein, 16 aa, Homo sapiens
  CDR3 for alpha chain variable domain of TCR clone 328729 (TRAV8-3, TRAJ22)
CAVDLLGSGSARQLTF

SEQ ID NO: 657458 - protein, 14 aa, Homo sapiens
  CDR3 for beta chain variable domain of TCR clone 328729 (TRBV11-2, TRBJ2-7)
CASSLEVEGYEQYF

SEQ ID NO: 657459 - protein, 15 aa, Homo sapiens
  CDR3 for alpha chain variable domain of TCR clone 328730 (TRAV12-1, TRAJ45)
CVVLSVGGGADGLTF

SEQ ID NO: 657460 - protein, 14 aa, Homo sapiens
  CDR3 for beta chain variable domain of TCR clone 328730 (TRBV11-2, TRBJ2-5)
CASSRTGGIETQYF

SEQ ID NO: 657461 - protein, 18 aa, Homo sapiens
  CDR3 for alpha chain variable domain of TCR clone 328731 (TRAV12-1, TRAJ52)
CVVKLINAGGTSYGKLTF

SEQ ID NO: 657462 - protein, 15 aa, Homo sapiens
  CDR3 for beta chain variable domain of TCR clone 328731 (TRBV28, TRBJ2-1)
CASSIIAGGRSEQFF

SEQ ID NO: 657463 - protein, 11 aa, Homo sapiens
  CDR3 for alpha chain variable domain of TCR clone 328732 (TRAV21, TRAJ11)
CAVNGYSTLTF

SEQ ID NO: 657464 - protein, 14 aa, Homo sapiens
  CDR3 for beta chain variable domain of TCR clone 328732 (TRBV2, TRBJ2-7)
CASSLTSAGYEQYF

SEQ ID NO: 657465 - protein, 14 aa, Homo sapiens
  CDR3 for alpha chain variable domain of TCR clone 328733 (TRAV1-2, TRAJ16)
CAVNRFSDGQKLLF

SEQ ID NO: 657466 - protein, 17 aa, Homo sapiens
  CDR3 for beta chain variable domain of TCR clone 328733 (TRBV7-8, TRBJ2-6)
CASSAGTGGAEANVLTF

SEQ ID NO: 657467 - protein, 12 aa, Homo sapiens
  CDR3 for alpha chain variable domain of TCR clone 328734 (TRAV3, TRAJ26)
CAVRDYGQNFVF

SEQ ID NO: 657468 - protein, 13 aa, Homo sapiens
  CDR3 for beta chain variable domain of TCR clone 328734 (TRBV11-3, TRBJ2-3)
CASSHDTKDTQYF

SEQ ID NO: 657469 - protein, 13 aa, Homo sapiens
  CDR3 for alpha chain variable domain of TCR clone 328735 (TRAV3, TRAJ21)
CAVREPYFNKFYF

SEQ ID NO: 657470 - protein, 14 aa, Homo sapiens
  CDR3 for beta chain variable domain of TCR clone 328735 (TRBV20-1, TRBJ2-3)
CSARGGTSTDTQYF

SEQ ID NO: 657471 - protein, 16 aa, Homo sapiens
  CDR3 for alpha chain variable domain of TCR clone 328736 (TRAV30, TRAJ32)
CGTESSYGGATNKLIF

SEQ ID NO: 657472 - protein, 12 aa, Homo sapiens
  CDR3 for beta chain variable domain of TCR clone 328736 (TRBV11-2, TRBJ2-5)
CASSPPAEPQYF

SEQ ID NO: 657473 - protein, 13 aa, Homo sapiens
  CDR3 for alpha chain variable domain of TCR clone 328737 (TRAV17, TRAJ5)
CAPMDTGRRALTF

SEQ ID NO: 657474 - protein, 17 aa, Homo sapiens
  CDR3 for beta chain variable domain of TCR clone 328737 (TRBV7-7, TRBJ1-1)
CASIGDRPNLGVTEAFF

SEQ ID NO: 657475 - protein, 12 aa, Homo sapiens
  CDR3 for alpha chain variable domain of TCR clone 328738 (TRAV1-1, TRAJ12)
CAVGDSRYKLIF

SEQ ID NO: 657476 - protein, 17 aa, Homo sapiens
  CDR3 for beta chain variable domain of TCR clone 328738 (TRBV25-1, TRBJ2-1)
CASSAYGQGRGVYEQFF

SEQ ID NO: 657477 - protein, 11 aa, Homo sapiens
  CDR3 for alpha chain variable domain of TCR clone 328739 (TRAV2, TRAJ40)
CAVEDPGNLQI

SEQ ID NO: 657478 - protein, 14 aa, Homo sapiens
  CDR3 for beta chain variable domain of TCR clone 328739 (TRBV19, TRBJ2-2)
CASSTLHRYGELFF

SEQ ID NO: 657479 - protein, 15 aa, Homo sapiens
  CDR3 for alpha chain variable domain of TCR clone 328740 (TRAV29/DV5, TRAJ57)
CAASLLSGGSAKLVF

SEQ ID NO: 657480 - protein, 15 aa, Homo sapiens
  CDR3 for beta chain variable domain of TCR clone 328740 (TRBV5-1, TRBJ1-3)
CASSLEGGSGNTIYF

SEQ ID NO: 657481 - protein, 13 aa, Homo sapiens
  CDR3 for alpha chain variable domain of TCR clone 328741 (TRAV8-4, TRAJ9)
CAVSDTGGFKTIF

SEQ ID NO: 657482 - protein, 13 aa, Homo sapiens
  CDR3 for beta chain variable domain of TCR clone 328741 (TRBV10-3, TRBJ2-7)
CASKLAVNYEQYF

SEQ ID NO: 657483 - protein, 14 aa, Homo sapiens
  CDR3 for alpha chain variable domain of TCR clone 328742 (TRAV13-1, TRAJ8)
CAASEDTGFQKIVF

SEQ ID NO: 657484 - protein, 13 aa, Homo sapiens
  CDR3 for beta chain variable domain of TCR clone 328742 (TRBV19, TRBJ1-5)
CASSTRRDQPQHF

SEQ ID NO: 657485 - protein, 15 aa, Homo sapiens
  CDR3 for alpha chain variable domain of TCR clone 328743 (TRAV38-1, TRAJ37)
CAFIFGSGNTGKLSF

SEQ ID NO: 657486 - protein, 12 aa, Homo sapiens
  CDR3 for beta chain variable domain of TCR clone 328743 (TRBV7-9, TRBJ2-7)
CASSLEGYEQYF

SEQ ID NO: 657487 - protein, 13 aa, Homo sapiens
  CDR3 for alpha chain variable domain of TCR clone 328744 (TRAV20, TRAJ37)
CAGCSSNTGKLIF

SEQ ID NO: 657488 - protein, 11 aa, Homo sapiens
  CDR3 for beta chain variable domain of TCR clone 328744 (TRBV12-4, TRBJ2-3)
CASTAIDTQYF

SEQ ID NO: 657489 - protein, 15 aa, Homo sapiens
  CDR3 for alpha chain variable domain of TCR clone 328745 (TRAV16, TRAJ57)
CALSGGQGGSEKLVF

SEQ ID NO: 657490 - protein, 18 aa, Homo sapiens
  CDR3 for beta chain variable domain of TCR clone 328745 (TRBV28, TRBJ2-1)
CASSSTSGRANSYNEQFF

SEQ ID NO: 657491 - protein, 14 aa, Homo sapiens
  CDR3 for alpha chain variable domain of TCR clone 328746 (TRAV12-1, TRAJ30)
CLVNIGGRDDKIIF

SEQ ID NO: 657492 - protein, 14 aa, Homo sapiens
  CDR3 for beta chain variable domain of TCR clone 328746 (TRBV7-6, TRBJ2-3)
CASSLGTVTDTQYF

SEQ ID NO: 657493 - protein, 15 aa, Homo sapiens
  CDR3 for alpha chain variable domain of TCR clone 328747 (TRAV13-1, TRAJ5)
CAVYIRDTGRRALTF

SEQ ID NO: 657494 - protein, 16 aa, Homo sapiens
  CDR3 for beta chain variable domain of TCR clone 328747 (TRBV12-4, TRBJ2-1)
CASTEQGMDRSNDSSS

SEQ ID NO: 657495 - protein, 15 aa, Homo sapiens
  CDR3 for alpha chain variable domain of TCR clone 328748 (TRAV27, TRAJ22)
CAGAPLKGTARQLTF

SEQ ID NO: 657496 - protein, 16 aa, Homo sapiens
  CDR3 for beta chain variable domain of TCR clone 328748 (TRBV19, TRBJ2-2)
CASTLGASGAPGELFF

SEQ ID NO: 657497 - protein, 15 aa, Homo sapiens
  CDR3 for alpha chain variable domain of TCR clone 328749 (TRAV4, TRAJ39)
CLVGPNNNAGNMLTF

SEQ ID NO: 657498 - protein, 14 aa, Homo sapiens
  CDR3 for beta chain variable domain of TCR clone 328749 (TRBV19, TRBJ2-1)
CASPTFVLCGEQFF

SEQ ID NO: 657499 - protein, 15 aa, Homo sapiens
  CDR3 for alpha chain variable domain of TCR clone 328750 (TRAV4, TRAJ36)
CLVGDRKTGANNLFF

SEQ ID NO: 657500 - protein, 15 aa, Homo sapiens
  CDR3 for beta chain variable domain of TCR clone 328750 (TRBV7-6, TRBJ2-1)
CASSSLAGEGNEQFF

SEQ ID NO: 657501 - protein, 11 aa, Homo sapiens
  CDR3 for alpha chain variable domain of TCR clone 328751 (TRAV35, TRAJ30)
CAGPGDDKIIF

SEQ ID NO: 657502 - protein, 14 aa, Homo sapiens
  CDR3 for beta chain variable domain of TCR clone 328751 (TRBV7-2, TRBJ2-3)
CASSQTGSSYTQYF

SEQ ID NO: 657503 - protein, 14 aa, Homo sapiens
  CDR3 for alpha chain variable domain of TCR clone 328752 (TRAV12-2, TRAJ11)
CAVNRESGYSTLTF

SEQ ID NO: 657504 - protein, 10 aa, Homo sapiens
  CDR3 for beta chain variable domain of TCR clone 328752 (TRBV20-1, TRBJ2-5)
SAVRFGTQYF

SEQ ID NO: 657505 - protein, 11 aa, Homo sapiens
  CDR3 for alpha chain variable domain of TCR clone 328753 (TRAV3, TRAJ49)
CAPITVNQFYF

SEQ ID NO: 657506 - protein, 16 aa, Homo sapiens
  CDR3 for beta chain variable domain of TCR clone 328753 (TRBV5-1, TRBJ2-3)
CASSVFPMSSTDTQYF

SEQ ID NO: 657507 - protein, 17 aa, Homo sapiens
  CDR3 for alpha chain variable domain of TCR clone 328754 (TRAV3, TRAJ42)
CAVRDRDYGGGQGTLIF

SEQ ID NO: 657508 - protein, 15 aa, Homo sapiens
  CDR3 for beta chain variable domain of TCR clone 328754 (TRBV6-6, TRBJ2-7)
CASSYSYGGSYEQYF

SEQ ID NO: 657509 - protein, 12 aa, Homo sapiens
  CDR3 for alpha chain variable domain of TCR clone 328755 (TRAV1-2, TRAJ9)
CAGSTGGFKTIF

SEQ ID NO: 657510 - protein, 15 aa, Homo sapiens
  CDR3 for beta chain variable domain of TCR clone 328755 (TRBV11-2, TRBJ2-1)
CASSPAGQSLNEQFF

SEQ ID NO: 657511 - protein, 16 aa, Homo sapiens
  CDR3 for alpha chain variable domain of TCR clone 328756 (TRAV26-2, TRAJ57)
CILRDVGSGGAEKLVF

SEQ ID NO: 657512 - protein, 13 aa, Homo sapiens
  CDR3 for beta chain variable domain of TCR clone 328756 (TRBV18, TRBJ2-3)
CASSPGITDTQYF

SEQ ID NO: 657513 - protein, 13 aa, Homo sapiens
  CDR3 for alpha chain variable domain of TCR clone 328757 (TRAV8-3, TRAJ28)
CAVGAVGSYQLTF

SEQ ID NO: 657514 - protein, 17 aa, Homo sapiens
  CDR3 for beta chain variable domain of TCR clone 328757 (TRBV7-6, TRBJ2-3)
CASSLSTGRVASNTQYF

SEQ ID NO: 657515 - protein, 14 aa, Homo sapiens
  CDR3 for alpha chain variable domain of TCR clone 328758 (TRAV12-1, TRAJ10)
CVAILTGGGNKLTF

SEQ ID NO: 657516 - protein, 13 aa, Homo sapiens
  CDR3 for beta chain variable domain of TCR clone 328758 (TRBV2, TRBJ1-1)
CASSEGGNTEAFF

SEQ ID NO: 657517 - protein, 15 aa, Homo sapiens
  CDR3 for alpha chain variable domain of TCR clone 328759 (TRAV16, TRAJ39)
FALSPSNNAGNMLTF

SEQ ID NO: 657518 - protein, 14 aa, Homo sapiens
  CDR3 for beta chain variable domain of TCR clone 328759 (TRBV7-7, TRBJ2-7)
CASSPGGPTYEQYF

SEQ ID NO: 657519 - protein, 13 aa, Homo sapiens
  CDR3 for alpha chain variable domain of TCR clone 328760 (TRAV30, TRAJ24)
CGTVTDSWGKLQF

SEQ ID NO: 657520 - protein, 15 aa, Homo sapiens
  CDR3 for beta chain variable domain of TCR clone 328760 (TRBV19, TRBJ1-1)
CASTSGQIKNTEAFF

SEQ ID NO: 657521 - protein, 13 aa, Homo sapiens
  CDR3 for alpha chain variable domain of TCR clone 328761 (TRAV12-2, TRAJ23)
CAVMGNQGGKLIF

SEQ ID NO: 657522 - protein, 15 aa, Homo sapiens
  CDR3 for beta chain variable domain of TCR clone 328761 (TRBV7-9, TRBJ1-4)
CASSRTGGFNEKLFF

SEQ ID NO: 657523 - protein, 13 aa, Homo sapiens
  CDR3 for alpha chain variable domain of TCR clone 328762 (TRAV20, TRAJ34)
CAVRSYNTDKLIF

SEQ ID NO: 657524 - protein, 14 aa, Homo sapiens
  CDR3 for beta chain variable domain of TCR clone 328762 (TRBV6-1, TRBJ2-6)
CASQQGAGANVLTF

SEQ ID NO: 657525 - protein, 11 aa, Homo sapiens
  CDR3 for alpha chain variable domain of TCR clone 328763 (TRAV2, TRAJ33)
CAVESNYQLIW

SEQ ID NO: 657526 - protein, 15 aa, Homo sapiens
  CDR3 for beta chain variable domain of TCR clone 328763 (TRBV7-8, TRBJ2-1)
CASSLHGGPYNEQFF

SEQ ID NO: 657527 - protein, 17 aa, Homo sapiens
  CDR3 for alpha chain variable domain of TCR clone 328764 (TRAV38-2/DV8, TRAJ23)
CALSRKLIFGQGTELSV

SEQ ID NO: 657528 - protein, 14 aa, Homo sapiens
  CDR3 for beta chain variable domain of TCR clone 328764 (TRBV19, TRBJ2-1)
CASPTFVLSGEQFF

SEQ ID NO: 657529 - protein, 12 aa, Homo sapiens
  CDR3 for alpha chain variable domain of TCR clone 328765 (TRAV12-3, TRAJ17)
CAMTLTGNKLTF

SEQ ID NO: 657530 - protein, 11 aa, Homo sapiens
  CDR3 for beta chain variable domain of TCR clone 328765 (TRBV11-2, TRBJ1-1)
CASGINTEAFL

SEQ ID NO: 657531 - protein, 11 aa, Homo sapiens
  CDR3 for alpha chain variable domain of TCR clone 328766 (TRAV12-3, TRAJ27)
CAMANAGKSPF

SEQ ID NO: 657532 - protein, 15 aa, Homo sapiens
  CDR3 for beta chain variable domain of TCR clone 328766 (TRBV19, TRBJ1-2)
CASSTKTDTNYGYTF

SEQ ID NO: 657533 - protein, 12 aa, Homo sapiens
  CDR3 for alpha chain variable domain of TCR clone 328767 (TRAV29/DV5, TRAJ34)
CAARRGTDKLIF

SEQ ID NO: 657534 - protein, 15 aa, Homo sapiens
  CDR3 for beta chain variable domain of TCR clone 328767 (TRBV2, TRBJ2-3)
CASSDAGGPPDTQYF

SEQ ID NO: 657535 - protein, 13 aa, Homo sapiens
  CDR3 for alpha chain variable domain of TCR clone 328768 (TRAV27, TRAJ45)
CRSSGGGADGLTF

SEQ ID NO: 657536 - protein, 16 aa, Homo sapiens
  CDR3 for beta chain variable domain of TCR clone 328768 (TRBV11-2, TRBJ2-1)
CASLYPPGVEYNEQFF

SEQ ID NO: 657537 - protein, 16 aa, Homo sapiens
  CDR3 for alpha chain variable domain of TCR clone 328769 (TRAV26-1, TRAJ53)
CIVRVAMGGSNYKLTF

SEQ ID NO: 657538 - protein, 12 aa, Homo sapiens
  CDR3 for beta chain variable domain of TCR clone 328769 (TRBV7-9, TRBJ1-5)
CASSPQGQPRHF

SEQ ID NO: 657539 - protein, 16 aa, Homo sapiens
  CDR3 for alpha chain variable domain of TCR clone 328770 (TRAV8-6, TRAJ58)
CAVSDHTETSGSRLSF

SEQ ID NO: 657540 - protein, 15 aa, Homo sapiens
  CDR3 for beta chain variable domain of TCR clone 328770 (TRBV27, TRBJ2-1)
CASSNGGGSSNEQFF

SEQ ID NO: 657541 - protein, 13 aa, Homo sapiens
  CDR3 for alpha chain variable domain of TCR clone 328771 (TRAV2, TRAJ24)
CDLQLKAGGNSSL

SEQ ID NO: 657542 - protein, 13 aa, Homo sapiens
  CDR3 for beta chain variable domain of TCR clone 328771 (TRBV7-9, TRBJ1-2)
CASSLKQNYGYTF

SEQ ID NO: 657543 - protein, 13 aa, Homo sapiens
  CDR3 for alpha chain variable domain of TCR clone 328772 (TRAV2, TRAJ20)
CAVEDPSEYKLSF

SEQ ID NO: 657544 - protein, 15 aa, Homo sapiens
  CDR3 for beta chain variable domain of TCR clone 328772 (TRBV25-1, TRBJ2-7)
CRSELTGGGIYEQYF

SEQ ID NO: 657545 - protein, 17 aa, Homo sapiens
  CDR3 for alpha chain variable domain of TCR clone 328773 (TRAV14/DV4, TRAJ28)
CAMREVSSGAGSDQLTF

SEQ ID NO: 657546 - protein, 15 aa, Homo sapiens
  CDR3 for beta chain variable domain of TCR clone 328773 (TRBV11-2, TRBJ1-6)
CASTLRETGNSPLHF

SEQ ID NO: 657547 - protein, 14 aa, Homo sapiens
  CDR3 for alpha chain variable domain of TCR clone 328774 (TRAV26-2, TRAJ39)
CSLRGNNNAGNMLT

SEQ ID NO: 657548 - protein, 14 aa, Homo sapiens
  CDR3 for beta chain variable domain of TCR clone 328774 (TRBV4-2, TRBJ2-3)
CASRETRAPGMQYF

SEQ ID NO: 657549 - protein, 13 aa, Homo sapiens
  CDR3 for alpha chain variable domain of TCR clone 328775 (TRAV38-2/DV8, TRAJ34)
CAYRNYNTDKLIF

SEQ ID NO: 657550 - protein, 15 aa, Homo sapiens
  CDR3 for beta chain variable domain of TCR clone 328775 (TRBV20-1, TRBJ2-5)
CSADGTGGLQETQYF

SEQ ID NO: 657551 - protein, 14 aa, Homo sapiens
  CDR3 for alpha chain variable domain of TCR clone 328776 (TRAV9-2, TRAJ39)
CALYIYNAGNMLTF

SEQ ID NO: 657552 - protein, 15 aa, Homo sapiens
  CDR3 for beta chain variable domain of TCR clone 328776 (TRBV5-1, TRBJ2-3)
CASSVTSGSTDTQYV

SEQ ID NO: 657553 - protein, 15 aa, Homo sapiens
  CDR3 for alpha chain variable domain of TCR clone 328777 (TRAV3, TRAJ29)
CAVRDLYSGNTPLVF

SEQ ID NO: 657554 - protein, 14 aa, Homo sapiens
  CDR3 for beta chain variable domain of TCR clone 328777 (TRBV7-2, TRBJ2-3)
CASSSGISTDTQYF

SEQ ID NO: 657555 - protein, 16 aa, Homo sapiens
  CDR3 for alpha chain variable domain of TCR clone 328778 (TRAV12-3, TRAJ58)
CAMTDTEETSGSRLTF

SEQ ID NO: 657556 - protein, 14 aa, Homo sapiens
  CDR3 for beta chain variable domain of TCR clone 328778 (TRBV7-6, TRBJ2-3)
CASSLGTVTDTQYF

SEQ ID NO: 657557 - protein, 21 aa, Homo sapiens
  CDR3 for alpha chain variable domain of TCR clone 328779 (TRAV17, TRAJ28)
CFLLLCYGPRRGGAGSYQLTF

SEQ ID NO: 657558 - protein, 16 aa, Homo sapiens
  CDR3 for beta chain variable domain of TCR clone 328779 (TRBV25-1, TRBJ1-1)
CASSGDRDRGRIEAFF

SEQ ID NO: 657559 - protein, 11 aa, Homo sapiens
  CDR3 for alpha chain variable domain of TCR clone 328780 (TRAV27, TRAJ20)
CAGADDYKLSF

SEQ ID NO: 657560 - protein, 17 aa, Homo sapiens
  CDR3 for beta chain variable domain of TCR clone 328780 (TRBV28, TRBJ2-1)
CASSSARQALTYNEQFF

SEQ ID NO: 657561 - protein, 14 aa, Homo sapiens
  CDR3 for alpha chain variable domain of TCR clone 328781 (TRAV27, TRAJ13)
CRSSNSGGYQEVTF

SEQ ID NO: 657562 - protein, 18 aa, Homo sapiens
  CDR3 for beta chain variable domain of TCR clone 328781 (TRBV7-6, TRBJ2-1)
GHVSLGQQLGGGADEQFF

SEQ ID NO: 657563 - protein, 14 aa, Homo sapiens
  CDR3 for alpha chain variable domain of TCR clone 328782 (TRAV34, TRAJ44)
CGADGTGTASKLTF

SEQ ID NO: 657564 - protein, 15 aa, Homo sapiens
  CDR3 for beta chain variable domain of TCR clone 328782 (TRBV10-2, TRBJ2-6)
CASSEQGTGANVLTF

SEQ ID NO: 657565 - protein, 13 aa, Homo sapiens
  CDR3 for alpha chain variable domain of TCR clone 328783 (TRAV27, TRAJ6)
CAGGTRGSYIPTF

SEQ ID NO: 657566 - protein, 11 aa, Homo sapiens
  CDR3 for beta chain variable domain of TCR clone 328783 (TRBV7-3, TRBJ2-5)
CVSSLSETQYF

SEQ ID NO: 657567 - protein, 18 aa, Homo sapiens
  CDR3 for alpha chain variable domain of TCR clone 328784 (TRAV21, TRAJ52)
CAVRPSPAGGTSYGKLTF

SEQ ID NO: 657568 - protein, 16 aa, Homo sapiens
  CDR3 for beta chain variable domain of TCR clone 328784 (TRBV7-9, TRBJ2-3)
CASSLDDPDLTDTQYF

SEQ ID NO: 657569 - protein, 12 aa, Homo sapiens
  CDR3 for alpha chain variable domain of TCR clone 328785 (TRAV17, TRAJ12)
CATLRSSYKLIF

SEQ ID NO: 657570 - protein, 14 aa, Homo sapiens
  CDR3 for beta chain variable domain of TCR clone 328785 (TRBV19, TRBJ2-2)
CASSGQGIAGELFF

SEQ ID NO: 657571 - protein, 11 aa, Homo sapiens
  CDR3 for alpha chain variable domain of TCR clone 328786 (TRAV2, TRAJ33)
CAVERNYQLIW

SEQ ID NO: 657572 - protein, 14 aa, Homo sapiens
  CDR3 for beta chain variable domain of TCR clone 328786 (TRBV11-2, TRBJ2-7)
CASSLGAGAYEQYF

SEQ ID NO: 657573 - protein, 16 aa, Homo sapiens
  CDR3 for alpha chain variable domain of TCR clone 328787 (TRAV1-2, TRAJ10)
CAVRGLLTGGGNKLTF

SEQ ID NO: 657574 - protein, 15 aa, Homo sapiens
  CDR3 for beta chain variable domain of TCR clone 328787 (TRBV7-2, TRBJ2-1)
CASTHGTGIYNEQFF

SEQ ID NO: 657575 - protein, 14 aa, Homo sapiens
  CDR3 for alpha chain variable domain of TCR clone 328788 (TRAV22, TRAJ37)
CASPYSGNTGKLIF

SEQ ID NO: 657576 - protein, 13 aa, Homo sapiens
  CDR3 for beta chain variable domain of TCR clone 328788 (TRBV20-1, TRBJ2-1)
CSARGSSYNEQFF

SEQ ID NO: 657577 - protein, 17 aa, Homo sapiens
  CDR3 for alpha chain variable domain of TCR clone 328789 (TRAV26-1, TRAJ53)
CIVRVDDSGGSNYKLTF

SEQ ID NO: 657578 - protein, 19 aa, Homo sapiens
  CDR3 for beta chain variable domain of TCR clone 328789 (TRBV25-1, TRBJ2-2)
CAILVYRVDRGRKTGELFL

SEQ ID NO: 657579 - protein, 14 aa, Homo sapiens
  CDR3 for alpha chain variable domain of TCR clone 328790 (TRAV1-2, TRAJ16)
CAVNRFSDGQKLLF

SEQ ID NO: 657580 - protein, 12 aa, Homo sapiens
  CDR3 for beta chain variable domain of TCR clone 328790 (TRBV28, TRBJ2-6)
CAIQAGANVLAF

SEQ ID NO: 657581 - protein, 15 aa, Homo sapiens
  CDR3 for alpha chain variable domain of TCR clone 328791 (TRAV26-1, TRAJ56)
CIVRVDNGANSKLTF

SEQ ID NO: 657582 - protein, 15 aa, Homo sapiens
  CDR3 for beta chain variable domain of TCR clone 328791 (TRBV20-1, TRBJ2-7)
CSARGPTEVGHEQYF

SEQ ID NO: 657583 - protein, 14 aa, Homo sapiens
  CDR3 for alpha chain variable domain of TCR clone 328792 (TRAV23/DV6, TRAJ17)
CAARGRAAGNKRTF

SEQ ID NO: 657584 - protein, 12 aa, Homo sapiens
  CDR3 for beta chain variable domain of TCR clone 328792 (TRBV7-9, TRBJ2-3)
CASSFITDTQYF

SEQ ID NO: 657585 - protein, 19 aa, Homo sapiens
  CDR3 for alpha chain variable domain of TCR clone 328793 (TRAV26-1, TRAJ52)
CIVRVANNACGTSYGKLTF

SEQ ID NO: 657586 - protein, 14 aa, Homo sapiens
  CDR3 for beta chain variable domain of TCR clone 328793 (TRBV19, TRBJ1-2)
CASSIGAGSYGYTF

SEQ ID NO: 657587 - protein, 17 aa, Homo sapiens
  CDR3 for alpha chain variable domain of TCR clone 328794 (TRAV3, TRAJ12)
CAVRDGGRMDSSYKLIF

SEQ ID NO: 657588 - protein, 16 aa, Homo sapiens
  CDR3 for beta chain variable domain of TCR clone 328794 (TRBV7-2, TRBJ2-5)
CASSSKWLSGQETQYF

SEQ ID NO: 657589 - protein, 15 aa, Homo sapiens
  CDR3 for alpha chain variable domain of TCR clone 328795 (TRAV8-3, TRAJ32)
CAVGPYGGSTNKLIF

SEQ ID NO: 657590 - protein, 14 aa, Homo sapiens
  CDR3 for beta chain variable domain of TCR clone 328795 (TRBV29-1, TRBJ2-2)
CSVLAETNTGELFF

SEQ ID NO: 657591 - protein, 13 aa, Homo sapiens
  CDR3 for alpha chain variable domain of TCR clone 328796 (TRAV1-2, TRAJ12)
CAVSMDSSYKLIF

SEQ ID NO: 657592 - protein, 15 aa, Homo sapiens
  CDR3 for beta chain variable domain of TCR clone 328796 (TRBV27, TRBJ2-5)
CASSLIPSGGETQYV

SEQ ID NO: 657593 - protein, 14 aa, Homo sapiens
  CDR3 for alpha chain variable domain of TCR clone 328797 (TRAV17, TRAJ57)
CAADPQGGSEKLVF

SEQ ID NO: 657594 - protein, 17 aa, Homo sapiens
  CDR3 for beta chain variable domain of TCR clone 328797 (TRBV3-1, TRBJ2-6)
CASSPNTGPAGANVLTF

SEQ ID NO: 657595 - protein, 13 aa, Homo sapiens
  CDR3 for alpha chain variable domain of TCR clone 328798 (TRAV8-3, TRAJ28)
WAVGAVGSYQLTF

SEQ ID NO: 657596 - protein, 15 aa, Homo sapiens
  CDR3 for beta chain variable domain of TCR clone 328798 (TRBV28, TRBJ2-5)
CASSPGQGSIETQYF

SEQ ID NO: 657597 - protein, 13 aa, Homo sapiens
  CDR3 for alpha chain variable domain of TCR clone 328799 (TRAV36/DV7, TRAJ29)
CAVEPSGNPPLAF

SEQ ID NO: 657598 - protein, 11 aa, Homo sapiens
  CDR3 for beta chain variable domain of TCR clone 328799 (TRBV19, TRBJ2-7)
CASGNSYEQYF

SEQ ID NO: 657599 - protein, 13 aa, Homo sapiens
  CDR3 for alpha chain variable domain of TCR clone 328800 (TRAV21, TRAJ20)
CAVGVFADYKLSL

SEQ ID NO: 657600 - protein, 15 aa, Homo sapiens
  CDR3 for beta chain variable domain of TCR clone 328800 (TRBV12-4, TRBJ2-5)
CASSPPTGLQETQYF

SEQ ID NO: 657601 - protein, 16 aa, Homo sapiens
  CDR3 for alpha chain variable domain of TCR clone 328801 (TRAV8-3, TRAJ8)
CAVPRDGNTGVQKLVF

SEQ ID NO: 657602 - protein, 14 aa, Homo sapiens
  CDR3 for beta chain variable domain of TCR clone 328801 (TRBV28, TRBJ1-1)
CASSESGRGTEAFF

SEQ ID NO: 657603 - protein, 10 aa, Homo sapiens
  CDR3 for alpha chain variable domain of TCR clone 328802 (TRAV23/DV6, TRAJ57)
CAASSTLSQG

SEQ ID NO: 657604 - protein, 12 aa, Homo sapiens
  CDR3 for beta chain variable domain of TCR clone 328802 (TRBV29-1, TRBJ2-3)
CSVTGGADTQYF

SEQ ID NO: 657605 - protein, 17 aa, Homo sapiens
  CDR3 for alpha chain variable domain of TCR clone 328803 (TRAV3, TRAJ6)
CAVRDGPRAGRSYVPTF

SEQ ID NO: 657606 - protein, 16 aa, Homo sapiens
  CDR3 for beta chain variable domain of TCR clone 328803 (TRBV19, TRBJ2-1)
CASSKAGPSSYNEQFF

SEQ ID NO: 657607 - protein, 14 aa, Homo sapiens
  CDR3 for alpha chain variable domain of TCR clone 328804 (TRAV13-1, TRAJ44)
CAAKATGTASKLTF

SEQ ID NO: 657608 - protein, 14 aa, Homo sapiens
  CDR3 for beta chain variable domain of TCR clone 328804 (TRBV7-3, TRBJ1-1)
CASSFGGGMTEAFF

SEQ ID NO: 657609 - protein, 18 aa, Homo sapiens
  CDR3 for alpha chain variable domain of TCR clone 328805 (TRAV8-4, TRAJ52)
CAVTRANAGGTSYGKLTF

SEQ ID NO: 657610 - protein, 20 aa, Homo sapiens
  CDR3 for beta chain variable domain of TCR clone 328805 (TRBV19, TRBJ2-1)
CASSISRTVISTRLNNEQFF

SEQ ID NO: 657611 - protein, 13 aa, Homo sapiens
  CDR3 for alpha chain variable domain of TCR clone 328806 (TRAV1-1, TRAJ9)
CAAKNTGGFKTIF

SEQ ID NO: 657612 - protein, 15 aa, Homo sapiens
  CDR3 for beta chain variable domain of TCR clone 328806 (TRBV20-1, TRBJ1-1)
CSASRGVTGNTEAFF

SEQ ID NO: 657613 - protein, 16 aa, Homo sapiens
  CDR3 for alpha chain variable domain of TCR clone 328807 (TRAV30, TRAJ24)
CGTEIVDADSCGKFQF

SEQ ID NO: 657614 - protein, 12 aa, Homo sapiens
  CDR3 for beta chain variable domain of TCR clone 328807 (TRBV11-2, TRBJ2-2)
CASSLGGGELFF

SEQ ID NO: 657615 - protein, 11 aa, Homo sapiens
  CDR3 for alpha chain variable domain of TCR clone 328808 (TRAV2, TRAJ33)
CAVDSNYQLIW

SEQ ID NO: 657616 - protein, 14 aa, Homo sapiens
  CDR3 for beta chain variable domain of TCR clone 328808 (TRBV19, TRBJ2-3)
CASSAPRGTDTQYF

SEQ ID NO: 657617 - protein, 15 aa, Homo sapiens
  CDR3 for alpha chain variable domain of TCR clone 328809 (TRAV17, TRAJ35)
CATAFVIGFGNVLHC

SEQ ID NO: 657618 - protein, 16 aa, Homo sapiens
  CDR3 for beta chain variable domain of TCR clone 328809 (TRBV5-7, TRBJ2-7)
PAASEGGGRGSYEQYF

SEQ ID NO: 657619 - protein, 11 aa, Homo sapiens
  CDR3 for alpha chain variable domain of TCR clone 328810 (TRAV21, TRAJ48)
CAVDGNEKLTF

SEQ ID NO: 657620 - protein, 13 aa, Homo sapiens
  CDR3 for beta chain variable domain of TCR clone 328810 (TRBV6-6, TRBJ2-1)
CASSLHQGDEQFF

SEQ ID NO: 657621 - protein, 15 aa, Homo sapiens
  CDR3 for alpha chain variable domain of TCR clone 328811 (TRAV12-3, TRAJ13)
CAMSTRSGGYQKVTF

SEQ ID NO: 657622 - protein, 18 aa, Homo sapiens
  CDR3 for beta chain variable domain of TCR clone 328811 (TRBV3-1, TRBJ2-7)
CASSQEGGGGSWHYEQYF

SEQ ID NO: 657623 - protein, 12 aa, Homo sapiens
  CDR3 for alpha chain variable domain of TCR clone 328812 (TRAV12-3, TRAJ3)
CAIDSSASKIIF

SEQ ID NO: 657624 - protein, 17 aa, Homo sapiens
  CDR3 for beta chain variable domain of TCR clone 328812 (TRBV7-9, TRBJ2-3)
CASSLEEAGAYPDTQNF

SEQ ID NO: 657625 - protein, 15 aa, Homo sapiens
  CDR3 for alpha chain variable domain of TCR clone 328813 (TRAV35, TRAJ50)
CAGQLRKTSYDELIF

SEQ ID NO: 657626 - protein, 12 aa, Homo sapiens
  CDR3 for beta chain variable domain of TCR clone 328813 (TRBV5-1, TRBJ2-5)
CASSLGLETQYC

SEQ ID NO: 657627 - protein, 15 aa, Homo sapiens
  CDR3 for alpha chain variable domain of TCR clone 328814 (TRAV26-1, TRAJ29)
CIVRVGGSGNTPLVF

SEQ ID NO: 657628 - protein, 15 aa, Homo sapiens
  CDR3 for beta chain variable domain of TCR clone 328814 (TRBV7-9, TRBJ1-5)
CPSSQGHQPNQPQHF

SEQ ID NO: 657629 - protein, 13 aa, Homo sapiens
  CDR3 for alpha chain variable domain of TCR clone 328815 (TRAV12-1, TRAJ31)
CVVNMNNNARLMF

SEQ ID NO: 657630 - protein, 15 aa, Homo sapiens
  CDR3 for beta chain variable domain of TCR clone 328815 (TRBV4-1, TRBJ1-2)
CASSQGQGAAYGYNF

SEQ ID NO: 657631 - protein, 20 aa, Homo sapiens
  CDR3 for alpha chain variable domain of TCR clone 328816 (TRAV27, TRAJ10)
ASTSVPSRVILTGGGNKLTF

SEQ ID NO: 657632 - protein, 15 aa, Homo sapiens
  CDR3 for beta chain variable domain of TCR clone 328816 (TRBV9, TRBJ2-3)
CASSLEGGLTDTQYF

SEQ ID NO: 657633 - protein, 18 aa, Homo sapiens
  CDR3 for alpha chain variable domain of TCR clone 328817 (TRAV13-1, TRAJ52)
CAADFPNAGGTSYGKLTF

SEQ ID NO: 657634 - protein, 15 aa, Homo sapiens
  CDR3 for beta chain variable domain of TCR clone 328817 (TRBV27, TRBJ2-1)
CASSNGGGSSNEQFF

SEQ ID NO: 657635 - protein, 13 aa, Homo sapiens
  CDR3 for alpha chain variable domain of TCR clone 328818 (TRAV12-3, TRAJ41)
CAIAPNSGYALNF

SEQ ID NO: 657636 - protein, 13 aa, Homo sapiens
  CDR3 for beta chain variable domain of TCR clone 328818 (TRBV24-1, TRBJ2-2)
CATSDWSTGELFF

SEQ ID NO: 657637 - protein, 13 aa, Homo sapiens
  CDR3 for alpha chain variable domain of TCR clone 328819 (TRAV16, TRAJ29)
CALSRRGNTPLVF

SEQ ID NO: 657638 - protein, 15 aa, Homo sapiens
  CDR3 for beta chain variable domain of TCR clone 328819 (TRBV4-1, TRBJ2-3)
CASSRGQGIPDTQYV

SEQ ID NO: 657639 - protein, 14 aa, Homo sapiens
  CDR3 for alpha chain variable domain of TCR clone 328820 (TRAV23/DV6, TRAJ4)
CEAPSSGGYNKLIF

SEQ ID NO: 657640 - protein, 16 aa, Homo sapiens
  CDR3 for beta chain variable domain of TCR clone 328820 (TRBV19, TRBJ1-1)
CASRFGGPVTGTEAFF

SEQ ID NO: 657641 - protein, 11 aa, Homo sapiens
  CDR3 for alpha chain variable domain of TCR clone 328821 (TRAV17, TRAJ43)
CATPRSNDTRF

SEQ ID NO: 657642 - protein, 15 aa, Homo sapiens
  CDR3 for beta chain variable domain of TCR clone 328821 (TRBV11-2, TRBJ2-1)
CASSLGTSGLNEQFF

SEQ ID NO: 657643 - protein, 13 aa, Homo sapiens
  CDR3 for alpha chain variable domain of TCR clone 328822 (TRAV21, TRAJ27)
CAARPGNAGKSTV

SEQ ID NO: 657644 - protein, 14 aa, Homo sapiens
  CDR3 for beta chain variable domain of TCR clone 328822 (TRBV7-6, TRBJ2-3)
YASSLGTVTDTQYF

SEQ ID NO: 657645 - protein, 14 aa, Homo sapiens
  CDR3 for alpha chain variable domain of TCR clone 328823 (TRAV21, TRAJ35)
CAVMPIGVGIVLHC

SEQ ID NO: 657646 - protein, 12 aa, Homo sapiens
  CDR3 for beta chain variable domain of TCR clone 328823 (TRBV7-9, TRBJ2-7)
CASSIKREEQYF

SEQ ID NO: 657647 - protein, 12 aa, Homo sapiens
  CDR3 for alpha chain variable domain of TCR clone 328824 (TRAV12-3, TRAJ17)
CAMTLTGNKLTF

SEQ ID NO: 657648 - protein, 17 aa, Homo sapiens
  CDR3 for beta chain variable domain of TCR clone 328824 (TRBV11-2, TRBJ2-1)
CASSLYPPWVEYNEQFF

SEQ ID NO: 657649 - protein, 13 aa, Homo sapiens
  CDR3 for alpha chain variable domain of TCR clone 328825 (TRAV13-1, TRAJ5)
CAARVTGRRALTF

SEQ ID NO: 657650 - protein, 15 aa, Homo sapiens
  CDR3 for beta chain variable domain of TCR clone 328825 (TRBV7-9, TRBJ2-7)
CASSPGGGLTYEKYF

SEQ ID NO: 657651 - protein, 13 aa, Homo sapiens
  CDR3 for alpha chain variable domain of TCR clone 328826 (TRAV27, TRAJ41)
CAGEGNSGYALNF

SEQ ID NO: 657652 - protein, 15 aa, Homo sapiens
  CDR3 for beta chain variable domain of TCR clone 328826 (TRBV25-1, TRBJ1-4)
CASSPGDSTNEKLFF

SEQ ID NO: 657653 - protein, 17 aa, Homo sapiens
  CDR3 for alpha chain variable domain of TCR clone 328827 (TRAV3, TRAJ28)
CAVREAYSGPGSYQLTF

SEQ ID NO: 657654 - protein, 18 aa, Homo sapiens
  CDR3 for beta chain variable domain of TCR clone 328827 (TRBV27, TRBJ2-1)
CASGNRAVGVGSKNEQFF

SEQ ID NO: 657655 - protein, 15 aa, Homo sapiens
  CDR3 for alpha chain variable domain of TCR clone 328828 (TRAV23/DV6, TRAJ13)
CAAWPGGGGYQKVTF

SEQ ID NO: 657656 - protein, 12 aa, Homo sapiens
  CDR3 for beta chain variable domain of TCR clone 328828 (TRBV5-4, TRBJ2-7)
CASSWAGQGENF

SEQ ID NO: 657657 - protein, 14 aa, Homo sapiens
  CDR3 for alpha chain variable domain of TCR clone 328829 (TRAV1-2, TRAJ8)
CAVREDRGFQKLVF

SEQ ID NO: 657658 - protein, 15 aa, Homo sapiens
  CDR3 for beta chain variable domain of TCR clone 328829 (TRBV6-3, TRBJ2-7)
CASSAPGTVFYEQYF

SEQ ID NO: 657659 - protein, 13 aa, Homo sapiens
  CDR3 for alpha chain variable domain of TCR clone 328830 (TRAV8-3, TRAJ28)
CAVGAVGSYQLTF

SEQ ID NO: 657660 - protein, 14 aa, Homo sapiens
  CDR3 for beta chain variable domain of TCR clone 328830 (TRBV9, TRBJ2-1)
CASSVDPRGKEQFF

SEQ ID NO: 657661 - protein, 10 aa, Homo sapiens
  CDR3 for alpha chain variable domain of TCR clone 328831 (TRAV13-1, TRAJ27)
CALLARQINL

SEQ ID NO: 657662 - protein, 13 aa, Homo sapiens
  CDR3 for beta chain variable domain of TCR clone 328831 (TRBV7-3, TRBJ1-1)
CASRQDWGAEAFF

SEQ ID NO: 657663 - protein, 13 aa, Homo sapiens
  CDR3 for alpha chain variable domain of TCR clone 328832 (TRAV12-2, TRAJ4)
CAVFPGGYNKLIF

SEQ ID NO: 657664 - protein, 13 aa, Homo sapiens
  CDR3 for beta chain variable domain of TCR clone 328832 (TRBV19, TRBJ1-5)
CASSIDRDQPQHF

SEQ ID NO: 657665 - protein, 13 aa, Homo sapiens
  CDR3 for alpha chain variable domain of TCR clone 328833 (TRAV8-6, TRAJ49)
CAVITNTVNQFYF

SEQ ID NO: 657666 - protein, 14 aa, Homo sapiens
  CDR3 for beta chain variable domain of TCR clone 328833 (TRBV28, TRBJ2-7)
CAIVGQGNLYEQYF

SEQ ID NO: 657667 - protein, 16 aa, Homo sapiens
  CDR3 for alpha chain variable domain of TCR clone 328834 (TRAV20, TRAJ10)
CAVLRGLTGGGNKLTF

SEQ ID NO: 657668 - protein, 11 aa, Homo sapiens
  CDR3 for beta chain variable domain of TCR clone 328834 (TRBV29-1, TRBJ2-5)
CSEDRTGTQYF

SEQ ID NO: 657669 - protein, 13 aa, Homo sapiens
  CDR3 for alpha chain variable domain of TCR clone 328835 (TRAV8-3, TRAJ48)
CAVFPFGNEKLTF

SEQ ID NO: 657670 - protein, 14 aa, Homo sapiens
  CDR3 for beta chain variable domain of TCR clone 328835 (TRBV18, TRBJ2-7)
CASSPRGGAYEQYF

SEQ ID NO: 657671 - protein, 16 aa, Homo sapiens
  CDR3 for alpha chain variable domain of TCR clone 328836 (TRAV12-2, TRAJ43)
CAGDDMRFGAGTRLTV

SEQ ID NO: 657672 - protein, 16 aa, Homo sapiens
  CDR3 for beta chain variable domain of TCR clone 328836 (TRBV2, TRBJ2-4)
CASSEAPGGEQNRQYF

SEQ ID NO: 657673 - protein, 14 aa, Homo sapiens
  CDR3 for alpha chain variable domain of TCR clone 328837 (TRAV12-2, TRAJ17)
CAVLFKAAGNKLTF

SEQ ID NO: 657674 - protein, 13 aa, Homo sapiens
  CDR3 for beta chain variable domain of TCR clone 328837 (TRBV12-4, TRBJ1-2)
CASSLRQGKGYAF

SEQ ID NO: 657675 - protein, 15 aa, Homo sapiens
  CDR3 for alpha chain variable domain of TCR clone 328838 (TRAV8-3, TRAJ6)
GAVGPLGGGSYIPTF

SEQ ID NO: 657676 - protein, 14 aa, Homo sapiens
  CDR3 for beta chain variable domain of TCR clone 328838 (TRBV19, TRBJ2-2)
CASSTGQGAGELFF

SEQ ID NO: 657677 - protein, 15 aa, Homo sapiens
  CDR3 for alpha chain variable domain of TCR clone 328839 (TRAV16, TRAJ26)
CAPEELWSEFCLLSR

SEQ ID NO: 657678 - protein, 15 aa, Homo sapiens
  CDR3 for beta chain variable domain of TCR clone 328839 (TRBV7-2, TRBJ2-3)
CASILTGTSTDTQYF

SEQ ID NO: 657679 - protein, 14 aa, Homo sapiens
  CDR3 for alpha chain variable domain of TCR clone 328840 (TRAV12-2, TRAJ45)
CAGYSGGGADGLTF

SEQ ID NO: 657680 - protein, 14 aa, Homo sapiens
  CDR3 for beta chain variable domain of TCR clone 328840 (TRBV6-5, TRBJ1-2)
CASTRGGGSDGCTF

SEQ ID NO: 657681 - protein, 18 aa, Homo sapiens
  CDR3 for alpha chain variable domain of TCR clone 328841 (TRAV21, TRAJ52)
CAVRPSPAGGTSYGKLTL

SEQ ID NO: 657682 - protein, 15 aa, Homo sapiens
  CDR3 for beta chain variable domain of TCR clone 328841 (TRBV20-1, TRBJ1-5)
CSAFKNGQRNQPQHF

SEQ ID NO: 657683 - protein, 16 aa, Homo sapiens
  CDR3 for alpha chain variable domain of TCR clone 328842 (TRAV16, TRAJ4)
CALSRMFSGGYNKMIF

SEQ ID NO: 657684 - protein, 14 aa, Homo sapiens
  CDR3 for beta chain variable domain of TCR clone 328842 (TRBV5-1, TRBJ2-7)
CASSRGESLYEQYF

SEQ ID NO: 657685 - protein, 12 aa, Homo sapiens
  CDR3 for alpha chain variable domain of TCR clone 328843 (TRAV27, TRAJ22)
CAGDGAGVEIWF

SEQ ID NO: 657686 - protein, 13 aa, Homo sapiens
  CDR3 for beta chain variable domain of TCR clone 328843 (TRBV7-9, TRBJ1-2)
CASSLKQNYGYTF

SEQ ID NO: 657687 - protein, 14 aa, Homo sapiens
  CDR3 for alpha chain variable domain of TCR clone 328844 (TRAV29/DV5, TRAJ13)
CAASLSGGYQKVTF

SEQ ID NO: 657688 - protein, 14 aa, Homo sapiens
  CDR3 for beta chain variable domain of TCR clone 328844 (TRBV4-1, TRBJ2-2)
CASSQAVNTGELFF

SEQ ID NO: 657689 - protein, 12 aa, Homo sapiens
  CDR3 for alpha chain variable domain of TCR clone 328845 (TRAV2, TRAJ34)
CAVERNTDKPIF

SEQ ID NO: 657690 - protein, 14 aa, Homo sapiens
  CDR3 for beta chain variable domain of TCR clone 328845 (TRBV7-9, TRBJ2-1)
CASSDNSGYNEQFF

SEQ ID NO: 657691 - protein, 14 aa, Homo sapiens
  CDR3 for alpha chain variable domain of TCR clone 328846 (TRAV23/DV6, TRAJ37)
CAASTSSNTGKLIF

SEQ ID NO: 657692 - protein, 12 aa, Homo sapiens
  CDR3 for beta chain variable domain of TCR clone 328846 (TRBV7-6, TRBJ2-7)
CASSLADSEQYF

SEQ ID NO: 657693 - protein, 14 aa, Homo sapiens
  CDR3 for alpha chain variable domain of TCR clone 328847 (TRAV17, TRAJ56)
CATVPAGANSKLTF

SEQ ID NO: 657694 - protein, 13 aa, Homo sapiens
  CDR3 for beta chain variable domain of TCR clone 328847 (TRBV7-9, TRBJ2-3)
CASSPGSTDTQYF

SEQ ID NO: 657695 - protein, 15 aa, Homo sapiens
  CDR3 for alpha chain variable domain of TCR clone 328848 (TRAV25, TRAJ53)
CAATGGGGSNYKLTF

SEQ ID NO: 657696 - protein, 11 aa, Homo sapiens
  CDR3 for beta chain variable domain of TCR clone 328848 (TRBV10-3, TRBJ2-7)
CAISEGLEQYF

SEQ ID NO: 657697 - protein, 11 aa, Homo sapiens
  CDR3 for alpha chain variable domain of TCR clone 328849 (TRAV8-3, TRAJ36)
CAVGATGQTTS

SEQ ID NO: 657698 - protein, 16 aa, Homo sapiens
  CDR3 for beta chain variable domain of TCR clone 328849 (TRBV20-1, TRBJ1-4)
CSAPGQGLLTNEKLFF

SEQ ID NO: 657699 - protein, 16 aa, Homo sapiens
  CDR3 for alpha chain variable domain of TCR clone 328850 (TRAV30, TRAJ24)
CGTEIVYADSWGKFQF

SEQ ID NO: 657700 - protein, 12 aa, Homo sapiens
  CDR3 for beta chain variable domain of TCR clone 328850 (TRBV11-2, TRBJ2-1)
CASSPGNNEQFF

SEQ ID NO: 657701 - protein, 14 aa, Homo sapiens
  CDR3 for alpha chain variable domain of TCR clone 328851 (TRAV1-1, TRAJ30)
CAVRSLNRDEKIIF

SEQ ID NO: 657702 - protein, 14 aa, Homo sapiens
  CDR3 for beta chain variable domain of TCR clone 328851 (TRBV7-8, TRBJ2-3)
CASSLEAGTDTQYF

SEQ ID NO: 657703 - protein, 13 aa, Homo sapiens
  CDR3 for alpha chain variable domain of TCR clone 328852 (TRAV12-3, TRAJ40)
CAMSARGTYKSIF

SEQ ID NO: 657704 - protein, 16 aa, Homo sapiens
  CDR3 for beta chain variable domain of TCR clone 328852 (TRBV20-1, TRBJ2-3)
CSGEAGLAGGQDTQYF

SEQ ID NO: 657705 - protein, 15 aa, Homo sapiens
  CDR3 for alpha chain variable domain of TCR clone 328853 (TRAV13-2, TRAJ10)
CAENRDPGGGNKLTF

SEQ ID NO: 657706 - protein, 16 aa, Homo sapiens
  CDR3 for beta chain variable domain of TCR clone 328853 (TRBV2, TRBJ1-3)
CASSRTGGSTGNTIYF

SEQ ID NO: 657707 - protein, 13 aa, Homo sapiens
  CDR3 for alpha chain variable domain of TCR clone 328854 (TRAV8-4, TRAJ48)
CAVSLFGNEKLTF

SEQ ID NO: 657708 - protein, 15 aa, Homo sapiens
  CDR3 for beta chain variable domain of TCR clone 328854 (TRBV20-1, TRBJ2-7)
CSARKGLAGSYEQYF

SEQ ID NO: 657709 - protein, 12 aa, Homo sapiens
  CDR3 for alpha chain variable domain of TCR clone 328855 (TRAV1-2, TRAJ24)
CAVGGSWGKFQF

SEQ ID NO: 657710 - protein, 16 aa, Homo sapiens
  CDR3 for beta chain variable domain of TCR clone 328855 (TRBV19, TRBJ2-2)
CASRSPGTGATGELFF

SEQ ID NO: 657711 - protein, 13 aa, Homo sapiens
  CDR3 for alpha chain variable domain of TCR clone 328856 (TRAV30, TRAJ24)
CGSVTDSWGKLQF

SEQ ID NO: 657712 - protein, 14 aa, Homo sapiens
  CDR3 for beta chain variable domain of TCR clone 328856 (TRBV6-3, TRBJ2-2)
CASTYTPDTGELFF

SEQ ID NO: 657713 - protein, 14 aa, Homo sapiens
  CDR3 for alpha chain variable domain of TCR clone 328857 (TRAV10, TRAJ29)
CVVSAISGNTPLFF

SEQ ID NO: 657714 - protein, 16 aa, Homo sapiens
  CDR3 for beta chain variable domain of TCR clone 328857 (TRBV29-1, TRBJ2-7)
CSVEDAEDGTAYEQYF

SEQ ID NO: 657715 - protein, 14 aa, Homo sapiens
  CDR3 for alpha chain variable domain of TCR clone 328858 (TRAV29/DV5, TRAJ20)
CAATIRSNDYKLSF

SEQ ID NO: 657716 - protein, 15 aa, Homo sapiens
  CDR3 for beta chain variable domain of TCR clone 328858 (TRBV20-1, TRBJ2-1)
CSASSAGSSYNERFF

SEQ ID NO: 657717 - protein, 11 aa, Homo sapiens
  CDR3 for alpha chain variable domain of TCR clone 328859 (TRAV3, TRAJ21)
CSVGNFNKFYF

SEQ ID NO: 657718 - protein, 14 aa, Homo sapiens
  CDR3 for beta chain variable domain of TCR clone 328859 (TRBV19, TRBJ1-3)
CASSIHGFGNTIYF

SEQ ID NO: 657719 - protein, 15 aa, Homo sapiens
  CDR3 for alpha chain variable domain of TCR clone 328860 (TRAV35, TRAJ50)
CAGQLRKTSYDKVIF

SEQ ID NO: 657720 - protein, 14 aa, Homo sapiens
  CDR3 for beta chain variable domain of TCR clone 328860 (TRBV12-5, TRBJ2-5)
CASGSRTHQETQYF

SEQ ID NO: 657721 - protein, 15 aa, Homo sapiens
  CDR3 for alpha chain variable domain of TCR clone 328861 (TRAV13-1, TRAJ43)
CEATPELGGNNDMRF

SEQ ID NO: 657722 - protein, 15 aa, Homo sapiens
  CDR3 for beta chain variable domain of TCR clone 328861 (TRBV10-2, TRBJ2-6)
CASSEQGTGANVLTF

SEQ ID NO: 657723 - protein, 17 aa, Homo sapiens
  CDR3 for alpha chain variable domain of TCR clone 328862 (TRAV3, TRAJ42)
CAVRDRDYGGSQGNLIF

SEQ ID NO: 657724 - protein, 12 aa, Homo sapiens
  CDR3 for beta chain variable domain of TCR clone 328862 (TRBV18, TRBJ2-1)
CASSSDEDEQFF

SEQ ID NO: 657725 - protein, 17 aa, Homo sapiens
  CDR3 for alpha chain variable domain of TCR clone 328863 (TRAV3, TRAJ42)
CAVRERYYGGSQGNLIF

SEQ ID NO: 657726 - protein, 16 aa, Homo sapiens
  CDR3 for beta chain variable domain of TCR clone 328863 (TRBV9, TRBJ2-1)
CASSVGGGGNYNEQFF

SEQ ID NO: 657727 - protein, 13 aa, Homo sapiens
  CDR3 for alpha chain variable domain of TCR clone 328864 (TRAV1-2, TRAJ36)
CAVDQTGANDLFF

SEQ ID NO: 657728 - protein, 14 aa, Homo sapiens
  CDR3 for beta chain variable domain of TCR clone 328864 (TRBV20-1, TRBJ2-5)
CSAREMTKQETQYF

SEQ ID NO: 657729 - protein, 15 aa, Homo sapiens
  CDR3 for alpha chain variable domain of TCR clone 328865 (TRAV3, TRAJ3)
CAVRDGHSSASKIIF

SEQ ID NO: 657730 - protein, 14 aa, Homo sapiens
  CDR3 for beta chain variable domain of TCR clone 328865 (TRBV28, TRBJ1-4)
CASSFGTYDEKLFF

SEQ ID NO: 657731 - protein, 13 aa, Homo sapiens
  CDR3 for alpha chain variable domain of TCR clone 328866 (TRAV4, TRAJ20)
CLVGSSNDYKLSF

SEQ ID NO: 657732 - protein, 16 aa, Homo sapiens
  CDR3 for beta chain variable domain of TCR clone 328866 (TRBV12-5, TRBJ2-5)
CASGPRTSGNQETQYF

SEQ ID NO: 657733 - protein, 12 aa, Homo sapiens
  CDR3 for alpha chain variable domain of TCR clone 328867 (TRAV12-3, TRAJ17)
CAMTLTGNTLTF

SEQ ID NO: 657734 - protein, 15 aa, Homo sapiens
  CDR3 for beta chain variable domain of TCR clone 328867 (TRBV10-2, TRBJ2-6)
CASSEQGTGANVLTF

SEQ ID NO: 657735 - protein, 13 aa, Homo sapiens
  CDR3 for alpha chain variable domain of TCR clone 328868 (TRAV21, TRAJ57)
CAVTQGGSEKLAF

SEQ ID NO: 657736 - protein, 17 aa, Homo sapiens
  CDR3 for beta chain variable domain of TCR clone 328868 (TRBV13, TRBJ2-3)
CASSLSRVAGGRNTQYF

SEQ ID NO: 657737 - protein, 15 aa, Homo sapiens
  CDR3 for alpha chain variable domain of TCR clone 328869 (TRAV27, TRAJ53)
CRAINSGGSNYKLTF

SEQ ID NO: 657738 - protein, 14 aa, Homo sapiens
  CDR3 for beta chain variable domain of TCR clone 328869 (TRBV7-8, TRBJ2-3)
CASSLEAGTDTQYF

SEQ ID NO: 657739 - protein, 15 aa, Homo sapiens
  CDR3 for alpha chain variable domain of TCR clone 328870 (TRAV21, TRAJ52)
CAVRGGGTSYGKLTF

SEQ ID NO: 657740 - protein, 15 aa, Homo sapiens
  CDR3 for beta chain variable domain of TCR clone 328870 (TRBV18, TRBJ1-5)
CDSSPSDRSNQTQHF

SEQ ID NO: 657741 - protein, 13 aa, Homo sapiens
  CDR3 for alpha chain variable domain of TCR clone 328871 (TRAV36/DV7, TRAJ27)
CAARPGNAGKSTF

SEQ ID NO: 657742 - protein, 15 aa, Homo sapiens
  CDR3 for beta chain variable domain of TCR clone 328871 (TRBV2, TRBJ2-3)
CASSDAGGPPDTQYF

SEQ ID NO: 657743 - protein, 14 aa, Homo sapiens
  CDR3 for alpha chain variable domain of TCR clone 328872 (TRAV35, TRAJ42)
CCVPYGGSQGNLIF

SEQ ID NO: 657744 - protein, 18 aa, Homo sapiens
  CDR3 for beta chain variable domain of TCR clone 328872 (TRBV13, TRBJ2-6)
CASSPMTSGGSGANGLTF

SEQ ID NO: 657745 - protein, 12 aa, Homo sapiens
  CDR3 for alpha chain variable domain of TCR clone 328873 (TRAV12-1, TRAJ20)
CVAHFNDYKLSF

SEQ ID NO: 657746 - protein, 13 aa, Homo sapiens
  CDR3 for beta chain variable domain of TCR clone 328873 (TRBV5-7, TRBJ2-5)
CASSSRLQGTQYF

SEQ ID NO: 657747 - protein, 17 aa, Homo sapiens
  CDR3 for alpha chain variable domain of TCR clone 328874 (TRAV1-1, TRAJ9)
CLLLLRCQKYWRLKTIF

SEQ ID NO: 657748 - protein, 13 aa, Homo sapiens
  CDR3 for beta chain variable domain of TCR clone 328874 (TRBV7-9, TRBJ1-2)
CASSLKQNYGYTF

SEQ ID NO: 657749 - protein, 12 aa, Homo sapiens
  CDR3 for alpha chain variable domain of TCR clone 328875 (TRAV3, TRAJ31)
CAVRDGNARLMF

SEQ ID NO: 657750 - protein, 14 aa, Homo sapiens
  CDR3 for beta chain variable domain of TCR clone 328875 (TRBV10-3, TRBJ2-1)
CAISPGQGSNEQFF

SEQ ID NO: 657751 - protein, 12 aa, Homo sapiens
  CDR3 for alpha chain variable domain of TCR clone 328876 (TRAV29/DV5, TRAJ15)
CASNQAGTALMF

SEQ ID NO: 657752 - protein, 14 aa, Homo sapiens
  CDR3 for beta chain variable domain of TCR clone 328876 (TRBV28, TRBJ2-3)
CASSWRGRADTQYF

SEQ ID NO: 657753 - protein, 18 aa, Homo sapiens
  CDR3 for alpha chain variable domain of TCR clone 328877 (TRAV21, TRAJ52)
CVVRPSPAGGTSYGKLTF

SEQ ID NO: 657754 - protein, 17 aa, Homo sapiens
  CDR3 for beta chain variable domain of TCR clone 328877 (TRBV14, TRBJ2-3)
CASSQEPSGLSTDTQYF

SEQ ID NO: 657755 - protein, 15 aa, Homo sapiens
  CDR3 for alpha chain variable domain of TCR clone 328878 (TRAV8-4, TRAJ37)
CAVTYGSSNTVKLIF

SEQ ID NO: 657756 - protein, 13 aa, Homo sapiens
  CDR3 for beta chain variable domain of TCR clone 328878 (TRBV12-4, TRBJ2-5)
CASSVGGSRTQYF

SEQ ID NO: 657757 - protein, 13 aa, Homo sapiens
  CDR3 for alpha chain variable domain of TCR clone 328879 (TRAV1-2, TRAJ9)
CAALNTGGFKTIF

SEQ ID NO: 657758 - protein, 14 aa, Homo sapiens
  CDR3 for beta chain variable domain of TCR clone 328879 (TRBV19, TRBJ2-2)
CASSIAGAFGELFF

SEQ ID NO: 657759 - protein, 15 aa, Homo sapiens
  CDR3 for alpha chain variable domain of TCR clone 328880 (TRAV8-3, TRAJ45)
CASSYSGGGADGLTF

SEQ ID NO: 657760 - protein, 14 aa, Homo sapiens
  CDR3 for beta chain variable domain of TCR clone 328880 (TRBV2, TRBJ1-2)
CASSEGGRNYGYTF

SEQ ID NO: 657761 - protein, 18 aa, Homo sapiens
  CDR3 for alpha chain variable domain of TCR clone 328881 (TRAV21, TRAJ52)
CAVRPSPAGGTSYGKLTF

SEQ ID NO: 657762 - protein, 17 aa, Homo sapiens
  CDR3 for beta chain variable domain of TCR clone 328881 (TRBV13, TRBJ2-3)
CDSSLSRVAGGEEYAVF

SEQ ID NO: 657763 - protein, 14 aa, Homo sapiens
  CDR3 for alpha chain variable domain of TCR clone 328882 (TRAV35, TRAJ33)
CWPRGRDSNYQLIW

SEQ ID NO: 657764 - protein, 11 aa, Homo sapiens
  CDR3 for beta chain variable domain of TCR clone 328882 (TRBV10-3, TRBJ2-7)
CAISEALEQYF

SEQ ID NO: 657765 - protein, 11 aa, Homo sapiens
  CDR3 for alpha chain variable domain of TCR clone 328883 (TRAV2, TRAJ21)
CAVFNFNRFYL

SEQ ID NO: 657766 - protein, 14 aa, Homo sapiens
  CDR3 for beta chain variable domain of TCR clone 328883 (TRBV15, TRBJ2-3)
CATRSGTSTDTQYF

SEQ ID NO: 657767 - protein, 16 aa, Homo sapiens
  CDR3 for alpha chain variable domain of TCR clone 328884 (TRAV20, TRAJ10)
CAVLRGLTGGGNKLTF

SEQ ID NO: 657768 - protein, 15 aa, Homo sapiens
  CDR3 for beta chain variable domain of TCR clone 328884 (TRBV3-1, TRBJ2-1)
CASSQQPSGGNEQFF

SEQ ID NO: 657769 - protein, 13 aa, Homo sapiens
  CDR3 for alpha chain variable domain of TCR clone 328885 (TRAV2, TRAJ40)
CAVVTSVTYKHIF

SEQ ID NO: 657770 - protein, 14 aa, Homo sapiens
  CDR3 for beta chain variable domain of TCR clone 328885 (TRBV19, TRBJ2-1)
CASPTFVLSGEQFF

SEQ ID NO: 657771 - protein, 14 aa, Homo sapiens
  CDR3 for alpha chain variable domain of TCR clone 328886 (TRAV12-3, TRAJ10)
SHLPLTGGGNKLTF

SEQ ID NO: 657772 - protein, 12 aa, Homo sapiens
  CDR3 for beta chain variable domain of TCR clone 328886 (TRBV7-2, TRBJ1-5)
CASSLWSQPQHF

SEQ ID NO: 657773 - protein, 11 aa, Homo sapiens
  CDR3 for alpha chain variable domain of TCR clone 328887 (TRAV1-2, TRAJ11)
CAVRGYSTLTF

SEQ ID NO: 657774 - protein, 13 aa, Homo sapiens
  CDR3 for beta chain variable domain of TCR clone 328887 (TRBV10-3, TRBJ2-7)
CASKRAVNYEQYF

SEQ ID NO: 657775 - protein, 15 aa, Homo sapiens
  CDR3 for alpha chain variable domain of TCR clone 328888 (TRAV13-1, TRAJ44)
CAASKGGGTASKLTF

SEQ ID NO: 657776 - protein, 16 aa, Homo sapiens
  CDR3 for beta chain variable domain of TCR clone 328888 (TRBV6-3, TRBJ2-1)
CASSYRRGDSYNEQFF

SEQ ID NO: 657777 - protein, 13 aa, Homo sapiens
  CDR3 for alpha chain variable domain of TCR clone 328889 (TRAV13-1, TRAJ21)
CAASIYNFNKFYF

SEQ ID NO: 657778 - protein, 15 aa, Homo sapiens
  CDR3 for beta chain variable domain of TCR clone 328889 (TRBV2, TRBJ2-3)
CASSGEGTGTDTQYF

SEQ ID NO: 657779 - protein, 11 aa, Homo sapiens
  CDR3 for alpha chain variable domain of TCR clone 328890 (TRAV21, TRAJ48)
CAVDGNEKLTF

SEQ ID NO: 657780 - protein, 14 aa, Homo sapiens
  CDR3 for beta chain variable domain of TCR clone 328890 (TRBV20-1, TRBJ1-1)
CSAQTRIGGTEAFF

SEQ ID NO: 657781 - protein, 17 aa, Homo sapiens
  CDR3 for alpha chain variable domain of TCR clone 328891 (TRAV36/DV7, TRAJ52)
CAVAQRAGGTSYGKLTF

SEQ ID NO: 657782 - protein, 15 aa, Homo sapiens
  CDR3 for beta chain variable domain of TCR clone 328891 (TRBV9, TRBJ1-6)
CASSVAGTVDSPLHF

SEQ ID NO: 657783 - protein, 13 aa, Homo sapiens
  CDR3 for alpha chain variable domain of TCR clone 328892 (TRAV8-2, TRAJ43)
CVVSDQGGNDTRF

SEQ ID NO: 657784 - protein, 12 aa, Homo sapiens
  CDR3 for beta chain variable domain of TCR clone 328892 (TRBV7-9, TRBJ2-7)
CASRTGFDEQYF

SEQ ID NO: 657785 - protein, 17 aa, Homo sapiens
  CDR3 for alpha chain variable domain of TCR clone 328893 (TRAV26-1, TRAJ53)
CIVRVDDSGGSNYKLTF

SEQ ID NO: 657786 - protein, 15 aa, Homo sapiens
  CDR3 for beta chain variable domain of TCR clone 328893 (TRBV20-1, TRBJ2-7)
CCARVPAAYFYEQYF

SEQ ID NO: 657787 - protein, 14 aa, Homo sapiens
  CDR3 for alpha chain variable domain of TCR clone 328894 (TRAV2, TRAJ9)
CAVEDRSGGFKTIL

SEQ ID NO: 657788 - protein, 14 aa, Homo sapiens
  CDR3 for beta chain variable domain of TCR clone 328894 (TRBV7-7, TRBJ2-2)
CATRQDSDTGELFF

SEQ ID NO: 657789 - protein, 10 aa, Homo sapiens
  CDR3 for alpha chain variable domain of TCR clone 328895 (TRAV21, TRAJ31)
CAVDNARLMF

SEQ ID NO: 657790 - protein, 17 aa, Homo sapiens
  CDR3 for beta chain variable domain of TCR clone 328895 (TRBV4-1, TRBJ2-5)
CASSQDQTGGPQETQYF

SEQ ID NO: 657791 - protein, 14 aa, Homo sapiens
  CDR3 for alpha chain variable domain of TCR clone 328896 (TRAV16, TRAJ15)
CALSFNQAGTALIF

SEQ ID NO: 657792 - protein, 16 aa, Homo sapiens
  CDR3 for beta chain variable domain of TCR clone 328896 (TRBV9, TRBJ2-7)
CASSAGPDRSAYEQYF

SEQ ID NO: 657793 - protein, 14 aa, Homo sapiens
  CDR3 for alpha chain variable domain of TCR clone 328897 (TRAV8-4, TRAJ9)
CAVRINTGGFKTIF

SEQ ID NO: 657794 - protein, 15 aa, Homo sapiens
  CDR3 for beta chain variable domain of TCR clone 328897 (TRBV20-1, TRBJ2-7)
CSARDRVSGVDEQYF

SEQ ID NO: 657795 - protein, 14 aa, Homo sapiens
  CDR3 for alpha chain variable domain of TCR clone 328898 (TRAV21, TRAJ58)
CAVRRGRSGSRLTF

SEQ ID NO: 657796 - protein, 15 aa, Homo sapiens
  CDR3 for beta chain variable domain of TCR clone 328898 (TRBV7-3, TRBJ2-2)
CASSETGQGTGELFF

SEQ ID NO: 657797 - protein, 11 aa, Homo sapiens
  CDR3 for alpha chain variable domain of TCR clone 328899 (TRAV2, TRAJ20)
CAVLNDYKLSF

SEQ ID NO: 657798 - protein, 16 aa, Homo sapiens
  CDR3 for beta chain variable domain of TCR clone 328899 (TRBV11-1, TRBJ2-2)
CASSAKGLKNTGELFF

SEQ ID NO: 657799 - protein, 13 aa, Homo sapiens
  CDR3 for alpha chain variable domain of TCR clone 328900 (TRAV8-3, TRAJ15)
CAVGIQAVTALIF

SEQ ID NO: 657800 - protein, 17 aa, Homo sapiens
  CDR3 for beta chain variable domain of TCR clone 328900 (TRBV20-1, TRBJ2-1)
CSARDPLAGVSYNEQFF

SEQ ID NO: 657801 - protein, 14 aa, Homo sapiens
  CDR3 for alpha chain variable domain of TCR clone 328901 (TRAV1-2, TRAJ16)
CAVNRFSDGQKLLF

SEQ ID NO: 657802 - protein, 15 aa, Homo sapiens
  CDR3 for beta chain variable domain of TCR clone 328901 (TRBV9, TRBJ1-6)
CASGVAGTGGSPLHF

SEQ ID NO: 657803 - protein, 13 aa, Homo sapiens
  CDR3 for alpha chain variable domain of TCR clone 328902 (TRAV2, TRAJ24)
CAVTTDSWGQLKF

SEQ ID NO: 657804 - protein, 14 aa, Homo sapiens
  CDR3 for beta chain variable domain of TCR clone 328902 (TRBV13, TRBJ2-5)
CASSLGRGQETQYF

SEQ ID NO: 657805 - protein, 14 aa, Homo sapiens
  CDR3 for alpha chain variable domain of TCR clone 328903 (TRAV2, TRAJ16)
CAVERGSDGQKLLF

SEQ ID NO: 657806 - protein, 12 aa, Homo sapiens
  CDR3 for beta chain variable domain of TCR clone 328903 (TRBV6-5, TRBJ2-7)
CASYIYGYGQYF

SEQ ID NO: 657807 - protein, 16 aa, Homo sapiens
  CDR3 for alpha chain variable domain of TCR clone 328904 (TRAV26-1, TRAJ37)
CIVRGDGSGNTGKLIF

SEQ ID NO: 657808 - protein, 11 aa, Homo sapiens
  CDR3 for beta chain variable domain of TCR clone 328904 (TRBV29-1, TRBJ2-5)
CSEDRTGTQYF

SEQ ID NO: 657809 - protein, 14 aa, Homo sapiens
  CDR3 for alpha chain variable domain of TCR clone 328905 (TRAV12-3, TRAJ10)
SHLPLTGGGNKLTF

SEQ ID NO: 657810 - protein, 16 aa, Homo sapiens
  CDR3 for beta chain variable domain of TCR clone 328905 (TRBV19, TRBJ1-1)
CASRFGGPVTGTQAFF

SEQ ID NO: 657811 - protein, 16 aa, Homo sapiens
  CDR3 for alpha chain variable domain of TCR clone 328906 (TRAV30, TRAJ24)
CGTEIGDAEGWGKFRF

SEQ ID NO: 657812 - protein, 13 aa, Homo sapiens
  CDR3 for beta chain variable domain of TCR clone 328906 (TRBV20-1, TRBJ1-1)
CSARGVGNTEAFF

SEQ ID NO: 657813 - protein, 13 aa, Homo sapiens
  CDR3 for alpha chain variable domain of TCR clone 328907 (TRAV13-2, TRAJ54)
CAESGSGSPEAGF

SEQ ID NO: 657814 - protein, 15 aa, Homo sapiens
  CDR3 for beta chain variable domain of TCR clone 328907 (TRBV20-1, TRBJ2-7)
CSAESGTSGAYEQYF

SEQ ID NO: 657815 - protein, 13 aa, Homo sapiens
  CDR3 for alpha chain variable domain of TCR clone 328908 (TRAV13-1, TRAJ10)
CAATLGGGNKLTF

SEQ ID NO: 657816 - protein, 17 aa, Homo sapiens
  CDR3 for beta chain variable domain of TCR clone 328908 (TRBV7-8, TRBJ2-6)
CASSAGTGGAGANVLTF

SEQ ID NO: 657817 - protein, 14 aa, Homo sapiens
  CDR3 for alpha chain variable domain of TCR clone 328909 (TRAV12-1, TRAJ34)
CVVNLDYNTYKLIF

SEQ ID NO: 657818 - protein, 20 aa, Homo sapiens
  CDR3 for beta chain variable domain of TCR clone 328909 (TRBV7-3, TRBJ2-7)
CASSPRGLAGMVAVLRAGHQ

SEQ ID NO: 657819 - protein, 12 aa, Homo sapiens
  CDR3 for alpha chain variable domain of TCR clone 328910 (TRAV17, TRAJ57)
CATDGGSEKLVF

SEQ ID NO: 657820 - protein, 13 aa, Homo sapiens
  CDR3 for beta chain variable domain of TCR clone 328910 (TRBV7-9, TRBJ2-7)
CASSFAGPYEQYF

SEQ ID NO: 657821 - protein, 16 aa, Homo sapiens
  CDR3 for alpha chain variable domain of TCR clone 328911 (TRAV12-2, TRAJ45)
CAVNRGSGGGADGLTF

SEQ ID NO: 657822 - protein, 14 aa, Homo sapiens
  CDR3 for beta chain variable domain of TCR clone 328911 (TRBV23-1, TRBJ2-2)
DDRGVEKDTGELFF

SEQ ID NO: 657823 - protein, 16 aa, Homo sapiens
  CDR3 for alpha chain variable domain of TCR clone 328912 (TRAV4, TRAJ9)
CLVRDPNRPGGFKTIF

SEQ ID NO: 657824 - protein, 16 aa, Homo sapiens
  CDR3 for beta chain variable domain of TCR clone 328912 (TRBV28, TRBJ1-4)
CASSPPYRGRSEKLFF

SEQ ID NO: 657825 - protein, 15 aa, Homo sapiens
  CDR3 for alpha chain variable domain of TCR clone 328913 (TRAV3, TRAJ13)
CAVRVYSGGYQKVTF

SEQ ID NO: 657826 - protein, 16 aa, Homo sapiens
  CDR3 for beta chain variable domain of TCR clone 328913 (TRBV7-8, TRBJ2-4)
CASSAERTLAKNIQYF

SEQ ID NO: 657827 - protein, 18 aa, Homo sapiens
  CDR3 for alpha chain variable domain of TCR clone 328914 (TRAV21, TRAJ52)
CTVRPSPAGGTSYGKLTF

SEQ ID NO: 657828 - protein, 13 aa, Homo sapiens
  CDR3 for beta chain variable domain of TCR clone 328914 (TRBV7-3, TRBJ1-1)
CASSQDWGAEAFF

SEQ ID NO: 657829 - protein, 16 aa, Homo sapiens
  CDR3 for alpha chain variable domain of TCR clone 328915 (TRAV12-3, TRAJ53)
CAMSPGSGGSNYKLTF

SEQ ID NO: 657830 - protein, 15 aa, Homo sapiens
  CDR3 for beta chain variable domain of TCR clone 328915 (TRBV5-1, TRBJ1-2)
CASSSYGEFDYGYTF

SEQ ID NO: 657831 - protein, 13 aa, Homo sapiens
  CDR3 for alpha chain variable domain of TCR clone 328916 (TRAV21, TRAJ57)
CAVIEGGSEKMVF

SEQ ID NO: 657832 - protein, 14 aa, Homo sapiens
  CDR3 for beta chain variable domain of TCR clone 328916 (TRBV12-5, TRBJ2-5)
CASGSRTHQGTQYF

SEQ ID NO: 657833 - protein, 14 aa, Homo sapiens
  CDR3 for alpha chain variable domain of TCR clone 328917 (TRAV1-2, TRAJ16)
CAVNRFSDGQKLLF

SEQ ID NO: 657834 - protein, 12 aa, Homo sapiens
  CDR3 for beta chain variable domain of TCR clone 328917 (TRBV5-1, TRBJ2-5)
CASSGDQETQYF

SEQ ID NO: 657835 - protein, 13 aa, Homo sapiens
  CDR3 for alpha chain variable domain of TCR clone 328918 (TRAV36/DV7, TRAJ37)
CAVFSSNTGELIF

SEQ ID NO: 657836 - protein, 16 aa, Homo sapiens
  CDR3 for beta chain variable domain of TCR clone 328918 (TRBV3-1, TRBJ2-5)
WASSPGQFNGFGTQYF

SEQ ID NO: 657837 - protein, 15 aa, Homo sapiens
  CDR3 for alpha chain variable domain of TCR clone 328919 (TRAV26-1, TRAJ48)
CIVRVGDFGNEKLTF

SEQ ID NO: 657838 - protein, 16 aa, Homo sapiens
  CDR3 for beta chain variable domain of TCR clone 328919 (TRBV4-1, TRBJ2-3)
CASSQRAGGLTDRQYF

SEQ ID NO: 657839 - protein, 14 aa, Homo sapiens
  CDR3 for alpha chain variable domain of TCR clone 328920 (TRAV1-2, TRAJ16)
CAVNRFSDGQKLLF

SEQ ID NO: 657840 - protein, 14 aa, Homo sapiens
  CDR3 for beta chain variable domain of TCR clone 328920 (TRBV11-3, TRBJ1-2)
CASSLGTANYGYTF

SEQ ID NO: 657841 - protein, 13 aa, Homo sapiens
  CDR3 for alpha chain variable domain of TCR clone 328921 (TRAV20, TRAJ37)
CAGCSSNTGKLIF

SEQ ID NO: 657842 - protein, 11 aa, Homo sapiens
  CDR3 for beta chain variable domain of TCR clone 328921 (TRBV12-4, TRBJ2-3)
WASTATDAQYF

SEQ ID NO: 657843 - protein, 16 aa, Homo sapiens
  CDR3 for alpha chain variable domain of TCR clone 328922 (TRAV3, TRAJ37)
CAVRPHGPGNTGKLIF

SEQ ID NO: 657844 - protein, 14 aa, Homo sapiens
  CDR3 for beta chain variable domain of TCR clone 328922 (TRBV7-3, TRBJ1-1)
CASSLKGGNTEAFF

SEQ ID NO: 657845 - protein, 12 aa, Homo sapiens
  CDR3 for alpha chain variable domain of TCR clone 328923 (TRAV13-1, TRAJ21)
CAAKEGFNKFYF

SEQ ID NO: 657846 - protein, 13 aa, Homo sapiens
  CDR3 for beta chain variable domain of TCR clone 328923 (TRBV7-3, TRBJ1-1)
CASSQVWGAEAFF

SEQ ID NO: 657847 - protein, 15 aa, Homo sapiens
  CDR3 for alpha chain variable domain of TCR clone 328924 (TRAV1-2, TRAJ20)
CLLPLCCGNDYKLSF

SEQ ID NO: 657848 - protein, 18 aa, Homo sapiens
  CDR3 for beta chain variable domain of TCR clone 328924 (TRBV20-1, TRBJ2-6)
CSAETTPTHGSGANVLTF

SEQ ID NO: 657849 - protein, 16 aa, Homo sapiens
  CDR3 for alpha chain variable domain of TCR clone 328925 (TRAV16, TRAJ52)
CPLSAAGGTSYGKLTF

SEQ ID NO: 657850 - protein, 12 aa, Homo sapiens
  CDR3 for beta chain variable domain of TCR clone 328925 (TRBV12-4, TRBJ1-3)
CASSFSGNTIYF

SEQ ID NO: 657851 - protein, 14 aa, Homo sapiens
  CDR3 for alpha chain variable domain of TCR clone 328926 (TRAV1-2, TRAJ8)
CAVREDTGFQKLIF

SEQ ID NO: 657852 - protein, 15 aa, Homo sapiens
  CDR3 for beta chain variable domain of TCR clone 328926 (TRBV11-3, TRBJ2-3)
CASLKDGREGDTQYF

SEQ ID NO: 657853 - protein, 15 aa, Homo sapiens
  CDR3 for alpha chain variable domain of TCR clone 328927 (TRAV8-4, TRAJ40)
CAVSSITSGTYKYIF

SEQ ID NO: 657854 - protein, 13 aa, Homo sapiens
  CDR3 for beta chain variable domain of TCR clone 328927 (TRBV2, TRBJ2-1)
CAPSRGTDNEQFF

SEQ ID NO: 657855 - protein, 11 aa, Homo sapiens
  CDR3 for alpha chain variable domain of TCR clone 328928 (TRAV14/DV4, )
CAMREISRTLT

SEQ ID NO: 657856 - protein, 14 aa, Homo sapiens
  CDR3 for beta chain variable domain of TCR clone 328928 (TRBV2, TRBJ2-1)
CASSDRPYYNEQFF

SEQ ID NO: 657857 - protein, 18 aa, Homo sapiens
  CDR3 for alpha chain variable domain of TCR clone 328929 (TRAV13-1, TRAJ52)
CAASKRSAGGTSYGKLTF

SEQ ID NO: 657858 - protein, 13 aa, Homo sapiens
  CDR3 for beta chain variable domain of TCR clone 328929 (TRBV12-4, TRBJ1-2)
CGSSLRQGKGYTF

SEQ ID NO: 657859 - protein, 14 aa, Homo sapiens
  CDR3 for alpha chain variable domain of TCR clone 328930 (TRAV1-2, TRAJ16)
CAVNRFSDGQKLLF

SEQ ID NO: 657860 - protein, 21 aa, Homo sapiens
  CDR3 for beta chain variable domain of TCR clone 328930 (TRBV7-2, TRBJ2-7)
RRTRPCISVRSPKTSFYEQYF

SEQ ID NO: 657861 - protein, 14 aa, Homo sapiens
  CDR3 for alpha chain variable domain of TCR clone 328931 (TRAV13-1, TRAJ35)
CAASKGGFGNVLHC

SEQ ID NO: 657862 - protein, 12 aa, Homo sapiens
  CDR3 for beta chain variable domain of TCR clone 328931 (TRBV5-1, TRBJ2-7)
CASSLDSYEQYF

SEQ ID NO: 657863 - protein, 14 aa, Homo sapiens
  CDR3 for alpha chain variable domain of TCR clone 328932 (TRAV20, TRAJ32)
CCGRYGGATNKLIF

SEQ ID NO: 657864 - protein, 16 aa, Homo sapiens
  CDR3 for beta chain variable domain of TCR clone 328932 (TRBV19, TRBJ2-2)
CASRSPGKGATGELFF

SEQ ID NO: 657865 - protein, 15 aa, Homo sapiens
  CDR3 for alpha chain variable domain of TCR clone 328933 (TRAV3, TRAJ17)
CAVSRKEAAGNKLTF

SEQ ID NO: 657866 - protein, 12 aa, Homo sapiens
  CDR3 for beta chain variable domain of TCR clone 328933 (TRBV7-9, TRBJ1-6)
CASSLMTSPLHF

SEQ ID NO: 657867 - protein, 14 aa, Homo sapiens
  CDR3 for alpha chain variable domain of TCR clone 328934 (TRAV12-2, TRAJ17)
CAALFKAAGNKLTF

SEQ ID NO: 657868 - protein, 16 aa, Homo sapiens
  CDR3 for beta chain variable domain of TCR clone 328934 (TRBV20-1, TRBJ2-2)
CSASASGIPGGGELFF

SEQ ID NO: 657869 - protein, 16 aa, Homo sapiens
  CDR3 for alpha chain variable domain of TCR clone 328935 (TRAV30, TRAJ24)
CGTEIVDADSWGKFQF

SEQ ID NO: 657870 - protein, 13 aa, Homo sapiens
  CDR3 for beta chain variable domain of TCR clone 328935 (TRBV20-1, TRBJ1-1)
CSAGGGGNTEAFF

SEQ ID NO: 657871 - protein, 15 aa, Homo sapiens
  CDR3 for alpha chain variable domain of TCR clone 328936 (TRAV20, TRAJ50)
CAVRQMKTSYDKVIF

SEQ ID NO: 657872 - protein, 16 aa, Homo sapiens
  CDR3 for beta chain variable domain of TCR clone 328936 (TRBV15, TRBJ1-2)
CATSRGPRTGGGGYNF

SEQ ID NO: 657873 - protein, 17 aa, Homo sapiens
  CDR3 for alpha chain variable domain of TCR clone 328937 (TRAV3, TRAJ6)
CAVRDGPRAGGSYIPTF

SEQ ID NO: 657874 - protein, 13 aa, Homo sapiens
  CDR3 for beta chain variable domain of TCR clone 328937 (TRBV27, TRBJ2-1)
CGSRTLGVGEQFF

SEQ ID NO: 657875 - protein, 11 aa, Homo sapiens
  CDR3 for alpha chain variable domain of TCR clone 328938 (TRAV2, TRAJ13)
CASGGYQKVTF

SEQ ID NO: 657876 - protein, 14 aa, Homo sapiens
  CDR3 for beta chain variable domain of TCR clone 328938 (TRBV19, TRBJ2-7)
CASSIRLGDHEQYF

SEQ ID NO: 657877 - protein, 13 aa, Homo sapiens
  CDR3 for alpha chain variable domain of TCR clone 328939 (TRAV3, TRAJ41)
CAVSSNSGYSPNF

SEQ ID NO: 657878 - protein, 13 aa, Homo sapiens
  CDR3 for beta chain variable domain of TCR clone 328939 (TRBV7-9, TRBJ1-2)
CASSLKQNYGYTF

SEQ ID NO: 657879 - protein, 16 aa, Homo sapiens
  CDR3 for alpha chain variable domain of TCR clone 328940 (TRAV26-1, TRAJ37)
CIVRGDGSGNTGKLIF

SEQ ID NO: 657880 - protein, 13 aa, Homo sapiens
  CDR3 for beta chain variable domain of TCR clone 328940 (TRBV4-1, TRBJ2-2)
CTSNQENTGELFF

SEQ ID NO: 657881 - protein, 11 aa, Homo sapiens
  CDR3 for alpha chain variable domain of TCR clone 328941 (TRAV13-2, TRAJ36)
CAETGANNHFF

SEQ ID NO: 657882 - protein, 13 aa, Homo sapiens
  CDR3 for beta chain variable domain of TCR clone 328941 (TRBV7-9, TRBJ2-4)
CATEGLAGNIQYF

SEQ ID NO: 657883 - protein, 14 aa, Homo sapiens
  CDR3 for alpha chain variable domain of TCR clone 328942 (TRAV1-2, TRAJ16)
CAVNRFSDGQKLRF

SEQ ID NO: 657884 - protein, 16 aa, Homo sapiens
  CDR3 for beta chain variable domain of TCR clone 328942 (TRBV7-9, TRBJ1-4)
CAITEGEANEKLFLAV

SEQ ID NO: 657885 - protein, 20 aa, Homo sapiens
  CDR3 for alpha chain variable domain of TCR clone 328943 (TRAV12-3, TRAJ41)
SLFIRDSQPSDSATPEALNF

SEQ ID NO: 657886 - protein, 14 aa, Homo sapiens
  CDR3 for beta chain variable domain of TCR clone 328943 (TRBV6-1, TRBJ1-3)
FASVQGGGGNTIYF

SEQ ID NO: 657887 - protein, 19 aa, Homo sapiens
  CDR3 for alpha chain variable domain of TCR clone 328944 (TRAV27, TRAJ53)
ASTTVQSRNSGGSNYKLTF

SEQ ID NO: 657888 - protein, 14 aa, Homo sapiens
  CDR3 for beta chain variable domain of TCR clone 328944 (TRBV11-1, TRBJ2-7)
CASTIAVPSYGQYF

SEQ ID NO: 657889 - protein, 13 aa, Homo sapiens
  CDR3 for alpha chain variable domain of TCR clone 328945 (TRAV12-3, TRAJ9)
CAMSDTGGFKTIF

SEQ ID NO: 657890 - protein, 14 aa, Homo sapiens
  CDR3 for beta chain variable domain of TCR clone 328945 (TRBV11-2, TRBJ2-7)
CASSSTGEGYEQYF

SEQ ID NO: 657891 - protein, 12 aa, Homo sapiens
  CDR3 for alpha chain variable domain of TCR clone 328946 (TRAV12-3, TRAJ17)
CAMTLTGNKLTF

SEQ ID NO: 657892 - protein, 17 aa, Homo sapiens
  CDR3 for beta chain variable domain of TCR clone 328946 (TRBV28, TRBJ2-3)
CASSPTPAGGRVDTQYF

SEQ ID NO: 657893 - protein, 13 aa, Homo sapiens
  CDR3 for alpha chain variable domain of TCR clone 328947 (TRAV13-2, TRAJ53)
CAENMGSNYKLTF

SEQ ID NO: 657894 - protein, 16 aa, Homo sapiens
  CDR3 for beta chain variable domain of TCR clone 328947 (TRBV4-1, TRBJ2-7)
CASSQNDRDNSYEQYF

SEQ ID NO: 657895 - protein, 14 aa, Homo sapiens
  CDR3 for alpha chain variable domain of TCR clone 328948 (TRAV9-2, TRAJ39)
CALYIYNAGNMLTF

SEQ ID NO: 657896 - protein, 12 aa, Homo sapiens
  CDR3 for beta chain variable domain of TCR clone 328948 (TRBV2, TRBJ2-3)
CASSGRFDTQYF

SEQ ID NO: 657897 - protein, 15 aa, Homo sapiens
  CDR3 for alpha chain variable domain of TCR clone 328949 (TRAV21, TRAJ53)
CATLNSGGSNYKLTF

SEQ ID NO: 657898 - protein, 14 aa, Homo sapiens
  CDR3 for beta chain variable domain of TCR clone 328949 (TRBV19, TRBJ2-7)
CASSMGQGAIEQYF

SEQ ID NO: 657899 - protein, 13 aa, Homo sapiens
  CDR3 for alpha chain variable domain of TCR clone 328950 (TRAV12-1, TRAJ26)
SATYLYYGQNFVF

SEQ ID NO: 657900 - protein, 15 aa, Homo sapiens
  CDR3 for beta chain variable domain of TCR clone 328950 (TRBV18, TRBJ2-7)
CASSPRSGTAYEQYF

SEQ ID NO: 657901 - protein, 16 aa, Homo sapiens
  CDR3 for alpha chain variable domain of TCR clone 328951 (TRAV3, TRAJ8)
CAVRDYPNTGFQKLVF

SEQ ID NO: 657902 - protein, 14 aa, Homo sapiens
  CDR3 for beta chain variable domain of TCR clone 328951 (TRBV7-6, TRBJ2-3)
CASSLGTVTDTQYF

SEQ ID NO: 657903 - protein, 13 aa, Homo sapiens
  CDR3 for alpha chain variable domain of TCR clone 328952 (TRAV30, TRAJ24)
CGTVTDSWGNLQF

SEQ ID NO: 657904 - protein, 16 aa, Homo sapiens
  CDR3 for beta chain variable domain of TCR clone 328952 (TRBV7-3, TRBJ2-2)
CASSLKRGTLSGELFF

SEQ ID NO: 657905 - protein, 11 aa, Homo sapiens
  CDR3 for alpha chain variable domain of TCR clone 328953 (TRAV20, TRAJ23)
CACNQGGKLIF

SEQ ID NO: 657906 - protein, 16 aa, Homo sapiens
  CDR3 for beta chain variable domain of TCR clone 328953 (TRBV7-8, TRBJ2-5)
CASSFGGQAAQETQYF

SEQ ID NO: 657907 - protein, 13 aa, Homo sapiens
  CDR3 for alpha chain variable domain of TCR clone 328954 (TRAV13-1, TRAJ20)
CAARVSNDYKLSF

SEQ ID NO: 657908 - protein, 16 aa, Homo sapiens
  CDR3 for beta chain variable domain of TCR clone 328954 (TRBV11-1, TRBJ1-1)
CATNPRDRAFNTEASF

SEQ ID NO: 657909 - protein, 13 aa, Homo sapiens
  CDR3 for alpha chain variable domain of TCR clone 328955 (TRAV16, TRAJ22)
SAMLAGSARQLTF

SEQ ID NO: 657910 - protein, 16 aa, Homo sapiens
  CDR3 for beta chain variable domain of TCR clone 328955 (TRBV2, TRBJ2-1)
CASSVGGSLSYNEQFF

SEQ ID NO: 657911 - protein, 14 aa, Homo sapiens
  CDR3 for alpha chain variable domain of TCR clone 328956 (TRAV20, TRAJ29)
CAVQAWVGNTPLVF

SEQ ID NO: 657912 - protein, 11 aa, Homo sapiens
  CDR3 for beta chain variable domain of TCR clone 328956 (TRBV29-1, TRBJ2-5)
CSEDRTGTQYF

SEQ ID NO: 657913 - protein, 13 aa, Homo sapiens
  CDR3 for alpha chain variable domain of TCR clone 328957 (TRAV29/DV5, TRAJ31)
CAASRNNNARLMF

SEQ ID NO: 657914 - protein, 12 aa, Homo sapiens
  CDR3 for beta chain variable domain of TCR clone 328957 (TRBV7-9, TRBJ1-5)
CASSPQGQPQHF

SEQ ID NO: 657915 - protein, 12 aa, Homo sapiens
  CDR3 for alpha chain variable domain of TCR clone 328958 (TRAV3, TRAJ26)
CAVRDYGQNFVF

SEQ ID NO: 657916 - protein, 13 aa, Homo sapiens
  CDR3 for beta chain variable domain of TCR clone 328958 (TRBV11-2, TRBJ2-7)
CASSTSRSLEQYF

SEQ ID NO: 657917 - protein, 18 aa, Homo sapiens
  CDR3 for alpha chain variable domain of TCR clone 328959 (TRAV3, TRAJ17)
CAVKARRGGRSCRQQANF

SEQ ID NO: 657918 - protein, 14 aa, Homo sapiens
  CDR3 for beta chain variable domain of TCR clone 328959 (TRBV4-1, TRBJ2-2)
CASSQAVNTGELFF

SEQ ID NO: 657919 - protein, 13 aa, Homo sapiens
  CDR3 for alpha chain variable domain of TCR clone 328960 (TRAV2, TRAJ40)
CAVVTSGTYKYIL

SEQ ID NO: 657920 - protein, 12 aa, Homo sapiens
  CDR3 for beta chain variable domain of TCR clone 328960 (TRBV20-1, TRBJ2-1)
CSAQYTYNEQFF

SEQ ID NO: 657921 - protein, 12 aa, Homo sapiens
  CDR3 for alpha chain variable domain of TCR clone 328961 (TRAV13-1, TRAJ21)
CAAKEGCNKFYF

SEQ ID NO: 657922 - protein, 14 aa, Homo sapiens
  CDR3 for beta chain variable domain of TCR clone 328961 (TRBV7-2, TRBJ2-5)
CASSLSGGGETQYF

SEQ ID NO: 657923 - protein, 13 aa, Homo sapiens
  CDR3 for alpha chain variable domain of TCR clone 328962 (TRAV10, TRAJ34)
CVVSGENNDKLIF

SEQ ID NO: 657924 - protein, 14 aa, Homo sapiens
  CDR3 for beta chain variable domain of TCR clone 328962 (TRBV19, TRBJ2-7)
CASSTTRSSYEQYF

SEQ ID NO: 657925 - protein, 15 aa, Homo sapiens
  CDR3 for alpha chain variable domain of TCR clone 328963 (TRAV3, TRAJ29)
CAVRDINSGNTPLVF

SEQ ID NO: 657926 - protein, 16 aa, Homo sapiens
  CDR3 for beta chain variable domain of TCR clone 328963 (TRBV4-1, TRBJ2-5)
CASSRTFYGDQETQYF

SEQ ID NO: 657927 - protein, 16 aa, Homo sapiens
  CDR3 for alpha chain variable domain of TCR clone 328964 (TRAV16, TRAJ42)
CARKMNYGGSQGNLIF

SEQ ID NO: 657928 - protein, 15 aa, Homo sapiens
  CDR3 for beta chain variable domain of TCR clone 328964 (TRBV28, TRBJ2-1)
CASSIIAGGRSEQFF

SEQ ID NO: 657929 - protein, 13 aa, Homo sapiens
  CDR3 for alpha chain variable domain of TCR clone 328965 (TRAV27, TRAJ3)
ASLRGSSASKIIF

SEQ ID NO: 657930 - protein, 13 aa, Homo sapiens
  CDR3 for beta chain variable domain of TCR clone 328965 (TRBV20-1, TRBJ1-3)
CSARLGVGNTIYF

SEQ ID NO: 657931 - protein, 14 aa, Homo sapiens
  CDR3 for alpha chain variable domain of TCR clone 328966 (TRAV12-2, TRAJ17)
CAVLFKAAGNKLPF

SEQ ID NO: 657932 - protein, 13 aa, Homo sapiens
  CDR3 for beta chain variable domain of TCR clone 328966 (TRBV19, TRBJ1-2)
CASSQGQVYGYTF

SEQ ID NO: 657933 - protein, 17 aa, Homo sapiens
  CDR3 for alpha chain variable domain of TCR clone 328967 (TRAV8-3, TRAJ34)
CAIPGKLIFGTGPRLQV

SEQ ID NO: 657934 - protein, 15 aa, Homo sapiens
  CDR3 for beta chain variable domain of TCR clone 328967 (TRBV5-7, TRBJ2-1)
CASSRRLAGDNEQFF

SEQ ID NO: 657935 - protein, 13 aa, Homo sapiens
  CDR3 for alpha chain variable domain of TCR clone 328968 (TRAV24, TRAJ37)
CAFSPGNTGKLIF

SEQ ID NO: 657936 - protein, 15 aa, Homo sapiens
  CDR3 for beta chain variable domain of TCR clone 328968 (TRBV7-6, TRBJ2-5)
SASSKPTGPQETQYF

SEQ ID NO: 657937 - protein, 11 aa, Homo sapiens
  CDR3 for alpha chain variable domain of TCR clone 328969 (TRAV2, TRAJ13)
CASGGYQKVTF

SEQ ID NO: 657938 - protein, 15 aa, Homo sapiens
  CDR3 for beta chain variable domain of TCR clone 328969 (TRBV11-1, TRBJ2-1)
CASHTGLAGSNEQFF

SEQ ID NO: 657939 - protein, 16 aa, Homo sapiens
  CDR3 for alpha chain variable domain of TCR clone 328970 (TRAV30, TRAJ24)
CGTEIVGADSWGKFHF

SEQ ID NO: 657940 - protein, 15 aa, Homo sapiens
  CDR3 for beta chain variable domain of TCR clone 328970 (TRBV7-9, TRBJ1-4)
CASSARTGGNEKLFF

SEQ ID NO: 657941 - protein, 14 aa, Homo sapiens
  CDR3 for alpha chain variable domain of TCR clone 328971 (TRAV29/DV5, TRAJ48)
CAAMALFGNEKLTF

SEQ ID NO: 657942 - protein, 15 aa, Homo sapiens
  CDR3 for beta chain variable domain of TCR clone 328971 (TRBV7-2, TRBJ2-1)
CASSSGLAGGNEQFF

SEQ ID NO: 657943 - protein, 14 aa, Homo sapiens
  CDR3 for alpha chain variable domain of TCR clone 328972 (TRAV13-2, TRAJ57)
CAENFQGGSEKLVF

SEQ ID NO: 657944 - protein, 14 aa, Homo sapiens
  CDR3 for beta chain variable domain of TCR clone 328972 (TRBV5-4, TRBJ1-1)
CASSLDSRRDEAFF

SEQ ID NO: 657945 - protein, 15 aa, Homo sapiens
  CDR3 for alpha chain variable domain of TCR clone 328973 (TRAV3, TRAJ22)
CAVRDRGGSARQLTF

SEQ ID NO: 657946 - protein, 12 aa, Homo sapiens
  CDR3 for beta chain variable domain of TCR clone 328973 (TRBV2, TRBJ1-5)
CASSGRDQPQHF

SEQ ID NO: 657947 - protein, 14 aa, Homo sapiens
  CDR3 for alpha chain variable domain of TCR clone 328974 (TRAV13-1, TRAJ44)
CAAKATGTASKLTF

SEQ ID NO: 657948 - protein, 16 aa, Homo sapiens
  CDR3 for beta chain variable domain of TCR clone 328974 (TRBV5-1, TRBJ2-3)
CASRLQGRVGADTQYF

SEQ ID NO: 657949 - protein, 14 aa, Homo sapiens
  CDR3 for alpha chain variable domain of TCR clone 328975 (TRAV12-2, TRAJ13)
CAVKRTGGYQKVTF

SEQ ID NO: 657950 - protein, 17 aa, Homo sapiens
  CDR3 for beta chain variable domain of TCR clone 328975 (TRBV20-1, TRBJ2-2)
CSAGGSGQGGLTGELFF

SEQ ID NO: 657951 - protein, 14 aa, Homo sapiens
  CDR3 for alpha chain variable domain of TCR clone 328976 (TRAV8-3, TRAJ4)
CAVGADGGYNKLIF

SEQ ID NO: 657952 - protein, 15 aa, Homo sapiens
  CDR3 for beta chain variable domain of TCR clone 328976 (TRBV6-3, TRBJ2-7)
CASSSPGTVFYEQYF

SEQ ID NO: 657953 - protein, 13 aa, Homo sapiens
  CDR3 for alpha chain variable domain of TCR clone 328977 (TRAV21, TRAJ27)
CAARPGNAGKSTF

SEQ ID NO: 657954 - protein, 17 aa, Homo sapiens
  CDR3 for beta chain variable domain of TCR clone 328977 (TRBV4-1, TRBJ1-4)
CASSHEGPRGVEEKLFF

SEQ ID NO: 657955 - protein, 14 aa, Homo sapiens
  CDR3 for alpha chain variable domain of TCR clone 328978 (TRAV12-1, TRAJ26)
CEVKGSNYGQNFVF

SEQ ID NO: 657956 - protein, 17 aa, Homo sapiens
  CDR3 for beta chain variable domain of TCR clone 328978 (TRBV11-2, TRBJ2-6)
GASSQRDIFSGANVLTF

SEQ ID NO: 657957 - protein, 14 aa, Homo sapiens
  CDR3 for alpha chain variable domain of TCR clone 328979 (TRAV26-1, TRAJ38)
CIADNAGNNRKLIW

SEQ ID NO: 657958 - protein, 20 aa, Homo sapiens
  CDR3 for beta chain variable domain of TCR clone 328979 (TRBV7-8, TRBJ2-2)
CASSHLFPGPTIHITGELVF

SEQ ID NO: 657959 - protein, 12 aa, Homo sapiens
  CDR3 for alpha chain variable domain of TCR clone 328980 (TRAV23/DV6, TRAJ33)
CAAEDSNYQLIW

SEQ ID NO: 657960 - protein, 15 aa, Homo sapiens
  CDR3 for beta chain variable domain of TCR clone 328980 (TRBV20-1, TRBJ2-7)
CSARDRVSGMDEQYF

SEQ ID NO: 657961 - protein, 15 aa, Homo sapiens
  CDR3 for alpha chain variable domain of TCR clone 328981 (TRAV21, TRAJ53)
CATLNSGGSNYKLTF

SEQ ID NO: 657962 - protein, 15 aa, Homo sapiens
  CDR3 for beta chain variable domain of TCR clone 328981 (TRBV11-2, TRBJ2-1)
CASSKNRGLIYEQFF

SEQ ID NO: 657963 - protein, 13 aa, Homo sapiens
  CDR3 for alpha chain variable domain of TCR clone 328982 (TRAV12-3, TRAJ33)
CAMSVNSNYQLIW

SEQ ID NO: 657964 - protein, 13 aa, Homo sapiens
  CDR3 for beta chain variable domain of TCR clone 328982 (TRBV7-2, TRBJ2-2)
FASSLAVTGELFF

SEQ ID NO: 657965 - protein, 15 aa, Homo sapiens
  CDR3 for alpha chain variable domain of TCR clone 328983 (TRAV3, TRAJ22)
CAVRDRGGSGRQLNF

SEQ ID NO: 657966 - protein, 16 aa, Homo sapiens
  CDR3 for beta chain variable domain of TCR clone 328983 (TRBV5-4, TRBJ2-3)
CASQQPGAGGADTQYF

SEQ ID NO: 657967 - protein, 13 aa, Homo sapiens
  CDR3 for alpha chain variable domain of TCR clone 328984 (TRAV13-2, TRAJ48)
CAEMDFGNEKLTF

SEQ ID NO: 657968 - protein, 15 aa, Homo sapiens
  CDR3 for beta chain variable domain of TCR clone 328984 (TRBV7-3, TRBJ2-1)
CASSQRGGALIELFF

SEQ ID NO: 657969 - protein, 13 aa, Homo sapiens
  CDR3 for alpha chain variable domain of TCR clone 328985 (TRAV12-1, TRAJ49)
CVVGANTGNQFYF

SEQ ID NO: 657970 - protein, 17 aa, Homo sapiens
  CDR3 for beta chain variable domain of TCR clone 328985 (TRBV7-3, TRBJ2-3)
RASSLMKRMRGADTQYF

SEQ ID NO: 657971 - protein, 12 aa, Homo sapiens
  CDR3 for alpha chain variable domain of TCR clone 328986 (TRAV1-1, TRAJ33)
CADSDSNYQLIW

SEQ ID NO: 657972 - protein, 18 aa, Homo sapiens
  CDR3 for beta chain variable domain of TCR clone 328986 (TRBV20-1, TRBJ2-2)
CSARVQTARPSGTGELFF

SEQ ID NO: 657973 - protein, 19 aa, Homo sapiens
  CDR3 for alpha chain variable domain of TCR clone 328987 (TRAV1-2, TRAJ26)
CLLPLCCERPDNYDQNFVF

SEQ ID NO: 657974 - protein, 15 aa, Homo sapiens
  CDR3 for beta chain variable domain of TCR clone 328987 (TRBV10-3, TRBJ2-1)
CAISDVQDRAYEQFF

SEQ ID NO: 657975 - protein, 14 aa, Homo sapiens
  CDR3 for alpha chain variable domain of TCR clone 328988 (TRAV1-1, TRAJ27)
CAVIYNTNAGKSTF

SEQ ID NO: 657976 - protein, 15 aa, Homo sapiens
  CDR3 for beta chain variable domain of TCR clone 328988 (TRBV7-2, TRBJ2-1)
CASRKTGSSYNEQFF

SEQ ID NO: 657977 - protein, 12 aa, Homo sapiens
  CDR3 for alpha chain variable domain of TCR clone 328989 (TRAV16, TRAJ10)
CSRTGGGNKLTF

SEQ ID NO: 657978 - protein, 15 aa, Homo sapiens
  CDR3 for beta chain variable domain of TCR clone 328989 (TRBV28, TRBJ2-3)
CASSPDRQGANTQYF

SEQ ID NO: 657979 - protein, 14 aa, Homo sapiens
  CDR3 for alpha chain variable domain of TCR clone 328990 (TRAV14/DV4, TRAJ20)
CAMRESLNDYKLSF

SEQ ID NO: 657980 - protein, 16 aa, Homo sapiens
  CDR3 for beta chain variable domain of TCR clone 328990 (TRBV12-4, TRBJ2-5)
CASSFFVRGRQETQYF

SEQ ID NO: 657981 - protein, 15 aa, Homo sapiens
  CDR3 for alpha chain variable domain of TCR clone 328991 (TRAV4, TRAJ39)
CLVGQNNNAGNMLTF

SEQ ID NO: 657982 - protein, 15 aa, Homo sapiens
  CDR3 for beta chain variable domain of TCR clone 328991 (TRBV7-9, TRBJ1-6)
CASSSPGRGNSPLHF

SEQ ID NO: 657983 - protein, 15 aa, Homo sapiens
  CDR3 for alpha chain variable domain of TCR clone 328992 (TRAV12-2, TRAJ13)
CRESLGSGGYQKFTF

SEQ ID NO: 657984 - protein, 15 aa, Homo sapiens
  CDR3 for beta chain variable domain of TCR clone 328992 (TRBV6-5, TRBJ2-1)
CASRRAQLSYNEQFF

SEQ ID NO: 657985 - protein, 15 aa, Homo sapiens
  CDR3 for alpha chain variable domain of TCR clone 328993 (TRAV27, TRAJ53)
CSAINSGGSNYKLTF

SEQ ID NO: 657986 - protein, 14 aa, Homo sapiens
  CDR3 for beta chain variable domain of TCR clone 328993 (TRBV7-3, TRBJ2-1)
CASSLAGGTNEQFF

SEQ ID NO: 657987 - protein, 18 aa, Homo sapiens
  CDR3 for alpha chain variable domain of TCR clone 328994 (TRAV26-1, TRAJ22)
CIVRVALFSSGSAMQLTF

SEQ ID NO: 657988 - protein, 13 aa, Homo sapiens
  CDR3 for beta chain variable domain of TCR clone 328994 (TRBV13, TRBJ2-5)
CASSPEVGETQYF

SEQ ID NO: 657989 - protein, 14 aa, Homo sapiens
  CDR3 for alpha chain variable domain of TCR clone 328995 (TRAV1-2, TRAJ16)
CAVNRFSDGQKPLF

SEQ ID NO: 657990 - protein, 15 aa, Homo sapiens
  CDR3 for beta chain variable domain of TCR clone 328995 (TRBV9, TRBJ1-6)
CAGSVAGTGDSPLHF

SEQ ID NO: 657991 - protein, 13 aa, Homo sapiens
  CDR3 for alpha chain variable domain of TCR clone 328996 (TRAV27, TRAJ45)
CRSSGGGADGLTF

SEQ ID NO: 657992 - protein, 13 aa, Homo sapiens
  CDR3 for beta chain variable domain of TCR clone 328996 (TRBV7-7, TRBJ2-5)
CANSRSGQETQYF

SEQ ID NO: 657993 - protein, 16 aa, Homo sapiens
  CDR3 for alpha chain variable domain of TCR clone 328997 (TRAV12-1, TRAJ23)
CVVSVLVVTREESLSS

SEQ ID NO: 657994 - protein, 15 aa, Homo sapiens
  CDR3 for beta chain variable domain of TCR clone 328997 (TRBV4-1, TRBJ2-5)
CASSQWDLYQETQYF

SEQ ID NO: 657995 - protein, 11 aa, Homo sapiens
  CDR3 for alpha chain variable domain of TCR clone 328998 (TRAV39, TRAJ27)
CAVVNAGKSTF

SEQ ID NO: 657996 - protein, 15 aa, Homo sapiens
  CDR3 for beta chain variable domain of TCR clone 328998 (TRBV7-9, TRBJ1-5)
CASSQGHQPNQPQHF

SEQ ID NO: 657997 - protein, 15 aa, Homo sapiens
  CDR3 for alpha chain variable domain of TCR clone 328999 (TRAV26-1, TRAJ29)
CIVRVEGSGNTPLVF

SEQ ID NO: 657998 - protein, 15 aa, Homo sapiens
  CDR3 for beta chain variable domain of TCR clone 328999 (TRBV7-9, TRBJ1-5)
CPSSQGHQPNQPQHF

SEQ ID NO: 657999 - protein, 16 aa, Homo sapiens
  CDR3 for alpha chain variable domain of TCR clone 329000 (TRAV21, TRAJ45)
CAVSWGSGGGADGRTF

SEQ ID NO: 658000 - protein, 14 aa, Homo sapiens
  CDR3 for beta chain variable domain of TCR clone 329000 (TRBV4-2, TRBJ1-2)
CASSPGGSNYGCSF

SEQ ID NO: 658001 - protein, 18 aa, Homo sapiens
  CDR3 for alpha chain variable domain of TCR clone 329001 (TRAV26-1, TRAJ23)
CIVRVGLEVWNQGGKLIF

SEQ ID NO: 658002 - protein, 16 aa, Homo sapiens
  CDR3 for beta chain variable domain of TCR clone 329001 (TRBV12-4, TRBJ2-5)
CASSFFVGGRKETQYF

SEQ ID NO: 658003 - protein, 11 aa, Homo sapiens
  CDR3 for alpha chain variable domain of TCR clone 329002 (TRAV12-3, TRAJ43)
CAMSVSNDMRF

SEQ ID NO: 658004 - protein, 12 aa, Homo sapiens
  CDR3 for beta chain variable domain of TCR clone 329002 (TRBV20-1, TRBJ1-1)
CSAPLGGGTEAF

SEQ ID NO: 658005 - protein, 15 aa, Homo sapiens
  CDR3 for alpha chain variable domain of TCR clone 329003 (TRAV12-1, TRAJ44)
CVADLPTGTASKLTF

SEQ ID NO: 658006 - protein, 17 aa, Homo sapiens
  CDR3 for beta chain variable domain of TCR clone 329003 (TRBV4-1, TRBJ1-4)
CASSQEGPRGVEEKLFF

SEQ ID NO: 658007 - protein, 13 aa, Homo sapiens
  CDR3 for alpha chain variable domain of TCR clone 329004 (TRAV17, TRAJ5)
CALRGTGRRALTF

SEQ ID NO: 658008 - protein, 16 aa, Homo sapiens
  CDR3 for beta chain variable domain of TCR clone 329004 (TRBV19, TRBJ2-1)
CASSEAGPSSYNEQFF

SEQ ID NO: 658009 - protein, 16 aa, Homo sapiens
  CDR3 for alpha chain variable domain of TCR clone 329005 (TRAV29/DV5, TRAJ30)
QCTSVQQANRDDKIIF

SEQ ID NO: 658010 - protein, 13 aa, Homo sapiens
  CDR3 for beta chain variable domain of TCR clone 329005 (TRBV12-5, TRBJ2-3)
CASRNRGTDTQYF

SEQ ID NO: 658011 - protein, 10 aa, Homo sapiens
  CDR3 for alpha chain variable domain of TCR clone 329006 (TRAV26-1, TRAJ22)
CIVSLNFFWF

SEQ ID NO: 658012 - protein, 15 aa, Homo sapiens
  CDR3 for beta chain variable domain of TCR clone 329006 (TRBV19, TRBJ1-2)
CASSVGQVLNYGYTF

SEQ ID NO: 658013 - protein, 14 aa, Homo sapiens
  CDR3 for alpha chain variable domain of TCR clone 329007 (TRAV2, TRAJ9)
CAVDPNTGGFKTIF

SEQ ID NO: 658014 - protein, 14 aa, Homo sapiens
  CDR3 for beta chain variable domain of TCR clone 329007 (TRBV7-2, TRBJ2-7)
CASIPKTSFYEQYF

SEQ ID NO: 658015 - protein, 15 aa, Homo sapiens
  CDR3 for alpha chain variable domain of TCR clone 329008 (TRAV8-3, TRAJ45)
CPSSYSGGGADGLTF

SEQ ID NO: 658016 - protein, 12 aa, Homo sapiens
  CDR3 for beta chain variable domain of TCR clone 329008 (TRBV12-4, TRBJ2-7)
CASSLGGYEQYF

SEQ ID NO: 658017 - protein, 12 aa, Homo sapiens
  CDR3 for alpha chain variable domain of TCR clone 329009 (TRAV27, TRAJ58)
CAGARDTSRLTF

SEQ ID NO: 658018 - protein, 17 aa, Homo sapiens
  CDR3 for beta chain variable domain of TCR clone 329009 (TRBV20-1, TRBJ2-1)
CSARDRRRASSYNEQFF

SEQ ID NO: 658019 - protein, 11 aa, Homo sapiens
  CDR3 for alpha chain variable domain of TCR clone 329010 (TRAV1-1, TRAJ20)
CAVFNVYKLSF

SEQ ID NO: 658020 - protein, 14 aa, Homo sapiens
  CDR3 for beta chain variable domain of TCR clone 329010 (TRBV19, TRBJ2-1)
CASSKDRGQDEQFF

SEQ ID NO: 658021 - protein, 14 aa, Homo sapiens
  CDR3 for alpha chain variable domain of TCR clone 329011 (TRAV9-2, TRAJ39)
CALYIYNAGNMLTF

SEQ ID NO: 658022 - protein, 14 aa, Homo sapiens
  CDR3 for beta chain variable domain of TCR clone 329011 (TRBV7-8, TRBJ2-3)
CASSIEAGTDTQYF

SEQ ID NO: 658023 - protein, 10 aa, Homo sapiens
  CDR3 for alpha chain variable domain of TCR clone 329012 (TRAV38-2/DV8, TRAJ40)
CASGTYKYIF

SEQ ID NO: 658024 - protein, 18 aa, Homo sapiens
  CDR3 for beta chain variable domain of TCR clone 329012 (TRBV18, TRBJ1-3)
CASSPRGGAGPSGNTVYF

SEQ ID NO: 658025 - protein, 13 aa, Homo sapiens
  CDR3 for alpha chain variable domain of TCR clone 329013 (TRAV12-1, TRAJ33)
CGDAPDSNYKLIW

SEQ ID NO: 658026 - protein, 13 aa, Homo sapiens
  CDR3 for beta chain variable domain of TCR clone 329013 (TRBV7-2, TRBJ2-5)
CASSQTSVETQYF

SEQ ID NO: 658027 - protein, 15 aa, Homo sapiens
  CDR3 for alpha chain variable domain of TCR clone 329014 (TRAV14/DV4, TRAJ21)
CAMREEGYNFKKFYF

SEQ ID NO: 658028 - protein, 15 aa, Homo sapiens
  CDR3 for beta chain variable domain of TCR clone 329014 (TRBV15, TRBJ1-5)
CATSTTGVVNQPQHF

SEQ ID NO: 658029 - protein, 14 aa, Homo sapiens
  CDR3 for alpha chain variable domain of TCR clone 329015 (TRAV2, TRAJ9)
CAVEDRSGGFKTIF

SEQ ID NO: 658030 - protein, 16 aa, Homo sapiens
  CDR3 for beta chain variable domain of TCR clone 329015 (TRBV5-1, TRBJ1-1)
CASSSGGNSLNTEAFF

SEQ ID NO: 658031 - protein, 15 aa, Homo sapiens
  CDR3 for alpha chain variable domain of TCR clone 329016 (TRAV17, TRAJ56)
CATDANTGANSKLTF

SEQ ID NO: 658032 - protein, 14 aa, Homo sapiens
  CDR3 for beta chain variable domain of TCR clone 329016 (TRBV19, TRBJ1-5)
CASSLGTGSQPKHF

SEQ ID NO: 658033 - protein, 14 aa, Homo sapiens
  CDR3 for alpha chain variable domain of TCR clone 329017 (TRAV3, TRAJ28)
CAVRRGAGSYQLTF

SEQ ID NO: 658034 - protein, 16 aa, Homo sapiens
  CDR3 for beta chain variable domain of TCR clone 329017 (TRBV4-1, TRBJ2-7)
CASSQEWTSGHLEQYF

SEQ ID NO: 658035 - protein, 14 aa, Homo sapiens
  CDR3 for alpha chain variable domain of TCR clone 329018 (TRAV8-1, TRAJ23)
CAVGTYNQGGKLIF

SEQ ID NO: 658036 - protein, 15 aa, Homo sapiens
  CDR3 for beta chain variable domain of TCR clone 329018 (TRBV11-2, TRBJ1-3)
CASSLDGTVGNTIYF

SEQ ID NO: 658037 - protein, 14 aa, Homo sapiens
  CDR3 for alpha chain variable domain of TCR clone 329019 (TRAV17, TRAJ35)
CATDMPGFGNVLHC

SEQ ID NO: 658038 - protein, 19 aa, Homo sapiens
  CDR3 for beta chain variable domain of TCR clone 329019 (TRBV11-3, TRBJ2-2)
CASSTRPGAKTTNTGELFF

SEQ ID NO: 658039 - protein, 15 aa, Homo sapiens
  CDR3 for alpha chain variable domain of TCR clone 329020 (TRAV12-2, TRAJ53)
CAVNGGGGSNYKLTF

SEQ ID NO: 658040 - protein, 15 aa, Homo sapiens
  CDR3 for beta chain variable domain of TCR clone 329020 (TRBV11-2, TRBJ2-3)
CASSWTGGRTDTQCF

SEQ ID NO: 658041 - protein, 17 aa, Homo sapiens
  CDR3 for alpha chain variable domain of TCR clone 329021 (TRAV26-1, TRAJ37)
CIVRVITVSSNTGKLIF

SEQ ID NO: 658042 - protein, 13 aa, Homo sapiens
  CDR3 for beta chain variable domain of TCR clone 329021 (TRBV3-1, TRBJ2-7)
CASSLRDGYEQYF

SEQ ID NO: 658043 - protein, 12 aa, Homo sapiens
  CDR3 for alpha chain variable domain of TCR clone 329022 (TRAV12-3, TRAJ17)
CAMTLTGSKLTF

SEQ ID NO: 658044 - protein, 15 aa, Homo sapiens
  CDR3 for beta chain variable domain of TCR clone 329022 (TRBV20-1, TRBJ2-7)
CSARDRVSGMDEQYV

SEQ ID NO: 658045 - protein, 21 aa, Homo sapiens
  CDR3 for alpha chain variable domain of TCR clone 329023 (TRAV1-2, TRAJ10)
CAVRGTHGRRKQTHLWDRHSA

SEQ ID NO: 658046 - protein, 12 aa, Homo sapiens
  CDR3 for beta chain variable domain of TCR clone 329023 (TRBV7-8, TRBJ2-7)
CASSLGDREQYF

SEQ ID NO: 658047 - protein, 13 aa, Homo sapiens
  CDR3 for alpha chain variable domain of TCR clone 329024 (TRAV14/DV4, TRAJ4)
CAMKAGGYIKLSF

SEQ ID NO: 658048 - protein, 15 aa, Homo sapiens
  CDR3 for beta chain variable domain of TCR clone 329024 (TRBV11-3, TRBJ1-1)
CASSLGGPGDTEAFF

SEQ ID NO: 658049 - protein, 20 aa, Homo sapiens
  CDR3 for alpha chain variable domain of TCR clone 329025 (TRAV21, TRAJ22)
SLVTQPPTLKSSGSARQLTF

SEQ ID NO: 658050 - protein, 16 aa, Homo sapiens
  CDR3 for beta chain variable domain of TCR clone 329025 (TRBV7-3, TRBJ2-2)
CASSLKRGTLSGELFV

SEQ ID NO: 658051 - protein, 14 aa, Homo sapiens
  CDR3 for alpha chain variable domain of TCR clone 329026 (TRAV21, TRAJ21)
CAVKGFGNFNKFYF

SEQ ID NO: 658052 - protein, 13 aa, Homo sapiens
  CDR3 for beta chain variable domain of TCR clone 329026 (TRBV18, TRBJ1-1)
CASSPETKPEAFL

SEQ ID NO: 658053 - protein, 14 aa, Homo sapiens
  CDR3 for alpha chain variable domain of TCR clone 329027 (TRAV26-1, TRAJ38)
CIADNAGNNRKLIW

SEQ ID NO: 658054 - protein, 13 aa, Homo sapiens
  CDR3 for beta chain variable domain of TCR clone 329027 (TRBV20-1, TRBJ1-1)
CSARGGGNTGAFF

SEQ ID NO: 658055 - protein, 14 aa, Homo sapiens
  CDR3 for alpha chain variable domain of TCR clone 329028 (TRAV17, TRAJ15)
CATTTNQAGTALIF

SEQ ID NO: 658056 - protein, 16 aa, Homo sapiens
  CDR3 for beta chain variable domain of TCR clone 329028 (TRBV4-1, TRBJ2-7)
CASRRGDILNSYEQYF

SEQ ID NO: 658057 - protein, 16 aa, Homo sapiens
  CDR3 for alpha chain variable domain of TCR clone 329029 (TRAV30, TRAJ24)
CGTEIVDADSWGKFQF

SEQ ID NO: 658058 - protein, 15 aa, Homo sapiens
  CDR3 for beta chain variable domain of TCR clone 329029 (TRBV12-4, TRBJ1-2)
CASSFEAGLGYGYTF

SEQ ID NO: 658059 - protein, 16 aa, Homo sapiens
  CDR3 for alpha chain variable domain of TCR clone 329030 (TRAV3, TRAJ37)
CAVRGKGSGNTGKLSF

SEQ ID NO: 658060 - protein, 12 aa, Homo sapiens
  CDR3 for beta chain variable domain of TCR clone 329030 (TRBV7-8, TRBJ2-7)
CASEGGPHGQYF

SEQ ID NO: 658061 - protein, 14 aa, Homo sapiens
  CDR3 for alpha chain variable domain of TCR clone 329031 (TRAV12-2, TRAJ13)
CAVKKTGGYQKVTF

SEQ ID NO: 658062 - protein, 14 aa, Homo sapiens
  CDR3 for beta chain variable domain of TCR clone 329031 (TRBV5-5, TRBJ2-7)
CASSFGQGTYEQYF

SEQ ID NO: 658063 - protein, 19 aa, Homo sapiens
  CDR3 for alpha chain variable domain of TCR clone 329032 (TRAV25, TRAJ43)
TATQTTDVGTYFCAVFMRF

SEQ ID NO: 658064 - protein, 13 aa, Homo sapiens
  CDR3 for beta chain variable domain of TCR clone 329032 (TRBV19, TRBJ1-2)
CASSVPGQDGYTF

SEQ ID NO: 658065 - protein, 14 aa, Homo sapiens
  CDR3 for alpha chain variable domain of TCR clone 329033 (TRAV12-1, TRAJ43)
CVVNGRSNNNDIRF

SEQ ID NO: 658066 - protein, 13 aa, Homo sapiens
  CDR3 for beta chain variable domain of TCR clone 329033 (TRBV2, TRBJ1-4)
CASSELGVEKLFF

SEQ ID NO: 658067 - protein, 13 aa, Homo sapiens
  CDR3 for alpha chain variable domain of TCR clone 329034 (TRAV21, TRAJ27)
CAARPGNAGKSTF

SEQ ID NO: 658068 - protein, 15 aa, Homo sapiens
  CDR3 for beta chain variable domain of TCR clone 329034 (TRBV19, TRBJ2-1)
CASSHRDRGPNEQFF

SEQ ID NO: 658069 - protein, 12 aa, Homo sapiens
  CDR3 for alpha chain variable domain of TCR clone 329035 (TRAV2, TRAJ31)
CAVEDNNARLMF

SEQ ID NO: 658070 - protein, 14 aa, Homo sapiens
  CDR3 for beta chain variable domain of TCR clone 329035 (TRBV28, TRBJ1-5)
CASSRTGLNQTQHF

SEQ ID NO: 658071 - protein, 15 aa, Homo sapiens
  CDR3 for alpha chain variable domain of TCR clone 329036 (TRAV3, TRAJ5)
CAVRDLDTGRRARTC

SEQ ID NO: 658072 - protein, 14 aa, Homo sapiens
  CDR3 for beta chain variable domain of TCR clone 329036 (TRBV25-1, TRBJ1-4)
CASSGGGQPEKLFF

SEQ ID NO: 658073 - protein, 16 aa, Homo sapiens
  CDR3 for alpha chain variable domain of TCR clone 329037 (TRAV8-3, TRAJ22)
CAVDLLGAGSARQLTC

SEQ ID NO: 658074 - protein, 14 aa, Homo sapiens
  CDR3 for beta chain variable domain of TCR clone 329037 (TRBV11-2, TRBJ2-7)
CASSLELEGYEQYF

SEQ ID NO: 658075 - protein, 14 aa, Homo sapiens
  CDR3 for alpha chain variable domain of TCR clone 329038 (TRAV8-1, TRAJ31)
CAVTSWNNNARLMF

SEQ ID NO: 658076 - protein, 16 aa, Homo sapiens
  CDR3 for beta chain variable domain of TCR clone 329038 (TRBV20-1, TRBJ1-4)
CSAPGQGLLTNEKLFF

SEQ ID NO: 658077 - protein, 10 aa, Homo sapiens
  CDR3 for alpha chain variable domain of TCR clone 329039 (TRAV30, TRAJ16)
CGTGGQKLLF

SEQ ID NO: 658078 - protein, 17 aa, Homo sapiens
  CDR3 for beta chain variable domain of TCR clone 329039 (TRBV5-5, TRBJ1-2)
CASSLGSLDGQSEGYTF

SEQ ID NO: 658079 - protein, 14 aa, Homo sapiens
  CDR3 for alpha chain variable domain of TCR clone 329040 (TRAV1-2, TRAJ16)
CAVNRFSDGLKLLF

SEQ ID NO: 658080 - protein, 15 aa, Homo sapiens
  CDR3 for beta chain variable domain of TCR clone 329040 (TRBV11-3, TRBJ2-3)
CASLKDGREGDTQYF

SEQ ID NO: 658081 - protein, 15 aa, Homo sapiens
  CDR3 for alpha chain variable domain of TCR clone 329041 (TRAV38-2/DV8, TRAJ47)
CAYRSAKGYGNNLVF

SEQ ID NO: 658082 - protein, 15 aa, Homo sapiens
  CDR3 for beta chain variable domain of TCR clone 329041 (TRBV6-6, TRBJ2-7)
CASSYSYGGSYEQYF

SEQ ID NO: 658083 - protein, 15 aa, Homo sapiens
  CDR3 for alpha chain variable domain of TCR clone 329042 (TRAV17, TRAJ45)
TSVLRTGGGTDGLTF

SEQ ID NO: 658084 - protein, 15 aa, Homo sapiens
  CDR3 for beta chain variable domain of TCR clone 329042 (TRBV5-7, TRBJ1-5)
CASSYGKLWDQPQHF

SEQ ID NO: 658085 - protein, 15 aa, Homo sapiens
  CDR3 for alpha chain variable domain of TCR clone 329043 (TRAV35, TRAJ40)
CAGQLGTSGTYKYIF

SEQ ID NO: 658086 - protein, 20 aa, Homo sapiens
  CDR3 for beta chain variable domain of TCR clone 329043 (TRBV28, TRBJ2-1)
CASTPIGRSPGLAGGNEQFF

SEQ ID NO: 658087 - protein, 10 aa, Homo sapiens
  CDR3 for alpha chain variable domain of TCR clone 329044 (TRAV23/DV6, TRAJ57)
CAASSTLSQA

SEQ ID NO: 658088 - protein, 18 aa, Homo sapiens
  CDR3 for beta chain variable domain of TCR clone 329044 (TRBV7-6, TRBJ2-1)
CASSPRTSGMSSYNEQFF

SEQ ID NO: 658089 - protein, 12 aa, Homo sapiens
  CDR3 for alpha chain variable domain of TCR clone 329045 (TRAV10, TRAJ43)
CVVVRVGNDMRF

SEQ ID NO: 658090 - protein, 14 aa, Homo sapiens
  CDR3 for beta chain variable domain of TCR clone 329045 (TRBV28, TRBJ2-7)
CASSPYGMAYEQYF

SEQ ID NO: 658091 - protein, 14 aa, Homo sapiens
  CDR3 for alpha chain variable domain of TCR clone 329046 (TRAV21, TRAJ45)
FAVSSGGGADGRTF

SEQ ID NO: 658092 - protein, 15 aa, Homo sapiens
  CDR3 for beta chain variable domain of TCR clone 329046 (TRBV6-1, TRBJ2-4)
CASSEAVWTINIQYF

SEQ ID NO: 658093 - protein, 14 aa, Homo sapiens
  CDR3 for alpha chain variable domain of TCR clone 329047 (TRAV12-2, TRAJ4)
CAVSSSGGYNKLIF

SEQ ID NO: 658094 - protein, 15 aa, Homo sapiens
  CDR3 for beta chain variable domain of TCR clone 329047 (TRBV12-4, TRBJ2-5)
CASSPPTGLQETQYF

SEQ ID NO: 658095 - protein, 14 aa, Homo sapiens
  CDR3 for alpha chain variable domain of TCR clone 329048 (TRAV17, TRAJ12)
CATDEKDSSYKLIC

SEQ ID NO: 658096 - protein, 16 aa, Homo sapiens
  CDR3 for beta chain variable domain of TCR clone 329048 (TRBV11-2, TRBJ2-1)
CASSPRLAGVYNEQFF

SEQ ID NO: 658097 - protein, 13 aa, Homo sapiens
  CDR3 for alpha chain variable domain of TCR clone 329049 (TRAV23/DV6, TRAJ27)
CAASKPMQANQPL

SEQ ID NO: 658098 - protein, 16 aa, Homo sapiens
  CDR3 for beta chain variable domain of TCR clone 329049 (TRBV5-4, TRBJ1-1)
CASSLDSRRDEAFLDK

SEQ ID NO: 658099 - protein, 13 aa, Homo sapiens
  CDR3 for alpha chain variable domain of TCR clone 329050 (TRAV17, TRAJ9)
CGTDYTGGFKTIF

SEQ ID NO: 658100 - protein, 14 aa, Homo sapiens
  CDR3 for beta chain variable domain of TCR clone 329050 (TRBV19, TRBJ2-5)
CASSMTGQQETQYF

SEQ ID NO: 658101 - protein, 14 aa, Homo sapiens
  CDR3 for alpha chain variable domain of TCR clone 329051 (TRAV12-2, TRAJ49)
CAVNPRTLVTSSIL

SEQ ID NO: 658102 - protein, 19 aa, Homo sapiens
  CDR3 for beta chain variable domain of TCR clone 329051 (TRBV12-5, TRBJ2-2)
CASGLGQGTMFADTGELFF

SEQ ID NO: 658103 - protein, 18 aa, Homo sapiens
  CDR3 for alpha chain variable domain of TCR clone 329052 (TRAV21, TRAJ52)
CAVRPSPAGGTSYGKLTF

SEQ ID NO: 658104 - protein, 13 aa, Homo sapiens
  CDR3 for beta chain variable domain of TCR clone 329052 (TRBV7-3, TRBJ1-1)
CASTQDWGAEAFF

SEQ ID NO: 658105 - protein, 17 aa, Homo sapiens
  CDR3 for alpha chain variable domain of TCR clone 329053 (TRAV3, TRAJ6)
CAVRDGPRAGGSYIPTF

SEQ ID NO: 658106 - protein, 12 aa, Homo sapiens
  CDR3 for beta chain variable domain of TCR clone 329053 (TRBV5-7, TRBJ1-2)
CASSLVQNGYTF

SEQ ID NO: 658107 - protein, 14 aa, Homo sapiens
  CDR3 for alpha chain variable domain of TCR clone 329054 (TRAV26-1, TRAJ38)
CIADNAGNNRKLVL

SEQ ID NO: 658108 - protein, 13 aa, Homo sapiens
  CDR3 for beta chain variable domain of TCR clone 329054 (TRBV20-1, TRBJ1-1)
CSARGGGNTEAFF

SEQ ID NO: 658109 - protein, 16 aa, Homo sapiens
  CDR3 for alpha chain variable domain of TCR clone 329055 (TRAV30, TRAJ24)
CGTEIVDADSWGKFQF

SEQ ID NO: 658110 - protein, 14 aa, Homo sapiens
  CDR3 for beta chain variable domain of TCR clone 329055 (TRBV12-5, TRBJ2-5)
CSSGSRTHEEAQYF

SEQ ID NO: 658111 - protein, 11 aa, Homo sapiens
  CDR3 for alpha chain variable domain of TCR clone 329056 (TRAV2, TRAJ13)
CASGGYQKVTF

SEQ ID NO: 658112 - protein, 15 aa, Homo sapiens
  CDR3 for beta chain variable domain of TCR clone 329056 (TRBV3-1, TRBJ2-7)
CASSQIRQGAYEQYF

SEQ ID NO: 658113 - protein, 13 aa, Homo sapiens
  CDR3 for alpha chain variable domain of TCR clone 329057 (TRAV21, TRAJ27)
CAARPGNARKSTF

SEQ ID NO: 658114 - protein, 13 aa, Homo sapiens
  CDR3 for beta chain variable domain of TCR clone 329057 (TRBV13, TRBJ2-1)
CASILGGRGEQFF

SEQ ID NO: 658115 - protein, 15 aa, Homo sapiens
  CDR3 for alpha chain variable domain of TCR clone 329058 (TRAV12-1, TRAJ44)
CVADLPTGTASELTF

SEQ ID NO: 658116 - protein, 13 aa, Homo sapiens
  CDR3 for beta chain variable domain of TCR clone 329058 (TRBV6-5, TRBJ2-5)
CASSPQGGETQCF

SEQ ID NO: 658117 - protein, 14 aa, Homo sapiens
  CDR3 for alpha chain variable domain of TCR clone 329059 (TRAV17, TRAJ6)
CATDASGGSYIPTF

SEQ ID NO: 658118 - protein, 12 aa, Homo sapiens
  CDR3 for beta chain variable domain of TCR clone 329059 (TRBV11-2, TRBJ2-2)
CASSLPTGELFF

SEQ ID NO: 658119 - protein, 13 aa, Homo sapiens
  CDR3 for alpha chain variable domain of TCR clone 329060 (TRAV12-2, TRAJ39)
CAVNNNAGNMLTF

SEQ ID NO: 658120 - protein, 11 aa, Homo sapiens
  CDR3 for beta chain variable domain of TCR clone 329060 (TRBV24-1, TRBJ2-3)
CATASTDTQYF

SEQ ID NO: 658121 - protein, 16 aa, Homo sapiens
  CDR3 for alpha chain variable domain of TCR clone 329061 (TRAV8-4, TRAJ3)
CAVSDPGYSSASKIIF

SEQ ID NO: 658122 - protein, 12 aa, Homo sapiens
  CDR3 for beta chain variable domain of TCR clone 329061 (TRBV29-1, TRBJ2-3)
CSVAGGADTQYF

SEQ ID NO: 658123 - protein, 18 aa, Homo sapiens
  CDR3 for alpha chain variable domain of TCR clone 329062 (TRAV13-1, TRAJ52)
CAAKNPNAGGTSYGNLTF

SEQ ID NO: 658124 - protein, 15 aa, Homo sapiens
  CDR3 for beta chain variable domain of TCR clone 329062 (TRBV28, TRBJ2-1)
CASSIIAGGRSEQFF

SEQ ID NO: 658125 - protein, 11 aa, Homo sapiens
  CDR3 for alpha chain variable domain of TCR clone 329063 (TRAV8-3, TRAJ4)
CAVGARADFKR

SEQ ID NO: 658126 - protein, 13 aa, Homo sapiens
  CDR3 for beta chain variable domain of TCR clone 329063 (TRBV20-1, TRBJ1-2)
CSATGIQGSGYTF

SEQ ID NO: 658127 - protein, 14 aa, Homo sapiens
  CDR3 for alpha chain variable domain of TCR clone 329064 (TRAV8-4, TRAJ16)
CAVSPVGRWPEAAL

SEQ ID NO: 658128 - protein, 15 aa, Homo sapiens
  CDR3 for beta chain variable domain of TCR clone 329064 (TRBV11-3, TRBJ2-7)
CASSPGPESSYEQYF

SEQ ID NO: 658129 - protein, 12 aa, Homo sapiens
  CDR3 for alpha chain variable domain of TCR clone 329065 (TRAV9-2, TRAJ36)
CALKKGAHNLFF

SEQ ID NO: 658130 - protein, 13 aa, Homo sapiens
  CDR3 for beta chain variable domain of TCR clone 329065 (TRBV27, TRBJ1-1)
CASSLAIGAEAFF

SEQ ID NO: 658131 - protein, 13 aa, Homo sapiens
  CDR3 for alpha chain variable domain of TCR clone 329066 (TRAV39, TRAJ49)
CAVDRNTGNQFFF

SEQ ID NO: 658132 - protein, 12 aa, Homo sapiens
  CDR3 for beta chain variable domain of TCR clone 329066 (TRBV24-1, TRBJ1-1)
CATLYPDTEAFF

SEQ ID NO: 658133 - protein, 12 aa, Homo sapiens
  CDR3 for alpha chain variable domain of TCR clone 329067 (TRAV12-3, TRAJ42)
CAPGGSQGNLIF

SEQ ID NO: 658134 - protein, 13 aa, Homo sapiens
  CDR3 for beta chain variable domain of TCR clone 329067 (TRBV5-7, TRBJ2-6)
CASTSSGANVLPF

SEQ ID NO: 658135 - protein, 14 aa, Homo sapiens
  CDR3 for alpha chain variable domain of TCR clone 329068 (TRAV13-1, TRAJ44)
CAAKATGTASKLPF

SEQ ID NO: 658136 - protein, 12 aa, Homo sapiens
  CDR3 for beta chain variable domain of TCR clone 329068 (TRBV7-8, TRBJ2-7)
CASSLGDREQYF

SEQ ID NO: 658137 - protein, 14 aa, Homo sapiens
  CDR3 for alpha chain variable domain of TCR clone 329069 (TRAV12-2, TRAJ17)
CAVLFKAAGNKLTF

SEQ ID NO: 658138 - protein, 13 aa, Homo sapiens
  CDR3 for beta chain variable domain of TCR clone 329069 (TRBV10-2, TRBJ2-7)
CASSEGQYYEQYF

SEQ ID NO: 658139 - protein, 14 aa, Homo sapiens
  CDR3 for alpha chain variable domain of TCR clone 329070 (TRAV2, TRAJ9)
CAVEDRSGGFKTIF

SEQ ID NO: 658140 - protein, 13 aa, Homo sapiens
  CDR3 for beta chain variable domain of TCR clone 329070 (TRBV7-9, TRBJ1-2)
CASSLKQNYGYTC

SEQ ID NO: 658141 - protein, 18 aa, Homo sapiens
  CDR3 for alpha chain variable domain of TCR clone 329071 (TRAV13-1, TRAJ52)
CAASKRSACGTSYGKLTF

SEQ ID NO: 658142 - protein, 12 aa, Homo sapiens
  CDR3 for beta chain variable domain of TCR clone 329071 (TRBV12-4, TRBJ2-7)
CASSLGGYEQYF

SEQ ID NO: 658143 - protein, 18 aa, Homo sapiens
  CDR3 for alpha chain variable domain of TCR clone 329072 (TRAV12-3, TRAJ52)
CAMSVGGAGGTSYGKLTF

SEQ ID NO: 658144 - protein, 13 aa, Homo sapiens
  CDR3 for beta chain variable domain of TCR clone 329072 (TRBV7-7, TRBJ2-3)
CASSLSRADTQYF

SEQ ID NO: 658145 - protein, 13 aa, Homo sapiens
  CDR3 for alpha chain variable domain of TCR clone 329073 (TRAV2, TRAJ40)
WSVVTSGTYKYIF

SEQ ID NO: 658146 - protein, 14 aa, Homo sapiens
  CDR3 for beta chain variable domain of TCR clone 329073 (TRBV19, TRBJ2-1)
CASPTFVLSGEQFF

SEQ ID NO: 658147 - protein, 13 aa, Homo sapiens
  CDR3 for alpha chain variable domain of TCR clone 329074 (TRAV1-2, TRAJ33)
CAVTMDSNYQLIW

SEQ ID NO: 658148 - protein, 17 aa, Homo sapiens
  CDR3 for beta chain variable domain of TCR clone 329074 (TRBV11-2, TRBJ2-1)
CASSLYPPGVEYNEQFF

SEQ ID NO: 658149 - protein, 11 aa, Homo sapiens
  CDR3 for alpha chain variable domain of TCR clone 329075 (TRAV21, TRAJ31)
CAVRNNARLMF

SEQ ID NO: 658150 - protein, 12 aa, Homo sapiens
  CDR3 for beta chain variable domain of TCR clone 329075 (TRBV6-3, TRBJ2-7)
CASSLTPYEQYF

SEQ ID NO: 658151 - protein, 10 aa, Homo sapiens
  CDR3 for alpha chain variable domain of TCR clone 329076 (TRAV23/DV6, TRAJ57)
CAASSTLSQG

SEQ ID NO: 658152 - protein, 15 aa, Homo sapiens
  CDR3 for beta chain variable domain of TCR clone 329076 (TRBV19, TRBJ1-2)
CASSVGQVLNYGYTF

SEQ ID NO: 658153 - protein, 14 aa, Homo sapiens
  CDR3 for alpha chain variable domain of TCR clone 329077 (TRAV17, TRAJ57)
CATDPQGGSEKPVF

SEQ ID NO: 658154 - protein, 15 aa, Homo sapiens
  CDR3 for beta chain variable domain of TCR clone 329077 (TRBV7-2, TRBJ2-5)
CASSPLGLDKETQYF

SEQ ID NO: 658155 - protein, 18 aa, Homo sapiens
  CDR3 for alpha chain variable domain of TCR clone 329078 (TRAV26-1, TRAJ52)
CVVRVEGAGGTSYGKLTF

SEQ ID NO: 658156 - protein, 13 aa, Homo sapiens
  CDR3 for beta chain variable domain of TCR clone 329078 (TRBV7-3, TRBJ1-2)
CASSLKRGYGYTF

SEQ ID NO: 658157 - protein, 14 aa, Homo sapiens
  CDR3 for alpha chain variable domain of TCR clone 329079 (TRAV1-2, TRAJ8)
CAVREDTGFHKLVF

SEQ ID NO: 658158 - protein, 20 aa, Homo sapiens
  CDR3 for beta chain variable domain of TCR clone 329079 (TRBV7-8, TRBJ2-2)
CASSHLFPGPTIHITGELFF

SEQ ID NO: 658159 - protein, 12 aa, Homo sapiens
  CDR3 for alpha chain variable domain of TCR clone 329080 (TRAV26-2, TRAJ21)
CILKGNFNKFYF

SEQ ID NO: 658160 - protein, 14 aa, Homo sapiens
  CDR3 for beta chain variable domain of TCR clone 329080 (TRBV7-9, TRBJ1-1)
CASTPVQSYTEAFF

SEQ ID NO: 658161 - protein, 14 aa, Homo sapiens
  CDR3 for alpha chain variable domain of TCR clone 329081 (TRAV38-1, TRAJ40)
CALRPTSGTYKYIF

SEQ ID NO: 658162 - protein, 13 aa, Homo sapiens
  CDR3 for beta chain variable domain of TCR clone 329081 (TRBV4-1, TRBJ1-1)
CASSRKMNTEAFF

SEQ ID NO: 658163 - protein, 14 aa, Homo sapiens
  CDR3 for alpha chain variable domain of TCR clone 329082 (TRAV27, TRAJ44)
CAASFTGTAGKLTF

SEQ ID NO: 658164 - protein, 13 aa, Homo sapiens
  CDR3 for beta chain variable domain of TCR clone 329082 (TRBV27, TRBJ2-3)
CATSRGGLYTQYF

SEQ ID NO: 658165 - protein, 14 aa, Homo sapiens
  CDR3 for alpha chain variable domain of TCR clone 329083 (TRAV25, TRAJ6)
CAGRESGGSYIPTF

SEQ ID NO: 658166 - protein, 13 aa, Homo sapiens
  CDR3 for beta chain variable domain of TCR clone 329083 (TRBV12-4, TRBJ2-7)
CASSLSGVYEQFF

SEQ ID NO: 658167 - protein, 12 aa, Homo sapiens
  CDR3 for alpha chain variable domain of TCR clone 329084 (TRAV12-1, )
CVVNSWISRTLT

SEQ ID NO: 658168 - protein, 14 aa, Homo sapiens
  CDR3 for beta chain variable domain of TCR clone 329084 (TRBV7-3, TRBJ1-1)
CASSLKGGNTEAFF

SEQ ID NO: 658169 - protein, 11 aa, Homo sapiens
  CDR3 for alpha chain variable domain of TCR clone 329085 (TRAV2, TRAJ21)
CAVFNFNKFYF

SEQ ID NO: 658170 - protein, 14 aa, Homo sapiens
  CDR3 for beta chain variable domain of TCR clone 329085 (TRBV5-4, TRBJ1-1)
CASSLDSRRDEAFF

SEQ ID NO: 658171 - protein, 12 aa, Homo sapiens
  CDR3 for alpha chain variable domain of TCR clone 329086 (TRAV27, TRAJ34)
CAGAKNNDKLIF

SEQ ID NO: 658172 - protein, 13 aa, Homo sapiens
  CDR3 for beta chain variable domain of TCR clone 329086 (TRBV4-1, TRBJ2-1)
CASSQEVQYEQFF

SEQ ID NO: 658173 - protein, 12 aa, Homo sapiens
  CDR3 for alpha chain variable domain of TCR clone 329087 (TRAV12-3, TRAJ17)
CAMTLTGNKLTF

SEQ ID NO: 658174 - protein, 18 aa, Homo sapiens
  CDR3 for beta chain variable domain of TCR clone 329087 (TRBV7-6, TRBJ2-1)
WASSPRTSGMSSYNEQFF

SEQ ID NO: 658175 - protein, 12 aa, Homo sapiens
  CDR3 for alpha chain variable domain of TCR clone 329088 (TRAV26-1, TRAJ17)
CISQSCGQQANF

SEQ ID NO: 658176 - protein, 16 aa, Homo sapiens
  CDR3 for beta chain variable domain of TCR clone 329088 (TRBV28, TRBJ1-4)
CASSSRTGAANEKLFF

SEQ ID NO: 658177 - protein, 12 aa, Homo sapiens
  CDR3 for alpha chain variable domain of TCR clone 329089 (TRAV16, TRAJ56)
CAPTGANSTLTF

SEQ ID NO: 658178 - protein, 17 aa, Homo sapiens
  CDR3 for beta chain variable domain of TCR clone 329089 (TRBV27, TRBJ2-6)
CASSLTGFASGANVLTF

SEQ ID NO: 658179 - protein, 15 aa, Homo sapiens
  CDR3 for alpha chain variable domain of TCR clone 329090 (TRAV8-3, TRAJ45)
CASSYSGGGADGLTF

SEQ ID NO: 658180 - protein, 16 aa, Homo sapiens
  CDR3 for beta chain variable domain of TCR clone 329090 (TRBV20-1, TRBJ2-2)
WSASASGIPGAGELFF

SEQ ID NO: 658181 - protein, 15 aa, Homo sapiens
  CDR3 for alpha chain variable domain of TCR clone 329091 (TRAV12-2, TRAJ57)
CAVSRGQGGSEKLVF

SEQ ID NO: 658182 - protein, 14 aa, Homo sapiens
  CDR3 for beta chain variable domain of TCR clone 329091 (TRBV20-1, TRBJ2-1)
CSAHPGLPYNQQFF

SEQ ID NO: 658183 - protein, 14 aa, Homo sapiens
  CDR3 for alpha chain variable domain of TCR clone 329092 (TRAV17, TRAJ57)
CATDPQGGSEKLAF

SEQ ID NO: 658184 - protein, 15 aa, Homo sapiens
  CDR3 for beta chain variable domain of TCR clone 329092 (TRBV11-3, TRBJ2-3)
CASLKDGREGDTQYF

SEQ ID NO: 658185 - protein, 14 aa, Homo sapiens
  CDR3 for alpha chain variable domain of TCR clone 329093 (TRAV1-2, TRAJ8)
CAVREDTGFQKLVF

SEQ ID NO: 658186 - protein, 15 aa, Homo sapiens
  CDR3 for beta chain variable domain of TCR clone 329093 (TRBV7-9, TRBJ1-4)
CASSARTGDNEKLFF

SEQ ID NO: 658187 - protein, 15 aa, Homo sapiens
  CDR3 for alpha chain variable domain of TCR clone 329094 (TRAV14/DV4, TRAJ46)
SAMREKKSSGDKLTF

SEQ ID NO: 658188 - protein, 13 aa, Homo sapiens
  CDR3 for beta chain variable domain of TCR clone 329094 (TRBV20-1, TRBJ2-5)
CSAREAFQETQYF

SEQ ID NO: 658189 - protein, 13 aa, Homo sapiens
  CDR3 for alpha chain variable domain of TCR clone 329095 (TRAV2, TRAJ40)
CAVVTSGTYKYIF

SEQ ID NO: 658190 - protein, 12 aa, Homo sapiens
  CDR3 for beta chain variable domain of TCR clone 329095 (TRBV27, TRBJ2-2)
CASKLFTGELFF

SEQ ID NO: 658191 - protein, 13 aa, Homo sapiens
  CDR3 for alpha chain variable domain of TCR clone 329096 (TRAV8-3, TRAJ28)
CAVGADGSYQLTF

SEQ ID NO: 658192 - protein, 17 aa, Homo sapiens
  CDR3 for beta chain variable domain of TCR clone 329096 (TRBV11-2, TRBJ2-1)
CASSLYPPGVEYNEQFF

SEQ ID NO: 658193 - protein, 17 aa, Homo sapiens
  CDR3 for alpha chain variable domain of TCR clone 329097 (TRAV3, TRAJ42)
CAVRDRDYGGSQGNPIF

SEQ ID NO: 658194 - protein, 13 aa, Homo sapiens
  CDR3 for beta chain variable domain of TCR clone 329097 (TRBV20-1, TRBJ2-5)
CSARRGTGATQYF

SEQ ID NO: 658195 - protein, 15 aa, Homo sapiens
  CDR3 for alpha chain variable domain of TCR clone 329098 (TRAV26-1, TRAJ30)
IASSGRFNRDDKIIF

SEQ ID NO: 658196 - protein, 12 aa, Homo sapiens
  CDR3 for beta chain variable domain of TCR clone 329098 (TRBV19, TRBJ2-1)
CASSMQDTEQFF

SEQ ID NO: 658197 - protein, 14 aa, Homo sapiens
  CDR3 for alpha chain variable domain of TCR clone 329099 (TRAV17, TRAJ57)
CATDPQGGSEKLVF

SEQ ID NO: 658198 - protein, 15 aa, Homo sapiens
  CDR3 for beta chain variable domain of TCR clone 329099 (TRBV3-1, TRBJ2-5)
CASSANLGGPETQYF

SEQ ID NO: 658199 - protein, 14 aa, Homo sapiens
  CDR3 for alpha chain variable domain of TCR clone 329100 (TRAV13-1, TRAJ44)
CAAKATGTASKLTF

SEQ ID NO: 658200 - protein, 12 aa, Homo sapiens
  CDR3 for beta chain variable domain of TCR clone 329100 (TRBV5-5, TRBJ1-2)
CQQLLRGEDYTF

SEQ ID NO: 658201 - protein, 15 aa, Homo sapiens
  CDR3 for alpha chain variable domain of TCR clone 329101 (TRAV4, TRAJ10)
CLVVGEGGGGNKLTF

SEQ ID NO: 658202 - protein, 11 aa, Homo sapiens
  CDR3 for beta chain variable domain of TCR clone 329101 (TRBV12-4, TRBJ2-3)
CASTATDTQYF

SEQ ID NO: 658203 - protein, 14 aa, Homo sapiens
  CDR3 for alpha chain variable domain of TCR clone 329102 (TRAV12-3, TRAJ10)
SHLPLTGGGNKLTF

SEQ ID NO: 658204 - protein, 15 aa, Homo sapiens
  CDR3 for beta chain variable domain of TCR clone 329102 (TRBV7-9, TRBJ1-4)
CASSRTGGCNEKLFF

SEQ ID NO: 658205 - protein, 11 aa, Homo sapiens
  CDR3 for alpha chain variable domain of TCR clone 329103 (TRAV1-2, TRAJ31)
CAVKNNARLMF

SEQ ID NO: 658206 - protein, 17 aa, Homo sapiens
  CDR3 for beta chain variable domain of TCR clone 329103 (TRBV7-2, TRBJ1-2)
CASSSRAGRGIVYGYTF

SEQ ID NO: 658207 - protein, 14 aa, Homo sapiens
  CDR3 for alpha chain variable domain of TCR clone 329104 (TRAV30, TRAJ26)
CGTEIVSYGQNFVF

SEQ ID NO: 658208 - protein, 20 aa, Homo sapiens
  CDR3 for beta chain variable domain of TCR clone 329104 (TRBV19, TRBJ1-3)
CAKIIPRKHHIFWRGKLAHC

SEQ ID NO: 658209 - protein, 14 aa, Homo sapiens
  CDR3 for alpha chain variable domain of TCR clone 329105 (TRAV13-2, TRAJ17)
CAETSKAAGNKLTF

SEQ ID NO: 658210 - protein, 15 aa, Homo sapiens
  CDR3 for beta chain variable domain of TCR clone 329105 (TRBV27, TRBJ2-1)
CASSNGGGSSNEQFF

SEQ ID NO: 658211 - protein, 12 aa, Homo sapiens
  CDR3 for alpha chain variable domain of TCR clone 329106 (TRAV23/DV6, TRAJ30)
CAASKGDEKNIL

SEQ ID NO: 658212 - protein, 13 aa, Homo sapiens
  CDR3 for beta chain variable domain of TCR clone 329106 (TRBV19, TRBJ1-2)
CASSVPGQDGYTF

SEQ ID NO: 658213 - protein, 14 aa, Homo sapiens
  CDR3 for alpha chain variable domain of TCR clone 329107 (TRAV21, TRAJ58)
CAVRRGRSGSRLTF

SEQ ID NO: 658214 - protein, 14 aa, Homo sapiens
  CDR3 for beta chain variable domain of TCR clone 329107 (TRBV6-3, TRBJ2-2)
CASTYTPDTGELFF

SEQ ID NO: 658215 - protein, 18 aa, Homo sapiens
  CDR3 for alpha chain variable domain of TCR clone 329108 (TRAV13-1, TRAJ52)
CAAKNPNAGGTSYGKLTF

SEQ ID NO: 658216 - protein, 18 aa, Homo sapiens
  CDR3 for beta chain variable domain of TCR clone 329108 (TRBV4-1, TRBJ1-2)
CASSQPRRGGSTNYGYTF

SEQ ID NO: 658217 - protein, 11 aa, Homo sapiens
  CDR3 for alpha chain variable domain of TCR clone 329109 (TRAV3, TRAJ32)
CAVREGIMVVL

SEQ ID NO: 658218 - protein, 13 aa, Homo sapiens
  CDR3 for beta chain variable domain of TCR clone 329109 (TRBV2, TRBJ1-1)
CASSEGGNTDAFF

SEQ ID NO: 658219 - protein, 15 aa, Homo sapiens
  CDR3 for alpha chain variable domain of TCR clone 329110 (TRAV4, TRAJ39)
CLVGPNNNAGNLLTF

SEQ ID NO: 658220 - protein, 15 aa, Homo sapiens
  CDR3 for beta chain variable domain of TCR clone 329110 (TRBV7-9, TRBJ1-6)
CASSSPGRGNSPLHF

SEQ ID NO: 658221 - protein, 14 aa, Homo sapiens
  CDR3 for alpha chain variable domain of TCR clone 329111 (TRAV1-2, TRAJ16)
CAVNRFSDGQKRLF

SEQ ID NO: 658222 - protein, 14 aa, Homo sapiens
  CDR3 for beta chain variable domain of TCR clone 329111 (TRBV6-6, TRBJ1-5)
CASSYGPANQPQHF

SEQ ID NO: 658223 - protein, 13 aa, Homo sapiens
  CDR3 for alpha chain variable domain of TCR clone 329112 (TRAV1-2, TRAJ9)
CAALNTGGFKTIF

SEQ ID NO: 658224 - protein, 14 aa, Homo sapiens
  CDR3 for beta chain variable domain of TCR clone 329112 (TRBV13, TRBJ2-3)
CASSSGSPTDTKYF

SEQ ID NO: 658225 - protein, 17 aa, Homo sapiens
  CDR3 for alpha chain variable domain of TCR clone 329113 (TRAV23/DV6, )
CAADIQNPDPAVYQLSY

SEQ ID NO: 658226 - protein, 14 aa, Homo sapiens
  CDR3 for beta chain variable domain of TCR clone 329113 (TRBV5-7, TRBJ1-6)
CASSFAGHNSPLHF

SEQ ID NO: 658227 - protein, 16 aa, Homo sapiens
  CDR3 for alpha chain variable domain of TCR clone 329114 (TRAV8-4, TRAJ9)
CAVTFNTGGFKNYLWS

SEQ ID NO: 658228 - protein, 15 aa, Homo sapiens
  CDR3 for beta chain variable domain of TCR clone 329114 (TRBV7-9, TRBJ2-2)
RASSPETGAGGELFF

SEQ ID NO: 658229 - protein, 13 aa, Homo sapiens
  CDR3 for alpha chain variable domain of TCR clone 329115 (TRAV21, TRAJ36)
CAVIKTGANNLFF

SEQ ID NO: 658230 - protein, 17 aa, Homo sapiens
  CDR3 for beta chain variable domain of TCR clone 329115 (TRBV11-2, TRBJ2-1)
CASSLYPPGVEYNEQFF

SEQ ID NO: 658231 - protein, 14 aa, Homo sapiens
  CDR3 for alpha chain variable domain of TCR clone 329116 (TRAV1-2, TRAJ8)
CAVREDTGFQQLVF

SEQ ID NO: 658232 - protein, 15 aa, Homo sapiens
  CDR3 for beta chain variable domain of TCR clone 329116 (TRBV5-1, TRBJ2-2)
CASSSQGGNTGELFF

SEQ ID NO: 658233 - protein, 14 aa, Homo sapiens
  CDR3 for alpha chain variable domain of TCR clone 329117 (TRAV2, TRAJ37)
CAVDFTSNTGKLIF

SEQ ID NO: 658234 - protein, 15 aa, Homo sapiens
  CDR3 for beta chain variable domain of TCR clone 329117 (TRBV7-2, TRBJ2-1)
CASSLVAGRYNEQFF

SEQ ID NO: 658235 - protein, 18 aa, Homo sapiens
  CDR3 for alpha chain variable domain of TCR clone 329118 (TRAV3, TRAJ17)
CAVRARRGGRSCRQQANF

SEQ ID NO: 658236 - protein, 14 aa, Homo sapiens
  CDR3 for beta chain variable domain of TCR clone 329118 (TRBV7-2, TRBJ1-5)
CASSTQGAGQPQHF

SEQ ID NO: 658237 - protein, 16 aa, Homo sapiens
  CDR3 for alpha chain variable domain of TCR clone 329119 (TRAV30, TRAJ24)
CGTEIVDADSWGKFQV

SEQ ID NO: 658238 - protein, 15 aa, Homo sapiens
  CDR3 for beta chain variable domain of TCR clone 329119 (TRBV7-9, TRBJ1-4)
CASSRTGGFNEKLFF

SEQ ID NO: 658239 - protein, 15 aa, Homo sapiens
  CDR3 for alpha chain variable domain of TCR clone 329120 (TRAV8-1, TRAJ23)
CAVNSHYNQGGKLIF

SEQ ID NO: 658240 - protein, 15 aa, Homo sapiens
  CDR3 for beta chain variable domain of TCR clone 329120 (TRBV2, TRBJ2-3)
CASSDFEKATDTQYF

SEQ ID NO: 658241 - protein, 18 aa, Homo sapiens
  CDR3 for alpha chain variable domain of TCR clone 329121 (TRAV13-1, TRAJ52)
CAAKSPNAGGTSYRKLTF

SEQ ID NO: 658242 - protein, 16 aa, Homo sapiens
  CDR3 for beta chain variable domain of TCR clone 329121 (TRBV27, TRBJ2-2)
CASSFRGLVRTGELVF

SEQ ID NO: 658243 - protein, 12 aa, Homo sapiens
  CDR3 for alpha chain variable domain of TCR clone 329122 (TRAV1-2, TRAJ29)
CAVPSGNTPLVF

SEQ ID NO: 658244 - protein, 18 aa, Homo sapiens
  CDR3 for beta chain variable domain of TCR clone 329122 (TRBV15, TRBJ2-3)
CATSRDGARSWDTDTQYF

SEQ ID NO: 658245 - protein, 10 aa, Homo sapiens
  CDR3 for alpha chain variable domain of TCR clone 329123 (TRAV21, TRAJ43)
CAVRIGTCAL

SEQ ID NO: 658246 - protein, 13 aa, Homo sapiens
  CDR3 for beta chain variable domain of TCR clone 329123 (TRBV20-1, TRBJ2-7)
CSAPGLADYEQYF

SEQ ID NO: 658247 - protein, 14 aa, Homo sapiens
  CDR3 for alpha chain variable domain of TCR clone 329124 (TRAV16, TRAJ33)
CALSAMDSNFQLIW

SEQ ID NO: 658248 - protein, 12 aa, Homo sapiens
  CDR3 for beta chain variable domain of TCR clone 329124 (TRBV5-1, TRBJ1-2)
CASSQDTYGYTF

SEQ ID NO: 658249 - protein, 14 aa, Homo sapiens
  CDR3 for alpha chain variable domain of TCR clone 329125 (TRAV17, TRAJ5)
CATVALTGRRALTF

SEQ ID NO: 658250 - protein, 14 aa, Homo sapiens
  CDR3 for beta chain variable domain of TCR clone 329125 (TRBV28, TRBJ2-7)
CASSPYVMAYEQYF

SEQ ID NO: 658251 - protein, 13 aa, Homo sapiens
  CDR3 for alpha chain variable domain of TCR clone 329126 (TRAV12-2, TRAJ20)
CRDEQGNDYKLSF

SEQ ID NO: 658252 - protein, 14 aa, Homo sapiens
  CDR3 for beta chain variable domain of TCR clone 329126 (TRBV7-2, TRBJ2-5)
CASSFGGAQETQYF

SEQ ID NO: 658253 - protein, 14 aa, Homo sapiens
  CDR3 for alpha chain variable domain of TCR clone 329127 (TRAV17, TRAJ42)
CATDAPGSQGNLIF

SEQ ID NO: 658254 - protein, 15 aa, Homo sapiens
  CDR3 for beta chain variable domain of TCR clone 329127 (TRBV7-9, TRBJ1-6)
CASSSPGRGNSPLHF

SEQ ID NO: 658255 - protein, 14 aa, Homo sapiens
  CDR3 for alpha chain variable domain of TCR clone 329128 (TRAV8-2, TRAJ4)
CVVSPSGGYNKLIF

SEQ ID NO: 658256 - protein, 13 aa, Homo sapiens
  CDR3 for beta chain variable domain of TCR clone 329128 (TRBV9, TRBJ2-1)
CASSPSGGNEQFF

SEQ ID NO: 658257 - protein, 15 aa, Homo sapiens
  CDR3 for alpha chain variable domain of TCR clone 329129 (TRAV4, TRAJ39)
CLVGPNNNAGNMPNF

SEQ ID NO: 658258 - protein, 16 aa, Homo sapiens
  CDR3 for beta chain variable domain of TCR clone 329129 (TRBV13, TRBJ2-2)
CASSPRTGEHTGELFF

SEQ ID NO: 658259 - protein, 13 aa, Homo sapiens
  CDR3 for alpha chain variable domain of TCR clone 329130 (TRAV29/DV5, TRAJ31)
CAASRNNNARLMF

SEQ ID NO: 658260 - protein, 11 aa, Homo sapiens
  CDR3 for beta chain variable domain of TCR clone 329130 (TRBV20-1, TRBJ2-7)
CSGRQGHEQYF

SEQ ID NO: 658261 - protein, 17 aa, Homo sapiens
  CDR3 for alpha chain variable domain of TCR clone 329131 (TRAV23/DV6, TRAJ57)
CAASSTLSQGGSEKLVF

SEQ ID NO: 658262 - protein, 15 aa, Homo sapiens
  CDR3 for beta chain variable domain of TCR clone 329131 (TRBV20-1, TRBJ2-1)
CSARGIGGTYNEQFF

SEQ ID NO: 658263 - protein, 15 aa, Homo sapiens
  CDR3 for alpha chain variable domain of TCR clone 329132 (TRAV16, TRAJ16)
CALQEGGSDGQKLLF

SEQ ID NO: 658264 - protein, 14 aa, Homo sapiens
  CDR3 for beta chain variable domain of TCR clone 329132 (TRBV6-1, TRBJ2-7)
CASSEGVNPYEQYF

SEQ ID NO: 658265 - protein, 15 aa, Homo sapiens
  CDR3 for alpha chain variable domain of TCR clone 329133 (TRAV20, TRAJ23)
CAVQAVRNQGGKLNF

SEQ ID NO: 658266 - protein, 18 aa, Homo sapiens
  CDR3 for beta chain variable domain of TCR clone 329133 (TRBV4-1, TRBJ1-6)
CASSQWDKKIIHPSTLRT

SEQ ID NO: 658267 - protein, 13 aa, Homo sapiens
  CDR3 for alpha chain variable domain of TCR clone 329134 (TRAV8-3, TRAJ43)
CAVVPYNNNDMRF

SEQ ID NO: 658268 - protein, 17 aa, Homo sapiens
  CDR3 for beta chain variable domain of TCR clone 329134 (TRBV7-7, TRBJ1-1)
CASIGDRPNLGVTEAFY

SEQ ID NO: 658269 - protein, 14 aa, Homo sapiens
  CDR3 for alpha chain variable domain of TCR clone 329135 (TRAV26-1, TRAJ44)
CIVRPTGTASKPTF

SEQ ID NO: 658270 - protein, 12 aa, Homo sapiens
  CDR3 for beta chain variable domain of TCR clone 329135 (TRBV11-3, TRBJ1-1)
CASSLRDSEAFF

SEQ ID NO: 658271 - protein, 13 aa, Homo sapiens
  CDR3 for alpha chain variable domain of TCR clone 329136 (TRAV2, TRAJ20)
CAVEGSSEDKLSF

SEQ ID NO: 658272 - protein, 16 aa, Homo sapiens
  CDR3 for beta chain variable domain of TCR clone 329136 (TRBV25-1, TRBJ2-7)
CASSELTGGGIYEQYF

SEQ ID NO: 658273 - protein, 14 aa, Homo sapiens
  CDR3 for alpha chain variable domain of TCR clone 329137 (TRAV12-2, TRAJ3)
CAVSLYSSASKIIF

SEQ ID NO: 658274 - protein, 14 aa, Homo sapiens
  CDR3 for beta chain variable domain of TCR clone 329137 (TRBV6-1, TRBJ1-3)
CASVQGGGENTIYF

SEQ ID NO: 658275 - protein, 15 aa, Homo sapiens
  CDR3 for alpha chain variable domain of TCR clone 329138 (TRAV26-2, TRAJ50)
CILRDEETSYDKVIF

SEQ ID NO: 658276 - protein, 13 aa, Homo sapiens
  CDR3 for beta chain variable domain of TCR clone 329138 (TRBV7-9, TRBJ1-2)
CASSLKQNYGYTF

SEQ ID NO: 658277 - protein, 15 aa, Homo sapiens
  CDR3 for alpha chain variable domain of TCR clone 329139 (TRAV21, TRAJ18)
CAVRDRGSTLGRLYF

SEQ ID NO: 658278 - protein, 13 aa, Homo sapiens
  CDR3 for beta chain variable domain of TCR clone 329139 (TRBV19, TRBJ2-7)
CASRKAGGSEQYF

SEQ ID NO: 658279 - protein, 17 aa, Homo sapiens
  CDR3 for alpha chain variable domain of TCR clone 329140 (TRAV3, TRAJ42)
CAVRDRDHGGSQGNLIF

SEQ ID NO: 658280 - protein, 18 aa, Homo sapiens
  CDR3 for beta chain variable domain of TCR clone 329140 (TRBV20-1, TRBJ2-3)
CSASGLAGGPGTTDRQYF

SEQ ID NO: 658281 - protein, 14 aa, Homo sapiens
  CDR3 for alpha chain variable domain of TCR clone 329141 (TRAV17, TRAJ5)
CATVALTGRRALTF

SEQ ID NO: 658282 - protein, 12 aa, Homo sapiens
  CDR3 for beta chain variable domain of TCR clone 329141 (TRBV11-2, TRBJ2-1)
CASSPGNNEQFF

SEQ ID NO: 658283 - protein, 15 aa, Homo sapiens
  CDR3 for alpha chain variable domain of TCR clone 329142 (TRAV13-1, TRAJ43)
CAATPELGGNNDMRF

SEQ ID NO: 658284 - protein, 16 aa, Homo sapiens
  CDR3 for beta chain variable domain of TCR clone 329142 (TRBV20-1, TRBJ1-1)
CSARALTQGMNTEAFF

SEQ ID NO: 658285 - protein, 17 aa, Homo sapiens
  CDR3 for alpha chain variable domain of TCR clone 329143 (TRAV3, TRAJ42)
CAVRDRDYGGSQGNLIF

SEQ ID NO: 658286 - protein, 13 aa, Homo sapiens
  CDR3 for beta chain variable domain of TCR clone 329143 (TRBV6-6, TRBJ2-7)
CASSLPSRYEQYF

SEQ ID NO: 658287 - protein, 16 aa, Homo sapiens
  CDR3 for alpha chain variable domain of TCR clone 329144 (TRAV38-1, TRAJ22)
CAFMAISSGSARQLTF

SEQ ID NO: 658288 - protein, 15 aa, Homo sapiens
  CDR3 for beta chain variable domain of TCR clone 329144 (TRBV4-1, TRBJ1-4)
CASSDTWGTNEKLFF

SEQ ID NO: 658289 - protein, 17 aa, Homo sapiens
  CDR3 for alpha chain variable domain of TCR clone 329145 (TRAV8-3, TRAJ50)
CAVGAVDTETSYGKVIF

SEQ ID NO: 658290 - protein, 13 aa, Homo sapiens
  CDR3 for beta chain variable domain of TCR clone 329145 (TRBV7-9, TRBJ2-2)
CASSAAGTGELFF

SEQ ID NO: 658291 - protein, 19 aa, Homo sapiens
  CDR3 for alpha chain variable domain of TCR clone 329146 (TRAV26-1, TRAJ50)
CCVLLHRQNPKTSYDKVIF

SEQ ID NO: 658292 - protein, 17 aa, Homo sapiens
  CDR3 for beta chain variable domain of TCR clone 329146 (TRBV4-1, TRBJ1-4)
CASSHEGPRGVEEKLFF

SEQ ID NO: 658293 - protein, 12 aa, Homo sapiens
  CDR3 for alpha chain variable domain of TCR clone 329147 (TRAV8-3, TRAJ34)
WASGYNTDKLIF

SEQ ID NO: 658294 - protein, 17 aa, Homo sapiens
  CDR3 for beta chain variable domain of TCR clone 329147 (TRBV5-7, TRBJ2-7)
CASSKVAGETTSSTSGR

SEQ ID NO: 658295 - protein, 13 aa, Homo sapiens
  CDR3 for alpha chain variable domain of TCR clone 329148 (TRAV12-1, TRAJ26)
CVVRGNYGQNFVF

SEQ ID NO: 658296 - protein, 14 aa, Homo sapiens
  CDR3 for beta chain variable domain of TCR clone 329148 (TRBV6-3, TRBJ1-1)
CASRYTGESTEAFF

SEQ ID NO: 658297 - protein, 14 aa, Homo sapiens
  CDR3 for alpha chain variable domain of TCR clone 329149 (TRAV1-1, TRAJ30)
CAVRSLNRDVKIIF

SEQ ID NO: 658298 - protein, 14 aa, Homo sapiens
  CDR3 for beta chain variable domain of TCR clone 329149 (TRBV7-8, TRBJ2-3)
CASSLEAGTDTQYF

SEQ ID NO: 658299 - protein, 14 aa, Homo sapiens
  CDR3 for alpha chain variable domain of TCR clone 329150 (TRAV1-2, TRAJ16)
CAVNRFSDGQKLLL

SEQ ID NO: 658300 - protein, 14 aa, Homo sapiens
  CDR3 for beta chain variable domain of TCR clone 329150 (TRBV6-1, TRBJ2-3)
CASSELTGKVTQYF

SEQ ID NO: 658301 - protein, 13 aa, Homo sapiens
  CDR3 for alpha chain variable domain of TCR clone 329151 (TRAV1-1, TRAJ9)
CAAKNTGGFKTIF

SEQ ID NO: 658302 - protein, 14 aa, Homo sapiens
  CDR3 for beta chain variable domain of TCR clone 329151 (TRBV4-2, TRBJ2-3)
CASSQERGTDTQYF

SEQ ID NO: 658303 - protein, 15 aa, Homo sapiens
  CDR3 for alpha chain variable domain of TCR clone 329152 (TRAV12-3, TRAJ6)
CAMSATTGGSYEPTF

SEQ ID NO: 658304 - protein, 16 aa, Homo sapiens
  CDR3 for beta chain variable domain of TCR clone 329152 (TRBV20-1, TRBJ1-2)
CSASMGQGVANYGYTF

SEQ ID NO: 658305 - protein, 13 aa, Homo sapiens
  CDR3 for alpha chain variable domain of TCR clone 329153 (TRAV12-2, TRAJ20)
CAVYPSNDYTLSF

SEQ ID NO: 658306 - protein, 14 aa, Homo sapiens
  CDR3 for beta chain variable domain of TCR clone 329153 (TRBV10-2, TRBJ1-5)
CASSSTGRNQPQHF

SEQ ID NO: 658307 - protein, 14 aa, Homo sapiens
  CDR3 for alpha chain variable domain of TCR clone 329154 (TRAV12-2, TRAJ13)
FAVKQTGGYQKVTF

SEQ ID NO: 658308 - protein, 15 aa, Homo sapiens
  CDR3 for beta chain variable domain of TCR clone 329154 (TRBV27, TRBJ2-1)
CASSNGGGSSNEQFF

SEQ ID NO: 658309 - protein, 14 aa, Homo sapiens
  CDR3 for alpha chain variable domain of TCR clone 329155 (TRAV12-2, TRAJ40)
CAVKITSGTYKYIF

SEQ ID NO: 658310 - protein, 13 aa, Homo sapiens
  CDR3 for beta chain variable domain of TCR clone 329155 (TRBV12-4, TRBJ1-1)
CASSPGTGFEAFF

SEQ ID NO: 658311 - protein, 14 aa, Homo sapiens
  CDR3 for alpha chain variable domain of TCR clone 329156 (TRAV1-2, TRAJ16)
CAVNRSSDGQKLLF

SEQ ID NO: 658312 - protein, 15 aa, Homo sapiens
  CDR3 for beta chain variable domain of TCR clone 329156 (TRBV2, TRBJ2-7)
CASSEGLARSYEQYF

SEQ ID NO: 658313 - protein, 15 aa, Homo sapiens
  CDR3 for alpha chain variable domain of TCR clone 329157 (TRAV27, TRAJ53)
CRAINSGGSNYKLTF

SEQ ID NO: 658314 - protein, 14 aa, Homo sapiens
  CDR3 for beta chain variable domain of TCR clone 329157 (TRBV7-3, TRBJ2-1)
CASSLAGGTDEQFF

SEQ ID NO: 658315 - protein, 15 aa, Homo sapiens
  CDR3 for alpha chain variable domain of TCR clone 329158 (TRAV17, TRAJ13)
CATVPNSGGYQKVTF

SEQ ID NO: 658316 - protein, 13 aa, Homo sapiens
  CDR3 for beta chain variable domain of TCR clone 329158 (TRBV3-1, TRBJ1-5)
CASSQAGGQPQHL

SEQ ID NO: 658317 - protein, 13 aa, Homo sapiens
  CDR3 for alpha chain variable domain of TCR clone 329159 (TRAV17, TRAJ21)
CATDGNNFNKFYF

SEQ ID NO: 658318 - protein, 11 aa, Homo sapiens
  CDR3 for beta chain variable domain of TCR clone 329159 (TRBV20-1, TRBJ1-1)
SARGGNTEAFF

SEQ ID NO: 658319 - protein, 16 aa, Homo sapiens
  CDR3 for alpha chain variable domain of TCR clone 329160 (TRAV12-3, TRAJ53)
CAMSVGSGGSNYKLTF

SEQ ID NO: 658320 - protein, 15 aa, Homo sapiens
  CDR3 for beta chain variable domain of TCR clone 329160 (TRBV29-1, TRBJ2-1)
CSGRDRKSSYNEQFF

SEQ ID NO: 658321 - protein, 14 aa, Homo sapiens
  CDR3 for alpha chain variable domain of TCR clone 329161 (TRAV35, TRAJ42)
CCVPYGGSQGNLIF

SEQ ID NO: 658322 - protein, 14 aa, Homo sapiens
  CDR3 for beta chain variable domain of TCR clone 329161 (TRBV2, TRBJ2-7)
CASSVLGAAYEQYF

SEQ ID NO: 658323 - protein, 18 aa, Homo sapiens
  CDR3 for alpha chain variable domain of TCR clone 329162 (TRAV21, TRAJ52)
CAVRPSPAGGTSYGKLTF

SEQ ID NO: 658324 - protein, 13 aa, Homo sapiens
  CDR3 for beta chain variable domain of TCR clone 329162 (TRBV11-2, TRBJ1-4)
CASSPGTLEKLFF

SEQ ID NO: 658325 - protein, 13 aa, Homo sapiens
  CDR3 for alpha chain variable domain of TCR clone 329163 (TRAV2, TRAJ15)
CAVASQAGTALIF

SEQ ID NO: 658326 - protein, 12 aa, Homo sapiens
  CDR3 for beta chain variable domain of TCR clone 329163 (TRBV20-1, TRBJ1-5)
CSARAPDQPQHF

SEQ ID NO: 658327 - protein, 14 aa, Homo sapiens
  CDR3 for alpha chain variable domain of TCR clone 329164 (TRAV38-1, TRAJ45)
FASHSVGGADGLTF

SEQ ID NO: 658328 - protein, 13 aa, Homo sapiens
  CDR3 for beta chain variable domain of TCR clone 329164 (TRBV10-3, TRBJ1-2)
CAISERDSYGYTF

SEQ ID NO: 658329 - protein, 14 aa, Homo sapiens
  CDR3 for alpha chain variable domain of TCR clone 329165 (TRAV17, TRAJ6)
CATVFQGGSYIPTF

SEQ ID NO: 658330 - protein, 17 aa, Homo sapiens
  CDR3 for beta chain variable domain of TCR clone 329165 (TRBV7-8, TRBJ2-6)
CAISAGTGGAGANVLTF

SEQ ID NO: 658331 - protein, 11 aa, Homo sapiens
  CDR3 for alpha chain variable domain of TCR clone 329166 (TRAV12-2, TRAJ43)
CASPIGNDMRF

SEQ ID NO: 658332 - protein, 13 aa, Homo sapiens
  CDR3 for beta chain variable domain of TCR clone 329166 (TRBV7-3, TRBJ1-2)
CASSLKRDYGYTF

SEQ ID NO: 658333 - protein, 15 aa, Homo sapiens
  CDR3 for alpha chain variable domain of TCR clone 329167 (TRAV3, TRAJ29)
CAVRDPLSGNTPLVF

SEQ ID NO: 658334 - protein, 16 aa, Homo sapiens
  CDR3 for beta chain variable domain of TCR clone 329167 (TRBV27, TRBJ2-2)
CASSFRGLVRTGELFF

SEQ ID NO: 658335 - protein, 21 aa, Homo sapiens
  CDR3 for alpha chain variable domain of TCR clone 329168 (TRAV1-1, TRAJ30)
CLLLLRCEREGGENRDDKIIF

SEQ ID NO: 658336 - protein, 16 aa, Homo sapiens
  CDR3 for beta chain variable domain of TCR clone 329168 (TRBV7-2, TRBJ2-7)
CASSLDLSGGAYEQYF

SEQ ID NO: 658337 - protein, 15 aa, Homo sapiens
  CDR3 for alpha chain variable domain of TCR clone 329169 (TRAV26-1, TRAJ29)
CIVRVEGSGNTPLVP

SEQ ID NO: 658338 - protein, 15 aa, Homo sapiens
  CDR3 for beta chain variable domain of TCR clone 329169 (TRBV7-9, TRBJ1-5)
CASSQGHQPNQPQHF

SEQ ID NO: 658339 - protein, 13 aa, Homo sapiens
  CDR3 for alpha chain variable domain of TCR clone 329170 (TRAV13-1, TRAJ39)
CSKYSNAGNMLTF

SEQ ID NO: 658340 - protein, 13 aa, Homo sapiens
  CDR3 for beta chain variable domain of TCR clone 329170 (TRBV20-1, TRBJ1-1)
CSARGGGNTEAVF

SEQ ID NO: 658341 - protein, 14 aa, Homo sapiens
  CDR3 for alpha chain variable domain of TCR clone 329171 (TRAV26-1, TRAJ45)
CIEVTGGGADGLTF

SEQ ID NO: 658342 - protein, 20 aa, Homo sapiens
  CDR3 for beta chain variable domain of TCR clone 329171 (TRBV11-2, TRBJ2-1)
CASSSGLAGGWVSSYNEQFF

SEQ ID NO: 658343 - protein, 13 aa, Homo sapiens
  CDR3 for alpha chain variable domain of TCR clone 329172 (TRAV21, TRAJ27)
CAARPGNAGKSHF

SEQ ID NO: 658344 - protein, 14 aa, Homo sapiens
  CDR3 for beta chain variable domain of TCR clone 329172 (TRBV7-6, TRBJ2-3)
CASSLGTVTDTQYF

SEQ ID NO: 658345 - protein, 13 aa, Homo sapiens
  CDR3 for alpha chain variable domain of TCR clone 329173 (TRAV17, TRAJ36)
CATDQTGANNLFF

SEQ ID NO: 658346 - protein, 12 aa, Homo sapiens
  CDR3 for beta chain variable domain of TCR clone 329173 (TRBV11-2, TRBJ2-2)
CASSLPTGELFF

SEQ ID NO: 658347 - protein, 13 aa, Homo sapiens
  CDR3 for alpha chain variable domain of TCR clone 329174 (TRAV20, TRAJ42)
CAVQGGRKGNLIF

SEQ ID NO: 658348 - protein, 15 aa, Homo sapiens
  CDR3 for beta chain variable domain of TCR clone 329174 (TRBV10-1, TRBJ2-1)
CASSEWRGTYNEQFF

SEQ ID NO: 658349 - protein, 17 aa, Homo sapiens
  CDR3 for alpha chain variable domain of TCR clone 329175 (TRAV16, TRAJ37)
CALSGRMALATQANYSL

SEQ ID NO: 658350 - protein, 13 aa, Homo sapiens
  CDR3 for beta chain variable domain of TCR clone 329175 (TRBV7-2, TRBJ2-2)
CASSLAVTGELFF

SEQ ID NO: 658351 - protein, 14 aa, Homo sapiens
  CDR3 for alpha chain variable domain of TCR clone 329176 (TRAV26-1, TRAJ38)
CIADNAGNNRKLIW

SEQ ID NO: 658352 - protein, 15 aa, Homo sapiens
  CDR3 for beta chain variable domain of TCR clone 329176 (TRBV2, TRBJ2-5)
CASSEQGLIGETQYF

SEQ ID NO: 658353 - protein, 11 aa, Homo sapiens
  CDR3 for alpha chain variable domain of TCR clone 329177 (TRAV16, TRAJ33)
CALHSNYQLIW

SEQ ID NO: 658354 - protein, 14 aa, Homo sapiens
  CDR3 for beta chain variable domain of TCR clone 329177 (TRBV7-9, TRBJ2-1)
CASSPRDSLYEQFF

SEQ ID NO: 658355 - protein, 14 aa, Homo sapiens
  CDR3 for alpha chain variable domain of TCR clone 329178 (TRAV1-2, TRAJ16)
CAVNRFSDGQKLLF

SEQ ID NO: 658356 - protein, 15 aa, Homo sapiens
  CDR3 for beta chain variable domain of TCR clone 329178 (TRBV7-9, TRBJ1-6)
CASSAPGRGNPPLHF

SEQ ID NO: 658357 - protein, 20 aa, Homo sapiens
  CDR3 for alpha chain variable domain of TCR clone 329179 (TRAV21, TRAJ13)
CAVPRSFWGLPESYLWNLNK

SEQ ID NO: 658358 - protein, 15 aa, Homo sapiens
  CDR3 for beta chain variable domain of TCR clone 329179 (TRBV7-9, TRBJ1-6)
CASSSPGRGNSPLHF

SEQ ID NO: 658359 - protein, 13 aa, Homo sapiens
  CDR3 for alpha chain variable domain of TCR clone 329180 (TRAV8-6, TRAJ33)
CAVSEGSNYQLIW

SEQ ID NO: 658360 - protein, 14 aa, Homo sapiens
  CDR3 for beta chain variable domain of TCR clone 329180 (TRBV18, TRBJ2-7)
CASSPRGGAYEQYF

SEQ ID NO: 658361 - protein, 14 aa, Homo sapiens
  CDR3 for alpha chain variable domain of TCR clone 329181 (TRAV26-1, TRAJ38)
CIADNAGNNRKLIW

SEQ ID NO: 658362 - protein, 14 aa, Homo sapiens
  CDR3 for beta chain variable domain of TCR clone 329181 (TRBV4-1, TRBJ2-2)
CASSKAVNTGELFF

SEQ ID NO: 658363 - protein, 13 aa, Homo sapiens
  CDR3 for alpha chain variable domain of TCR clone 329182 (TRAV8-1, TRAJ13)
CAVSKGGYQKVTF

SEQ ID NO: 658364 - protein, 18 aa, Homo sapiens
  CDR3 for beta chain variable domain of TCR clone 329182 (TRBV11-2, TRBJ2-7)
CASSWRTVHTGQAYEQYF

SEQ ID NO: 658365 - protein, 12 aa, Homo sapiens
  CDR3 for alpha chain variable domain of TCR clone 329183 (TRAV1-1, TRAJ8)
CAGGTGFQKLVF

SEQ ID NO: 658366 - protein, 15 aa, Homo sapiens
  CDR3 for beta chain variable domain of TCR clone 329183 (TRBV7-9, TRBJ1-4)
CASIRTGGFNEKLFF

SEQ ID NO: 658367 - protein, 15 aa, Homo sapiens
  CDR3 for alpha chain variable domain of TCR clone 329184 (TRAV12-1, TRAJ45)
RVVLSGGGGADGLTF

SEQ ID NO: 658368 - protein, 12 aa, Homo sapiens
  CDR3 for beta chain variable domain of TCR clone 329184 (TRBV12-5, TRBJ2-5)
RASGQGVETQYF

SEQ ID NO: 658369 - protein, 13 aa, Homo sapiens
  CDR3 for alpha chain variable domain of TCR clone 329185 (TRAV8-4, TRAJ10)
CAAFTGGGNKLNF

SEQ ID NO: 658370 - protein, 15 aa, Homo sapiens
  CDR3 for beta chain variable domain of TCR clone 329185 (TRBV2, TRBJ2-3)
CASSDFEKATDTQYF

SEQ ID NO: 658371 - protein, 14 aa, Homo sapiens
  CDR3 for alpha chain variable domain of TCR clone 329186 (TRAV16, TRAJ42)
CALLAGGSQGNLIF

SEQ ID NO: 658372 - protein, 14 aa, Homo sapiens
  CDR3 for beta chain variable domain of TCR clone 329186 (TRBV7-2, TRBJ2-7)
CASSLPPGQGPQYF

SEQ ID NO: 658373 - protein, 15 aa, Homo sapiens
  CDR3 for alpha chain variable domain of TCR clone 329187 (TRAV2, TRAJ15)
CAVEDRGQAGTALIF

SEQ ID NO: 658374 - protein, 18 aa, Homo sapiens
  CDR3 for beta chain variable domain of TCR clone 329187 (TRBV11-2, TRBJ2-3)
CASSLGGASRGAPNTQYF

SEQ ID NO: 658375 - protein, 15 aa, Homo sapiens
  CDR3 for alpha chain variable domain of TCR clone 329188 (TRAV12-2, TRAJ53)
CAGNGGGGSNYKLTF

SEQ ID NO: 658376 - protein, 14 aa, Homo sapiens
  CDR3 for beta chain variable domain of TCR clone 329188 (TRBV12-5, TRBJ2-5)
CASGSRTHQETQYF

SEQ ID NO: 658377 - protein, 11 aa, Homo sapiens
  CDR3 for alpha chain variable domain of TCR clone 329189 (TRAV12-3, TRAJ43)
CAMSVSNDKRF

SEQ ID NO: 658378 - protein, 13 aa, Homo sapiens
  CDR3 for beta chain variable domain of TCR clone 329189 (TRBV20-1, TRBJ1-1)
CSAPLGGGTEAFV

SEQ ID NO: 658379 - protein, 11 aa, Homo sapiens
  CDR3 for alpha chain variable domain of TCR clone 329190 (TRAV21, TRAJ31)
CAVRKNARPMF

SEQ ID NO: 658380 - protein, 15 aa, Homo sapiens
  CDR3 for beta chain variable domain of TCR clone 329190 (TRBV20-1, TRBJ2-7)
CSARDRVSGMDEQYF

SEQ ID NO: 658381 - protein, 13 aa, Homo sapiens
  CDR3 for alpha chain variable domain of TCR clone 329191 (TRAV12-3, TRAJ13)
CAMSSGGYQKVTF

SEQ ID NO: 658382 - protein, 13 aa, Homo sapiens
  CDR3 for beta chain variable domain of TCR clone 329191 (TRBV20-1, TRBJ1-1)
CSAPAGGHTEAFF

SEQ ID NO: 658383 - protein, 10 aa, Homo sapiens
  CDR3 for alpha chain variable domain of TCR clone 329192 (TRAV22, TRAJ21)
CAVGAGNFYF

SEQ ID NO: 658384 - protein, 13 aa, Homo sapiens
  CDR3 for beta chain variable domain of TCR clone 329192 (TRBV18, TRBJ2-7)
CASSPGQDYEQYF

SEQ ID NO: 658385 - protein, 16 aa, Homo sapiens
  CDR3 for alpha chain variable domain of TCR clone 329193 (TRAV16, TRAJ4)
CALSRMFSGGYNKLIF

SEQ ID NO: 658386 - protein, 15 aa, Homo sapiens
  CDR3 for beta chain variable domain of TCR clone 329193 (TRBV7-8, TRBJ1-3)
CASSPRGKDGNTIYF

SEQ ID NO: 658387 - protein, 16 aa, Homo sapiens
  CDR3 for alpha chain variable domain of TCR clone 329194 (TRAV30, TRAJ24)
CGTEIVDADSWGKFQF

SEQ ID NO: 658388 - protein, 13 aa, Homo sapiens
  CDR3 for beta chain variable domain of TCR clone 329194 (TRBV4-2, TRBJ1-1)
CASSQAVNTEAFF

SEQ ID NO: 658389 - protein, 15 aa, Homo sapiens
  CDR3 for alpha chain variable domain of TCR clone 329195 (TRAV14/DV4, TRAJ15)
CAMREGWQAGTALIF

SEQ ID NO: 658390 - protein, 17 aa, Homo sapiens
  CDR3 for beta chain variable domain of TCR clone 329195 (TRBV20-1, TRBJ2-1)
CSASSSGLAGSYNEQFF

SEQ ID NO: 658391 - protein, 12 aa, Homo sapiens
  CDR3 for alpha chain variable domain of TCR clone 329196 (TRAV12-2, TRAJ7)
RAVMRGNNRLAF

SEQ ID NO: 658392 - protein, 17 aa, Homo sapiens
  CDR3 for beta chain variable domain of TCR clone 329196 (TRBV7-9, TRBJ2-3)
CASSPTVAGDLTDTQYF

SEQ ID NO: 658393 - protein, 22 aa, Homo sapiens
  CDR3 for alpha chain variable domain of TCR clone 329197 (TRAV4, TRAJ37)
CLVGDGRLWQHRPTNLWARDNF

SEQ ID NO: 658394 - protein, 15 aa, Homo sapiens
  CDR3 for beta chain variable domain of TCR clone 329197 (TRBV6-6, TRBJ1-1)
CASSYASGAGTEAFF

SEQ ID NO: 658395 - protein, 16 aa, Homo sapiens
  CDR3 for alpha chain variable domain of TCR clone 329198 (TRAV12-3, TRAJ53)
CAMSPGSGGSNYRLTF

SEQ ID NO: 658396 - protein, 15 aa, Homo sapiens
  CDR3 for beta chain variable domain of TCR clone 329198 (TRBV10-3, TRBJ2-3)
CAISLTSGGTDTQYF

SEQ ID NO: 658397 - protein, 14 aa, Homo sapiens
  CDR3 for alpha chain variable domain of TCR clone 329199 (TRAV1-2, TRAJ8)
CAVREDTGFQKLVF

SEQ ID NO: 658398 - protein, 13 aa, Homo sapiens
  CDR3 for beta chain variable domain of TCR clone 329199 (TRBV7-3, TRBJ2-1)
RASSLDSYNEQFF

SEQ ID NO: 658399 - protein, 11 aa, Homo sapiens
  CDR3 for alpha chain variable domain of TCR clone 329200 (TRAV25, TRAJ49)
SAGGTGNQFYF

SEQ ID NO: 658400 - protein, 12 aa, Homo sapiens
  CDR3 for beta chain variable domain of TCR clone 329200 (TRBV6-5, TRBJ2-1)
CASRNDRGQQFF

SEQ ID NO: 658401 - protein, 18 aa, Homo sapiens
  CDR3 for alpha chain variable domain of TCR clone 329201 (TRAV26-1, TRAJ23)
CIVRVGLEVWNQGGKLIF

SEQ ID NO: 658402 - protein, 15 aa, Homo sapiens
  CDR3 for beta chain variable domain of TCR clone 329201 (TRBV9, TRBJ1-6)
CASSVAGTGDSTLHF

SEQ ID NO: 658403 - protein, 14 aa, Homo sapiens
  CDR3 for alpha chain variable domain of TCR clone 329202 (TRAV12-2, TRAJ13)
CAVKKTGGYQKVTF

SEQ ID NO: 658404 - protein, 14 aa, Homo sapiens
  CDR3 for beta chain variable domain of TCR clone 329202 (TRBV12-5, TRBJ2-5)
CASASLTHQETQYF

SEQ ID NO: 658405 - protein, 14 aa, Homo sapiens
  CDR3 for alpha chain variable domain of TCR clone 329203 (TRAV26-1, TRAJ38)
CIADNAGNNRKLIW

SEQ ID NO: 658406 - protein, 15 aa, Homo sapiens
  CDR3 for beta chain variable domain of TCR clone 329203 (TRBV4-1, TRBJ1-1)
CASSQEWGHYTEAFL

SEQ ID NO: 658407 - protein, 14 aa, Homo sapiens
  CDR3 for alpha chain variable domain of TCR clone 329204 (TRAV12-3, TRAJ29)
CAMILLSGNTPLVF

SEQ ID NO: 658408 - protein, 16 aa, Homo sapiens
  CDR3 for beta chain variable domain of TCR clone 329204 (TRBV28, TRBJ2-7)
WASSSGTSGRGYEQYF

SEQ ID NO: 658409 - protein, 13 aa, Homo sapiens
  CDR3 for alpha chain variable domain of TCR clone 329205 (TRAV27, TRAJ41)
CAGEGNSGYALNF

SEQ ID NO: 658410 - protein, 14 aa, Homo sapiens
  CDR3 for beta chain variable domain of TCR clone 329205 (TRBV12-4, TRBJ2-3)
CASSLVPSTDTQYF

SEQ ID NO: 658411 - protein, 13 aa, Homo sapiens
  CDR3 for alpha chain variable domain of TCR clone 329206 (TRAV12-2, TRAJ6)
CAVNVSRKLHTYI

SEQ ID NO: 658412 - protein, 12 aa, Homo sapiens
  CDR3 for beta chain variable domain of TCR clone 329206 (TRBV29-1, TRBJ2-3)
CSVTGGADTLYF

SEQ ID NO: 658413 - protein, 12 aa, Homo sapiens
  CDR3 for alpha chain variable domain of TCR clone 329207 (TRAV13-2, TRAJ23)
CAERHRGGKLIF

SEQ ID NO: 658414 - protein, 12 aa, Homo sapiens
  CDR3 for beta chain variable domain of TCR clone 329207 (TRBV20-1, TRBJ2-1)
CSARLGTDEQFF

SEQ ID NO: 658415 - protein, 17 aa, Homo sapiens
  CDR3 for alpha chain variable domain of TCR clone 329208 (TRAV8-6, TRAJ58)
CAVSSWVGETSGSRLTF

SEQ ID NO: 658416 - protein, 15 aa, Homo sapiens
  CDR3 for beta chain variable domain of TCR clone 329208 (TRBV5-1, TRBJ2-1)
CASSPPRAPYNEQFF

SEQ ID NO: 658417 - protein, 16 aa, Homo sapiens
  CDR3 for alpha chain variable domain of TCR clone 329209 (TRAV30, TRAJ24)
CGTEIVDADSWWKFQF

SEQ ID NO: 658418 - protein, 15 aa, Homo sapiens
  CDR3 for beta chain variable domain of TCR clone 329209 (TRBV12-4, TRBJ2-2)
CASSPNDSGTGELFF

SEQ ID NO: 658419 - protein, 12 aa, Homo sapiens
  CDR3 for alpha chain variable domain of TCR clone 329210 (TRAV21, TRAJ33)
CAKMDSNYQLIW

SEQ ID NO: 658420 - protein, 15 aa, Homo sapiens
  CDR3 for beta chain variable domain of TCR clone 329210 (TRBV12-4, TRBJ2-5)
CASSPPTGLQETQYV

SEQ ID NO: 658421 - protein, 14 aa, Homo sapiens
  CDR3 for alpha chain variable domain of TCR clone 329211 (TRAV1-2, TRAJ16)
CAVNRFSDGQKLLF

SEQ ID NO: 658422 - protein, 17 aa, Homo sapiens
  CDR3 for beta chain variable domain of TCR clone 329211 (TRBV7-9, TRBJ1-4)
CASRLRTGWVKNCFLAV

SEQ ID NO: 658423 - protein, 15 aa, Homo sapiens
  CDR3 for alpha chain variable domain of TCR clone 329212 (TRAV3, TRAJ45)
CAVRTPWGGADGLTF

SEQ ID NO: 658424 - protein, 16 aa, Homo sapiens
  CDR3 for beta chain variable domain of TCR clone 329212 (TRBV6-1, TRBJ2-2)
CASSFGRGANTGELFF

SEQ ID NO: 658425 - protein, 16 aa, Homo sapiens
  CDR3 for alpha chain variable domain of TCR clone 329213 (TRAV30, TRAJ24)
CGTENVDADSWGKFQF

SEQ ID NO: 658426 - protein, 16 aa, Homo sapiens
  CDR3 for beta chain variable domain of TCR clone 329213 (TRBV6-3, TRBJ1-1)
CASTDLGTVPNTEAFF

SEQ ID NO: 658427 - protein, 12 aa, Homo sapiens
  CDR3 for alpha chain variable domain of TCR clone 329214 (TRAV12-3, TRAJ17)
CAMTLTGNNLTF

SEQ ID NO: 658428 - protein, 13 aa, Homo sapiens
  CDR3 for beta chain variable domain of TCR clone 329214 (TRBV12-4, TRBJ1-1)
CASSPGTGFEAFF

SEQ ID NO: 658429 - protein, 11 aa, Homo sapiens
  CDR3 for alpha chain variable domain of TCR clone 329215 (TRAV12-1, TRAJ21)
CVVYNFNKFYF

SEQ ID NO: 658430 - protein, 15 aa, Homo sapiens
  CDR3 for beta chain variable domain of TCR clone 329215 (TRBV7-9, TRBJ2-7)
CASSPGGGLTYEQYF

SEQ ID NO: 658431 - protein, 11 aa, Homo sapiens
  CDR3 for alpha chain variable domain of TCR clone 329216 (TRAV3, TRAJ21)
CAVGNFNKFYF

SEQ ID NO: 658432 - protein, 18 aa, Homo sapiens
  CDR3 for beta chain variable domain of TCR clone 329216 (TRBV11-3, TRBJ2-7)
CASSWRTVQTGQSYEQYF

SEQ ID NO: 658433 - protein, 15 aa, Homo sapiens
  CDR3 for alpha chain variable domain of TCR clone 329217 (TRAV35, TRAJ58)
CAGRRQETSGSRLTF

SEQ ID NO: 658434 - protein, 13 aa, Homo sapiens
  CDR3 for beta chain variable domain of TCR clone 329217 (TRBV20-1, TRBJ1-1)
CSARGGGNTEAFF

SEQ ID NO: 658435 - protein, 12 aa, Homo sapiens
  CDR3 for alpha chain variable domain of TCR clone 329218 (TRAV17, TRAJ49)
CATASTGNQFYF

SEQ ID NO: 658436 - protein, 15 aa, Homo sapiens
  CDR3 for beta chain variable domain of TCR clone 329218 (TRBV15, TRBJ2-1)
SATSRDLGSYNEQFF

SEQ ID NO: 658437 - protein, 12 aa, Homo sapiens
  CDR3 for alpha chain variable domain of TCR clone 329219 (TRAV26-2, TRAJ21)
CILKGNFNKFYL

SEQ ID NO: 658438 - protein, 19 aa, Homo sapiens
  CDR3 for beta chain variable domain of TCR clone 329219 (TRBV19, TRBJ2-5)
CASSIGQVTDFFLGETQYF

SEQ ID NO: 658439 - protein, 15 aa, Homo sapiens
  CDR3 for alpha chain variable domain of TCR clone 329220 (TRAV1-2, TRAJ30)
CAVRPHGNRDDKIIF

SEQ ID NO: 658440 - protein, 13 aa, Homo sapiens
  CDR3 for beta chain variable domain of TCR clone 329220 (TRBV19, TRBJ1-2)
CASSQGQVYGYTF

SEQ ID NO: 658441 - protein, 16 aa, Homo sapiens
  CDR3 for alpha chain variable domain of TCR clone 329221 (TRAV30, TRAJ44)
CGTEDKRTGTASKLPF

SEQ ID NO: 658442 - protein, 16 aa, Homo sapiens
  CDR3 for beta chain variable domain of TCR clone 329221 (TRBV10-2, TRBJ2-7)
CASSESPGSSGFEQYF

SEQ ID NO: 658443 - protein, 14 aa, Homo sapiens
  CDR3 for alpha chain variable domain of TCR clone 329222 (TRAV8-6, TRAJ49)
CAVSDPGTGSQFYF

SEQ ID NO: 658444 - protein, 16 aa, Homo sapiens
  CDR3 for beta chain variable domain of TCR clone 329222 (TRBV24-1, TRBJ2-1)
CATSGVAGANYNEQFF

SEQ ID NO: 658445 - protein, 16 aa, Homo sapiens
  CDR3 for alpha chain variable domain of TCR clone 329223 (TRAV1-1, TRAJ29)
CAVRSTRNSGHTPLVF

SEQ ID NO: 658446 - protein, 14 aa, Homo sapiens
  CDR3 for beta chain variable domain of TCR clone 329223 (TRBV6-1, TRBJ1-3)
CASVQGGGGNTIYF

SEQ ID NO: 658447 - protein, 14 aa, Homo sapiens
  CDR3 for alpha chain variable domain of TCR clone 329224 (TRAV8-2, TRAJ4)
CVVSPSGGYNKLIF

SEQ ID NO: 658448 - protein, 15 aa, Homo sapiens
  CDR3 for beta chain variable domain of TCR clone 329224 (TRBV4-1, TRBJ1-4)
CASSDTGGTNVKLFF

SEQ ID NO: 658449 - protein, 17 aa, Homo sapiens
  CDR3 for alpha chain variable domain of TCR clone 329225 (TRAV3, TRAJ6)
CAVRDGPRAGGSYIPTF

SEQ ID NO: 658450 - protein, 16 aa, Homo sapiens
  CDR3 for beta chain variable domain of TCR clone 329225 (TRBV4-3, TRBJ2-1)
CASSPALERGVNEQFF

SEQ ID NO: 658451 - protein, 15 aa, Homo sapiens
  CDR3 for alpha chain variable domain of TCR clone 329226 (TRAV35, TRAJ23)
CAGPLGNNQGGKLIF

SEQ ID NO: 658452 - protein, 14 aa, Homo sapiens
  CDR3 for beta chain variable domain of TCR clone 329226 (TRBV7-9, TRBJ1-1)
CASTPLQSYTESFF

SEQ ID NO: 658453 - protein, 14 aa, Homo sapiens
  CDR3 for alpha chain variable domain of TCR clone 329227 (TRAV12-1, TRAJ12)
CVVNGRDSSYKLIF

SEQ ID NO: 658454 - protein, 14 aa, Homo sapiens
  CDR3 for beta chain variable domain of TCR clone 329227 (TRBV10-2, TRBJ1-5)
CASSSTGRNQPQHF

SEQ ID NO: 658455 - protein, 13 aa, Homo sapiens
  CDR3 for alpha chain variable domain of TCR clone 329228 (TRAV8-3, TRAJ28)
CAVGAVGSYQLTS

SEQ ID NO: 658456 - protein, 14 aa, Homo sapiens
  CDR3 for beta chain variable domain of TCR clone 329228 (TRBV7-2, TRBJ2-7)
CASRSQGAAYEQYF

SEQ ID NO: 658457 - protein, 12 aa, Homo sapiens
  CDR3 for alpha chain variable domain of TCR clone 329229 (TRAV20, TRAJ39)
CAVGNAGKMLTF

SEQ ID NO: 658458 - protein, 15 aa, Homo sapiens
  CDR3 for beta chain variable domain of TCR clone 329229 (TRBV27, TRBJ2-1)
CASSNGGGSSNEQFF

SEQ ID NO: 658459 - protein, 12 aa, Homo sapiens
  CDR3 for alpha chain variable domain of TCR clone 329230 (TRAV12-2, TRAJ10)
WGVTGGGNKLTF

SEQ ID NO: 658460 - protein, 14 aa, Homo sapiens
  CDR3 for beta chain variable domain of TCR clone 329230 (TRBV19, TRBJ2-3)
CGSSAPRGTDTQYF

SEQ ID NO: 658461 - protein, 13 aa, Homo sapiens
  CDR3 for alpha chain variable domain of TCR clone 329231 (TRAV12-1, TRAJ37)
CVVSSGNTGKLIF

SEQ ID NO: 658462 - protein, 17 aa, Homo sapiens
  CDR3 for beta chain variable domain of TCR clone 329231 (TRBV28, TRBJ2-5)
CASSRQGGLAGAETQYF

SEQ ID NO: 658463 - protein, 12 aa, Homo sapiens
  CDR3 for alpha chain variable domain of TCR clone 329232 (TRAV2, TRAJ31)
CAVEDNNARLMF

SEQ ID NO: 658464 - protein, 15 aa, Homo sapiens
  CDR3 for beta chain variable domain of TCR clone 329232 (TRBV7-8, TRBJ2-1)
CASSLADSLYNEQFF

SEQ ID NO: 658465 - protein, 13 aa, Homo sapiens
  CDR3 for alpha chain variable domain of TCR clone 329233 (TRAV20, TRAJ21)
CAVEGYNFNKFYF

SEQ ID NO: 658466 - protein, 15 aa, Homo sapiens
  CDR3 for beta chain variable domain of TCR clone 329233 (TRBV27, TRBJ2-1)
CASSNGGGSSNEQFF

SEQ ID NO: 658467 - protein, 13 aa, Homo sapiens
  CDR3 for alpha chain variable domain of TCR clone 329234 (TRAV13-1, TRAJ4)
CAASSGGHNKLIF

SEQ ID NO: 658468 - protein, 13 aa, Homo sapiens
  CDR3 for beta chain variable domain of TCR clone 329234 (TRBV7-3, TRBJ1-1)
CASSQDWGAEAFF

SEQ ID NO: 658469 - protein, 16 aa, Homo sapiens
  CDR3 for alpha chain variable domain of TCR clone 329235 (TRAV3, TRAJ37)
CSVRGKGSGKTGKLIF

SEQ ID NO: 658470 - protein, 16 aa, Homo sapiens
  CDR3 for beta chain variable domain of TCR clone 329235 (TRBV12-5, TRBJ2-5)
CASGPRTSGSQETQYF

SEQ ID NO: 658471 - protein, 14 aa, Homo sapiens
  CDR3 for alpha chain variable domain of TCR clone 329236 (TRAV23/DV6, TRAJ27)
CAASRDTNAGKSTF

SEQ ID NO: 658472 - protein, 15 aa, Homo sapiens
  CDR3 for beta chain variable domain of TCR clone 329236 (TRBV11-3, TRBJ2-3)
CASLKDGREGDTQYF

SEQ ID NO: 658473 - protein, 14 aa, Homo sapiens
  CDR3 for alpha chain variable domain of TCR clone 329237 (TRAV1-2, TRAJ16)
CAVNRFSDGQKLPF

SEQ ID NO: 658474 - protein, 16 aa, Homo sapiens
  CDR3 for beta chain variable domain of TCR clone 329237 (TRBV5-1, TRBJ2-5)
CASSLRRTSGQETQYF

SEQ ID NO: 658475 - protein, 15 aa, Homo sapiens
  CDR3 for alpha chain variable domain of TCR clone 329238 (TRAV17, TRAJ35)
CATAFVIGFGNVLHF

SEQ ID NO: 658476 - protein, 14 aa, Homo sapiens
  CDR3 for beta chain variable domain of TCR clone 329238 (TRBV12-4, TRBJ2-5)
CASSQSGGGETQYF

SEQ ID NO: 658477 - protein, 13 aa, Homo sapiens
  CDR3 for alpha chain variable domain of TCR clone 329239 (TRAV13-2, TRAJ40)
CAEFTSVTYKYIF

SEQ ID NO: 658478 - protein, 14 aa, Homo sapiens
  CDR3 for beta chain variable domain of TCR clone 329239 (TRBV10-2, TRBJ1-5)
CASSSTGRNQPQHF

SEQ ID NO: 658479 - protein, 14 aa, Homo sapiens
  CDR3 for alpha chain variable domain of TCR clone 329240 (TRAV12-2, TRAJ4)
CAEDLSGCYNKLIF

SEQ ID NO: 658480 - protein, 13 aa, Homo sapiens
  CDR3 for beta chain variable domain of TCR clone 329240 (TRBV7-9, TRBJ1-2)
CASSLKQNYGYTF

SEQ ID NO: 658481 - protein, 14 aa, Homo sapiens
  CDR3 for alpha chain variable domain of TCR clone 329241 (TRAV12-2, TRAJ13)
CAVSPSGGYQKVTF

SEQ ID NO: 658482 - protein, 13 aa, Homo sapiens
  CDR3 for beta chain variable domain of TCR clone 329241 (TRBV20-1, TRBJ1-6)
CSAKLGGTSPLHF

SEQ ID NO: 658483 - protein, 12 aa, Homo sapiens
  CDR3 for alpha chain variable domain of TCR clone 329242 (TRAV13-2, TRAJ23)
CAERHRGGKLIF

SEQ ID NO: 658484 - protein, 15 aa, Homo sapiens
  CDR3 for beta chain variable domain of TCR clone 329242 (TRBV25-1, TRBJ1-4)
CASSKRIATNEKLFF

SEQ ID NO: 658485 - protein, 12 aa, Homo sapiens
  CDR3 for alpha chain variable domain of TCR clone 329243 (TRAV13-1, TRAJ9)
CASHTGGFTTIL

SEQ ID NO: 658486 - protein, 18 aa, Homo sapiens
  CDR3 for beta chain variable domain of TCR clone 329243 (TRBV11-2, TRBJ2-3)
CASSLGGASRGAPNTQYF

SEQ ID NO: 658487 - protein, 14 aa, Homo sapiens
  CDR3 for alpha chain variable domain of TCR clone 329244 (TRAV16, TRAJ42)
CALLAGGSQGNLIF

SEQ ID NO: 658488 - protein, 15 aa, Homo sapiens
  CDR3 for beta chain variable domain of TCR clone 329244 (TRBV11-1, TRBJ2-7)
CASSHDSGGDYEQYF

SEQ ID NO: 658489 - protein, 18 aa, Homo sapiens
  CDR3 for alpha chain variable domain of TCR clone 329245 (TRAV21, TRAJ52)
CAVRPYPAGGTSYGKLTF

SEQ ID NO: 658490 - protein, 12 aa, Homo sapiens
  CDR3 for beta chain variable domain of TCR clone 329245 (TRBV11-2, TRBJ2-2)
CASSLGGGELFF

SEQ ID NO: 658491 - protein, 14 aa, Homo sapiens
  CDR3 for alpha chain variable domain of TCR clone 329246 (TRAV12-1, TRAJ17)
CVVNYKAAGNKLTF

SEQ ID NO: 658492 - protein, 12 aa, Homo sapiens
  CDR3 for beta chain variable domain of TCR clone 329246 (TRBV7-8, TRBJ2-7)
CASSRGDREQYF

SEQ ID NO: 658493 - protein, 15 aa, Homo sapiens
  CDR3 for alpha chain variable domain of TCR clone 329247 (TRAV8-6, TRAJ57)
CAVSLTQGGSEKLVF

SEQ ID NO: 658494 - protein, 13 aa, Homo sapiens
  CDR3 for beta chain variable domain of TCR clone 329247 (TRBV7-9, TRBJ1-2)
CASSLKQNYGYTF

SEQ ID NO: 658495 - protein, 13 aa, Homo sapiens
  CDR3 for alpha chain variable domain of TCR clone 329248 (TRAV9-2, TRAJ9)
CALSDTGGFKTIF

SEQ ID NO: 658496 - protein, 15 aa, Homo sapiens
  CDR3 for beta chain variable domain of TCR clone 329248 (TRBV7-3, TRBJ2-2)
CASSETGQGTGELFF

SEQ ID NO: 658497 - protein, 13 aa, Homo sapiens
  CDR3 for alpha chain variable domain of TCR clone 329249 (TRAV3, TRAJ15)
CAVRDQAGTALIF

SEQ ID NO: 658498 - protein, 22 aa, Homo sapiens
  CDR3 for beta chain variable domain of TCR clone 329249 (TRBV23-1, TRBJ2-5)
CASSPWARPPHSRDPVLRARHA

SEQ ID NO: 658499 - protein, 17 aa, Homo sapiens
  CDR3 for alpha chain variable domain of TCR clone 329250 (TRAV3, TRAJ6)
CAVRDGPRAGGSYIPTF

SEQ ID NO: 658500 - protein, 16 aa, Homo sapiens
  CDR3 for beta chain variable domain of TCR clone 329250 (TRBV19, TRBJ2-2)
CASSTARASNTGELFF

SEQ ID NO: 658501 - protein, 17 aa, Homo sapiens
  CDR3 for alpha chain variable domain of TCR clone 329251 (TRAV3, TRAJ12)
CCERRDGTMDSSHKLIF

SEQ ID NO: 658502 - protein, 15 aa, Homo sapiens
  CDR3 for beta chain variable domain of TCR clone 329251 (TRBV5-5, TRBJ1-5)
CASSVKGGGEQHQHF

SEQ ID NO: 658503 - protein, 17 aa, Homo sapiens
  CDR3 for alpha chain variable domain of TCR clone 329252 (TRAV3, TRAJ42)
CAVRDRDYGGSQGNLIF

SEQ ID NO: 658504 - protein, 16 aa, Homo sapiens
  CDR3 for beta chain variable domain of TCR clone 329252 (TRBV5-1, TRBJ1-3)
CASTSPGAGDGNTIYF

SEQ ID NO: 658505 - protein, 11 aa, Homo sapiens
  CDR3 for alpha chain variable domain of TCR clone 329253 (TRAV27, TRAJ20)
CAGADDYKLSF

SEQ ID NO: 658506 - protein, 13 aa, Homo sapiens
  CDR3 for beta chain variable domain of TCR clone 329253 (TRBV11-2, TRBJ1-3)
CASSLEPVNTIYF

SEQ ID NO: 658507 - protein, 15 aa, Homo sapiens
  CDR3 for alpha chain variable domain of TCR clone 329254 (TRAV21, TRAJ40)
CAVRPQTSGTYKYIF

SEQ ID NO: 658508 - protein, 13 aa, Homo sapiens
  CDR3 for beta chain variable domain of TCR clone 329254 (TRBV7-2, TRBJ2-2)
CASSSVWAGELFF

SEQ ID NO: 658509 - protein, 16 aa, Homo sapiens
  CDR3 for alpha chain variable domain of TCR clone 329255 (TRAV3, TRAJ37)
CAVRGKGSCNTGKLIF

SEQ ID NO: 658510 - protein, 13 aa, Homo sapiens
  CDR3 for beta chain variable domain of TCR clone 329255 (TRBV4-2, TRBJ1-1)
CASSQAGNTEAFF

SEQ ID NO: 658511 - protein, 13 aa, Homo sapiens
  CDR3 for alpha chain variable domain of TCR clone 329256 (TRAV13-2, TRAJ8)
CAFMNTGFKKLVF

SEQ ID NO: 658512 - protein, 15 aa, Homo sapiens
  CDR3 for beta chain variable domain of TCR clone 329256 (TRBV19, TRBJ2-3)
CAAGDTNAPNDTQYF

SEQ ID NO: 658513 - protein, 15 aa, Homo sapiens
  CDR3 for alpha chain variable domain of TCR clone 329257 (TRAV3, TRAJ9)
CAGRARNTGGFKTIF

SEQ ID NO: 658514 - protein, 12 aa, Homo sapiens
  CDR3 for beta chain variable domain of TCR clone 329257 (TRBV11-2, TRBJ2-7)
CASSLPTYEQYF

SEQ ID NO: 658515 - protein, 16 aa, Homo sapiens
  CDR3 for alpha chain variable domain of TCR clone 329258 (TRAV22, TRAJ45)
CAVERGKRGCADGLTF

SEQ ID NO: 658516 - protein, 13 aa, Homo sapiens
  CDR3 for beta chain variable domain of TCR clone 329258 (TRBV27, TRBJ1-1)
CASSLSIGAEAFF

SEQ ID NO: 658517 - protein, 15 aa, Homo sapiens
  CDR3 for alpha chain variable domain of TCR clone 329259 (TRAV12-3, TRAJ42)
CAMSGHGGSQGNLIF

SEQ ID NO: 658518 - protein, 12 aa, Homo sapiens
  CDR3 for beta chain variable domain of TCR clone 329259 (TRBV29-1, TRBJ2-3)
CSVTGGADTQYF

SEQ ID NO: 658519 - protein, 15 aa, Homo sapiens
  CDR3 for alpha chain variable domain of TCR clone 329260 (TRAV21, TRAJ24)
CAARSSTDSWGKLQF

SEQ ID NO: 658520 - protein, 15 aa, Homo sapiens
  CDR3 for beta chain variable domain of TCR clone 329260 (TRBV29-1, TRBJ1-2)
CSVVLEAGSNYGYTF

SEQ ID NO: 658521 - protein, 14 aa, Homo sapiens
  CDR3 for alpha chain variable domain of TCR clone 329261 (TRAV17, TRAJ6)
CATNPAGGSYIPTF

SEQ ID NO: 658522 - protein, 14 aa, Homo sapiens
  CDR3 for beta chain variable domain of TCR clone 329261 (TRBV19, TRBJ2-1)
CASPTFVLSGEQFF

SEQ ID NO: 658523 - protein, 14 aa, Homo sapiens
  CDR3 for alpha chain variable domain of TCR clone 329262 (TRAV34, TRAJ44)
CGADGTGTASKLPF

SEQ ID NO: 658524 - protein, 12 aa, Homo sapiens
  CDR3 for beta chain variable domain of TCR clone 329262 (TRBV11-2, TRBJ2-2)
CASSLGGGELFF

SEQ ID NO: 658525 - protein, 16 aa, Homo sapiens
  CDR3 for alpha chain variable domain of TCR clone 329263 (TRAV16, TRAJ4)
CITVLPFSGGYNKLIF

SEQ ID NO: 658526 - protein, 14 aa, Homo sapiens
  CDR3 for beta chain variable domain of TCR clone 329263 (TRBV19, TRBJ2-7)
YASSMGQGAIEQYF

SEQ ID NO: 658527 - protein, 13 aa, Homo sapiens
  CDR3 for alpha chain variable domain of TCR clone 329264 (TRAV13-1, TRAJ6)
GAARRGGSYIPTF

SEQ ID NO: 658528 - protein, 15 aa, Homo sapiens
  CDR3 for beta chain variable domain of TCR clone 329264 (TRBV11-2, TRBJ2-2)
CASRGLAANTGELFF

SEQ ID NO: 658529 - protein, 12 aa, Homo sapiens
  CDR3 for alpha chain variable domain of TCR clone 329265 (TRAV41, TRAJ58)
CAVGTSGSRLTF

SEQ ID NO: 658530 - protein, 15 aa, Homo sapiens
  CDR3 for beta chain variable domain of TCR clone 329265 (TRBV29-1, TRBJ2-6)
CSVGDRGSGANVLTF

SEQ ID NO: 658531 - protein, 14 aa, Homo sapiens
  CDR3 for alpha chain variable domain of TCR clone 329266 (TRAV41, TRAJ32)
CCPNYGGATNKLIF

SEQ ID NO: 658532 - protein, 15 aa, Homo sapiens
  CDR3 for beta chain variable domain of TCR clone 329266 (TRBV11-2, TRBJ2-1)
CASSKNRGLIYELFF

SEQ ID NO: 658533 - protein, 13 aa, Homo sapiens
  CDR3 for alpha chain variable domain of TCR clone 329267 (TRAV2, TRAJ40)
CAVVPSGTYNYIF

SEQ ID NO: 658534 - protein, 14 aa, Homo sapiens
  CDR3 for beta chain variable domain of TCR clone 329267 (TRBV19, TRBJ2-1)
CASPTFVLSGEQFF

SEQ ID NO: 658535 - protein, 14 aa, Homo sapiens
  CDR3 for alpha chain variable domain of TCR clone 329268 (TRAV29/DV5, TRAJ48)
CAAMALFGNDQLTF

SEQ ID NO: 658536 - protein, 15 aa, Homo sapiens
  CDR3 for beta chain variable domain of TCR clone 329268 (TRBV7-2, TRBJ2-1)
CASTHGTGIYNEQFF

SEQ ID NO: 658537 - protein, 15 aa, Homo sapiens
  CDR3 for alpha chain variable domain of TCR clone 329269 (TRAV2, TRAJ9)
CAVEDRGTGGFKTIL

SEQ ID NO: 658538 - protein, 16 aa, Homo sapiens
  CDR3 for beta chain variable domain of TCR clone 329269 (TRBV24-1, TRBJ2-3)
CATSDPETGATDTQYF

SEQ ID NO: 658539 - protein, 12 aa, Homo sapiens
  CDR3 for alpha chain variable domain of TCR clone 329270 (TRAV1-2, TRAJ29)
CAVPSGNTPLVF

SEQ ID NO: 658540 - protein, 14 aa, Homo sapiens
  CDR3 for beta chain variable domain of TCR clone 329270 (TRBV5-1, TRBJ2-1)
CASSALWAGNEQFF

SEQ ID NO: 658541 - protein, 14 aa, Homo sapiens
  CDR3 for alpha chain variable domain of TCR clone 329271 (TRAV17, TRAJ16)
CATADFSDGQKLLF

SEQ ID NO: 658542 - protein, 13 aa, Homo sapiens
  CDR3 for beta chain variable domain of TCR clone 329271 (TRBV7-2, TRBJ2-2)
CASSSVRAGELFF

SEQ ID NO: 658543 - protein, 10 aa, Homo sapiens
  CDR3 for alpha chain variable domain of TCR clone 329272 (TRAV12-3, TRAJ49)
CAMNDDSSIL

SEQ ID NO: 658544 - protein, 13 aa, Homo sapiens
  CDR3 for beta chain variable domain of TCR clone 329272 (TRBV12-4, TRBJ1-1)
CASSPGTGFEAFF

SEQ ID NO: 658545 - protein, 15 aa, Homo sapiens
  CDR3 for alpha chain variable domain of TCR clone 329273 (TRAV17, TRAJ54)
CATEKLGQGAQKPVF

SEQ ID NO: 658546 - protein, 14 aa, Homo sapiens
  CDR3 for beta chain variable domain of TCR clone 329273 (TRBV7-3, TRBJ1-1)
CQQLRGQMNTEAFF

SEQ ID NO: 658547 - protein, 13 aa, Homo sapiens
  CDR3 for alpha chain variable domain of TCR clone 329274 (TRAV13-1, TRAJ20)
CAARASNDYKLSF

SEQ ID NO: 658548 - protein, 12 aa, Homo sapiens
  CDR3 for beta chain variable domain of TCR clone 329274 (TRBV20-1, TRBJ2-1)
CSARLGTDEQFF

SEQ ID NO: 658549 - protein, 13 aa, Homo sapiens
  CDR3 for alpha chain variable domain of TCR clone 329275 (TRAV35, TRAJ42)
CAGFPGSQGNLIF

SEQ ID NO: 658550 - protein, 14 aa, Homo sapiens
  CDR3 for beta chain variable domain of TCR clone 329275 (TRBV4-1, TRBJ2-2)
RASSQAVNTGELFF

SEQ ID NO: 658551 - protein, 19 aa, Homo sapiens
  CDR3 for alpha chain variable domain of TCR clone 329276 (TRAV26-1, TRAJ52)
CIVRAHRNAGGTSYGKLTF

SEQ ID NO: 658552 - protein, 15 aa, Homo sapiens
  CDR3 for beta chain variable domain of TCR clone 329276 (TRBV12-4, TRBJ2-5)
CASSPPTGLHETQYF

SEQ ID NO: 658553 - protein, 14 aa, Homo sapiens
  CDR3 for alpha chain variable domain of TCR clone 329277 (TRAV13-1, TRAJ35)
CAASKGGFGNVLHG

SEQ ID NO: 658554 - protein, 13 aa, Homo sapiens
  CDR3 for beta chain variable domain of TCR clone 329277 (TRBV7-3, TRBJ1-1)
FASSQDWGAEAFF

SEQ ID NO: 658555 - protein, 11 aa, Homo sapiens
  CDR3 for alpha chain variable domain of TCR clone 329278 (TRAV2, TRAJ33)
CAVESNYQLIW

SEQ ID NO: 658556 - protein, 14 aa, Homo sapiens
  CDR3 for beta chain variable domain of TCR clone 329278 (TRBV7-2, TRBJ1-2)
CASSRGGTNYGYTF

SEQ ID NO: 658557 - protein, 13 aa, Homo sapiens
  CDR3 for alpha chain variable domain of TCR clone 329279 (TRAV13-1, TRAJ43)
CAASLSNNNDMRL

SEQ ID NO: 658558 - protein, 15 aa, Homo sapiens
  CDR3 for beta chain variable domain of TCR clone 329279 (TRBV5-1, TRBJ2-1)
CASSQAGYWWNEQFF

SEQ ID NO: 658559 - protein, 10 aa, Homo sapiens
  CDR3 for alpha chain variable domain of TCR clone 329280 (TRAV13-1, TRAJ41)
CAASGPRRTQ

SEQ ID NO: 658560 - protein, 18 aa, Homo sapiens
  CDR3 for beta chain variable domain of TCR clone 329280 (TRBV18, TRBJ2-3)
ISVPAHRRREGRGNTQYF

SEQ ID NO: 658561 - protein, 15 aa, Homo sapiens
  CDR3 for alpha chain variable domain of TCR clone 329281 (TRAV25, TRAJ52)
CAGRPGGTSYGKLTF

SEQ ID NO: 658562 - protein, 15 aa, Homo sapiens
  CDR3 for beta chain variable domain of TCR clone 329281 (TRBV19, TRBJ2-1)
CASSINREPSHEQFF

SEQ ID NO: 658563 - protein, 16 aa, Homo sapiens
  CDR3 for alpha chain variable domain of TCR clone 329282 (TRAV12-3, TRAJ53)
CAMSAGSGGSNYKLTV

SEQ ID NO: 658564 - protein, 13 aa, Homo sapiens
  CDR3 for beta chain variable domain of TCR clone 329282 (TRBV29-1, TRBJ2-3)
CSVGPRGTDTQYF

SEQ ID NO: 658565 - protein, 12 aa, Homo sapiens
  CDR3 for alpha chain variable domain of TCR clone 329283 (TRAV16, TRAJ49)
CALNEGGNQFYF

SEQ ID NO: 658566 - protein, 15 aa, Homo sapiens
  CDR3 for beta chain variable domain of TCR clone 329283 (TRBV20-1, TRBJ2-5)
CSAEGTGGLQETQYF

SEQ ID NO: 658567 - protein, 14 aa, Homo sapiens
  CDR3 for alpha chain variable domain of TCR clone 329284 (TRAV1-2, TRAJ16)
CAVNRFSDGQQLLF

SEQ ID NO: 658568 - protein, 14 aa, Homo sapiens
  CDR3 for beta chain variable domain of TCR clone 329284 (TRBV7-9, TRBJ2-2)
CASSLGHRTGELFF

SEQ ID NO: 658569 - protein, 15 aa, Homo sapiens
  CDR3 for alpha chain variable domain of TCR clone 329285 (TRAV35, TRAJ42)
CAGQGYGGSQGNPIF

SEQ ID NO: 658570 - protein, 13 aa, Homo sapiens
  CDR3 for beta chain variable domain of TCR clone 329285 (TRBV7-2, TRBJ1-1)
CASSLVQGAEAFF

SEQ ID NO: 658571 - protein, 12 aa, Homo sapiens
  CDR3 for alpha chain variable domain of TCR clone 329286 (TRAV12-3, TRAJ17)
CAMTLTGNKLTV

SEQ ID NO: 658572 - protein, 12 aa, Homo sapiens
  CDR3 for beta chain variable domain of TCR clone 329286 (TRBV11-2, TRBJ2-7)
CASSLPTYEQYF

SEQ ID NO: 658573 - protein, 14 aa, Homo sapiens
  CDR3 for alpha chain variable domain of TCR clone 329287 (TRAV12-2, TRAJ53)
CAVKGGGSNYKLTF

SEQ ID NO: 658574 - protein, 15 aa, Homo sapiens
  CDR3 for beta chain variable domain of TCR clone 329287 (TRBV11-2, TRBJ2-2)
CASSVDTGNTGELFF

SEQ ID NO: 658575 - protein, 13 aa, Homo sapiens
  CDR3 for alpha chain variable domain of TCR clone 329288 (TRAV17, TRAJ9)
CATAITGGFKTIF

SEQ ID NO: 658576 - protein, 16 aa, Homo sapiens
  CDR3 for beta chain variable domain of TCR clone 329288 (TRBV15, TRBJ2-1)
CATSRNLAGGYNEQFL

SEQ ID NO: 658577 - protein, 12 aa, Homo sapiens
  CDR3 for alpha chain variable domain of TCR clone 329289 (TRAV27, TRAJ9)
CVGESGGFKTIF

SEQ ID NO: 658578 - protein, 15 aa, Homo sapiens
  CDR3 for beta chain variable domain of TCR clone 329289 (TRBV28, TRBJ1-2)
CASSSHSIANYGYTF

SEQ ID NO: 658579 - protein, 12 aa, Homo sapiens
  CDR3 for alpha chain variable domain of TCR clone 329290 (TRAV16, TRAJ10)
CAFTGGGNKLTF

SEQ ID NO: 658580 - protein, 16 aa, Homo sapiens
  CDR3 for beta chain variable domain of TCR clone 329290 (TRBV7-2, TRBJ2-3)
CASSLVALYSTDTQYF

SEQ ID NO: 658581 - protein, 14 aa, Homo sapiens
  CDR3 for alpha chain variable domain of TCR clone 329291 (TRAV35, TRAJ50)
CAGHRKTSYDTLIF

SEQ ID NO: 658582 - protein, 13 aa, Homo sapiens
  CDR3 for beta chain variable domain of TCR clone 329291 (TRBV7-7, TRBJ2-3)
CASSLSRADTQDF

SEQ ID NO: 658583 - protein, 13 aa, Homo sapiens
  CDR3 for alpha chain variable domain of TCR clone 329292 (TRAV12-1, TRAJ7)
CVVNMRGNNRLAL

SEQ ID NO: 658584 - protein, 14 aa, Homo sapiens
  CDR3 for beta chain variable domain of TCR clone 329292 (TRBV7-2, TRBJ2-7)
CASSPKTSFYEQYF

SEQ ID NO: 658585 - protein, 11 aa, Homo sapiens
  CDR3 for alpha chain variable domain of TCR clone 329293 (TRAV3, TRAJ21)
CAVGNFNKFYF

SEQ ID NO: 658586 - protein, 15 aa, Homo sapiens
  CDR3 for beta chain variable domain of TCR clone 329293 (TRBV29-1, TRBJ2-1)
CSVEGGPASYNEQIF

SEQ ID NO: 658587 - protein, 16 aa, Homo sapiens
  CDR3 for alpha chain variable domain of TCR clone 329294 (TRAV30, TRAJ24)
CDTEIVDADSWGKFQF

SEQ ID NO: 658588 - protein, 13 aa, Homo sapiens
  CDR3 for beta chain variable domain of TCR clone 329294 (TRBV19, TRBJ2-7)
CASSKQGGYEQYF

SEQ ID NO: 658589 - protein, 14 aa, Homo sapiens
  CDR3 for alpha chain variable domain of TCR clone 329295 (TRAV4, TRAJ26)
CLVGPHNYGQNFVF

SEQ ID NO: 658590 - protein, 17 aa, Homo sapiens
  CDR3 for beta chain variable domain of TCR clone 329295 (TRBV20-1, TRBJ2-1)
CSASSSGLAGYYNEQFF

SEQ ID NO: 658591 - protein, 15 aa, Homo sapiens
  CDR3 for alpha chain variable domain of TCR clone 329296 (TRAV16, TRAJ42)
CALRRGGGSQGNLIF

SEQ ID NO: 658592 - protein, 17 aa, Homo sapiens
  CDR3 for beta chain variable domain of TCR clone 329296 (TRBV7-9, TRBJ2-7)
CASSWRGRWREAYEQYF

SEQ ID NO: 658593 - protein, 13 aa, Homo sapiens
  CDR3 for alpha chain variable domain of TCR clone 329297 (TRAV12-2, TRAJ20)
CAVFPSNDYKLSF

SEQ ID NO: 658594 - protein, 12 aa, Homo sapiens
  CDR3 for beta chain variable domain of TCR clone 329297 (TRBV14, TRBJ2-7)
CASSRLKGEQYF

SEQ ID NO: 658595 - protein, 13 aa, Homo sapiens
  CDR3 for alpha chain variable domain of TCR clone 329298 (TRAV8-3, TRAJ36)
CAVGATGANNLFF

SEQ ID NO: 658596 - protein, 15 aa, Homo sapiens
  CDR3 for beta chain variable domain of TCR clone 329298 (TRBV7-2, TRBJ1-2)
CTSSPRAGWNYGYTV

SEQ ID NO: 658597 - protein, 14 aa, Homo sapiens
  CDR3 for alpha chain variable domain of TCR clone 329299 (TRAV12-2, TRAJ13)
CDVKKTGGYQKVTF

SEQ ID NO: 658598 - protein, 13 aa, Homo sapiens
  CDR3 for beta chain variable domain of TCR clone 329299 (TRBV10-3, TRBJ2-7)
CASKLAVNYEQYF

SEQ ID NO: 658599 - protein, 16 aa, Homo sapiens
  CDR3 for alpha chain variable domain of TCR clone 329300 (TRAV27, TRAJ48)
TAAQPGDTGLYLPLTF

SEQ ID NO: 658600 - protein, 12 aa, Homo sapiens
  CDR3 for beta chain variable domain of TCR clone 329300 (TRBV7-2, TRBJ2-5)
CASSLYQETQYF

SEQ ID NO: 658601 - protein, 11 aa, Homo sapiens
  CDR3 for alpha chain variable domain of TCR clone 329301 (TRAV13-1, TRAJ6)
FATLGSYIPTF

SEQ ID NO: 658602 - protein, 13 aa, Homo sapiens
  CDR3 for beta chain variable domain of TCR clone 329301 (TRBV6-6, TRBJ2-1)
CASSLHQGDEQFF

SEQ ID NO: 658603 - protein, 16 aa, Homo sapiens
  CDR3 for alpha chain variable domain of TCR clone 329302 (TRAV12-3, TRAJ53)
CAMSPGSGGSNYKLTF

SEQ ID NO: 658604 - protein, 14 aa, Homo sapiens
  CDR3 for beta chain variable domain of TCR clone 329302 (TRBV18, TRBJ2-5)
CASSPPGHQETQYF

SEQ ID NO: 658605 - protein, 13 aa, Homo sapiens
  CDR3 for alpha chain variable domain of TCR clone 329303 (TRAV22, TRAJ48)
CAVERFGNERLTF

SEQ ID NO: 658606 - protein, 13 aa, Homo sapiens
  CDR3 for beta chain variable domain of TCR clone 329303 (TRBV20-1, TRBJ2-5)
CSARGDYQETQYF

SEQ ID NO: 658607 - protein, 16 aa, Homo sapiens
  CDR3 for alpha chain variable domain of TCR clone 329304 (TRAV3, TRAJ10)
CAVRDMRAGGGNKLTF

SEQ ID NO: 658608 - protein, 15 aa, Homo sapiens
  CDR3 for beta chain variable domain of TCR clone 329304 (TRBV28, TRBJ2-1)
CASSIIAGGRSEQFF

SEQ ID NO: 658609 - protein, 13 aa, Homo sapiens
  CDR3 for alpha chain variable domain of TCR clone 329305 (TRAV35, TRAJ42)
CAGFPGSQGNLNF

SEQ ID NO: 658610 - protein, 14 aa, Homo sapiens
  CDR3 for beta chain variable domain of TCR clone 329305 (TRBV25-1, TRBJ1-1)
CASTHLGGNTEAFF

SEQ ID NO: 658611 - protein, 14 aa, Homo sapiens
  CDR3 for alpha chain variable domain of TCR clone 329306 (TRAV1-2, TRAJ8)
CAVREDTGFQKLVV

SEQ ID NO: 658612 - protein, 15 aa, Homo sapiens
  CDR3 for beta chain variable domain of TCR clone 329306 (TRBV7-9, TRBJ1-4)
CASSARTGGNEKLFF

SEQ ID NO: 658613 - protein, 14 aa, Homo sapiens
  CDR3 for alpha chain variable domain of TCR clone 329307 (TRAV30, TRAJ33)
CGTVAPRSNYQLIW

SEQ ID NO: 658614 - protein, 14 aa, Homo sapiens
  CDR3 for beta chain variable domain of TCR clone 329307 (TRBV18, TRBJ1-1)
CASSPPTGRTEAFF

SEQ ID NO: 658615 - protein, 15 aa, Homo sapiens
  CDR3 for alpha chain variable domain of TCR clone 329308 (TRAV17, TRAJ10)
CATVLLTGGGNKLTF

SEQ ID NO: 658616 - protein, 14 aa, Homo sapiens
  CDR3 for beta chain variable domain of TCR clone 329308 (TRBV7-2, TRBJ2-7)
CASSPKTSFYEQYF

SEQ ID NO: 658617 - protein, 13 aa, Homo sapiens
  CDR3 for alpha chain variable domain of TCR clone 329309 (TRAV12-1, TRAJ40)
CVVPTLGTYKYIF

SEQ ID NO: 658618 - protein, 18 aa, Homo sapiens
  CDR3 for beta chain variable domain of TCR clone 329309 (TRBV7-6, TRBJ2-1)
CASSPRTSGMSSYNEQFF

SEQ ID NO: 658619 - protein, 14 aa, Homo sapiens
  CDR3 for alpha chain variable domain of TCR clone 329310 (TRAV26-1, TRAJ34)
CIVRVAYNTTKLIF

SEQ ID NO: 658620 - protein, 15 aa, Homo sapiens
  CDR3 for beta chain variable domain of TCR clone 329310 (TRBV20-1, TRBJ2-7)
CSARVPAAYFYEQYF

SEQ ID NO: 658621 - protein, 14 aa, Homo sapiens
  CDR3 for alpha chain variable domain of TCR clone 329311 (TRAV12-3, TRAJ58)
CAMSTENSGSRLTF

SEQ ID NO: 658622 - protein, 12 aa, Homo sapiens
  CDR3 for beta chain variable domain of TCR clone 329311 (TRBV7-8, TRBJ2-7)
CASSLGDREQYF

SEQ ID NO: 658623 - protein, 16 aa, Homo sapiens
  CDR3 for alpha chain variable domain of TCR clone 329312 (TRAV30, TRAJ24)
CGTEIVDADSGGKFQF

SEQ ID NO: 658624 - protein, 14 aa, Homo sapiens
  CDR3 for beta chain variable domain of TCR clone 329312 (TRBV19, TRBJ2-7)
CASNFRGTFTGMYF

SEQ ID NO: 658625 - protein, 16 aa, Homo sapiens
  CDR3 for alpha chain variable domain of TCR clone 329313 (TRAV27, TRAJ13)
CAGAKSDSGGYQNVTF

SEQ ID NO: 658626 - protein, 15 aa, Homo sapiens
  CDR3 for beta chain variable domain of TCR clone 329313 (TRBV3-1, TRBJ1-2)
CASSPTRLPEGGYTF

SEQ ID NO: 658627 - protein, 18 aa, Homo sapiens
  CDR3 for alpha chain variable domain of TCR clone 329314 (TRAV8-6, TRAJ52)
CAVSRANAVGTSYGKLTF

SEQ ID NO: 658628 - protein, 12 aa, Homo sapiens
  CDR3 for beta chain variable domain of TCR clone 329314 (TRBV14, TRBJ2-7)
CASSRLKGEQYF

SEQ ID NO: 658629 - protein, 15 aa, Homo sapiens
  CDR3 for alpha chain variable domain of TCR clone 329315 (TRAV8-3, TRAJ45)
CASSYSGGGADGLTF

SEQ ID NO: 658630 - protein, 15 aa, Homo sapiens
  CDR3 for beta chain variable domain of TCR clone 329315 (TRBV9, TRBJ2-1)
CASSVGSGFYNEQFF

SEQ ID NO: 658631 - protein, 23 aa, Homo sapiens
  CDR3 for alpha chain variable domain of TCR clone 329316 (TRAV26-1, TRAJ38)
CIADNAGNNHIQNPDHAVYQLRD

SEQ ID NO: 658632 - protein, 12 aa, Homo sapiens
  CDR3 for beta chain variable domain of TCR clone 329316 (TRBV11-2, TRBJ2-2)
CASSLGGGELFF

SEQ ID NO: 658633 - protein, 12 aa, Homo sapiens
  CDR3 for alpha chain variable domain of TCR clone 329317 (TRAV16, TRAJ49)
CALNEGGNQFYF

SEQ ID NO: 658634 - protein, 14 aa, Homo sapiens
  CDR3 for beta chain variable domain of TCR clone 329317 (TRBV7-9, TRBJ2-1)
CASRPTGLQNEQFF

SEQ ID NO: 658635 - protein, 14 aa, Homo sapiens
  CDR3 for alpha chain variable domain of TCR clone 329318 (TRAV12-3, TRAJ10)
SHLPLTGGGNELTF

SEQ ID NO: 658636 - protein, 12 aa, Homo sapiens
  CDR3 for beta chain variable domain of TCR clone 329318 (TRBV7-8, TRBJ2-7)
CASNLGDREQYF

SEQ ID NO: 658637 - protein, 13 aa, Homo sapiens
  CDR3 for alpha chain variable domain of TCR clone 329319 (TRAV12-3, TRAJ33)
CAMSVNSNYQLIW

SEQ ID NO: 658638 - protein, 16 aa, Homo sapiens
  CDR3 for beta chain variable domain of TCR clone 329319 (TRBV7-3, TRBJ2-3)
CPSSLSGYRPEDTQYF

SEQ ID NO: 658639 - protein, 18 aa, Homo sapiens
  CDR3 for alpha chain variable domain of TCR clone 329320 (TRAV21, TRAJ52)
CAVRPSPAGGTSYGKLKF

SEQ ID NO: 658640 - protein, 16 aa, Homo sapiens
  CDR3 for beta chain variable domain of TCR clone 329320 (TRBV7-3, TRBJ2-2)
CASSLKRGTLSGELFF

SEQ ID NO: 658641 - protein, 18 aa, Homo sapiens
  CDR3 for alpha chain variable domain of TCR clone 329321 (TRAV21, TRAJ52)
CAVRPSPAGGTSYGKLAF

SEQ ID NO: 658642 - protein, 17 aa, Homo sapiens
  CDR3 for beta chain variable domain of TCR clone 329321 (TRBV13, TRBJ2-3)
CASSLSRVAGGRNTRYF

SEQ ID NO: 658643 - protein, 11 aa, Homo sapiens
  CDR3 for alpha chain variable domain of TCR clone 329322 (TRAV23/DV6, TRAJ48)
CAPRWGGKLTF

SEQ ID NO: 658644 - protein, 13 aa, Homo sapiens
  CDR3 for beta chain variable domain of TCR clone 329322 (TRBV12-4, TRBJ2-5)
CASGPGTEETQYF

SEQ ID NO: 658645 - protein, 15 aa, Homo sapiens
  CDR3 for alpha chain variable domain of TCR clone 329323 (TRAV21, TRAJ57)
CAVRPTQGGSEKLVF

SEQ ID NO: 658646 - protein, 13 aa, Homo sapiens
  CDR3 for beta chain variable domain of TCR clone 329323 (TRBV7-9, TRBJ2-7)
CASSAGLQYGQYF

SEQ ID NO: 658647 - protein, 13 aa, Homo sapiens
  CDR3 for alpha chain variable domain of TCR clone 329324 (TRAV2, TRAJ40)
FSFFTSLTYKYIF

SEQ ID NO: 658648 - protein, 13 aa, Homo sapiens
  CDR3 for beta chain variable domain of TCR clone 329324 (TRBV12-4, TRBJ1-1)
CASSPGTGFEAFF

SEQ ID NO: 658649 - protein, 15 aa, Homo sapiens
  CDR3 for alpha chain variable domain of TCR clone 329325 (TRAV27, TRAJ38)
CAARRNAGKNRKLVW

SEQ ID NO: 658650 - protein, 11 aa, Homo sapiens
  CDR3 for beta chain variable domain of TCR clone 329325 (TRBV12-4, TRBJ2-2)
CASSSAGELFF

SEQ ID NO: 658651 - protein, 19 aa, Homo sapiens
  CDR3 for alpha chain variable domain of TCR clone 329326 (TRAV26-1, TRAJ28)
CIVRVAHAYSGAGSYHLTF

SEQ ID NO: 658652 - protein, 12 aa, Homo sapiens
  CDR3 for beta chain variable domain of TCR clone 329326 (TRBV27, TRBJ2-2)
CASKLFTGELFF

SEQ ID NO: 658653 - protein, 12 aa, Homo sapiens
  CDR3 for alpha chain variable domain of TCR clone 329327 (TRAV13-1, TRAJ27)
CAAHTNAGKSTF

SEQ ID NO: 658654 - protein, 17 aa, Homo sapiens
  CDR3 for beta chain variable domain of TCR clone 329327 (TRBV7-6, TRBJ2-5)
CASSSPQAGDPSETQYF

SEQ ID NO: 658655 - protein, 15 aa, Homo sapiens
  CDR3 for alpha chain variable domain of TCR clone 329328 (TRAV27, TRAJ38)
CAARRTAGNNRKLIW

SEQ ID NO: 658656 - protein, 13 aa, Homo sapiens
  CDR3 for beta chain variable domain of TCR clone 329328 (TRBV12-5, TRBJ2-3)
CASGERQSDTQYF

SEQ ID NO: 658657 - protein, 15 aa, Homo sapiens
  CDR3 for alpha chain variable domain of TCR clone 329329 (TRAV26-1, TRAJ48)
CIVRVGDFGNEKLPF

SEQ ID NO: 658658 - protein, 16 aa, Homo sapiens
  CDR3 for beta chain variable domain of TCR clone 329329 (TRBV4-1, TRBJ2-3)
CASSQRAGGLTDTQYF

SEQ ID NO: 658659 - protein, 15 aa, Homo sapiens
  CDR3 for alpha chain variable domain of TCR clone 329330 (TRAV2, TRAJ28)
CAVPYSGAGSYQLTF

SEQ ID NO: 658660 - protein, 17 aa, Homo sapiens
  CDR3 for beta chain variable domain of TCR clone 329330 (TRBV20-1, TRBJ2-4)
GSARDCDSGGRENMQYF

SEQ ID NO: 658661 - protein, 14 aa, Homo sapiens
  CDR3 for alpha chain variable domain of TCR clone 329331 (TRAV8-6, TRAJ12)
CAVKAADSSFKLIF

SEQ ID NO: 658662 - protein, 15 aa, Homo sapiens
  CDR3 for beta chain variable domain of TCR clone 329331 (TRBV5-1, TRBJ2-5)
CASSLGLAEQETQYF

SEQ ID NO: 658663 - protein, 11 aa, Homo sapiens
  CDR3 for alpha chain variable domain of TCR clone 329332 (TRAV12-1, TRAJ30)
CVLNCQDKIIF

SEQ ID NO: 658664 - protein, 12 aa, Homo sapiens
  CDR3 for beta chain variable domain of TCR clone 329332 (TRBV27, TRBJ2-2)
CASKLFTGELFF

SEQ ID NO: 658665 - protein, 14 aa, Homo sapiens
  CDR3 for alpha chain variable domain of TCR clone 329333 (TRAV17, TRAJ4)
CATAPLGGYNKLIF

SEQ ID NO: 658666 - protein, 13 aa, Homo sapiens
  CDR3 for beta chain variable domain of TCR clone 329333 (TRBV12-4, TRBJ1-3)
CASSLASGNTIYV

SEQ ID NO: 658667 - protein, 15 aa, Homo sapiens
  CDR3 for alpha chain variable domain of TCR clone 329334 (TRAV3, TRAJ30)
CAVRDEYGRDDKIIF

SEQ ID NO: 658668 - protein, 16 aa, Homo sapiens
  CDR3 for beta chain variable domain of TCR clone 329334 (TRBV5-1, TRBJ2-5)
CASSLANHRGRVTQYF

SEQ ID NO: 658669 - protein, 13 aa, Homo sapiens
  CDR3 for alpha chain variable domain of TCR clone 329335 (TRAV8-3, TRAJ12)
CAVGSGSSYKLIS

SEQ ID NO: 658670 - protein, 13 aa, Homo sapiens
  CDR3 for beta chain variable domain of TCR clone 329335 (TRBV7-9, TRBJ1-2)
CASSPRGLSNTMA

SEQ ID NO: 658671 - protein, 13 aa, Homo sapiens
  CDR3 for alpha chain variable domain of TCR clone 329336 (TRAV8-3, TRAJ48)
CAVVPFGNEKLTF

SEQ ID NO: 658672 - protein, 19 aa, Homo sapiens
  CDR3 for beta chain variable domain of TCR clone 329336 (TRBV25-1, TRBJ2-2)
WAILVYRVDRGRKTGELFF

SEQ ID NO: 658673 - protein, 12 aa, Homo sapiens
  CDR3 for alpha chain variable domain of TCR clone 329337 (TRAV3, TRAJ34)
CAVLGNTDKLIF

SEQ ID NO: 658674 - protein, 13 aa, Homo sapiens
  CDR3 for beta chain variable domain of TCR clone 329337 (TRBV19, TRBJ2-1)
CASSIGAGNEQFF

SEQ ID NO: 658675 - protein, 15 aa, Homo sapiens
  CDR3 for alpha chain variable domain of TCR clone 329338 (TRAV27, TRAJ38)
CAARRNAGNNRKLIW

SEQ ID NO: 658676 - protein, 15 aa, Homo sapiens
  CDR3 for beta chain variable domain of TCR clone 329338 (TRBV7-2, TRBJ2-3)
CASSSTGLETDTQYF

SEQ ID NO: 658677 - protein, 15 aa, Homo sapiens
  CDR3 for alpha chain variable domain of TCR clone 329339 (TRAV29/DV5, TRAJ29)
CAASEGSSGNTPLAF

SEQ ID NO: 658678 - protein, 17 aa, Homo sapiens
  CDR3 for beta chain variable domain of TCR clone 329339 (TRBV4-1, TRBJ1-4)
CASSQEGPRGVEEKLFF

SEQ ID NO: 658679 - protein, 12 aa, Homo sapiens
  CDR3 for alpha chain variable domain of TCR clone 329340 (TRAV16, TRAJ56)
CAPTGANSKLTF

SEQ ID NO: 658680 - protein, 17 aa, Homo sapiens
  CDR3 for beta chain variable domain of TCR clone 329340 (TRBV27, TRBJ2-6)
CASSLTGFASGANALTF

SEQ ID NO: 658681 - protein, 15 aa, Homo sapiens
  CDR3 for alpha chain variable domain of TCR clone 329341 (TRAV3, TRAJ22)
CAVRDRGGSARQLTF

SEQ ID NO: 658682 - protein, 16 aa, Homo sapiens
  CDR3 for beta chain variable domain of TCR clone 329341 (TRBV5-4, TRBJ2-3)
CASQQPGAGGADTQHF

SEQ ID NO: 658683 - protein, 13 aa, Homo sapiens
  CDR3 for alpha chain variable domain of TCR clone 329342 (TRAV12-1, TRAJ26)
CEVRRNYGQNFVF

SEQ ID NO: 658684 - protein, 15 aa, Homo sapiens
  CDR3 for beta chain variable domain of TCR clone 329342 (TRBV28, TRBJ2-1)
CASSIIAGGRSEQFF

SEQ ID NO: 658685 - protein, 16 aa, Homo sapiens
  CDR3 for alpha chain variable domain of TCR clone 329343 (TRAV26-1, TRAJ23)
CIVRVHPYNQGGKLIF

SEQ ID NO: 658686 - protein, 15 aa, Homo sapiens
  CDR3 for beta chain variable domain of TCR clone 329343 (TRBV11-3, TRBJ2-3)
CASLKDGREGDTQYF

SEQ ID NO: 658687 - protein, 13 aa, Homo sapiens
  CDR3 for alpha chain variable domain of TCR clone 329344 (TRAV3, TRAJ36)
CAVGATGANNLFF

SEQ ID NO: 658688 - protein, 15 aa, Homo sapiens
  CDR3 for beta chain variable domain of TCR clone 329344 (TRBV7-2, TRBJ1-2)
CASSPRAGWNYGYTF

SEQ ID NO: 658689 - protein, 18 aa, Homo sapiens
  CDR3 for alpha chain variable domain of TCR clone 329345 (TRAV26-1, TRAJ44)
CIVRVAGGGISTASKLTF

SEQ ID NO: 658690 - protein, 16 aa, Homo sapiens
  CDR3 for beta chain variable domain of TCR clone 329345 (TRBV20-1, TRBJ2-3)
CSVIFPIGGLTDTQYF

SEQ ID NO: 658691 - protein, 15 aa, Homo sapiens
  CDR3 for alpha chain variable domain of TCR clone 329346 (TRAV12-2, TRAJ5)
CAVNGKDTGRRALTF

SEQ ID NO: 658692 - protein, 15 aa, Homo sapiens
  CDR3 for beta chain variable domain of TCR clone 329346 (TRBV5-4, TRBJ1-3)
CASSLDMTPGNTIYF

SEQ ID NO: 658693 - protein, 14 aa, Homo sapiens
  CDR3 for alpha chain variable domain of TCR clone 329347 (TRAV1-2, TRAJ16)
CAVNRFSHGQKLLF

SEQ ID NO: 658694 - protein, 14 aa, Homo sapiens
  CDR3 for beta chain variable domain of TCR clone 329347 (TRBV19, TRBJ2-2)
CASSTLHRSGELFF

SEQ ID NO: 658695 - protein, 18 aa, Homo sapiens
  CDR3 for alpha chain variable domain of TCR clone 329348 (TRAV9-2, TRAJ52)
CALSRLNAGGTSYGKLTF

SEQ ID NO: 658696 - protein, 13 aa, Homo sapiens
  CDR3 for beta chain variable domain of TCR clone 329348 (TRBV7-9, TRBJ1-2)
CASSLKQNYGYTF

SEQ ID NO: 658697 - protein, 13 aa, Homo sapiens
  CDR3 for alpha chain variable domain of TCR clone 329349 (TRAV12-3, TRAJ13)
CAMGTGGYQKGTF

SEQ ID NO: 658698 - protein, 16 aa, Homo sapiens
  CDR3 for beta chain variable domain of TCR clone 329349 (TRBV9, TRBJ2-1)
CASSVGGGGNYNEQFF

SEQ ID NO: 658699 - protein, 17 aa, Homo sapiens
  CDR3 for alpha chain variable domain of TCR clone 329350 (TRAV26-1, TRAJ28)
CIVRLAYSGAGSYQLTF

SEQ ID NO: 658700 - protein, 15 aa, Homo sapiens
  CDR3 for beta chain variable domain of TCR clone 329350 (TRBV6-1, TRBJ2-3)
CASSERGGITDTQYF

SEQ ID NO: 658701 - protein, 22 aa, Homo sapiens
  CDR3 for alpha chain variable domain of TCR clone 329351 (TRAV21, )
CAVMQDAGNNHIQNPDPAVYQL

SEQ ID NO: 658702 - protein, 16 aa, Homo sapiens
  CDR3 for beta chain variable domain of TCR clone 329351 (TRBV4-2, TRBJ1-1)
CASRPLDGGGDTEAFF

SEQ ID NO: 658703 - protein, 14 aa, Homo sapiens
  CDR3 for alpha chain variable domain of TCR clone 329352 (TRAV1-2, TRAJ8)
CAVREDTGFQKLVF

SEQ ID NO: 658704 - protein, 15 aa, Homo sapiens
  CDR3 for beta chain variable domain of TCR clone 329352 (TRBV15, TRBJ1-4)
CATSRDMGSYEKLFF

SEQ ID NO: 658705 - protein, 17 aa, Homo sapiens
  CDR3 for alpha chain variable domain of TCR clone 329353 (TRAV17, TRAJ7)
CATLGRHAFGKGNQVVV

SEQ ID NO: 658706 - protein, 13 aa, Homo sapiens
  CDR3 for beta chain variable domain of TCR clone 329353 (TRBV12-4, TRBJ2-7)
CASSLERVREQYF

SEQ ID NO: 658707 - protein, 12 aa, Homo sapiens
  CDR3 for alpha chain variable domain of TCR clone 329354 (TRAV4, TRAJ21)
CLVGDNFNKFYF

SEQ ID NO: 658708 - protein, 15 aa, Homo sapiens
  CDR3 for beta chain variable domain of TCR clone 329354 (TRBV7-9, TRBJ1-4)
CASSATGGNNEKLFF

SEQ ID NO: 658709 - protein, 12 aa, Homo sapiens
  CDR3 for alpha chain variable domain of TCR clone 329355 (TRAV1-2, TRAJ33)
CAALDSNYQLIW

SEQ ID NO: 658710 - protein, 13 aa, Homo sapiens
  CDR3 for beta chain variable domain of TCR clone 329355 (TRBV27, TRBJ2-3)
CASSWGRTDTQYF

SEQ ID NO: 658711 - protein, 15 aa, Homo sapiens
  CDR3 for alpha chain variable domain of TCR clone 329356 (TRAV14/DV4, TRAJ12)
CAMREGRDSSYKLIF

SEQ ID NO: 658712 - protein, 13 aa, Homo sapiens
  CDR3 for beta chain variable domain of TCR clone 329356 (TRBV10-3, TRBJ2-7)
CASKLAVNYEQYF

SEQ ID NO: 658713 - protein, 14 aa, Homo sapiens
  CDR3 for alpha chain variable domain of TCR clone 329357 (TRAV29/DV5, TRAJ36)
CAARRKTGANNLFL

SEQ ID NO: 658714 - protein, 15 aa, Homo sapiens
  CDR3 for beta chain variable domain of TCR clone 329357 (TRBV9, TRBJ1-6)
CASSVAGTGDSPLHF

SEQ ID NO: 658715 - protein, 15 aa, Homo sapiens
  CDR3 for alpha chain variable domain of TCR clone 329358 (TRAV14/DV4, TRAJ12)
CAMREERDSSCKLIF

SEQ ID NO: 658716 - protein, 16 aa, Homo sapiens
  CDR3 for beta chain variable domain of TCR clone 329358 (TRBV11-2, TRBJ1-2)
CASSLDRGGNNYGYTF

SEQ ID NO: 658717 - protein, 15 aa, Homo sapiens
  CDR3 for alpha chain variable domain of TCR clone 329359 (TRAV8-3, TRAJ40)
CAAPSLGSGTYKYIF

SEQ ID NO: 658718 - protein, 14 aa, Homo sapiens
  CDR3 for beta chain variable domain of TCR clone 329359 (TRBV7-3, TRBJ2-1)
CASSLAGGTNEQFF

SEQ ID NO: 658719 - protein, 12 aa, Homo sapiens
  CDR3 for alpha chain variable domain of TCR clone 329360 (TRAV13-1, TRAJ21)
CAAKEGFNKFYF

SEQ ID NO: 658720 - protein, 20 aa, Homo sapiens
  CDR3 for beta chain variable domain of TCR clone 329360 (TRBV7-8, TRBJ2-2)
CASSHLFPGPTMHITGELFF

SEQ ID NO: 658721 - protein, 20 aa, Homo sapiens
  CDR3 for alpha chain variable domain of TCR clone 329361 (TRAV12-3, TRAJ41)
SLFIRDSQPSDSATPEALNF

SEQ ID NO: 658722 - protein, 15 aa, Homo sapiens
  CDR3 for beta chain variable domain of TCR clone 329361 (TRBV5-1, TRBJ2-7)
CARSLDLTSSYEQYF

SEQ ID NO: 658723 - protein, 15 aa, Homo sapiens
  CDR3 for alpha chain variable domain of TCR clone 329362 (TRAV1-2, TRAJ28)
CAVRNSGAGSYQLTF

SEQ ID NO: 658724 - protein, 14 aa, Homo sapiens
  CDR3 for beta chain variable domain of TCR clone 329362 (TRBV13, TRBJ2-5)
CASSLGPRGETQYF

SEQ ID NO: 658725 - protein, 14 aa, Homo sapiens
  CDR3 for alpha chain variable domain of TCR clone 329363 (TRAV12-3, TRAJ10)
SHLPLTGGGNKLTF

SEQ ID NO: 658726 - protein, 17 aa, Homo sapiens
  CDR3 for beta chain variable domain of TCR clone 329363 (TRBV28, TRBJ2-1)
CASSSARQALTYNEQFF

SEQ ID NO: 658727 - protein, 16 aa, Homo sapiens
  CDR3 for alpha chain variable domain of TCR clone 329364 (TRAV8-3, TRAJ44)
CAVGTLMTGTASKLTF

SEQ ID NO: 658728 - protein, 16 aa, Homo sapiens
  CDR3 for beta chain variable domain of TCR clone 329364 (TRBV19, TRBJ2-1)
CASSKAGPSSYNEQFF

SEQ ID NO: 658729 - protein, 14 aa, Homo sapiens
  CDR3 for alpha chain variable domain of TCR clone 329365 (TRAV1-2, TRAJ16)
CAVNRFSDGQKPLF

SEQ ID NO: 658730 - protein, 15 aa, Homo sapiens
  CDR3 for beta chain variable domain of TCR clone 329365 (TRBV19, TRBJ1-5)
CASSIVWADNQHQHF

SEQ ID NO: 658731 - protein, 11 aa, Homo sapiens
  CDR3 for alpha chain variable domain of TCR clone 329366 (TRAV2, TRAJ13)
CASEGYQKVTF

SEQ ID NO: 658732 - protein, 11 aa, Homo sapiens
  CDR3 for beta chain variable domain of TCR clone 329366 (TRBV6-3, TRBJ2-3)
CATGQADTQYF

SEQ ID NO: 658733 - protein, 15 aa, Homo sapiens
  CDR3 for alpha chain variable domain of TCR clone 329367 (TRAV25, TRAJ53)
CPTSNSGGSNYKLTF

SEQ ID NO: 658734 - protein, 13 aa, Homo sapiens
  CDR3 for beta chain variable domain of TCR clone 329367 (TRBV11-2, TRBJ2-3)
CSSRLARTDTQYF

SEQ ID NO: 658735 - protein, 13 aa, Homo sapiens
  CDR3 for alpha chain variable domain of TCR clone 329368 (TRAV8-3, TRAJ40)
CAVGAQYLRNLQI

SEQ ID NO: 658736 - protein, 14 aa, Homo sapiens
  CDR3 for beta chain variable domain of TCR clone 329368 (TRBV4-2, TRBJ1-5)
CASSRDRGNQPQHF

SEQ ID NO: 658737 - protein, 16 aa, Homo sapiens
  CDR3 for alpha chain variable domain of TCR clone 329369 (TRAV26-1, TRAJ58)
IASSESGETSGSRLTF

SEQ ID NO: 658738 - protein, 17 aa, Homo sapiens
  CDR3 for beta chain variable domain of TCR clone 329369 (TRBV4-2, TRBJ1-1)
CASTQFGGGSGNTEAFF

SEQ ID NO: 658739 - protein, 21 aa, Homo sapiens
  CDR3 for alpha chain variable domain of TCR clone 329370 (TRAV13-1, TRAJ6)
CEPREEEATYLHLEEEPALLF

SEQ ID NO: 658740 - protein, 15 aa, Homo sapiens
  CDR3 for beta chain variable domain of TCR clone 329370 (TRBV25-1, TRBJ2-5)
CASSDTGTHQETQYF

SEQ ID NO: 658741 - protein, 14 aa, Homo sapiens
  CDR3 for alpha chain variable domain of TCR clone 329371 (TRAV12-2, TRAJ13)
CAVKRAGGYQKVTL

SEQ ID NO: 658742 - protein, 15 aa, Homo sapiens
  CDR3 for beta chain variable domain of TCR clone 329371 (TRBV27, TRBJ2-1)
CASSNGGGSSNEQFF

SEQ ID NO: 658743 - protein, 16 aa, Homo sapiens
  CDR3 for alpha chain variable domain of TCR clone 329372 (TRAV1-2, TRAJ10)
CAVRGVLTGGGNKLTF

SEQ ID NO: 658744 - protein, 13 aa, Homo sapiens
  CDR3 for beta chain variable domain of TCR clone 329372 (TRBV20-1, TRBJ1-6)
CSAPLGVGSPLHC

SEQ ID NO: 658745 - protein, 19 aa, Homo sapiens
  CDR3 for alpha chain variable domain of TCR clone 329373 (TRAV1-2, TRAJ26)
CLLPLCCERPDNYGQNFVF

SEQ ID NO: 658746 - protein, 14 aa, Homo sapiens
  CDR3 for beta chain variable domain of TCR clone 329373 (TRBV11-2, TRBJ1-5)
CASSLDRGRQPQHF

SEQ ID NO: 658747 - protein, 13 aa, Homo sapiens
  CDR3 for alpha chain variable domain of TCR clone 329374 (TRAV21, TRAJ37)
CAVSSGNTGKLIF

SEQ ID NO: 658748 - protein, 15 aa, Homo sapiens
  CDR3 for beta chain variable domain of TCR clone 329374 (TRBV28, TRBJ1-3)
CASSMGWASGNTIYF

SEQ ID NO: 658749 - protein, 14 aa, Homo sapiens
  CDR3 for alpha chain variable domain of TCR clone 329375 (TRAV25, TRAJ6)
CAGRESGGSYIPTF

SEQ ID NO: 658750 - protein, 14 aa, Homo sapiens
  CDR3 for beta chain variable domain of TCR clone 329375 (TRBV7-3, TRBJ2-1)
CASSLAGGTNEQFF

SEQ ID NO: 658751 - protein, 15 aa, Homo sapiens
  CDR3 for alpha chain variable domain of TCR clone 329376 (TRAV35, TRAJ23)
SAGPLGNNQGGKLIF

SEQ ID NO: 658752 - protein, 14 aa, Homo sapiens
  CDR3 for beta chain variable domain of TCR clone 329376 (TRBV7-9, TRBJ1-1)
CASTPLQSYTEAFF

SEQ ID NO: 658753 - protein, 14 aa, Homo sapiens
  CDR3 for alpha chain variable domain of TCR clone 329377 (TRAV12-2, TRAJ53)
CAVKGGGSNYKLTF

SEQ ID NO: 658754 - protein, 14 aa, Homo sapiens
  CDR3 for beta chain variable domain of TCR clone 329377 (TRBV19, TRBJ2-2)
CASSGQGIAGELFF

SEQ ID NO: 658755 - protein, 15 aa, Homo sapiens
  CDR3 for alpha chain variable domain of TCR clone 329378 (TRAV26-2, TRAJ13)
YILRDLSGGYQKVTF

SEQ ID NO: 658756 - protein, 11 aa, Homo sapiens
  CDR3 for beta chain variable domain of TCR clone 329378 (TRBV7-9, TRBJ2-5)
CASSLSATQYF

SEQ ID NO: 658757 - protein, 14 aa, Homo sapiens
  CDR3 for alpha chain variable domain of TCR clone 329379 (TRAV35, TRAJ10)
CAGILTGGGNKLTF

SEQ ID NO: 658758 - protein, 15 aa, Homo sapiens
  CDR3 for beta chain variable domain of TCR clone 329379 (TRBV7-3, TRBJ2-1)
CASSPTGGGEVEQFF

SEQ ID NO: 658759 - protein, 14 aa, Homo sapiens
  CDR3 for alpha chain variable domain of TCR clone 329380 (TRAV12-2, TRAJ45)
CAVNIGGGSDGLTF

SEQ ID NO: 658760 - protein, 13 aa, Homo sapiens
  CDR3 for beta chain variable domain of TCR clone 329380 (TRBV7-2, TRBJ2-1)
CASSLGVYNEQFF

SEQ ID NO: 658761 - protein, 13 aa, Homo sapiens
  CDR3 for alpha chain variable domain of TCR clone 329381 (TRAV12-1, TRAJ16)
CVVNGPDGQKLLF

SEQ ID NO: 658762 - protein, 16 aa, Homo sapiens
  CDR3 for beta chain variable domain of TCR clone 329381 (TRBV20-1, TRBJ2-6)
CSAREGPGVGANVLTF

SEQ ID NO: 658763 - protein, 18 aa, Homo sapiens
  CDR3 for alpha chain variable domain of TCR clone 329382 (TRAV8-4, TRAJ52)
CAVTRANAGGTSYGKLTF

SEQ ID NO: 658764 - protein, 13 aa, Homo sapiens
  CDR3 for beta chain variable domain of TCR clone 329382 (TRBV7-3, TRBJ2-5)
CASSFRGGETQYF

SEQ ID NO: 658765 - protein, 14 aa, Homo sapiens
  CDR3 for alpha chain variable domain of TCR clone 329383 (TRAV3, TRAJ9)
CAVRLNTGGFKTIF

SEQ ID NO: 658766 - protein, 16 aa, Homo sapiens
  CDR3 for beta chain variable domain of TCR clone 329383 (TRBV12-5, TRBJ2-5)
CASGPRTSGNQETQYL

SEQ ID NO: 658767 - protein, 15 aa, Homo sapiens
  CDR3 for alpha chain variable domain of TCR clone 329384 (TRAV27, TRAJ38)
YAARRNAGNNRKLIW

SEQ ID NO: 658768 - protein, 13 aa, Homo sapiens
  CDR3 for beta chain variable domain of TCR clone 329384 (TRBV12-5, TRBJ2-3)
CARGDRQSDTQYF

SEQ ID NO: 658769 - protein, 12 aa, Homo sapiens
  CDR3 for alpha chain variable domain of TCR clone 329385 (TRAV3, TRAJ31)
CAVRDGNARLMF

SEQ ID NO: 658770 - protein, 14 aa, Homo sapiens
  CDR3 for beta chain variable domain of TCR clone 329385 (TRBV11-2, TRBJ2-5)
CASRPLAGRETQYF

SEQ ID NO: 658771 - protein, 14 aa, Homo sapiens
  CDR3 for alpha chain variable domain of TCR clone 329386 (TRAV20, TRAJ44)
CAVHDTGTASKLTF

SEQ ID NO: 658772 - protein, 13 aa, Homo sapiens
  CDR3 for beta chain variable domain of TCR clone 329386 (TRBV29-1, TRBJ1-3)
CSAGTGRGNTIYF

SEQ ID NO: 658773 - protein, 17 aa, Homo sapiens
  CDR3 for alpha chain variable domain of TCR clone 329387 (TRAV23/DV6, TRAJ57)
CAASSTLSQGGSEKLVF

SEQ ID NO: 658774 - protein, 14 aa, Homo sapiens
  CDR3 for beta chain variable domain of TCR clone 329387 (TRBV25-1, TRBJ1-1)
CASTHLGGSTGAFF

SEQ ID NO: 658775 - protein, 13 aa, Homo sapiens
  CDR3 for alpha chain variable domain of TCR clone 329388 (TRAV26-1, TRAJ40)
CIVRVEGTYNYIF

SEQ ID NO: 658776 - protein, 15 aa, Homo sapiens
  CDR3 for beta chain variable domain of TCR clone 329388 (TRBV12-4, TRBJ1-2)
CASSLAHRDGQAYTF

SEQ ID NO: 658777 - protein, 12 aa, Homo sapiens
  CDR3 for alpha chain variable domain of TCR clone 329389 (TRAV13-2, TRAJ23)
CAERHRGGKLTF

SEQ ID NO: 658778 - protein, 17 aa, Homo sapiens
  CDR3 for beta chain variable domain of TCR clone 329389 (TRBV7-8, TRBJ2-5)
CASSLASGGRFQETQYF

SEQ ID NO: 658779 - protein, 16 aa, Homo sapiens
  CDR3 for alpha chain variable domain of TCR clone 329390 (TRAV12-2, TRAJ5)
CAVTRGSGTGRRALTF

SEQ ID NO: 658780 - protein, 15 aa, Homo sapiens
  CDR3 for beta chain variable domain of TCR clone 329390 (TRBV9, TRBJ2-1)
CDSSVGTGELNEQFF

SEQ ID NO: 658781 - protein, 15 aa, Homo sapiens
  CDR3 for alpha chain variable domain of TCR clone 329391 (TRAV27, TRAJ45)
CAGAGSGGGADGLTF

SEQ ID NO: 658782 - protein, 13 aa, Homo sapiens
  CDR3 for beta chain variable domain of TCR clone 329391 (TRBV7-9, TRBJ1-2)
CASSLKQNYGYTF

SEQ ID NO: 658783 - protein, 16 aa, Homo sapiens
  CDR3 for alpha chain variable domain of TCR clone 329392 (TRAV16, TRAJ52)
CALSGVGGTSYGKLTF

SEQ ID NO: 658784 - protein, 14 aa, Homo sapiens
  CDR3 for beta chain variable domain of TCR clone 329392 (TRBV19, TRBJ1-2)
CASSLQGEAYGYTF

SEQ ID NO: 658785 - protein, 12 aa, Homo sapiens
  CDR3 for alpha chain variable domain of TCR clone 329393 (TRAV20, TRAJ39)
CAVGNAGNMLTF

SEQ ID NO: 658786 - protein, 15 aa, Homo sapiens
  CDR3 for beta chain variable domain of TCR clone 329393 (TRBV2, TRBJ2-7)
CASSEGLARSYEQYF

SEQ ID NO: 658787 - protein, 13 aa, Homo sapiens
  CDR3 for alpha chain variable domain of TCR clone 329394 (TRAV1-2, TRAJ9)
CAALNTGGFKTIF

SEQ ID NO: 658788 - protein, 14 aa, Homo sapiens
  CDR3 for beta chain variable domain of TCR clone 329394 (TRBV13, TRBJ2-3)
CASSSRSPTDTQYF

SEQ ID NO: 658789 - protein, 12 aa, Homo sapiens
  CDR3 for alpha chain variable domain of TCR clone 329395 (TRAV20, TRAJ54)
CAVQEGAQKLVF

SEQ ID NO: 658790 - protein, 17 aa, Homo sapiens
  CDR3 for beta chain variable domain of TCR clone 329395 (TRBV13, TRBJ2-3)
CASSRSRVAGGRNTQYF

SEQ ID NO: 658791 - protein, 15 aa, Homo sapiens
  CDR3 for alpha chain variable domain of TCR clone 329396 (TRAV21, TRAJ38)
CAVRQDAVNNRKLIW

SEQ ID NO: 658792 - protein, 16 aa, Homo sapiens
  CDR3 for beta chain variable domain of TCR clone 329396 (TRBV4-2, TRBJ1-1)
CASRPLDGGGDTEAFF

SEQ ID NO: 658793 - protein, 14 aa, Homo sapiens
  CDR3 for alpha chain variable domain of TCR clone 329397 (TRAV2, TRAJ9)
CAVEDRSGGYKTIF

SEQ ID NO: 658794 - protein, 18 aa, Homo sapiens
  CDR3 for beta chain variable domain of TCR clone 329397 (TRBV20-1, TRBJ2-5)
CSQTGDSGRLGGKETQYF

SEQ ID NO: 658795 - protein, 14 aa, Homo sapiens
  CDR3 for alpha chain variable domain of TCR clone 329398 (TRAV1-2, TRAJ16)
CAVNRFSDGLKLLF

SEQ ID NO: 658796 - protein, 14 aa, Homo sapiens
  CDR3 for beta chain variable domain of TCR clone 329398 (TRBV12-4, TRBJ2-3)
CASSGQGSTDTQYF

SEQ ID NO: 658797 - protein, 15 aa, Homo sapiens
  CDR3 for alpha chain variable domain of TCR clone 329399 (TRAV8-4, TRAJ3)
CAVTGENLVQQCFQD

SEQ ID NO: 658798 - protein, 15 aa, Homo sapiens
  CDR3 for beta chain variable domain of TCR clone 329399 (TRBV28, TRBJ1-4)
CASSVSGSGLEKLFF

SEQ ID NO: 658799 - protein, 12 aa, Homo sapiens
  CDR3 for alpha chain variable domain of TCR clone 329400 (TRAV12-1, TRAJ40)
CVVCSGTYKYIF

SEQ ID NO: 658800 - protein, 18 aa, Homo sapiens
  CDR3 for beta chain variable domain of TCR clone 329400 (TRBV11-2, TRBJ2-3)
CASSVGGASRGAPNTQYF

SEQ ID NO: 658801 - protein, 18 aa, Homo sapiens
  CDR3 for alpha chain variable domain of TCR clone 329401 (TRAV12-3, TRAJ52)
CAMSVGGAGGTSYGKLTF

SEQ ID NO: 658802 - protein, 17 aa, Homo sapiens
  CDR3 for beta chain variable domain of TCR clone 329401 (TRBV13, TRBJ2-3)
GASSLSRVAGGGNTQYF

SEQ ID NO: 658803 - protein, 15 aa, Homo sapiens
  CDR3 for alpha chain variable domain of TCR clone 329402 (TRAV12-1, TRAJ44)
CVADLPTGTASKLTF

SEQ ID NO: 658804 - protein, 14 aa, Homo sapiens
  CDR3 for beta chain variable domain of TCR clone 329402 (TRBV6-1, TRBJ1-3)
CASVQGGGGNTMYF

SEQ ID NO: 658805 - protein, 12 aa, Homo sapiens
  CDR3 for alpha chain variable domain of TCR clone 329403 (TRAV17, TRAJ12)
CATLRSSYKLIF

SEQ ID NO: 658806 - protein, 16 aa, Homo sapiens
  CDR3 for beta chain variable domain of TCR clone 329403 (TRBV28, TRBJ2-7)
CASSLCVETGGPEQYF

SEQ ID NO: 658807 - protein, 13 aa, Homo sapiens
  CDR3 for alpha chain variable domain of TCR clone 329404 (TRAV21, TRAJ37)
CAVSSGNTGTLIF

SEQ ID NO: 658808 - protein, 15 aa, Homo sapiens
  CDR3 for beta chain variable domain of TCR clone 329404 (TRBV12-4, TRBJ1-2)
CASSFVDRGNYGYTF

SEQ ID NO: 658809 - protein, 14 aa, Homo sapiens
  CDR3 for alpha chain variable domain of TCR clone 329405 (TRAV17, TRAJ17)
CATDARAAGNKLTF

SEQ ID NO: 658810 - protein, 17 aa, Homo sapiens
  CDR3 for beta chain variable domain of TCR clone 329405 (TRBV19, TRBJ1-1)
CASSIAGRGLMNTEAFF

SEQ ID NO: 658811 - protein, 14 aa, Homo sapiens
  CDR3 for alpha chain variable domain of TCR clone 329406 (TRAV13-1, TRAJ10)
CAAKEPGGGNKLTF

SEQ ID NO: 658812 - protein, 14 aa, Homo sapiens
  CDR3 for beta chain variable domain of TCR clone 329406 (TRBV20-1, TRBJ1-1)
CRAQTRIGGTEAFF

SEQ ID NO: 658813 - protein, 15 aa, Homo sapiens
  CDR3 for alpha chain variable domain of TCR clone 329407 (TRAV35, TRAJ42)
CAGQGYGGIQGNLIF

SEQ ID NO: 658814 - protein, 13 aa, Homo sapiens
  CDR3 for beta chain variable domain of TCR clone 329407 (TRBV7-2, TRBJ1-1)
CASSLVQGAEAFF

SEQ ID NO: 658815 - protein, 15 aa, Homo sapiens
  CDR3 for alpha chain variable domain of TCR clone 329408 (TRAV26-1, TRAJ24)
CIVREDTDSWGKLQF

SEQ ID NO: 658816 - protein, 15 aa, Homo sapiens
  CDR3 for beta chain variable domain of TCR clone 329408 (TRBV5-1, TRBJ2-2)
CASSSQGGNTGELFF

SEQ ID NO: 658817 - protein, 13 aa, Homo sapiens
  CDR3 for alpha chain variable domain of TCR clone 329409 (TRAV36/DV7, TRAJ37)
CAVFSSNTGKLIF

SEQ ID NO: 658818 - protein, 15 aa, Homo sapiens
  CDR3 for beta chain variable domain of TCR clone 329409 (TRBV12-4, TRBJ2-5)
CQQFFVRGRKETQYF

SEQ ID NO: 658819 - protein, 14 aa, Homo sapiens
  CDR3 for alpha chain variable domain of TCR clone 329410 (TRAV16, TRAJ39)
CALSKNNAGNMLTF

SEQ ID NO: 658820 - protein, 16 aa, Homo sapiens
  CDR3 for beta chain variable domain of TCR clone 329410 (TRBV6-6, TRBJ2-1)
RASSYSFSGSYNEQFF

SEQ ID NO: 658821 - protein, 16 aa, Homo sapiens
  CDR3 for alpha chain variable domain of TCR clone 329411 (TRAV4, TRAJ22)
CLVGDLYSGSARQLTF

SEQ ID NO: 658822 - protein, 13 aa, Homo sapiens
  CDR3 for beta chain variable domain of TCR clone 329411 (TRBV10-3, TRBJ1-2)
CAISERDSYGYTF

SEQ ID NO: 658823 - protein, 15 aa, Homo sapiens
  CDR3 for alpha chain variable domain of TCR clone 329412 (TRAV12-3, TRAJ6)
CAMSATTGGSYIPTF

SEQ ID NO: 658824 - protein, 16 aa, Homo sapiens
  CDR3 for beta chain variable domain of TCR clone 329412 (TRBV9, TRBJ2-7)
CASSAGPDRSPYEQYF

SEQ ID NO: 658825 - protein, 14 aa, Homo sapiens
  CDR3 for alpha chain variable domain of TCR clone 329413 (TRAV4, TRAJ17)
CLVGGKAAGNKLTF

SEQ ID NO: 658826 - protein, 19 aa, Homo sapiens
  CDR3 for beta chain variable domain of TCR clone 329413 (TRBV4-3, TRBJ2-1)
CASSQEVVSSGVAAGEQFF

SEQ ID NO: 658827 - protein, 14 aa, Homo sapiens
  CDR3 for alpha chain variable domain of TCR clone 329414 (TRAV3, TRAJ22)
CAVRDYGSARQLTF

SEQ ID NO: 658828 - protein, 13 aa, Homo sapiens
  CDR3 for beta chain variable domain of TCR clone 329414 (TRBV11-2, TRBJ2-5)
CASGHGAKETQYC

SEQ ID NO: 658829 - protein, 14 aa, Homo sapiens
  CDR3 for alpha chain variable domain of TCR clone 329415 (TRAV1-2, TRAJ8)
CAVREDTGFQKLVF

SEQ ID NO: 658830 - protein, 14 aa, Homo sapiens
  CDR3 for beta chain variable domain of TCR clone 329415 (TRBV7-3, TRBJ2-1)
CASSLAGGTNEQLF

SEQ ID NO: 658831 - protein, 11 aa, Homo sapiens
  CDR3 for alpha chain variable domain of TCR clone 329416 (TRAV12-3, TRAJ43)
CAMSVSNDMRF

SEQ ID NO: 658832 - protein, 13 aa, Homo sapiens
  CDR3 for beta chain variable domain of TCR clone 329416 (TRBV28, TRBJ2-2)
CASIRESTGELFF

SEQ ID NO: 658833 - protein, 14 aa, Homo sapiens
  CDR3 for alpha chain variable domain of TCR clone 329417 (TRAV12-2, TRAJ40)
CAVKIPSGTYKYIF

SEQ ID NO: 658834 - protein, 12 aa, Homo sapiens
  CDR3 for beta chain variable domain of TCR clone 329417 (TRBV11-2, TRBJ2-5)
CASSLDTQTQYF

SEQ ID NO: 658835 - protein, 13 aa, Homo sapiens
  CDR3 for alpha chain variable domain of TCR clone 329418 (TRAV3, TRAJ29)
CAVRDIIDTPLVF

SEQ ID NO: 658836 - protein, 14 aa, Homo sapiens
  CDR3 for beta chain variable domain of TCR clone 329418 (TRBV27, TRBJ2-1)
RASSATGGYNEQFF

SEQ ID NO: 658837 - protein, 12 aa, Homo sapiens
  CDR3 for alpha chain variable domain of TCR clone 329419 (TRAV13-1, TRAJ49)
CAASPMGNQFYF

SEQ ID NO: 658838 - protein, 17 aa, Homo sapiens
  CDR3 for beta chain variable domain of TCR clone 329419 (TRBV11-2, TRBJ2-1)
CASSLYPPGVEYNEQFV

SEQ ID NO: 658839 - protein, 18 aa, Homo sapiens
  CDR3 for alpha chain variable domain of TCR clone 329420 (TRAV12-3, TRAJ52)
CAMSVGGAGGTSYGKLTF

SEQ ID NO: 658840 - protein, 13 aa, Homo sapiens
  CDR3 for beta chain variable domain of TCR clone 329420 (TRBV18, TRBJ1-1)
CASSGGRNTEAFF

SEQ ID NO: 658841 - protein, 14 aa, Homo sapiens
  CDR3 for alpha chain variable domain of TCR clone 329421 (TRAV13-1, TRAJ20)
CAVRPGSNDYKLSF

SEQ ID NO: 658842 - protein, 14 aa, Homo sapiens
  CDR3 for beta chain variable domain of TCR clone 329421 (TRBV7-2, TRBJ1-1)
CASSFLTGTTEAFF

SEQ ID NO: 658843 - protein, 12 aa, Homo sapiens
  CDR3 for alpha chain variable domain of TCR clone 329422 (TRAV8-3, TRAJ26)
CAGDNYGQNFVF

SEQ ID NO: 658844 - protein, 13 aa, Homo sapiens
  CDR3 for beta chain variable domain of TCR clone 329422 (TRBV10-3, TRBJ2-7)
CASKLAVNYEHYF

SEQ ID NO: 658845 - protein, 11 aa, Homo sapiens
  CDR3 for alpha chain variable domain of TCR clone 329423 (TRAV12-2, TRAJ29)
CDVTLRSPLVF

SEQ ID NO: 658846 - protein, 15 aa, Homo sapiens
  CDR3 for beta chain variable domain of TCR clone 329423 (TRBV20-1, TRBJ2-7)
CSARDPTEVGHEQYF

SEQ ID NO: 658847 - protein, 14 aa, Homo sapiens
  CDR3 for alpha chain variable domain of TCR clone 329424 (TRAV8-3, TRAJ31)
CAVGRGLNNSRLMF

SEQ ID NO: 658848 - protein, 15 aa, Homo sapiens
  CDR3 for beta chain variable domain of TCR clone 329424 (TRBV7-2, TRBJ2-2)
CASSLAGGLTGELFL

SEQ ID NO: 658849 - protein, 13 aa, Homo sapiens
  CDR3 for alpha chain variable domain of TCR clone 329425 (TRAV23/DV6, TRAJ43)
CAAGMGGNNDMRF

SEQ ID NO: 658850 - protein, 14 aa, Homo sapiens
  CDR3 for beta chain variable domain of TCR clone 329425 (TRBV3-1, TRBJ2-3)
CASSWSGVGDTQYF

SEQ ID NO: 658851 - protein, 13 aa, Homo sapiens
  CDR3 for alpha chain variable domain of TCR clone 329426 (TRAV26-1, TRAJ48)
CIVRVVGDEKLTF

SEQ ID NO: 658852 - protein, 13 aa, Homo sapiens
  CDR3 for beta chain variable domain of TCR clone 329426 (TRBV7-9, TRBJ1-2)
CGSSLKQNYGYTF

SEQ ID NO: 658853 - protein, 14 aa, Homo sapiens
  CDR3 for alpha chain variable domain of TCR clone 329427 (TRAV1-1, TRAJ27)
CAVIYNTNAGKSTF

SEQ ID NO: 658854 - protein, 15 aa, Homo sapiens
  CDR3 for beta chain variable domain of TCR clone 329427 (TRBV6-3, TRBJ2-7)
CASSAPGTVFYEQYF

SEQ ID NO: 658855 - protein, 14 aa, Homo sapiens
  CDR3 for alpha chain variable domain of TCR clone 329428 (TRAV2, TRAJ9)
CAVEDRSGGFKTIF

SEQ ID NO: 658856 - protein, 11 aa, Homo sapiens
  CDR3 for beta chain variable domain of TCR clone 329428 (TRBV7-2, TRBJ2-3)
CASSSSDTQYF

SEQ ID NO: 658857 - protein, 11 aa, Homo sapiens
  CDR3 for alpha chain variable domain of TCR clone 329429 (TRAV12-1, TRAJ21)
CVVNNFNKFYF

SEQ ID NO: 658858 - protein, 14 aa, Homo sapiens
  CDR3 for beta chain variable domain of TCR clone 329429 (TRBV6-1, TRBJ2-7)
CASTRTGDYYEQYF

SEQ ID NO: 658859 - protein, 17 aa, Homo sapiens
  CDR3 for alpha chain variable domain of TCR clone 329430 (TRAV3, TRAJ6)
CAVRDGPRAGGSYLPTF

SEQ ID NO: 658860 - protein, 18 aa, Homo sapiens
  CDR3 for beta chain variable domain of TCR clone 329430 (TRBV7-3, TRBJ2-3)
CASSSTGTYPGSTDTQYL

SEQ ID NO: 658861 - protein, 15 aa, Homo sapiens
  CDR3 for alpha chain variable domain of TCR clone 329431 (TRAV21, TRAJ53)
CATLNSGGSNYKLTF

SEQ ID NO: 658862 - protein, 17 aa, Homo sapiens
  CDR3 for beta chain variable domain of TCR clone 329431 (TRBV7-8, TRBJ2-6)
CASSAGTGGAGANGLTF

SEQ ID NO: 658863 - protein, 15 aa, Homo sapiens
  CDR3 for alpha chain variable domain of TCR clone 329432 (TRAV3, TRAJ13)
CAVRDIAGGYQKVTF

SEQ ID NO: 658864 - protein, 15 aa, Homo sapiens
  CDR3 for beta chain variable domain of TCR clone 329432 (TRBV6-3, TRBJ2-7)
CASSSPGTVFYEQYF

SEQ ID NO: 658865 - protein, 15 aa, Homo sapiens
  CDR3 for alpha chain variable domain of TCR clone 329433 (TRAV34, TRAJ38)
CGADFTPGNNRKLIW

SEQ ID NO: 658866 - protein, 14 aa, Homo sapiens
  CDR3 for beta chain variable domain of TCR clone 329433 (TRBV7-2, TRBJ1-1)
CASSFLTGTTEAFF

SEQ ID NO: 658867 - protein, 14 aa, Homo sapiens
  CDR3 for alpha chain variable domain of TCR clone 329434 (TRAV17, TRAJ54)
CATDANQGAQKLVF

SEQ ID NO: 658868 - protein, 12 aa, Homo sapiens
  CDR3 for beta chain variable domain of TCR clone 329434 (TRBV6-3, TRBJ2-1)
RASSGSYNEQFF

SEQ ID NO: 658869 - protein, 15 aa, Homo sapiens
  CDR3 for alpha chain variable domain of TCR clone 329435 (TRAV25, TRAJ42)
CACSNYGGSQGNLIF

SEQ ID NO: 658870 - protein, 13 aa, Homo sapiens
  CDR3 for beta chain variable domain of TCR clone 329435 (TRBV20-1, TRBJ1-2)
CSASLGVGYGYTF

SEQ ID NO: 658871 - protein, 14 aa, Homo sapiens
  CDR3 for alpha chain variable domain of TCR clone 329436 (TRAV26-1, TRAJ44)
CIVRPTGTASQLTF

SEQ ID NO: 658872 - protein, 12 aa, Homo sapiens
  CDR3 for beta chain variable domain of TCR clone 329436 (TRBV11-3, TRBJ1-1)
CASSLRDSEAFF

SEQ ID NO: 658873 - protein, 14 aa, Homo sapiens
  CDR3 for alpha chain variable domain of TCR clone 329437 (TRAV8-4, TRAJ22)
CAVSPSGSARQLTF

SEQ ID NO: 658874 - protein, 13 aa, Homo sapiens
  CDR3 for beta chain variable domain of TCR clone 329437 (TRBV7-3, TRBJ1-1)
CASSQDWGAEAFF

SEQ ID NO: 658875 - protein, 16 aa, Homo sapiens
  CDR3 for alpha chain variable domain of TCR clone 329438 (TRAV23/DV6, TRAJ9)
CAASIGGNTVGFKTIF

SEQ ID NO: 658876 - protein, 11 aa, Homo sapiens
  CDR3 for beta chain variable domain of TCR clone 329438 (TRBV11-2, TRBJ2-2)
CASSLPGELFF

SEQ ID NO: 658877 - protein, 13 aa, Homo sapiens
  CDR3 for alpha chain variable domain of TCR clone 329439 (TRAV20, TRAJ31)
CAVQAIGGARLMF

SEQ ID NO: 658878 - protein, 15 aa, Homo sapiens
  CDR3 for beta chain variable domain of TCR clone 329439 (TRBV20-1, TRBJ2-1)
CSASSAGSSYNEQFF

SEQ ID NO: 658879 - protein, 11 aa, Homo sapiens
  CDR3 for alpha chain variable domain of TCR clone 329440 (TRAV29/DV5, TRAJ31)
CAAMNNASIMF

SEQ ID NO: 658880 - protein, 15 aa, Homo sapiens
  CDR3 for beta chain variable domain of TCR clone 329440 (TRBV20-1, TRBJ2-7)
CSARGPLAGGREQYF

SEQ ID NO: 658881 - protein, 14 aa, Homo sapiens
  CDR3 for alpha chain variable domain of TCR clone 329441 (TRAV12-3, TRAJ10)
SHLPLTGGGNKLTF

SEQ ID NO: 658882 - protein, 13 aa, Homo sapiens
  CDR3 for beta chain variable domain of TCR clone 329441 (TRBV12-5, TRBJ2-3)
CASQNRGTDTQYF

SEQ ID NO: 658883 - protein, 12 aa, Homo sapiens
  CDR3 for alpha chain variable domain of TCR clone 329442 (TRAV1-1, TRAJ8)
CAGGTGFQKVVF

SEQ ID NO: 658884 - protein, 16 aa, Homo sapiens
  CDR3 for beta chain variable domain of TCR clone 329442 (TRBV12-5, TRBJ2-5)
CASGPRTSGNQETQYF

SEQ ID NO: 658885 - protein, 14 aa, Homo sapiens
  CDR3 for alpha chain variable domain of TCR clone 329443 (TRAV1-2, TRAJ16)
CAVNRFSVGQKLLF

SEQ ID NO: 658886 - protein, 16 aa, Homo sapiens
  CDR3 for beta chain variable domain of TCR clone 329443 (TRBV7-3, TRBJ2-2)
CASSLKRGTLSGELFF

SEQ ID NO: 658887 - protein, 14 aa, Homo sapiens
  CDR3 for alpha chain variable domain of TCR clone 329444 (TRAV38-1, TRAJ40)
CALRPTSGTYKYII

SEQ ID NO: 658888 - protein, 14 aa, Homo sapiens
  CDR3 for beta chain variable domain of TCR clone 329444 (TRBV19, TRBJ2-1)
CASPTFVLSGEQFF

SEQ ID NO: 658889 - protein, 13 aa, Homo sapiens
  CDR3 for alpha chain variable domain of TCR clone 329445 (TRAV36/DV7, TRAJ54)
CAVDIQGAQKLVF

SEQ ID NO: 658890 - protein, 15 aa, Homo sapiens
  CDR3 for beta chain variable domain of TCR clone 329445 (TRBV19, TRBJ2-1)
CASSSPGVPLDEQFF

SEQ ID NO: 658891 - protein, 13 aa, Homo sapiens
  CDR3 for alpha chain variable domain of TCR clone 329446 (TRAV12-1, TRAJ40)
CVVPTSGTYKYIF

SEQ ID NO: 658892 - protein, 18 aa, Homo sapiens
  CDR3 for beta chain variable domain of TCR clone 329446 (TRBV7-6, TRBJ2-1)
CASSPWTSGMSSYNEQFF

SEQ ID NO: 658893 - protein, 12 aa, Homo sapiens
  CDR3 for alpha chain variable domain of TCR clone 329447 (TRAV12-1, TRAJ40)
CVVYSGTYKYIF

SEQ ID NO: 658894 - protein, 15 aa, Homo sapiens
  CDR3 for beta chain variable domain of TCR clone 329447 (TRBV12-4, TRBJ2-5)
CASSLSGAFQETQYF

SEQ ID NO: 658895 - protein, 15 aa, Homo sapiens
  CDR3 for alpha chain variable domain of TCR clone 329448 (TRAV4, TRAJ9)
CLVGGGNTGGFKTIF

SEQ ID NO: 658896 - protein, 20 aa, Homo sapiens
  CDR3 for beta chain variable domain of TCR clone 329448 (TRBV7-8, TRBJ2-1)
CASSLAHRLAGVRSYNEQFF

SEQ ID NO: 658897 - protein, 11 aa, Homo sapiens
  CDR3 for alpha chain variable domain of TCR clone 329449 (TRAV8-4, TRAJ34)
CAVSWTGKLIF

SEQ ID NO: 658898 - protein, 14 aa, Homo sapiens
  CDR3 for beta chain variable domain of TCR clone 329449 (TRBV7-9, TRBJ2-3)
CASSLEDGTDTQYF

SEQ ID NO: 658899 - protein, 15 aa, Homo sapiens
  CDR3 for alpha chain variable domain of TCR clone 329450 (TRAV21, TRAJ53)
CATLNSGGSNYKLTF

SEQ ID NO: 658900 - protein, 12 aa, Homo sapiens
  CDR3 for beta chain variable domain of TCR clone 329450 (TRBV14, TRBJ2-4)
CASSNIKSIQYF

SEQ ID NO: 658901 - protein, 12 aa, Homo sapiens
  CDR3 for alpha chain variable domain of TCR clone 329451 (TRAV13-1, TRAJ9)
CASQTGGFKTIF

SEQ ID NO: 658902 - protein, 18 aa, Homo sapiens
  CDR3 for beta chain variable domain of TCR clone 329451 (TRBV11-2, TRBJ2-3)
CASSLGGASRGAPNTQYF

SEQ ID NO: 658903 - protein, 15 aa, Homo sapiens
  CDR3 for alpha chain variable domain of TCR clone 329452 (TRAV1-2, TRAJ30)
CAVRPHGNRDDKIIF

SEQ ID NO: 658904 - protein, 13 aa, Homo sapiens
  CDR3 for beta chain variable domain of TCR clone 329452 (TRBV7-7, TRBJ2-2)
CASSLTSAGELFF

SEQ ID NO: 658905 - protein, 14 aa, Homo sapiens
  CDR3 for alpha chain variable domain of TCR clone 329453 (TRAV8-3, TRAJ7)
CAAIALYGNNRLAF

SEQ ID NO: 658906 - protein, 15 aa, Homo sapiens
  CDR3 for beta chain variable domain of TCR clone 329453 (TRBV3-1, TRBJ2-1)
CASSTGDTNYNEQFF

SEQ ID NO: 658907 - protein, 10 aa, Homo sapiens
  CDR3 for alpha chain variable domain of TCR clone 329454 (TRAV21, TRAJ43)
CAVRIGDMRF

SEQ ID NO: 658908 - protein, 14 aa, Homo sapiens
  CDR3 for beta chain variable domain of TCR clone 329454 (TRBV4-1, TRBJ1-1)
CASSPKAGNTEAFF

SEQ ID NO: 658909 - protein, 14 aa, Homo sapiens
  CDR3 for alpha chain variable domain of TCR clone 329455 (TRAV12-2, TRAJ13)
CAVKKTGGYQKVTF

SEQ ID NO: 658910 - protein, 14 aa, Homo sapiens
  CDR3 for beta chain variable domain of TCR clone 329455 (TRBV5-1, TRBJ2-5)
CASSLAGKQEIQYF

SEQ ID NO: 658911 - protein, 14 aa, Homo sapiens
  CDR3 for alpha chain variable domain of TCR clone 329456 (TRAV1-2, TRAJ24)
CAVLTTDSWGKFQF

SEQ ID NO: 658912 - protein, 21 aa, Homo sapiens
  CDR3 for beta chain variable domain of TCR clone 329456 (TRBV6-5, TRBJ1-3)
CASSYWEKIAQGMSSGNTIYY

SEQ ID NO: 658913 - protein, 15 aa, Homo sapiens
  CDR3 for alpha chain variable domain of TCR clone 329457 (TRAV13-2, TRAJ10)
RAENKIGGGGNKLTF

SEQ ID NO: 658914 - protein, 15 aa, Homo sapiens
  CDR3 for beta chain variable domain of TCR clone 329457 (TRBV5-1, TRBJ1-2)
CASSPGDRGSYGYTF

SEQ ID NO: 658915 - protein, 11 aa, Homo sapiens
  CDR3 for alpha chain variable domain of TCR clone 329458 (TRAV17, TRAJ9)
CATTGGFKTIF

SEQ ID NO: 658916 - protein, 15 aa, Homo sapiens
  CDR3 for beta chain variable domain of TCR clone 329458 (TRBV10-3, TRBJ2-3)
CAISLTSGGTDTQYF

SEQ ID NO: 658917 - protein, 14 aa, Homo sapiens
  CDR3 for alpha chain variable domain of TCR clone 329459 (TRAV3, TRAJ9)
CAVRQNTGGFKTIF

SEQ ID NO: 658918 - protein, 15 aa, Homo sapiens
  CDR3 for beta chain variable domain of TCR clone 329459 (TRBV7-2, TRBJ2-1)
CASSLASGRVNEQLF

SEQ ID NO: 658919 - protein, 18 aa, Homo sapiens
  CDR3 for alpha chain variable domain of TCR clone 329460 (TRAV21, TRAJ52)
CAVRPSPAGGTSYGKMTF

SEQ ID NO: 658920 - protein, 17 aa, Homo sapiens
  CDR3 for beta chain variable domain of TCR clone 329460 (TRBV13, TRBJ2-3)
CASSLSRVTGGRNTQYF

SEQ ID NO: 658921 - protein, 14 aa, Homo sapiens
  CDR3 for alpha chain variable domain of TCR clone 329461 (TRAV12-3, TRAJ10)
SHLPLTGGGNKLTF

SEQ ID NO: 658922 - protein, 17 aa, Homo sapiens
  CDR3 for beta chain variable domain of TCR clone 329461 (TRBV28, TRBJ2-5)
WASSTPEGDALQETQYF

SEQ ID NO: 658923 - protein, 14 aa, Homo sapiens
  CDR3 for alpha chain variable domain of TCR clone 329462 (TRAV1-1, TRAJ16)
CLLLLRRDGQKLLF

SEQ ID NO: 658924 - protein, 19 aa, Homo sapiens
  CDR3 for beta chain variable domain of TCR clone 329462 (TRBV28, TRBJ2-1)
CASSFSIRGSGRTRYEQFF

SEQ ID NO: 658925 - protein, 12 aa, Homo sapiens
  CDR3 for alpha chain variable domain of TCR clone 329463 (TRAV12-3, TRAJ17)
CAITLTGNKITF

SEQ ID NO: 658926 - protein, 15 aa, Homo sapiens
  CDR3 for beta chain variable domain of TCR clone 329463 (TRBV20-1, TRBJ2-7)
CSARDRVSGMDEQYF

SEQ ID NO: 658927 - protein, 15 aa, Homo sapiens
  CDR3 for alpha chain variable domain of TCR clone 329464 (TRAV8-3, TRAJ45)
CASSYSGGGADGLTF

SEQ ID NO: 658928 - protein, 15 aa, Homo sapiens
  CDR3 for beta chain variable domain of TCR clone 329464 (TRBV5-1, TRBJ2-1)
CASTGSGRTYNEQFF

SEQ ID NO: 658929 - protein, 17 aa, Homo sapiens
  CDR3 for alpha chain variable domain of TCR clone 329465 (TRAV3, TRAJ6)
CAVRDGPRARGSYIPTF

SEQ ID NO: 658930 - protein, 14 aa, Homo sapiens
  CDR3 for beta chain variable domain of TCR clone 329465 (TRBV7-2, TRBJ2-7)
CASSPKTSFYEQCF

SEQ ID NO: 658931 - protein, 14 aa, Homo sapiens
  CDR3 for alpha chain variable domain of TCR clone 329466 (TRAV17, TRAJ32)
CATDPGGATNKLIF

SEQ ID NO: 658932 - protein, 14 aa, Homo sapiens
  CDR3 for beta chain variable domain of TCR clone 329466 (TRBV2, TRBJ1-5)
CASSENRGGQPQHV

SEQ ID NO: 658933 - protein, 17 aa, Homo sapiens
  CDR3 for alpha chain variable domain of TCR clone 329467 (TRAV3, TRAJ42)
CAVRDRDYGGSQGNPIF

SEQ ID NO: 658934 - protein, 15 aa, Homo sapiens
  CDR3 for beta chain variable domain of TCR clone 329467 (TRBV11-2, TRBJ2-2)
CASRGLAANTGELFF

SEQ ID NO: 658935 - protein, 16 aa, Homo sapiens
  CDR3 for alpha chain variable domain of TCR clone 329468 (TRAV12-2, TRAJ28)
CAVITDSGAGSYQLTF

SEQ ID NO: 658936 - protein, 14 aa, Homo sapiens
  CDR3 for beta chain variable domain of TCR clone 329468 (TRBV28, TRBJ1-5)
CASSLGVLVKPQHF

SEQ ID NO: 658937 - protein, 15 aa, Homo sapiens
  CDR3 for alpha chain variable domain of TCR clone 329469 (TRAV4, TRAJ26)
CFVGDMNNYGQNFVF

SEQ ID NO: 658938 - protein, 16 aa, Homo sapiens
  CDR3 for beta chain variable domain of TCR clone 329469 (TRBV28, TRBJ1-4)
CASSSRTGAANEKLFF

SEQ ID NO: 658939 - protein, 11 aa, Homo sapiens
  CDR3 for alpha chain variable domain of TCR clone 329470 (TRAV21, TRAJ31)
CAVRNNARLMF

SEQ ID NO: 658940 - protein, 14 aa, Homo sapiens
  CDR3 for beta chain variable domain of TCR clone 329470 (TRBV7-6, TRBJ2-3)
CASSVAGGTDTQYF

SEQ ID NO: 658941 - protein, 13 aa, Homo sapiens
  CDR3 for alpha chain variable domain of TCR clone 329471 (TRAV8-3, TRAJ36)
CAVGATGANNPFF

SEQ ID NO: 658942 - protein, 15 aa, Homo sapiens
  CDR3 for beta chain variable domain of TCR clone 329471 (TRBV7-2, TRBJ1-2)
CASSPRASWNYGYTF

SEQ ID NO: 658943 - protein, 14 aa, Homo sapiens
  CDR3 for alpha chain variable domain of TCR clone 329472 (TRAV23/DV6, TRAJ13)
CAAMYSGGYQKVTF

SEQ ID NO: 658944 - protein, 16 aa, Homo sapiens
  CDR3 for beta chain variable domain of TCR clone 329472 (TRBV9, TRBJ2-1)
CASSAFGGIGNNEQFF

SEQ ID NO: 658945 - protein, 12 aa, Homo sapiens
  CDR3 for alpha chain variable domain of TCR clone 329473 (TRAV16, TRAJ10)
CSRTGGGNKPTF

SEQ ID NO: 658946 - protein, 13 aa, Homo sapiens
  CDR3 for beta chain variable domain of TCR clone 329473 (TRBV7-7, TRBJ1-1)
CASSLGANTEAFF

SEQ ID NO: 658947 - protein, 10 aa, Homo sapiens
  CDR3 for alpha chain variable domain of TCR clone 329474 (TRAV23/DV6, TRAJ3)
CAATTLALGG

SEQ ID NO: 658948 - protein, 15 aa, Homo sapiens
  CDR3 for beta chain variable domain of TCR clone 329474 (TRBV19, TRBJ1-6)
CASSTQGAVGSPLHF

SEQ ID NO: 658949 - protein, 19 aa, Homo sapiens
  CDR3 for alpha chain variable domain of TCR clone 329475 (TRAV12-1, TRAJ45)
CVVTHDVGYSGGGADGLTF

SEQ ID NO: 658950 - protein, 14 aa, Homo sapiens
  CDR3 for beta chain variable domain of TCR clone 329475 (TRBV6-1, TRBJ1-2)
CASSAGRGRYGYTF

SEQ ID NO: 658951 - protein, 15 aa, Homo sapiens
  CDR3 for alpha chain variable domain of TCR clone 329476 (TRAV26-1, TRAJ29)
CIVRVEGSGNTPLVF

SEQ ID NO: 658952 - protein, 15 aa, Homo sapiens
  CDR3 for beta chain variable domain of TCR clone 329476 (TRBV7-9, TRBJ1-6)
CARSSPGRGNSPLHF

SEQ ID NO: 658953 - protein, 12 aa, Homo sapiens
  CDR3 for alpha chain variable domain of TCR clone 329477 (TRAV35, TRAJ30)
CAGLNRDDKIIF

SEQ ID NO: 658954 - protein, 12 aa, Homo sapiens
  CDR3 for beta chain variable domain of TCR clone 329477 (TRBV7-9, TRBJ2-7)
CASSLEGYEQYF

SEQ ID NO: 658955 - protein, 17 aa, Homo sapiens
  CDR3 for alpha chain variable domain of TCR clone 329478 (TRAV12-2, TRAJ42)
CAVNILTYGGSQGNLIF

SEQ ID NO: 658956 - protein, 13 aa, Homo sapiens
  CDR3 for beta chain variable domain of TCR clone 329478 (TRBV3-1, TRBJ1-5)
CASSQDLDQPQHF

SEQ ID NO: 658957 - protein, 14 aa, Homo sapiens
  CDR3 for alpha chain variable domain of TCR clone 329479 (TRAV12-2, TRAJ17)
CAVLFKAAGNKLTF

SEQ ID NO: 658958 - protein, 14 aa, Homo sapiens
  CDR3 for beta chain variable domain of TCR clone 329479 (TRBV12-5, TRBJ1-3)
CASGPAGSGNTIYF

SEQ ID NO: 658959 - protein, 16 aa, Homo sapiens
  CDR3 for alpha chain variable domain of TCR clone 329480 (TRAV3, TRAJ37)
CAVRPHGSGNTGKLIF

SEQ ID NO: 658960 - protein, 12 aa, Homo sapiens
  CDR3 for beta chain variable domain of TCR clone 329480 (TRBV7-2, TRBJ2-3)
CASSLTGDTQYF

SEQ ID NO: 658961 - protein, 11 aa, Homo sapiens
  CDR3 for alpha chain variable domain of TCR clone 329481 (TRAV21, TRAJ34)
CAHYNTDKLIF

SEQ ID NO: 658962 - protein, 13 aa, Homo sapiens
  CDR3 for beta chain variable domain of TCR clone 329481 (TRBV4-2, TRBJ1-1)
CASNQAGNTEAFF

SEQ ID NO: 658963 - protein, 17 aa, Homo sapiens
  CDR3 for alpha chain variable domain of TCR clone 329482 (TRAV9-2, TRAJ45)
CALSGYYSGGCADGLTF

SEQ ID NO: 658964 - protein, 12 aa, Homo sapiens
  CDR3 for beta chain variable domain of TCR clone 329482 (TRBV7-8, TRBJ2-7)
CASSLGDREQYF

SEQ ID NO: 658965 - protein, 13 aa, Homo sapiens
  CDR3 for alpha chain variable domain of TCR clone 329483 (TRAV2, TRAJ40)
CAVVTSETYKYIL

SEQ ID NO: 658966 - protein, 14 aa, Homo sapiens
  CDR3 for beta chain variable domain of TCR clone 329483 (TRBV19, TRBJ2-1)
CASPTFVLSGEQFF

SEQ ID NO: 658967 - protein, 14 aa, Homo sapiens
  CDR3 for alpha chain variable domain of TCR clone 329484 (TRAV30, TRAJ26)
CGTEIVSYGENFVF

SEQ ID NO: 658968 - protein, 13 aa, Homo sapiens
  CDR3 for beta chain variable domain of TCR clone 329484 (TRBV7-3, TRBJ1-1)
CASSQDWGAEAFF

SEQ ID NO: 658969 - protein, 12 aa, Homo sapiens
  CDR3 for alpha chain variable domain of TCR clone 329485 (TRAV21, TRAJ13)
PGPSGGYQKVTF

SEQ ID NO: 658970 - protein, 12 aa, Homo sapiens
  CDR3 for beta chain variable domain of TCR clone 329485 (TRBV11-2, TRBJ2-1)
CASSPGNNEQFF

SEQ ID NO: 658971 - protein, 13 aa, Homo sapiens
  CDR3 for alpha chain variable domain of TCR clone 329486 (TRAV21, TRAJ27)
CAARPGNSGKSTF

SEQ ID NO: 658972 - protein, 12 aa, Homo sapiens
  CDR3 for beta chain variable domain of TCR clone 329486 (TRBV11-2, TRBJ2-2)
CASSLGGGELFF

SEQ ID NO: 658973 - protein, 15 aa, Homo sapiens
  CDR3 for alpha chain variable domain of TCR clone 329487 (TRAV12-2, TRAJ8)
CAVREENTGFQKLVF

SEQ ID NO: 658974 - protein, 16 aa, Homo sapiens
  CDR3 for beta chain variable domain of TCR clone 329487 (TRBV7-3, TRBJ2-2)
CASSLKRGTLAGELFF

SEQ ID NO: 658975 - protein, 14 aa, Homo sapiens
  CDR3 for alpha chain variable domain of TCR clone 329488 (TRAV35, TRAJ53)
GRVNSGGSNYKLRF

SEQ ID NO: 658976 - protein, 14 aa, Homo sapiens
  CDR3 for beta chain variable domain of TCR clone 329488 (TRBV7-3, TRBJ2-2)
CASSLLGSTGELFF

SEQ ID NO: 658977 - protein, 12 aa, Homo sapiens
  CDR3 for alpha chain variable domain of TCR clone 329489 (TRAV27, TRAJ36)
ASTPAGANNLFF

SEQ ID NO: 658978 - protein, 13 aa, Homo sapiens
  CDR3 for beta chain variable domain of TCR clone 329489 (TRBV7-9, TRBJ2-3)
CASSPGSTDRQYF

SEQ ID NO: 658979 - protein, 11 aa, Homo sapiens
  CDR3 for alpha chain variable domain of TCR clone 329490 (TRAV12-2, TRAJ3)
CAVKRASKIIF

SEQ ID NO: 658980 - protein, 16 aa, Homo sapiens
  CDR3 for beta chain variable domain of TCR clone 329490 (TRBV24-1, TRBJ2-3)
CATSEAREGRGDTQYF

SEQ ID NO: 658981 - protein, 14 aa, Homo sapiens
  CDR3 for alpha chain variable domain of TCR clone 329491 (TRAV1-2, TRAJ16)
CAVNRFSDGQKLLF

SEQ ID NO: 658982 - protein, 14 aa, Homo sapiens
  CDR3 for beta chain variable domain of TCR clone 329491 (TRBV7-3, TRBJ2-1)
CPSSLAGGTNEQFF

SEQ ID NO: 658983 - protein, 15 aa, Homo sapiens
  CDR3 for alpha chain variable domain of TCR clone 329492 (TRAV13-1, TRAJ44)
CAASRGGGTASKPTF

SEQ ID NO: 658984 - protein, 12 aa, Homo sapiens
  CDR3 for beta chain variable domain of TCR clone 329492 (TRBV11-2, TRBJ2-2)
CASSLGGGELFF

SEQ ID NO: 658985 - protein, 11 aa, Homo sapiens
  CDR3 for alpha chain variable domain of TCR clone 329493 (TRAV12-3, TRAJ34)
CNGLNTDKLIF

SEQ ID NO: 658986 - protein, 14 aa, Homo sapiens
  CDR3 for beta chain variable domain of TCR clone 329493 (TRBV4-1, TRBJ2-2)
CASSQAVNTGELFF

SEQ ID NO: 658987 - protein, 13 aa, Homo sapiens
  CDR3 for alpha chain variable domain of TCR clone 329494 (TRAV30, TRAJ24)
CGTVTDSWGKLQF

SEQ ID NO: 658988 - protein, 15 aa, Homo sapiens
  CDR3 for beta chain variable domain of TCR clone 329494 (TRBV12-4, TRBJ2-2)
CASSPQPGSTGELFF

SEQ ID NO: 658989 - protein, 13 aa, Homo sapiens
  CDR3 for alpha chain variable domain of TCR clone 329495 (TRAV35, TRAJ36)
CAGPRIGANNLFF

SEQ ID NO: 658990 - protein, 15 aa, Homo sapiens
  CDR3 for beta chain variable domain of TCR clone 329495 (TRBV28, TRBJ2-5)
CASSPPWAYQEAQYF

SEQ ID NO: 658991 - protein, 18 aa, Homo sapiens
  CDR3 for alpha chain variable domain of TCR clone 329496 (TRAV12-2, )
CAVEDIQNPDPAVYQLRD

SEQ ID NO: 658992 - protein, 15 aa, Homo sapiens
  CDR3 for beta chain variable domain of TCR clone 329496 (TRBV6-5, TRBJ2-7)
CASSRTSCFSYEQYF

SEQ ID NO: 658993 - protein, 12 aa, Homo sapiens
  CDR3 for alpha chain variable domain of TCR clone 329497 (TRAV13-1, TRAJ21)
CAAKEGFNKFYF

SEQ ID NO: 658994 - protein, 14 aa, Homo sapiens
  CDR3 for beta chain variable domain of TCR clone 329497 (TRBV23-1, TRBJ2-5)
CASSFLRSQETHYF

SEQ ID NO: 658995 - protein, 14 aa, Homo sapiens
  CDR3 for alpha chain variable domain of TCR clone 329498 (TRAV35, TRAJ33)
CAGSSQDGNYQLIW

SEQ ID NO: 658996 - protein, 15 aa, Homo sapiens
  CDR3 for beta chain variable domain of TCR clone 329498 (TRBV5-1, TRBJ1-4)
FAPAAWKDGNEKLFF

SEQ ID NO: 658997 - protein, 14 aa, Homo sapiens
  CDR3 for alpha chain variable domain of TCR clone 329499 (TRAV12-1, TRAJ9)
CVVTGDTGGFKTIF

SEQ ID NO: 658998 - protein, 16 aa, Homo sapiens
  CDR3 for beta chain variable domain of TCR clone 329499 (TRBV29-1, TRBJ1-2)
CSVEANREIANYGYTF

SEQ ID NO: 658999 - protein, 14 aa, Homo sapiens
  CDR3 for alpha chain variable domain of TCR clone 329500 (TRAV26-1, TRAJ39)
CIVRGSRAGNMLTF

SEQ ID NO: 659000 - protein, 17 aa, Homo sapiens
  CDR3 for beta chain variable domain of TCR clone 329500 (TRBV7-3, TRBJ2-3)
CASSLMKRMRGADTQYF

SEQ ID NO: 659001 - protein, 12 aa, Homo sapiens
  CDR3 for alpha chain variable domain of TCR clone 329501 (TRAV8-3, TRAJ4)
CALSGGYNKLIF

SEQ ID NO: 659002 - protein, 15 aa, Homo sapiens
  CDR3 for beta chain variable domain of TCR clone 329501 (TRBV20-1, TRBJ2-7)
CSARDRVSGMDEQYF

SEQ ID NO: 659003 - protein, 15 aa, Homo sapiens
  CDR3 for alpha chain variable domain of TCR clone 329502 (TRAV3, TRAJ22)
CAVRDRGGSARQLTF

SEQ ID NO: 659004 - protein, 16 aa, Homo sapiens
  CDR3 for beta chain variable domain of TCR clone 329502 (TRBV2, TRBJ2-3)
CANSTSVEGVTDTQYF

SEQ ID NO: 659005 - protein, 16 aa, Homo sapiens
  CDR3 for alpha chain variable domain of TCR clone 329503 (TRAV12-1, TRAJ42)
CVVTPYYGGSQGNLIF

SEQ ID NO: 659006 - protein, 15 aa, Homo sapiens
  CDR3 for beta chain variable domain of TCR clone 329503 (TRBV4-3, TRBJ2-7)
CASSQGGRGIHEQYF

SEQ ID NO: 659007 - protein, 10 aa, Homo sapiens
  CDR3 for alpha chain variable domain of TCR clone 329504 (TRAV29/DV5, TRAJ48)
CAAGGEKLTF

SEQ ID NO: 659008 - protein, 14 aa, Homo sapiens
  CDR3 for beta chain variable domain of TCR clone 329504 (TRBV7-9, TRBJ2-5)
CAISLAPDQETQYF

SEQ ID NO: 659009 - protein, 23 aa, Homo sapiens
  CDR3 for alpha chain variable domain of TCR clone 329505 (TRAV17, TRAJ9)
CATTGASKLSLEQEQDYLLKQIS

SEQ ID NO: 659010 - protein, 14 aa, Homo sapiens
  CDR3 for beta chain variable domain of TCR clone 329505 (TRBV7-9, TRBJ2-2)
CASSGLADTGELFF

SEQ ID NO: 659011 - protein, 12 aa, Homo sapiens
  CDR3 for alpha chain variable domain of TCR clone 329506 (TRAV16, TRAJ49)
CALSGTGNQFYF

SEQ ID NO: 659012 - protein, 15 aa, Homo sapiens
  CDR3 for beta chain variable domain of TCR clone 329506 (TRBV20-1, TRBJ2-1)
CSARGSGTYYNEQFF

SEQ ID NO: 659013 - protein, 14 aa, Homo sapiens
  CDR3 for alpha chain variable domain of TCR clone 329507 (TRAV17, TRAJ57)
CATDPQGGSEKLVF

SEQ ID NO: 659014 - protein, 13 aa, Homo sapiens
  CDR3 for beta chain variable domain of TCR clone 329507 (TRBV7-3, TRBJ2-1)
CASSLDSYNEQFF

SEQ ID NO: 659015 - protein, 17 aa, Homo sapiens
  CDR3 for alpha chain variable domain of TCR clone 329508 (TRAV4, TRAJ42)
CLVGVLNYGGSQGNSIF

SEQ ID NO: 659016 - protein, 12 aa, Homo sapiens
  CDR3 for beta chain variable domain of TCR clone 329508 (TRBV20-1, TRBJ2-1)
CSAQYTYNEQFF

SEQ ID NO: 659017 - protein, 12 aa, Homo sapiens
  CDR3 for alpha chain variable domain of TCR clone 329509 (TRAV12-1, TRAJ40)
CVVYSGTYKYIF

SEQ ID NO: 659018 - protein, 18 aa, Homo sapiens
  CDR3 for beta chain variable domain of TCR clone 329509 (TRBV11-2, TRBJ2-3)
CASSLRGAPRGAPNTQYF

SEQ ID NO: 659019 - protein, 15 aa, Homo sapiens
  CDR3 for alpha chain variable domain of TCR clone 329510 (TRAV27, TRAJ38)
CAARRNAGNNRTLIW

SEQ ID NO: 659020 - protein, 13 aa, Homo sapiens
  CDR3 for beta chain variable domain of TCR clone 329510 (TRBV20-1, TRBJ1-1)
CSARGGGNTEAFF

SEQ ID NO: 659021 - protein, 16 aa, Homo sapiens
  CDR3 for alpha chain variable domain of TCR clone 329511 (TRAV13-1, TRAJ4)
CAASGIWSGGYNKLIF

SEQ ID NO: 659022 - protein, 16 aa, Homo sapiens
  CDR3 for beta chain variable domain of TCR clone 329511 (TRBV7-3, TRBJ2-2)
CASSLKRGTLSGELFF

SEQ ID NO: 659023 - protein, 15 aa, Homo sapiens
  CDR3 for alpha chain variable domain of TCR clone 329512 (TRAV12-2, TRAJ43)
CAFAMRFGAGTSLTV

SEQ ID NO: 659024 - protein, 18 aa, Homo sapiens
  CDR3 for beta chain variable domain of TCR clone 329512 (TRBV20-1, TRBJ2-3)
CSASGLAGGPGTTDTQYF

SEQ ID NO: 659025 - protein, 14 aa, Homo sapiens
  CDR3 for alpha chain variable domain of TCR clone 329513 (TRAV13-1, TRAJ10)
CAAKEPGGGNKLTF

SEQ ID NO: 659026 - protein, 14 aa, Homo sapiens
  CDR3 for beta chain variable domain of TCR clone 329513 (TRBV6-3, TRBJ2-7)
CASSYLVSGNEQYF

SEQ ID NO: 659027 - protein, 12 aa, Homo sapiens
  CDR3 for alpha chain variable domain of TCR clone 329514 (TRAV3, TRAJ20)
CAMRDGDYKPSF

SEQ ID NO: 659028 - protein, 13 aa, Homo sapiens
  CDR3 for beta chain variable domain of TCR clone 329514 (TRBV9, TRBJ2-1)
CASSVGQGGEQFF

SEQ ID NO: 659029 - protein, 16 aa, Homo sapiens
  CDR3 for alpha chain variable domain of TCR clone 329515 (TRAV4, TRAJ18)
CCVLLIGGLTLGRLYF

SEQ ID NO: 659030 - protein, 15 aa, Homo sapiens
  CDR3 for beta chain variable domain of TCR clone 329515 (TRBV20-1, TRBJ2-7)
CSARDRVSGMDEQYF

SEQ ID NO: 659031 - protein, 15 aa, Homo sapiens
  CDR3 for alpha chain variable domain of TCR clone 329516 (TRAV13-1, TRAJ15)
CAASIERQAGTALIF

SEQ ID NO: 659032 - protein, 13 aa, Homo sapiens
  CDR3 for beta chain variable domain of TCR clone 329516 (TRBV5-1, TRBJ2-7)
CARSATGGNEQYF

SEQ ID NO: 659033 - protein, 17 aa, Homo sapiens
  CDR3 for alpha chain variable domain of TCR clone 329517 (TRAV2, TRAJ36)
CAVEDRGNWGKPPLLWD

SEQ ID NO: 659034 - protein, 14 aa, Homo sapiens
  CDR3 for beta chain variable domain of TCR clone 329517 (TRBV7-9, TRBJ2-5)
CASSLDTAQETQYF

SEQ ID NO: 659035 - protein, 12 aa, Homo sapiens
  CDR3 for alpha chain variable domain of TCR clone 329518 (TRAV38-1, TRAJ47)
CAFETYGNKLVF

SEQ ID NO: 659036 - protein, 15 aa, Homo sapiens
  CDR3 for beta chain variable domain of TCR clone 329518 (TRBV20-1, TRBJ2-7)
CSARRGLAESYEQYF

SEQ ID NO: 659037 - protein, 13 aa, Homo sapiens
  CDR3 for alpha chain variable domain of TCR clone 329519 (TRAV16, TRAJ47)
CALSRGYGNKLVF

SEQ ID NO: 659038 - protein, 15 aa, Homo sapiens
  CDR3 for beta chain variable domain of TCR clone 329519 (TRBV11-2, TRBJ2-2)
CASSSDRVNAGELFF

SEQ ID NO: 659039 - protein, 13 aa, Homo sapiens
  CDR3 for alpha chain variable domain of TCR clone 329520 (TRAV13-1, TRAJ21)
CAASIYNFNKFYF

SEQ ID NO: 659040 - protein, 16 aa, Homo sapiens
  CDR3 for beta chain variable domain of TCR clone 329520 (TRBV4-2, TRBJ2-3)
CASSQELAGDTDTQYF

SEQ ID NO: 659041 - protein, 10 aa, Homo sapiens
  CDR3 for alpha chain variable domain of TCR clone 329521 (TRAV12-3, TRAJ18)
CAMSAGAQPW

SEQ ID NO: 659042 - protein, 15 aa, Homo sapiens
  CDR3 for beta chain variable domain of TCR clone 329521 (TRBV20-1, TRBJ2-7)
CSARDRVSGMDEQYF

SEQ ID NO: 659043 - protein, 13 aa, Homo sapiens
  CDR3 for alpha chain variable domain of TCR clone 329522 (TRAV2, TRAJ40)
CAVVTSGTSNYIF

SEQ ID NO: 659044 - protein, 14 aa, Homo sapiens
  CDR3 for beta chain variable domain of TCR clone 329522 (TRBV19, TRBJ2-1)
CASPTFVLSGEQFF

SEQ ID NO: 659045 - protein, 14 aa, Homo sapiens
  CDR3 for alpha chain variable domain of TCR clone 329523 (TRAV12-3, TRAJ15)
CAMITPQAGTALIF

SEQ ID NO: 659046 - protein, 14 aa, Homo sapiens
  CDR3 for beta chain variable domain of TCR clone 329523 (TRBV20-1, TRBJ2-2)
CSARKRLATGELFF

SEQ ID NO: 659047 - protein, 16 aa, Homo sapiens
  CDR3 for alpha chain variable domain of TCR clone 329524 (TRAV12-3, TRAJ10)
CAMKKGITGGGNKLTL

SEQ ID NO: 659048 - protein, 15 aa, Homo sapiens
  CDR3 for beta chain variable domain of TCR clone 329524 (TRBV18, TRBJ1-1)
CASSPRQGENTEAFF

SEQ ID NO: 659049 - protein, 12 aa, Homo sapiens
  CDR3 for alpha chain variable domain of TCR clone 329525 (TRAV12-3, TRAJ17)
CAMTLTGNKLTL

SEQ ID NO: 659050 - protein, 13 aa, Homo sapiens
  CDR3 for beta chain variable domain of TCR clone 329525 (TRBV4-2, TRBJ1-1)
CASSQAGNTEAFF

SEQ ID NO: 659051 - protein, 12 aa, Homo sapiens
  CDR3 for alpha chain variable domain of TCR clone 329526 (TRAV16, TRAJ57)
CALEGGSEKLVF

SEQ ID NO: 659052 - protein, 13 aa, Homo sapiens
  CDR3 for beta chain variable domain of TCR clone 329526 (TRBV20-1, TRBJ2-5)
CSAREAFQETQYF

SEQ ID NO: 659053 - protein, 13 aa, Homo sapiens
  CDR3 for alpha chain variable domain of TCR clone 329527 (TRAV21, TRAJ49)
CAVRQSTGNQFYF

SEQ ID NO: 659054 - protein, 13 aa, Homo sapiens
  CDR3 for beta chain variable domain of TCR clone 329527 (TRBV6-6, TRBJ1-5)
CASRAYQHQPQHF

SEQ ID NO: 659055 - protein, 15 aa, Homo sapiens
  CDR3 for alpha chain variable domain of TCR clone 329528 (TRAV12-1, TRAJ6)
CVVNCPLRRKLHTYI

SEQ ID NO: 659056 - protein, 13 aa, Homo sapiens
  CDR3 for beta chain variable domain of TCR clone 329528 (TRBV20-1, TRBJ2-7)
CSATHTSGYEQYF

SEQ ID NO: 659057 - protein, 20 aa, Homo sapiens
  CDR3 for alpha chain variable domain of TCR clone 329529 (TRAV12-3, TRAJ4)
CAMTGAGTCWLYTHISRTLT

SEQ ID NO: 659058 - protein, 14 aa, Homo sapiens
  CDR3 for beta chain variable domain of TCR clone 329529 (TRBV10-3, TRBJ1-1)
CAISDTDRGVEAFF

SEQ ID NO: 659059 - protein, 20 aa, Homo sapiens
  CDR3 for alpha chain variable domain of TCR clone 329530 (TRAV12-3, TRAJ41)
SLFIRDSQPSDSATPEALNF

SEQ ID NO: 659060 - protein, 13 aa, Homo sapiens
  CDR3 for beta chain variable domain of TCR clone 329530 (TRBV7-8, TRBJ2-7)
CASSFAGLYEQYF

SEQ ID NO: 659061 - protein, 15 aa, Homo sapiens
  CDR3 for alpha chain variable domain of TCR clone 329531 (TRAV35, TRAJ23)
CAGPLGNNQGGKLIF

SEQ ID NO: 659062 - protein, 14 aa, Homo sapiens
  CDR3 for beta chain variable domain of TCR clone 329531 (TRBV7-9, TRBJ1-1)
CASTPVQSYTEAFF

SEQ ID NO: 659063 - protein, 18 aa, Homo sapiens
  CDR3 for alpha chain variable domain of TCR clone 329532 (TRAV13-1, TRAJ10)
CAASKGRAVTGGENKLTF

SEQ ID NO: 659064 - protein, 15 aa, Homo sapiens
  CDR3 for beta chain variable domain of TCR clone 329532 (TRBV27, TRBJ2-7)
CASSPIVTGAYEQYF

SEQ ID NO: 659065 - protein, 15 aa, Homo sapiens
  CDR3 for alpha chain variable domain of TCR clone 329533 (TRAV12-2, TRAJ50)
CAVNGLETSYVKVIF

SEQ ID NO: 659066 - protein, 16 aa, Homo sapiens
  CDR3 for beta chain variable domain of TCR clone 329533 (TRBV6-5, TRBJ2-7)
CASSSDPTSGFYEQYF

SEQ ID NO: 659067 - protein, 16 aa, Homo sapiens
  CDR3 for alpha chain variable domain of TCR clone 329534 (TRAV3, TRAJ37)
CAVRGRGSGNTGKLIF

SEQ ID NO: 659068 - protein, 13 aa, Homo sapiens
  CDR3 for beta chain variable domain of TCR clone 329534 (TRBV14, TRBJ2-7)
CASSQDRRGEQYC

SEQ ID NO: 659069 - protein, 15 aa, Homo sapiens
  CDR3 for alpha chain variable domain of TCR clone 329535 (TRAV35, TRAJ40)
CAGQLGTSGTYKYIF

SEQ ID NO: 659070 - protein, 14 aa, Homo sapiens
  CDR3 for beta chain variable domain of TCR clone 329535 (TRBV7-3, TRBJ2-1)
CASSVAGRTNEQFF

SEQ ID NO: 659071 - protein, 14 aa, Homo sapiens
  CDR3 for alpha chain variable domain of TCR clone 329536 (TRAV12-1, TRAJ24)
CVVIPTDSWGKLQF

SEQ ID NO: 659072 - protein, 19 aa, Homo sapiens
  CDR3 for beta chain variable domain of TCR clone 329536 (TRBV25-1, TRBJ2-2)
CAILVYRVDRGRKTGELFF

SEQ ID NO: 659073 - protein, 10 aa, Homo sapiens
  CDR3 for alpha chain variable domain of TCR clone 329537 (TRAV13-2, TRAJ49)
CADTGNQFYF

SEQ ID NO: 659074 - protein, 15 aa, Homo sapiens
  CDR3 for beta chain variable domain of TCR clone 329537 (TRBV4-3, TRBJ2-7)
CASSQGGRGIYEQYF

SEQ ID NO: 659075 - protein, 13 aa, Homo sapiens
  CDR3 for alpha chain variable domain of TCR clone 329538 (TRAV36/DV7, TRAJ49)
CAGDSNTGNQFYF

SEQ ID NO: 659076 - protein, 15 aa, Homo sapiens
  CDR3 for beta chain variable domain of TCR clone 329538 (TRBV7-9, TRBJ1-5)
CASSQGHQPNQPQHF

SEQ ID NO: 659077 - protein, 15 aa, Homo sapiens
  CDR3 for alpha chain variable domain of TCR clone 329539 (TRAV20, TRAJ23)
CAVQAVRNQGGKLIF

SEQ ID NO: 659078 - protein, 16 aa, Homo sapiens
  CDR3 for beta chain variable domain of TCR clone 329539 (TRBV27, TRBJ2-7)
CASSKQGRGWPYEQYF

SEQ ID NO: 659079 - protein, 18 aa, Homo sapiens
  CDR3 for alpha chain variable domain of TCR clone 329540 (TRAV21, TRAJ52)
CAVRPSPAGGTSYGKLTF

SEQ ID NO: 659080 - protein, 12 aa, Homo sapiens
  CDR3 for beta chain variable domain of TCR clone 329540 (TRBV7-9, TRBJ1-6)
CASSLMTSPLHF

SEQ ID NO: 659081 - protein, 15 aa, Homo sapiens
  CDR3 for alpha chain variable domain of TCR clone 329541 (TRAV34, TRAJ38)
CGADFTPGNNRKLIW

SEQ ID NO: 659082 - protein, 16 aa, Homo sapiens
  CDR3 for beta chain variable domain of TCR clone 329541 (TRBV12-5, TRBJ2-5)
CASRPRTSGNQENQYF

SEQ ID NO: 659083 - protein, 13 aa, Homo sapiens
  CDR3 for alpha chain variable domain of TCR clone 329542 (TRAV17, TRAJ15)
CAVVDQAGTALIF

SEQ ID NO: 659084 - protein, 14 aa, Homo sapiens
  CDR3 for beta chain variable domain of TCR clone 329542 (TRBV5-4, TRBJ1-6)
CASSLWSDNSPLHF

SEQ ID NO: 659085 - protein, 13 aa, Homo sapiens
  CDR3 for alpha chain variable domain of TCR clone 329543 (TRAV27, TRAJ6)
CAGGTRGSYIPTF

SEQ ID NO: 659086 - protein, 12 aa, Homo sapiens
  CDR3 for beta chain variable domain of TCR clone 329543 (TRBV7-9, TRBJ2-7)
CATRTDAYEQYF

SEQ ID NO: 659087 - protein, 15 aa, Homo sapiens
  CDR3 for alpha chain variable domain of TCR clone 329544 (TRAV3, TRAJ3)
CAVRDRDSSAFKIIF

SEQ ID NO: 659088 - protein, 18 aa, Homo sapiens
  CDR3 for beta chain variable domain of TCR clone 329544 (TRBV25-1, TRBJ1-2)
CASSGLQNGQGLIFGYAF

SEQ ID NO: 659089 - protein, 14 aa, Homo sapiens
  CDR3 for alpha chain variable domain of TCR clone 329545 (TRAV16, TRAJ42)
CALLAGGSQGNLIF

SEQ ID NO: 659090 - protein, 16 aa, Homo sapiens
  CDR3 for beta chain variable domain of TCR clone 329545 (TRBV12-4, TRBJ2-5)
CASSWRPSGDLETQYF

SEQ ID NO: 659091 - protein, 12 aa, Homo sapiens
  CDR3 for alpha chain variable domain of TCR clone 329546 (TRAV12-1, TRAJ40)
CVVYSGTYKYIF

SEQ ID NO: 659092 - protein, 18 aa, Homo sapiens
  CDR3 for beta chain variable domain of TCR clone 329546 (TRBV11-2, TRBJ2-3)
RASSLGGASRGATNTQYF

SEQ ID NO: 659093 - protein, 15 aa, Homo sapiens
  CDR3 for alpha chain variable domain of TCR clone 329547 (TRAV23/DV6, TRAJ44)
CAARLLTGTASKLTL

SEQ ID NO: 659094 - protein, 15 aa, Homo sapiens
  CDR3 for beta chain variable domain of TCR clone 329547 (TRBV12-4, TRBJ1-5)
CASTLNRVSNQPQHF

SEQ ID NO: 659095 - protein, 14 aa, Homo sapiens
  CDR3 for alpha chain variable domain of TCR clone 329548 (TRAV38-1, TRAJ43)
CAFMKHNNNNDMRF

SEQ ID NO: 659096 - protein, 13 aa, Homo sapiens
  CDR3 for beta chain variable domain of TCR clone 329548 (TRBV7-9, TRBJ2-1)
CASSWESYNEQFF

SEQ ID NO: 659097 - protein, 19 aa, Homo sapiens
  CDR3 for alpha chain variable domain of TCR clone 329549 (TRAV1-2, TRAJ26)
CLLPLCCERSDNYGQNFVF

SEQ ID NO: 659098 - protein, 11 aa, Homo sapiens
  CDR3 for beta chain variable domain of TCR clone 329549 (TRBV29-1, TRBJ2-5)
CSEDRTGTQYF

SEQ ID NO: 659099 - protein, 14 aa, Homo sapiens
  CDR3 for alpha chain variable domain of TCR clone 329550 (TRAV12-2, TRAJ13)
CAVKKTGGSQKVTF

SEQ ID NO: 659100 - protein, 14 aa, Homo sapiens
  CDR3 for beta chain variable domain of TCR clone 329550 (TRBV12-5, TRBJ2-5)
CASGSRTHQETQYF

SEQ ID NO: 659101 - protein, 12 aa, Homo sapiens
  CDR3 for alpha chain variable domain of TCR clone 329551 (TRAV29/DV5, TRAJ43)
FAAPYNNNDMRF

SEQ ID NO: 659102 - protein, 17 aa, Homo sapiens
  CDR3 for beta chain variable domain of TCR clone 329551 (TRBV19, TRBJ2-6)
CASSTGQVFSGANVLTF

SEQ ID NO: 659103 - protein, 11 aa, Homo sapiens
  CDR3 for alpha chain variable domain of TCR clone 329552 (TRAV12-1, TRAJ43)
CVEYDNNEMRF

SEQ ID NO: 659104 - protein, 14 aa, Homo sapiens
  CDR3 for beta chain variable domain of TCR clone 329552 (TRBV10-2, TRBJ2-1)
CASSEGTSEDEQFF

SEQ ID NO: 659105 - protein, 11 aa, Homo sapiens
  CDR3 for alpha chain variable domain of TCR clone 329553 (TRAV12-3, TRAJ49)
CAANPGNQFYF

SEQ ID NO: 659106 - protein, 15 aa, Homo sapiens
  CDR3 for beta chain variable domain of TCR clone 329553 (TRBV11-2, TRBJ2-1)
CASSLGTSGLNEQFF

SEQ ID NO: 659107 - protein, 13 aa, Homo sapiens
  CDR3 for alpha chain variable domain of TCR clone 329554 (TRAV27, TRAJ45)
CRSSGGGADGLTF

SEQ ID NO: 659108 - protein, 13 aa, Homo sapiens
  CDR3 for beta chain variable domain of TCR clone 329554 (TRBV7-7, TRBJ2-5)
CASSRSGQETQCF

SEQ ID NO: 659109 - protein, 12 aa, Homo sapiens
  CDR3 for alpha chain variable domain of TCR clone 329555 (TRAV12-3, TRAJ17)
CALTLTGNKLTF

SEQ ID NO: 659110 - protein, 15 aa, Homo sapiens
  CDR3 for beta chain variable domain of TCR clone 329555 (TRBV6-3, TRBJ2-7)
CASSSPGTVFYEQYF

SEQ ID NO: 659111 - protein, 15 aa, Homo sapiens
  CDR3 for alpha chain variable domain of TCR clone 329556 (TRAV8-2, TRAJ13)
CVVSDLSGGYQKVTF

SEQ ID NO: 659112 - protein, 18 aa, Homo sapiens
  CDR3 for beta chain variable domain of TCR clone 329556 (TRBV18, TRBJ1-3)
CASSPRGGAGPSGNTIYF

SEQ ID NO: 659113 - protein, 18 aa, Homo sapiens
  CDR3 for alpha chain variable domain of TCR clone 329557 (TRAV13-1, TRAJ17)
CAASIHVGCRQQANFWRR

SEQ ID NO: 659114 - protein, 14 aa, Homo sapiens
  CDR3 for beta chain variable domain of TCR clone 329557 (TRBV20-1, TRBJ2-4)
CSARDRGQGGIQYF

SEQ ID NO: 659115 - protein, 13 aa, Homo sapiens
  CDR3 for alpha chain variable domain of TCR clone 329558 (TRAV14/DV4, TRAJ22)
CAMRDLSARQLTF

SEQ ID NO: 659116 - protein, 18 aa, Homo sapiens
  CDR3 for beta chain variable domain of TCR clone 329558 (TRBV19, TRBJ1-5)
CASSKGQVSSHSNQPQHF

SEQ ID NO: 659117 - protein, 14 aa, Homo sapiens
  CDR3 for alpha chain variable domain of TCR clone 329559 (TRAV16, TRAJ4)
CALHFSGGYNKLIF

SEQ ID NO: 659118 - protein, 13 aa, Homo sapiens
  CDR3 for beta chain variable domain of TCR clone 329559 (TRBV28, TRBJ2-7)
CASSPSGTYEQYF

SEQ ID NO: 659119 - protein, 14 aa, Homo sapiens
  CDR3 for alpha chain variable domain of TCR clone 329560 (TRAV8-4, TRAJ5)
CAVSTGTGRRALTF

SEQ ID NO: 659120 - protein, 14 aa, Homo sapiens
  CDR3 for beta chain variable domain of TCR clone 329560 (TRBV7-3, TRBJ1-1)
CASSLKGGNTEAFF

SEQ ID NO: 659121 - protein, 15 aa, Homo sapiens
  CDR3 for alpha chain variable domain of TCR clone 329561 (TRAV3, TRAJ22)
CAVRDRGGSARQLTF

SEQ ID NO: 659122 - protein, 15 aa, Homo sapiens
  CDR3 for beta chain variable domain of TCR clone 329561 (TRBV2, TRBJ2-1)
CASSELAGSYNEQFF

SEQ ID NO: 659123 - protein, 13 aa, Homo sapiens
  CDR3 for alpha chain variable domain of TCR clone 329562 (TRAV20, TRAJ11)
CAVAPSGYSTLTF

SEQ ID NO: 659124 - protein, 17 aa, Homo sapiens
  CDR3 for beta chain variable domain of TCR clone 329562 (TRBV20-1, TRBJ2-1)
CSARVPSGISSYNEQFF

SEQ ID NO: 659125 - protein, 13 aa, Homo sapiens
  CDR3 for alpha chain variable domain of TCR clone 329563 (TRAV20, TRAJ50)
CAVQQTSYDKVIF

SEQ ID NO: 659126 - protein, 16 aa, Homo sapiens
  CDR3 for beta chain variable domain of TCR clone 329563 (TRBV28, TRBJ2-1)
CASSSPEYPRDNEQFF

SEQ ID NO: 659127 - protein, 21 aa, Homo sapiens
  CDR3 for alpha chain variable domain of TCR clone 329564 (TRAV1-1, TRAJ30)
CLLLLRCEREGGENRDDKIIF

SEQ ID NO: 659128 - protein, 16 aa, Homo sapiens
  CDR3 for beta chain variable domain of TCR clone 329564 (TRBV2, TRBJ2-3)
CASSEISGRGDDTQYF

SEQ ID NO: 659129 - protein, 13 aa, Homo sapiens
  CDR3 for alpha chain variable domain of TCR clone 329565 (TRAV21, TRAJ27)
CAARPGNAGKSTF

SEQ ID NO: 659130 - protein, 20 aa, Homo sapiens
  CDR3 for beta chain variable domain of TCR clone 329565 (TRBV4-2, TRBJ2-7)
CASSQASGGNLGAVLRAGHQ

SEQ ID NO: 659131 - protein, 15 aa, Homo sapiens
  CDR3 for alpha chain variable domain of TCR clone 329566 (TRAV17, TRAJ56)
CATDANTGANSKLTF

SEQ ID NO: 659132 - protein, 12 aa, Homo sapiens
  CDR3 for beta chain variable domain of TCR clone 329566 (TRBV7-8, TRBJ2-7)
CASSQGDREQYF

SEQ ID NO: 659133 - protein, 13 aa, Homo sapiens
  CDR3 for alpha chain variable domain of TCR clone 329567 (TRAV12-3, TRAJ47)
CAMKKEYGNKLVF

SEQ ID NO: 659134 - protein, 18 aa, Homo sapiens
  CDR3 for beta chain variable domain of TCR clone 329567 (TRBV20-1, TRBJ2-6)
CSAETTPTHGSGANVLTF

SEQ ID NO: 659135 - protein, 16 aa, Homo sapiens
  CDR3 for alpha chain variable domain of TCR clone 329568 (TRAV23/DV6, TRAJ22)
CAASSRGSRVCKATDL

SEQ ID NO: 659136 - protein, 13 aa, Homo sapiens
  CDR3 for beta chain variable domain of TCR clone 329568 (TRBV7-9, TRBJ1-2)
CASSLKQNYGYTF

SEQ ID NO: 659137 - protein, 15 aa, Homo sapiens
  CDR3 for alpha chain variable domain of TCR clone 329569 (TRAV12-1, TRAJ44)
CVVDTPQGTASKLTF

SEQ ID NO: 659138 - protein, 16 aa, Homo sapiens
  CDR3 for beta chain variable domain of TCR clone 329569 (TRBV20-1, TRBJ2-2)
CSASASGIPGAGELFF

SEQ ID NO: 659139 - protein, 13 aa, Homo sapiens
  CDR3 for alpha chain variable domain of TCR clone 329570 (TRAV8-3, TRAJ48)
CAVAAGGIEKLTF

SEQ ID NO: 659140 - protein, 15 aa, Homo sapiens
  CDR3 for beta chain variable domain of TCR clone 329570 (TRBV6-1, TRBJ2-2)
CASSAGQGYAGELFF

SEQ ID NO: 659141 - protein, 14 aa, Homo sapiens
  CDR3 for alpha chain variable domain of TCR clone 329571 (TRAV1-2, TRAJ12)
CAVSGTDSSYKLIF

SEQ ID NO: 659142 - protein, 15 aa, Homo sapiens
  CDR3 for beta chain variable domain of TCR clone 329571 (TRBV2, TRBJ2-4)
CASSGTNLAKNIQDF

SEQ ID NO: 659143 - protein, 18 aa, Homo sapiens
  CDR3 for alpha chain variable domain of TCR clone 329572 (TRAV16, TRAJ45)
CAQASYPSSGGGADGLTF

SEQ ID NO: 659144 - protein, 16 aa, Homo sapiens
  CDR3 for beta chain variable domain of TCR clone 329572 (TRBV12-5, TRBJ2-5)
CASGPRTSGNQETQYF

SEQ ID NO: 659145 - protein, 16 aa, Homo sapiens
  CDR3 for alpha chain variable domain of TCR clone 329573 (TRAV8-2, TRAJ48)
CVVSDVSNFGNERLTF

SEQ ID NO: 659146 - protein, 16 aa, Homo sapiens
  CDR3 for beta chain variable domain of TCR clone 329573 (TRBV19, TRBJ1-5)
CASSIKTTGGNQPQHF

SEQ ID NO: 659147 - protein, 14 aa, Homo sapiens
  CDR3 for alpha chain variable domain of TCR clone 329574 (TRAV1-1, TRAJ27)
CAVIYNTNAGNSPF

SEQ ID NO: 659148 - protein, 15 aa, Homo sapiens
  CDR3 for beta chain variable domain of TCR clone 329574 (TRBV7-2, TRBJ2-1)
CASSSGLAGGNEQFF

SEQ ID NO: 659149 - protein, 14 aa, Homo sapiens
  CDR3 for alpha chain variable domain of TCR clone 329575 (TRAV2, TRAJ3)
CAVRPYSSASKIIF

SEQ ID NO: 659150 - protein, 14 aa, Homo sapiens
  CDR3 for beta chain variable domain of TCR clone 329575 (TRBV7-3, TRBJ2-2)
CASSSGGYTGELFF

SEQ ID NO: 659151 - protein, 14 aa, Homo sapiens
  CDR3 for alpha chain variable domain of TCR clone 329576 (TRAV12-2, TRAJ41)
CAVLNSNSGYALNF

SEQ ID NO: 659152 - protein, 13 aa, Homo sapiens
  CDR3 for beta chain variable domain of TCR clone 329576 (TRBV24-1, TRBJ2-2)
CATRAGSSGELFF

SEQ ID NO: 659153 - protein, 12 aa, Homo sapiens
  CDR3 for alpha chain variable domain of TCR clone 329577 (TRAV17, TRAJ20)
CATDGDDYKLSF

SEQ ID NO: 659154 - protein, 15 aa, Homo sapiens
  CDR3 for beta chain variable domain of TCR clone 329577 (TRBV5-1, TRBJ2-3)
CASSLARQGTDTQYF

SEQ ID NO: 659155 - protein, 15 aa, Homo sapiens
  CDR3 for alpha chain variable domain of TCR clone 329578 (TRAV8-2, TRAJ40)
CVVLGTTSGTYKYIC

SEQ ID NO: 659156 - protein, 12 aa, Homo sapiens
  CDR3 for beta chain variable domain of TCR clone 329578 (TRBV11-3, TRBJ1-1)
CASSHRQGEAFF

SEQ ID NO: 659157 - protein, 19 aa, Homo sapiens
  CDR3 for alpha chain variable domain of TCR clone 329579 (TRAV21, TRAJ20)
SLVTQPPTSVLPNDYKLSF

SEQ ID NO: 659158 - protein, 14 aa, Homo sapiens
  CDR3 for beta chain variable domain of TCR clone 329579 (TRBV7-2, TRBJ1-3)
CASSRLRSGNTIDF

SEQ ID NO: 659159 - protein, 15 aa, Homo sapiens
  CDR3 for alpha chain variable domain of TCR clone 329580 (TRAV12-2, TRAJ56)
CAVNPFTGANSKLTF

SEQ ID NO: 659160 - protein, 13 aa, Homo sapiens
  CDR3 for beta chain variable domain of TCR clone 329580 (TRBV20-1, TRBJ1-2)
CSARDRFYGGYTF

SEQ ID NO: 659161 - protein, 13 aa, Homo sapiens
  CDR3 for alpha chain variable domain of TCR clone 329581 (TRAV12-1, TRAJ6)
CVVFPGGGYIPTF

SEQ ID NO: 659162 - protein, 13 aa, Homo sapiens
  CDR3 for beta chain variable domain of TCR clone 329581 (TRBV7-9, TRBJ1-2)
CASSLKQNYGYTF

SEQ ID NO: 659163 - protein, 15 aa, Homo sapiens
  CDR3 for alpha chain variable domain of TCR clone 329582 (TRAV12-2, TRAJ53)
CAVNGGGGSNYKLTF

SEQ ID NO: 659164 - protein, 14 aa, Homo sapiens
  CDR3 for beta chain variable domain of TCR clone 329582 (TRBV6-1, TRBJ1-3)
CAGVQGGGGNTIYF

SEQ ID NO: 659165 - protein, 11 aa, Homo sapiens
  CDR3 for alpha chain variable domain of TCR clone 329583 (TRAV2, TRAJ23)
CAVETRGKLIF

SEQ ID NO: 659166 - protein, 14 aa, Homo sapiens
  CDR3 for beta chain variable domain of TCR clone 329583 (TRBV2, TRBJ2-3)
CASSEGQNTDTQYL

SEQ ID NO: 659167 - protein, 16 aa, Homo sapiens
  CDR3 for alpha chain variable domain of TCR clone 329584 (TRAV26-1, TRAJ22)
CIVRVSFWFCKATDLW

SEQ ID NO: 659168 - protein, 13 aa, Homo sapiens
  CDR3 for beta chain variable domain of TCR clone 329584 (TRBV7-9, TRBJ1-2)
CASSLKQNYGYTF

SEQ ID NO: 659169 - protein, 14 aa, Homo sapiens
  CDR3 for alpha chain variable domain of TCR clone 329585 (TRAV27, TRAJ23)
CTGLSYNQGGKLIF

SEQ ID NO: 659170 - protein, 15 aa, Homo sapiens
  CDR3 for beta chain variable domain of TCR clone 329585 (TRBV19, TRBJ2-2)
CASSLNRGVTGELFF

SEQ ID NO: 659171 - protein, 14 aa, Homo sapiens
  CDR3 for alpha chain variable domain of TCR clone 329586 (TRAV9-2, TRAJ38)
CALSNAGNNRKLSW

SEQ ID NO: 659172 - protein, 17 aa, Homo sapiens
  CDR3 for beta chain variable domain of TCR clone 329586 (TRBV20-1, TRBJ2-1)
CSARDPLAGVWDNEQFF

SEQ ID NO: 659173 - protein, 13 aa, Homo sapiens
  CDR3 for alpha chain variable domain of TCR clone 329587 (TRAV13-1, TRAJ49)
CAAIWALGNQFYF

SEQ ID NO: 659174 - protein, 17 aa, Homo sapiens
  CDR3 for beta chain variable domain of TCR clone 329587 (TRBV20-1, TRBJ2-2)
CSASGSGQGGLTGELFF

SEQ ID NO: 659175 - protein, 13 aa, Homo sapiens
  CDR3 for alpha chain variable domain of TCR clone 329588 (TRAV13-2, TRAJ13)
CAERPGGYQKVTF

SEQ ID NO: 659176 - protein, 16 aa, Homo sapiens
  CDR3 for beta chain variable domain of TCR clone 329588 (TRBV7-3, TRBJ2-3)
CASSLGLAGVADTQYF

SEQ ID NO: 659177 - protein, 15 aa, Homo sapiens
  CDR3 for alpha chain variable domain of TCR clone 329589 (TRAV13-1, TRAJ20)
CAASTVRSNDYKLSF

SEQ ID NO: 659178 - protein, 18 aa, Homo sapiens
  CDR3 for beta chain variable domain of TCR clone 329589 (TRBV5-5, TRBJ1-5)
CASSLRQVKGSSNQPQHF

SEQ ID NO: 659179 - protein, 14 aa, Homo sapiens
  CDR3 for alpha chain variable domain of TCR clone 329590 (TRAV1-2, TRAJ16)
CAVNRFSDGQKLLF

SEQ ID NO: 659180 - protein, 16 aa, Homo sapiens
  CDR3 for beta chain variable domain of TCR clone 329590 (TRBV20-1, TRBJ1-4)
CSAPGQGLLTHEKLFF

SEQ ID NO: 659181 - protein, 16 aa, Homo sapiens
  CDR3 for alpha chain variable domain of TCR clone 329591 (TRAV12-2, TRAJ6)
CPSRHPRAGGSYIPTF

SEQ ID NO: 659182 - protein, 16 aa, Homo sapiens
  CDR3 for beta chain variable domain of TCR clone 329591 (TRBV19, TRBJ2-2)
CASSTARASNTGELFF

SEQ ID NO: 659183 - protein, 13 aa, Homo sapiens
  CDR3 for alpha chain variable domain of TCR clone 329592 (TRAV39, TRAJ48)
CAAVNFGNETLTF

SEQ ID NO: 659184 - protein, 12 aa, Homo sapiens
  CDR3 for beta chain variable domain of TCR clone 329592 (TRBV5-5, TRBJ2-5)
CASSYFGETQYF

SEQ ID NO: 659185 - protein, 16 aa, Homo sapiens
  CDR3 for alpha chain variable domain of TCR clone 329593 (TRAV38-1, TRAJ34)
CAFMKHDETYTDKLIF

SEQ ID NO: 659186 - protein, 13 aa, Homo sapiens
  CDR3 for beta chain variable domain of TCR clone 329593 (TRBV12-5, TRBJ2-3)
CASGDRQSDTQYF

SEQ ID NO: 659187 - protein, 14 aa, Homo sapiens
  CDR3 for alpha chain variable domain of TCR clone 329594 (TRAV2, TRAJ22)
CAVEVKRSARQLTF

SEQ ID NO: 659188 - protein, 14 aa, Homo sapiens
  CDR3 for beta chain variable domain of TCR clone 329594 (TRBV19, TRBJ2-2)
CASTPGYSGGELFF

SEQ ID NO: 659189 - protein, 12 aa, Homo sapiens
  CDR3 for alpha chain variable domain of TCR clone 329595 (TRAV21, TRAJ37)
CAVRGNTGKLIF

SEQ ID NO: 659190 - protein, 14 aa, Homo sapiens
  CDR3 for beta chain variable domain of TCR clone 329595 (TRBV4-1, TRBJ2-2)
CASSQAVNTGELFF

SEQ ID NO: 659191 - protein, 13 aa, Homo sapiens
  CDR3 for alpha chain variable domain of TCR clone 329596 (TRAV17, TRAJ26)
CATVDNYGQNFVF

SEQ ID NO: 659192 - protein, 17 aa, Homo sapiens
  CDR3 for beta chain variable domain of TCR clone 329596 (TRBV28, TRBJ2-5)
CASSTPEGDALQETQYV

SEQ ID NO: 659193 - protein, 14 aa, Homo sapiens
  CDR3 for alpha chain variable domain of TCR clone 329597 (TRAV1-2, TRAJ8)
CAVREDTGFQNLVF

SEQ ID NO: 659194 - protein, 17 aa, Homo sapiens
  CDR3 for beta chain variable domain of TCR clone 329597 (TRBV28, TRBJ2-5)
CASSRQGGLAGAETQYF

SEQ ID NO: 659195 - protein, 22 aa, Homo sapiens
  CDR3 for alpha chain variable domain of TCR clone 329598 (TRAV2, TRAJ10)
ILQVREADAAVYYTGGGNKLTF

SEQ ID NO: 659196 - protein, 21 aa, Homo sapiens
  CDR3 for beta chain variable domain of TCR clone 329598 (TRBV4-2, TRBJ2-3)
PCSQKTRPCISVPAAPDTQYF

SEQ ID NO: 659197 - protein, 18 aa, Homo sapiens
  CDR3 for alpha chain variable domain of TCR clone 329599 (TRAV12-3, TRAJ52)
CAMSVGGAGVTSYGKLTF

SEQ ID NO: 659198 - protein, 15 aa, Homo sapiens
  CDR3 for beta chain variable domain of TCR clone 329599 (TRBV6-3, TRBJ2-7)
CASSSPGTVFYEQYF

SEQ ID NO: 659199 - protein, 22 aa, Homo sapiens
  CDR3 for alpha chain variable domain of TCR clone 329600 (TRAV3, )
CAVRDCLNAGSNHIQNPDPAVY

SEQ ID NO: 659200 - protein, 19 aa, Homo sapiens
  CDR3 for beta chain variable domain of TCR clone 329600 (TRBV7-2, TRBJ2-3)
CASSFLSRNWGGGTDTQYF

SEQ ID NO: 659201 - protein, 14 aa, Homo sapiens
  CDR3 for alpha chain variable domain of TCR clone 329601 (TRAV8-6, TRAJ9)
CAVSAYTGCFKTIF

SEQ ID NO: 659202 - protein, 15 aa, Homo sapiens
  CDR3 for beta chain variable domain of TCR clone 329601 (TRBV2, TRBJ1-2)
CASSESRTVNYGYTF

SEQ ID NO: 659203 - protein, 16 aa, Homo sapiens
  CDR3 for alpha chain variable domain of TCR clone 329602 (TRAV3, TRAJ37)
CAVRPHGSGNTGKLIC

SEQ ID NO: 659204 - protein, 13 aa, Homo sapiens
  CDR3 for beta chain variable domain of TCR clone 329602 (TRBV2, TRBJ1-5)
CASGTGGYQPQHF

SEQ ID NO: 659205 - protein, 13 aa, Homo sapiens
  CDR3 for alpha chain variable domain of TCR clone 329603 (TRAV20, TRAJ49)
CAVQARTCNQFYF

SEQ ID NO: 659206 - protein, 14 aa, Homo sapiens
  CDR3 for beta chain variable domain of TCR clone 329603 (TRBV5-1, TRBJ1-1)
CASSLQGASTEAFF

SEQ ID NO: 659207 - protein, 11 aa, Homo sapiens
  CDR3 for alpha chain variable domain of TCR clone 329604 (TRAV13-1, TRAJ6)
CATLGSYIPTF

SEQ ID NO: 659208 - protein, 12 aa, Homo sapiens
  CDR3 for beta chain variable domain of TCR clone 329604 (TRBV11-2, TRBJ2-1)
CASSPGNNEQFY

SEQ ID NO: 659209 - protein, 14 aa, Homo sapiens
  CDR3 for alpha chain variable domain of TCR clone 329605 (TRAV12-2, TRAJ17)
CAVLFKAAGNKLTF

SEQ ID NO: 659210 - protein, 14 aa, Homo sapiens
  CDR3 for beta chain variable domain of TCR clone 329605 (TRBV23-1, TRBJ2-5)
CASSFLRSQETQYF

SEQ ID NO: 659211 - protein, 13 aa, Homo sapiens
  CDR3 for alpha chain variable domain of TCR clone 329606 (TRAV1-1, TRAJ31)
CASYLNNNARLMF

SEQ ID NO: 659212 - protein, 16 aa, Homo sapiens
  CDR3 for beta chain variable domain of TCR clone 329606 (TRBV4-1, TRBJ1-2)
CASSQDAGQVLYGYTF

SEQ ID NO: 659213 - protein, 18 aa, Homo sapiens
  CDR3 for alpha chain variable domain of TCR clone 329607 (TRAV17, TRAJ22)
CFLLLCYEPSGSARQLTF

SEQ ID NO: 659214 - protein, 15 aa, Homo sapiens
  CDR3 for beta chain variable domain of TCR clone 329607 (TRBV4-1, TRBJ2-5)
CASSQWDLYQETQYF

SEQ ID NO: 659215 - protein, 12 aa, Homo sapiens
  CDR3 for alpha chain variable domain of TCR clone 329608 (TRAV12-3, TRAJ42)
CAPGGSQGNLIF

SEQ ID NO: 659216 - protein, 13 aa, Homo sapiens
  CDR3 for beta chain variable domain of TCR clone 329608 (TRBV5-7, TRBJ2-6)
CACTSSGANVLTF

SEQ ID NO: 659217 - protein, 13 aa, Homo sapiens
  CDR3 for alpha chain variable domain of TCR clone 329609 (TRAV13-1, TRAJ10)
CAASGGGGNKLTF

SEQ ID NO: 659218 - protein, 20 aa, Homo sapiens
  CDR3 for beta chain variable domain of TCR clone 329609 (TRBV7-8, TRBJ2-2)
CASSHLFPGPTIHITGELFF

SEQ ID NO: 659219 - protein, 14 aa, Homo sapiens
  CDR3 for alpha chain variable domain of TCR clone 329610 (TRAV1-2, TRAJ16)
CAVNRFSDGQKLLF

SEQ ID NO: 659220 - protein, 19 aa, Homo sapiens
  CDR3 for beta chain variable domain of TCR clone 329610 (TRBV25-1, TRBJ2-2)
CAILVYRVDRGRNTGELFF

SEQ ID NO: 659221 - protein, 16 aa, Homo sapiens
  CDR3 for alpha chain variable domain of TCR clone 329611 (TRAV3, TRAJ37)
CAVRGKGSGNTGKLIF

SEQ ID NO: 659222 - protein, 14 aa, Homo sapiens
  CDR3 for beta chain variable domain of TCR clone 329611 (TRBV6-1, TRBJ1-3)
CARVQGGGGNTIYF

SEQ ID NO: 659223 - protein, 11 aa, Homo sapiens
  CDR3 for alpha chain variable domain of TCR clone 329612 (TRAV8-3, TRAJ49)
CAVGGGNQFYF

SEQ ID NO: 659224 - protein, 15 aa, Homo sapiens
  CDR3 for beta chain variable domain of TCR clone 329612 (TRBV7-8, TRBJ2-1)
CASSLAGGLYNEQFF

SEQ ID NO: 659225 - protein, 19 aa, Homo sapiens
  CDR3 for alpha chain variable domain of TCR clone 329613 (TRAV1-2, TRAJ26)
CLLPLCCERPDNYGQNFVF

SEQ ID NO: 659226 - protein, 16 aa, Homo sapiens
  CDR3 for beta chain variable domain of TCR clone 329613 (TRBV2, TRBJ2-3)
CASSTAVEGVTDTQYF

SEQ ID NO: 659227 - protein, 14 aa, Homo sapiens
  CDR3 for alpha chain variable domain of TCR clone 329614 (TRAV30, TRAJ26)
CGTEIVSYGQNFVF

SEQ ID NO: 659228 - protein, 13 aa, Homo sapiens
  CDR3 for beta chain variable domain of TCR clone 329614 (TRBV19, TRBJ1-3)
CASRLALGNTMYF

SEQ ID NO: 659229 - protein, 13 aa, Homo sapiens
  CDR3 for alpha chain variable domain of TCR clone 329615 (TRAV21, TRAJ27)
CAARPGNAGKSTF

SEQ ID NO: 659230 - protein, 15 aa, Homo sapiens
  CDR3 for beta chain variable domain of TCR clone 329615 (TRBV2, TRBJ2-1)
CASSEEREGDNEQFF

SEQ ID NO: 659231 - protein, 17 aa, Homo sapiens
  CDR3 for alpha chain variable domain of TCR clone 329616 (TRAV3, TRAJ38)
CAVRDCLNAGNNRTLIW

SEQ ID NO: 659232 - protein, 16 aa, Homo sapiens
  CDR3 for beta chain variable domain of TCR clone 329616 (TRBV20-1, TRBJ1-4)
CSAPGQGLLTNEKLFF

SEQ ID NO: 659233 - protein, 14 aa, Homo sapiens
  CDR3 for alpha chain variable domain of TCR clone 329617 (TRAV8-6, TRAJ37)
CAARLSGNTGKLIF

SEQ ID NO: 659234 - protein, 14 aa, Homo sapiens
  CDR3 for beta chain variable domain of TCR clone 329617 (TRBV13, TRBJ2-7)
CASSLKGASYEQYF

SEQ ID NO: 659235 - protein, 15 aa, Homo sapiens
  CDR3 for alpha chain variable domain of TCR clone 329618 (TRAV29/DV5, TRAJ42)
CAAKTDGGSQGNLIF

SEQ ID NO: 659236 - protein, 15 aa, Homo sapiens
  CDR3 for beta chain variable domain of TCR clone 329618 (TRBV5-1, TRBJ2-2)
CASSSQGGNTGELFF

SEQ ID NO: 659237 - protein, 12 aa, Homo sapiens
  CDR3 for alpha chain variable domain of TCR clone 329619 (TRAV17, TRAJ49)
CATVTTGNQFYF

SEQ ID NO: 659238 - protein, 12 aa, Homo sapiens
  CDR3 for beta chain variable domain of TCR clone 329619 (TRBV11-2, TRBJ2-1)
CASSPGNNEQFF

SEQ ID NO: 659239 - protein, 13 aa, Homo sapiens
  CDR3 for alpha chain variable domain of TCR clone 329620 (TRAV2, TRAJ40)
CAVVTSGTYKYIF

SEQ ID NO: 659240 - protein, 16 aa, Homo sapiens
  CDR3 for beta chain variable domain of TCR clone 329620 (TRBV29-1, TRBJ1-2)
CSVEANRDIAKYGYTF

SEQ ID NO: 659241 - protein, 12 aa, Homo sapiens
  CDR3 for alpha chain variable domain of TCR clone 329621 (TRAV2, TRAJ9)
CAVVAGGFKTIF

SEQ ID NO: 659242 - protein, 14 aa, Homo sapiens
  CDR3 for beta chain variable domain of TCR clone 329621 (TRBV12-5, TRBJ2-5)
CASGSRTHQETQYF

SEQ ID NO: 659243 - protein, 15 aa, Homo sapiens
  CDR3 for alpha chain variable domain of TCR clone 329622 (TRAV4, TRAJ36)
CLVGDRQTGAINLFF

SEQ ID NO: 659244 - protein, 15 aa, Homo sapiens
  CDR3 for beta chain variable domain of TCR clone 329622 (TRBV7-6, TRBJ2-1)
CASSSLAGEGNEQFF

SEQ ID NO: 659245 - protein, 14 aa, Homo sapiens
  CDR3 for alpha chain variable domain of TCR clone 329623 (TRAV8-4, TRAJ9)
CAVRINTGGFKTIV

SEQ ID NO: 659246 - protein, 15 aa, Homo sapiens
  CDR3 for beta chain variable domain of TCR clone 329623 (TRBV10-2, TRBJ2-6)
CASSEQGTGANVLTF

SEQ ID NO: 659247 - protein, 11 aa, Homo sapiens
  CDR3 for alpha chain variable domain of TCR clone 329624 (TRAV35, TRAJ30)
CAPGGDDKIIF

SEQ ID NO: 659248 - protein, 15 aa, Homo sapiens
  CDR3 for beta chain variable domain of TCR clone 329624 (TRBV28, TRBJ2-7)
CASRPWDRFSYEQYF

SEQ ID NO: 659249 - protein, 14 aa, Homo sapiens
  CDR3 for alpha chain variable domain of TCR clone 329625 (TRAV16, TRAJ39)
CALSKNNAGNMPTF

SEQ ID NO: 659250 - protein, 18 aa, Homo sapiens
  CDR3 for beta chain variable domain of TCR clone 329625 (TRBV12-4, TRBJ2-2)
CASSLVAGTRGRTGELFF

SEQ ID NO: 659251 - protein, 13 aa, Homo sapiens
  CDR3 for alpha chain variable domain of TCR clone 329626 (TRAV21, TRAJ27)
CAARPGKAGKSTF

SEQ ID NO: 659252 - protein, 14 aa, Homo sapiens
  CDR3 for beta chain variable domain of TCR clone 329626 (TRBV11-2, TRBJ2-7)
CASSLGAGAYEQYF

SEQ ID NO: 659253 - protein, 12 aa, Homo sapiens
  CDR3 for alpha chain variable domain of TCR clone 329627 (TRAV12-3, TRAJ17)
CAMTLTGNKLTF

SEQ ID NO: 659254 - protein, 15 aa, Homo sapiens
  CDR3 for beta chain variable domain of TCR clone 329627 (TRBV20-1, TRBJ2-7)
CSARDRVPGMDQQYF

SEQ ID NO: 659255 - protein, 15 aa, Homo sapiens
  CDR3 for alpha chain variable domain of TCR clone 329628 (TRAV4, TRAJ30)
CLVGDIMNRDDKIIF

SEQ ID NO: 659256 - protein, 12 aa, Homo sapiens
  CDR3 for beta chain variable domain of TCR clone 329628 (TRBV5-1, TRBJ2-7)
CASSLDSYEQYF

SEQ ID NO: 659257 - protein, 14 aa, Homo sapiens
  CDR3 for alpha chain variable domain of TCR clone 329629 (TRAV9-2, TRAJ39)
CALYIYNAGNMLNF

SEQ ID NO: 659258 - protein, 18 aa, Homo sapiens
  CDR3 for beta chain variable domain of TCR clone 329629 (TRBV20-1, TRBJ2-6)
CSAETTPTHGSGANVLTF

SEQ ID NO: 659259 - protein, 12 aa, Homo sapiens
  CDR3 for alpha chain variable domain of TCR clone 329630 (TRAV13-1, TRAJ44)
VGGGGTARKLTF

SEQ ID NO: 659260 - protein, 14 aa, Homo sapiens
  CDR3 for beta chain variable domain of TCR clone 329630 (TRBV7-2, TRBJ2-5)
CASSPRGSSETQYF

SEQ ID NO: 659261 - protein, 14 aa, Homo sapiens
  CDR3 for alpha chain variable domain of TCR clone 329631 (TRAV1-2, TRAJ28)
CVARSGAGSYQLTF

SEQ ID NO: 659262 - protein, 17 aa, Homo sapiens
  CDR3 for beta chain variable domain of TCR clone 329631 (TRBV28, TRBJ2-5)
CASSTPEGDALQETQYF

SEQ ID NO: 659263 - protein, 14 aa, Homo sapiens
  CDR3 for alpha chain variable domain of TCR clone 329632 (TRAV29/DV5, TRAJ36)
CAARHKTGANNLFF

SEQ ID NO: 659264 - protein, 15 aa, Homo sapiens
  CDR3 for beta chain variable domain of TCR clone 329632 (TRBV7-9, TRBJ1-4)
CASSARTGGNEKLFF

SEQ ID NO: 659265 - protein, 15 aa, Homo sapiens
  CDR3 for alpha chain variable domain of TCR clone 329633 (TRAV12-3, TRAJ6)
CAMSGTTGGSYIPTF

SEQ ID NO: 659266 - protein, 16 aa, Homo sapiens
  CDR3 for beta chain variable domain of TCR clone 329633 (TRBV20-1, TRBJ1-2)
CSASMGQGVANYGDTF

SEQ ID NO: 659267 - protein, 14 aa, Homo sapiens
  CDR3 for alpha chain variable domain of TCR clone 329634 (TRAV3, TRAJ6)
CAVRDWGGSYIPTL

SEQ ID NO: 659268 - protein, 15 aa, Homo sapiens
  CDR3 for beta chain variable domain of TCR clone 329634 (TRBV5-1, TRBJ2-1)
CASSPPRAPYNEQFF

SEQ ID NO: 659269 - protein, 17 aa, Homo sapiens
  CDR3 for alpha chain variable domain of TCR clone 329635 (TRAV26-1, TRAJ53)
CIVRVDDSGGSNYKLTF

SEQ ID NO: 659270 - protein, 14 aa, Homo sapiens
  CDR3 for beta chain variable domain of TCR clone 329635 (TRBV4-2, TRBJ2-1)
CASGLDRAYNEQFF

SEQ ID NO: 659271 - protein, 16 aa, Homo sapiens
  CDR3 for alpha chain variable domain of TCR clone 329636 (TRAV12-3, TRAJ53)
CAMSPGSGGSNYKLTF

SEQ ID NO: 659272 - protein, 13 aa, Homo sapiens
  CDR3 for beta chain variable domain of TCR clone 329636 (TRBV7-8, TRBJ1-5)
CASSLGGDQPQHF

SEQ ID NO: 659273 - protein, 17 aa, Homo sapiens
  CDR3 for alpha chain variable domain of TCR clone 329637 (TRAV17, TRAJ28)
CATDPRRGGAGSYQLTF

SEQ ID NO: 659274 - protein, 16 aa, Homo sapiens
  CDR3 for beta chain variable domain of TCR clone 329637 (TRBV25-1, TRBJ1-1)
CASSGDRDRGRIKAFF

SEQ ID NO: 659275 - protein, 16 aa, Homo sapiens
  CDR3 for alpha chain variable domain of TCR clone 329638 (TRAV3, TRAJ37)
CAVRGKGSGNTCKLIF

SEQ ID NO: 659276 - protein, 14 aa, Homo sapiens
  CDR3 for beta chain variable domain of TCR clone 329638 (TRBV6-1, TRBJ1-3)
CASVQGGGGNTIYF

SEQ ID NO: 659277 - protein, 12 aa, Homo sapiens
  CDR3 for alpha chain variable domain of TCR clone 329639 (TRAV23/DV6, TRAJ30)
CAASMCADANRD

SEQ ID NO: 659278 - protein, 12 aa, Homo sapiens
  CDR3 for beta chain variable domain of TCR clone 329639 (TRBV19, TRBJ2-3)
CATAQGGDTQYF

SEQ ID NO: 659279 - protein, 15 aa, Homo sapiens
  CDR3 for alpha chain variable domain of TCR clone 329640 (TRAV4, TRAJ39)
CLVGPNNNAGNMLTF

SEQ ID NO: 659280 - protein, 14 aa, Homo sapiens
  CDR3 for beta chain variable domain of TCR clone 329640 (TRBV19, TRBJ2-1)
CTSPTFVLSGEQFF

SEQ ID NO: 659281 - protein, 15 aa, Homo sapiens
  CDR3 for alpha chain variable domain of TCR clone 329641 (TRAV21, TRAJ53)
CATLNSGGSNYKLTF

SEQ ID NO: 659282 - protein, 14 aa, Homo sapiens
  CDR3 for beta chain variable domain of TCR clone 329641 (TRBV7-9, TRBJ2-1)
CASSPRDALYEQFF

SEQ ID NO: 659283 - protein, 15 aa, Homo sapiens
  CDR3 for alpha chain variable domain of TCR clone 329642 (TRAV8-3, TRAJ45)
CASSYSGGGADGLTF

SEQ ID NO: 659284 - protein, 18 aa, Homo sapiens
  CDR3 for beta chain variable domain of TCR clone 329642 (TRBV10-3, TRBJ2-1)
CASSPDRMGIGSINEQFF

SEQ ID NO: 659285 - protein, 14 aa, Homo sapiens
  CDR3 for alpha chain variable domain of TCR clone 329643 (TRAV12-2, TRAJ40)
CAVKIPSGTYKYIF

SEQ ID NO: 659286 - protein, 16 aa, Homo sapiens
  CDR3 for beta chain variable domain of TCR clone 329643 (TRBV12-4, TRBJ1-5)
CASSSGPRGSNQPQHF

SEQ ID NO: 659287 - protein, 14 aa, Homo sapiens
  CDR3 for alpha chain variable domain of TCR clone 329644 (TRAV20, TRAJ42)
CAVQAGGSQGNLIV

SEQ ID NO: 659288 - protein, 14 aa, Homo sapiens
  CDR3 for beta chain variable domain of TCR clone 329644 (TRBV28, TRBJ1-2)
CASRIQGANYGYTF

SEQ ID NO: 659289 - protein, 17 aa, Homo sapiens
  CDR3 for alpha chain variable domain of TCR clone 329645 (TRAV8-4, TRAJ8)
CAVSAGEANTGFQKLVF

SEQ ID NO: 659290 - protein, 16 aa, Homo sapiens
  CDR3 for beta chain variable domain of TCR clone 329645 (TRBV3-1, TRBJ2-2)
CASSHYSGRSTGELFF

SEQ ID NO: 659291 - protein, 14 aa, Homo sapiens
  CDR3 for alpha chain variable domain of TCR clone 329646 (TRAV26-1, TRAJ39)
CIVRGSRAGNMLNF

SEQ ID NO: 659292 - protein, 15 aa, Homo sapiens
  CDR3 for beta chain variable domain of TCR clone 329646 (TRBV7-9, TRBJ1-5)
RASSQGHQPNQPQHF

SEQ ID NO: 659293 - protein, 14 aa, Homo sapiens
  CDR3 for alpha chain variable domain of TCR clone 329647 (TRAV13-1, TRAJ17)
CAASRGAAGNKLTF

SEQ ID NO: 659294 - protein, 14 aa, Homo sapiens
  CDR3 for beta chain variable domain of TCR clone 329647 (TRBV11-1, TRBJ2-7)
CASSLEREWGEQYF

SEQ ID NO: 659295 - protein, 18 aa, Homo sapiens
  CDR3 for alpha chain variable domain of TCR clone 329648 (TRAV13-1, TRAJ52)
CAASKRSAGGTSYGKLTF

SEQ ID NO: 659296 - protein, 13 aa, Homo sapiens
  CDR3 for beta chain variable domain of TCR clone 329648 (TRBV12-4, TRBJ1-2)
CASSLRQGNGYTF

SEQ ID NO: 659297 - protein, 12 aa, Homo sapiens
  CDR3 for alpha chain variable domain of TCR clone 329649 (TRAV3, TRAJ43)
CAVRGPDNDMRF

SEQ ID NO: 659298 - protein, 18 aa, Homo sapiens
  CDR3 for beta chain variable domain of TCR clone 329649 (TRBV7-6, TRBJ2-1)
CASSPRTSGMSSYNEQFF

SEQ ID NO: 659299 - protein, 14 aa, Homo sapiens
  CDR3 for alpha chain variable domain of TCR clone 329650 (TRAV12-2, TRAJ13)
CAVKKTGGYQNVTF

SEQ ID NO: 659300 - protein, 14 aa, Homo sapiens
  CDR3 for beta chain variable domain of TCR clone 329650 (TRBV19, TRBJ2-1)
CASPTFVLSGEQFF

SEQ ID NO: 659301 - protein, 14 aa, Homo sapiens
  CDR3 for alpha chain variable domain of TCR clone 329651 (TRAV36/DV7, TRAJ40)
CAVEGASGTYKYIF

SEQ ID NO: 659302 - protein, 12 aa, Homo sapiens
  CDR3 for beta chain variable domain of TCR clone 329651 (TRBV11-2, TRBJ2-2)
CASSLGGGELFF

SEQ ID NO: 659303 - protein, 15 aa, Homo sapiens
  CDR3 for alpha chain variable domain of TCR clone 329652 (TRAV30, TRAJ57)
CGTAIPQGGSEKLFF

SEQ ID NO: 659304 - protein, 13 aa, Homo sapiens
  CDR3 for beta chain variable domain of TCR clone 329652 (TRBV7-9, TRBJ1-2)
CASSPSNFWGYSF

SEQ ID NO: 659305 - protein, 14 aa, Homo sapiens
  CDR3 for alpha chain variable domain of TCR clone 329653 (TRAV3, TRAJ22)
CAVRDYGSARQLTF

SEQ ID NO: 659306 - protein, 13 aa, Homo sapiens
  CDR3 for beta chain variable domain of TCR clone 329653 (TRBV11-2, TRBJ2-5)
CASGHGARETQYF

SEQ ID NO: 659307 - protein, 15 aa, Homo sapiens
  CDR3 for alpha chain variable domain of TCR clone 329654 (TRAV4, TRAJ36)
CLVGDRQTGANNLFF

SEQ ID NO: 659308 - protein, 15 aa, Homo sapiens
  CDR3 for beta chain variable domain of TCR clone 329654 (TRBV7-6, TRBJ2-1)
CASSSLAGEGNERFF

SEQ ID NO: 659309 - protein, 17 aa, Homo sapiens
  CDR3 for alpha chain variable domain of TCR clone 329655 (TRAV13-1, TRAJ28)
CAASPPYSGAGSYQLTF

SEQ ID NO: 659310 - protein, 13 aa, Homo sapiens
  CDR3 for beta chain variable domain of TCR clone 329655 (TRBV12-4, TRBJ2-7)
CASSPTETYEQYF

SEQ ID NO: 659311 - protein, 12 aa, Homo sapiens
  CDR3 for alpha chain variable domain of TCR clone 329656 (TRAV1-2, TRAJ31)
CAVRDLNARLMF

SEQ ID NO: 659312 - protein, 13 aa, Homo sapiens
  CDR3 for beta chain variable domain of TCR clone 329656 (TRBV7-9, TRBJ1-2)
CASSLKQNYGYTF

SEQ ID NO: 659313 - protein, 13 aa, Homo sapiens
  CDR3 for alpha chain variable domain of TCR clone 329657 (TRAV1-1, TRAJ9)
CAAKNTGGFKTIF

SEQ ID NO: 659314 - protein, 12 aa, Homo sapiens
  CDR3 for beta chain variable domain of TCR clone 329657 (TRBV7-9, TRBJ2-7)
CASSIKREEQYF

SEQ ID NO: 659315 - protein, 16 aa, Homo sapiens
  CDR3 for alpha chain variable domain of TCR clone 329658 (TRAV26-1, TRAJ33)
CIVPFWGEDSNYQLIW

SEQ ID NO: 659316 - protein, 13 aa, Homo sapiens
  CDR3 for beta chain variable domain of TCR clone 329658 (TRBV2, TRBJ1-4)
CASSELGVEKLFF

SEQ ID NO: 659317 - protein, 15 aa, Homo sapiens
  CDR3 for alpha chain variable domain of TCR clone 329659 (TRAV40, TRAJ53)
CLLTNSGGSNYKLTF

SEQ ID NO: 659318 - protein, 14 aa, Homo sapiens
  CDR3 for beta chain variable domain of TCR clone 329659 (TRBV19, TRBJ2-1)
CASPTFVLSGEQFF

SEQ ID NO: 659319 - protein, 15 aa, Homo sapiens
  CDR3 for alpha chain variable domain of TCR clone 329660 (TRAV3, TRAJ20)
CAVRDIKLSYYKPSF

SEQ ID NO: 659320 - protein, 15 aa, Homo sapiens
  CDR3 for beta chain variable domain of TCR clone 329660 (TRBV7-9, TRBJ1-6)
CASSSPGRGNSPLHF

SEQ ID NO: 659321 - protein, 15 aa, Homo sapiens
  CDR3 for alpha chain variable domain of TCR clone 329661 (TRAV3, TRAJ20)
CAVRDIKLSDYKLSF

SEQ ID NO: 659322 - protein, 13 aa, Homo sapiens
  CDR3 for beta chain variable domain of TCR clone 329661 (TRBV7-9, TRBJ1-2)
CASSLKQNYGYTV

SEQ ID NO: 659323 - protein, 16 aa, Homo sapiens
  CDR3 for alpha chain variable domain of TCR clone 329662 (TRAV12-2, TRAJ28)
CAVITDSGAGIYQLTF

SEQ ID NO: 659324 - protein, 14 aa, Homo sapiens
  CDR3 for beta chain variable domain of TCR clone 329662 (TRBV25-1, TRBJ1-1)
CASTHLGGNTEAFF

SEQ ID NO: 659325 - protein, 13 aa, Homo sapiens
  CDR3 for alpha chain variable domain of TCR clone 329663 (TRAV36/DV7, TRAJ54)
CAVCTQGAQKLVF

SEQ ID NO: 659326 - protein, 14 aa, Homo sapiens
  CDR3 for beta chain variable domain of TCR clone 329663 (TRBV7-7, TRBJ2-2)
CATRQDSDTGELFF

SEQ ID NO: 659327 - protein, 13 aa, Homo sapiens
  CDR3 for alpha chain variable domain of TCR clone 329664 (TRAV23/DV6, TRAJ34)
CAAIENNTDKLIF

SEQ ID NO: 659328 - protein, 13 aa, Homo sapiens
  CDR3 for beta chain variable domain of TCR clone 329664 (TRBV29-1, TRBJ2-7)
CSVGPSGVYEQYF

SEQ ID NO: 659329 - protein, 14 aa, Homo sapiens
  CDR3 for alpha chain variable domain of TCR clone 329665 (TRAV8-3, TRAJ48)
CCGCGQFGNEQLTF

SEQ ID NO: 659330 - protein, 15 aa, Homo sapiens
  CDR3 for beta chain variable domain of TCR clone 329665 (TRBV28, TRBJ2-4)
CAAGSGTLLMGIQYF

SEQ ID NO: 659331 - protein, 14 aa, Homo sapiens
  CDR3 for alpha chain variable domain of TCR clone 329666 (TRAV12-1, TRAJ17)
CVVNYKAAGNKLTF

SEQ ID NO: 659332 - protein, 18 aa, Homo sapiens
  CDR3 for beta chain variable domain of TCR clone 329666 (TRBV11-2, TRBJ2-6)
CASSLNPFLGTGANVLTF

SEQ ID NO: 659333 - protein, 12 aa, Homo sapiens
  CDR3 for alpha chain variable domain of TCR clone 329667 (TRAV27, TRAJ22)
CAGDGAGVEIWF

SEQ ID NO: 659334 - protein, 14 aa, Homo sapiens
  CDR3 for beta chain variable domain of TCR clone 329667 (TRBV20-1, TRBJ2-7)
CSAQRGTSSPGQYF

SEQ ID NO: 659335 - protein, 14 aa, Homo sapiens
  CDR3 for alpha chain variable domain of TCR clone 329668 (TRAV1-2, TRAJ8)
CAVREDTGFQKLVF

SEQ ID NO: 659336 - protein, 13 aa, Homo sapiens
  CDR3 for beta chain variable domain of TCR clone 329668 (TRBV20-1, TRBJ1-4)
CSARTPYNENLFF

SEQ ID NO: 659337 - protein, 14 aa, Homo sapiens
  CDR3 for alpha chain variable domain of TCR clone 329669 (TRAV1-2, TRAJ16)
CPVNRFSDGQKLLF

SEQ ID NO: 659338 - protein, 15 aa, Homo sapiens
  CDR3 for beta chain variable domain of TCR clone 329669 (TRBV20-1, TRBJ2-2)
SAVPRTPRTPGSCFF

SEQ ID NO: 659339 - protein, 15 aa, Homo sapiens
  CDR3 for alpha chain variable domain of TCR clone 329670 (TRAV12-2, TRAJ53)
CAVNGGGGSNYKLPF

SEQ ID NO: 659340 - protein, 13 aa, Homo sapiens
  CDR3 for beta chain variable domain of TCR clone 329670 (TRBV24-1, TRBJ2-2)
CATSDWSTGELFF

SEQ ID NO: 659341 - protein, 13 aa, Homo sapiens
  CDR3 for alpha chain variable domain of TCR clone 329671 (TRAV25, TRAJ26)
CAGIDNYGQNFVF

SEQ ID NO: 659342 - protein, 15 aa, Homo sapiens
  CDR3 for beta chain variable domain of TCR clone 329671 (TRBV10-3, TRBJ2-1)
CAIRNGTSGHNEQFF

SEQ ID NO: 659343 - protein, 15 aa, Homo sapiens
  CDR3 for alpha chain variable domain of TCR clone 329672 (TRAV12-1, TRAJ45)
CVVLSGGGGADGLTF

SEQ ID NO: 659344 - protein, 16 aa, Homo sapiens
  CDR3 for beta chain variable domain of TCR clone 329672 (TRBV6-5, TRBJ2-1)
CASSETLAGHYNEEFF

SEQ ID NO: 659345 - protein, 14 aa, Homo sapiens
  CDR3 for alpha chain variable domain of TCR clone 329673 (TRAV25, TRAJ18)
CAGRQRLNPGEAIL

SEQ ID NO: 659346 - protein, 16 aa, Homo sapiens
  CDR3 for beta chain variable domain of TCR clone 329673 (TRBV15, TRBJ2-3)
CATSRDLGIVTDTQYF

SEQ ID NO: 659347 - protein, 16 aa, Homo sapiens
  CDR3 for alpha chain variable domain of TCR clone 329674 (TRAV30, TRAJ24)
CGTEVVDADSWGKFQF

SEQ ID NO: 659348 - protein, 14 aa, Homo sapiens
  CDR3 for beta chain variable domain of TCR clone 329674 (TRBV12-5, TRBJ2-5)
CASGSRTHQENQYF

SEQ ID NO: 659349 - protein, 11 aa, Homo sapiens
  CDR3 for alpha chain variable domain of TCR clone 329675 (TRAV12-2, TRAJ33)
CAVGSYYQLIW

SEQ ID NO: 659350 - protein, 14 aa, Homo sapiens
  CDR3 for beta chain variable domain of TCR clone 329675 (TRBV6-1, TRBJ2-2)
CASVEHIESGELFF

SEQ ID NO: 659351 - protein, 16 aa, Homo sapiens
  CDR3 for alpha chain variable domain of TCR clone 329676 (TRAV4, TRAJ22)
CLGGDLYSGSARQLTF

SEQ ID NO: 659352 - protein, 14 aa, Homo sapiens
  CDR3 for beta chain variable domain of TCR clone 329676 (TRBV28, TRBJ2-3)
CASSWRGRADTQYF

SEQ ID NO: 659353 - protein, 14 aa, Homo sapiens
  CDR3 for alpha chain variable domain of TCR clone 329677 (TRAV26-1, TRAJ38)
CIADNAGNNRKLIW

SEQ ID NO: 659354 - protein, 15 aa, Homo sapiens
  CDR3 for beta chain variable domain of TCR clone 329677 (TRBV9, TRBJ2-1)
CASSLAESSYNEQFF

SEQ ID NO: 659355 - protein, 23 aa, Homo sapiens
  CDR3 for alpha chain variable domain of TCR clone 329678 (TRAV26-1, TRAJ38)
CIADNAGNNHIQIPDPAVYQLRD

SEQ ID NO: 659356 - protein, 13 aa, Homo sapiens
  CDR3 for beta chain variable domain of TCR clone 329678 (TRBV20-1, TRBJ1-1)
CSARGGGNTEASF

SEQ ID NO: 659357 - protein, 13 aa, Homo sapiens
  CDR3 for alpha chain variable domain of TCR clone 329679 (TRAV8-3, TRAJ48)
CAVVPFGNEKLTF

SEQ ID NO: 659358 - protein, 19 aa, Homo sapiens
  CDR3 for beta chain variable domain of TCR clone 329679 (TRBV25-1, TRBJ2-2)
CAFLVYRVDRGRKTGELFF

SEQ ID NO: 659359 - protein, 14 aa, Homo sapiens
  CDR3 for alpha chain variable domain of TCR clone 329680 (TRAV1-2, TRAJ16)
CAVNRFSDGQKLLF

SEQ ID NO: 659360 - protein, 16 aa, Homo sapiens
  CDR3 for beta chain variable domain of TCR clone 329680 (TRBV15, TRBJ2-5)
CATSPTTGQGMETQYF

SEQ ID NO: 659361 - protein, 14 aa, Homo sapiens
  CDR3 for alpha chain variable domain of TCR clone 329681 (TRAV2, TRAJ8)
CAGRGNTGFQNLVF

SEQ ID NO: 659362 - protein, 13 aa, Homo sapiens
  CDR3 for beta chain variable domain of TCR clone 329681 (TRBV6-5, TRBJ2-7)
CASRTSGIHEQYF

SEQ ID NO: 659363 - protein, 10 aa, Homo sapiens
  CDR3 for alpha chain variable domain of TCR clone 329682 (TRAV30, TRAJ48)
CVIGNEKLTF

SEQ ID NO: 659364 - protein, 16 aa, Homo sapiens
  CDR3 for beta chain variable domain of TCR clone 329682 (TRBV20-1, TRBJ1-4)
CSAPGQGLLTNEKLFF

SEQ ID NO: 659365 - protein, 15 aa, Homo sapiens
  CDR3 for alpha chain variable domain of TCR clone 329683 (TRAV21, TRAJ52)
CCDKCWWTSYGKLTF

SEQ ID NO: 659366 - protein, 17 aa, Homo sapiens
  CDR3 for beta chain variable domain of TCR clone 329683 (TRBV28, TRBJ2-5)
CASSRQGGLAGAETQYF

SEQ ID NO: 659367 - protein, 15 aa, Homo sapiens
  CDR3 for alpha chain variable domain of TCR clone 329684 (TRAV3, TRAJ17)
CAVRATGAAGNKLTF

SEQ ID NO: 659368 - protein, 14 aa, Homo sapiens
  CDR3 for beta chain variable domain of TCR clone 329684 (TRBV6-3, TRBJ1-1)
CASSNLLPGAEAFF

SEQ ID NO: 659369 - protein, 13 aa, Homo sapiens
  CDR3 for alpha chain variable domain of TCR clone 329685 (TRAV12-1, TRAJ39)
CVVNYNAGNMPTF

SEQ ID NO: 659370 - protein, 14 aa, Homo sapiens
  CDR3 for beta chain variable domain of TCR clone 329685 (TRBV27, TRBJ2-3)
CASSPLGTTDTQYF

SEQ ID NO: 659371 - protein, 14 aa, Homo sapiens
  CDR3 for alpha chain variable domain of TCR clone 329686 (TRAV3, TRAJ5)
CAVRDRKTGRRALT

SEQ ID NO: 659372 - protein, 15 aa, Homo sapiens
  CDR3 for beta chain variable domain of TCR clone 329686 (TRBV7-8, TRBJ2-1)
CASSLADSLYNEQFF

SEQ ID NO: 659373 - protein, 14 aa, Homo sapiens
  CDR3 for alpha chain variable domain of TCR clone 329687 (TRAV19, TRAJ27)
CALSEVVNAGKSTF

SEQ ID NO: 659374 - protein, 15 aa, Homo sapiens
  CDR3 for beta chain variable domain of TCR clone 329687 (TRBV9, TRBJ2-1)
CASSVAVAGAVEQFF

SEQ ID NO: 659375 - protein, 17 aa, Homo sapiens
  CDR3 for alpha chain variable domain of TCR clone 329688 (TRAV12-2, TRAJ48)
CASNEKSTFGTGTRLTI

SEQ ID NO: 659376 - protein, 16 aa, Homo sapiens
  CDR3 for beta chain variable domain of TCR clone 329688 (TRBV7-3, TRBJ2-2)
CASSLKRGTLSGELFF

SEQ ID NO: 659377 - protein, 14 aa, Homo sapiens
  CDR3 for alpha chain variable domain of TCR clone 329689 (TRAV8-2, TRAJ4)
CVVSPSGGYNKLIF

SEQ ID NO: 659378 - protein, 15 aa, Homo sapiens
  CDR3 for beta chain variable domain of TCR clone 329689 (TRBV19, TRBJ1-1)
CASTSGQIQNTEALF

SEQ ID NO: 659379 - protein, 14 aa, Homo sapiens
  CDR3 for alpha chain variable domain of TCR clone 329690 (TRAV12-2, TRAJ17)
CAVLFKAAGNKLTF

SEQ ID NO: 659380 - protein, 14 aa, Homo sapiens
  CDR3 for beta chain variable domain of TCR clone 329690 (TRBV15, TRBJ1-2)
CATSRDFDRVGFTV

SEQ ID NO: 659381 - protein, 15 aa, Homo sapiens
  CDR3 for alpha chain variable domain of TCR clone 329691 (TRAV21, TRAJ24)
CAARSSTDSWGKLQF

SEQ ID NO: 659382 - protein, 13 aa, Homo sapiens
  CDR3 for beta chain variable domain of TCR clone 329691 (TRBV7-9, TRBJ2-3)
CASSPGSTDTQYF

SEQ ID NO: 659383 - protein, 12 aa, Homo sapiens
  CDR3 for alpha chain variable domain of TCR clone 329692 (TRAV2, TRAJ31)
CAVEDNNARLMF

SEQ ID NO: 659384 - protein, 14 aa, Homo sapiens
  CDR3 for beta chain variable domain of TCR clone 329692 (TRBV20-1, TRBJ1-4)
CSARSGQSNEKLFF

SEQ ID NO: 659385 - protein, 14 aa, Homo sapiens
  CDR3 for alpha chain variable domain of TCR clone 329693 (TRAV38-1, TRAJ45)
CAYYSVGGADGLTF

SEQ ID NO: 659386 - protein, 20 aa, Homo sapiens
  CDR3 for beta chain variable domain of TCR clone 329693 (TRBV28, TRBJ2-1)
CASTPIGRSPALAGGNGQFF

SEQ ID NO: 659387 - protein, 15 aa, Homo sapiens
  CDR3 for alpha chain variable domain of TCR clone 329694 (TRAV27, TRAJ45)
CAPVDSGGGADGLTF

SEQ ID NO: 659388 - protein, 19 aa, Homo sapiens
  CDR3 for beta chain variable domain of TCR clone 329694 (TRBV23-1, TRBJ1-5)
RQQSIEGTGLGGLYQPQHF

SEQ ID NO: 659389 - protein, 12 aa, Homo sapiens
  CDR3 for alpha chain variable domain of TCR clone 329695 (TRAV16, TRAJ21)
CALLGNFNKFCF

SEQ ID NO: 659390 - protein, 13 aa, Homo sapiens
  CDR3 for beta chain variable domain of TCR clone 329695 (TRBV28, TRBJ2-7)
CASKAGGVYEQYF

SEQ ID NO: 659391 - protein, 17 aa, Homo sapiens
  CDR3 for alpha chain variable domain of TCR clone 329696 (TRAV23/DV6, TRAJ28)
CAALLAYSGAGSYQLPF

SEQ ID NO: 659392 - protein, 13 aa, Homo sapiens
  CDR3 for beta chain variable domain of TCR clone 329696 (TRBV4-2, TRBJ2-3)
CASSQGNTDTQYF

SEQ ID NO: 659393 - protein, 13 aa, Homo sapiens
  CDR3 for alpha chain variable domain of TCR clone 329697 (TRAV12-2, TRAJ20)
CAVYPSNDYKLSF

SEQ ID NO: 659394 - protein, 15 aa, Homo sapiens
  CDR3 for beta chain variable domain of TCR clone 329697 (TRBV5-1, TRBJ2-7)
CASSLYPDGGYEQYF

SEQ ID NO: 659395 - protein, 16 aa, Homo sapiens
  CDR3 for alpha chain variable domain of TCR clone 329698 (TRAV30, TRAJ24)
CGTEIVDADSWGKFQF

SEQ ID NO: 659396 - protein, 20 aa, Homo sapiens
  CDR3 for beta chain variable domain of TCR clone 329698 (TRBV28, TRBJ2-1)
CANTPIGRSPGLAGGNEQFF

SEQ ID NO: 659397 - protein, 14 aa, Homo sapiens
  CDR3 for alpha chain variable domain of TCR clone 329699 (TRAV17, TRAJ57)
CATDPQGASEKLVF

SEQ ID NO: 659398 - protein, 14 aa, Homo sapiens
  CDR3 for beta chain variable domain of TCR clone 329699 (TRBV7-2, TRBJ2-7)
CASSPKTSFYEQYF

SEQ ID NO: 659399 - protein, 17 aa, Homo sapiens
  CDR3 for alpha chain variable domain of TCR clone 329700 (TRAV3, TRAJ6)
CAVRDGPRAGGSDIPTF

SEQ ID NO: 659400 - protein, 15 aa, Homo sapiens
  CDR3 for beta chain variable domain of TCR clone 329700 (TRBV7-8, TRBJ1-5)
CASSLERRGLEPQHF

SEQ ID NO: 659401 - protein, 15 aa, Homo sapiens
  CDR3 for alpha chain variable domain of TCR clone 329701 (TRAV3, TRAJ5)
CAVRDRKTGRRALTF

SEQ ID NO: 659402 - protein, 16 aa, Homo sapiens
  CDR3 for beta chain variable domain of TCR clone 329701 (TRBV2, TRBJ2-3)
CASSTSVEGVTDTQYF

SEQ ID NO: 659403 - protein, 11 aa, Homo sapiens
  CDR3 for alpha chain variable domain of TCR clone 329702 (TRAV17, TRAJ36)
CAPTGANNLFF

SEQ ID NO: 659404 - protein, 15 aa, Homo sapiens
  CDR3 for beta chain variable domain of TCR clone 329702 (TRBV11-3, TRBJ2-3)
CASLKDGREGDTQYF

SEQ ID NO: 659405 - protein, 15 aa, Homo sapiens
  CDR3 for alpha chain variable domain of TCR clone 329703 (TRAV8-6, TRAJ40)
CDVSEAPSGTYKYIF

SEQ ID NO: 659406 - protein, 14 aa, Homo sapiens
  CDR3 for beta chain variable domain of TCR clone 329703 (TRBV6-5, TRBJ2-7)
CASSTSGGNYEQYF

SEQ ID NO: 659407 - protein, 14 aa, Homo sapiens
  CDR3 for alpha chain variable domain of TCR clone 329704 (TRAV12-3, TRAJ42)
CAMNYGGSQGNLTF

SEQ ID NO: 659408 - protein, 15 aa, Homo sapiens
  CDR3 for beta chain variable domain of TCR clone 329704 (TRBV5-7, TRBJ1-5)
CASSYGKLWDQHQHF

SEQ ID NO: 659409 - protein, 15 aa, Homo sapiens
  CDR3 for alpha chain variable domain of TCR clone 329705 (TRAV26-1, TRAJ29)
CIARVEGSGNTPLVF

SEQ ID NO: 659410 - protein, 15 aa, Homo sapiens
  CDR3 for beta chain variable domain of TCR clone 329705 (TRBV7-9, TRBJ1-5)
CASSQGYQPNQPQHF

SEQ ID NO: 659411 - protein, 18 aa, Homo sapiens
  CDR3 for alpha chain variable domain of TCR clone 329706 (TRAV21, TRAJ52)
CAVRASPAGGTSYGKLTF

SEQ ID NO: 659412 - protein, 13 aa, Homo sapiens
  CDR3 for beta chain variable domain of TCR clone 329706 (TRBV12-5, TRBJ2-3)
CASGDRQSDTQYF

SEQ ID NO: 659413 - protein, 15 aa, Homo sapiens
  CDR3 for alpha chain variable domain of TCR clone 329707 (TRAV8-3, TRAJ45)
RASSYSGGGADGLTF

SEQ ID NO: 659414 - protein, 13 aa, Homo sapiens
  CDR3 for beta chain variable domain of TCR clone 329707 (TRBV12-4, TRBJ2-2)
CASSITGSGELFF

SEQ ID NO: 659415 - protein, 13 aa, Homo sapiens
  CDR3 for alpha chain variable domain of TCR clone 329708 (TRAV13-1, TRAJ15)
CAALYQAGTALIF

SEQ ID NO: 659416 - protein, 14 aa, Homo sapiens
  CDR3 for beta chain variable domain of TCR clone 329708 (TRBV7-2, TRBJ1-1)
CASSFLTGTTEAFF

SEQ ID NO: 659417 - protein, 16 aa, Homo sapiens
  CDR3 for alpha chain variable domain of TCR clone 329709 (TRAV12-2, TRAJ10)
CAVNRVLTGGGNKFTF

SEQ ID NO: 659418 - protein, 14 aa, Homo sapiens
  CDR3 for beta chain variable domain of TCR clone 329709 (TRBV9, TRBJ2-1)
CASSVALAVNEQFF

SEQ ID NO: 659419 - protein, 12 aa, Homo sapiens
  CDR3 for alpha chain variable domain of TCR clone 329710 (TRAV13-1, TRAJ48)
CAANFGNEKLTF

SEQ ID NO: 659420 - protein, 17 aa, Homo sapiens
  CDR3 for beta chain variable domain of TCR clone 329710 (TRBV7-6, TRBJ2-5)
CASSPGLADPWGETQYF

SEQ ID NO: 659421 - protein, 14 aa, Homo sapiens
  CDR3 for alpha chain variable domain of TCR clone 329711 (TRAV27, TRAJ22)
CAGVIPGSARQLTF

SEQ ID NO: 659422 - protein, 16 aa, Homo sapiens
  CDR3 for beta chain variable domain of TCR clone 329711 (TRBV9, TRBJ2-7)
CASSVGLGGGTYEQYF

SEQ ID NO: 659423 - protein, 20 aa, Homo sapiens
  CDR3 for alpha chain variable domain of TCR clone 329712 (TRAV30, TRAJ32)
MNLLLRHREGYGGATNKLIF

SEQ ID NO: 659424 - protein, 13 aa, Homo sapiens
  CDR3 for beta chain variable domain of TCR clone 329712 (TRBV10-3, TRBJ2-7)
CASKLAVNYEQYF

SEQ ID NO: 659425 - protein, 12 aa, Homo sapiens
  CDR3 for alpha chain variable domain of TCR clone 329713 (TRAV29/DV5, TRAJ15)
CASNQAGTALIF

SEQ ID NO: 659426 - protein, 10 aa, Homo sapiens
  CDR3 for beta chain variable domain of TCR clone 329713 (TRBV11-2, TRBJ2-2)
CASSSDRVNA

SEQ ID NO: 659427 - protein, 13 aa, Homo sapiens
  CDR3 for alpha chain variable domain of TCR clone 329714 (TRAV12-1, TRAJ11)
CVVTRGGYSTLTF

SEQ ID NO: 659428 - protein, 13 aa, Homo sapiens
  CDR3 for beta chain variable domain of TCR clone 329714 (TRBV7-7, TRBJ2-5)
CASSRSGQETQYF

SEQ ID NO: 659429 - protein, 15 aa, Homo sapiens
  CDR3 for alpha chain variable domain of TCR clone 329715 (TRAV12-1, TRAJ45)
CVVLSGGGGADGLTF

SEQ ID NO: 659430 - protein, 19 aa, Homo sapiens
  CDR3 for beta chain variable domain of TCR clone 329715 (TRBV2, TRBJ2-7)
CSSSDDETSGRANDYEQYF

SEQ ID NO: 659431 - protein, 14 aa, Homo sapiens
  CDR3 for alpha chain variable domain of TCR clone 329716 (TRAV2, TRAJ9)
CAVEDRSGGFKTLF

SEQ ID NO: 659432 - protein, 13 aa, Homo sapiens
  CDR3 for beta chain variable domain of TCR clone 329716 (TRBV7-9, TRBJ1-2)
CASSLKQNYGYTF

SEQ ID NO: 659433 - protein, 14 aa, Homo sapiens
  CDR3 for alpha chain variable domain of TCR clone 329717 (TRAV38-1, TRAJ45)
CASHSGGGADGLTF

SEQ ID NO: 659434 - protein, 14 aa, Homo sapiens
  CDR3 for beta chain variable domain of TCR clone 329717 (TRBV11-2, TRBJ2-3)
CASSRLALTDTQYF

SEQ ID NO: 659435 - protein, 14 aa, Homo sapiens
  CDR3 for alpha chain variable domain of TCR clone 329718 (TRAV12-2, TRAJ48)
CAANAFCGNEKLTF

SEQ ID NO: 659436 - protein, 13 aa, Homo sapiens
  CDR3 for beta chain variable domain of TCR clone 329718 (TRBV28, TRBJ2-7)
CAGAQQGLDEQYF

SEQ ID NO: 659437 - protein, 14 aa, Homo sapiens
  CDR3 for alpha chain variable domain of TCR clone 329719 (TRAV12-2, TRAJ44)
CAVNPADTASKLTF

SEQ ID NO: 659438 - protein, 13 aa, Homo sapiens
  CDR3 for beta chain variable domain of TCR clone 329719 (TRBV20-1, TRBJ1-6)
CSAPLGVGSPLHF

SEQ ID NO: 659439 - protein, 15 aa, Homo sapiens
  CDR3 for alpha chain variable domain of TCR clone 329720 (TRAV26-1, TRAJ56)
CIVRVDNGANSKRTF

SEQ ID NO: 659440 - protein, 15 aa, Homo sapiens
  CDR3 for beta chain variable domain of TCR clone 329720 (TRBV20-1, TRBJ2-7)
CSARDPTEVGHEQYF

SEQ ID NO: 659441 - protein, 23 aa, Homo sapiens
  CDR3 for alpha chain variable domain of TCR clone 329721 (TRAV8-4, TRAJ38)
CARLNAGNNHIQNPDPALYQLRD

SEQ ID NO: 659442 - protein, 14 aa, Homo sapiens
  CDR3 for beta chain variable domain of TCR clone 329721 (TRBV7-8, TRBJ2-3)
CASSLEAGTDTQYF

SEQ ID NO: 659443 - protein, 13 aa, Homo sapiens
  CDR3 for alpha chain variable domain of TCR clone 329722 (TRAV9-2, TRAJ12)
CARGEDSSYKLIF

SEQ ID NO: 659444 - protein, 16 aa, Homo sapiens
  CDR3 for beta chain variable domain of TCR clone 329722 (TRBV2, TRBJ2-1)
CASSVGGSLSYNEQFF

SEQ ID NO: 659445 - protein, 15 aa, Homo sapiens
  CDR3 for alpha chain variable domain of TCR clone 329723 (TRAV13-1, TRAJ9)
CAASDRNTGGFKTIF

SEQ ID NO: 659446 - protein, 15 aa, Homo sapiens
  CDR3 for beta chain variable domain of TCR clone 329723 (TRBV4-1, TRBJ1-1)
CASSQVVPAGTEAFF

SEQ ID NO: 659447 - protein, 14 aa, Homo sapiens
  CDR3 for alpha chain variable domain of TCR clone 329724 (TRAV9-2, TRAJ39)
CSLYIYNAGNMLTF

SEQ ID NO: 659448 - protein, 15 aa, Homo sapiens
  CDR3 for beta chain variable domain of TCR clone 329724 (TRBV15, TRBJ2-7)
CATSRDRSPRNEQYF

SEQ ID NO: 659449 - protein, 11 aa, Homo sapiens
  CDR3 for alpha chain variable domain of TCR clone 329725 (TRAV20, TRAJ23)
RACNQGGKLIF

SEQ ID NO: 659450 - protein, 16 aa, Homo sapiens
  CDR3 for beta chain variable domain of TCR clone 329725 (TRBV7-8, TRBJ2-5)
CASSFGGQPAQETQYF

SEQ ID NO: 659451 - protein, 12 aa, Homo sapiens
  CDR3 for alpha chain variable domain of TCR clone 329726 (TRAV13-1, TRAJ21)
CAAKEGFNKFYF

SEQ ID NO: 659452 - protein, 15 aa, Homo sapiens
  CDR3 for beta chain variable domain of TCR clone 329726 (TRBV12-4, TRBJ1-5)
CASSFFGGRDQPQHF

SEQ ID NO: 659453 - protein, 14 aa, Homo sapiens
  CDR3 for alpha chain variable domain of TCR clone 329727 (TRAV1-1, TRAJ33)
CAVRPEASNYQLIW

SEQ ID NO: 659454 - protein, 16 aa, Homo sapiens
  CDR3 for beta chain variable domain of TCR clone 329727 (TRBV19, TRBJ2-6)
CASSMSGLSGANVLTF

SEQ ID NO: 659455 - protein, 16 aa, Homo sapiens
  CDR3 for alpha chain variable domain of TCR clone 329728 (TRAV3, TRAJ10)
CAVRDMNAGGGNKLTF

SEQ ID NO: 659456 - protein, 12 aa, Homo sapiens
  CDR3 for beta chain variable domain of TCR clone 329728 (TRBV18, TRBJ2-5)
CASSPSKETQYF

SEQ ID NO: 659457 - protein, 14 aa, Homo sapiens
  CDR3 for alpha chain variable domain of TCR clone 329729 (TRAV12-3, TRAJ10)
SHLPLTGGGNKLTF

SEQ ID NO: 659458 - protein, 17 aa, Homo sapiens
  CDR3 for beta chain variable domain of TCR clone 329729 (TRBV20-1, TRBJ2-1)
CSASSSGLAGSYKEQFF

SEQ ID NO: 659459 - protein, 16 aa, Homo sapiens
  CDR3 for alpha chain variable domain of TCR clone 329730 (TRAV4, TRAJ9)
CLVADPNRPGGFKTIF

SEQ ID NO: 659460 - protein, 16 aa, Homo sapiens
  CDR3 for beta chain variable domain of TCR clone 329730 (TRBV28, TRBJ1-4)
CASSPPYRGRSEKLFF

SEQ ID NO: 659461 - protein, 13 aa, Homo sapiens
  CDR3 for alpha chain variable domain of TCR clone 329731 (TRAV27, TRAJ49)
CAPRPYTGYQFYF

SEQ ID NO: 659462 - protein, 16 aa, Homo sapiens
  CDR3 for beta chain variable domain of TCR clone 329731 (TRBV4-1, TRBJ1-2)
CASSQDAGQVLYGYTF

SEQ ID NO: 659463 - protein, 13 aa, Homo sapiens
  CDR3 for alpha chain variable domain of TCR clone 329732 (TRAV12-3, TRAJ9)
FAMSADGGFKTIF

SEQ ID NO: 659464 - protein, 14 aa, Homo sapiens
  CDR3 for beta chain variable domain of TCR clone 329732 (TRBV6-1, TRBJ2-7)
CASSEGVNPYEQYF

SEQ ID NO: 659465 - protein, 11 aa, Homo sapiens
  CDR3 for alpha chain variable domain of TCR clone 329733 (TRAV26-1, TRAJ37)
CIVIVGRKLIF

SEQ ID NO: 659466 - protein, 15 aa, Homo sapiens
  CDR3 for beta chain variable domain of TCR clone 329733 (TRBV20-1, TRBJ1-1)
CSASWDRFLNTEAFF

SEQ ID NO: 659467 - protein, 14 aa, Homo sapiens
  CDR3 for alpha chain variable domain of TCR clone 329734 (TRAV2, TRAJ37)
CAVDFTSNTGKLIF

SEQ ID NO: 659468 - protein, 19 aa, Homo sapiens
  CDR3 for beta chain variable domain of TCR clone 329734 (TRBV7-2, TRBJ2-3)
CASSSQGGPRLAGADTQYF

SEQ ID NO: 659469 - protein, 15 aa, Homo sapiens
  CDR3 for alpha chain variable domain of TCR clone 329735 (TRAV14/DV4, TRAJ46)
CVMREKKSGGDKLTF

SEQ ID NO: 659470 - protein, 13 aa, Homo sapiens
  CDR3 for beta chain variable domain of TCR clone 329735 (TRBV20-1, TRBJ2-5)
CSAREAFQETQYF

SEQ ID NO: 659471 - protein, 14 aa, Homo sapiens
  CDR3 for alpha chain variable domain of TCR clone 329736 (TRAV13-2, TRAJ27)
CAEMQPTNAGKSTF

SEQ ID NO: 659472 - protein, 15 aa, Homo sapiens
  CDR3 for beta chain variable domain of TCR clone 329736 (TRBV7-2, TRBJ2-6)
CASSFGQAGANVLTF

SEQ ID NO: 659473 - protein, 13 aa, Homo sapiens
  CDR3 for alpha chain variable domain of TCR clone 329737 (TRAV9-2, TRAJ44)
CALLTGTASKLTF

SEQ ID NO: 659474 - protein, 16 aa, Homo sapiens
  CDR3 for beta chain variable domain of TCR clone 329737 (TRBV10-3, TRBJ2-1)
CAISGVGDGGGGEQFF

SEQ ID NO: 659475 - protein, 12 aa, Homo sapiens
  CDR3 for alpha chain variable domain of TCR clone 329738 (TRAV21, TRAJ3)
CCFYSSASTIIF

SEQ ID NO: 659476 - protein, 16 aa, Homo sapiens
  CDR3 for beta chain variable domain of TCR clone 329738 (TRBV9, TRBJ2-1)
CASSVGGGGNYNEQFF

SEQ ID NO: 659477 - protein, 10 aa, Homo sapiens
  CDR3 for alpha chain variable domain of TCR clone 329739 (TRAV21, TRAJ31)
CAVDNARLMF

SEQ ID NO: 659478 - protein, 19 aa, Homo sapiens
  CDR3 for beta chain variable domain of TCR clone 329739 (TRBV6-3, TRBJ2-1)
CASSYSWTSGRATYNEQFF

SEQ ID NO: 659479 - protein, 22 aa, Homo sapiens
  CDR3 for alpha chain variable domain of TCR clone 329740 (TRAV12-1, TRAJ10)
CVWGRYTHGRRKQTHLWDSHSA

SEQ ID NO: 659480 - protein, 16 aa, Homo sapiens
  CDR3 for beta chain variable domain of TCR clone 329740 (TRBV20-1, TRBJ2-1)
CSARSTSESSYNEQFF

SEQ ID NO: 659481 - protein, 19 aa, Homo sapiens
  CDR3 for alpha chain variable domain of TCR clone 329741 (TRAV3, TRAJ6)
CAVRDRNPSRSGGSNILTF

SEQ ID NO: 659482 - protein, 15 aa, Homo sapiens
  CDR3 for beta chain variable domain of TCR clone 329741 (TRBV18, TRBJ2-7)
CASSPTFMDSYEQYF

SEQ ID NO: 659483 - protein, 14 aa, Homo sapiens
  CDR3 for alpha chain variable domain of TCR clone 329742 (TRAV13-1, TRAJ29)
CAASSNSGNTPLVF

SEQ ID NO: 659484 - protein, 15 aa, Homo sapiens
  CDR3 for beta chain variable domain of TCR clone 329742 (TRBV12-4, TRBJ2-5)
CASIPPTGLQETQYF

SEQ ID NO: 659485 - protein, 12 aa, Homo sapiens
  CDR3 for alpha chain variable domain of TCR clone 329743 (TRAV36/DV7, TRAJ50)
CAVEPENLLRQG

SEQ ID NO: 659486 - protein, 16 aa, Homo sapiens
  CDR3 for beta chain variable domain of TCR clone 329743 (TRBV12-5, TRBJ2-5)
CASGPRTSGNQETQYF

SEQ ID NO: 659487 - protein, 17 aa, Homo sapiens
  CDR3 for alpha chain variable domain of TCR clone 329744 (TRAV13-1, TRAJ52)
CAASSGAGGTSYGKLTF

SEQ ID NO: 659488 - protein, 15 aa, Homo sapiens
  CDR3 for beta chain variable domain of TCR clone 329744 (TRBV12-4, TRBJ1-5)
CANTRGSGFGQHQHF

SEQ ID NO: 659489 - protein, 14 aa, Homo sapiens
  CDR3 for alpha chain variable domain of TCR clone 329745 (TRAV1-2, TRAJ16)
CAVNRFSDGQKLLF

SEQ ID NO: 659490 - protein, 17 aa, Homo sapiens
  CDR3 for beta chain variable domain of TCR clone 329745 (TRBV4-1, TRBJ2-7)
CASSQQGQVLTSSTSGR

SEQ ID NO: 659491 - protein, 12 aa, Homo sapiens
  CDR3 for alpha chain variable domain of TCR clone 329746 (TRAV26-2, TRAJ21)
CILKGNFNKFYF

SEQ ID NO: 659492 - protein, 13 aa, Homo sapiens
  CDR3 for beta chain variable domain of TCR clone 329746 (TRBV12-4, TRBJ2-7)
CASSFVPTAEQYF

SEQ ID NO: 659493 - protein, 14 aa, Homo sapiens
  CDR3 for alpha chain variable domain of TCR clone 329747 (TRAV16, TRAJ39)
CALSKNNAGNMLTF

SEQ ID NO: 659494 - protein, 15 aa, Homo sapiens
  CDR3 for beta chain variable domain of TCR clone 329747 (TRBV7-9, TRBJ1-5)
CASSQGDQPNQPQHF

SEQ ID NO: 659495 - protein, 13 aa, Homo sapiens
  CDR3 for alpha chain variable domain of TCR clone 329748 (TRAV2, TRAJ15)
CAVGGQAGTALIF

SEQ ID NO: 659496 - protein, 16 aa, Homo sapiens
  CDR3 for beta chain variable domain of TCR clone 329748 (TRBV6-4, TRBJ2-3)
CASSDRGYSSTDTQYF

SEQ ID NO: 659497 - protein, 13 aa, Homo sapiens
  CDR3 for alpha chain variable domain of TCR clone 329749 (TRAV23/DV6, TRAJ47)
CAASMTRGNKLVF

SEQ ID NO: 659498 - protein, 15 aa, Homo sapiens
  CDR3 for beta chain variable domain of TCR clone 329749 (TRBV20-1, TRBJ2-7)
CSARDRVSGMDEQYF

SEQ ID NO: 659499 - protein, 14 aa, Homo sapiens
  CDR3 for alpha chain variable domain of TCR clone 329750 (TRAV1-2, TRAJ8)
CAGREDTGFQKLVF

SEQ ID NO: 659500 - protein, 14 aa, Homo sapiens
  CDR3 for beta chain variable domain of TCR clone 329750 (TRBV7-6, TRBJ2-3)
CASSLGTVTDTQYF

SEQ ID NO: 659501 - protein, 13 aa, Homo sapiens
  CDR3 for alpha chain variable domain of TCR clone 329751 (TRAV17, TRAJ54)
CATSWGGAQKLGF

SEQ ID NO: 659502 - protein, 15 aa, Homo sapiens
  CDR3 for beta chain variable domain of TCR clone 329751 (TRBV4-3, TRBJ2-3)
CASSPSLLSTDTQYF

SEQ ID NO: 659503 - protein, 13 aa, Homo sapiens
  CDR3 for alpha chain variable domain of TCR clone 329752 (TRAV26-1, TRAJ34)
CIVRPWITDKLIF

SEQ ID NO: 659504 - protein, 14 aa, Homo sapiens
  CDR3 for beta chain variable domain of TCR clone 329752 (TRBV19, TRBJ2-1)
CASPTFVLSGEQFF

SEQ ID NO: 659505 - protein, 17 aa, Homo sapiens
  CDR3 for alpha chain variable domain of TCR clone 329753 (TRAV26-1, TRAJ49)
CIAGNQFYFGTGTSLTV

SEQ ID NO: 659506 - protein, 13 aa, Homo sapiens
  CDR3 for beta chain variable domain of TCR clone 329753 (TRBV10-2, TRBJ2-7)
CASGASGGYEQYF

SEQ ID NO: 659507 - protein, 14 aa, Homo sapiens
  CDR3 for alpha chain variable domain of TCR clone 329754 (TRAV12-2, TRAJ13)
CAVKKTGGYQKVTF

SEQ ID NO: 659508 - protein, 19 aa, Homo sapiens
  CDR3 for beta chain variable domain of TCR clone 329754 (TRBV25-1, TRBJ2-2)
CAILVYRVDRGRKTGELSF

SEQ ID NO: 659509 - protein, 14 aa, Homo sapiens
  CDR3 for alpha chain variable domain of TCR clone 329755 (TRAV1-2, TRAJ16)
CAVRGFSDGQKLLF

SEQ ID NO: 659510 - protein, 12 aa, Homo sapiens
  CDR3 for beta chain variable domain of TCR clone 329755 (TRBV7-8, TRBJ2-7)
CASSLGDREQYF

SEQ ID NO: 659511 - protein, 11 aa, Homo sapiens
  CDR3 for alpha chain variable domain of TCR clone 329756 (TRAV1-1, TRAJ31)
CAAFPNARLMF

SEQ ID NO: 659512 - protein, 13 aa, Homo sapiens
  CDR3 for beta chain variable domain of TCR clone 329756 (TRBV4-1, TRBJ1-1)
CASSRKMYTEAFF

SEQ ID NO: 659513 - protein, 12 aa, Homo sapiens
  CDR3 for alpha chain variable domain of TCR clone 329757 (TRAV8-3, TRAJ20)
CAVGGGDYKLSF

SEQ ID NO: 659514 - protein, 14 aa, Homo sapiens
  CDR3 for beta chain variable domain of TCR clone 329757 (TRBV5-1, TRBJ2-7)
CASSRGESLYEQFF

SEQ ID NO: 659515 - protein, 14 aa, Homo sapiens
  CDR3 for alpha chain variable domain of TCR clone 329758 (TRAV17, TRAJ16)
CATADFSDGQKLLF

SEQ ID NO: 659516 - protein, 17 aa, Homo sapiens
  CDR3 for beta chain variable domain of TCR clone 329758 (TRBV13, TRBJ2-3)
CASSLSRVAGGRNTPYF

SEQ ID NO: 659517 - protein, 14 aa, Homo sapiens
  CDR3 for alpha chain variable domain of TCR clone 329759 (TRAV1-2, TRAJ8)
CAVREDTGFQKLVF

SEQ ID NO: 659518 - protein, 15 aa, Homo sapiens
  CDR3 for beta chain variable domain of TCR clone 329759 (TRBV7-9, TRBJ1-1)
CASSHRGTVNNEAFF

SEQ ID NO: 659519 - protein, 17 aa, Homo sapiens
  CDR3 for alpha chain variable domain of TCR clone 329760 (TRAV13-1, TRAJ31)
CAPRDRLMFGTGTQLVV

SEQ ID NO: 659520 - protein, 12 aa, Homo sapiens
  CDR3 for beta chain variable domain of TCR clone 329760 (TRBV7-9, TRBJ2-7)
CASSLEGYEQYF

SEQ ID NO: 659521 - protein, 16 aa, Homo sapiens
  CDR3 for alpha chain variable domain of TCR clone 329761 (TRAV30, TRAJ24)
CGTEIPDADSWGKFQF

SEQ ID NO: 659522 - protein, 14 aa, Homo sapiens
  CDR3 for beta chain variable domain of TCR clone 329761 (TRBV12-5, TRBJ2-5)
CASGSRTHQETQYF

SEQ ID NO: 659523 - protein, 17 aa, Homo sapiens
  CDR3 for alpha chain variable domain of TCR clone 329762 (TRAV27, TRAJ42)
CAERVIYYGGSQGNLIF

SEQ ID NO: 659524 - protein, 16 aa, Homo sapiens
  CDR3 for beta chain variable domain of TCR clone 329762 (TRBV7-6, TRBJ2-7)
CASSGGTGALSYEQYF

SEQ ID NO: 659525 - protein, 14 aa, Homo sapiens
  CDR3 for alpha chain variable domain of TCR clone 329763 (TRAV13-1, TRAJ44)
CAAKATGLASKLTF

SEQ ID NO: 659526 - protein, 14 aa, Homo sapiens
  CDR3 for beta chain variable domain of TCR clone 329763 (TRBV19, TRBJ2-2)
CASSTLHRSGELFF

SEQ ID NO: 659527 - protein, 13 aa, Homo sapiens
  CDR3 for alpha chain variable domain of TCR clone 329764 (TRAV1-2, TRAJ12)
CAVSIDSSYKLIF

SEQ ID NO: 659528 - protein, 14 aa, Homo sapiens
  CDR3 for beta chain variable domain of TCR clone 329764 (TRBV19, TRBJ2-1)
CASSSGRDYNEQFF

SEQ ID NO: 659529 - protein, 13 aa, Homo sapiens
  CDR3 for alpha chain variable domain of TCR clone 329765 (TRAV13-2, TRAJ41)
CAESINSGYELNF

SEQ ID NO: 659530 - protein, 14 aa, Homo sapiens
  CDR3 for beta chain variable domain of TCR clone 329765 (TRBV2, TRBJ2-1)
CASSEALDGNEQFF

SEQ ID NO: 659531 - protein, 10 aa, Homo sapiens
  CDR3 for alpha chain variable domain of TCR clone 329766 (TRAV12-3, TRAJ18)
CAMSAEAQPW

SEQ ID NO: 659532 - protein, 16 aa, Homo sapiens
  CDR3 for beta chain variable domain of TCR clone 329766 (TRBV7-3, TRBJ2-2)
CASSLKRGTLSGELFF

SEQ ID NO: 659533 - protein, 11 aa, Homo sapiens
  CDR3 for alpha chain variable domain of TCR clone 329767 (TRAV4, TRAJ23)
CLLDQGGKLIF

SEQ ID NO: 659534 - protein, 17 aa, Homo sapiens
  CDR3 for beta chain variable domain of TCR clone 329767 (TRBV13, TRBJ2-3)
CASSLSRVAGGRNTQYF

SEQ ID NO: 659535 - protein, 16 aa, Homo sapiens
  CDR3 for alpha chain variable domain of TCR clone 329768 (TRAV29/DV5, TRAJ36)
CAASAGVETGANSLFF

SEQ ID NO: 659536 - protein, 16 aa, Homo sapiens
  CDR3 for beta chain variable domain of TCR clone 329768 (TRBV5-1, TRBJ2-3)
CASSLGLAVYTDTQYF

SEQ ID NO: 659537 - protein, 11 aa, Homo sapiens
  CDR3 for alpha chain variable domain of TCR clone 329769 (TRAV17, TRAJ31)
CATDRTASLMF

SEQ ID NO: 659538 - protein, 14 aa, Homo sapiens
  CDR3 for beta chain variable domain of TCR clone 329769 (TRBV4-2, TRBJ2-3)
CASSQERGTDTQYF

SEQ ID NO: 659539 - protein, 14 aa, Homo sapiens
  CDR3 for alpha chain variable domain of TCR clone 329770 (TRAV4, TRAJ39)
CLVVRIIMQATCSP

SEQ ID NO: 659540 - protein, 13 aa, Homo sapiens
  CDR3 for beta chain variable domain of TCR clone 329770 (TRBV11-2, TRBJ2-5)
CASSSTGEETQYF

SEQ ID NO: 659541 - protein, 12 aa, Homo sapiens
  CDR3 for alpha chain variable domain of TCR clone 329771 (TRAV2, TRAJ32)
CAVGGATNKLIF

SEQ ID NO: 659542 - protein, 15 aa, Homo sapiens
  CDR3 for beta chain variable domain of TCR clone 329771 (TRBV7-2, TRBJ2-1)
CASSSRTSREDEQCF

SEQ ID NO: 659543 - protein, 12 aa, Homo sapiens
  CDR3 for alpha chain variable domain of TCR clone 329772 (TRAV12-1, TRAJ40)
CVVYSGTYKYIF

SEQ ID NO: 659544 - protein, 15 aa, Homo sapiens
  CDR3 for beta chain variable domain of TCR clone 329772 (TRBV7-9, TRBJ1-6)
CANSSPGRGNSPLHF

SEQ ID NO: 659545 - protein, 16 aa, Homo sapiens
  CDR3 for alpha chain variable domain of TCR clone 329773 (TRAV8-6, TRAJ42)
CAVSEGYGGSKGNLIF

SEQ ID NO: 659546 - protein, 16 aa, Homo sapiens
  CDR3 for beta chain variable domain of TCR clone 329773 (TRBV13, TRBJ2-2)
CASSPRTGEHTGELFF

SEQ ID NO: 659547 - protein, 12 aa, Homo sapiens
  CDR3 for alpha chain variable domain of TCR clone 329774 (TRAV12-3, TRAJ20)
CAMVRGDYKLSF

SEQ ID NO: 659548 - protein, 16 aa, Homo sapiens
  CDR3 for beta chain variable domain of TCR clone 329774 (TRBV7-3, TRBJ2-1)
CASSLSSGGGAKEQFF

SEQ ID NO: 659549 - protein, 13 aa, Homo sapiens
  CDR3 for alpha chain variable domain of TCR clone 329775 (TRAV12-2, TRAJ9)
CAVKWAGGFKTIF

SEQ ID NO: 659550 - protein, 14 aa, Homo sapiens
  CDR3 for beta chain variable domain of TCR clone 329775 (TRBV6-1, TRBJ1-3)
CASVQGGGGNTIYF

SEQ ID NO: 659551 - protein, 16 aa, Homo sapiens
  CDR3 for alpha chain variable domain of TCR clone 329776 (TRAV3, TRAJ37)
CAVRPHGSGNTGKLIV

SEQ ID NO: 659552 - protein, 13 aa, Homo sapiens
  CDR3 for beta chain variable domain of TCR clone 329776 (TRBV19, TRBJ1-2)
CASSVPGQDGYTF

SEQ ID NO: 659553 - protein, 16 aa, Homo sapiens
  CDR3 for alpha chain variable domain of TCR clone 329777 (TRAV3, TRAJ37)
CAVRPHGSGNTGKLIV

SEQ ID NO: 659554 - protein, 14 aa, Homo sapiens
  CDR3 for beta chain variable domain of TCR clone 329777 (TRBV20-1, TRBJ2-1)
CSARGGSSYNEQFF

SEQ ID NO: 659555 - protein, 13 aa, Homo sapiens
  CDR3 for alpha chain variable domain of TCR clone 329778 (TRAV13-1, TRAJ5)
CAASDTGRRALTC

SEQ ID NO: 659556 - protein, 12 aa, Homo sapiens
  CDR3 for beta chain variable domain of TCR clone 329778 (TRBV28, TRBJ2-3)
CASSLYRDTQYF

SEQ ID NO: 659557 - protein, 13 aa, Homo sapiens
  CDR3 for alpha chain variable domain of TCR clone 329779 (TRAV8-3, TRAJ54)
CAVSIQGAQKLVF

SEQ ID NO: 659558 - protein, 12 aa, Homo sapiens
  CDR3 for beta chain variable domain of TCR clone 329779 (TRBV11-2, TRBJ2-1)
CASSPGNNEQFF

SEQ ID NO: 659559 - protein, 14 aa, Homo sapiens
  CDR3 for alpha chain variable domain of TCR clone 329780 (TRAV12-3, TRAJ33)
CAMSAGDSNYQLIW

SEQ ID NO: 659560 - protein, 16 aa, Homo sapiens
  CDR3 for beta chain variable domain of TCR clone 329780 (TRBV7-3, TRBJ2-1)
CASSLEGYRSYNEQFF

SEQ ID NO: 659561 - protein, 16 aa, Homo sapiens
  CDR3 for alpha chain variable domain of TCR clone 329781 (TRAV38-1, TRAJ32)
CAFMKGGGGATKQLIF

SEQ ID NO: 659562 - protein, 13 aa, Homo sapiens
  CDR3 for beta chain variable domain of TCR clone 329781 (TRBV20-1, TRBJ2-5)
CSAREAFQETQYF

SEQ ID NO: 659563 - protein, 15 aa, Homo sapiens
  CDR3 for alpha chain variable domain of TCR clone 329782 (TRAV2, TRAJ9)
CAVEDRGTGGFKTIF

SEQ ID NO: 659564 - protein, 18 aa, Homo sapiens
  CDR3 for beta chain variable domain of TCR clone 329782 (TRBV11-2, TRBJ2-3)
CASSLGGASRGAPNTQYF

SEQ ID NO: 659565 - protein, 15 aa, Homo sapiens
  CDR3 for alpha chain variable domain of TCR clone 329783 (TRAV26-1, TRAJ29)
CIVRVKGSGNTPLVF

SEQ ID NO: 659566 - protein, 15 aa, Homo sapiens
  CDR3 for beta chain variable domain of TCR clone 329783 (TRBV7-9, TRBJ1-5)
CASSQGHKPNQPQHF

SEQ ID NO: 659567 - protein, 10 aa, Homo sapiens
  CDR3 for alpha chain variable domain of TCR clone 329784 (TRAV36/DV7, TRAJ56)
CAGPAVELNF

SEQ ID NO: 659568 - protein, 13 aa, Homo sapiens
  CDR3 for beta chain variable domain of TCR clone 329784 (TRBV7-9, TRBJ2-7)
CASSFWSSYEQYF

SEQ ID NO: 659569 - protein, 17 aa, Homo sapiens
  CDR3 for alpha chain variable domain of TCR clone 329785 (TRAV3, TRAJ6)
CVLRDGPRAGGSYIPTF

SEQ ID NO: 659570 - protein, 14 aa, Homo sapiens
  CDR3 for beta chain variable domain of TCR clone 329785 (TRBV7-2, TRBJ2-7)
CASSPKTSFYEQYF

SEQ ID NO: 659571 - protein, 18 aa, Homo sapiens
  CDR3 for alpha chain variable domain of TCR clone 329786 (TRAV40, TRAJ42)
SSGSRLLNYGGSLGNLIF

SEQ ID NO: 659572 - protein, 13 aa, Homo sapiens
  CDR3 for beta chain variable domain of TCR clone 329786 (TRBV4-1, TRBJ2-2)
CASSQENTGELFF

SEQ ID NO: 659573 - protein, 14 aa, Homo sapiens
  CDR3 for alpha chain variable domain of TCR clone 329787 (TRAV12-2, TRAJ15)
CAPRTGQAGTALIF

SEQ ID NO: 659574 - protein, 14 aa, Homo sapiens
  CDR3 for beta chain variable domain of TCR clone 329787 (TRBV7-2, TRBJ2-7)
CASSPKTSVYEQYF

SEQ ID NO: 659575 - protein, 16 aa, Homo sapiens
  CDR3 for alpha chain variable domain of TCR clone 329788 (TRAV8-1, TRAJ33)
CAVNARGGDSNYQLIW

SEQ ID NO: 659576 - protein, 13 aa, Homo sapiens
  CDR3 for beta chain variable domain of TCR clone 329788 (TRBV7-3, TRBJ1-1)
CASSQDWGAEAFF

SEQ ID NO: 659577 - protein, 14 aa, Homo sapiens
  CDR3 for alpha chain variable domain of TCR clone 329789 (TRAV17, TRAJ57)
CATDPQGGSENLVF

SEQ ID NO: 659578 - protein, 16 aa, Homo sapiens
  CDR3 for beta chain variable domain of TCR clone 329789 (TRBV4-2, TRBJ2-3)
CASSQELAGDTDTQYF

SEQ ID NO: 659579 - protein, 12 aa, Homo sapiens
  CDR3 for alpha chain variable domain of TCR clone 329790 (TRAV13-1, TRAJ49)
CAASPMGNPFYF

SEQ ID NO: 659580 - protein, 17 aa, Homo sapiens
  CDR3 for beta chain variable domain of TCR clone 329790 (TRBV20-1, TRBJ2-1)
CSARDPLAGVWDNEQFF

SEQ ID NO: 659581 - protein, 13 aa, Homo sapiens
  CDR3 for alpha chain variable domain of TCR clone 329791 (TRAV13-1, TRAJ10)
CAAPTGGGNKLTF

SEQ ID NO: 659582 - protein, 15 aa, Homo sapiens
  CDR3 for beta chain variable domain of TCR clone 329791 (TRBV19, TRBJ1-4)
CASSPGTATNEKLVF

SEQ ID NO: 659583 - protein, 12 aa, Homo sapiens
  CDR3 for alpha chain variable domain of TCR clone 329792 (TRAV38-1, TRAJ47)
CAFEPYGNKLVF

SEQ ID NO: 659584 - protein, 13 aa, Homo sapiens
  CDR3 for beta chain variable domain of TCR clone 329792 (TRBV4-2, TRBJ1-1)
CASSQAGNTEAFF

SEQ ID NO: 659585 - protein, 13 aa, Homo sapiens
  CDR3 for alpha chain variable domain of TCR clone 329793 (TRAV34, TRAJ22)
CGAGAGSARQMTF

SEQ ID NO: 659586 - protein, 16 aa, Homo sapiens
  CDR3 for beta chain variable domain of TCR clone 329793 (TRBV7-3, TRBJ2-1)
CASSKPLAGGYNEQFF

SEQ ID NO: 659587 - protein, 16 aa, Homo sapiens
  CDR3 for alpha chain variable domain of TCR clone 329794 (TRAV13-1, TRAJ38)
CAASTSNAGNNRKLIG

SEQ ID NO: 659588 - protein, 15 aa, Homo sapiens
  CDR3 for beta chain variable domain of TCR clone 329794 (TRBV27, TRBJ2-1)
CASSNGGGSSNEQFF

SEQ ID NO: 659589 - protein, 13 aa, Homo sapiens
  CDR3 for alpha chain variable domain of TCR clone 329795 (TRAV4, TRAJ13)
CLVESGGYQKVTF

SEQ ID NO: 659590 - protein, 14 aa, Homo sapiens
  CDR3 for beta chain variable domain of TCR clone 329795 (TRBV19, TRBJ2-1)
CASPTFVLSGEQFF

SEQ ID NO: 659591 - protein, 12 aa, Homo sapiens
  CDR3 for alpha chain variable domain of TCR clone 329796 (TRAV25, TRAJ17)
CAGEAAGNKLTF

SEQ ID NO: 659592 - protein, 15 aa, Homo sapiens
  CDR3 for beta chain variable domain of TCR clone 329796 (TRBV7-9, TRBJ1-6)
CASSSPGRGNSPLHF

SEQ ID NO: 659593 - protein, 16 aa, Homo sapiens
  CDR3 for alpha chain variable domain of TCR clone 329797 (TRAV3, TRAJ4)
CAGRAFFSGGYNKLIF

SEQ ID NO: 659594 - protein, 16 aa, Homo sapiens
  CDR3 for beta chain variable domain of TCR clone 329797 (TRBV6-1, TRBJ1-6)
CASSERGGSGNSPLHF

SEQ ID NO: 659595 - protein, 14 aa, Homo sapiens
  CDR3 for alpha chain variable domain of TCR clone 329798 (TRAV8-3, TRAJ4)
RAVGAAGGYNKLIF

SEQ ID NO: 659596 - protein, 15 aa, Homo sapiens
  CDR3 for beta chain variable domain of TCR clone 329798 (TRBV5-1, TRBJ2-1)
CASSPPRAPYNEQFF

SEQ ID NO: 659597 - protein, 16 aa, Homo sapiens
  CDR3 for alpha chain variable domain of TCR clone 329799 (TRAV13-1, TRAJ22)
CAAKGGRSGSARQLPF

SEQ ID NO: 659598 - protein, 15 aa, Homo sapiens
  CDR3 for beta chain variable domain of TCR clone 329799 (TRBV9, TRBJ1-6)
CASSVAGTGDSPLHF

SEQ ID NO: 659599 - protein, 15 aa, Homo sapiens
  CDR3 for alpha chain variable domain of TCR clone 329800 (TRAV17, TRAJ57)
CATSPSQGGSEKLVF

SEQ ID NO: 659600 - protein, 14 aa, Homo sapiens
  CDR3 for beta chain variable domain of TCR clone 329800 (TRBV12-5, TRBJ2-5)
CASGSRTHQETQYF

SEQ ID NO: 659601 - protein, 15 aa, Homo sapiens
  CDR3 for alpha chain variable domain of TCR clone 329801 (TRAV35, TRAJ40)
CAGQLGTSGTYKYIF

SEQ ID NO: 659602 - protein, 14 aa, Homo sapiens
  CDR3 for beta chain variable domain of TCR clone 329801 (TRBV7-3, TRBJ2-1)
CASSLAGGTNDQFF

SEQ ID NO: 659603 - protein, 12 aa, Homo sapiens
  CDR3 for alpha chain variable domain of TCR clone 329802 (TRAV13-1, TRAJ21)
CASKEGFNKFYF

SEQ ID NO: 659604 - protein, 15 aa, Homo sapiens
  CDR3 for beta chain variable domain of TCR clone 329802 (TRBV7-9, TRBJ1-6)
CASSSPGRGNSPLHF

SEQ ID NO: 659605 - protein, 13 aa, Homo sapiens
  CDR3 for alpha chain variable domain of TCR clone 329803 (TRAV12-2, TRAJ52)
CAVSGTSYGKLTF

SEQ ID NO: 659606 - protein, 16 aa, Homo sapiens
  CDR3 for beta chain variable domain of TCR clone 329803 (TRBV7-2, TRBJ2-7)
CASTSQAASWGYEQYF

SEQ ID NO: 659607 - protein, 11 aa, Homo sapiens
  CDR3 for alpha chain variable domain of TCR clone 329804 (TRAV12-2, TRAJ33)
CAVNSNYQLIW

SEQ ID NO: 659608 - protein, 14 aa, Homo sapiens
  CDR3 for beta chain variable domain of TCR clone 329804 (TRBV28, TRBJ2-2)
CASRIRSGTGELFF

SEQ ID NO: 659609 - protein, 16 aa, Homo sapiens
  CDR3 for alpha chain variable domain of TCR clone 329805 (TRAV8-3, TRAJ10)
CAVGPILTGGGNKLTF

SEQ ID NO: 659610 - protein, 16 aa, Homo sapiens
  CDR3 for beta chain variable domain of TCR clone 329805 (TRBV9, TRBJ2-1)
CASSVGGGGNYNEQFF

SEQ ID NO: 659611 - protein, 13 aa, Homo sapiens
  CDR3 for alpha chain variable domain of TCR clone 329806 (TRAV1-2, TRAJ9)
CAALNAGGFKTIF

SEQ ID NO: 659612 - protein, 12 aa, Homo sapiens
  CDR3 for beta chain variable domain of TCR clone 329806 (TRBV11-3, TRBJ1-1)
CASSHRQGEAFF

SEQ ID NO: 659613 - protein, 15 aa, Homo sapiens
  CDR3 for alpha chain variable domain of TCR clone 329807 (TRAV21, TRAJ53)
SATLNSGGSNYKLTF

SEQ ID NO: 659614 - protein, 15 aa, Homo sapiens
  CDR3 for beta chain variable domain of TCR clone 329807 (TRBV27, TRBJ2-1)
CASSNGGGSSNEQFF

SEQ ID NO: 659615 - protein, 14 aa, Homo sapiens
  CDR3 for alpha chain variable domain of TCR clone 329808 (TRAV12-2, TRAJ13)
CAVKKPGGYQKVTF

SEQ ID NO: 659616 - protein, 16 aa, Homo sapiens
  CDR3 for beta chain variable domain of TCR clone 329808 (TRBV20-1, TRBJ1-2)
CSASMGQGVANYGYIF

SEQ ID NO: 659617 - protein, 14 aa, Homo sapiens
  CDR3 for alpha chain variable domain of TCR clone 329809 (TRAV21, TRAJ28)
CAVGSGAGSYQLTF

SEQ ID NO: 659618 - protein, 14 aa, Homo sapiens
  CDR3 for beta chain variable domain of TCR clone 329809 (TRBV18, TRBJ1-4)
CASSPGPNGEKLFF

SEQ ID NO: 659619 - protein, 14 aa, Homo sapiens
  CDR3 for alpha chain variable domain of TCR clone 329810 (TRAV8-2, TRAJ37)
CVVSISGNTGKLIF

SEQ ID NO: 659620 - protein, 14 aa, Homo sapiens
  CDR3 for beta chain variable domain of TCR clone 329810 (TRBV4-1, TRBJ2-2)
CASSQAVNTGELFF

SEQ ID NO: 659621 - protein, 13 aa, Homo sapiens
  CDR3 for alpha chain variable domain of TCR clone 329811 (TRAV17, TRAJ9)
CATDYTGGFKTIF

SEQ ID NO: 659622 - protein, 20 aa, Homo sapiens
  CDR3 for beta chain variable domain of TCR clone 329811 (TRBV19, TRBJ2-1)
CASSISRTVTSTRLNNEQFF

SEQ ID NO: 659623 - protein, 13 aa, Homo sapiens
  CDR3 for alpha chain variable domain of TCR clone 329812 (TRAV13-1, TRAJ20)
CAARVSNDYKPSF

SEQ ID NO: 659624 - protein, 16 aa, Homo sapiens
  CDR3 for beta chain variable domain of TCR clone 329812 (TRBV11-1, TRBJ1-1)
CATTPRDRAFNTEAFF

SEQ ID NO: 659625 - protein, 14 aa, Homo sapiens
  CDR3 for alpha chain variable domain of TCR clone 329813 (TRAV1-2, TRAJ16)
CAVNRFSDGQKLPF

SEQ ID NO: 659626 - protein, 16 aa, Homo sapiens
  CDR3 for beta chain variable domain of TCR clone 329813 (TRBV19, TRBJ2-1)
CASSKAGPSSYNEQFF

SEQ ID NO: 659627 - protein, 12 aa, Homo sapiens
  CDR3 for alpha chain variable domain of TCR clone 329814 (TRAV13-1, TRAJ21)
CAEKEGFNKFYF

SEQ ID NO: 659628 - protein, 14 aa, Homo sapiens
  CDR3 for beta chain variable domain of TCR clone 329814 (TRBV7-2, TRBJ2-7)
CASSPKTSFYEQYF

SEQ ID NO: 659629 - protein, 15 aa, Homo sapiens
  CDR3 for alpha chain variable domain of TCR clone 329815 (TRAV8-2, TRAJ15)
CVVTMGNQAGTALIF

SEQ ID NO: 659630 - protein, 15 aa, Homo sapiens
  CDR3 for beta chain variable domain of TCR clone 329815 (TRBV7-9, TRBJ1-4)
CASSARTGGNEKLFF

SEQ ID NO: 659631 - protein, 15 aa, Homo sapiens
  CDR3 for alpha chain variable domain of TCR clone 329816 (TRAV38-1, TRAJ37)
CAFIFVSGNTGKLIF

SEQ ID NO: 659632 - protein, 16 aa, Homo sapiens
  CDR3 for beta chain variable domain of TCR clone 329816 (TRBV6-1, TRBJ2-3)
CASSEVIGQGTDTQYF

SEQ ID NO: 659633 - protein, 13 aa, Homo sapiens
  CDR3 for alpha chain variable domain of TCR clone 329817 (TRAV12-2, TRAJ39)
CAVNNNAGNMLTF

SEQ ID NO: 659634 - protein, 14 aa, Homo sapiens
  CDR3 for beta chain variable domain of TCR clone 329817 (TRBV6-1, TRBJ1-3)
CASVQGGGGNTIYF

SEQ ID NO: 659635 - protein, 16 aa, Homo sapiens
  CDR3 for alpha chain variable domain of TCR clone 329818 (TRAV12-1, TRAJ53)
CVVTSVAGGSNYKLTF

SEQ ID NO: 659636 - protein, 16 aa, Homo sapiens
  CDR3 for beta chain variable domain of TCR clone 329818 (TRBV6-6, TRBJ2-3)
CASSYSHAGSADTQYF

SEQ ID NO: 659637 - protein, 14 aa, Homo sapiens
  CDR3 for alpha chain variable domain of TCR clone 329819 (TRAV13-1, TRAJ13)
CAASRVGGYQKVTF

SEQ ID NO: 659638 - protein, 15 aa, Homo sapiens
  CDR3 for beta chain variable domain of TCR clone 329819 (TRBV7-2, TRBJ2-7)
CASSLKGALTYEQYF

SEQ ID NO: 659639 - protein, 10 aa, Homo sapiens
  CDR3 for alpha chain variable domain of TCR clone 329820 (TRAV12-2, TRAJ52)
CAANRWWYWL

SEQ ID NO: 659640 - protein, 13 aa, Homo sapiens
  CDR3 for beta chain variable domain of TCR clone 329820 (TRBV15, TRBJ2-7)
CATSTTGHYEQYF

SEQ ID NO: 659641 - protein, 12 aa, Homo sapiens
  CDR3 for alpha chain variable domain of TCR clone 329821 (TRAV8-3, TRAJ47)
CAVGVGGNKLVF

SEQ ID NO: 659642 - protein, 15 aa, Homo sapiens
  CDR3 for beta chain variable domain of TCR clone 329821 (TRBV7-2, TRBJ2-1)
CASSFQADEYNEQFF

SEQ ID NO: 659643 - protein, 11 aa, Homo sapiens
  CDR3 for alpha chain variable domain of TCR clone 329822 (TRAV12-2, TRAJ49)
CALQGGTQFYF

SEQ ID NO: 659644 - protein, 14 aa, Homo sapiens
  CDR3 for beta chain variable domain of TCR clone 329822 (TRBV7-2, TRBJ2-7)
CASSPKTSFYEQYF

SEQ ID NO: 659645 - protein, 15 aa, Homo sapiens
  CDR3 for alpha chain variable domain of TCR clone 329823 (TRAV12-3, TRAJ49)
CAVAFTPNTGNQFYF

SEQ ID NO: 659646 - protein, 18 aa, Homo sapiens
  CDR3 for beta chain variable domain of TCR clone 329823 (TRBV4-1, TRBJ1-5)
CASSQDPRGQGLNQPQHF

SEQ ID NO: 659647 - protein, 14 aa, Homo sapiens
  CDR3 for alpha chain variable domain of TCR clone 329824 (TRAV13-1, TRAJ9)
CAVSALTGGFKTIF

SEQ ID NO: 659648 - protein, 16 aa, Homo sapiens
  CDR3 for beta chain variable domain of TCR clone 329824 (TRBV12-4, TRBJ2-3)
CASSFGTGGISDTQYF

SEQ ID NO: 659649 - protein, 15 aa, Homo sapiens
  CDR3 for alpha chain variable domain of TCR clone 329825 (TRAV25, TRAJ10)
CAGPLLTGGGNKLTF

SEQ ID NO: 659650 - protein, 14 aa, Homo sapiens
  CDR3 for beta chain variable domain of TCR clone 329825 (TRBV7-6, TRBJ2-1)
CASSLGGGADEQFF

SEQ ID NO: 659651 - protein, 11 aa, Homo sapiens
  CDR3 for alpha chain variable domain of TCR clone 329826 (TRAV13-1, TRAJ6)
CATLGSYIPTF

SEQ ID NO: 659652 - protein, 13 aa, Homo sapiens
  CDR3 for beta chain variable domain of TCR clone 329826 (TRBV6-6, TRBJ2-1)
CASSLHQGDEQFC

SEQ ID NO: 659653 - protein, 14 aa, Homo sapiens
  CDR3 for alpha chain variable domain of TCR clone 329827 (TRAV38-1, TRAJ32)
CAFIYGVATNKLIF

SEQ ID NO: 659654 - protein, 17 aa, Homo sapiens
  CDR3 for beta chain variable domain of TCR clone 329827 (TRBV28, TRBJ2-1)
CASTGPGLAVSEDEQFF

SEQ ID NO: 659655 - protein, 16 aa, Homo sapiens
  CDR3 for alpha chain variable domain of TCR clone 329828 (TRAV30, TRAJ24)
CGTEIVDADSWGKFQF

SEQ ID NO: 659656 - protein, 16 aa, Homo sapiens
  CDR3 for beta chain variable domain of TCR clone 329828 (TRBV11-2, TRBJ2-7)
CASSPTTGGVSYGQYF

SEQ ID NO: 659657 - protein, 15 aa, Homo sapiens
  CDR3 for alpha chain variable domain of TCR clone 329829 (TRAV20, TRAJ43)
CAVQAGKSSKNDMSV

SEQ ID NO: 659658 - protein, 14 aa, Homo sapiens
  CDR3 for beta chain variable domain of TCR clone 329829 (TRBV27, TRBJ2-1)
CASRHLGGGKEQFF

SEQ ID NO: 659659 - protein, 13 aa, Homo sapiens
  CDR3 for alpha chain variable domain of TCR clone 329830 (TRAV35, TRAJ42)
CAGFPGSQGNLIF

SEQ ID NO: 659660 - protein, 15 aa, Homo sapiens
  CDR3 for beta chain variable domain of TCR clone 329830 (TRBV10-2, TRBJ2-6)
CASSEQGTGANVLTF

SEQ ID NO: 659661 - protein, 14 aa, Homo sapiens
  CDR3 for alpha chain variable domain of TCR clone 329831 (TRAV9-2, TRAJ39)
CALYIYNAGNMLTF

SEQ ID NO: 659662 - protein, 15 aa, Homo sapiens
  CDR3 for beta chain variable domain of TCR clone 329831 (TRBV29-1, TRBJ2-7)
CSVEFFDRGSYEQYF

SEQ ID NO: 659663 - protein, 14 aa, Homo sapiens
  CDR3 for alpha chain variable domain of TCR clone 329832 (TRAV35, TRAJ13)
CAGSPSGGYKKVTF

SEQ ID NO: 659664 - protein, 17 aa, Homo sapiens
  CDR3 for beta chain variable domain of TCR clone 329832 (TRBV7-6, TRBJ2-5)
CASGPGLADPWGETQYF

SEQ ID NO: 659665 - protein, 12 aa, Homo sapiens
  CDR3 for alpha chain variable domain of TCR clone 329833 (TRAV1-1, TRAJ8)
CAGGTGFQKLVF

SEQ ID NO: 659666 - protein, 18 aa, Homo sapiens
  CDR3 for beta chain variable domain of TCR clone 329833 (TRBV20-1, TRBJ2-6)
CSAETTPTHGSGANVLTF

SEQ ID NO: 659667 - protein, 14 aa, Homo sapiens
  CDR3 for alpha chain variable domain of TCR clone 329834 (TRAV12-2, TRAJ40)
YAVKIPSGTYKYIF

SEQ ID NO: 659668 - protein, 15 aa, Homo sapiens
  CDR3 for beta chain variable domain of TCR clone 329834 (TRBV7-9, TRBJ1-2)
CASSLKQNYGYTLVR

SEQ ID NO: 659669 - protein, 17 aa, Homo sapiens
  CDR3 for alpha chain variable domain of TCR clone 329835 (TRAV3, TRAJ42)
CAVRDRDYGGSQGNLIF

SEQ ID NO: 659670 - protein, 15 aa, Homo sapiens
  CDR3 for beta chain variable domain of TCR clone 329835 (TRBV20-1, TRBJ2-1)
CSAEGGLLAGDEQFF

SEQ ID NO: 659671 - protein, 17 aa, Homo sapiens
  CDR3 for alpha chain variable domain of TCR clone 329836 (TRAV8-6, TRAJ58)
CAVSSWVGETSGSRLTF

SEQ ID NO: 659672 - protein, 14 aa, Homo sapiens
  CDR3 for beta chain variable domain of TCR clone 329836 (TRBV4-2, TRBJ2-1)
CASGLDRAYNEQVF

SEQ ID NO: 659673 - protein, 13 aa, Homo sapiens
  CDR3 for alpha chain variable domain of TCR clone 329837 (TRAV12-2, TRAJ49)
CAVETRTGNQFYF

SEQ ID NO: 659674 - protein, 13 aa, Homo sapiens
  CDR3 for beta chain variable domain of TCR clone 329837 (TRBV4-1, TRBJ2-7)
CASSQGQAYEQYF

SEQ ID NO: 659675 - protein, 16 aa, Homo sapiens
  CDR3 for alpha chain variable domain of TCR clone 329838 (TRAV30, TRAJ24)
CGTEIVDADSWGEFQF

SEQ ID NO: 659676 - protein, 16 aa, Homo sapiens
  CDR3 for beta chain variable domain of TCR clone 329838 (TRBV25-1, TRBJ1-1)
CASSGDRDRGRIEAFF

SEQ ID NO: 659677 - protein, 14 aa, Homo sapiens
  CDR3 for alpha chain variable domain of TCR clone 329839 (TRAV12-2, TRAJ17)
CAVNIKAAGNKLTF

SEQ ID NO: 659678 - protein, 13 aa, Homo sapiens
  CDR3 for beta chain variable domain of TCR clone 329839 (TRBV7-8, TRBJ2-7)
CASSLTGGRKQYF

SEQ ID NO: 659679 - protein, 11 aa, Homo sapiens
  CDR3 for alpha chain variable domain of TCR clone 329840 (TRAV3, TRAJ17)
PRGAAGNKLTF

SEQ ID NO: 659680 - protein, 14 aa, Homo sapiens
  CDR3 for beta chain variable domain of TCR clone 329840 (TRBV7-2, TRBJ2-7)
CASRSQGAAYEQYF

SEQ ID NO: 659681 - protein, 13 aa, Homo sapiens
  CDR3 for alpha chain variable domain of TCR clone 329841 (TRAV3, TRAJ21)
CAVREPDFNKFYF

SEQ ID NO: 659682 - protein, 16 aa, Homo sapiens
  CDR3 for beta chain variable domain of TCR clone 329841 (TRBV20-1, TRBJ2-1)
CSARDFSGRIGDEQFF

SEQ ID NO: 659683 - protein, 13 aa, Homo sapiens
  CDR3 for alpha chain variable domain of TCR clone 329842 (TRAV27, TRAJ6)
CAGGTRGSYIPTF

SEQ ID NO: 659684 - protein, 13 aa, Homo sapiens
  CDR3 for beta chain variable domain of TCR clone 329842 (TRBV4-1, TRBJ2-2)
CASSQENTGQLFF

SEQ ID NO: 659685 - protein, 12 aa, Homo sapiens
  CDR3 for alpha chain variable domain of TCR clone 329843 (TRAV3, TRAJ20)
CAVRDPDYKLSF

SEQ ID NO: 659686 - protein, 18 aa, Homo sapiens
  CDR3 for beta chain variable domain of TCR clone 329843 (TRBV7-3, TRBJ2-1)
CASSLTAPRVAAYNEQFF

SEQ ID NO: 659687 - protein, 13 aa, Homo sapiens
  CDR3 for alpha chain variable domain of TCR clone 329844 (TRAV3, TRAJ16)
CAVRDRNGQKLLF

SEQ ID NO: 659688 - protein, 15 aa, Homo sapiens
  CDR3 for beta chain variable domain of TCR clone 329844 (TRBV5-1, TRBJ2-1)
CASTPPRAPYNEQFF

SEQ ID NO: 659689 - protein, 11 aa, Homo sapiens
  CDR3 for alpha chain variable domain of TCR clone 329845 (TRAV27, TRAJ47)
CAGAYGNKLGF

SEQ ID NO: 659690 - protein, 15 aa, Homo sapiens
  CDR3 for beta chain variable domain of TCR clone 329845 (TRBV9, TRBJ2-7)
CASSPHEQGSYEQYF

SEQ ID NO: 659691 - protein, 14 aa, Homo sapiens
  CDR3 for alpha chain variable domain of TCR clone 329846 (TRAV13-1, TRAJ44)
CAAKAASTATKLTF

SEQ ID NO: 659692 - protein, 13 aa, Homo sapiens
  CDR3 for beta chain variable domain of TCR clone 329846 (TRBV5-5, TRBJ1-2)
CASSFWRGEDYTF

SEQ ID NO: 659693 - protein, 14 aa, Homo sapiens
  CDR3 for alpha chain variable domain of TCR clone 329847 (TRAV8-3, TRAJ4)
CTVGAAGGYNKLIF

SEQ ID NO: 659694 - protein, 16 aa, Homo sapiens
  CDR3 for beta chain variable domain of TCR clone 329847 (TRBV19, TRBJ2-2)
CASRSPGTGATGELFF

SEQ ID NO: 659695 - protein, 18 aa, Homo sapiens
  CDR3 for alpha chain variable domain of TCR clone 329848 (TRAV12-3, TRAJ52)
CAMSVGGAGGTSYGKLPF

SEQ ID NO: 659696 - protein, 16 aa, Homo sapiens
  CDR3 for beta chain variable domain of TCR clone 329848 (TRBV7-9, TRBJ1-2)
CASSISLDRGGYGYTF

SEQ ID NO: 659697 - protein, 13 aa, Homo sapiens
  CDR3 for alpha chain variable domain of TCR clone 329849 (TRAV6, TRAJ16)
RTLDDSDGQKLLF

SEQ ID NO: 659698 - protein, 14 aa, Homo sapiens
  CDR3 for beta chain variable domain of TCR clone 329849 (TRBV12-4, TRBJ1-6)
CASNLQGKGSPLHF

SEQ ID NO: 659699 - protein, 13 aa, Homo sapiens
  CDR3 for alpha chain variable domain of TCR clone 329850 (TRAV12-2, TRAJ17)
CAVSKAAGNKLTF

SEQ ID NO: 659700 - protein, 13 aa, Homo sapiens
  CDR3 for beta chain variable domain of TCR clone 329850 (TRBV12-4, TRBJ1-1)
CASSPGTGFEAFF

SEQ ID NO: 659701 - protein, 15 aa, Homo sapiens
  CDR3 for alpha chain variable domain of TCR clone 329851 (TRAV21, TRAJ53)
CATWNSGGSNYKLTF

SEQ ID NO: 659702 - protein, 12 aa, Homo sapiens
  CDR3 for beta chain variable domain of TCR clone 329851 (TRBV2, TRBJ2-3)
CASSGRFDTQYL

SEQ ID NO: 659703 - protein, 15 aa, Homo sapiens
  CDR3 for alpha chain variable domain of TCR clone 329852 (TRAV21, TRAJ40)
CAVRPQTSGTYKYIF

SEQ ID NO: 659704 - protein, 15 aa, Homo sapiens
  CDR3 for beta chain variable domain of TCR clone 329852 (TRBV6-3, TRBJ2-2)
CARSFLATLTGELFF

SEQ ID NO: 659705 - protein, 16 aa, Homo sapiens
  CDR3 for alpha chain variable domain of TCR clone 329853 (TRAV12-2, TRAJ32)
CAVNLGQGGATNKLIF

SEQ ID NO: 659706 - protein, 12 aa, Homo sapiens
  CDR3 for beta chain variable domain of TCR clone 329853 (TRBV29-1, TRBJ2-3)
CSVTGGADTQYL

SEQ ID NO: 659707 - protein, 12 aa, Homo sapiens
  CDR3 for alpha chain variable domain of TCR clone 329854 (TRAV8-4, TRAJ37)
CAVRSNTGKLIF

SEQ ID NO: 659708 - protein, 16 aa, Homo sapiens
  CDR3 for beta chain variable domain of TCR clone 329854 (TRBV7-2, TRBJ2-3)
CASSLGGDASTDTQYF

SEQ ID NO: 659709 - protein, 16 aa, Homo sapiens
  CDR3 for alpha chain variable domain of TCR clone 329855 (TRAV12-3, TRAJ53)
CAMSPGSGGSNYKLTF

SEQ ID NO: 659710 - protein, 15 aa, Homo sapiens
  CDR3 for beta chain variable domain of TCR clone 329855 (TRBV5-4, TRBJ2-2)
CASSRRGGGTGELFF

SEQ ID NO: 659711 - protein, 14 aa, Homo sapiens
  CDR3 for alpha chain variable domain of TCR clone 329856 (TRAV36/DV7, TRAJ44)
CCGANTGTASNLTF

SEQ ID NO: 659712 - protein, 16 aa, Homo sapiens
  CDR3 for beta chain variable domain of TCR clone 329856 (TRBV7-9, TRBJ1-2)
CASSLGFSSGEDGYTF

SEQ ID NO: 659713 - protein, 17 aa, Homo sapiens
  CDR3 for alpha chain variable domain of TCR clone 329857 (TRAV8-3, TRAJ32)
CAVGPLDYGGATNKLIF

SEQ ID NO: 659714 - protein, 14 aa, Homo sapiens
  CDR3 for beta chain variable domain of TCR clone 329857 (TRBV19, TRBJ2-1)
CASPTFVLSGEQFF

SEQ ID NO: 659715 - protein, 14 aa, Homo sapiens
  CDR3 for alpha chain variable domain of TCR clone 329858 (TRAV12-2, TRAJ17)
CAVLFKAAGNKLTF

SEQ ID NO: 659716 - protein, 16 aa, Homo sapiens
  CDR3 for beta chain variable domain of TCR clone 329858 (TRBV15, TRBJ1-2)
CATSRGPRTGGGGYTF

SEQ ID NO: 659717 - protein, 18 aa, Homo sapiens
  CDR3 for alpha chain variable domain of TCR clone 329859 (TRAV21, TRAJ52)
RAVRPSPAGGTSYGKLKF

SEQ ID NO: 659718 - protein, 17 aa, Homo sapiens
  CDR3 for beta chain variable domain of TCR clone 329859 (TRBV13, TRBJ2-3)
CASSLSRVAGGRNTQYF

SEQ ID NO: 659719 - protein, 13 aa, Homo sapiens
  CDR3 for alpha chain variable domain of TCR clone 329860 (TRAV13-1, TRAJ40)
CAASTSGTYKYIF

SEQ ID NO: 659720 - protein, 16 aa, Homo sapiens
  CDR3 for beta chain variable domain of TCR clone 329860 (TRBV9, TRBJ2-1)
CASSAYFVGGPSEQFF

SEQ ID NO: 659721 - protein, 14 aa, Homo sapiens
  CDR3 for alpha chain variable domain of TCR clone 329861 (TRAV12-2, TRAJ13)
CAVKKTGGYQKVTF

SEQ ID NO: 659722 - protein, 13 aa, Homo sapiens
  CDR3 for beta chain variable domain of TCR clone 329861 (TRBV6-3, TRBJ1-2)
CASSLTGDYGYTF

SEQ ID NO: 659723 - protein, 12 aa, Homo sapiens
  CDR3 for alpha chain variable domain of TCR clone 329862 (TRAV13-2, TRAJ23)
CAERHRGGKLIF

SEQ ID NO: 659724 - protein, 16 aa, Homo sapiens
  CDR3 for beta chain variable domain of TCR clone 329862 (TRBV7-3, TRBJ2-1)
CASSFTGRRSYNEQFF

SEQ ID NO: 659725 - protein, 14 aa, Homo sapiens
  CDR3 for alpha chain variable domain of TCR clone 329863 (TRAV26-2, TRAJ45)
DAAVYGGGADGLTF

SEQ ID NO: 659726 - protein, 17 aa, Homo sapiens
  CDR3 for beta chain variable domain of TCR clone 329863 (TRBV11-2, TRBJ2-1)
CASSLYPPGVEYNEQFF

SEQ ID NO: 659727 - protein, 11 aa, Homo sapiens
  CDR3 for alpha chain variable domain of TCR clone 329864 (TRAV2, TRAJ13)
CASVGYQKATF

SEQ ID NO: 659728 - protein, 18 aa, Homo sapiens
  CDR3 for beta chain variable domain of TCR clone 329864 (TRBV11-2, TRBJ2-3)
CASSLGGASRGAPNTQYF

SEQ ID NO: 659729 - protein, 14 aa, Homo sapiens
  CDR3 for alpha chain variable domain of TCR clone 329865 (TRAV2, TRAJ41)
CAVGTSNSGYALNF

SEQ ID NO: 659730 - protein, 14 aa, Homo sapiens
  CDR3 for beta chain variable domain of TCR clone 329865 (TRBV7-3, TRBJ1-1)
CASSLKGGNTEAFF

SEQ ID NO: 659731 - protein, 14 aa, Homo sapiens
  CDR3 for alpha chain variable domain of TCR clone 329866 (TRAV20, TRAJ13)
CAVLNSGGYQKVTF

SEQ ID NO: 659732 - protein, 14 aa, Homo sapiens
  CDR3 for beta chain variable domain of TCR clone 329866 (TRBV7-8, TRBJ2-7)
CASTFRGGPNEQYF

SEQ ID NO: 659733 - protein, 15 aa, Homo sapiens
  CDR3 for alpha chain variable domain of TCR clone 329867 (TRAV21, TRAJ24)
CAARSSTDSWGKLQF

SEQ ID NO: 659734 - protein, 13 aa, Homo sapiens
  CDR3 for beta chain variable domain of TCR clone 329867 (TRBV11-2, TRBJ2-5)
CDSSSTGEENQYF

SEQ ID NO: 659735 - protein, 17 aa, Homo sapiens
  CDR3 for alpha chain variable domain of TCR clone 329868 (TRAV3, TRAJ6)
CAVRAGPRAGGSYIPTF

SEQ ID NO: 659736 - protein, 20 aa, Homo sapiens
  CDR3 for beta chain variable domain of TCR clone 329868 (TRBV28, TRBJ2-1)
CASTPIGRSPGLAGGNEQLF

SEQ ID NO: 659737 - protein, 12 aa, Homo sapiens
  CDR3 for alpha chain variable domain of TCR clone 329869 (TRAV8-6, TRAJ43)
CAVSHNNNDMRF

SEQ ID NO: 659738 - protein, 14 aa, Homo sapiens
  CDR3 for beta chain variable domain of TCR clone 329869 (TRBV10-3, TRBJ1-1)
CASSDGSGVTEAFF

SEQ ID NO: 659739 - protein, 16 aa, Homo sapiens
  CDR3 for alpha chain variable domain of TCR clone 329870 (TRAV21, TRAJ37)
CAVRTAGSSNTSKLIF

SEQ ID NO: 659740 - protein, 13 aa, Homo sapiens
  CDR3 for beta chain variable domain of TCR clone 329870 (TRBV7-9, TRBJ2-5)
CASLPSGRETQYF

SEQ ID NO: 659741 - protein, 12 aa, Homo sapiens
  CDR3 for alpha chain variable domain of TCR clone 329871 (TRAV13-2, TRAJ31)
CAESYNNARLMF

SEQ ID NO: 659742 - protein, 13 aa, Homo sapiens
  CDR3 for beta chain variable domain of TCR clone 329871 (TRBV24-1, TRBJ1-3)
CATMADSGNTIDF

SEQ ID NO: 659743 - protein, 17 aa, Homo sapiens
  CDR3 for alpha chain variable domain of TCR clone 329872 (TRAV8-3, TRAJ8)
CAVGPNEHRLSENCIWN

SEQ ID NO: 659744 - protein, 13 aa, Homo sapiens
  CDR3 for beta chain variable domain of TCR clone 329872 (TRBV10-2, TRBJ2-3)
CASSESGDHTQYF

SEQ ID NO: 659745 - protein, 16 aa, Homo sapiens
  CDR3 for alpha chain variable domain of TCR clone 329873 (TRAV30, TRAJ24)
CGTEILDADSWGKFQF

SEQ ID NO: 659746 - protein, 14 aa, Homo sapiens
  CDR3 for beta chain variable domain of TCR clone 329873 (TRBV15, TRBJ2-3)
CATRSGTSTDTQYF

SEQ ID NO: 659747 - protein, 14 aa, Homo sapiens
  CDR3 for alpha chain variable domain of TCR clone 329874 (TRAV13-2, TRAJ9)
CAVRLNTGGFKTIF

SEQ ID NO: 659748 - protein, 15 aa, Homo sapiens
  CDR3 for beta chain variable domain of TCR clone 329874 (TRBV7-2, TRBJ2-1)
CASSLASGRVNEQFF

SEQ ID NO: 659749 - protein, 14 aa, Homo sapiens
  CDR3 for alpha chain variable domain of TCR clone 329875 (TRAV12-2, TRAJ17)
CAVLFKAAGNKLTF

SEQ ID NO: 659750 - protein, 13 aa, Homo sapiens
  CDR3 for beta chain variable domain of TCR clone 329875 (TRBV19, TRBJ2-2)
CAASGRNTGELFF

SEQ ID NO: 659751 - protein, 14 aa, Homo sapiens
  CDR3 for alpha chain variable domain of TCR clone 329876 (TRAV1-2, TRAJ8)
CAVREDTGFQKLVF

SEQ ID NO: 659752 - protein, 17 aa, Homo sapiens
  CDR3 for beta chain variable domain of TCR clone 329876 (TRBV11-2, TRBJ2-1)
CASSLYPPGVEYNEQVF

SEQ ID NO: 659753 - protein, 16 aa, Homo sapiens
  CDR3 for alpha chain variable domain of TCR clone 329877 (TRAV3, TRAJ10)
CAVRDVRAGGGNKLTF

SEQ ID NO: 659754 - protein, 17 aa, Homo sapiens
  CDR3 for beta chain variable domain of TCR clone 329877 (TRBV28, TRBJ2-5)
CASTTPEGDALQETQYF

SEQ ID NO: 659755 - protein, 12 aa, Homo sapiens
  CDR3 for alpha chain variable domain of TCR clone 329878 (TRAV2, TRAJ10)
CASTGGGNKLTF

SEQ ID NO: 659756 - protein, 15 aa, Homo sapiens
  CDR3 for beta chain variable domain of TCR clone 329878 (TRBV2, TRBJ2-1)
CASRESGGAYNEQFF

SEQ ID NO: 659757 - protein, 16 aa, Homo sapiens
  CDR3 for alpha chain variable domain of TCR clone 329879 (TRAV27, TRAJ56)
CAGVSRKDGANSKLTF

SEQ ID NO: 659758 - protein, 15 aa, Homo sapiens
  CDR3 for beta chain variable domain of TCR clone 329879 (TRBV20-1, TRBJ2-7)
CSAESGTSGAYEQYF

SEQ ID NO: 659759 - protein, 18 aa, Homo sapiens
  CDR3 for alpha chain variable domain of TCR clone 329880 (TRAV21, TRAJ52)
CAVRPSPAGGTIYGRLTF

SEQ ID NO: 659760 - protein, 15 aa, Homo sapiens
  CDR3 for beta chain variable domain of TCR clone 329880 (TRBV20-1, TRBJ1-5)
CSAFKNGQRNQPQHF

SEQ ID NO: 659761 - protein, 16 aa, Homo sapiens
  CDR3 for alpha chain variable domain of TCR clone 329881 (TRAV1-2, TRAJ10)
CAVRGVLTGGGNKLTF

SEQ ID NO: 659762 - protein, 13 aa, Homo sapiens
  CDR3 for beta chain variable domain of TCR clone 329881 (TRBV27, TRBJ2-7)
CASSLTTGYEQYF

SEQ ID NO: 659763 - protein, 19 aa, Homo sapiens
  CDR3 for alpha chain variable domain of TCR clone 329882 (TRAV1-1, TRAJ32)
CAVRVDELWWCYKQAHLRN

SEQ ID NO: 659764 - protein, 17 aa, Homo sapiens
  CDR3 for beta chain variable domain of TCR clone 329882 (TRBV13, TRBJ2-3)
CASSLSRVAGGRNTQYF

SEQ ID NO: 659765 - protein, 15 aa, Homo sapiens
  CDR3 for alpha chain variable domain of TCR clone 329883 (TRAV26-1, TRAJ21)
CIVRVPNYNFNKFYF

SEQ ID NO: 659766 - protein, 14 aa, Homo sapiens
  CDR3 for beta chain variable domain of TCR clone 329883 (TRBV2, TRBJ2-3)
CASSEGQNTDTQYF

SEQ ID NO: 659767 - protein, 14 aa, Homo sapiens
  CDR3 for alpha chain variable domain of TCR clone 329884 (TRAV1-2, TRAJ16)
CVVNRLSDGQKLLF

SEQ ID NO: 659768 - protein, 15 aa, Homo sapiens
  CDR3 for beta chain variable domain of TCR clone 329884 (TRBV9, TRBJ1-6)
CASSVAGTGDSPLHF

SEQ ID NO: 659769 - protein, 13 aa, Homo sapiens
  CDR3 for alpha chain variable domain of TCR clone 329885 (TRAV12-1, TRAJ40)
CVGPTSGTYKYIF

SEQ ID NO: 659770 - protein, 18 aa, Homo sapiens
  CDR3 for beta chain variable domain of TCR clone 329885 (TRBV7-6, TRBJ2-1)
CASSPRTSGMSSYNEQFF

SEQ ID NO: 659771 - protein, 14 aa, Homo sapiens
  CDR3 for alpha chain variable domain of TCR clone 329886 (TRAV16, TRAJ33)
CALSAMDSNYQLIW

SEQ ID NO: 659772 - protein, 17 aa, Homo sapiens
  CDR3 for beta chain variable domain of TCR clone 329886 (TRBV28, TRBJ2-1)
CASSSARQALTYNEQFF

SEQ ID NO: 659773 - protein, 13 aa, Homo sapiens
  CDR3 for alpha chain variable domain of TCR clone 329887 (TRAV20, TRAJ34)
CTVSSYNTYKLIF

SEQ ID NO: 659774 - protein, 13 aa, Homo sapiens
  CDR3 for beta chain variable domain of TCR clone 329887 (TRBV7-9, TRBJ1-2)
CASSLKQNYGYTF

SEQ ID NO: 659775 - protein, 16 aa, Homo sapiens
  CDR3 for alpha chain variable domain of TCR clone 329888 (TRAV17, TRAJ28)
CATALDSGAGSYQLTF

SEQ ID NO: 659776 - protein, 18 aa, Homo sapiens
  CDR3 for beta chain variable domain of TCR clone 329888 (TRBV4-1, TRBJ1-4)
CASSPRTGGAWTNEKLFF

SEQ ID NO: 659777 - protein, 16 aa, Homo sapiens
  CDR3 for alpha chain variable domain of TCR clone 329889 (TRAV4, TRAJ22)
CLVGDPYSGSARQLTF

SEQ ID NO: 659778 - protein, 16 aa, Homo sapiens
  CDR3 for beta chain variable domain of TCR clone 329889 (TRBV6-1, TRBJ2-5)
CASSERTGGTWETQYF

SEQ ID NO: 659779 - protein, 13 aa, Homo sapiens
  CDR3 for alpha chain variable domain of TCR clone 329890 (TRAV13-2, TRAJ48)
CAEMDFGNEKLTF

SEQ ID NO: 659780 - protein, 14 aa, Homo sapiens
  CDR3 for beta chain variable domain of TCR clone 329890 (TRBV20-1, TRBJ2-7)
CSAKTGTGGYEQYF

SEQ ID NO: 659781 - protein, 18 aa, Homo sapiens
  CDR3 for alpha chain variable domain of TCR clone 329891 (TRAV12-2, )
CAVVDIQNPDPAVYQLRD

SEQ ID NO: 659782 - protein, 16 aa, Homo sapiens
  CDR3 for beta chain variable domain of TCR clone 329891 (TRBV6-1, TRBJ1-2)
CVSSGAWQGRSHGYTF

SEQ ID NO: 659783 - protein, 18 aa, Homo sapiens
  CDR3 for alpha chain variable domain of TCR clone 329892 (TRAV12-2, )
CAVEDIQNPDPAAYQLRD

SEQ ID NO: 659784 - protein, 13 aa, Homo sapiens
  CDR3 for beta chain variable domain of TCR clone 329892 (TRBV7-3, TRBJ1-1)
CASSQDWGAEAFF

SEQ ID NO: 659785 - protein, 14 aa, Homo sapiens
  CDR3 for alpha chain variable domain of TCR clone 329893 (TRAV13-1, TRAJ35)
CAASKGGFGNVLHC

SEQ ID NO: 659786 - protein, 15 aa, Homo sapiens
  CDR3 for beta chain variable domain of TCR clone 329893 (TRBV7-3, TRBJ2-1)
CASSLGQGPFGEHFF

SEQ ID NO: 659787 - protein, 18 aa, Homo sapiens
  CDR3 for alpha chain variable domain of TCR clone 329894 (TRAV21, TRAJ52)
CAVRPSPAGGTSYGKLTF

SEQ ID NO: 659788 - protein, 14 aa, Homo sapiens
  CDR3 for beta chain variable domain of TCR clone 329894 (TRBV7-2, TRBJ2-1)
CASSLSRVDNEQFF

SEQ ID NO: 659789 - protein, 15 aa, Homo sapiens
  CDR3 for alpha chain variable domain of TCR clone 329895 (TRAV21, TRAJ24)
CAARSSTDSWGKLQF

SEQ ID NO: 659790 - protein, 13 aa, Homo sapiens
  CDR3 for beta chain variable domain of TCR clone 329895 (TRBV4-1, TRBJ1-6)
CASSQVSDSPLHF

SEQ ID NO: 659791 - protein, 15 aa, Homo sapiens
  CDR3 for alpha chain variable domain of TCR clone 329896 (TRAV8-3, TRAJ40)
CAAPSLGSGTYKYIF

SEQ ID NO: 659792 - protein, 12 aa, Homo sapiens
  CDR3 for beta chain variable domain of TCR clone 329896 (TRBV7-3, TRBJ2-7)
CASSIKREEQYF

SEQ ID NO: 659793 - protein, 12 aa, Homo sapiens
  CDR3 for alpha chain variable domain of TCR clone 329897 (TRAV13-1, TRAJ21)
CAAKEGFNKFYF

SEQ ID NO: 659794 - protein, 15 aa, Homo sapiens
  CDR3 for beta chain variable domain of TCR clone 329897 (TRBV7-6, TRBJ1-2)
CASSSGGRGGYGYFF

SEQ ID NO: 659795 - protein, 22 aa, Homo sapiens
  CDR3 for alpha chain variable domain of TCR clone 329898 (TRAV12-1, )
CVVLRGIPDIQNPDPAVYQLRD

SEQ ID NO: 659796 - protein, 13 aa, Homo sapiens
  CDR3 for beta chain variable domain of TCR clone 329898 (TRBV20-1, TRBJ1-1)
CSARGGGNTEAFF

SEQ ID NO: 659797 - protein, 14 aa, Homo sapiens
  CDR3 for alpha chain variable domain of TCR clone 329899 (TRAV12-3, TRAJ6)
CAMSATGGSYIPTF

SEQ ID NO: 659798 - protein, 18 aa, Homo sapiens
  CDR3 for beta chain variable domain of TCR clone 329899 (TRBV20-1, TRBJ2-6)
CSARGSGTTRSGANVLTF

SEQ ID NO: 659799 - protein, 14 aa, Homo sapiens
  CDR3 for alpha chain variable domain of TCR clone 329900 (TRAV35, TRAJ22)
CAGLRPGSARQLTF

SEQ ID NO: 659800 - protein, 13 aa, Homo sapiens
  CDR3 for beta chain variable domain of TCR clone 329900 (TRBV4-1, TRBJ2-7)
CASSQGQAYEQYF

SEQ ID NO: 659801 - protein, 14 aa, Homo sapiens
  CDR3 for alpha chain variable domain of TCR clone 329901 (TRAV12-3, TRAJ57)
CAMSAWGGSEKPVF

SEQ ID NO: 659802 - protein, 13 aa, Homo sapiens
  CDR3 for beta chain variable domain of TCR clone 329901 (TRBV6-1, TRBJ1-5)
CASSGDRVRSQHF

SEQ ID NO: 659803 - protein, 15 aa, Homo sapiens
  CDR3 for alpha chain variable domain of TCR clone 329902 (TRAV25, TRAJ53)
CPTSNSGGSNYKLTF

SEQ ID NO: 659804 - protein, 15 aa, Homo sapiens
  CDR3 for beta chain variable domain of TCR clone 329902 (TRBV6-5, TRBJ2-1)
CASSYDAGAGNEQFS

SEQ ID NO: 659805 - protein, 10 aa, Homo sapiens
  CDR3 for alpha chain variable domain of TCR clone 329903 (TRAV1-2, TRAJ31)
CAFFDARLML

SEQ ID NO: 659806 - protein, 15 aa, Homo sapiens
  CDR3 for beta chain variable domain of TCR clone 329903 (TRBV4-1, TRBJ1-4)
CASSDTGGTNEKLFF

SEQ ID NO: 659807 - protein, 10 aa, Homo sapiens
  CDR3 for alpha chain variable domain of TCR clone 329904 (TRAV16, TRAJ22)
SAMYLRQLTF

SEQ ID NO: 659808 - protein, 16 aa, Homo sapiens
  CDR3 for beta chain variable domain of TCR clone 329904 (TRBV11-2, TRBJ2-7)
CASSPTTGGVSYEQYF

SEQ ID NO: 659809 - protein, 16 aa, Homo sapiens
  CDR3 for alpha chain variable domain of TCR clone 329905 (TRAV1-2, TRAJ6)
CAVRDQGAGGSYIPTF

SEQ ID NO: 659810 - protein, 13 aa, Homo sapiens
  CDR3 for beta chain variable domain of TCR clone 329905 (TRBV28, TRBJ2-7)
CASTPGLAGEQYF

SEQ ID NO: 659811 - protein, 14 aa, Homo sapiens
  CDR3 for alpha chain variable domain of TCR clone 329906 (TRAV12-2, TRAJ44)
CAVNPAGTASKLTI

SEQ ID NO: 659812 - protein, 15 aa, Homo sapiens
  CDR3 for beta chain variable domain of TCR clone 329906 (TRBV5-1, TRBJ2-1)
CASSPPRAPYNEQFF

SEQ ID NO: 659813 - protein, 12 aa, Homo sapiens
  CDR3 for alpha chain variable domain of TCR clone 329907 (TRAV30, TRAJ39)
CGRGNAGNMLTF

SEQ ID NO: 659814 - protein, 15 aa, Homo sapiens
  CDR3 for beta chain variable domain of TCR clone 329907 (TRBV5-1, TRBJ1-1)
CASSGTGRGNIEAFF

SEQ ID NO: 659815 - protein, 14 aa, Homo sapiens
  CDR3 for alpha chain variable domain of TCR clone 329908 (TRAV2, TRAJ41)
WAVGTSNSGYALNF

SEQ ID NO: 659816 - protein, 13 aa, Homo sapiens
  CDR3 for beta chain variable domain of TCR clone 329908 (TRBV4-1, TRBJ2-1)
CASSQEVQYEQFF

SEQ ID NO: 659817 - protein, 16 aa, Homo sapiens
  CDR3 for alpha chain variable domain of TCR clone 329909 (TRAV4, TRAJ18)
CCVLLIGGSTLGRLYF

SEQ ID NO: 659818 - protein, 12 aa, Homo sapiens
  CDR3 for beta chain variable domain of TCR clone 329909 (TRBV6-3, TRBJ2-7)
CASSLTTYEQYF

SEQ ID NO: 659819 - protein, 13 aa, Homo sapiens
  CDR3 for alpha chain variable domain of TCR clone 329910 (TRAV35, TRAJ44)
CAGLSGTASKLTF

SEQ ID NO: 659820 - protein, 15 aa, Homo sapiens
  CDR3 for beta chain variable domain of TCR clone 329910 (TRBV6-1, TRBJ2-1)
CASSELRGQYNEQFF

SEQ ID NO: 659821 - protein, 14 aa, Homo sapiens
  CDR3 for alpha chain variable domain of TCR clone 329911 (TRAV17, TRAJ37)
CATVPSSNTGKLIF

SEQ ID NO: 659822 - protein, 13 aa, Homo sapiens
  CDR3 for beta chain variable domain of TCR clone 329911 (TRBV9, TRBJ2-1)
CASSPSGGNEQFF

SEQ ID NO: 659823 - protein, 10 aa, Homo sapiens
  CDR3 for alpha chain variable domain of TCR clone 329912 (TRAV1-2, TRAJ18)
CAVRGEAPPW

SEQ ID NO: 659824 - protein, 13 aa, Homo sapiens
  CDR3 for beta chain variable domain of TCR clone 329912 (TRBV20-1, TRBJ1-1)
CSARVGGNTEAFF

SEQ ID NO: 659825 - protein, 14 aa, Homo sapiens
  CDR3 for alpha chain variable domain of TCR clone 329913 (TRAV8-4, TRAJ22)
CAVSPGGSARQLTF

SEQ ID NO: 659826 - protein, 16 aa, Homo sapiens
  CDR3 for beta chain variable domain of TCR clone 329913 (TRBV27, TRBJ2-2)
CASSFRGLVRTGELFF

SEQ ID NO: 659827 - protein, 15 aa, Homo sapiens
  CDR3 for alpha chain variable domain of TCR clone 329914 (TRAV17, TRAJ57)
CATGPSQGGTEKLVF

SEQ ID NO: 659828 - protein, 14 aa, Homo sapiens
  CDR3 for beta chain variable domain of TCR clone 329914 (TRBV11-2, TRBJ1-2)
CASSLYRGNYGYTF

SEQ ID NO: 659829 - protein, 14 aa, Homo sapiens
  CDR3 for alpha chain variable domain of TCR clone 329915 (TRAV4, TRAJ26)
CLGGPHNYGQNFVF

SEQ ID NO: 659830 - protein, 14 aa, Homo sapiens
  CDR3 for beta chain variable domain of TCR clone 329915 (TRBV7-9, TRBJ2-7)
CASSLSAATYEQYS

SEQ ID NO: 659831 - protein, 13 aa, Homo sapiens
  CDR3 for alpha chain variable domain of TCR clone 329916 (TRAV13-1, TRAJ29)
CAASIGLNTPLVF

SEQ ID NO: 659832 - protein, 13 aa, Homo sapiens
  CDR3 for beta chain variable domain of TCR clone 329916 (TRBV15, TRBJ2-7)
CATSTTGHYEQYF

SEQ ID NO: 659833 - protein, 13 aa, Homo sapiens
  CDR3 for alpha chain variable domain of TCR clone 329917 (TRAV2, TRAJ15)
CAVASQAGTALIF

SEQ ID NO: 659834 - protein, 13 aa, Homo sapiens
  CDR3 for beta chain variable domain of TCR clone 329917 (TRBV7-9, TRBJ2-5)
CASSSTGTGTQYF

SEQ ID NO: 659835 - protein, 16 aa, Homo sapiens
  CDR3 for alpha chain variable domain of TCR clone 329918 (TRAV1-2, TRAJ16)
CAVNGFQMARSCSLQG

SEQ ID NO: 659836 - protein, 13 aa, Homo sapiens
  CDR3 for beta chain variable domain of TCR clone 329918 (TRBV7-6, TRBJ1-2)
CASSLVADYGYTF

SEQ ID NO: 659837 - protein, 16 aa, Homo sapiens
  CDR3 for alpha chain variable domain of TCR clone 329919 (TRAV3, TRAJ10)
CAVRDMRAGGGNKLPF

SEQ ID NO: 659838 - protein, 11 aa, Homo sapiens
  CDR3 for beta chain variable domain of TCR clone 329919 (TRBV29-1, TRBJ2-5)
CSEDRTGTQYF

SEQ ID NO: 659839 - protein, 15 aa, Homo sapiens
  CDR3 for alpha chain variable domain of TCR clone 329920 (TRAV26-1, TRAJ29)
CIVRVEVSVNTPLVF

SEQ ID NO: 659840 - protein, 14 aa, Homo sapiens
  CDR3 for beta chain variable domain of TCR clone 329920 (TRBV18, TRBJ2-5)
CASSPGVSQETQYF

SEQ ID NO: 659841 - protein, 15 aa, Homo sapiens
  CDR3 for alpha chain variable domain of TCR clone 329921 (TRAV26-1, TRAJ40)
CIVRAVPPGTYTYIF

SEQ ID NO: 659842 - protein, 14 aa, Homo sapiens
  CDR3 for beta chain variable domain of TCR clone 329921 (TRBV19, TRBJ2-1)
CASKDPGLANEQFF

SEQ ID NO: 659843 - protein, 16 aa, Homo sapiens
  CDR3 for alpha chain variable domain of TCR clone 329922 (TRAV26-1, TRAJ52)
CIVRVSGGTSYEKLTF

SEQ ID NO: 659844 - protein, 16 aa, Homo sapiens
  CDR3 for beta chain variable domain of TCR clone 329922 (TRBV3-1, TRBJ2-3)
CASSQRAGDPTDTQYF

SEQ ID NO: 659845 - protein, 17 aa, Homo sapiens
  CDR3 for alpha chain variable domain of TCR clone 329923 (TRAV8-3, TRAJ34)
CAIPGKLIFGAGTRLQV

SEQ ID NO: 659846 - protein, 15 aa, Homo sapiens
  CDR3 for beta chain variable domain of TCR clone 329923 (TRBV5-7, TRBJ2-1)
CASSRRLAGDNEQFF

SEQ ID NO: 659847 - protein, 11 aa, Homo sapiens
  CDR3 for alpha chain variable domain of TCR clone 329924 (TRAV3, TRAJ21)
CAVGNFNKFYF

SEQ ID NO: 659848 - protein, 15 aa, Homo sapiens
  CDR3 for beta chain variable domain of TCR clone 329924 (TRBV19, TRBJ1-2)
CASSVGQVLNYGYTF

SEQ ID NO: 659849 - protein, 12 aa, Homo sapiens
  CDR3 for alpha chain variable domain of TCR clone 329925 (TRAV23/DV6, TRAJ30)
CAASKGDDKISF

SEQ ID NO: 659850 - protein, 13 aa, Homo sapiens
  CDR3 for beta chain variable domain of TCR clone 329925 (TRBV19, TRBJ1-2)
CASSVPGQDGDTF

SEQ ID NO: 659851 - protein, 14 aa, Homo sapiens
  CDR3 for alpha chain variable domain of TCR clone 329926 (TRAV8-4, TRAJ34)
CAVSDPGDSDKLIF

SEQ ID NO: 659852 - protein, 14 aa, Homo sapiens
  CDR3 for beta chain variable domain of TCR clone 329926 (TRBV20-1, TRBJ2-5)
CSARDGRAGETQYF

SEQ ID NO: 659853 - protein, 17 aa, Homo sapiens
  CDR3 for alpha chain variable domain of TCR clone 329927 (TRAV3, TRAJ6)
CAVRDGPRAGGSSIPTF

SEQ ID NO: 659854 - protein, 14 aa, Homo sapiens
  CDR3 for beta chain variable domain of TCR clone 329927 (TRBV6-1, TRBJ1-3)
CASVQGGGGNTIYF

SEQ ID NO: 659855 - protein, 19 aa, Homo sapiens
  CDR3 for alpha chain variable domain of TCR clone 329928 (TRAV26-1, TRAJ44)
CCVLLHRQSPLGTASKLTF

SEQ ID NO: 659856 - protein, 17 aa, Homo sapiens
  CDR3 for beta chain variable domain of TCR clone 329928 (TRBV24-1, TRBJ2-4)
CATSDAEARGVRNMQYF

SEQ ID NO: 659857 - protein, 17 aa, Homo sapiens
  CDR3 for alpha chain variable domain of TCR clone 329929 (TRAV13-1, TRAJ52)
CSKNPNDGGTSYGKLTF

SEQ ID NO: 659858 - protein, 14 aa, Homo sapiens
  CDR3 for beta chain variable domain of TCR clone 329929 (TRBV6-5, TRBJ1-1)
CASSFGQGLTEAFF

SEQ ID NO: 659859 - protein, 13 aa, Homo sapiens
  CDR3 for alpha chain variable domain of TCR clone 329930 (TRAV12-3, TRAJ56)
CAMSFGANRKLTF

SEQ ID NO: 659860 - protein, 15 aa, Homo sapiens
  CDR3 for beta chain variable domain of TCR clone 329930 (TRBV6-3, TRBJ2-7)
CASSSPGTVFYEQYF

SEQ ID NO: 659861 - protein, 14 aa, Homo sapiens
  CDR3 for alpha chain variable domain of TCR clone 329931 (TRAV12-2, TRAJ13)
CAVKKTRGYQKVTF

SEQ ID NO: 659862 - protein, 14 aa, Homo sapiens
  CDR3 for beta chain variable domain of TCR clone 329931 (TRBV5-5, TRBJ2-7)
CASSLGQGTHEQYF

SEQ ID NO: 659863 - protein, 11 aa, Homo sapiens
  CDR3 for alpha chain variable domain of TCR clone 329932 (TRAV39, TRAJ49)
CAGDISTQFYF

SEQ ID NO: 659864 - protein, 11 aa, Homo sapiens
  CDR3 for beta chain variable domain of TCR clone 329932 (TRBV7-8, TRBJ2-7)
CASSLSLEQYF

SEQ ID NO: 659865 - protein, 23 aa, Homo sapiens
  CDR3 for alpha chain variable domain of TCR clone 329933 (TRAV8-3, TRAJ6)
CAVGPLGEEATYLHLEEEPALLF

SEQ ID NO: 659866 - protein, 14 aa, Homo sapiens
  CDR3 for beta chain variable domain of TCR clone 329933 (TRBV19, TRBJ2-2)
CASSTGQGAGELFF

SEQ ID NO: 659867 - protein, 14 aa, Homo sapiens
  CDR3 for alpha chain variable domain of TCR clone 329934 (TRAV17, TRAJ57)
CATDPQGASEKLVF

SEQ ID NO: 659868 - protein, 18 aa, Homo sapiens
  CDR3 for beta chain variable domain of TCR clone 329934 (TRBV6-6, TRBJ1-3)
CASSYSKWDSISGNTIYF

SEQ ID NO: 659869 - protein, 14 aa, Homo sapiens
  CDR3 for alpha chain variable domain of TCR clone 329935 (TRAV13-1, TRAJ40)
CAASMTSGTYKYIF

SEQ ID NO: 659870 - protein, 13 aa, Homo sapiens
  CDR3 for beta chain variable domain of TCR clone 329935 (TRBV7-2, TRBJ1-1)
CASNLKGAKVAFF

SEQ ID NO: 659871 - protein, 10 aa, Homo sapiens
  CDR3 for alpha chain variable domain of TCR clone 329936 (TRAV36/DV7, TRAJ49)
CALTVNQFYF

SEQ ID NO: 659872 - protein, 13 aa, Homo sapiens
  CDR3 for beta chain variable domain of TCR clone 329936 (TRBV4-1, TRBJ2-7)
CASSQGQAYEQYF

SEQ ID NO: 659873 - protein, 18 aa, Homo sapiens
  CDR3 for alpha chain variable domain of TCR clone 329937 (TRAV21, TRAJ52)
CAVRPSPAGGTSYGKLTF

SEQ ID NO: 659874 - protein, 15 aa, Homo sapiens
  CDR3 for beta chain variable domain of TCR clone 329937 (TRBV18, TRBJ2-5)
CASTDRGPRQETQYF

SEQ ID NO: 659875 - protein, 12 aa, Homo sapiens
  CDR3 for alpha chain variable domain of TCR clone 329938 (TRAV12-3, TRAJ17)
CAMTLTGNKLTF

SEQ ID NO: 659876 - protein, 13 aa, Homo sapiens
  CDR3 for beta chain variable domain of TCR clone 329938 (TRBV3-1, TRBJ1-1)
CASSPGIITEAFF

SEQ ID NO: 659877 - protein, 15 aa, Homo sapiens
  CDR3 for alpha chain variable domain of TCR clone 329939 (TRAV17, TRAJ37)
CATDHGSSNTGKLIF

SEQ ID NO: 659878 - protein, 14 aa, Homo sapiens
  CDR3 for beta chain variable domain of TCR clone 329939 (TRBV7-2, TRBJ2-3)
SASSRTSGADTQYF

SEQ ID NO: 659879 - protein, 15 aa, Homo sapiens
  CDR3 for alpha chain variable domain of TCR clone 329940 (TRAV12-2, TRAJ43)
CAFDMRFVAGTRLTV

SEQ ID NO: 659880 - protein, 15 aa, Homo sapiens
  CDR3 for beta chain variable domain of TCR clone 329940 (TRBV28, TRBJ2-3)
CASSPDRQGANTQYF

SEQ ID NO: 659881 - protein, 13 aa, Homo sapiens
  CDR3 for alpha chain variable domain of TCR clone 329941 (TRAV38-1, TRAJ42)
CARWGGSQGNLIF

SEQ ID NO: 659882 - protein, 15 aa, Homo sapiens
  CDR3 for beta chain variable domain of TCR clone 329941 (TRBV28, TRBJ1-3)
CASSMGWASGNTIYF

SEQ ID NO: 659883 - protein, 12 aa, Homo sapiens
  CDR3 for alpha chain variable domain of TCR clone 329942 (TRAV2, TRAJ36)
CAEVTGANNLFF

SEQ ID NO: 659884 - protein, 15 aa, Homo sapiens
  CDR3 for beta chain variable domain of TCR clone 329942 (TRBV2, TRBJ2-1)
CASRGTGANYNEQFF

SEQ ID NO: 659885 - protein, 18 aa, Homo sapiens
  CDR3 for alpha chain variable domain of TCR clone 329943 (TRAV29/DV5, TRAJ52)
CAAGFRGAGGTSYGKLTF

SEQ ID NO: 659886 - protein, 13 aa, Homo sapiens
  CDR3 for beta chain variable domain of TCR clone 329943 (TRBV7-3, TRBJ2-5)
CASSSDREETQYF

SEQ ID NO: 659887 - protein, 15 aa, Homo sapiens
  CDR3 for alpha chain variable domain of TCR clone 329944 (TRAV21, TRAJ53)
CPTLNSGGSNYKLTF

SEQ ID NO: 659888 - protein, 16 aa, Homo sapiens
  CDR3 for beta chain variable domain of TCR clone 329944 (TRBV12-4, TRBJ1-5)
CASSRPVGGSNQPQHF

SEQ ID NO: 659889 - protein, 15 aa, Homo sapiens
  CDR3 for alpha chain variable domain of TCR clone 329945 (TRAV29/DV5, TRAJ47)
CAARPTMEYVNKLVF

SEQ ID NO: 659890 - protein, 13 aa, Homo sapiens
  CDR3 for beta chain variable domain of TCR clone 329945 (TRBV20-1, TRBJ1-1)
CSARAGGNTEAFF

SEQ ID NO: 659891 - protein, 15 aa, Homo sapiens
  CDR3 for alpha chain variable domain of TCR clone 329946 (TRAV3, TRAJ9)
CAVRARNTGGFKNIF

SEQ ID NO: 659892 - protein, 15 aa, Homo sapiens
  CDR3 for beta chain variable domain of TCR clone 329946 (TRBV6-5, TRBJ2-6)
CASSQWEAGANVLTF

SEQ ID NO: 659893 - protein, 18 aa, Homo sapiens
  CDR3 for alpha chain variable domain of TCR clone 329947 (TRAV3, TRAJ17)
CAVRARRGGRSCRQQANF

SEQ ID NO: 659894 - protein, 14 aa, Homo sapiens
  CDR3 for beta chain variable domain of TCR clone 329947 (TRBV4-1, TRBJ2-2)
CSISQAVNTGELFF

SEQ ID NO: 659895 - protein, 16 aa, Homo sapiens
  CDR3 for alpha chain variable domain of TCR clone 329948 (TRAV3, TRAJ37)
CAVRGKVSGNTGKLIF

SEQ ID NO: 659896 - protein, 15 aa, Homo sapiens
  CDR3 for beta chain variable domain of TCR clone 329948 (TRBV7-9, TRBJ2-2)
CASGPLDTFPGELFF

SEQ ID NO: 659897 - protein, 14 aa, Homo sapiens
  CDR3 for alpha chain variable domain of TCR clone 329949 (TRAV14/DV4, TRAJ42)
CPRGSLRSQGNLIF

SEQ ID NO: 659898 - protein, 13 aa, Homo sapiens
  CDR3 for beta chain variable domain of TCR clone 329949 (TRBV2, TRBJ2-7)
CASTGGSSYEQYF

SEQ ID NO: 659899 - protein, 15 aa, Homo sapiens
  CDR3 for alpha chain variable domain of TCR clone 329950 (TRAV8-3, TRAJ23)
FSVGDRYNQGGKLIF

SEQ ID NO: 659900 - protein, 22 aa, Homo sapiens
  CDR3 for beta chain variable domain of TCR clone 329950 (TRBV29-1, TRBJ2-5)
TVSNMSPEDSSIYLCSAGTQYF

SEQ ID NO: 659901 - protein, 13 aa, Homo sapiens
  CDR3 for alpha chain variable domain of TCR clone 329951 (TRAV6, TRAJ16)
CALDDSDGQKLLF

SEQ ID NO: 659902 - protein, 16 aa, Homo sapiens
  CDR3 for beta chain variable domain of TCR clone 329951 (TRBV12-4, TRBJ1-6)
CASNLQEKGSPLHLGT

SEQ ID NO: 659903 - protein, 14 aa, Homo sapiens
  CDR3 for alpha chain variable domain of TCR clone 329952 (TRAV26-1, TRAJ38)
FIANNAGNNRKLIW

SEQ ID NO: 659904 - protein, 13 aa, Homo sapiens
  CDR3 for beta chain variable domain of TCR clone 329952 (TRBV20-1, TRBJ1-1)
CSARGGGNTEAFF

SEQ ID NO: 659905 - protein, 16 aa, Homo sapiens
  CDR3 for alpha chain variable domain of TCR clone 329953 (TRAV4, TRAJ8)
CLVGDSGNTGFQKLGF

SEQ ID NO: 659906 - protein, 15 aa, Homo sapiens
  CDR3 for beta chain variable domain of TCR clone 329953 (TRBV15, TRBJ1-2)
CATSRVRASGSDYTF

SEQ ID NO: 659907 - protein, 16 aa, Homo sapiens
  CDR3 for alpha chain variable domain of TCR clone 329954 (TRAV20, TRAJ26)
CAVQHRRDNYGQNFVF

SEQ ID NO: 659908 - protein, 15 aa, Homo sapiens
  CDR3 for beta chain variable domain of TCR clone 329954 (TRBV7-2, TRBJ2-7)
CASSWGQGAIYEQYV

SEQ ID NO: 659909 - protein, 14 aa, Homo sapiens
  CDR3 for alpha chain variable domain of TCR clone 329955 (TRAV23/DV6, TRAJ27)
CAASGNGNAGKSTF

SEQ ID NO: 659910 - protein, 14 aa, Homo sapiens
  CDR3 for beta chain variable domain of TCR clone 329955 (TRBV7-3, TRBJ1-1)
CASSLKGGDTEAFF

SEQ ID NO: 659911 - protein, 13 aa, Homo sapiens
  CDR3 for alpha chain variable domain of TCR clone 329956 (TRAV35, TRAJ42)
CAGFPGSQGNLIF

SEQ ID NO: 659912 - protein, 15 aa, Homo sapiens
  CDR3 for beta chain variable domain of TCR clone 329956 (TRBV29-1, TRBJ2-3)
CSATRTDLSTDTQYF

SEQ ID NO: 659913 - protein, 15 aa, Homo sapiens
  CDR3 for alpha chain variable domain of TCR clone 329957 (TRAV13-1, TRAJ52)
CALRTGGTSDGKLTF

SEQ ID NO: 659914 - protein, 14 aa, Homo sapiens
  CDR3 for beta chain variable domain of TCR clone 329957 (TRBV20-1, TRBJ2-5)
CSASDSGSGETQYF

SEQ ID NO: 659915 - protein, 12 aa, Homo sapiens
  CDR3 for alpha chain variable domain of TCR clone 329958 (TRAV12-3, TRAJ34)
CAMGYNTDKLIF

SEQ ID NO: 659916 - protein, 15 aa, Homo sapiens
  CDR3 for beta chain variable domain of TCR clone 329958 (TRBV28, TRBJ2-1)
CASSIIGEVEVGSSS

SEQ ID NO: 659917 - protein, 13 aa, Homo sapiens
  CDR3 for alpha chain variable domain of TCR clone 329959 (TRAV1-2, TRAJ9)
CAALNTGGFKTIF

SEQ ID NO: 659918 - protein, 13 aa, Homo sapiens
  CDR3 for beta chain variable domain of TCR clone 329959 (TRBV20-1, TRBJ1-5)
CSASWGRSQPQHF

SEQ ID NO: 659919 - protein, 15 aa, Homo sapiens
  CDR3 for alpha chain variable domain of TCR clone 329960 (TRAV2, TRAJ15)
CAVEDWGQAGTALIF

SEQ ID NO: 659920 - protein, 15 aa, Homo sapiens
  CDR3 for beta chain variable domain of TCR clone 329960 (TRBV5-1, TRBJ2-1)
CASSPPRAPYNEQFF

SEQ ID NO: 659921 - protein, 13 aa, Homo sapiens
  CDR3 for alpha chain variable domain of TCR clone 329961 (TRAV26-2, TRAJ43)
CILRGVNNNDMRF

SEQ ID NO: 659922 - protein, 15 aa, Homo sapiens
  CDR3 for beta chain variable domain of TCR clone 329961 (TRBV7-2, TRBJ2-1)
CASTHGTGIYNEQFF

SEQ ID NO: 659923 - protein, 14 aa, Homo sapiens
  CDR3 for alpha chain variable domain of TCR clone 329962 (TRAV8-4, TRAJ5)
CAGSTDTGRRALTF

SEQ ID NO: 659924 - protein, 15 aa, Homo sapiens
  CDR3 for beta chain variable domain of TCR clone 329962 (TRBV19, TRBJ1-2)
CASSVGQVLNYGYTF

SEQ ID NO: 659925 - protein, 13 aa, Homo sapiens
  CDR3 for alpha chain variable domain of TCR clone 329963 (TRAV13-1, TRAJ12)
CAASPGSSYKLIF

SEQ ID NO: 659926 - protein, 16 aa, Homo sapiens
  CDR3 for beta chain variable domain of TCR clone 329963 (TRBV15, TRBJ2-1)
CATSREGLAGAYEQFF

SEQ ID NO: 659927 - protein, 13 aa, Homo sapiens
  CDR3 for alpha chain variable domain of TCR clone 329964 (TRAV35, TRAJ48)
CAGHEFGTEKLTF

SEQ ID NO: 659928 - protein, 14 aa, Homo sapiens
  CDR3 for beta chain variable domain of TCR clone 329964 (TRBV19, TRBJ2-1)
CASPTFVLSGEQFF

SEQ ID NO: 659929 - protein, 15 aa, Homo sapiens
  CDR3 for alpha chain variable domain of TCR clone 329965 (TRAV25, TRAJ53)
CAATGGGGSNHKLPF

SEQ ID NO: 659930 - protein, 19 aa, Homo sapiens
  CDR3 for beta chain variable domain of TCR clone 329965 (TRBV7-2, TRBJ2-3)
CASSFLSRNWGGGTDTQYF

SEQ ID NO: 659931 - protein, 13 aa, Homo sapiens
  CDR3 for alpha chain variable domain of TCR clone 329966 (TRAV29/DV5, TRAJ33)
CAASGESNYQLIW

SEQ ID NO: 659932 - protein, 14 aa, Homo sapiens
  CDR3 for beta chain variable domain of TCR clone 329966 (TRBV5-7, TRBJ1-1)
CASSLAGDWTEAFF

SEQ ID NO: 659933 - protein, 18 aa, Homo sapiens
  CDR3 for alpha chain variable domain of TCR clone 329967 (TRAV21, TRAJ52)
CAVRPSPAGGTSYGKLTF

SEQ ID NO: 659934 - protein, 15 aa, Homo sapiens
  CDR3 for beta chain variable domain of TCR clone 329967 (TRBV7-9, TRBJ1-6)
CASSSPGRGNSTLHF

SEQ ID NO: 659935 - protein, 15 aa, Homo sapiens
  CDR3 for alpha chain variable domain of TCR clone 329968 (TRAV2, TRAJ11)
CAVGGRNSGYSTLTL

SEQ ID NO: 659936 - protein, 17 aa, Homo sapiens
  CDR3 for beta chain variable domain of TCR clone 329968 (TRBV25-1, TRBJ1-6)
CASSEYIGERGNSPLHF

SEQ ID NO: 659937 - protein, 15 aa, Homo sapiens
  CDR3 for alpha chain variable domain of TCR clone 329969 (TRAV8-3, TRAJ11)
CAVGLFDSGYSTLPF

SEQ ID NO: 659938 - protein, 14 aa, Homo sapiens
  CDR3 for beta chain variable domain of TCR clone 329969 (TRBV12-5, TRBJ2-5)
CASGSRTHQETQYF

SEQ ID NO: 659939 - protein, 15 aa, Homo sapiens
  CDR3 for alpha chain variable domain of TCR clone 329970 (TRAV25, TRAJ52)
CAGRPGGTRYGKLTF

SEQ ID NO: 659940 - protein, 14 aa, Homo sapiens
  CDR3 for beta chain variable domain of TCR clone 329970 (TRBV2, TRBJ2-7)
CASSLTSGGYEQYF

SEQ ID NO: 659941 - protein, 13 aa, Homo sapiens
  CDR3 for alpha chain variable domain of TCR clone 329971 (TRAV13-1, TRAJ42)
CAASELWRKPRKY

SEQ ID NO: 659942 - protein, 14 aa, Homo sapiens
  CDR3 for beta chain variable domain of TCR clone 329971 (TRBV19, TRBJ2-1)
CASPTFVLSGEQFF

SEQ ID NO: 659943 - protein, 13 aa, Homo sapiens
  CDR3 for alpha chain variable domain of TCR clone 329972 (TRAV8-4, TRAJ29)
CAVSATGNTPLVF

SEQ ID NO: 659944 - protein, 17 aa, Homo sapiens
  CDR3 for beta chain variable domain of TCR clone 329972 (TRBV20-1, TRBJ2-1)
CNASSSGLAGSYNEQFF

SEQ ID NO: 659945 - protein, 12 aa, Homo sapiens
  CDR3 for alpha chain variable domain of TCR clone 329973 (TRAV12-1, TRAJ20)
CVVNPDDYKPSF

SEQ ID NO: 659946 - protein, 12 aa, Homo sapiens
  CDR3 for beta chain variable domain of TCR clone 329973 (TRBV11-2, TRBJ2-2)
CASSLGGGELFF

SEQ ID NO: 659947 - protein, 12 aa, Homo sapiens
  CDR3 for alpha chain variable domain of TCR clone 329974 (TRAV12-1, TRAJ40)
CVVYSGTYKSIF

SEQ ID NO: 659948 - protein, 14 aa, Homo sapiens
  CDR3 for beta chain variable domain of TCR clone 329974 (TRBV11-3, TRBJ1-5)
CASSLGQGAQPQHF

SEQ ID NO: 659949 - protein, 15 aa, Homo sapiens
  CDR3 for alpha chain variable domain of TCR clone 329975 (TRAV17, TRAJ54)
CATTRSEQGAQKLGF

SEQ ID NO: 659950 - protein, 16 aa, Homo sapiens
  CDR3 for beta chain variable domain of TCR clone 329975 (TRBV12-4, TRBJ2-3)
CARSLRLAETTDTQYF

SEQ ID NO: 659951 - protein, 13 aa, Homo sapiens
  CDR3 for alpha chain variable domain of TCR clone 329976 (TRAV13-2, TRAJ48)
CAEMDFGNEKLTF

SEQ ID NO: 659952 - protein, 15 aa, Homo sapiens
  CDR3 for beta chain variable domain of TCR clone 329976 (TRBV4-1, TRBJ1-4)
CASSDTGGTNEKLFF

SEQ ID NO: 659953 - protein, 12 aa, Homo sapiens
  CDR3 for alpha chain variable domain of TCR clone 329977 (TRAV16, TRAJ27)
CALNTNAGKSTF

SEQ ID NO: 659954 - protein, 20 aa, Homo sapiens
  CDR3 for beta chain variable domain of TCR clone 329977 (TRBV7-8, TRBJ2-2)
CASSHLFPGPTIHITGELFF

SEQ ID NO: 659955 - protein, 13 aa, Homo sapiens
  CDR3 for alpha chain variable domain of TCR clone 329978 (TRAV2, TRAJ29)
CAAGNSGNTPLDF

SEQ ID NO: 659956 - protein, 16 aa, Homo sapiens
  CDR3 for beta chain variable domain of TCR clone 329978 (TRBV7-9, TRBJ1-2)
CASSPGGGAINYGYTF

SEQ ID NO: 659957 - protein, 14 aa, Homo sapiens
  CDR3 for alpha chain variable domain of TCR clone 329979 (TRAV16, TRAJ17)
CAPSGRAAGNKLTF

SEQ ID NO: 659958 - protein, 15 aa, Homo sapiens
  CDR3 for beta chain variable domain of TCR clone 329979 (TRBV3-1, TRBJ1-2)
CASSPTRLPEGGYTF

SEQ ID NO: 659959 - protein, 14 aa, Homo sapiens
  CDR3 for alpha chain variable domain of TCR clone 329980 (TRAV26-1, TRAJ38)
CIADNAGNHRKLIW

SEQ ID NO: 659960 - protein, 17 aa, Homo sapiens
  CDR3 for beta chain variable domain of TCR clone 329980 (TRBV15, TRBJ1-1)
CATSRVGGADGDTEAFF

SEQ ID NO: 659961 - protein, 14 aa, Homo sapiens
  CDR3 for alpha chain variable domain of TCR clone 329981 (TRAV38-1, TRAJ40)
CALRPTSGTYKCIF

SEQ ID NO: 659962 - protein, 14 aa, Homo sapiens
  CDR3 for beta chain variable domain of TCR clone 329981 (TRBV25-1, TRBJ1-1)
CASNHLGGNTEAFF

SEQ ID NO: 659963 - protein, 11 aa, Homo sapiens
  CDR3 for alpha chain variable domain of TCR clone 329982 (TRAV3, TRAJ21)
CAVGNFNKFYF

SEQ ID NO: 659964 - protein, 17 aa, Homo sapiens
  CDR3 for beta chain variable domain of TCR clone 329982 (TRBV7-2, TRBJ2-7)
CASSLGTGTSGRYEQYF

SEQ ID NO: 659965 - protein, 14 aa, Homo sapiens
  CDR3 for alpha chain variable domain of TCR clone 329983 (TRAV12-2, TRAJ45)
CALPERGGADGLTF

SEQ ID NO: 659966 - protein, 13 aa, Homo sapiens
  CDR3 for beta chain variable domain of TCR clone 329983 (TRBV4-2, TRBJ1-1)
CASSQAGNTEAFF

SEQ ID NO: 659967 - protein, 14 aa, Homo sapiens
  CDR3 for alpha chain variable domain of TCR clone 329984 (TRAV12-3, TRAJ58)
CAMSTETSGPRLTF

SEQ ID NO: 659968 - protein, 15 aa, Homo sapiens
  CDR3 for beta chain variable domain of TCR clone 329984 (TRBV11-3, TRBJ2-3)
CASLKDGREGDTQYF

SEQ ID NO: 659969 - protein, 18 aa, Homo sapiens
  CDR3 for alpha chain variable domain of TCR clone 329985 (TRAV26-1, TRAJ23)
CIVRVGLEVWNQGGKLIF

SEQ ID NO: 659970 - protein, 20 aa, Homo sapiens
  CDR3 for beta chain variable domain of TCR clone 329985 (TRBV12-4, TRBJ2-5)
CASSFCQGAPRDPVLRARHA

SEQ ID NO: 659971 - protein, 14 aa, Homo sapiens
  CDR3 for alpha chain variable domain of TCR clone 329986 (TRAV8-3, TRAJ4)
CAVGAAGGYNKLIF

SEQ ID NO: 659972 - protein, 13 aa, Homo sapiens
  CDR3 for beta chain variable domain of TCR clone 329986 (TRBV7-2, TRBJ1-1)
CASNLKGAKVAFF

SEQ ID NO: 659973 - protein, 13 aa, Homo sapiens
  CDR3 for alpha chain variable domain of TCR clone 329987 (TRAV12-2, TRAJ50)
CAVIVTSYDKVIF

SEQ ID NO: 659974 - protein, 13 aa, Homo sapiens
  CDR3 for beta chain variable domain of TCR clone 329987 (TRBV20-1, TRBJ2-5)
CSAREAFQETQYF

SEQ ID NO: 659975 - protein, 13 aa, Homo sapiens
  CDR3 for alpha chain variable domain of TCR clone 329988 (TRAV1-2, TRAJ9)
CAALNPGGFKPIF

SEQ ID NO: 659976 - protein, 13 aa, Homo sapiens
  CDR3 for beta chain variable domain of TCR clone 329988 (TRBV19, TRBJ1-2)
CASSVPGQDGYTF

SEQ ID NO: 659977 - protein, 14 aa, Homo sapiens
  CDR3 for alpha chain variable domain of TCR clone 329989 (TRAV12-2, TRAJ40)
CAVKIPSGTYKYIF

SEQ ID NO: 659978 - protein, 18 aa, Homo sapiens
  CDR3 for beta chain variable domain of TCR clone 329989 (TRBV20-1, TRBJ2-6)
CSAETTPTRGSGANVLTF

SEQ ID NO: 659979 - protein, 20 aa, Homo sapiens
  CDR3 for alpha chain variable domain of TCR clone 329990 (TRAV1-1, TRAJ4)
CLLLLRCEGFLSGGYDKLIF

SEQ ID NO: 659980 - protein, 16 aa, Homo sapiens
  CDR3 for beta chain variable domain of TCR clone 329990 (TRBV28, TRBJ1-4)
CASSPPYRGRSEKLFF

SEQ ID NO: 659981 - protein, 14 aa, Homo sapiens
  CDR3 for alpha chain variable domain of TCR clone 329991 (TRAV8-1, TRAJ24)
CAVNAADSWGKLQF

SEQ ID NO: 659982 - protein, 20 aa, Homo sapiens
  CDR3 for beta chain variable domain of TCR clone 329991 (TRBV28, TRBJ2-1)
CASTPIGRSPGLAGGNEQFF

SEQ ID NO: 659983 - protein, 11 aa, Homo sapiens
  CDR3 for alpha chain variable domain of TCR clone 329992 (TRAV12-1, TRAJ15)
CVVNAGTALLF

SEQ ID NO: 659984 - protein, 16 aa, Homo sapiens
  CDR3 for beta chain variable domain of TCR clone 329992 (TRBV20-1, TRBJ2-3)
CSALAFDTGDPDTQYF

SEQ ID NO: 659985 - protein, 15 aa, Homo sapiens
  CDR3 for alpha chain variable domain of TCR clone 329993 (TRAV20, TRAJ4)
CAVQVFSGGYNKLIF

SEQ ID NO: 659986 - protein, 13 aa, Homo sapiens
  CDR3 for beta chain variable domain of TCR clone 329993 (TRBV7-3, TRBJ1-2)
CASSLKRGYGYTF

SEQ ID NO: 659987 - protein, 14 aa, Homo sapiens
  CDR3 for alpha chain variable domain of TCR clone 329994 (TRAV12-1, TRAJ30)
CVVRGMNSDDKIIF

SEQ ID NO: 659988 - protein, 14 aa, Homo sapiens
  CDR3 for beta chain variable domain of TCR clone 329994 (TRBV7-2, TRBJ2-1)
CASSLTSGNRRQFF

SEQ ID NO: 659989 - protein, 14 aa, Homo sapiens
  CDR3 for alpha chain variable domain of TCR clone 329995 (TRAV3, TRAJ34)
CAVRDINNTDKLIF

SEQ ID NO: 659990 - protein, 13 aa, Homo sapiens
  CDR3 for beta chain variable domain of TCR clone 329995 (TRBV20-1, TRBJ1-1)
CSARCGGNTEAFF

SEQ ID NO: 659991 - protein, 18 aa, Homo sapiens
  CDR3 for alpha chain variable domain of TCR clone 329996 (TRAV21, TRAJ52)
CAVRPSPAGGTSYGKLTF

SEQ ID NO: 659992 - protein, 15 aa, Homo sapiens
  CDR3 for beta chain variable domain of TCR clone 329996 (TRBV19, TRBJ1-2)
CASGRDGGGGYGYTF

SEQ ID NO: 659993 - protein, 14 aa, Homo sapiens
  CDR3 for alpha chain variable domain of TCR clone 329997 (TRAV26-2, TRAJ24)
CILRDSDSWGKLQF

SEQ ID NO: 659994 - protein, 15 aa, Homo sapiens
  CDR3 for beta chain variable domain of TCR clone 329997 (TRBV18, TRBJ2-2)
CASTNRGGNTGELFF

SEQ ID NO: 659995 - protein, 14 aa, Homo sapiens
  CDR3 for alpha chain variable domain of TCR clone 329998 (TRAV21, TRAJ15)
CAVSLNQAGTALIF

SEQ ID NO: 659996 - protein, 15 aa, Homo sapiens
  CDR3 for beta chain variable domain of TCR clone 329998 (TRBV18, TRBJ2-1)
CASSPPSASYNEQFF

SEQ ID NO: 659997 - protein, 14 aa, Homo sapiens
  CDR3 for alpha chain variable domain of TCR clone 329999 (TRAV1-2, TRAJ16)
CAVNRFSDGHKLLF

SEQ ID NO: 659998 - protein, 16 aa, Homo sapiens
  CDR3 for beta chain variable domain of TCR clone 329999 (TRBV20-1, TRBJ1-4)
CSAPGQGLLTNDKLFF

SEQ ID NO: 659999 - protein, 13 aa, Homo sapiens
  CDR3 for alpha chain variable domain of TCR clone 330000 (TRAV23/DV6, TRAJ43)
CAASMGGNNDMRF

SEQ ID NO: 660000 - protein, 15 aa, Homo sapiens
  CDR3 for beta chain variable domain of TCR clone 330000 (TRBV10-3, TRBJ2-3)
CAISLTSGGTDTQYF

SEQ ID NO: 660001 - protein, 23 aa, Homo sapiens
  CDR3 for alpha chain variable domain of TCR clone 330001 (TRAV26-1, )
CIADNAANNHIQSPDPAVSQLRD

SEQ ID NO: 660002 - protein, 13 aa, Homo sapiens
  CDR3 for beta chain variable domain of TCR clone 330001 (TRBV20-1, TRBJ1-1)
CSARGGGNTEAFF

SEQ ID NO: 660003 - protein, 16 aa, Homo sapiens
  CDR3 for alpha chain variable domain of TCR clone 330002 (TRAV8-2, TRAJ45)
CVVSEGTGGGAGGLTF

SEQ ID NO: 660004 - protein, 15 aa, Homo sapiens
  CDR3 for beta chain variable domain of TCR clone 330002 (TRBV7-9, TRBJ2-5)
CASSLVAGWLETQYF

SEQ ID NO: 660005 - protein, 16 aa, Homo sapiens
  CDR3 for alpha chain variable domain of TCR clone 330003 (TRAV3, TRAJ10)
CAVRDMRAGGGNKLTF

SEQ ID NO: 660006 - protein, 16 aa, Homo sapiens
  CDR3 for beta chain variable domain of TCR clone 330003 (TRBV12-4, TRBJ2-2)
CASSFWIVGNTGELFF

SEQ ID NO: 660007 - protein, 12 aa, Homo sapiens
  CDR3 for alpha chain variable domain of TCR clone 330004 (TRAV13-1, TRAJ21)
CAAKEGFNKFYF

SEQ ID NO: 660008 - protein, 17 aa, Homo sapiens
  CDR3 for beta chain variable domain of TCR clone 330004 (TRBV20-1, TRBJ2-1)
CSASSSGLAGSYNVQFF

SEQ ID NO: 660009 - protein, 12 aa, Homo sapiens
  CDR3 for alpha chain variable domain of TCR clone 330005 (TRAV12-2, TRAJ47)
CAAAECGNKLVF

SEQ ID NO: 660010 - protein, 14 aa, Homo sapiens
  CDR3 for beta chain variable domain of TCR clone 330005 (TRBV20-1, TRBJ1-1)
CSAMGGTANTEAFF

SEQ ID NO: 660011 - protein, 14 aa, Homo sapiens
  CDR3 for alpha chain variable domain of TCR clone 330006 (TRAV1-2, TRAJ8)
CAVREDTGFQKLVF

SEQ ID NO: 660012 - protein, 13 aa, Homo sapiens
  CDR3 for beta chain variable domain of TCR clone 330006 (TRBV4-2, TRBJ2-2)
CAGEDRGTGELFF

SEQ ID NO: 660013 - protein, 14 aa, Homo sapiens
  CDR3 for alpha chain variable domain of TCR clone 330007 (TRAV1-2, TRAJ8)
CAVREDTGFQKLVF

SEQ ID NO: 660014 - protein, 12 aa, Homo sapiens
  CDR3 for beta chain variable domain of TCR clone 330007 (TRBV18, TRBJ2-5)
CASSPSKETQYF

SEQ ID NO: 660015 - protein, 14 aa, Homo sapiens
  CDR3 for alpha chain variable domain of TCR clone 330008 (TRAV12-3, TRAJ29)
CAMILLSGNTPLVF

SEQ ID NO: 660016 - protein, 16 aa, Homo sapiens
  CDR3 for beta chain variable domain of TCR clone 330008 (TRBV28, TRBJ2-7)
CASSYGTSGRGYEQYF

SEQ ID NO: 660017 - protein, 15 aa, Homo sapiens
  CDR3 for alpha chain variable domain of TCR clone 330009 (TRAV4, TRAJ36)
CLVGDRQTGANNLSF

SEQ ID NO: 660018 - protein, 15 aa, Homo sapiens
  CDR3 for beta chain variable domain of TCR clone 330009 (TRBV7-6, TRBJ2-1)
CASSSLAGEGNEQFF

SEQ ID NO: 660019 - protein, 17 aa, Homo sapiens
  CDR3 for alpha chain variable domain of TCR clone 330010 (TRAV3, TRAJ28)
CAVREAYSGAGSYQLTF

SEQ ID NO: 660020 - protein, 15 aa, Homo sapiens
  CDR3 for beta chain variable domain of TCR clone 330010 (TRBV19, TRBJ2-1)
CASSSPGVPLDEQFF

SEQ ID NO: 660021 - protein, 22 aa, Homo sapiens
  CDR3 for alpha chain variable domain of TCR clone 330011 (TRAV8-3, TRAJ38)
CAVGASNAGNNHIQNADPAVYQ

SEQ ID NO: 660022 - protein, 15 aa, Homo sapiens
  CDR3 for beta chain variable domain of TCR clone 330011 (TRBV11-3, TRBJ1-3)
CASSLFGPSGNTIYF

SEQ ID NO: 660023 - protein, 16 aa, Homo sapiens
  CDR3 for alpha chain variable domain of TCR clone 330012 (TRAV26-1, TRAJ53)
CIVRVAMGGSNYKLTF

SEQ ID NO: 660024 - protein, 15 aa, Homo sapiens
  CDR3 for beta chain variable domain of TCR clone 330012 (TRBV7-2, TRBJ2-1)
CASSSGLAGGNEQFF

SEQ ID NO: 660025 - protein, 12 aa, Homo sapiens
  CDR3 for alpha chain variable domain of TCR clone 330013 (TRAV12-3, TRAJ17)
CAMTLTGNKLTF

SEQ ID NO: 660026 - protein, 17 aa, Homo sapiens
  CDR3 for beta chain variable domain of TCR clone 330013 (TRBV28, TRBJ2-2)
CASSFVAGGLYGGELFF

SEQ ID NO: 660027 - protein, 15 aa, Homo sapiens
  CDR3 for alpha chain variable domain of TCR clone 330014 (TRAV2, TRAJ9)
CAVEDRGTGGFKTIF

SEQ ID NO: 660028 - protein, 15 aa, Homo sapiens
  CDR3 for beta chain variable domain of TCR clone 330014 (TRBV7-9, TRBJ2-7)
CASSSSGLAVYEQYF

SEQ ID NO: 660029 - protein, 12 aa, Homo sapiens
  CDR3 for alpha chain variable domain of TCR clone 330015 (TRAV27, TRAJ35)
CAGADFGNVLHC

SEQ ID NO: 660030 - protein, 16 aa, Homo sapiens
  CDR3 for beta chain variable domain of TCR clone 330015 (TRBV6-1, TRBJ2-1)
CASISRQGSSYNEQCF

SEQ ID NO: 660031 - protein, 16 aa, Homo sapiens
  CDR3 for alpha chain variable domain of TCR clone 330016 (TRAV26-1, TRAJ53)
CIVRVAMGGSNYKLTF

SEQ ID NO: 660032 - protein, 13 aa, Homo sapiens
  CDR3 for beta chain variable domain of TCR clone 330016 (TRBV12-4, TRBJ1-4)
CASAMGHNEKLFF

SEQ ID NO: 660033 - protein, 13 aa, Homo sapiens
  CDR3 for alpha chain variable domain of TCR clone 330017 (TRAV26-2, TRAJ43)
CILRAVNNNDMRF

SEQ ID NO: 660034 - protein, 18 aa, Homo sapiens
  CDR3 for beta chain variable domain of TCR clone 330017 (TRBV25-1, TRBJ1-2)
CASSGLQNGQGLIFGYTF

SEQ ID NO: 660035 - protein, 12 aa, Homo sapiens
  CDR3 for alpha chain variable domain of TCR clone 330018 (TRAV16, TRAJ12)
CAHGDSSYKLIF

SEQ ID NO: 660036 - protein, 12 aa, Homo sapiens
  CDR3 for beta chain variable domain of TCR clone 330018 (TRBV28, TRBJ2-1)
CAISRLVGEQFF

SEQ ID NO: 660037 - protein, 15 aa, Homo sapiens
  CDR3 for alpha chain variable domain of TCR clone 330019 (TRAV3, TRAJ5)
CAVRDLDTGRRALTF

SEQ ID NO: 660038 - protein, 14 aa, Homo sapiens
  CDR3 for beta chain variable domain of TCR clone 330019 (TRBV7-8, TRBJ2-3)
CASSSRDSTDTQYF

SEQ ID NO: 660039 - protein, 14 aa, Homo sapiens
  CDR3 for alpha chain variable domain of TCR clone 330020 (TRAV16, TRAJ54)
CALSLIQGAQKLVF

SEQ ID NO: 660040 - protein, 12 aa, Homo sapiens
  CDR3 for beta chain variable domain of TCR clone 330020 (TRBV14, TRBJ1-1)
CASSQLKGLAFF

SEQ ID NO: 660041 - protein, 15 aa, Homo sapiens
  CDR3 for alpha chain variable domain of TCR clone 330021 (TRAV26-1, TRAJ47)
CIVRVGWGYGNKLVF

SEQ ID NO: 660042 - protein, 13 aa, Homo sapiens
  CDR3 for beta chain variable domain of TCR clone 330021 (TRBV20-1, TRBJ2-7)
CSARGGTQDEQYF

SEQ ID NO: 660043 - protein, 17 aa, Homo sapiens
  CDR3 for alpha chain variable domain of TCR clone 330022 (TRAV3, TRAJ7)
CAVRDMSPLEGTTDSLL

SEQ ID NO: 660044 - protein, 13 aa, Homo sapiens
  CDR3 for beta chain variable domain of TCR clone 330022 (TRBV7-9, TRBJ1-2)
CASSLKQNYGYTF

SEQ ID NO: 660045 - protein, 16 aa, Homo sapiens
  CDR3 for alpha chain variable domain of TCR clone 330023 (TRAV39, TRAJ32)
CAVDMEYGGATNKLIF

SEQ ID NO: 660046 - protein, 13 aa, Homo sapiens
  CDR3 for beta chain variable domain of TCR clone 330023 (TRBV7-6, TRBJ1-2)
CASSLVADYGYTF

SEQ ID NO: 660047 - protein, 15 aa, Homo sapiens
  CDR3 for alpha chain variable domain of TCR clone 330024 (TRAV29/DV5, TRAJ24)
CATSGATDSWGKFQF

SEQ ID NO: 660048 - protein, 11 aa, Homo sapiens
  CDR3 for beta chain variable domain of TCR clone 330024 (TRBV29-1, TRBJ2-5)
CSENRTGTQYF

SEQ ID NO: 660049 - protein, 14 aa, Homo sapiens
  CDR3 for alpha chain variable domain of TCR clone 330025 (TRAV12-3, TRAJ42)
CAMNYGGSQGNLIF

SEQ ID NO: 660050 - protein, 13 aa, Homo sapiens
  CDR3 for beta chain variable domain of TCR clone 330025 (TRBV11-2, TRBJ2-5)
CASSSTGEETQYF

SEQ ID NO: 660051 - protein, 13 aa, Homo sapiens
  CDR3 for alpha chain variable domain of TCR clone 330026 (TRAV21, TRAJ27)
CAALNTNAGKSTL

SEQ ID NO: 660052 - protein, 14 aa, Homo sapiens
  CDR3 for beta chain variable domain of TCR clone 330026 (TRBV27, TRBJ1-1)
CASSLLGGLSEAFF

SEQ ID NO: 660053 - protein, 16 aa, Homo sapiens
  CDR3 for alpha chain variable domain of TCR clone 330027 (TRAV30, TRAJ24)
CGTEIVDADSWGQFQF

SEQ ID NO: 660054 - protein, 16 aa, Homo sapiens
  CDR3 for beta chain variable domain of TCR clone 330027 (TRBV7-3, TRBJ2-2)
CASSLKRGTLSGELFF

SEQ ID NO: 660055 - protein, 14 aa, Homo sapiens
  CDR3 for alpha chain variable domain of TCR clone 330028 (TRAV12-2, TRAJ13)
CAVKQTGGYQKVTF

SEQ ID NO: 660056 - protein, 15 aa, Homo sapiens
  CDR3 for beta chain variable domain of TCR clone 330028 (TRBV27, TRBJ2-1)
CASSNGGGSSNEQFV

SEQ ID NO: 660057 - protein, 14 aa, Homo sapiens
  CDR3 for alpha chain variable domain of TCR clone 330029 (TRAV29/DV5, TRAJ32)
CAAAYGGATNKLIF

SEQ ID NO: 660058 - protein, 11 aa, Homo sapiens
  CDR3 for beta chain variable domain of TCR clone 330029 (TRBV11-2, TRBJ2-2)
CASSSPGELFF

SEQ ID NO: 660059 - protein, 14 aa, Homo sapiens
  CDR3 for alpha chain variable domain of TCR clone 330030 (TRAV1-2, TRAJ16)
CAVRSASDGQTLLF

SEQ ID NO: 660060 - protein, 17 aa, Homo sapiens
  CDR3 for beta chain variable domain of TCR clone 330030 (TRBV7-3, TRBJ2-3)
CASSLMKRMRGADTQYF

SEQ ID NO: 660061 - protein, 16 aa, Homo sapiens
  CDR3 for alpha chain variable domain of TCR clone 330031 (TRAV26-1, TRAJ46)
CIVRVGKEKQRRQAEF

SEQ ID NO: 660062 - protein, 16 aa, Homo sapiens
  CDR3 for beta chain variable domain of TCR clone 330031 (TRBV27, TRBJ2-2)
CASSFRGLVRTGELFF

SEQ ID NO: 660063 - protein, 16 aa, Homo sapiens
  CDR3 for alpha chain variable domain of TCR clone 330032 (TRAV36/DV7, TRAJ30)
CAVETYGLDRDDKIIF

SEQ ID NO: 660064 - protein, 15 aa, Homo sapiens
  CDR3 for beta chain variable domain of TCR clone 330032 (TRBV18, TRBJ2-1)
CASLPDRGRDNEQLF

SEQ ID NO: 660065 - protein, 16 aa, Homo sapiens
  CDR3 for alpha chain variable domain of TCR clone 330033 (TRAV3, TRAJ18)
CAVRDGRGSTLGRLYF

SEQ ID NO: 660066 - protein, 15 aa, Homo sapiens
  CDR3 for beta chain variable domain of TCR clone 330033 (TRBV7-9, TRBJ1-6)
CASSSPGRGNSPRHF

SEQ ID NO: 660067 - protein, 15 aa, Homo sapiens
  CDR3 for alpha chain variable domain of TCR clone 330034 (TRAV13-1, TRAJ11)
CAASNRNSGYSTLAF

SEQ ID NO: 660068 - protein, 17 aa, Homo sapiens
  CDR3 for beta chain variable domain of TCR clone 330034 (TRBV28, TRBJ2-3)
CASSPTPAGGRVDTQYF

SEQ ID NO: 660069 - protein, 12 aa, Homo sapiens
  CDR3 for alpha chain variable domain of TCR clone 330035 (TRAV1-2, TRAJ33)
CAALDSNYQLFW

SEQ ID NO: 660070 - protein, 13 aa, Homo sapiens
  CDR3 for beta chain variable domain of TCR clone 330035 (TRBV7-2, TRBJ2-7)
CASSFGQEKEQYF

SEQ ID NO: 660071 - protein, 23 aa, Homo sapiens
  CDR3 for alpha chain variable domain of TCR clone 330036 (TRAV26-1, )
CIADNAGNNYIQNPDPAVYQLRD

SEQ ID NO: 660072 - protein, 17 aa, Homo sapiens
  CDR3 for beta chain variable domain of TCR clone 330036 (TRBV11-2, TRBJ2-6)
CASSQRDIFSGANVLTF

SEQ ID NO: 660073 - protein, 16 aa, Homo sapiens
  CDR3 for alpha chain variable domain of TCR clone 330037 (TRAV12-3, TRAJ53)
CAMSPGSGGSNYKLTF

SEQ ID NO: 660074 - protein, 14 aa, Homo sapiens
  CDR3 for beta chain variable domain of TCR clone 330037 (TRBV7-8, TRBJ2-5)
CASSATGGQETQYF

SEQ ID NO: 660075 - protein, 14 aa, Homo sapiens
  CDR3 for alpha chain variable domain of TCR clone 330038 (TRAV12-2, TRAJ13)
CAVKKTGGYQKVTF

SEQ ID NO: 660076 - protein, 16 aa, Homo sapiens
  CDR3 for beta chain variable domain of TCR clone 330038 (TRBV2, TRBJ2-1)
CPSRSPAGGKYNEQFF

SEQ ID NO: 660077 - protein, 13 aa, Homo sapiens
  CDR3 for alpha chain variable domain of TCR clone 330039 (TRAV20, TRAJ37)
CAGCSSNKGKLIF

SEQ ID NO: 660078 - protein, 21 aa, Homo sapiens
  CDR3 for beta chain variable domain of TCR clone 330039 (TRBV4-2, TRBJ2-3)
PCSQKTRPCISVPAAPDTQYF

SEQ ID NO: 660079 - protein, 15 aa, Homo sapiens
  CDR3 for alpha chain variable domain of TCR clone 330040 (TRAV3, TRAJ29)
CAVRDINSGNTPLVF

SEQ ID NO: 660080 - protein, 16 aa, Homo sapiens
  CDR3 for beta chain variable domain of TCR clone 330040 (TRBV4-1, TRBJ2-5)
CASSQTFYGDQDTQYF

SEQ ID NO: 660081 - protein, 13 aa, Homo sapiens
  CDR3 for alpha chain variable domain of TCR clone 330041 (TRAV12-3, TRAJ33)
CAMSVNSNYQLIW

SEQ ID NO: 660082 - protein, 13 aa, Homo sapiens
  CDR3 for beta chain variable domain of TCR clone 330041 (TRBV7-3, TRBJ1-2)
CASSLKRGYGYTF

SEQ ID NO: 660083 - protein, 12 aa, Homo sapiens
  CDR3 for alpha chain variable domain of TCR clone 330042 (TRAV27, TRAJ36)
ASTPAGANNLFF

SEQ ID NO: 660084 - protein, 13 aa, Homo sapiens
  CDR3 for beta chain variable domain of TCR clone 330042 (TRBV7-9, TRBJ2-3)
CASSPGSTDTRYF

SEQ ID NO: 660085 - protein, 13 aa, Homo sapiens
  CDR3 for alpha chain variable domain of TCR clone 330043 (TRAV29/DV5, TRAJ31)
CAASRNNNARLMF

SEQ ID NO: 660086 - protein, 15 aa, Homo sapiens
  CDR3 for beta chain variable domain of TCR clone 330043 (TRBV28, TRBJ2-5)
CASSPGQGSIETQYF

SEQ ID NO: 660087 - protein, 14 aa, Homo sapiens
  CDR3 for alpha chain variable domain of TCR clone 330044 (TRAV2, TRAJ9)
CAVEDRSGGFKTIF

SEQ ID NO: 660088 - protein, 14 aa, Homo sapiens
  CDR3 for beta chain variable domain of TCR clone 330044 (TRBV7-9, TRBJ2-7)
CASSPSGGQSEQYF

SEQ ID NO: 660089 - protein, 13 aa, Homo sapiens
  CDR3 for alpha chain variable domain of TCR clone 330045 (TRAV9-2, TRAJ53)
CALSGGSNYKLTF

SEQ ID NO: 660090 - protein, 17 aa, Homo sapiens
  CDR3 for beta chain variable domain of TCR clone 330045 (TRBV11-2, TRBJ2-1)
CASSLYPPGVEYNEQFI

SEQ ID NO: 660091 - protein, 18 aa, Homo sapiens
  CDR3 for alpha chain variable domain of TCR clone 330046 (TRAV13-1, TRAJ52)
CAAKNPNAGGTSYGKLTF

SEQ ID NO: 660092 - protein, 14 aa, Homo sapiens
  CDR3 for beta chain variable domain of TCR clone 330046 (TRBV7-3, TRBJ2-1)
CASSLAGGTDEQFF

SEQ ID NO: 660093 - protein, 14 aa, Homo sapiens
  CDR3 for alpha chain variable domain of TCR clone 330047 (TRAV12-1, TRAJ12)
CVVTRMDSSYKLIF

SEQ ID NO: 660094 - protein, 13 aa, Homo sapiens
  CDR3 for beta chain variable domain of TCR clone 330047 (TRBV7-2, TRBJ2-5)
CASGPVSQETQYF

SEQ ID NO: 660095 - protein, 14 aa, Homo sapiens
  CDR3 for alpha chain variable domain of TCR clone 330048 (TRAV34, TRAJ44)
CGADGTGTDSKLTF

SEQ ID NO: 660096 - protein, 15 aa, Homo sapiens
  CDR3 for beta chain variable domain of TCR clone 330048 (TRBV5-1, TRBJ2-1)
CASSPPRAPYNEQFF

SEQ ID NO: 660097 - protein, 17 aa, Homo sapiens
  CDR3 for alpha chain variable domain of TCR clone 330049 (TRAV26-1, TRAJ58)
CIVRGGAEETSGSRLTF

SEQ ID NO: 660098 - protein, 18 aa, Homo sapiens
  CDR3 for beta chain variable domain of TCR clone 330049 (TRBV7-9, TRBJ2-7)
CASSLTTSGSRTWYEQYF

SEQ ID NO: 660099 - protein, 12 aa, Homo sapiens
  CDR3 for alpha chain variable domain of TCR clone 330050 (TRAV12-1, TRAJ9)
CVVNPASFKTIF

SEQ ID NO: 660100 - protein, 15 aa, Homo sapiens
  CDR3 for beta chain variable domain of TCR clone 330050 (TRBV4-3, TRBJ2-2)
CASSQGIGGTGELFF

SEQ ID NO: 660101 - protein, 14 aa, Homo sapiens
  CDR3 for alpha chain variable domain of TCR clone 330051 (TRAV2, TRAJ9)
CAVEDRSGGFKTIF

SEQ ID NO: 660102 - protein, 14 aa, Homo sapiens
  CDR3 for beta chain variable domain of TCR clone 330051 (TRBV28, TRBJ2-2)
CASSMQGYTGELFF

SEQ ID NO: 660103 - protein, 16 aa, Homo sapiens
  CDR3 for alpha chain variable domain of TCR clone 330052 (TRAV26-1, TRAJ48)
CIVREPPNFGNEKLTF

SEQ ID NO: 660104 - protein, 12 aa, Homo sapiens
  CDR3 for beta chain variable domain of TCR clone 330052 (TRBV19, TRBJ2-1)
CASGRQGAEQFL

SEQ ID NO: 660105 - protein, 14 aa, Homo sapiens
  CDR3 for alpha chain variable domain of TCR clone 330053 (TRAV1-1, TRAJ27)
CPVIYNTNAGKSTF

SEQ ID NO: 660106 - protein, 18 aa, Homo sapiens
  CDR3 for beta chain variable domain of TCR clone 330053 (TRBV7-3, TRBJ2-1)
CASSLTLASGRAMVSSSS

SEQ ID NO: 660107 - protein, 14 aa, Homo sapiens
  CDR3 for alpha chain variable domain of TCR clone 330054 (TRAV12-2, TRAJ40)
VAVKIPSGPYKYIF

SEQ ID NO: 660108 - protein, 14 aa, Homo sapiens
  CDR3 for beta chain variable domain of TCR clone 330054 (TRBV20-1, TRBJ1-1)
CSAQTRIGGTEAFF

SEQ ID NO: 660109 - protein, 18 aa, Homo sapiens
  CDR3 for alpha chain variable domain of TCR clone 330055 (TRAV26-2, TRAJ54)
CILRDVEVGIQGAQKLVF

SEQ ID NO: 660110 - protein, 16 aa, Homo sapiens
  CDR3 for beta chain variable domain of TCR clone 330055 (TRBV11-2, TRBJ2-7)
CASSLAPTGVNYEQYF

SEQ ID NO: 660111 - protein, 15 aa, Homo sapiens
  CDR3 for alpha chain variable domain of TCR clone 330056 (TRAV26-1, TRAJ15)
CIVRAANQAGTALIF

SEQ ID NO: 660112 - protein, 13 aa, Homo sapiens
  CDR3 for beta chain variable domain of TCR clone 330056 (TRBV12-4, TRBJ1-5)
CASGPDRAQPQHF

SEQ ID NO: 660113 - protein, 11 aa, Homo sapiens
  CDR3 for alpha chain variable domain of TCR clone 330057 (TRAV35, TRAJ34)
CLARNTDKLIF

SEQ ID NO: 660114 - protein, 12 aa, Homo sapiens
  CDR3 for beta chain variable domain of TCR clone 330057 (TRBV11-2, TRBJ2-1)
CASSPGNNEQFF

SEQ ID NO: 660115 - protein, 18 aa, Homo sapiens
  CDR3 for alpha chain variable domain of TCR clone 330058 (TRAV9-2, TRAJ52)
CALSRHNAGGTSYGKLTF

SEQ ID NO: 660116 - protein, 16 aa, Homo sapiens
  CDR3 for beta chain variable domain of TCR clone 330058 (TRBV18, TRBJ2-4)
CASSPPYSGAKNIQYF

SEQ ID NO: 660117 - protein, 17 aa, Homo sapiens
  CDR3 for alpha chain variable domain of TCR clone 330059 (TRAV3, TRAJ6)
CAVRDGPGAGGSYIPKF

SEQ ID NO: 660118 - protein, 14 aa, Homo sapiens
  CDR3 for beta chain variable domain of TCR clone 330059 (TRBV7-2, TRBJ2-7)
CASSPKTSFYEQYF

SEQ ID NO: 660119 - protein, 15 aa, Homo sapiens
  CDR3 for alpha chain variable domain of TCR clone 330060 (TRAV3, TRAJ22)
CAVRDRGGSARQMTF

SEQ ID NO: 660120 - protein, 14 aa, Homo sapiens
  CDR3 for beta chain variable domain of TCR clone 330060 (TRBV19, TRBJ2-1)
CASPTFVLSGEQFF

SEQ ID NO: 660121 - protein, 14 aa, Homo sapiens
  CDR3 for alpha chain variable domain of TCR clone 330061 (TRAV1-2, TRAJ16)
CAVNRFSDGQKLLL

SEQ ID NO: 660122 - protein, 14 aa, Homo sapiens
  CDR3 for beta chain variable domain of TCR clone 330061 (TRBV7-2, TRBJ1-1)
CASSFLTGTTEAFF

SEQ ID NO: 660123 - protein, 13 aa, Homo sapiens
  CDR3 for alpha chain variable domain of TCR clone 330062 (TRAV3, TRAJ36)
CAVSLGGANNLFF

SEQ ID NO: 660124 - protein, 13 aa, Homo sapiens
  CDR3 for beta chain variable domain of TCR clone 330062 (TRBV20-1, TRBJ1-1)
CSARAGGNTEAFF

SEQ ID NO: 660125 - protein, 12 aa, Homo sapiens
  CDR3 for alpha chain variable domain of TCR clone 330063 (TRAV12-3, TRAJ17)
CAMTLTGNKLTF

SEQ ID NO: 660126 - protein, 14 aa, Homo sapiens
  CDR3 for beta chain variable domain of TCR clone 330063 (TRBV20-1, TRBJ1-3)
CSASPTGAGKTIYF

SEQ ID NO: 660127 - protein, 17 aa, Homo sapiens
  CDR3 for alpha chain variable domain of TCR clone 330064 (TRAV23/DV6, TRAJ57)
CAASSTLSQGGSEKLGF

SEQ ID NO: 660128 - protein, 14 aa, Homo sapiens
  CDR3 for beta chain variable domain of TCR clone 330064 (TRBV7-8, TRBJ2-5)
CASSATGGQETQYF

SEQ ID NO: 660129 - protein, 12 aa, Homo sapiens
  CDR3 for alpha chain variable domain of TCR clone 330065 (TRAV35, TRAJ39)
LAPNNTGNMLTF

SEQ ID NO: 660130 - protein, 13 aa, Homo sapiens
  CDR3 for beta chain variable domain of TCR clone 330065 (TRBV19, TRBJ1-3)
CASRLSLGNTIYF

SEQ ID NO: 660131 - protein, 14 aa, Homo sapiens
  CDR3 for alpha chain variable domain of TCR clone 330066 (TRAV1-2, TRAJ8)
CAVREDTGFQQLVL

SEQ ID NO: 660132 - protein, 14 aa, Homo sapiens
  CDR3 for beta chain variable domain of TCR clone 330066 (TRBV11-2, TRBJ2-3)
CASSRLARTDTQYF

SEQ ID NO: 660133 - protein, 16 aa, Homo sapiens
  CDR3 for alpha chain variable domain of TCR clone 330067 (TRAV12-2, TRAJ40)
CAVIRGGTSGTNKYIF

SEQ ID NO: 660134 - protein, 14 aa, Homo sapiens
  CDR3 for beta chain variable domain of TCR clone 330067 (TRBV20-1, TRBJ2-5)
CSARDGRAGETQYF

SEQ ID NO: 660135 - protein, 12 aa, Homo sapiens
  CDR3 for alpha chain variable domain of TCR clone 330068 (TRAV35, TRAJ49)
CAGWNTGNQFYF

SEQ ID NO: 660136 - protein, 16 aa, Homo sapiens
  CDR3 for beta chain variable domain of TCR clone 330068 (TRBV5-1, TRBJ2-2)
CASSHWDTTNTGELFF

SEQ ID NO: 660137 - protein, 17 aa, Homo sapiens
  CDR3 for alpha chain variable domain of TCR clone 330069 (TRAV23/DV6, TRAJ57)
CAASSTLSQGGSEKLVF

SEQ ID NO: 660138 - protein, 15 aa, Homo sapiens
  CDR3 for beta chain variable domain of TCR clone 330069 (TRBV27, TRBJ2-1)
CASSNGGGSSNEQFF

SEQ ID NO: 660139 - protein, 15 aa, Homo sapiens
  CDR3 for alpha chain variable domain of TCR clone 330070 (TRAV8-3, TRAJ4)
CAVGARIGGYNKLIF

SEQ ID NO: 660140 - protein, 14 aa, Homo sapiens
  CDR3 for beta chain variable domain of TCR clone 330070 (TRBV18, TRBJ2-7)
CASSPRGGAYEQYF

SEQ ID NO: 660141 - protein, 14 aa, Homo sapiens
  CDR3 for alpha chain variable domain of TCR clone 330071 (TRAV4, TRAJ9)
CLVGPGTGGFKTII

SEQ ID NO: 660142 - protein, 15 aa, Homo sapiens
  CDR3 for beta chain variable domain of TCR clone 330071 (TRBV7-2, TRBJ2-1)
CASSLASGRVNEQFF

SEQ ID NO: 660143 - protein, 17 aa, Homo sapiens
  CDR3 for alpha chain variable domain of TCR clone 330072 (TRAV3, TRAJ6)
CAVRAGPRAGGSYIPTF

SEQ ID NO: 660144 - protein, 15 aa, Homo sapiens
  CDR3 for beta chain variable domain of TCR clone 330072 (TRBV5-8, TRBJ2-2)
CASSLDRGATGELFF

SEQ ID NO: 660145 - protein, 15 aa, Homo sapiens
  CDR3 for alpha chain variable domain of TCR clone 330073 (TRAV8-2, TRAJ40)
CVVLGTTSGTYKYIF

SEQ ID NO: 660146 - protein, 16 aa, Homo sapiens
  CDR3 for beta chain variable domain of TCR clone 330073 (TRBV6-6, TRBJ2-3)
CASSYSHAGSTDTQYF

SEQ ID NO: 660147 - protein, 14 aa, Homo sapiens
  CDR3 for alpha chain variable domain of TCR clone 330074 (TRAV1-2, TRAJ16)
CAVNRFSAGQKLLF

SEQ ID NO: 660148 - protein, 17 aa, Homo sapiens
  CDR3 for beta chain variable domain of TCR clone 330074 (TRBV7-8, TRBJ2-6)
CASSAGTGGAGANVLTF

SEQ ID NO: 660149 - protein, 15 aa, Homo sapiens
  CDR3 for alpha chain variable domain of TCR clone 330075 (TRAV16, TRAJ17)
CALSGNKAAGNKLTF

SEQ ID NO: 660150 - protein, 16 aa, Homo sapiens
  CDR3 for beta chain variable domain of TCR clone 330075 (TRBV7-6, TRBJ1-6)
CASSSLPAGEDSPLHF

SEQ ID NO: 660151 - protein, 12 aa, Homo sapiens
  CDR3 for alpha chain variable domain of TCR clone 330076 (TRAV26-2, TRAJ47)
CILVEYGNKLVF

SEQ ID NO: 660152 - protein, 16 aa, Homo sapiens
  CDR3 for beta chain variable domain of TCR clone 330076 (TRBV18, TRBJ1-4)
YSSSPLVGDRAEKLFF

SEQ ID NO: 660153 - protein, 11 aa, Homo sapiens
  CDR3 for alpha chain variable domain of TCR clone 330077 (TRAV12-2, TRAJ39)
CAVNNILTFGG

SEQ ID NO: 660154 - protein, 16 aa, Homo sapiens
  CDR3 for beta chain variable domain of TCR clone 330077 (TRBV5-3, TRBJ2-2)
CARSFGTGTNTGELFF

SEQ ID NO: 660155 - protein, 18 aa, Homo sapiens
  CDR3 for alpha chain variable domain of TCR clone 330078 (TRAV21, TRAJ52)
CAVRPSPAGGASYGQLTF

SEQ ID NO: 660156 - protein, 17 aa, Homo sapiens
  CDR3 for beta chain variable domain of TCR clone 330078 (TRBV13, TRBJ2-3)
CASSLSRVAGGRNTQYF

SEQ ID NO: 660157 - protein, 11 aa, Homo sapiens
  CDR3 for alpha chain variable domain of TCR clone 330079 (TRAV17, TRAJ9)
CGFTGGFKTIF

SEQ ID NO: 660158 - protein, 13 aa, Homo sapiens
  CDR3 for beta chain variable domain of TCR clone 330079 (TRBV7-2, TRBJ1-1)
CASNLKGAKVAFF

SEQ ID NO: 660159 - protein, 13 aa, Homo sapiens
  CDR3 for alpha chain variable domain of TCR clone 330080 (TRAV21, TRAJ47)
CAVSGLYGNKLVF

SEQ ID NO: 660160 - protein, 17 aa, Homo sapiens
  CDR3 for beta chain variable domain of TCR clone 330080 (TRBV15, TRBJ2-3)
CATSGTTSEEGTDTQYF

SEQ ID NO: 660161 - protein, 17 aa, Homo sapiens
  CDR3 for alpha chain variable domain of TCR clone 330081 (TRAV3, TRAJ6)
CAVRDGPRAGGSDIPTF

SEQ ID NO: 660162 - protein, 14 aa, Homo sapiens
  CDR3 for beta chain variable domain of TCR clone 330081 (TRBV24-1, TRBJ1-1)
CATSIPRGDTEAFF

SEQ ID NO: 660163 - protein, 13 aa, Homo sapiens
  CDR3 for alpha chain variable domain of TCR clone 330082 (TRAV8-6, TRAJ24)
CAVSSDSWGKLQF

SEQ ID NO: 660164 - protein, 15 aa, Homo sapiens
  CDR3 for beta chain variable domain of TCR clone 330082 (TRBV2, TRBJ2-1)
CATQARLVMIGEQFF

SEQ ID NO: 660165 - protein, 13 aa, Homo sapiens
  CDR3 for alpha chain variable domain of TCR clone 330083 (TRAV27, TRAJ45)
CRSSGGGADGLTF

SEQ ID NO: 660166 - protein, 15 aa, Homo sapiens
  CDR3 for beta chain variable domain of TCR clone 330083 (TRBV4-1, TRBJ2-7)
CASSQEGWGPYEQYF

SEQ ID NO: 660167 - protein, 11 aa, Homo sapiens
  CDR3 for alpha chain variable domain of TCR clone 330084 (TRAV2, TRAJ13)
CASGGYQKVTF

SEQ ID NO: 660168 - protein, 15 aa, Homo sapiens
  CDR3 for beta chain variable domain of TCR clone 330084 (TRBV18, TRBJ2-7)
CASSPSSTGNYEKYF

SEQ ID NO: 660169 - protein, 15 aa, Homo sapiens
  CDR3 for alpha chain variable domain of TCR clone 330085 (TRAV17, TRAJ23)
CATDAEDNQGGKLIF

SEQ ID NO: 660170 - protein, 13 aa, Homo sapiens
  CDR3 for beta chain variable domain of TCR clone 330085 (TRBV12-4, TRBJ2-2)
CASSITGSGELFF

SEQ ID NO: 660171 - protein, 17 aa, Homo sapiens
  CDR3 for alpha chain variable domain of TCR clone 330086 (TRAV3, TRAJ6)
CAVKDGPRAGGSYIPIF

SEQ ID NO: 660172 - protein, 14 aa, Homo sapiens
  CDR3 for beta chain variable domain of TCR clone 330086 (TRBV7-2, TRBJ2-7)
CASSPKTSFYEQYF

SEQ ID NO: 660173 - protein, 13 aa, Homo sapiens
  CDR3 for alpha chain variable domain of TCR clone 330087 (TRAV12-3, TRAJ33)
CAMSVDSNYQLIW

SEQ ID NO: 660174 - protein, 12 aa, Homo sapiens
  CDR3 for beta chain variable domain of TCR clone 330087 (TRBV5-1, TRBJ2-4)
LAGEWTKNIQYF

SEQ ID NO: 660175 - protein, 18 aa, Homo sapiens
  CDR3 for alpha chain variable domain of TCR clone 330088 (TRAV21, TRAJ35)
CAVFGNVLHCVSRTQVIV

SEQ ID NO: 660176 - protein, 17 aa, Homo sapiens
  CDR3 for beta chain variable domain of TCR clone 330088 (TRBV7-2, TRBJ2-2)
CASSPRGAGEGTGELFF

SEQ ID NO: 660177 - protein, 15 aa, Homo sapiens
  CDR3 for alpha chain variable domain of TCR clone 330089 (TRAV25, TRAJ52)
CAGTSGGTSYGKLIF

SEQ ID NO: 660178 - protein, 16 aa, Homo sapiens
  CDR3 for beta chain variable domain of TCR clone 330089 (TRBV15, TRBJ1-2)
CATSRGPRTGGGGYTF

SEQ ID NO: 660179 - protein, 12 aa, Homo sapiens
  CDR3 for alpha chain variable domain of TCR clone 330090 (TRAV27, TRAJ35)
CAGADFGNVLHC

SEQ ID NO: 660180 - protein, 16 aa, Homo sapiens
  CDR3 for beta chain variable domain of TCR clone 330090 (TRBV6-1, TRBJ2-1)
CASNLRQGSSYNEQFF

SEQ ID NO: 660181 - protein, 10 aa, Homo sapiens
  CDR3 for alpha chain variable domain of TCR clone 330091 (TRAV13-1, TRAJ8)
CAAPFQKLVF

SEQ ID NO: 660182 - protein, 20 aa, Homo sapiens
  CDR3 for beta chain variable domain of TCR clone 330091 (TRBV10-3, TRBJ2-3)
CTSVPSPTLWRTSSTDTQYF

SEQ ID NO: 660183 - protein, 16 aa, Homo sapiens
  CDR3 for alpha chain variable domain of TCR clone 330092 (TRAV21, TRAJ52)
CAVTNAGGTSYGKLTF

SEQ ID NO: 660184 - protein, 15 aa, Homo sapiens
  CDR3 for beta chain variable domain of TCR clone 330092 (TRBV19, TRBJ1-2)
CAGIVGQVLNYGYTF

SEQ ID NO: 660185 - protein, 14 aa, Homo sapiens
  CDR3 for alpha chain variable domain of TCR clone 330093 (TRAV26-1, TRAJ38)
CIAANAGNTRKLIW

SEQ ID NO: 660186 - protein, 14 aa, Homo sapiens
  CDR3 for beta chain variable domain of TCR clone 330093 (TRBV4-1, TRBJ2-2)
CASSQAVNTGELFF

SEQ ID NO: 660187 - protein, 11 aa, Homo sapiens
  CDR3 for alpha chain variable domain of TCR clone 330094 (TRAV1-2, TRAJ31)
CAVNNNARLMF

SEQ ID NO: 660188 - protein, 15 aa, Homo sapiens
  CDR3 for beta chain variable domain of TCR clone 330094 (TRBV12-4, TRBJ2-2)
CASSLGVRHTGELFF

SEQ ID NO: 660189 - protein, 12 aa, Homo sapiens
  CDR3 for alpha chain variable domain of TCR clone 330095 (TRAV2, TRAJ9)
CAVGAGGFNTIL

SEQ ID NO: 660190 - protein, 16 aa, Homo sapiens
  CDR3 for beta chain variable domain of TCR clone 330095 (TRBV13, TRBJ2-2)
CASSPRTGEHTGELFF

SEQ ID NO: 660191 - protein, 14 aa, Homo sapiens
  CDR3 for alpha chain variable domain of TCR clone 330096 (TRAV23/DV6, TRAJ10)
CAEAISGGGNKLTF

SEQ ID NO: 660192 - protein, 12 aa, Homo sapiens
  CDR3 for beta chain variable domain of TCR clone 330096 (TRBV28, TRBJ2-7)
CASSVPPYEQYF

SEQ ID NO: 660193 - protein, 12 aa, Homo sapiens
  CDR3 for alpha chain variable domain of TCR clone 330097 (TRAV12-3, TRAJ17)
RAMTLTGNKLTF

SEQ ID NO: 660194 - protein, 15 aa, Homo sapiens
  CDR3 for beta chain variable domain of TCR clone 330097 (TRBV20-1, TRBJ2-7)
CSARDRVSGIDEQYF

SEQ ID NO: 660195 - protein, 14 aa, Homo sapiens
  CDR3 for alpha chain variable domain of TCR clone 330098 (TRAV4, TRAJ21)
CLVGDNLTNFTLDL

SEQ ID NO: 660196 - protein, 17 aa, Homo sapiens
  CDR3 for beta chain variable domain of TCR clone 330098 (TRBV3-1, TRBJ2-7)
CASSQDLTGLSSYEQYF

SEQ ID NO: 660197 - protein, 15 aa, Homo sapiens
  CDR3 for alpha chain variable domain of TCR clone 330099 (TRAV4, TRAJ32)
CLVGEDGGATNKLIF

SEQ ID NO: 660198 - protein, 16 aa, Homo sapiens
  CDR3 for beta chain variable domain of TCR clone 330099 (TRBV7-9, TRBJ2-1)
CASSDVAGGSYNEQFF

SEQ ID NO: 660199 - protein, 14 aa, Homo sapiens
  CDR3 for alpha chain variable domain of TCR clone 330100 (TRAV36/DV7, TRAJ40)
CAVETTSGTYKYMF

SEQ ID NO: 660200 - protein, 13 aa, Homo sapiens
  CDR3 for beta chain variable domain of TCR clone 330100 (TRBV29-1, TRBJ2-1)
CSVEGGRVNEQFF

SEQ ID NO: 660201 - protein, 15 aa, Homo sapiens
  CDR3 for alpha chain variable domain of TCR clone 330101 (TRAV27, TRAJ38)
CAARRNAGNNRKLLW

SEQ ID NO: 660202 - protein, 13 aa, Homo sapiens
  CDR3 for beta chain variable domain of TCR clone 330101 (TRBV12-5, TRBJ2-3)
CASGDRRSDTQYF

SEQ ID NO: 660203 - protein, 14 aa, Homo sapiens
  CDR3 for alpha chain variable domain of TCR clone 330102 (TRAV8-6, TRAJ49)
CAVRDPGTGNQFYF

SEQ ID NO: 660204 - protein, 16 aa, Homo sapiens
  CDR3 for beta chain variable domain of TCR clone 330102 (TRBV24-1, TRBJ2-1)
CATSGVAGANYNEQFF

SEQ ID NO: 660205 - protein, 16 aa, Homo sapiens
  CDR3 for alpha chain variable domain of TCR clone 330103 (TRAV30, TRAJ49)
SAAQRVGPNTGNQFYF

SEQ ID NO: 660206 - protein, 15 aa, Homo sapiens
  CDR3 for beta chain variable domain of TCR clone 330103 (TRBV2, TRBJ2-1)
CASSELAGSYNGQFF

SEQ ID NO: 660207 - protein, 15 aa, Homo sapiens
  CDR3 for alpha chain variable domain of TCR clone 330104 (TRAV26-1, TRAJ40)
CVVRVATSGTYKYIF

SEQ ID NO: 660208 - protein, 12 aa, Homo sapiens
  CDR3 for beta chain variable domain of TCR clone 330104 (TRBV7-9, TRBJ1-4)
CASSTDREKLFF

SEQ ID NO: 660209 - protein, 14 aa, Homo sapiens
  CDR3 for alpha chain variable domain of TCR clone 330105 (TRAV13-1, TRAJ44)
CAAKATSTASKLTF

SEQ ID NO: 660210 - protein, 17 aa, Homo sapiens
  CDR3 for beta chain variable domain of TCR clone 330105 (TRBV7-3, TRBJ2-3)
RASSLMKRMRGADTQYF

SEQ ID NO: 660211 - protein, 14 aa, Homo sapiens
  CDR3 for alpha chain variable domain of TCR clone 330106 (TRAV8-4, TRAJ43)
CAVSDPRNNNDMRF

SEQ ID NO: 660212 - protein, 15 aa, Homo sapiens
  CDR3 for beta chain variable domain of TCR clone 330106 (TRBV4-2, TRBJ1-2)
CASSQRTGGRDGDTF

SEQ ID NO: 660213 - protein, 12 aa, Homo sapiens
  CDR3 for alpha chain variable domain of TCR clone 330107 (TRAV12-3, TRAJ4)
CAMTGAGTRLAV

SEQ ID NO: 660214 - protein, 14 aa, Homo sapiens
  CDR3 for beta chain variable domain of TCR clone 330107 (TRBV10-3, TRBJ1-1)
CAISDTDRGVEAFI

SEQ ID NO: 660215 - protein, 12 aa, Homo sapiens
  CDR3 for alpha chain variable domain of TCR clone 330108 (TRAV13-1, TRAJ48)
CAANFGNEKLPF

SEQ ID NO: 660216 - protein, 13 aa, Homo sapiens
  CDR3 for beta chain variable domain of TCR clone 330108 (TRBV7-3, TRBJ1-1)
CASSQDWGAKAFF

SEQ ID NO: 660217 - protein, 13 aa, Homo sapiens
  CDR3 for alpha chain variable domain of TCR clone 330109 (TRAV12-2, TRAJ45)
CAARGGGADGLTF

SEQ ID NO: 660218 - protein, 13 aa, Homo sapiens
  CDR3 for beta chain variable domain of TCR clone 330109 (TRBV6-5, TRBJ2-5)
CASHTAGRETQYF

SEQ ID NO: 660219 - protein, 14 aa, Homo sapiens
  CDR3 for alpha chain variable domain of TCR clone 330110 (TRAV12-2, TRAJ9)
CTVNALEGGFKTIF

SEQ ID NO: 660220 - protein, 16 aa, Homo sapiens
  CDR3 for beta chain variable domain of TCR clone 330110 (TRBV19, TRBJ1-6)
CASSVAPVAGNSPLHF

SEQ ID NO: 660221 - protein, 19 aa, Homo sapiens
  CDR3 for alpha chain variable domain of TCR clone 330111 (TRAV29/DV5, TRAJ49)
CSVLLCSKLTVDTGNQFYF

SEQ ID NO: 660222 - protein, 15 aa, Homo sapiens
  CDR3 for beta chain variable domain of TCR clone 330111 (TRBV6-3, TRBJ2-7)
CASSSPGTVFYEQYF

SEQ ID NO: 660223 - protein, 12 aa, Homo sapiens
  CDR3 for alpha chain variable domain of TCR clone 330112 (TRAV22, TRAJ22)
CAPGGSARQLTF

SEQ ID NO: 660224 - protein, 15 aa, Homo sapiens
  CDR3 for beta chain variable domain of TCR clone 330112 (TRBV15, TRBJ1-6)
CATSGALIRPSTLGT

SEQ ID NO: 660225 - protein, 16 aa, Homo sapiens
  CDR3 for alpha chain variable domain of TCR clone 330113 (TRAV30, TRAJ24)
CGTEIVGADSWGKFQF

SEQ ID NO: 660226 - protein, 13 aa, Homo sapiens
  CDR3 for beta chain variable domain of TCR clone 330113 (TRBV14, TRBJ2-7)
CASSQDRRYEQYF

SEQ ID NO: 660227 - protein, 13 aa, Homo sapiens
  CDR3 for alpha chain variable domain of TCR clone 330114 (TRAV30, TRAJ39)
CGTEKNAGNMLTF

SEQ ID NO: 660228 - protein, 12 aa, Homo sapiens
  CDR3 for beta chain variable domain of TCR clone 330114 (TRBV12-4, TRBJ2-5)
CASSSAKETQYF

SEQ ID NO: 660229 - protein, 10 aa, Homo sapiens
  CDR3 for alpha chain variable domain of TCR clone 330115 (TRAV21, TRAJ49)
CAVTGNKFYF

SEQ ID NO: 660230 - protein, 15 aa, Homo sapiens
  CDR3 for beta chain variable domain of TCR clone 330115 (TRBV6-1, TRBJ2-3)
CASTTLAGHTDTQYF

SEQ ID NO: 660231 - protein, 14 aa, Homo sapiens
  CDR3 for alpha chain variable domain of TCR clone 330116 (TRAV12-3, TRAJ10)
SHLPLTGGGNKLTF

SEQ ID NO: 660232 - protein, 11 aa, Homo sapiens
  CDR3 for beta chain variable domain of TCR clone 330116 (TRBV29-1, TRBJ2-5)
CSKDRTGTQYF

SEQ ID NO: 660233 - protein, 15 aa, Homo sapiens
  CDR3 for alpha chain variable domain of TCR clone 330117 (TRAV12-1, TRAJ44)
CVADLPTGTASKLTF

SEQ ID NO: 660234 - protein, 18 aa, Homo sapiens
  CDR3 for beta chain variable domain of TCR clone 330117 (TRBV6-4, TRBJ2-1)
CASSPDRMGSGSINEQFF

SEQ ID NO: 660235 - protein, 11 aa, Homo sapiens
  CDR3 for alpha chain variable domain of TCR clone 330118 (TRAV2, TRAJ33)
CAVDSNYQLIW

SEQ ID NO: 660236 - protein, 16 aa, Homo sapiens
  CDR3 for beta chain variable domain of TCR clone 330118 (TRBV15, TRBJ2-1)
CATSRERLAGAYEQFF

SEQ ID NO: 660237 - protein, 17 aa, Homo sapiens
  CDR3 for alpha chain variable domain of TCR clone 330119 (TRAV13-1, TRAJ31)
CAPRDRLMFGDGTQLVV

SEQ ID NO: 660238 - protein, 12 aa, Homo sapiens
  CDR3 for beta chain variable domain of TCR clone 330119 (TRBV7-9, TRBJ2-7)
FASSLEGYEQYF

SEQ ID NO: 660239 - protein, 14 aa, Homo sapiens
  CDR3 for alpha chain variable domain of TCR clone 330120 (TRAV21, TRAJ15)
CAVSLNQTGTALIF

SEQ ID NO: 660240 - protein, 11 aa, Homo sapiens
  CDR3 for beta chain variable domain of TCR clone 330120 (TRBV20-1, TRBJ2-7)
CSARTSYEQYF

SEQ ID NO: 660241 - protein, 14 aa, Homo sapiens
  CDR3 for alpha chain variable domain of TCR clone 330121 (TRAV1-2, TRAJ8)
CAVSEDTGFQKLVF

SEQ ID NO: 660242 - protein, 14 aa, Homo sapiens
  CDR3 for beta chain variable domain of TCR clone 330121 (TRBV15, TRBJ2-3)
CATRSGTSTDTQYF

SEQ ID NO: 660243 - protein, 15 aa, Homo sapiens
  CDR3 for alpha chain variable domain of TCR clone 330122 (TRAV29/DV5, TRAJ42)
CAAKTDGGSQGNLIF

SEQ ID NO: 660244 - protein, 14 aa, Homo sapiens
  CDR3 for beta chain variable domain of TCR clone 330122 (TRBV11-2, TRBJ2-7)
CASSLGAGAYEQYF

SEQ ID NO: 660245 - protein, 16 aa, Homo sapiens
  CDR3 for alpha chain variable domain of TCR clone 330123 (TRAV12-2, TRAJ18)
CAVTTERGSTLGRLYF

SEQ ID NO: 660246 - protein, 13 aa, Homo sapiens
  CDR3 for beta chain variable domain of TCR clone 330123 (TRBV19, TRBJ2-3)
CATWDKITDTQYF

SEQ ID NO: 660247 - protein, 14 aa, Homo sapiens
  CDR3 for alpha chain variable domain of TCR clone 330124 (TRAV1-2, TRAJ8)
CAVREDTGFQKLVF

SEQ ID NO: 660248 - protein, 13 aa, Homo sapiens
  CDR3 for beta chain variable domain of TCR clone 330124 (TRBV7-9, TRBJ2-1)
CASSWESYNEQFF

SEQ ID NO: 660249 - protein, 16 aa, Homo sapiens
  CDR3 for alpha chain variable domain of TCR clone 330125 (TRAV30, TRAJ24)
CGTEIVDADSRGKFQF

SEQ ID NO: 660250 - protein, 15 aa, Homo sapiens
  CDR3 for beta chain variable domain of TCR clone 330125 (TRBV7-9, TRBJ1-4)
CASSARTGGNEKLFF

SEQ ID NO: 660251 - protein, 15 aa, Homo sapiens
  CDR3 for alpha chain variable domain of TCR clone 330126 (TRAV26-1, TRAJ15)
CIVRAANQAGTALIF

SEQ ID NO: 660252 - protein, 15 aa, Homo sapiens
  CDR3 for beta chain variable domain of TCR clone 330126 (TRBV20-1, TRBJ1-1)
CSARSAATSNTETFF

SEQ ID NO: 660253 - protein, 13 aa, Homo sapiens
  CDR3 for alpha chain variable domain of TCR clone 330127 (TRAV35, TRAJ22)
CAGLSGSARQLAF

SEQ ID NO: 660254 - protein, 16 aa, Homo sapiens
  CDR3 for beta chain variable domain of TCR clone 330127 (TRBV7-9, TRBJ2-1)
CASSLVLTGQGNEQFF

SEQ ID NO: 660255 - protein, 15 aa, Homo sapiens
  CDR3 for alpha chain variable domain of TCR clone 330128 (TRAV8-3, TRAJ41)
CAVGSNSNSEYALNF

SEQ ID NO: 660256 - protein, 17 aa, Homo sapiens
  CDR3 for beta chain variable domain of TCR clone 330128 (TRBV25-1, TRBJ2-1)
CASSAYGQGRGVYEQFF

SEQ ID NO: 660257 - protein, 15 aa, Homo sapiens
  CDR3 for alpha chain variable domain of TCR clone 330129 (TRAV26-1, TRAJ40)
CIVRVTTSGNYKYIF

SEQ ID NO: 660258 - protein, 13 aa, Homo sapiens
  CDR3 for beta chain variable domain of TCR clone 330129 (TRBV10-3, TRBJ2-7)
CASKLAVNYEQYF

SEQ ID NO: 660259 - protein, 14 aa, Homo sapiens
  CDR3 for alpha chain variable domain of TCR clone 330130 (TRAV35, TRAJ24)
CAGRRRDSWGKLQF

SEQ ID NO: 660260 - protein, 12 aa, Homo sapiens
  CDR3 for beta chain variable domain of TCR clone 330130 (TRBV12-4, TRBJ2-3)
CASSLGQDTQYF

SEQ ID NO: 660261 - protein, 14 aa, Homo sapiens
  CDR3 for alpha chain variable domain of TCR clone 330131 (TRAV1-2, TRAJ16)
CAVNRFSDGQKLLF

SEQ ID NO: 660262 - protein, 12 aa, Homo sapiens
  CDR3 for beta chain variable domain of TCR clone 330131 (TRBV11-2, TRBJ2-2)
CASSLEGGELFF

SEQ ID NO: 660263 - protein, 12 aa, Homo sapiens
  CDR3 for alpha chain variable domain of TCR clone 330132 (TRAV14/DV4, TRAJ23)
CNERGERRKAIF

SEQ ID NO: 660264 - protein, 15 aa, Homo sapiens
  CDR3 for beta chain variable domain of TCR clone 330132 (TRBV6-3, TRBJ2-1)
CASSYASDSYNEQFF

SEQ ID NO: 660265 - protein, 15 aa, Homo sapiens
  CDR3 for alpha chain variable domain of TCR clone 330133 (TRAV29/DV5, TRAJ29)
CAASERSSGTTPLVF

SEQ ID NO: 660266 - protein, 12 aa, Homo sapiens
  CDR3 for beta chain variable domain of TCR clone 330133 (TRBV12-4, TRBJ1-5)
CASSLGRQPQHF

SEQ ID NO: 660267 - protein, 15 aa, Homo sapiens
  CDR3 for alpha chain variable domain of TCR clone 330134 (TRAV12-1, TRAJ15)
CVATRANQAGTALIF

SEQ ID NO: 660268 - protein, 14 aa, Homo sapiens
  CDR3 for beta chain variable domain of TCR clone 330134 (TRBV5-1, TRBJ1-1)
CASSLVSINTEAFF

SEQ ID NO: 660269 - protein, 14 aa, Homo sapiens
  CDR3 for alpha chain variable domain of TCR clone 330135 (TRAV23/DV6, TRAJ45)
CAVYSGGGADGLTF

SEQ ID NO: 660270 - protein, 12 aa, Homo sapiens
  CDR3 for beta chain variable domain of TCR clone 330135 (TRBV11-2, TRBJ2-2)
CASSLGGGELFF

SEQ ID NO: 660271 - protein, 14 aa, Homo sapiens
  CDR3 for alpha chain variable domain of TCR clone 330136 (TRAV38-1, TRAJ43)
CAFMKHNNNNDMRF

SEQ ID NO: 660272 - protein, 14 aa, Homo sapiens
  CDR3 for beta chain variable domain of TCR clone 330136 (TRBV19, TRBJ2-1)
CASPTFVLSGEQFF

SEQ ID NO: 660273 - protein, 15 aa, Homo sapiens
  CDR3 for alpha chain variable domain of TCR clone 330137 (TRAV20, TRAJ53)
CAVQASGGSNYKLTF

SEQ ID NO: 660274 - protein, 14 aa, Homo sapiens
  CDR3 for beta chain variable domain of TCR clone 330137 (TRBV25-1, TRBJ1-1)
CASTHLGGNTEAFF

SEQ ID NO: 660275 - protein, 13 aa, Homo sapiens
  CDR3 for alpha chain variable domain of TCR clone 330138 (TRAV17, TRAJ9)
CATDYTGGFKTIF

SEQ ID NO: 660276 - protein, 17 aa, Homo sapiens
  CDR3 for beta chain variable domain of TCR clone 330138 (TRBV24-1, TRBJ2-1)
CATSDVSTSGTYNEQFF

SEQ ID NO: 660277 - protein, 15 aa, Homo sapiens
  CDR3 for alpha chain variable domain of TCR clone 330139 (TRAV38-1, TRAJ57)
CAFMDSQGGSEQLVF

SEQ ID NO: 660278 - protein, 16 aa, Homo sapiens
  CDR3 for beta chain variable domain of TCR clone 330139 (TRBV10-3, TRBJ2-1)
CAIRGGGRGDYNEQFF

SEQ ID NO: 660279 - protein, 16 aa, Homo sapiens
  CDR3 for alpha chain variable domain of TCR clone 330140 (TRAV30, TRAJ57)
CGTGWAPRGGSEKLVF

SEQ ID NO: 660280 - protein, 14 aa, Homo sapiens
  CDR3 for beta chain variable domain of TCR clone 330140 (TRBV18, TRBJ1-1)
CASSPGFQGVEAFF

SEQ ID NO: 660281 - protein, 18 aa, Homo sapiens
  CDR3 for alpha chain variable domain of TCR clone 330141 (TRAV21, TRAJ52)
CAVRPPPAGGTSYGKLTF

SEQ ID NO: 660282 - protein, 15 aa, Homo sapiens
  CDR3 for beta chain variable domain of TCR clone 330141 (TRBV20-1, TRBJ2-7)
CSARDRVSGMDEQYF

SEQ ID NO: 660283 - protein, 15 aa, Homo sapiens
  CDR3 for alpha chain variable domain of TCR clone 330142 (TRAV2, TRAJ29)
CAVDLARSGNTPLVF

SEQ ID NO: 660284 - protein, 14 aa, Homo sapiens
  CDR3 for beta chain variable domain of TCR clone 330142 (TRBV15, TRBJ2-5)
CATSRVSVRETQYF

SEQ ID NO: 660285 - protein, 13 aa, Homo sapiens
  CDR3 for alpha chain variable domain of TCR clone 330143 (TRAV26-2, TRAJ54)
CILRDQGAQKLVF

SEQ ID NO: 660286 - protein, 12 aa, Homo sapiens
  CDR3 for beta chain variable domain of TCR clone 330143 (TRBV11-2, TRBJ2-2)
CASSLGGGELFF

SEQ ID NO: 660287 - protein, 17 aa, Homo sapiens
  CDR3 for alpha chain variable domain of TCR clone 330144 (TRAV26-2, TRAJ52)
CILSSSSGGTSYGKLTF

SEQ ID NO: 660288 - protein, 11 aa, Homo sapiens
  CDR3 for beta chain variable domain of TCR clone 330144 (TRBV19, TRBJ1-1)
CATLGNTEAFF

SEQ ID NO: 660289 - protein, 14 aa, Homo sapiens
  CDR3 for alpha chain variable domain of TCR clone 330145 (TRAV12-2, TRAJ13)
CAVKKTGGYQKVTF

SEQ ID NO: 660290 - protein, 12 aa, Homo sapiens
  CDR3 for beta chain variable domain of TCR clone 330145 (TRBV11-2, TRBJ2-2)
CAGSLGGGELFF

SEQ ID NO: 660291 - protein, 11 aa, Homo sapiens
  CDR3 for alpha chain variable domain of TCR clone 330146 (TRAV4, TRAJ31)
CLVGDNARLMF

SEQ ID NO: 660292 - protein, 16 aa, Homo sapiens
  CDR3 for beta chain variable domain of TCR clone 330146 (TRBV7-2, TRBJ2-5)
CASSSKWLSRQETQYF

SEQ ID NO: 660293 - protein, 10 aa, Homo sapiens
  CDR3 for alpha chain variable domain of TCR clone 330147 (TRAV5, TRAJ34)
CAEDTDKLIF

SEQ ID NO: 660294 - protein, 14 aa, Homo sapiens
  CDR3 for beta chain variable domain of TCR clone 330147 (TRBV7-9, TRBJ2-1)
CDSSPRDSLYEQFF

SEQ ID NO: 660295 - protein, 13 aa, Homo sapiens
  CDR3 for alpha chain variable domain of TCR clone 330148 (TRAV12-3, TRAJ7)
CSMSASGNNRLAF

SEQ ID NO: 660296 - protein, 14 aa, Homo sapiens
  CDR3 for beta chain variable domain of TCR clone 330148 (TRBV5-7, TRBJ1-6)
CASTPWPADSPLHF

SEQ ID NO: 660297 - protein, 10 aa, Homo sapiens
  CDR3 for alpha chain variable domain of TCR clone 330149 (TRAV13-2, TRAJ49)
CADTGNQFYF

SEQ ID NO: 660298 - protein, 13 aa, Homo sapiens
  CDR3 for beta chain variable domain of TCR clone 330149 (TRBV10-3, TRBJ1-2)
CANSERDSYGYTF

SEQ ID NO: 660299 - protein, 13 aa, Homo sapiens
  CDR3 for alpha chain variable domain of TCR clone 330150 (TRAV8-4, TRAJ49)
CAVSDPGGNQFYF

SEQ ID NO: 660300 - protein, 14 aa, Homo sapiens
  CDR3 for beta chain variable domain of TCR clone 330150 (TRBV7-9, TRBJ2-2)
CASSLVQDTGELFF

SEQ ID NO: 660301 - protein, 13 aa, Homo sapiens
  CDR3 for alpha chain variable domain of TCR clone 330151 (TRAV13-2, TRAJ53)
CAENMGSNYKLTF

SEQ ID NO: 660302 - protein, 17 aa, Homo sapiens
  CDR3 for beta chain variable domain of TCR clone 330151 (TRBV4-1, TRBJ2-7)
CASSQPTSGSRGYEQYF

SEQ ID NO: 660303 - protein, 16 aa, Homo sapiens
  CDR3 for alpha chain variable domain of TCR clone 330152 (TRAV3, TRAJ10)
CAVRDLRAGGGNKLTF

SEQ ID NO: 660304 - protein, 15 aa, Homo sapiens
  CDR3 for beta chain variable domain of TCR clone 330152 (TRBV11-2, TRBJ1-6)
CASTGFGTAVSTLHF

SEQ ID NO: 660305 - protein, 16 aa, Homo sapiens
  CDR3 for alpha chain variable domain of TCR clone 330153 (TRAV8-6, TRAJ22)
CAVSPISFGSARQLTF

SEQ ID NO: 660306 - protein, 14 aa, Homo sapiens
  CDR3 for beta chain variable domain of TCR clone 330153 (TRBV2, TRBJ2-1)
CASSARAAYNEQFF

SEQ ID NO: 660307 - protein, 17 aa, Homo sapiens
  CDR3 for alpha chain variable domain of TCR clone 330154 (TRAV13-1, TRAJ52)
CAASSVAGGTSYGKLTF

SEQ ID NO: 660308 - protein, 12 aa, Homo sapiens
  CDR3 for beta chain variable domain of TCR clone 330154 (TRBV11-2, TRBJ2-2)
CASSLGGGELFF

SEQ ID NO: 660309 - protein, 10 aa, Homo sapiens
  CDR3 for alpha chain variable domain of TCR clone 330155 (TRAV30, TRAJ34)
CGTNPDKLIF

SEQ ID NO: 660310 - protein, 16 aa, Homo sapiens
  CDR3 for beta chain variable domain of TCR clone 330155 (TRBV7-2, TRBJ2-6)
CASSERRASGANVLTF

SEQ ID NO: 660311 - protein, 12 aa, Homo sapiens
  CDR3 for alpha chain variable domain of TCR clone 330156 (TRAV8-3, TRAJ26)
CAGDNYGQNFVF

SEQ ID NO: 660312 - protein, 15 aa, Homo sapiens
  CDR3 for beta chain variable domain of TCR clone 330156 (TRBV9, TRBJ2-1)
CASSLAGSSYNVQFF

SEQ ID NO: 660313 - protein, 13 aa, Homo sapiens
  CDR3 for alpha chain variable domain of TCR clone 330157 (TRAV12-2, TRAJ52)
CAVGGTSYGKLTF

SEQ ID NO: 660314 - protein, 14 aa, Homo sapiens
  CDR3 for beta chain variable domain of TCR clone 330157 (TRBV19, TRBJ2-1)
CASPIFVLSGEQFF

SEQ ID NO: 660315 - protein, 19 aa, Homo sapiens
  CDR3 for alpha chain variable domain of TCR clone 330158 (TRAV21, TRAJ20)
SLVTQPPTSVLPNDYKLSF

SEQ ID NO: 660316 - protein, 14 aa, Homo sapiens
  CDR3 for beta chain variable domain of TCR clone 330158 (TRBV7-2, TRBJ1-3)
CASSSLRSGNTIYF

SEQ ID NO: 660317 - protein, 14 aa, Homo sapiens
  CDR3 for alpha chain variable domain of TCR clone 330159 (TRAV13-1, TRAJ44)
CAAKATGTASKLTF

SEQ ID NO: 660318 - protein, 14 aa, Homo sapiens
  CDR3 for beta chain variable domain of TCR clone 330159 (TRBV19, TRBJ2-2)
CASSTLPRSGELFF

SEQ ID NO: 660319 - protein, 16 aa, Homo sapiens
  CDR3 for alpha chain variable domain of TCR clone 330160 (TRAV30, TRAJ24)
CGTEIVDADSWGKFQF

SEQ ID NO: 660320 - protein, 16 aa, Homo sapiens
  CDR3 for beta chain variable domain of TCR clone 330160 (TRBV6-1, TRBJ2-1)
CASILRQWSSYNEQFF

SEQ ID NO: 660321 - protein, 10 aa, Homo sapiens
  CDR3 for alpha chain variable domain of TCR clone 330161 (TRAV1-2, TRAJ23)
CAGQGGKLLF

SEQ ID NO: 660322 - protein, 11 aa, Homo sapiens
  CDR3 for beta chain variable domain of TCR clone 330161 (TRBV11-2, TRBJ1-1)
CASSINTEAFF

SEQ ID NO: 660323 - protein, 14 aa, Homo sapiens
  CDR3 for alpha chain variable domain of TCR clone 330162 (TRAV12-1, TRAJ54)
CVVNIYQGAQKLVF

SEQ ID NO: 660324 - protein, 16 aa, Homo sapiens
  CDR3 for beta chain variable domain of TCR clone 330162 (TRBV24-1, TRBJ2-3)
CATSDPGTGATDTQYF

SEQ ID NO: 660325 - protein, 14 aa, Homo sapiens
  CDR3 for alpha chain variable domain of TCR clone 330163 (TRAV8-3, TRAJ17)
CAVGAQAAGNKLTF

SEQ ID NO: 660326 - protein, 11 aa, Homo sapiens
  CDR3 for beta chain variable domain of TCR clone 330163 (TRBV29-1, TRBJ1-4)
CSVSSGEKLFF

SEQ ID NO: 660327 - protein, 10 aa, Homo sapiens
  CDR3 for alpha chain variable domain of TCR clone 330164 (TRAV20, TRAJ49)
CAVRRNQFYF

SEQ ID NO: 660328 - protein, 12 aa, Homo sapiens
  CDR3 for beta chain variable domain of TCR clone 330164 (TRBV7-3, TRBJ2-1)
CASSFINNEQFF

SEQ ID NO: 660329 - protein, 13 aa, Homo sapiens
  CDR3 for alpha chain variable domain of TCR clone 330165 (TRAV9-2, TRAJ53)
YALSGGSNYKLTF

SEQ ID NO: 660330 - protein, 17 aa, Homo sapiens
  CDR3 for beta chain variable domain of TCR clone 330165 (TRBV11-2, TRBJ2-1)
CASSLYPPGVEYNEQFF

SEQ ID NO: 660331 - protein, 15 aa, Homo sapiens
  CDR3 for alpha chain variable domain of TCR clone 330166 (TRAV17, TRAJ57)
CATGPSQGGSEKLVF

SEQ ID NO: 660332 - protein, 18 aa, Homo sapiens
  CDR3 for beta chain variable domain of TCR clone 330166 (TRBV7-9, TRBJ2-7)
CASSLTTGGSRTWYEQYF

SEQ ID NO: 660333 - protein, 13 aa, Homo sapiens
  CDR3 for alpha chain variable domain of TCR clone 330167 (TRAV38-2/DV8, TRAJ34)
CAYRTWNTDKLIF

SEQ ID NO: 660334 - protein, 13 aa, Homo sapiens
  CDR3 for beta chain variable domain of TCR clone 330167 (TRBV29-1, TRBJ2-1)
CSVEGGRVNEQFF

SEQ ID NO: 660335 - protein, 13 aa, Homo sapiens
  CDR3 for alpha chain variable domain of TCR clone 330168 (TRAV12-3, TRAJ13)
CAMSSGGYQKVTF

SEQ ID NO: 660336 - protein, 13 aa, Homo sapiens
  CDR3 for beta chain variable domain of TCR clone 330168 (TRBV20-1, TRBJ1-1)
CSAPPGGHTEVFF

SEQ ID NO: 660337 - protein, 11 aa, Homo sapiens
  CDR3 for alpha chain variable domain of TCR clone 330169 (TRAV27, TRAJ47)
CRSNQGNKLVF

SEQ ID NO: 660338 - protein, 13 aa, Homo sapiens
  CDR3 for beta chain variable domain of TCR clone 330169 (TRBV4-2, TRBJ1-1)
CASSQAGNTEAFF

SEQ ID NO: 660339 - protein, 12 aa, Homo sapiens
  CDR3 for alpha chain variable domain of TCR clone 330170 (TRAV12-3, TRAJ17)
CATTLTGNKLTF

SEQ ID NO: 660340 - protein, 15 aa, Homo sapiens
  CDR3 for beta chain variable domain of TCR clone 330170 (TRBV9, TRBJ1-6)
CASSVAGTGDSPLHF

SEQ ID NO: 660341 - protein, 11 aa, Homo sapiens
  CDR3 for alpha chain variable domain of TCR clone 330171 (TRAV12-2, TRAJ6)
CAVEGSYIPTF

SEQ ID NO: 660342 - protein, 12 aa, Homo sapiens
  CDR3 for beta chain variable domain of TCR clone 330171 (TRBV28, TRBJ2-1)
CASSFRGNEQFF

SEQ ID NO: 660343 - protein, 16 aa, Homo sapiens
  CDR3 for alpha chain variable domain of TCR clone 330172 (TRAV8-3, TRAJ44)
CAVGASNTGTASKLTF

SEQ ID NO: 660344 - protein, 16 aa, Homo sapiens
  CDR3 for beta chain variable domain of TCR clone 330172 (TRBV15, TRBJ1-2)
CATSRGPRTGGGGYTF

SEQ ID NO: 660345 - protein, 16 aa, Homo sapiens
  CDR3 for alpha chain variable domain of TCR clone 330173 (TRAV30, TRAJ24)
CGAEIVDADSWGKFQF

SEQ ID NO: 660346 - protein, 16 aa, Homo sapiens
  CDR3 for beta chain variable domain of TCR clone 330173 (TRBV7-9, TRBJ2-4)
CASSLAMGGTFSTSAP

SEQ ID NO: 660347 - protein, 14 aa, Homo sapiens
  CDR3 for alpha chain variable domain of TCR clone 330174 (TRAV12-2, TRAJ13)
CAVKKTGGYQKVTL

SEQ ID NO: 660348 - protein, 15 aa, Homo sapiens
  CDR3 for beta chain variable domain of TCR clone 330174 (TRBV27, TRBJ2-1)
CVSSNGGGSSNEQFF

SEQ ID NO: 660349 - protein, 21 aa, Homo sapiens
  CDR3 for alpha chain variable domain of TCR clone 330175 (TRAV6, TRAJ36)
CARQTTSSLGLERDSPLFPIS

SEQ ID NO: 660350 - protein, 14 aa, Homo sapiens
  CDR3 for beta chain variable domain of TCR clone 330175 (TRBV7-2, TRBJ2-5)
CASSPRGSSETQYF

SEQ ID NO: 660351 - protein, 15 aa, Homo sapiens
  CDR3 for alpha chain variable domain of TCR clone 330176 (TRAV38-2/DV8, TRAJ57)
CAYTSGLGGSDKLVF

SEQ ID NO: 660352 - protein, 16 aa, Homo sapiens
  CDR3 for beta chain variable domain of TCR clone 330176 (TRBV28, TRBJ1-5)
CASSFRGGYSNQPQHF

SEQ ID NO: 660353 - protein, 12 aa, Homo sapiens
  CDR3 for alpha chain variable domain of TCR clone 330177 (TRAV9-2, TRAJ36)
WALKKGANNLFF

SEQ ID NO: 660354 - protein, 14 aa, Homo sapiens
  CDR3 for beta chain variable domain of TCR clone 330177 (TRBV7-3, TRBJ1-1)
CASSLKGGNTEAFF

SEQ ID NO: 660355 - protein, 14 aa, Homo sapiens
  CDR3 for alpha chain variable domain of TCR clone 330178 (TRAV12-2, TRAJ17)
CAVNIKAAGNKLTF

SEQ ID NO: 660356 - protein, 18 aa, Homo sapiens
  CDR3 for beta chain variable domain of TCR clone 330178 (TRBV20-1, TRBJ2-6)
CSAETTPTHGSGANVLTF

SEQ ID NO: 660357 - protein, 16 aa, Homo sapiens
  CDR3 for alpha chain variable domain of TCR clone 330179 (TRAV3, TRAJ37)
CAVRGKGSGNTGKLIF

SEQ ID NO: 660358 - protein, 13 aa, Homo sapiens
  CDR3 for beta chain variable domain of TCR clone 330179 (TRBV7-2, TRBJ2-2)
CASSSVRAGELFV

SEQ ID NO: 660359 - protein, 14 aa, Homo sapiens
  CDR3 for alpha chain variable domain of TCR clone 330180 (TRAV21, TRAJ35)
CAVMPIGFGNVLHC

SEQ ID NO: 660360 - protein, 14 aa, Homo sapiens
  CDR3 for beta chain variable domain of TCR clone 330180 (TRBV19, TRBJ2-2)
CASSTLHRSGELFF

SEQ ID NO: 660361 - protein, 18 aa, Homo sapiens
  CDR3 for alpha chain variable domain of TCR clone 330181 (TRAV26-1, TRAJ44)
CIVRVAGGGISTASKLTF

SEQ ID NO: 660362 - protein, 12 aa, Homo sapiens
  CDR3 for beta chain variable domain of TCR clone 330181 (TRBV11-2, TRBJ2-1)
CASSPGNNEQFF

SEQ ID NO: 660363 - protein, 14 aa, Homo sapiens
  CDR3 for alpha chain variable domain of TCR clone 330182 (TRAV9-2, TRAJ39)
CALYIYNAGNMLTF

SEQ ID NO: 660364 - protein, 14 aa, Homo sapiens
  CDR3 for beta chain variable domain of TCR clone 330182 (TRBV7-8, TRBJ2-3)
CASSFPDGQDTQCF

SEQ ID NO: 660365 - protein, 14 aa, Homo sapiens
  CDR3 for alpha chain variable domain of TCR clone 330183 (TRAV1-2, TRAJ16)
CAVNRFSDGQKLLF

SEQ ID NO: 660366 - protein, 17 aa, Homo sapiens
  CDR3 for beta chain variable domain of TCR clone 330183 (TRBV7-2, TRBJ2-4)
CASSVQGLVQAKNSQYF

SEQ ID NO: 660367 - protein, 13 aa, Homo sapiens
  CDR3 for alpha chain variable domain of TCR clone 330184 (TRAV22, TRAJ29)
CAVGGSGNTPLVF

SEQ ID NO: 660368 - protein, 14 aa, Homo sapiens
  CDR3 for beta chain variable domain of TCR clone 330184 (TRBV7-2, TRBJ2-2)
CASRGQGAAGELFF

SEQ ID NO: 660369 - protein, 14 aa, Homo sapiens
  CDR3 for alpha chain variable domain of TCR clone 330185 (TRAV12-2, TRAJ17)
CAVLFKAAGNKLTF

SEQ ID NO: 660370 - protein, 15 aa, Homo sapiens
  CDR3 for beta chain variable domain of TCR clone 330185 (TRBV5-1, TRBJ2-7)
CASSLGDFTTYEQYF

SEQ ID NO: 660371 - protein, 15 aa, Homo sapiens
  CDR3 for alpha chain variable domain of TCR clone 330186 (TRAV12-1, TRAJ44)
SVADLPTGTASNLTF

SEQ ID NO: 660372 - protein, 13 aa, Homo sapiens
  CDR3 for beta chain variable domain of TCR clone 330186 (TRBV6-5, TRBJ2-5)
CASSPQGGETQYF

SEQ ID NO: 660373 - protein, 14 aa, Homo sapiens
  CDR3 for alpha chain variable domain of TCR clone 330187 (TRAV8-2, TRAJ37)
CVVSISGNTGKLIF

SEQ ID NO: 660374 - protein, 15 aa, Homo sapiens
  CDR3 for beta chain variable domain of TCR clone 330187 (TRBV9, TRBJ2-3)
CASSTGGGEGYTQYF

SEQ ID NO: 660375 - protein, 14 aa, Homo sapiens
  CDR3 for alpha chain variable domain of TCR clone 330188 (TRAV1-2, TRAJ16)
CAVNRFSDGQKLLF

SEQ ID NO: 660376 - protein, 17 aa, Homo sapiens
  CDR3 for beta chain variable domain of TCR clone 330188 (TRBV9, TRBJ1-6)
CASSVAGTGDSPPTLGT

SEQ ID NO: 660377 - protein, 15 aa, Homo sapiens
  CDR3 for alpha chain variable domain of TCR clone 330189 (TRAV8-3, TRAJ45)
CASSYSGGGADGLTF

SEQ ID NO: 660378 - protein, 15 aa, Homo sapiens
  CDR3 for beta chain variable domain of TCR clone 330189 (TRBV4-2, TRBJ1-1)
CASSQLQGASAEAFF

SEQ ID NO: 660379 - protein, 14 aa, Homo sapiens
  CDR3 for alpha chain variable domain of TCR clone 330190 (TRAV29/DV5, TRAJ36)
CAARRKTGANNLFL

SEQ ID NO: 660380 - protein, 14 aa, Homo sapiens
  CDR3 for beta chain variable domain of TCR clone 330190 (TRBV12-5, TRBJ2-5)
CASGSRTHQETQYF

SEQ ID NO: 660381 - protein, 17 aa, Homo sapiens
  CDR3 for alpha chain variable domain of TCR clone 330191 (TRAV8-4, TRAJ11)
SAVSDRGENSGYSTLTF

SEQ ID NO: 660382 - protein, 14 aa, Homo sapiens
  CDR3 for beta chain variable domain of TCR clone 330191 (TRBV20-1, TRBJ2-1)
CSPNDEASYNEQFL

SEQ ID NO: 660383 - protein, 11 aa, Homo sapiens
  CDR3 for alpha chain variable domain of TCR clone 330192 (TRAV3, TRAJ21)
CAVGNFNKFYF

SEQ ID NO: 660384 - protein, 15 aa, Homo sapiens
  CDR3 for beta chain variable domain of TCR clone 330192 (TRBV18, TRBJ1-5)
CASSETGGNNQPQHF

SEQ ID NO: 660385 - protein, 15 aa, Homo sapiens
  CDR3 for alpha chain variable domain of TCR clone 330193 (TRAV26-1, TRAJ42)
FIARVKGGSKGNLIF

SEQ ID NO: 660386 - protein, 14 aa, Homo sapiens
  CDR3 for beta chain variable domain of TCR clone 330193 (TRBV19, TRBJ2-2)
CATTGHANTGELFF

SEQ ID NO: 660387 - protein, 12 aa, Homo sapiens
  CDR3 for alpha chain variable domain of TCR clone 330194 (TRAV21, TRAJ20)
CAVPSNDYKLSF

SEQ ID NO: 660388 - protein, 15 aa, Homo sapiens
  CDR3 for beta chain variable domain of TCR clone 330194 (TRBV20-1, TRBJ2-3)
CSASGGADGTDTQYF

SEQ ID NO: 660389 - protein, 15 aa, Homo sapiens
  CDR3 for alpha chain variable domain of TCR clone 330195 (TRAV8-2, TRAJ40)
CVVSDRGSGTYKYIF

SEQ ID NO: 660390 - protein, 17 aa, Homo sapiens
  CDR3 for beta chain variable domain of TCR clone 330195 (TRBV28, TRBJ2-5)
CASSRQGGLAGAETQYF

SEQ ID NO: 660391 - protein, 17 aa, Homo sapiens
  CDR3 for alpha chain variable domain of TCR clone 330196 (TRAV26-2, TRAJ42)
CILRDVGYEGSQGNLSF

SEQ ID NO: 660392 - protein, 16 aa, Homo sapiens
  CDR3 for beta chain variable domain of TCR clone 330196 (TRBV12-4, TRBJ2-7)
CASSLIGGTGTYEQYF

SEQ ID NO: 660393 - protein, 17 aa, Homo sapiens
  CDR3 for alpha chain variable domain of TCR clone 330197 (TRAV3, TRAJ42)
CAVRDRDYGGSQGNLIF

SEQ ID NO: 660394 - protein, 16 aa, Homo sapiens
  CDR3 for beta chain variable domain of TCR clone 330197 (TRBV5-4, TRBJ2-1)
CASSLVGSGQDNEQFF

SEQ ID NO: 660395 - protein, 12 aa, Homo sapiens
  CDR3 for alpha chain variable domain of TCR clone 330198 (TRAV12-3, TRAJ17)
CAMTLTGNKLTF

SEQ ID NO: 660396 - protein, 17 aa, Homo sapiens
  CDR3 for beta chain variable domain of TCR clone 330198 (TRBV11-2, TRBJ2-1)
CASSLYPPGVEYNEQSF

SEQ ID NO: 660397 - protein, 14 aa, Homo sapiens
  CDR3 for alpha chain variable domain of TCR clone 330199 (TRAV12-2, TRAJ13)
CAVKKTGGYQQVTF

SEQ ID NO: 660398 - protein, 12 aa, Homo sapiens
  CDR3 for beta chain variable domain of TCR clone 330199 (TRBV12-4, TRBJ1-2)
CASSFIWLHLRF

SEQ ID NO: 660399 - protein, 12 aa, Homo sapiens
  CDR3 for alpha chain variable domain of TCR clone 330200 (TRAV3, TRAJ29)
CSPNSGNTPLVF

SEQ ID NO: 660400 - protein, 16 aa, Homo sapiens
  CDR3 for beta chain variable domain of TCR clone 330200 (TRBV7-2, TRBJ2-5)
CASSPGGARRGETQYF

SEQ ID NO: 660401 - protein, 21 aa, Homo sapiens
  CDR3 for alpha chain variable domain of TCR clone 330201 (TRAV24, TRAJ5)
KGSQPEDSATYLCAPRRALTF

SEQ ID NO: 660402 - protein, 12 aa, Homo sapiens
  CDR3 for beta chain variable domain of TCR clone 330201 (TRBV24-1, TRBJ1-2)
CATSDDGGRYTF

SEQ ID NO: 660403 - protein, 15 aa, Homo sapiens
  CDR3 for alpha chain variable domain of TCR clone 330202 (TRAV3, TRAJ22)
CAVRDRGGSARQLTF

SEQ ID NO: 660404 - protein, 14 aa, Homo sapiens
  CDR3 for beta chain variable domain of TCR clone 330202 (TRBV19, TRBJ2-1)
CASSRLTSINEQFF

SEQ ID NO: 660405 - protein, 13 aa, Homo sapiens
  CDR3 for alpha chain variable domain of TCR clone 330203 (TRAV36/DV7, TRAJ53)
CALSGGSNYELTF

SEQ ID NO: 660406 - protein, 13 aa, Homo sapiens
  CDR3 for beta chain variable domain of TCR clone 330203 (TRBV28, TRBJ2-7)
CASSLPSRYEQYF

SEQ ID NO: 660407 - protein, 18 aa, Homo sapiens
  CDR3 for alpha chain variable domain of TCR clone 330204 (TRAV21, TRAJ52)
CAVRPSPAGGTSYGKLTF

SEQ ID NO: 660408 - protein, 17 aa, Homo sapiens
  CDR3 for beta chain variable domain of TCR clone 330204 (TRBV13, TRBJ2-3)
WASSRSRVAGGRNTQYF

SEQ ID NO: 660409 - protein, 12 aa, Homo sapiens
  CDR3 for alpha chain variable domain of TCR clone 330205 (TRAV12-3, TRAJ5)
CAMDTGRRALTF

SEQ ID NO: 660410 - protein, 14 aa, Homo sapiens
  CDR3 for beta chain variable domain of TCR clone 330205 (TRBV19, TRBJ1-2)
CASSIGAGSYGYTF

SEQ ID NO: 660411 - protein, 14 aa, Homo sapiens
  CDR3 for alpha chain variable domain of TCR clone 330206 (TRAV17, TRAJ37)
CATGGSSNTGKVIF

SEQ ID NO: 660412 - protein, 13 aa, Homo sapiens
  CDR3 for beta chain variable domain of TCR clone 330206 (TRBV11-2, TRBJ2-1)
CASSLDLVNEQFF

SEQ ID NO: 660413 - protein, 13 aa, Homo sapiens
  CDR3 for alpha chain variable domain of TCR clone 330207 (TRAV12-3, TRAJ4)
CAMTERAYNKLIF

SEQ ID NO: 660414 - protein, 17 aa, Homo sapiens
  CDR3 for beta chain variable domain of TCR clone 330207 (TRBV28, TRBJ2-3)
CASSLQVGPSSTDTQYF

SEQ ID NO: 660415 - protein, 11 aa, Homo sapiens
  CDR3 for alpha chain variable domain of TCR clone 330208 (TRAV21, TRAJ49)
CAHHGGNQFYF

SEQ ID NO: 660416 - protein, 12 aa, Homo sapiens
  CDR3 for beta chain variable domain of TCR clone 330208 (TRBV4-2, TRBJ2-2)
CASSHLPVELFF

SEQ ID NO: 660417 - protein, 13 aa, Homo sapiens
  CDR3 for alpha chain variable domain of TCR clone 330209 (TRAV13-1, TRAJ39)
CAASYNMQATCSP

SEQ ID NO: 660418 - protein, 13 aa, Homo sapiens
  CDR3 for beta chain variable domain of TCR clone 330209 (TRBV24-1, TRBJ1-4)
CATNNGRSEKLFF

SEQ ID NO: 660419 - protein, 12 aa, Homo sapiens
  CDR3 for alpha chain variable domain of TCR clone 330210 (TRAV8-6, TRAJ43)
CAVSRNNNDMRF

SEQ ID NO: 660420 - protein, 13 aa, Homo sapiens
  CDR3 for beta chain variable domain of TCR clone 330210 (TRBV7-3, TRBJ1-1)
CASSQDWGAEAFF

SEQ ID NO: 660421 - protein, 16 aa, Homo sapiens
  CDR3 for alpha chain variable domain of TCR clone 330211 (TRAV3, TRAJ10)
CAVRDMRAGGGNKLTV

SEQ ID NO: 660422 - protein, 17 aa, Homo sapiens
  CDR3 for beta chain variable domain of TCR clone 330211 (TRBV6-5, TRBJ2-4)
CASRPTPGQGSKNMQYF

SEQ ID NO: 660423 - protein, 14 aa, Homo sapiens
  CDR3 for alpha chain variable domain of TCR clone 330212 (TRAV2, TRAJ37)
CAVEHLCNTGKLIF

SEQ ID NO: 660424 - protein, 14 aa, Homo sapiens
  CDR3 for beta chain variable domain of TCR clone 330212 (TRBV18, TRBJ2-1)
CASSPQGRFNEQFF

SEQ ID NO: 660425 - protein, 12 aa, Homo sapiens
  CDR3 for alpha chain variable domain of TCR clone 330213 (TRAV12-3, TRAJ17)
CAMTLTGNKLTF

SEQ ID NO: 660426 - protein, 12 aa, Homo sapiens
  CDR3 for beta chain variable domain of TCR clone 330213 (TRBV7-3, TRBJ1-1)
CQQPDWGAEAFF

SEQ ID NO: 660427 - protein, 17 aa, Homo sapiens
  CDR3 for alpha chain variable domain of TCR clone 330214 (TRAV26-2, TRAJ42)
CILRDVGYGGRQGNLIF

SEQ ID NO: 660428 - protein, 16 aa, Homo sapiens
  CDR3 for beta chain variable domain of TCR clone 330214 (TRBV12-4, TRBJ2-7)
CASSVIGGTGTYEQYF

SEQ ID NO: 660429 - protein, 14 aa, Homo sapiens
  CDR3 for alpha chain variable domain of TCR clone 330215 (TRAV26-1, TRAJ38)
CIADNAGNNRQLIW

SEQ ID NO: 660430 - protein, 16 aa, Homo sapiens
  CDR3 for beta chain variable domain of TCR clone 330215 (TRBV19, TRBJ2-1)
CASSKAGPSSYNEQFF

SEQ ID NO: 660431 - protein, 14 aa, Homo sapiens
  CDR3 for alpha chain variable domain of TCR clone 330216 (TRAV13-1, TRAJ48)
CAASRSFGNEKLTF

SEQ ID NO: 660432 - protein, 13 aa, Homo sapiens
  CDR3 for beta chain variable domain of TCR clone 330216 (TRBV7-9, TRBJ2-3)
CASSPGSTDTQYF

SEQ ID NO: 660433 - protein, 10 aa, Homo sapiens
  CDR3 for alpha chain variable domain of TCR clone 330217 (TRAV23/DV6, TRAJ57)
CAASSTLSQG

SEQ ID NO: 660434 - protein, 16 aa, Homo sapiens
  CDR3 for beta chain variable domain of TCR clone 330217 (TRBV4-1, TRBJ1-2)
CASSQDAGQVLYGYTF

SEQ ID NO: 660435 - protein, 14 aa, Homo sapiens
  CDR3 for alpha chain variable domain of TCR clone 330218 (TRAV26-2, TRAJ32)
CCVGYVGATNKLIF

SEQ ID NO: 660436 - protein, 14 aa, Homo sapiens
  CDR3 for beta chain variable domain of TCR clone 330218 (TRBV4-2, TRBJ2-1)
CASGLDRAYNEQFF

SEQ ID NO: 660437 - protein, 13 aa, Homo sapiens
  CDR3 for alpha chain variable domain of TCR clone 330219 (TRAV35, TRAJ37)
CAGHAGNTGKLIF

SEQ ID NO: 660438 - protein, 17 aa, Homo sapiens
  CDR3 for beta chain variable domain of TCR clone 330219 (TRBV11-2, TRBJ2-1)
CASSLYPPGVEYNEQFF

SEQ ID NO: 660439 - protein, 13 aa, Homo sapiens
  CDR3 for alpha chain variable domain of TCR clone 330220 (TRAV13-1, TRAJ21)
CAASIYNFNKFHF

SEQ ID NO: 660440 - protein, 13 aa, Homo sapiens
  CDR3 for beta chain variable domain of TCR clone 330220 (TRBV19, TRBJ1-2)
CASSVPGQDGYTF

SEQ ID NO: 660441 - protein, 11 aa, Homo sapiens
  CDR3 for alpha chain variable domain of TCR clone 330221 (TRAV3, TRAJ21)
CAVGNFNKPYF

SEQ ID NO: 660442 - protein, 16 aa, Homo sapiens
  CDR3 for beta chain variable domain of TCR clone 330221 (TRBV19, TRBJ2-1)
CASSKAGPSYYNEQFF

SEQ ID NO: 660443 - protein, 14 aa, Homo sapiens
  CDR3 for alpha chain variable domain of TCR clone 330222 (TRAV17, TRAJ31)
CATVLRNNNARLMF

SEQ ID NO: 660444 - protein, 15 aa, Homo sapiens
  CDR3 for beta chain variable domain of TCR clone 330222 (TRBV27, TRBJ2-1)
CASSNGGGSSNEQFF

SEQ ID NO: 660445 - protein, 14 aa, Homo sapiens
  CDR3 for alpha chain variable domain of TCR clone 330223 (TRAV12-2, TRAJ13)
CAVQKTGGYQKVTF

SEQ ID NO: 660446 - protein, 15 aa, Homo sapiens
  CDR3 for beta chain variable domain of TCR clone 330223 (TRBV9, TRBJ1-6)
CASSVAGTGDSPLHF

SEQ ID NO: 660447 - protein, 14 aa, Homo sapiens
  CDR3 for alpha chain variable domain of TCR clone 330224 (TRAV8-3, TRAJ9)
CAVVYNTGGFKTIF

SEQ ID NO: 660448 - protein, 16 aa, Homo sapiens
  CDR3 for beta chain variable domain of TCR clone 330224 (TRBV9, TRBJ1-2)
CASSVEEKVSPYGYTF

SEQ ID NO: 660449 - protein, 13 aa, Homo sapiens
  CDR3 for alpha chain variable domain of TCR clone 330225 (TRAV2, TRAJ6)
CAVEAGGSYIPTF

SEQ ID NO: 660450 - protein, 15 aa, Homo sapiens
  CDR3 for beta chain variable domain of TCR clone 330225 (TRBV7-2, TRBJ2-7)
CASSWGQGAIYEQYF

SEQ ID NO: 660451 - protein, 12 aa, Homo sapiens
  CDR3 for alpha chain variable domain of TCR clone 330226 (TRAV3, TRAJ27)
CAVRDKAGKSTF

SEQ ID NO: 660452 - protein, 15 aa, Homo sapiens
  CDR3 for beta chain variable domain of TCR clone 330226 (TRBV11-3, TRBJ2-7)
CASSPGPASSYEQYF

SEQ ID NO: 660453 - protein, 13 aa, Homo sapiens
  CDR3 for alpha chain variable domain of TCR clone 330227 (TRAV12-1, TRAJ21)
CVVTLYNFNKFYF

SEQ ID NO: 660454 - protein, 20 aa, Homo sapiens
  CDR3 for beta chain variable domain of TCR clone 330227 (TRBV7-8, TRBJ2-1)
CASSLAHRVAGVRSYNEQFF

SEQ ID NO: 660455 - protein, 14 aa, Homo sapiens
  CDR3 for alpha chain variable domain of TCR clone 330228 (TRAV16, TRAJ37)
CALDIYGNTGKLIF

SEQ ID NO: 660456 - protein, 14 aa, Homo sapiens
  CDR3 for beta chain variable domain of TCR clone 330228 (TRBV7-6, TRBJ2-7)
CASSFRQGADEQYF

SEQ ID NO: 660457 - protein, 14 aa, Homo sapiens
  CDR3 for alpha chain variable domain of TCR clone 330229 (TRAV29/DV5, TRAJ40)
CAAPVASGTYKYIF

SEQ ID NO: 660458 - protein, 15 aa, Homo sapiens
  CDR3 for beta chain variable domain of TCR clone 330229 (TRBV12-4, TRBJ2-5)
CASSPPTGLQETQYF

SEQ ID NO: 660459 - protein, 16 aa, Homo sapiens
  CDR3 for alpha chain variable domain of TCR clone 330230 (TRAV29/DV5, TRAJ36)
CAASAGVETGPNNLFF

SEQ ID NO: 660460 - protein, 16 aa, Homo sapiens
  CDR3 for beta chain variable domain of TCR clone 330230 (TRBV5-1, TRBJ2-3)
CASSLGLAVYTDTQYF

SEQ ID NO: 660461 - protein, 16 aa, Homo sapiens
  CDR3 for alpha chain variable domain of TCR clone 330231 (TRAV12-3, TRAJ53)
CAMSPGSGGSNYKLTF

SEQ ID NO: 660462 - protein, 13 aa, Homo sapiens
  CDR3 for beta chain variable domain of TCR clone 330231 (TRBV18, TRBJ2-1)
CAGSPPSSNEQLF

SEQ ID NO: 660463 - protein, 16 aa, Homo sapiens
  CDR3 for alpha chain variable domain of TCR clone 330232 (TRAV3, TRAJ37)
CAVRGKGSGNTGKLIL

SEQ ID NO: 660464 - protein, 15 aa, Homo sapiens
  CDR3 for beta chain variable domain of TCR clone 330232 (TRBV7-9, TRBJ1-5)
CASSQGHQPNQPQHF

SEQ ID NO: 660465 - protein, 13 aa, Homo sapiens
  CDR3 for alpha chain variable domain of TCR clone 330233 (TRAV12-2, TRAJ4)
CAVRSGGYNKLIF

SEQ ID NO: 660466 - protein, 15 aa, Homo sapiens
  CDR3 for beta chain variable domain of TCR clone 330233 (TRBV10-3, TRBJ2-1)
CAISDVQDRAYELFF

SEQ ID NO: 660467 - protein, 11 aa, Homo sapiens
  CDR3 for alpha chain variable domain of TCR clone 330234 (TRAV3, TRAJ21)
CAVGNFNKFYF

SEQ ID NO: 660468 - protein, 15 aa, Homo sapiens
  CDR3 for beta chain variable domain of TCR clone 330234 (TRBV5-1, TRBJ2-7)
CASSLYPDGGYEQYF

SEQ ID NO: 660469 - protein, 13 aa, Homo sapiens
  CDR3 for alpha chain variable domain of TCR clone 330235 (TRAV12-3, TRAJ13)
CVMSSGGYQKVTF

SEQ ID NO: 660470 - protein, 13 aa, Homo sapiens
  CDR3 for beta chain variable domain of TCR clone 330235 (TRBV20-1, TRBJ1-1)
CSAPPGGHTEAFF

SEQ ID NO: 660471 - protein, 18 aa, Homo sapiens
  CDR3 for alpha chain variable domain of TCR clone 330236 (TRAV13-1, TRAJ52)
CAASKRSAGGTIYGKLTS

SEQ ID NO: 660472 - protein, 12 aa, Homo sapiens
  CDR3 for beta chain variable domain of TCR clone 330236 (TRBV11-2, TRBJ2-2)
CASSLGGGELFF

SEQ ID NO: 660473 - protein, 14 aa, Homo sapiens
  CDR3 for alpha chain variable domain of TCR clone 330237 (TRAV21, TRAJ3)
CAVTGYSSASKILF

SEQ ID NO: 660474 - protein, 17 aa, Homo sapiens
  CDR3 for beta chain variable domain of TCR clone 330237 (TRBV28, TRBJ2-5)
CASSRQGGLAGAETQYF

SEQ ID NO: 660475 - protein, 17 aa, Homo sapiens
  CDR3 for alpha chain variable domain of TCR clone 330238 (TRAV3, TRAJ42)
CAVRDRDYGGSQGNLIF

SEQ ID NO: 660476 - protein, 12 aa, Homo sapiens
  CDR3 for beta chain variable domain of TCR clone 330238 (TRBV5-1, TRBJ2-7)
CASSLDSYEQHF

SEQ ID NO: 660477 - protein, 16 aa, Homo sapiens
  CDR3 for alpha chain variable domain of TCR clone 330239 (TRAV36/DV7, TRAJ33)
WRPGNKVQDSNYQLIW

SEQ ID NO: 660478 - protein, 15 aa, Homo sapiens
  CDR3 for beta chain variable domain of TCR clone 330239 (TRBV29-1, TRBJ2-1)
CSVGRHALCYNEQFF

SEQ ID NO: 660479 - protein, 15 aa, Homo sapiens
  CDR3 for alpha chain variable domain of TCR clone 330240 (TRAV2, TRAJ15)
CAVEDRGQAGTALIF

SEQ ID NO: 660480 - protein, 13 aa, Homo sapiens
  CDR3 for beta chain variable domain of TCR clone 330240 (TRBV20-1, TRBJ1-1)
CSARGGGNTEAFF

SEQ ID NO: 660481 - protein, 11 aa, Homo sapiens
  CDR3 for alpha chain variable domain of TCR clone 330241 (TRAV13-2, TRAJ36)
CAETGVNNLFF

SEQ ID NO: 660482 - protein, 13 aa, Homo sapiens
  CDR3 for beta chain variable domain of TCR clone 330241 (TRBV7-9, TRBJ2-4)
CATEGLAGNIQYF

SEQ ID NO: 660483 - protein, 14 aa, Homo sapiens
  CDR3 for alpha chain variable domain of TCR clone 330242 (TRAV38-2/DV8, TRAJ42)
CAYPEGGSQGNLIF

SEQ ID NO: 660484 - protein, 15 aa, Homo sapiens
  CDR3 for beta chain variable domain of TCR clone 330242 (TRBV19, TRBJ2-1)
CASSTGTSSYNEHYF

SEQ ID NO: 660485 - protein, 14 aa, Homo sapiens
  CDR3 for alpha chain variable domain of TCR clone 330243 (TRAV17, TRAJ49)
SATDARDTGHQFYF

SEQ ID NO: 660486 - protein, 14 aa, Homo sapiens
  CDR3 for beta chain variable domain of TCR clone 330243 (TRBV5-5, TRBJ1-2)
CASSFGQINYGYTF

SEQ ID NO: 660487 - protein, 12 aa, Homo sapiens
  CDR3 for alpha chain variable domain of TCR clone 330244 (TRAV2, TRAJ31)
CAVEDGNARLMF

SEQ ID NO: 660488 - protein, 18 aa, Homo sapiens
  CDR3 for beta chain variable domain of TCR clone 330244 (TRBV7-9, TRBJ2-3)
CASSLDRAGLATPDTQYF

SEQ ID NO: 660489 - protein, 11 aa, Homo sapiens
  CDR3 for alpha chain variable domain of TCR clone 330245 (TRAV23/DV6, TRAJ58)
CAARLLRGETS

SEQ ID NO: 660490 - protein, 15 aa, Homo sapiens
  CDR3 for beta chain variable domain of TCR clone 330245 (TRBV7-2, TRBJ2-3)
CASSSTGLETDTQYF

SEQ ID NO: 660491 - protein, 13 aa, Homo sapiens
  CDR3 for alpha chain variable domain of TCR clone 330246 (TRAV8-3, TRAJ21)
CAVGAYNFNKFYF

SEQ ID NO: 660492 - protein, 16 aa, Homo sapiens
  CDR3 for beta chain variable domain of TCR clone 330246 (TRBV19, TRBJ2-1)
CASSMEAGAPTMSSSS

SEQ ID NO: 660493 - protein, 14 aa, Homo sapiens
  CDR3 for alpha chain variable domain of TCR clone 330247 (TRAV26-1, TRAJ40)
CIVRVARGTYKYIF

SEQ ID NO: 660494 - protein, 14 aa, Homo sapiens
  CDR3 for beta chain variable domain of TCR clone 330247 (TRBV7-3, TRBJ2-7)
CASSLKADSCEQYF

SEQ ID NO: 660495 - protein, 15 aa, Homo sapiens
  CDR3 for alpha chain variable domain of TCR clone 330248 (TRAV17, TRAJ4)
CATGTWSGGYNKLIF

SEQ ID NO: 660496 - protein, 16 aa, Homo sapiens
  CDR3 for beta chain variable domain of TCR clone 330248 (TRBV29-1, TRBJ2-2)
CSVETRASGNTGELFF

SEQ ID NO: 660497 - protein, 20 aa, Homo sapiens
  CDR3 for alpha chain variable domain of TCR clone 330249 (TRAV25, TRAJ21)
TATQTTDVGTYPLGFNKFYF

SEQ ID NO: 660498 - protein, 14 aa, Homo sapiens
  CDR3 for beta chain variable domain of TCR clone 330249 (TRBV6-1, TRBJ2-1)
CASAKDGFYNEQFF

SEQ ID NO: 660499 - protein, 15 aa, Homo sapiens
  CDR3 for alpha chain variable domain of TCR clone 330250 (TRAV35, TRAJ23)
CAGPLGNNQGGKVIF

SEQ ID NO: 660500 - protein, 14 aa, Homo sapiens
  CDR3 for beta chain variable domain of TCR clone 330250 (TRBV7-9, TRBJ1-1)
CASTPLQSYTEAFF

SEQ ID NO: 660501 - protein, 16 aa, Homo sapiens
  CDR3 for alpha chain variable domain of TCR clone 330251 (TRAV12-1, TRAJ8)
CVVNGRGNTGFQKLVF

SEQ ID NO: 660502 - protein, 15 aa, Homo sapiens
  CDR3 for beta chain variable domain of TCR clone 330251 (TRBV6-1, TRBJ1-2)
CASNPGRGGSYGHTF

SEQ ID NO: 660503 - protein, 14 aa, Homo sapiens
  CDR3 for alpha chain variable domain of TCR clone 330252 (TRAV12-2, TRAJ13)
CAVKKTGGYQKVTF

SEQ ID NO: 660504 - protein, 16 aa, Homo sapiens
  CDR3 for beta chain variable domain of TCR clone 330252 (TRBV6-5, TRBJ2-7)
CASSPGGREWTYEQYF

SEQ ID NO: 660505 - protein, 14 aa, Homo sapiens
  CDR3 for alpha chain variable domain of TCR clone 330253 (TRAV21, TRAJ32)
CCGDYGGAINKLIF

SEQ ID NO: 660506 - protein, 15 aa, Homo sapiens
  CDR3 for beta chain variable domain of TCR clone 330253 (TRBV6-3, TRBJ2-7)
CASSSPGTVFYEQYF

SEQ ID NO: 660507 - protein, 11 aa, Homo sapiens
  CDR3 for alpha chain variable domain of TCR clone 330254 (TRAV21, TRAJ34)
CAVTNTDKLIF

SEQ ID NO: 660508 - protein, 12 aa, Homo sapiens
  CDR3 for beta chain variable domain of TCR clone 330254 (TRBV7-2, TRBJ1-6)
CASSLSSSPLHF

SEQ ID NO: 660509 - protein, 16 aa, Homo sapiens
  CDR3 for alpha chain variable domain of TCR clone 330255 (TRAV26-1, TRAJ53)
WIVRVAMGGSNYKLTF

SEQ ID NO: 660510 - protein, 12 aa, Homo sapiens
  CDR3 for beta chain variable domain of TCR clone 330255 (TRBV7-9, TRBJ1-5)
CASSPQGQPQHF

SEQ ID NO: 660511 - protein, 16 aa, Homo sapiens
  CDR3 for alpha chain variable domain of TCR clone 330256 (TRAV17, TRAJ28)
CATDEYSGAGSYQLTF

SEQ ID NO: 660512 - protein, 13 aa, Homo sapiens
  CDR3 for beta chain variable domain of TCR clone 330256 (TRBV7-9, TRBJ1-2)
CASRTGPNYGYSF

SEQ ID NO: 660513 - protein, 18 aa, Homo sapiens
  CDR3 for alpha chain variable domain of TCR clone 330257 (TRAV29/DV5, TRAJ37)
CSVLLCSEGSGNTGKLIF

SEQ ID NO: 660514 - protein, 12 aa, Homo sapiens
  CDR3 for beta chain variable domain of TCR clone 330257 (TRBV5-1, TRBJ1-2)
CASSQDTYGYTF

SEQ ID NO: 660515 - protein, 11 aa, Homo sapiens
  CDR3 for alpha chain variable domain of TCR clone 330258 (TRAV2, TRAJ33)
CAVESNYQLIW

SEQ ID NO: 660516 - protein, 15 aa, Homo sapiens
  CDR3 for beta chain variable domain of TCR clone 330258 (TRBV19, TRBJ2-7)
CASRPTPGLSIEQYF

SEQ ID NO: 660517 - protein, 14 aa, Homo sapiens
  CDR3 for alpha chain variable domain of TCR clone 330259 (TRAV27, TRAJ17)
CRSTIRAAGNKLTF

SEQ ID NO: 660518 - protein, 15 aa, Homo sapiens
  CDR3 for beta chain variable domain of TCR clone 330259 (TRBV27, TRBJ2-5)
CASSLYPRGGETQYF

SEQ ID NO: 660519 - protein, 14 aa, Homo sapiens
  CDR3 for alpha chain variable domain of TCR clone 330260 (TRAV1-2, TRAJ16)
CAVNRFSDGQKLLF

SEQ ID NO: 660520 - protein, 16 aa, Homo sapiens
  CDR3 for beta chain variable domain of TCR clone 330260 (TRBV7-8, TRBJ2-2)
CASSLARTGVTGELFF

SEQ ID NO: 660521 - protein, 21 aa, Homo sapiens
  CDR3 for alpha chain variable domain of TCR clone 330261 (TRAV1-1, TRAJ6)
CLLLLRCERLERTGGSHIPTF

SEQ ID NO: 660522 - protein, 14 aa, Homo sapiens
  CDR3 for beta chain variable domain of TCR clone 330261 (TRBV4-1, TRBJ2-2)
CASSQAVNTGELFF

SEQ ID NO: 660523 - protein, 11 aa, Homo sapiens
  CDR3 for alpha chain variable domain of TCR clone 330262 (TRAV1-2, TRAJ40)
CAVPGTYKYIF

SEQ ID NO: 660524 - protein, 14 aa, Homo sapiens
  CDR3 for beta chain variable domain of TCR clone 330262 (TRBV20-1, TRBJ2-1)
CSAQIGGSANEQFF

SEQ ID NO: 660525 - protein, 13 aa, Homo sapiens
  CDR3 for alpha chain variable domain of TCR clone 330263 (TRAV35, TRAJ42)
CAGLPGSQGNLIV

SEQ ID NO: 660526 - protein, 13 aa, Homo sapiens
  CDR3 for beta chain variable domain of TCR clone 330263 (TRBV29-1, TRBJ2-1)
CSVEGGRFNEQFF

SEQ ID NO: 660527 - protein, 14 aa, Homo sapiens
  CDR3 for alpha chain variable domain of TCR clone 330264 (TRAV3, TRAJ42)
CCETLGGSQGNLIF

SEQ ID NO: 660528 - protein, 12 aa, Homo sapiens
  CDR3 for beta chain variable domain of TCR clone 330264 (TRBV4-1, TRBJ2-3)
CASNQGTDTQYF

SEQ ID NO: 660529 - protein, 13 aa, Homo sapiens
  CDR3 for alpha chain variable domain of TCR clone 330265 (TRAV13-1, TRAJ5)
CAASDTGSRALTF

SEQ ID NO: 660530 - protein, 14 aa, Homo sapiens
  CDR3 for beta chain variable domain of TCR clone 330265 (TRBV20-1, TRBJ2-1)
CSAQIGGSANEQFF

SEQ ID NO: 660531 - protein, 12 aa, Homo sapiens
  CDR3 for alpha chain variable domain of TCR clone 330266 (TRAV16, TRAJ21)
CALLGNFDKFYF

SEQ ID NO: 660532 - protein, 15 aa, Homo sapiens
  CDR3 for beta chain variable domain of TCR clone 330266 (TRBV3-1, TRBJ2-2)
CASSQEVRETGELFF

SEQ ID NO: 660533 - protein, 15 aa, Homo sapiens
  CDR3 for alpha chain variable domain of TCR clone 330267 (TRAV26-1, TRAJ29)
CMVRVEGSGNTPLVF

SEQ ID NO: 660534 - protein, 15 aa, Homo sapiens
  CDR3 for beta chain variable domain of TCR clone 330267 (TRBV28, TRBJ2-5)
CASSPGQGSIETQYF

SEQ ID NO: 660535 - protein, 12 aa, Homo sapiens
  CDR3 for alpha chain variable domain of TCR clone 330268 (TRAV17, TRAJ4)
CATDGGYNKLIF

SEQ ID NO: 660536 - protein, 14 aa, Homo sapiens
  CDR3 for beta chain variable domain of TCR clone 330268 (TRBV13, TRBJ2-7)
CASSLKGASYEQYF

SEQ ID NO: 660537 - protein, 21 aa, Homo sapiens
  CDR3 for alpha chain variable domain of TCR clone 330269 (TRAV4, TRAJ39)
CCVLLPRGGAAGGSAGNMLTF

SEQ ID NO: 660538 - protein, 16 aa, Homo sapiens
  CDR3 for beta chain variable domain of TCR clone 330269 (TRBV7-6, TRBJ2-7)
CASSGGTGALSYEQYF

SEQ ID NO: 660539 - protein, 14 aa, Homo sapiens
  CDR3 for alpha chain variable domain of TCR clone 330270 (TRAV12-1, TRAJ40)
CVVNRDSGTYKYIF

SEQ ID NO: 660540 - protein, 16 aa, Homo sapiens
  CDR3 for beta chain variable domain of TCR clone 330270 (TRBV12-4, TRBJ1-5)
CASSSGPRGSNQPQHF

SEQ ID NO: 660541 - protein, 16 aa, Homo sapiens
  CDR3 for alpha chain variable domain of TCR clone 330271 (TRAV1-2, TRAJ10)
CAVRGVLTGGGNKLTF

SEQ ID NO: 660542 - protein, 14 aa, Homo sapiens
  CDR3 for beta chain variable domain of TCR clone 330271 (TRBV12-4, TRBJ1-4)
CASSRQGANEKLFF

SEQ ID NO: 660543 - protein, 17 aa, Homo sapiens
  CDR3 for alpha chain variable domain of TCR clone 330272 (TRAV13-1, TRAJ5)
CSNPSLSRDTGRRDLTF

SEQ ID NO: 660544 - protein, 17 aa, Homo sapiens
  CDR3 for beta chain variable domain of TCR clone 330272 (TRBV24-1, TRBJ2-1)
CASSDVSTSGTYNEQFF

SEQ ID NO: 660545 - protein, 15 aa, Homo sapiens
  CDR3 for alpha chain variable domain of TCR clone 330273 (TRAV6, TRAJ32)
CALDMGGGATNKLIF

SEQ ID NO: 660546 - protein, 14 aa, Homo sapiens
  CDR3 for beta chain variable domain of TCR clone 330273 (TRBV25-1, TRBJ1-1)
CASTHLGGNTEAFF

SEQ ID NO: 660547 - protein, 14 aa, Homo sapiens
  CDR3 for alpha chain variable domain of TCR clone 330274 (TRAV1-1, TRAJ23)
CAVSIYNQGGKLIF

SEQ ID NO: 660548 - protein, 12 aa, Homo sapiens
  CDR3 for beta chain variable domain of TCR clone 330274 (TRBV9, TRBJ2-2)
CASSVVNGELFF

SEQ ID NO: 660549 - protein, 16 aa, Homo sapiens
  CDR3 for alpha chain variable domain of TCR clone 330275 (TRAV19, TRAJ24)
CSSPLSTTDSWGKLQF

SEQ ID NO: 660550 - protein, 13 aa, Homo sapiens
  CDR3 for beta chain variable domain of TCR clone 330275 (TRBV12-5, TRBJ2-3)
CASRDRQSDTQYF

SEQ ID NO: 660551 - protein, 14 aa, Homo sapiens
  CDR3 for alpha chain variable domain of TCR clone 330276 (TRAV3, TRAJ9)
CAVRLNTGGFKTIF

SEQ ID NO: 660552 - protein, 14 aa, Homo sapiens
  CDR3 for beta chain variable domain of TCR clone 330276 (TRBV6-3, TRBJ1-1)
CASSNLLPGAEAFF

SEQ ID NO: 660553 - protein, 11 aa, Homo sapiens
  CDR3 for alpha chain variable domain of TCR clone 330277 (TRAV1-1, TRAJ23)
CAVRQGGKLIF

SEQ ID NO: 660554 - protein, 20 aa, Homo sapiens
  CDR3 for beta chain variable domain of TCR clone 330277 (TRBV11-2, TRBJ1-6)
WASSLVFATGGSVHPSTLGT

SEQ ID NO: 660555 - protein, 14 aa, Homo sapiens
  CDR3 for alpha chain variable domain of TCR clone 330278 (TRAV17, TRAJ56)
CATEDTGANSKLTF

SEQ ID NO: 660556 - protein, 16 aa, Homo sapiens
  CDR3 for beta chain variable domain of TCR clone 330278 (TRBV19, TRBJ2-1)
CASSIKLAGSFNEQFF

SEQ ID NO: 660557 - protein, 14 aa, Homo sapiens
  CDR3 for alpha chain variable domain of TCR clone 330279 (TRAV13-1, TRAJ13)
CAASRVGGYQKVTF

SEQ ID NO: 660558 - protein, 15 aa, Homo sapiens
  CDR3 for beta chain variable domain of TCR clone 330279 (TRBV9, TRBJ2-1)
CASSLAGSSYNEQFF

SEQ ID NO: 660559 - protein, 16 aa, Homo sapiens
  CDR3 for alpha chain variable domain of TCR clone 330280 (TRAV12-2, TRAJ6)
CAAPLSGSGGSYIPTF

SEQ ID NO: 660560 - protein, 10 aa, Homo sapiens
  CDR3 for beta chain variable domain of TCR clone 330280 (TRBV28, TRBJ1-2)
CASSSDRAVF

SEQ ID NO: 660561 - protein, 14 aa, Homo sapiens
  CDR3 for alpha chain variable domain of TCR clone 330281 (TRAV13-1, TRAJ44)
CAAKATGTASKLNF

SEQ ID NO: 660562 - protein, 15 aa, Homo sapiens
  CDR3 for beta chain variable domain of TCR clone 330281 (TRBV10-3, TRBJ2-1)
CAISDVQDRAYEQFF

SEQ ID NO: 660563 - protein, 16 aa, Homo sapiens
  CDR3 for alpha chain variable domain of TCR clone 330282 (TRAV1-2, TRAJ10)
CAVRGVLTGGGNKLTF

SEQ ID NO: 660564 - protein, 16 aa, Homo sapiens
  CDR3 for beta chain variable domain of TCR clone 330282 (TRBV11-2, TRBJ2-7)
CASSLAPTGVNYEQYF

SEQ ID NO: 660565 - protein, 14 aa, Homo sapiens
  CDR3 for alpha chain variable domain of TCR clone 330283 (TRAV20, TRAJ22)
CAVALGGSARQLTF

SEQ ID NO: 660566 - protein, 15 aa, Homo sapiens
  CDR3 for beta chain variable domain of TCR clone 330283 (TRBV7-2, TRBJ1-1)
CASSLAGDRDTEAFF

SEQ ID NO: 660567 - protein, 13 aa, Homo sapiens
  CDR3 for alpha chain variable domain of TCR clone 330284 (TRAV21, TRAJ27)
CAARPGNAGKSTF

SEQ ID NO: 660568 - protein, 14 aa, Homo sapiens
  CDR3 for beta chain variable domain of TCR clone 330284 (TRBV13, TRBJ2-5)
CASSLGPRGETQYF

SEQ ID NO: 660569 - protein, 16 aa, Homo sapiens
  CDR3 for alpha chain variable domain of TCR clone 330285 (TRAV22, TRAJ45)
CAVERGKRGGADGLTF

SEQ ID NO: 660570 - protein, 14 aa, Homo sapiens
  CDR3 for beta chain variable domain of TCR clone 330285 (TRBV7-6, TRBJ2-3)
CASSLGTVTDTQYF

SEQ ID NO: 660571 - protein, 19 aa, Homo sapiens
  CDR3 for alpha chain variable domain of TCR clone 330286 (TRAV8-4, TRAJ16)
CAVSPVGRWPGAALCKGDH

SEQ ID NO: 660572 - protein, 14 aa, Homo sapiens
  CDR3 for beta chain variable domain of TCR clone 330286 (TRBV23-1, TRBJ2-5)
CASSFLRSQETQYF

SEQ ID NO: 660573 - protein, 12 aa, Homo sapiens
  CDR3 for alpha chain variable domain of TCR clone 330287 (TRAV4, TRAJ34)
CLVGEGTDKLIV

SEQ ID NO: 660574 - protein, 13 aa, Homo sapiens
  CDR3 for beta chain variable domain of TCR clone 330287 (TRBV2, TRBJ2-7)
CATSMGLVYEQYF

SEQ ID NO: 660575 - protein, 14 aa, Homo sapiens
  CDR3 for alpha chain variable domain of TCR clone 330288 (TRAV30, TRAJ33)
CGTVAPRSNYQLIW

SEQ ID NO: 660576 - protein, 13 aa, Homo sapiens
  CDR3 for beta chain variable domain of TCR clone 330288 (TRBV20-1, TRBJ2-5)
CSAILTGQETQYF

SEQ ID NO: 660577 - protein, 15 aa, Homo sapiens
  CDR3 for alpha chain variable domain of TCR clone 330289 (TRAV1-2, TRAJ32)
CAVRGYGGATNKLIF

SEQ ID NO: 660578 - protein, 15 aa, Homo sapiens
  CDR3 for beta chain variable domain of TCR clone 330289 (TRBV25-1, TRBJ2-5)
CASRDTGTHQETQYF

SEQ ID NO: 660579 - protein, 14 aa, Homo sapiens
  CDR3 for alpha chain variable domain of TCR clone 330290 (TRAV17, TRAJ32)
FATDPGGATNKLIF

SEQ ID NO: 660580 - protein, 14 aa, Homo sapiens
  CDR3 for beta chain variable domain of TCR clone 330290 (TRBV2, TRBJ1-5)
CASSENRGGQPQHF

SEQ ID NO: 660581 - protein, 14 aa, Homo sapiens
  CDR3 for alpha chain variable domain of TCR clone 330291 (TRAV1-2, TRAJ33)
CAVRAPASNYQLIW

SEQ ID NO: 660582 - protein, 14 aa, Homo sapiens
  CDR3 for beta chain variable domain of TCR clone 330291 (TRBV11-3, TRBJ1-6)
CASSFSGGDSPLHF

SEQ ID NO: 660583 - protein, 16 aa, Homo sapiens
  CDR3 for alpha chain variable domain of TCR clone 330292 (TRAV12-2, TRAJ13)
CAVDSAGAGGYPKVTF

SEQ ID NO: 660584 - protein, 14 aa, Homo sapiens
  CDR3 for beta chain variable domain of TCR clone 330292 (TRBV20-1, TRBJ1-4)
CSARDGSGWEKLFF

SEQ ID NO: 660585 - protein, 17 aa, Homo sapiens
  CDR3 for alpha chain variable domain of TCR clone 330293 (TRAV3, TRAJ6)
CAVRDGPRAGGSYIPTF

SEQ ID NO: 660586 - protein, 14 aa, Homo sapiens
  CDR3 for beta chain variable domain of TCR clone 330293 (TRBV7-2, TRBJ2-7)
CASSPKTGFYEQYV

SEQ ID NO: 660587 - protein, 15 aa, Homo sapiens
  CDR3 for alpha chain variable domain of TCR clone 330294 (TRAV8-2, TRAJ40)
FVVLGTTSGTYKYIF

SEQ ID NO: 660588 - protein, 16 aa, Homo sapiens
  CDR3 for beta chain variable domain of TCR clone 330294 (TRBV7-3, TRBJ2-1)
CASSLEGYRSYNEQFF

SEQ ID NO: 660589 - protein, 14 aa, Homo sapiens
  CDR3 for alpha chain variable domain of TCR clone 330295 (TRAV16, TRAJ37)
CALDISGNTGKLIF

SEQ ID NO: 660590 - protein, 14 aa, Homo sapiens
  CDR3 for beta chain variable domain of TCR clone 330295 (TRBV2, TRBJ2-5)
CASTWGRAQETQYF

SEQ ID NO: 660591 - protein, 15 aa, Homo sapiens
  CDR3 for alpha chain variable domain of TCR clone 330296 (TRAV8-6, TRAJ37)
CAVIFSSGNTGNLIF

SEQ ID NO: 660592 - protein, 15 aa, Homo sapiens
  CDR3 for beta chain variable domain of TCR clone 330296 (TRBV25-1, TRBJ2-4)
CASSETESAKNIQYF

SEQ ID NO: 660593 - protein, 16 aa, Homo sapiens
  CDR3 for alpha chain variable domain of TCR clone 330297 (TRAV27, TRAJ13)
CAGAKSGSGGFQKVTF

SEQ ID NO: 660594 - protein, 15 aa, Homo sapiens
  CDR3 for beta chain variable domain of TCR clone 330297 (TRBV29-1, TRBJ2-1)
CSVGRHALFYNEQFF

SEQ ID NO: 660595 - protein, 12 aa, Homo sapiens
  CDR3 for alpha chain variable domain of TCR clone 330298 (TRAV13-1, TRAJ21)
CAAKEGFNKLYF

SEQ ID NO: 660596 - protein, 17 aa, Homo sapiens
  CDR3 for beta chain variable domain of TCR clone 330298 (TRBV20-1, TRBJ2-1)
CSASSSGLAGSYNEQFF

SEQ ID NO: 660597 - protein, 14 aa, Homo sapiens
  CDR3 for alpha chain variable domain of TCR clone 330299 (TRAV38-1, TRAJ39)
CAFADNNAGNMLTF

SEQ ID NO: 660598 - protein, 15 aa, Homo sapiens
  CDR3 for beta chain variable domain of TCR clone 330299 (TRBV19, TRBJ2-6)
CASSIGPSGANVLTF

SEQ ID NO: 660599 - protein, 11 aa, Homo sapiens
  CDR3 for alpha chain variable domain of TCR clone 330300 (TRAV3, TRAJ21)
CAVGNFNKFYF

SEQ ID NO: 660600 - protein, 21 aa, Homo sapiens
  CDR3 for beta chain variable domain of TCR clone 330300 (TRBV15, TRBJ2-1)
AWGTQPCTCVPPAEVDTARFF

SEQ ID NO: 660601 - protein, 15 aa, Homo sapiens
  CDR3 for alpha chain variable domain of TCR clone 330301 (TRAV23/DV6, TRAJ18)
CAARYRGSTLGRLYF

SEQ ID NO: 660602 - protein, 13 aa, Homo sapiens
  CDR3 for beta chain variable domain of TCR clone 330301 (TRBV7-2, TRBJ2-7)
CASSAPRGSEQYF

SEQ ID NO: 660603 - protein, 16 aa, Homo sapiens
  CDR3 for alpha chain variable domain of TCR clone 330302 (TRAV8-3, TRAJ18)
CAVALGRGSTLGRLYF

SEQ ID NO: 660604 - protein, 11 aa, Homo sapiens
  CDR3 for beta chain variable domain of TCR clone 330302 (TRBV29-1, TRBJ1-1)
CSVEILTEAFF

SEQ ID NO: 660605 - protein, 15 aa, Homo sapiens
  CDR3 for alpha chain variable domain of TCR clone 330303 (TRAV35, TRAJ41)
CAGQLFSNSRYALNF

SEQ ID NO: 660606 - protein, 14 aa, Homo sapiens
  CDR3 for beta chain variable domain of TCR clone 330303 (TRBV7-2, TRBJ1-2)
CASSRGGTNYGYTF

SEQ ID NO: 660607 - protein, 15 aa, Homo sapiens
  CDR3 for alpha chain variable domain of TCR clone 330304 (TRAV8-6, TRAJ10)
CAVSDQAGGGNKLTF

SEQ ID NO: 660608 - protein, 12 aa, Homo sapiens
  CDR3 for beta chain variable domain of TCR clone 330304 (TRBV3-1, TRBJ2-1)
CASSQGSSGQFF

SEQ ID NO: 660609 - protein, 12 aa, Homo sapiens
  CDR3 for alpha chain variable domain of TCR clone 330305 (TRAV12-3, TRAJ17)
CAITLTGNKLTF

SEQ ID NO: 660610 - protein, 16 aa, Homo sapiens
  CDR3 for beta chain variable domain of TCR clone 330305 (TRBV19, TRBJ2-2)
CASRSPGTGATGELFF

SEQ ID NO: 660611 - protein, 13 aa, Homo sapiens
  CDR3 for alpha chain variable domain of TCR clone 330306 (TRAV17, TRAJ26)
CATVDNYGQNFFF

SEQ ID NO: 660612 - protein, 14 aa, Homo sapiens
  CDR3 for beta chain variable domain of TCR clone 330306 (TRBV6-1, TRBJ1-3)
CASVQGGGGNTIYF

SEQ ID NO: 660613 - protein, 16 aa, Homo sapiens
  CDR3 for alpha chain variable domain of TCR clone 330307 (TRAV3, TRAJ20)
CAVRPSVTTTSSALQP

SEQ ID NO: 660614 - protein, 15 aa, Homo sapiens
  CDR3 for beta chain variable domain of TCR clone 330307 (TRBV19, TRBJ2-6)
CASVRRDSGANVLTF

SEQ ID NO: 660615 - protein, 10 aa, Homo sapiens
  CDR3 for alpha chain variable domain of TCR clone 330308 (TRAV36/DV7, TRAJ48)
RAVGNEKLTF

SEQ ID NO: 660616 - protein, 16 aa, Homo sapiens
  CDR3 for beta chain variable domain of TCR clone 330308 (TRBV15, TRBJ2-3)
CATRLSGGRAPDTQYF

SEQ ID NO: 660617 - protein, 11 aa, Homo sapiens
  CDR3 for alpha chain variable domain of TCR clone 330309 (TRAV1-1, TRAJ23)
CAVRQGGKLIF

SEQ ID NO: 660618 - protein, 13 aa, Homo sapiens
  CDR3 for beta chain variable domain of TCR clone 330309 (TRBV7-3, TRBJ2-7)
CASSSSGPYEQYF

SEQ ID NO: 660619 - protein, 15 aa, Homo sapiens
  CDR3 for alpha chain variable domain of TCR clone 330310 (TRAV29/DV5, TRAJ40)
CAASAQGSGTYKYIF

SEQ ID NO: 660620 - protein, 14 aa, Homo sapiens
  CDR3 for beta chain variable domain of TCR clone 330310 (TRBV20-1, TRBJ2-1)
YSAQIGGSANEQFF

SEQ ID NO: 660621 - protein, 14 aa, Homo sapiens
  CDR3 for alpha chain variable domain of TCR clone 330311 (TRAV12-1, TRAJ30)
CVPTGTNRDDKIIF

SEQ ID NO: 660622 - protein, 13 aa, Homo sapiens
  CDR3 for beta chain variable domain of TCR clone 330311 (TRBV19, TRBJ2-2)
CASSIWSTGGLFF

SEQ ID NO: 660623 - protein, 14 aa, Homo sapiens
  CDR3 for alpha chain variable domain of TCR clone 330312 (TRAV9-2, TRAJ39)
CALYIYNAGNMLTF

SEQ ID NO: 660624 - protein, 15 aa, Homo sapiens
  CDR3 for beta chain variable domain of TCR clone 330312 (TRBV7-2, TRBJ1-3)
CASSPGGADGNTIYF

SEQ ID NO: 660625 - protein, 13 aa, Homo sapiens
  CDR3 for alpha chain variable domain of TCR clone 330313 (TRAV13-1, TRAJ43)
CAASKNNNNDKRF

SEQ ID NO: 660626 - protein, 14 aa, Homo sapiens
  CDR3 for beta chain variable domain of TCR clone 330313 (TRBV14, TRBJ2-1)
CASSQVQGRGEQFF

SEQ ID NO: 660627 - protein, 15 aa, Homo sapiens
  CDR3 for alpha chain variable domain of TCR clone 330314 (TRAV16, TRAJ12)
LSKWPLRDSSYKLIF

SEQ ID NO: 660628 - protein, 13 aa, Homo sapiens
  CDR3 for beta chain variable domain of TCR clone 330314 (TRBV4-2, TRBJ1-1)
CASSQAGNTEAFF

SEQ ID NO: 660629 - protein, 15 aa, Homo sapiens
  CDR3 for alpha chain variable domain of TCR clone 330315 (TRAV8-4, TRAJ26)
CAVSSSMVRILFLVP

SEQ ID NO: 660630 - protein, 15 aa, Homo sapiens
  CDR3 for beta chain variable domain of TCR clone 330315 (TRBV19, TRBJ1-5)
CASSIVWADNQPQHF

SEQ ID NO: 660631 - protein, 11 aa, Homo sapiens
  CDR3 for alpha chain variable domain of TCR clone 330316 (TRAV12-3, TRAJ49)
CAANTGNQFYF

SEQ ID NO: 660632 - protein, 11 aa, Homo sapiens
  CDR3 for beta chain variable domain of TCR clone 330316 (TRBV11-2, TRBJ2-2)
CASSLPGELFF

SEQ ID NO: 660633 - protein, 12 aa, Homo sapiens
  CDR3 for alpha chain variable domain of TCR clone 330317 (TRAV2, TRAJ31)
CAVEDNNARLMF

SEQ ID NO: 660634 - protein, 14 aa, Homo sapiens
  CDR3 for beta chain variable domain of TCR clone 330317 (TRBV19, TRBJ2-5)
CASSMTGRQETQYF

SEQ ID NO: 660635 - protein, 13 aa, Homo sapiens
  CDR3 for alpha chain variable domain of TCR clone 330318 (TRAV21, TRAJ27)
FAARPGYAGKSTF

SEQ ID NO: 660636 - protein, 14 aa, Homo sapiens
  CDR3 for beta chain variable domain of TCR clone 330318 (TRBV7-6, TRBJ2-3)
CASSLGTVTETQYF

SEQ ID NO: 660637 - protein, 13 aa, Homo sapiens
  CDR3 for alpha chain variable domain of TCR clone 330319 (TRAV2, TRAJ40)
CAVVTSGTYKYIF

SEQ ID NO: 660638 - protein, 12 aa, Homo sapiens
  CDR3 for beta chain variable domain of TCR clone 330319 (TRBV6-6, TRBJ2-5)
CASNRQSGTQYF

SEQ ID NO: 660639 - protein, 14 aa, Homo sapiens
  CDR3 for alpha chain variable domain of TCR clone 330320 (TRAV12-1, TRAJ17)
CVGNYKAAGNKLTF

SEQ ID NO: 660640 - protein, 15 aa, Homo sapiens
  CDR3 for beta chain variable domain of TCR clone 330320 (TRBV18, TRBJ2-7)
CASSPTFMDSYEQYF

SEQ ID NO: 660641 - protein, 12 aa, Homo sapiens
  CDR3 for alpha chain variable domain of TCR clone 330321 (TRAV17, TRAJ57)
CATDGGSEKLVF

SEQ ID NO: 660642 - protein, 13 aa, Homo sapiens
  CDR3 for beta chain variable domain of TCR clone 330321 (TRBV6-5, TRBJ2-7)
CASSWQGASEQYF

SEQ ID NO: 660643 - protein, 14 aa, Homo sapiens
  CDR3 for alpha chain variable domain of TCR clone 330322 (TRAV8-4, TRAJ9)
CAVSDRTGGFKTIF

SEQ ID NO: 660644 - protein, 12 aa, Homo sapiens
  CDR3 for beta chain variable domain of TCR clone 330322 (TRBV11-2, TRBJ2-2)
CASSLGGGELFF

SEQ ID NO: 660645 - protein, 11 aa, Homo sapiens
  CDR3 for alpha chain variable domain of TCR clone 330323 (TRAV2, TRAJ13)
CASGGYQKVTF

SEQ ID NO: 660646 - protein, 15 aa, Homo sapiens
  CDR3 for beta chain variable domain of TCR clone 330323 (TRBV19, TRBJ2-1)
CASSIGLEGWDEQFF

SEQ ID NO: 660647 - protein, 15 aa, Homo sapiens
  CDR3 for alpha chain variable domain of TCR clone 330324 (TRAV12-1, TRAJ33)
CVVNGNLDSDYQLIW

SEQ ID NO: 660648 - protein, 13 aa, Homo sapiens
  CDR3 for beta chain variable domain of TCR clone 330324 (TRBV9, TRBJ2-7)
CASSKTGTYEQYF

SEQ ID NO: 660649 - protein, 15 aa, Homo sapiens
  CDR3 for alpha chain variable domain of TCR clone 330325 (TRAV12-3, TRAJ48)
CAMNAKNFGNEKLTF

SEQ ID NO: 660650 - protein, 14 aa, Homo sapiens
  CDR3 for beta chain variable domain of TCR clone 330325 (TRBV2, TRBJ1-6)
CVSSESRNNSPLHF

SEQ ID NO: 660651 - protein, 12 aa, Homo sapiens
  CDR3 for alpha chain variable domain of TCR clone 330326 (TRAV16, TRAJ17)
CSPSAAGNKLTF

SEQ ID NO: 660652 - protein, 14 aa, Homo sapiens
  CDR3 for beta chain variable domain of TCR clone 330326 (TRBV6-1, TRBJ1-3)
CASVQGGGGNTIYF

SEQ ID NO: 660653 - protein, 12 aa, Homo sapiens
  CDR3 for alpha chain variable domain of TCR clone 330327 (TRAV13-2, TRAJ23)
CAERHRGGKLIF

SEQ ID NO: 660654 - protein, 16 aa, Homo sapiens
  CDR3 for beta chain variable domain of TCR clone 330327 (TRBV4-1, TRBJ1-2)
CASSQDAGQVLYGYTF

SEQ ID NO: 660655 - protein, 14 aa, Homo sapiens
  CDR3 for alpha chain variable domain of TCR clone 330328 (TRAV26-1, TRAJ49)
CIVRLTNTGNQFYF

SEQ ID NO: 660656 - protein, 17 aa, Homo sapiens
  CDR3 for beta chain variable domain of TCR clone 330328 (TRBV20-1, TRBJ2-1)
CSASSSGLAGFYNEQFF

SEQ ID NO: 660657 - protein, 14 aa, Homo sapiens
  CDR3 for alpha chain variable domain of TCR clone 330329 (TRAV13-1, TRAJ9)
CAACALTAGFKTIF

SEQ ID NO: 660658 - protein, 13 aa, Homo sapiens
  CDR3 for beta chain variable domain of TCR clone 330329 (TRBV20-1, TRBJ1-1)
CSAGTVGNTEAFF

SEQ ID NO: 660659 - protein, 10 aa, Homo sapiens
  CDR3 for alpha chain variable domain of TCR clone 330330 (TRAV1-2, TRAJ31)
CAFFDARLMF

SEQ ID NO: 660660 - protein, 13 aa, Homo sapiens
  CDR3 for beta chain variable domain of TCR clone 330330 (TRBV7-2, TRBJ2-2)
CASSLAVTGELFF

SEQ ID NO: 660661 - protein, 14 aa, Homo sapiens
  CDR3 for alpha chain variable domain of TCR clone 330331 (TRAV35, TRAJ41)
CAGQASVRRNALNF

SEQ ID NO: 660662 - protein, 14 aa, Homo sapiens
  CDR3 for beta chain variable domain of TCR clone 330331 (TRBV20-1, TRBJ1-2)
CSASEQGAAYGYTF

SEQ ID NO: 660663 - protein, 13 aa, Homo sapiens
  CDR3 for alpha chain variable domain of TCR clone 330332 (TRAV21, TRAJ27)
CAALNTNAGKSTF

SEQ ID NO: 660664 - protein, 14 aa, Homo sapiens
  CDR3 for beta chain variable domain of TCR clone 330332 (TRBV27, TRBJ1-1)
CASSLLSGHSEAFF

SEQ ID NO: 660665 - protein, 16 aa, Homo sapiens
  CDR3 for alpha chain variable domain of TCR clone 330333 (TRAV30, TRAJ24)
CGTEIVDADSWGKFQF

SEQ ID NO: 660666 - protein, 17 aa, Homo sapiens
  CDR3 for beta chain variable domain of TCR clone 330333 (TRBV20-1, TRBJ1-5)
CSASLSPGQGGNQPQHF

SEQ ID NO: 660667 - protein, 13 aa, Homo sapiens
  CDR3 for alpha chain variable domain of TCR clone 330334 (TRAV8-3, TRAJ48)
CAVVPFGNEKLTF

SEQ ID NO: 660668 - protein, 19 aa, Homo sapiens
  CDR3 for beta chain variable domain of TCR clone 330334 (TRBV25-1, TRBJ2-2)
CAILVYRVDRGRKTGELFS

SEQ ID NO: 660669 - protein, 15 aa, Homo sapiens
  CDR3 for alpha chain variable domain of TCR clone 330335 (TRAV8-3, TRAJ45)
CASSYSGGGAAGLTF

SEQ ID NO: 660670 - protein, 13 aa, Homo sapiens
  CDR3 for beta chain variable domain of TCR clone 330335 (TRBV10-3, TRBJ2-7)
CASKRAVNYEQYF

SEQ ID NO: 660671 - protein, 14 aa, Homo sapiens
  CDR3 for alpha chain variable domain of TCR clone 330336 (TRAV3, TRAJ9)
CAVRLNTGGFKTIF

SEQ ID NO: 660672 - protein, 15 aa, Homo sapiens
  CDR3 for beta chain variable domain of TCR clone 330336 (TRBV7-2, TRBJ2-1)
CASSLASGRVNEQVF

SEQ ID NO: 660673 - protein, 12 aa, Homo sapiens
  CDR3 for alpha chain variable domain of TCR clone 330337 (TRAV1-1, TRAJ8)
CAGGTGFQKLVF

SEQ ID NO: 660674 - protein, 15 aa, Homo sapiens
  CDR3 for beta chain variable domain of TCR clone 330337 (TRBV7-2, TRBJ2-1)
CASSSGLAGGNEQFF

SEQ ID NO: 660675 - protein, 15 aa, Homo sapiens
  CDR3 for alpha chain variable domain of TCR clone 330338 (TRAV8-3, TRAJ45)
CASSYSGGGAAGLTF

SEQ ID NO: 660676 - protein, 15 aa, Homo sapiens
  CDR3 for beta chain variable domain of TCR clone 330338 (TRBV27, TRBJ1-4)
CASSPRHATNEKLFF

SEQ ID NO: 660677 - protein, 16 aa, Homo sapiens
  CDR3 for alpha chain variable domain of TCR clone 330339 (TRAV30, TRAJ24)
CGTEIVDADSWGQFQF

SEQ ID NO: 660678 - protein, 14 aa, Homo sapiens
  CDR3 for beta chain variable domain of TCR clone 330339 (TRBV12-5, TRBJ2-5)
CASDSRTHQETQYF

SEQ ID NO: 660679 - protein, 13 aa, Homo sapiens
  CDR3 for alpha chain variable domain of TCR clone 330340 (TRAV12-1, TRAJ3)
CVVNARGASKIIF

SEQ ID NO: 660680 - protein, 13 aa, Homo sapiens
  CDR3 for beta chain variable domain of TCR clone 330340 (TRBV28, TRBJ1-5)
CASSDRGNQPQHF

SEQ ID NO: 660681 - protein, 15 aa, Homo sapiens
  CDR3 for alpha chain variable domain of TCR clone 330341 (TRAV12-3, TRAJ6)
CVMSATTGGSYILTF

SEQ ID NO: 660682 - protein, 19 aa, Homo sapiens
  CDR3 for beta chain variable domain of TCR clone 330341 (TRBV25-1, TRBJ2-2)
CAILVYRVDRGRKTGELFF

SEQ ID NO: 660683 - protein, 15 aa, Homo sapiens
  CDR3 for alpha chain variable domain of TCR clone 330342 (TRAV8-3, TRAJ45)
CASSYSGGGADGLTF

SEQ ID NO: 660684 - protein, 14 aa, Homo sapiens
  CDR3 for beta chain variable domain of TCR clone 330342 (TRBV19, TRBJ2-1)
CASPTFVLSGEQFL

SEQ ID NO: 660685 - protein, 14 aa, Homo sapiens
  CDR3 for alpha chain variable domain of TCR clone 330343 (TRAV8-3, TRAJ6)
CAVGASGGSYIPTF

SEQ ID NO: 660686 - protein, 17 aa, Homo sapiens
  CDR3 for beta chain variable domain of TCR clone 330343 (TRBV18, TRBJ2-2)
CASSPSDPWQNNGELFF

SEQ ID NO: 660687 - protein, 16 aa, Homo sapiens
  CDR3 for alpha chain variable domain of TCR clone 330344 (TRAV30, TRAJ24)
CGTEIVDADSWGKFQF

SEQ ID NO: 660688 - protein, 16 aa, Homo sapiens
  CDR3 for beta chain variable domain of TCR clone 330344 (TRBV15, TRBJ1-3)
CATSSPIGFSGNTIYF

SEQ ID NO: 660689 - protein, 11 aa, Homo sapiens
  CDR3 for alpha chain variable domain of TCR clone 330345 (TRAV1-1, TRAJ23)
CAVRQGGKLIF

SEQ ID NO: 660690 - protein, 13 aa, Homo sapiens
  CDR3 for beta chain variable domain of TCR clone 330345 (TRBV2, TRBJ2-7)
CASSVGGSGEQYF

SEQ ID NO: 660691 - protein, 18 aa, Homo sapiens
  CDR3 for alpha chain variable domain of TCR clone 330346 (TRAV26-2, TRAJ54)
CILRDVEVGIQGAQKLVF

SEQ ID NO: 660692 - protein, 16 aa, Homo sapiens
  CDR3 for beta chain variable domain of TCR clone 330346 (TRBV6-1, TRBJ2-5)
CSSSETLDRGAETQYF

SEQ ID NO: 660693 - protein, 15 aa, Homo sapiens
  CDR3 for alpha chain variable domain of TCR clone 330347 (TRAV35, TRAJ50)
CAGQLRKTSYDKVIC

SEQ ID NO: 660694 - protein, 12 aa, Homo sapiens
  CDR3 for beta chain variable domain of TCR clone 330347 (TRBV5-1, TRBJ2-5)
CASSLGLETQYF

SEQ ID NO: 660695 - protein, 16 aa, Homo sapiens
  CDR3 for alpha chain variable domain of TCR clone 330348 (TRAV30, TRAJ24)
CGTEIVDADSWGKFQF

SEQ ID NO: 660696 - protein, 16 aa, Homo sapiens
  CDR3 for beta chain variable domain of TCR clone 330348 (TRBV12-4, TRBJ2-5)
CASSLSTSGGKETQYF

SEQ ID NO: 660697 - protein, 23 aa, Homo sapiens
  CDR3 for alpha chain variable domain of TCR clone 330349 (TRAV8-3, TRAJ4)
GVMLLSTSVLWVFYSGGYNKLMF

SEQ ID NO: 660698 - protein, 14 aa, Homo sapiens
  CDR3 for beta chain variable domain of TCR clone 330349 (TRBV7-9, TRBJ2-3)
CASSLEDGTDTQYF

SEQ ID NO: 660699 - protein, 11 aa, Homo sapiens
  CDR3 for alpha chain variable domain of TCR clone 330350 (TRAV3, TRAJ21)
CALGNFNKFYF

SEQ ID NO: 660700 - protein, 15 aa, Homo sapiens
  CDR3 for beta chain variable domain of TCR clone 330350 (TRBV29-1, TRBJ2-1)
CSVEGGPASYNEQIF

SEQ ID NO: 660701 - protein, 14 aa, Homo sapiens
  CDR3 for alpha chain variable domain of TCR clone 330351 (TRAV2, TRAJ37)
CAVDFTSNTGKLIF

SEQ ID NO: 660702 - protein, 14 aa, Homo sapiens
  CDR3 for beta chain variable domain of TCR clone 330351 (TRBV19, TRBJ2-7)
CASSTTRSSYEQYF

SEQ ID NO: 660703 - protein, 11 aa, Homo sapiens
  CDR3 for alpha chain variable domain of TCR clone 330352 (TRAV12-3, TRAJ27)
CAMANAGKSTF

SEQ ID NO: 660704 - protein, 15 aa, Homo sapiens
  CDR3 for beta chain variable domain of TCR clone 330352 (TRBV3-1, TRBJ2-7)
CASSQEWTGSYEQYF

SEQ ID NO: 660705 - protein, 16 aa, Homo sapiens
  CDR3 for alpha chain variable domain of TCR clone 330353 (TRAV13-1, TRAJ37)
CAASIGGSSNTGKLIF

SEQ ID NO: 660706 - protein, 12 aa, Homo sapiens
  CDR3 for beta chain variable domain of TCR clone 330353 (TRBV11-2, TRBJ2-2)
CASSLGGGELFF

SEQ ID NO: 660707 - protein, 16 aa, Homo sapiens
  CDR3 for alpha chain variable domain of TCR clone 330354 (TRAV38-1, TRAJ42)
CAFPLNYGGSQGNLIF

SEQ ID NO: 660708 - protein, 15 aa, Homo sapiens
  CDR3 for beta chain variable domain of TCR clone 330354 (TRBV7-9, TRBJ1-5)
CASSQGHQPNQPQHF

SEQ ID NO: 660709 - protein, 11 aa, Homo sapiens
  CDR3 for alpha chain variable domain of TCR clone 330355 (TRAV17, TRAJ9)
CATTGGFKTIF

SEQ ID NO: 660710 - protein, 14 aa, Homo sapiens
  CDR3 for beta chain variable domain of TCR clone 330355 (TRBV7-9, TRBJ2-2)
CASSGLADTGEKFF

SEQ ID NO: 660711 - protein, 14 aa, Homo sapiens
  CDR3 for alpha chain variable domain of TCR clone 330356 (TRAV13-1, TRAJ9)
CAASALTGGFKTIF

SEQ ID NO: 660712 - protein, 14 aa, Homo sapiens
  CDR3 for beta chain variable domain of TCR clone 330356 (TRBV11-2, TRBJ1-2)
CASSLGTANYGYTF

SEQ ID NO: 660713 - protein, 14 aa, Homo sapiens
  CDR3 for alpha chain variable domain of TCR clone 330357 (TRAV13-1, TRAJ12)
CSNYPMDSSYKLIF

SEQ ID NO: 660714 - protein, 14 aa, Homo sapiens
  CDR3 for beta chain variable domain of TCR clone 330357 (TRBV7-3, TRBJ1-5)
RASSFSGCNQPQHF

SEQ ID NO: 660715 - protein, 18 aa, Homo sapiens
  CDR3 for alpha chain variable domain of TCR clone 330358 (TRAV23/DV6, )
CAEPDIQNPDPAGYQLRD

SEQ ID NO: 660716 - protein, 15 aa, Homo sapiens
  CDR3 for beta chain variable domain of TCR clone 330358 (TRBV12-4, TRBJ2-5)
CASTLNSGRGETQYF

SEQ ID NO: 660717 - protein, 11 aa, Homo sapiens
  CDR3 for alpha chain variable domain of TCR clone 330359 (TRAV35, TRAJ57)
GPQGGSEKLVF

SEQ ID NO: 660718 - protein, 17 aa, Homo sapiens
  CDR3 for beta chain variable domain of TCR clone 330359 (TRBV13, TRBJ2-3)
CASSLSRVAGGRNTQYF

SEQ ID NO: 660719 - protein, 15 aa, Homo sapiens
  CDR3 for alpha chain variable domain of TCR clone 330360 (TRAV26-1, TRAJ22)
CIVRVSFWFSKATDL

SEQ ID NO: 660720 - protein, 14 aa, Homo sapiens
  CDR3 for beta chain variable domain of TCR clone 330360 (TRBV18, TRBJ2-7)
CASSPRGGAYEQYF

SEQ ID NO: 660721 - protein, 15 aa, Homo sapiens
  CDR3 for alpha chain variable domain of TCR clone 330361 (TRAV26-1, TRAJ32)
CIVRSYGGATNKLIF

SEQ ID NO: 660722 - protein, 15 aa, Homo sapiens
  CDR3 for beta chain variable domain of TCR clone 330361 (TRBV4-3, TRBJ2-2)
CASSQGGTPTGELFF

SEQ ID NO: 660723 - protein, 15 aa, Homo sapiens
  CDR3 for alpha chain variable domain of TCR clone 330362 (TRAV26-1, TRAJ22)
CIVRVSFWFCKATDL

SEQ ID NO: 660724 - protein, 13 aa, Homo sapiens
  CDR3 for beta chain variable domain of TCR clone 330362 (TRBV7-3, TRBJ1-1)
CASSQEWGAEAFF

SEQ ID NO: 660725 - protein, 13 aa, Homo sapiens
  CDR3 for alpha chain variable domain of TCR clone 330363 (TRAV12-2, TRAJ9)
CSGGNTGGFKTIF

SEQ ID NO: 660726 - protein, 17 aa, Homo sapiens
  CDR3 for beta chain variable domain of TCR clone 330363 (TRBV4-1, TRBJ2-1)
CASSQGRGGGLYNEQFF

SEQ ID NO: 660727 - protein, 15 aa, Homo sapiens
  CDR3 for alpha chain variable domain of TCR clone 330364 (TRAV36/DV7, TRAJ40)
CAVGPFGSGTYKYIF

SEQ ID NO: 660728 - protein, 15 aa, Homo sapiens
  CDR3 for beta chain variable domain of TCR clone 330364 (TRBV7-6, TRBJ2-7)
CASSLGGAEPYEQYF

SEQ ID NO: 660729 - protein, 15 aa, Homo sapiens
  CDR3 for alpha chain variable domain of TCR clone 330365 (TRAV26-1, TRAJ38)
CIADNAGNNHIRTLT

SEQ ID NO: 660730 - protein, 13 aa, Homo sapiens
  CDR3 for beta chain variable domain of TCR clone 330365 (TRBV20-1, TRBJ1-1)
CSARGGGKTEAFF

SEQ ID NO: 660731 - protein, 13 aa, Homo sapiens
  CDR3 for alpha chain variable domain of TCR clone 330366 (TRAV1-2, TRAJ31)
CAVRGYNNARPMF

SEQ ID NO: 660732 - protein, 15 aa, Homo sapiens
  CDR3 for beta chain variable domain of TCR clone 330366 (TRBV5-7, TRBJ2-7)
CASSLGPGRGHEQYF

SEQ ID NO: 660733 - protein, 12 aa, Homo sapiens
  CDR3 for alpha chain variable domain of TCR clone 330367 (TRAV17, TRAJ53)
CATEGSNYKLTF

SEQ ID NO: 660734 - protein, 19 aa, Homo sapiens
  CDR3 for beta chain variable domain of TCR clone 330367 (TRBV5-1, TRBJ2-3)
CASSLWTSGGITTPETQYF

SEQ ID NO: 660735 - protein, 15 aa, Homo sapiens
  CDR3 for alpha chain variable domain of TCR clone 330368 (TRAV8-4, TRAJ37)
CAVTYGSSNTGKLIF

SEQ ID NO: 660736 - protein, 14 aa, Homo sapiens
  CDR3 for beta chain variable domain of TCR clone 330368 (TRBV5-4, TRBJ2-2)
CASRLDGGTGELFF

SEQ ID NO: 660737 - protein, 15 aa, Homo sapiens
  CDR3 for alpha chain variable domain of TCR clone 330369 (TRAV3, TRAJ22)
CAVRDRGGSARQLTF

SEQ ID NO: 660738 - protein, 15 aa, Homo sapiens
  CDR3 for beta chain variable domain of TCR clone 330369 (TRBV19, TRBJ2-5)
CASSIVRPSQETHYF

SEQ ID NO: 660739 - protein, 14 aa, Homo sapiens
  CDR3 for alpha chain variable domain of TCR clone 330370 (TRAV12-2, TRAJ17)
CAVNIKAAGNKLTF

SEQ ID NO: 660740 - protein, 16 aa, Homo sapiens
  CDR3 for beta chain variable domain of TCR clone 330370 (TRBV20-1, TRBJ2-6)
CSASSQGYDGANVLTL

SEQ ID NO: 660741 - protein, 15 aa, Homo sapiens
  CDR3 for alpha chain variable domain of TCR clone 330371 (TRAV38-1, TRAJ37)
CAFIFGSGNTGKLIF

SEQ ID NO: 660742 - protein, 11 aa, Homo sapiens
  CDR3 for beta chain variable domain of TCR clone 330371 (TRBV11-2, TRBJ2-2)
CASSLPGELFF

SEQ ID NO: 660743 - protein, 13 aa, Homo sapiens
  CDR3 for alpha chain variable domain of TCR clone 330372 (TRAV17, TRAJ5)
CATMETGRRALTF

SEQ ID NO: 660744 - protein, 15 aa, Homo sapiens
  CDR3 for beta chain variable domain of TCR clone 330372 (TRBV20-1, TRBJ2-5)
CSATRTSGSLETQYF

SEQ ID NO: 660745 - protein, 13 aa, Homo sapiens
  CDR3 for alpha chain variable domain of TCR clone 330373 (TRAV8-3, TRAJ36)
FAVGATGANNPFF

SEQ ID NO: 660746 - protein, 15 aa, Homo sapiens
  CDR3 for beta chain variable domain of TCR clone 330373 (TRBV7-2, TRBJ1-2)
CASSPRAGWNYGYTF

SEQ ID NO: 660747 - protein, 13 aa, Homo sapiens
  CDR3 for alpha chain variable domain of TCR clone 330374 (TRAV12-2, TRAJ50)
CAVIVTSYDKVIF

SEQ ID NO: 660748 - protein, 12 aa, Homo sapiens
  CDR3 for beta chain variable domain of TCR clone 330374 (TRBV11-2, TRBJ2-2)
CASSLPTGELFF

SEQ ID NO: 660749 - protein, 15 aa, Homo sapiens
  CDR3 for alpha chain variable domain of TCR clone 330375 (TRAV25, TRAJ53)
CPTSNSGGSNYKLTF

SEQ ID NO: 660750 - protein, 14 aa, Homo sapiens
  CDR3 for beta chain variable domain of TCR clone 330375 (TRBV11-2, TRBJ2-3)
CASSRLAGTDTQYF

SEQ ID NO: 660751 - protein, 10 aa, Homo sapiens
  CDR3 for alpha chain variable domain of TCR clone 330376 (TRAV1-2, TRAJ31)
CVSEDARLMF

SEQ ID NO: 660752 - protein, 13 aa, Homo sapiens
  CDR3 for beta chain variable domain of TCR clone 330376 (TRBV5-1, TRBJ1-1)
CASSADWDTEAFF

SEQ ID NO: 660753 - protein, 12 aa, Homo sapiens
  CDR3 for alpha chain variable domain of TCR clone 330377 (TRAV13-1, TRAJ15)
CAASQAGTALIF

SEQ ID NO: 660754 - protein, 14 aa, Homo sapiens
  CDR3 for beta chain variable domain of TCR clone 330377 (TRBV19, TRBJ2-2)
CASSTLHKSGELFF

SEQ ID NO: 660755 - protein, 13 aa, Homo sapiens
  CDR3 for alpha chain variable domain of TCR clone 330378 (TRAV20, TRAJ40)
CAVPFSGTYKYIF

SEQ ID NO: 660756 - protein, 13 aa, Homo sapiens
  CDR3 for beta chain variable domain of TCR clone 330378 (TRBV15, TRBJ2-5)
CATSQLGEETQYF

SEQ ID NO: 660757 - protein, 12 aa, Homo sapiens
  CDR3 for alpha chain variable domain of TCR clone 330379 (TRAV27, TRAJ29)
CAGAHSGNTPLV

SEQ ID NO: 660758 - protein, 14 aa, Homo sapiens
  CDR3 for beta chain variable domain of TCR clone 330379 (TRBV7-9, TRBJ2-7)
CASSIGQGAGEQYF

SEQ ID NO: 660759 - protein, 13 aa, Homo sapiens
  CDR3 for alpha chain variable domain of TCR clone 330380 (TRAV23/DV6, TRAJ22)
CAPYSGSARQLTF

SEQ ID NO: 660760 - protein, 15 aa, Homo sapiens
  CDR3 for beta chain variable domain of TCR clone 330380 (TRBV27, TRBJ2-1)
CASSNGGGSSNEQFF

SEQ ID NO: 660761 - protein, 12 aa, Homo sapiens
  CDR3 for alpha chain variable domain of TCR clone 330381 (TRAV27, TRAJ13)
CAGAGGYQKVTF

SEQ ID NO: 660762 - protein, 15 aa, Homo sapiens
  CDR3 for beta chain variable domain of TCR clone 330381 (TRBV19, TRBJ2-7)
CASSPAGSGEALRYF

SEQ ID NO: 660763 - protein, 14 aa, Homo sapiens
  CDR3 for alpha chain variable domain of TCR clone 330382 (TRAV12-2, TRAJ48)
CAVNAFFGNEKLTF

SEQ ID NO: 660764 - protein, 13 aa, Homo sapiens
  CDR3 for beta chain variable domain of TCR clone 330382 (TRBV28, TRBJ2-7)
CAGAQQGPDEQYF

SEQ ID NO: 660765 - protein, 16 aa, Homo sapiens
  CDR3 for alpha chain variable domain of TCR clone 330383 (TRAV27, TRAJ57)
CAGALGTQGGSEKLVF

SEQ ID NO: 660766 - protein, 13 aa, Homo sapiens
  CDR3 for beta chain variable domain of TCR clone 330383 (TRBV4-2, TRBJ1-1)
CASSQAGNTEAFF

SEQ ID NO: 660767 - protein, 13 aa, Homo sapiens
  CDR3 for alpha chain variable domain of TCR clone 330384 (TRAV1-2, TRAJ12)
CAVSMDSSYKLIF

SEQ ID NO: 660768 - protein, 14 aa, Homo sapiens
  CDR3 for beta chain variable domain of TCR clone 330384 (TRBV7-3, TRBJ2-1)
CASSLTGGANEQFF

SEQ ID NO: 660769 - protein, 12 aa, Homo sapiens
  CDR3 for alpha chain variable domain of TCR clone 330385 (TRAV30, TRAJ43)
CGTEERGNDMRF

SEQ ID NO: 660770 - protein, 13 aa, Homo sapiens
  CDR3 for beta chain variable domain of TCR clone 330385 (TRBV12-4, TRBJ1-2)
CASSYGSKDDYTF

SEQ ID NO: 660771 - protein, 15 aa, Homo sapiens
  CDR3 for alpha chain variable domain of TCR clone 330386 (TRAV26-1, TRAJ29)
CIVRVEGSGNTPLVF

SEQ ID NO: 660772 - protein, 13 aa, Homo sapiens
  CDR3 for beta chain variable domain of TCR clone 330386 (TRBV29-1, TRBJ2-5)
CSVEATAQGTQYF

SEQ ID NO: 660773 - protein, 17 aa, Homo sapiens
  CDR3 for alpha chain variable domain of TCR clone 330387 (TRAV3, TRAJ6)
CAVRDGPRAGGSYIPKF

SEQ ID NO: 660774 - protein, 16 aa, Homo sapiens
  CDR3 for beta chain variable domain of TCR clone 330387 (TRBV29-1, TRBJ2-7)
CSVEVVGTSGSYEQYF

SEQ ID NO: 660775 - protein, 14 aa, Homo sapiens
  CDR3 for alpha chain variable domain of TCR clone 330388 (TRAV13-1, TRAJ35)
CAASKGGFGNVLHC

SEQ ID NO: 660776 - protein, 17 aa, Homo sapiens
  CDR3 for beta chain variable domain of TCR clone 330388 (TRBV7-2, TRBJ2-3)
CASSSYSGTRRADTQYF

SEQ ID NO: 660777 - protein, 14 aa, Homo sapiens
  CDR3 for alpha chain variable domain of TCR clone 330389 (TRAV20, TRAJ42)
CAVQAGGSQGNLIF

SEQ ID NO: 660778 - protein, 16 aa, Homo sapiens
  CDR3 for beta chain variable domain of TCR clone 330389 (TRBV6-6, TRBJ2-1)
CASSYSFSGSYNEQFF

SEQ ID NO: 660779 - protein, 14 aa, Homo sapiens
  CDR3 for alpha chain variable domain of TCR clone 330390 (TRAV4, TRAJ17)
CLVGDPLVGNKLTF

SEQ ID NO: 660780 - protein, 20 aa, Homo sapiens
  CDR3 for beta chain variable domain of TCR clone 330390 (TRBV20-1, TRBJ2-1)
CSARPYSVAGGPSYYNEQFC

SEQ ID NO: 660781 - protein, 11 aa, Homo sapiens
  CDR3 for alpha chain variable domain of TCR clone 330391 (TRAV2, TRAJ33)
CAVESNYQLIW

SEQ ID NO: 660782 - protein, 13 aa, Homo sapiens
  CDR3 for beta chain variable domain of TCR clone 330391 (TRBV19, TRBJ2-7)
CASSPRQSYEQYF

SEQ ID NO: 660783 - protein, 13 aa, Homo sapiens
  CDR3 for alpha chain variable domain of TCR clone 330392 (TRAV8-6, TRAJ49)
CAVITNTGNQFYF

SEQ ID NO: 660784 - protein, 14 aa, Homo sapiens
  CDR3 for beta chain variable domain of TCR clone 330392 (TRBV16, TRBJ2-7)
CASSQWGRLYEQYF

SEQ ID NO: 660785 - protein, 11 aa, Homo sapiens
  CDR3 for alpha chain variable domain of TCR clone 330393 (TRAV2, TRAJ31)
CAVYNNARLMF

SEQ ID NO: 660786 - protein, 16 aa, Homo sapiens
  CDR3 for beta chain variable domain of TCR clone 330393 (TRBV28, TRBJ1-6)
CASSSLLEGYNSPLHF

SEQ ID NO: 660787 - protein, 15 aa, Homo sapiens
  CDR3 for alpha chain variable domain of TCR clone 330394 (TRAV21, TRAJ48)
CAVPISNLGNEKLTF

SEQ ID NO: 660788 - protein, 16 aa, Homo sapiens
  CDR3 for beta chain variable domain of TCR clone 330394 (TRBV5-7, TRBJ2-7)
CASSLAPSVLNYEQYF

SEQ ID NO: 660789 - protein, 15 aa, Homo sapiens
  CDR3 for alpha chain variable domain of TCR clone 330395 (TRAV2, TRAJ11)
CAVGGRNSGCSTLTF

SEQ ID NO: 660790 - protein, 12 aa, Homo sapiens
  CDR3 for beta chain variable domain of TCR clone 330395 (TRBV5-4, TRBJ2-7)
CASSLEAYEQYF

SEQ ID NO: 660791 - protein, 15 aa, Homo sapiens
  CDR3 for alpha chain variable domain of TCR clone 330396 (TRAV12-3, TRAJ6)
CAMSATTGGSYIPTF

SEQ ID NO: 660792 - protein, 13 aa, Homo sapiens
  CDR3 for beta chain variable domain of TCR clone 330396 (TRBV19, TRBJ2-2)
CASKVSAAGELFF

SEQ ID NO: 660793 - protein, 14 aa, Homo sapiens
  CDR3 for alpha chain variable domain of TCR clone 330397 (TRAV9-2, TRAJ39)
CALYIYNAGNMLTF

SEQ ID NO: 660794 - protein, 16 aa, Homo sapiens
  CDR3 for beta chain variable domain of TCR clone 330397 (TRBV25-1, TRBJ1-1)
CASSGDRDRGRIEAFF

SEQ ID NO: 660795 - protein, 15 aa, Homo sapiens
  CDR3 for alpha chain variable domain of TCR clone 330398 (TRAV20, TRAJ6)
CAVGLQSGGSYIPTF

SEQ ID NO: 660796 - protein, 14 aa, Homo sapiens
  CDR3 for beta chain variable domain of TCR clone 330398 (TRBV12-4, TRBJ2-7)
CASSASGGWYEQYF

SEQ ID NO: 660797 - protein, 12 aa, Homo sapiens
  CDR3 for alpha chain variable domain of TCR clone 330399 (TRAV16, TRAJ57)
CSLEGGSEKLVF

SEQ ID NO: 660798 - protein, 12 aa, Homo sapiens
  CDR3 for beta chain variable domain of TCR clone 330399 (TRBV28, TRBJ2-7)
CASSGRPYEQYF

SEQ ID NO: 660799 - protein, 12 aa, Homo sapiens
  CDR3 for alpha chain variable domain of TCR clone 330400 (TRAV3, TRAJ43)
CAVRGPNNDMRF

SEQ ID NO: 660800 - protein, 15 aa, Homo sapiens
  CDR3 for beta chain variable domain of TCR clone 330400 (TRBV27, TRBJ1-5)
CASSLGTGFDQPQQF

SEQ ID NO: 660801 - protein, 13 aa, Homo sapiens
  CDR3 for alpha chain variable domain of TCR clone 330401 (TRAV21, TRAJ24)
GLMTTDSWGKLRF

SEQ ID NO: 660802 - protein, 12 aa, Homo sapiens
  CDR3 for beta chain variable domain of TCR clone 330401 (TRBV11-2, TRBJ2-7)
CASSPPADEQYF

SEQ ID NO: 660803 - protein, 11 aa, Homo sapiens
  CDR3 for alpha chain variable domain of TCR clone 330402 (TRAV1-2, TRAJ31)
CAVKNNARLMF

SEQ ID NO: 660804 - protein, 12 aa, Homo sapiens
  CDR3 for beta chain variable domain of TCR clone 330402 (TRBV28, TRBJ2-3)
CASSLYRDTQYF

SEQ ID NO: 660805 - protein, 15 aa, Homo sapiens
  CDR3 for alpha chain variable domain of TCR clone 330403 (TRAV26-1, TRAJ29)
CIVRVEGSVNTPLAF

SEQ ID NO: 660806 - protein, 15 aa, Homo sapiens
  CDR3 for beta chain variable domain of TCR clone 330403 (TRBV7-9, TRBJ1-5)
CASSQGHQPNQPQHF

SEQ ID NO: 660807 - protein, 13 aa, Homo sapiens
  CDR3 for alpha chain variable domain of TCR clone 330404 (TRAV36/DV7, TRAJ37)
CAVFSSNTGKPIF

SEQ ID NO: 660808 - protein, 11 aa, Homo sapiens
  CDR3 for beta chain variable domain of TCR clone 330404 (TRBV11-2, TRBJ1-1)
CASSINTEAFF

SEQ ID NO: 660809 - protein, 16 aa, Homo sapiens
  CDR3 for alpha chain variable domain of TCR clone 330405 (TRAV12-3, TRAJ53)
CAMSPGSGGSNYKLKF

SEQ ID NO: 660810 - protein, 11 aa, Homo sapiens
  CDR3 for beta chain variable domain of TCR clone 330405 (TRBV29-1, TRBJ2-5)
CSEDRTGTQYF

SEQ ID NO: 660811 - protein, 12 aa, Homo sapiens
  CDR3 for alpha chain variable domain of TCR clone 330406 (TRAV12-2, TRAJ4)
GWPEGGYNKLIF

SEQ ID NO: 660812 - protein, 16 aa, Homo sapiens
  CDR3 for beta chain variable domain of TCR clone 330406 (TRBV6-1, TRBJ2-5)
CASSEALDRGAETQYF

SEQ ID NO: 660813 - protein, 17 aa, Homo sapiens
  CDR3 for alpha chain variable domain of TCR clone 330407 (TRAV3, TRAJ6)
CAVRDGPRAVGSYIPTF

SEQ ID NO: 660814 - protein, 15 aa, Homo sapiens
  CDR3 for beta chain variable domain of TCR clone 330407 (TRBV4-1, TRBJ1-4)
CASSDTGGTNEKLFF

SEQ ID NO: 660815 - protein, 19 aa, Homo sapiens
  CDR3 for alpha chain variable domain of TCR clone 330408 (TRAV1-2, TRAJ26)
CLLPLCCERPDNYGQNFVF

SEQ ID NO: 660816 - protein, 14 aa, Homo sapiens
  CDR3 for beta chain variable domain of TCR clone 330408 (TRBV2, TRBJ2-7)
CASSLTSGGYEQYF

SEQ ID NO: 660817 - protein, 14 aa, Homo sapiens
  CDR3 for alpha chain variable domain of TCR clone 330409 (TRAV21, TRAJ21)
CAGKGFGNSNKFYF

SEQ ID NO: 660818 - protein, 13 aa, Homo sapiens
  CDR3 for beta chain variable domain of TCR clone 330409 (TRBV18, TRBJ1-1)
CASSPETKPEAFF

SEQ ID NO: 660819 - protein, 14 aa, Homo sapiens
  CDR3 for alpha chain variable domain of TCR clone 330410 (TRAV2, TRAJ37)
CAVDFTSTTGKLIF

SEQ ID NO: 660820 - protein, 15 aa, Homo sapiens
  CDR3 for beta chain variable domain of TCR clone 330410 (TRBV20-1, TRBJ1-1)
CSARRGVTGNTEAFF

SEQ ID NO: 660821 - protein, 14 aa, Homo sapiens
  CDR3 for alpha chain variable domain of TCR clone 330411 (TRAV12-1, TRAJ23)
CVVIVYNQGGKLIF

SEQ ID NO: 660822 - protein, 15 aa, Homo sapiens
  CDR3 for beta chain variable domain of TCR clone 330411 (TRBV20-1, TRBJ1-5)
CSARPPGQGPQAQHF

SEQ ID NO: 660823 - protein, 23 aa, Homo sapiens
  CDR3 for alpha chain variable domain of TCR clone 330412 (TRAV26-1, )
CIADNAGNNNIQNPDPSVYQLRD

SEQ ID NO: 660824 - protein, 13 aa, Homo sapiens
  CDR3 for beta chain variable domain of TCR clone 330412 (TRBV20-1, TRBJ1-1)
CSARGGGNTEAFF

SEQ ID NO: 660825 - protein, 15 aa, Homo sapiens
  CDR3 for alpha chain variable domain of TCR clone 330413 (TRAV3, TRAJ9)
CAVRASNTGGFKTIF

SEQ ID NO: 660826 - protein, 16 aa, Homo sapiens
  CDR3 for beta chain variable domain of TCR clone 330413 (TRBV15, TRBJ2-5)
CATSPTTGQGMETQYF

SEQ ID NO: 660827 - protein, 16 aa, Homo sapiens
  CDR3 for alpha chain variable domain of TCR clone 330414 (TRAV4, TRAJ37)
CLVGWFGSSNAGKLIF

SEQ ID NO: 660828 - protein, 15 aa, Homo sapiens
  CDR3 for beta chain variable domain of TCR clone 330414 (TRBV12-4, TRBJ2-3)
CASSLAERPTDTQYF

SEQ ID NO: 660829 - protein, 13 aa, Homo sapiens
  CDR3 for alpha chain variable domain of TCR clone 330415 (TRAV27, TRAJ49)
CAPRPYTGNQFYF

SEQ ID NO: 660830 - protein, 18 aa, Homo sapiens
  CDR3 for beta chain variable domain of TCR clone 330415 (TRBV7-3, TRBJ2-5)
CGSSLGGAAQGRWETQYF

SEQ ID NO: 660831 - protein, 13 aa, Homo sapiens
  CDR3 for alpha chain variable domain of TCR clone 330416 (TRAV13-1, TRAJ40)
CAASKGGTYKYIF

SEQ ID NO: 660832 - protein, 13 aa, Homo sapiens
  CDR3 for beta chain variable domain of TCR clone 330416 (TRBV7-6, TRBJ1-2)
CASSLVADGGYTF

SEQ ID NO: 660833 - protein, 14 aa, Homo sapiens
  CDR3 for alpha chain variable domain of TCR clone 330417 (TRAV12-3, TRAJ5)
CAMTWDTGGRALTF

SEQ ID NO: 660834 - protein, 14 aa, Homo sapiens
  CDR3 for beta chain variable domain of TCR clone 330417 (TRBV10-2, TRBJ1-5)
CASSSTGRNQPQHF

SEQ ID NO: 660835 - protein, 14 aa, Homo sapiens
  CDR3 for alpha chain variable domain of TCR clone 330418 (TRAV17, TRAJ57)
CATDPQGGSEKLVF

SEQ ID NO: 660836 - protein, 13 aa, Homo sapiens
  CDR3 for beta chain variable domain of TCR clone 330418 (TRBV28, TRBJ2-2)
CASIGGLGGELFF

SEQ ID NO: 660837 - protein, 12 aa, Homo sapiens
  CDR3 for alpha chain variable domain of TCR clone 330419 (TRAV36/DV7, TRAJ37)
CACYGNTGKLIF

SEQ ID NO: 660838 - protein, 18 aa, Homo sapiens
  CDR3 for beta chain variable domain of TCR clone 330419 (TRBV12-4, TRBJ2-4)
CASSRTGAVDVAKNIQYF

SEQ ID NO: 660839 - protein, 12 aa, Homo sapiens
  CDR3 for alpha chain variable domain of TCR clone 330420 (TRAV8-3, TRAJ26)
CAGDHYGQNFVF

SEQ ID NO: 660840 - protein, 13 aa, Homo sapiens
  CDR3 for beta chain variable domain of TCR clone 330420 (TRBV20-1, TRBJ1-1)
CSAPLGGGTEAFF

SEQ ID NO: 660841 - protein, 14 aa, Homo sapiens
  CDR3 for alpha chain variable domain of TCR clone 330421 (TRAV1-2, TRAJ16)
CAVNRFSDGQKLLF

SEQ ID NO: 660842 - protein, 13 aa, Homo sapiens
  CDR3 for beta chain variable domain of TCR clone 330421 (TRBV4-1, TRBJ2-2)
CASSQENTGELVF

SEQ ID NO: 660843 - protein, 13 aa, Homo sapiens
  CDR3 for alpha chain variable domain of TCR clone 330422 (TRAV13-2, TRAJ13)
CAERPGGYPKVTF

SEQ ID NO: 660844 - protein, 15 aa, Homo sapiens
  CDR3 for beta chain variable domain of TCR clone 330422 (TRBV11-3, TRBJ2-7)
CASSPGPASSYEQYF

SEQ ID NO: 660845 - protein, 16 aa, Homo sapiens
  CDR3 for alpha chain variable domain of TCR clone 330423 (TRAV30, TRAJ24)
CGTEIVDADSWGKFQF

SEQ ID NO: 660846 - protein, 14 aa, Homo sapiens
  CDR3 for beta chain variable domain of TCR clone 330423 (TRBV5-5, TRBJ1-2)
CASSLDPYDYGYTF

SEQ ID NO: 660847 - protein, 11 aa, Homo sapiens
  CDR3 for alpha chain variable domain of TCR clone 330424 (TRAV12-3, TRAJ43)
CAMSGYNDMRF

SEQ ID NO: 660848 - protein, 12 aa, Homo sapiens
  CDR3 for beta chain variable domain of TCR clone 330424 (TRBV20-1, TRBJ1-1)
QCSTWGGTEAFF

SEQ ID NO: 660849 - protein, 13 aa, Homo sapiens
  CDR3 for alpha chain variable domain of TCR clone 330425 (TRAV3, TRAJ15)
CAVRDQAGTALIF

SEQ ID NO: 660850 - protein, 15 aa, Homo sapiens
  CDR3 for beta chain variable domain of TCR clone 330425 (TRBV11-1, TRBJ2-7)
YASSLNYGASYEQYF

SEQ ID NO: 660851 - protein, 13 aa, Homo sapiens
  CDR3 for alpha chain variable domain of TCR clone 330426 (TRAV21, TRAJ45)
CAVMGVGADGLTF

SEQ ID NO: 660852 - protein, 14 aa, Homo sapiens
  CDR3 for beta chain variable domain of TCR clone 330426 (TRBV4-3, TRBJ1-4)
CASSPLQRNEKLFF

SEQ ID NO: 660853 - protein, 17 aa, Homo sapiens
  CDR3 for alpha chain variable domain of TCR clone 330427 (TRAV13-1, TRAJ53)
CAASWKSSGGSNYKLTF

SEQ ID NO: 660854 - protein, 19 aa, Homo sapiens
  CDR3 for beta chain variable domain of TCR clone 330427 (TRBV7-9, TRBJ2-1)
CARSHNRGALLRSYNEQFF

SEQ ID NO: 660855 - protein, 11 aa, Homo sapiens
  CDR3 for alpha chain variable domain of TCR clone 330428 (TRAV20, TRAJ23)
CACNQGGKLIF

SEQ ID NO: 660856 - protein, 14 aa, Homo sapiens
  CDR3 for beta chain variable domain of TCR clone 330428 (TRBV7-2, TRBJ2-2)
CASRGQGAAGELFF

SEQ ID NO: 660857 - protein, 14 aa, Homo sapiens
  CDR3 for alpha chain variable domain of TCR clone 330429 (TRAV12-3, TRAJ10)
SHLPLTGGRNKLTF

SEQ ID NO: 660858 - protein, 12 aa, Homo sapiens
  CDR3 for beta chain variable domain of TCR clone 330429 (TRBV5-4, TRBJ2-5)
CASSSTRETQYF

SEQ ID NO: 660859 - protein, 14 aa, Homo sapiens
  CDR3 for alpha chain variable domain of TCR clone 330430 (TRAV1-2, TRAJ16)
CAVNRFSDGQKLLF

SEQ ID NO: 660860 - protein, 15 aa, Homo sapiens
  CDR3 for beta chain variable domain of TCR clone 330430 (TRBV5-1, TRBJ1-1)
CASSWTGRGNTEAFF

SEQ ID NO: 660861 - protein, 21 aa, Homo sapiens
  CDR3 for alpha chain variable domain of TCR clone 330431 (TRAV17, TRAJ57)
RASRAADTASYFCANPEKLVF

SEQ ID NO: 660862 - protein, 16 aa, Homo sapiens
  CDR3 for beta chain variable domain of TCR clone 330431 (TRBV11-2, TRBJ2-3)
CASSFQGRGALDTQYF

SEQ ID NO: 660863 - protein, 10 aa, Homo sapiens
  CDR3 for alpha chain variable domain of TCR clone 330432 (TRAV30, TRAJ48)
CGIGNEKLTF

SEQ ID NO: 660864 - protein, 16 aa, Homo sapiens
  CDR3 for beta chain variable domain of TCR clone 330432 (TRBV27, TRBJ2-1)
SMNVEPGTSGDNAQFF

SEQ ID NO: 660865 - protein, 16 aa, Homo sapiens
  CDR3 for alpha chain variable domain of TCR clone 330433 (TRAV26-1, TRAJ52)
SIVSNAGGTSYGKLTF

SEQ ID NO: 660866 - protein, 16 aa, Homo sapiens
  CDR3 for beta chain variable domain of TCR clone 330433 (TRBV5-1, TRBJ2-1)
CASSLEGRGLYNEQIF

SEQ ID NO: 660867 - protein, 15 aa, Homo sapiens
  CDR3 for alpha chain variable domain of TCR clone 330434 (TRAV12-2, TRAJ43)
CAFDMRFGAGTRLTV

SEQ ID NO: 660868 - protein, 12 aa, Homo sapiens
  CDR3 for beta chain variable domain of TCR clone 330434 (TRBV12-5, TRBJ2-5)
CASGQGVETQYF

SEQ ID NO: 660869 - protein, 16 aa, Homo sapiens
  CDR3 for alpha chain variable domain of TCR clone 330435 (TRAV17, TRAJ28)
CATASVSGAGSYQLTF

SEQ ID NO: 660870 - protein, 11 aa, Homo sapiens
  CDR3 for beta chain variable domain of TCR clone 330435 (TRBV7-9, TRBJ2-5)
CASSWGETQYF

SEQ ID NO: 660871 - protein, 17 aa, Homo sapiens
  CDR3 for alpha chain variable domain of TCR clone 330436 (TRAV13-1, TRAJ52)
CAASSGAGGTSYGKLTF

SEQ ID NO: 660872 - protein, 14 aa, Homo sapiens
  CDR3 for beta chain variable domain of TCR clone 330436 (TRBV2, TRBJ2-1)
CSSELAGIYNEQFF

SEQ ID NO: 660873 - protein, 12 aa, Homo sapiens
  CDR3 for alpha chain variable domain of TCR clone 330437 (TRAV26-2, TRAJ21)
CILKGNFNKFYF

SEQ ID NO: 660874 - protein, 14 aa, Homo sapiens
  CDR3 for beta chain variable domain of TCR clone 330437 (TRBV7-9, TRBJ1-1)
CAGTPLQSYTEAVF

SEQ ID NO: 660875 - protein, 11 aa, Homo sapiens
  CDR3 for alpha chain variable domain of TCR clone 330438 (TRAV17, TRAJ43)
CATPRSNDMRF

SEQ ID NO: 660876 - protein, 13 aa, Homo sapiens
  CDR3 for beta chain variable domain of TCR clone 330438 (TRBV20-1, TRBJ1-1)
CSARGGGNTEAFF

SEQ ID NO: 660877 - protein, 13 aa, Homo sapiens
  CDR3 for alpha chain variable domain of TCR clone 330439 (TRAV8-1, TRAJ23)
CAWRDNQGGKLIF

SEQ ID NO: 660878 - protein, 17 aa, Homo sapiens
  CDR3 for beta chain variable domain of TCR clone 330439 (TRBV11-3, TRBJ1-1)
CASSATDRAALKLSLDK

SEQ ID NO: 660879 - protein, 13 aa, Homo sapiens
  CDR3 for alpha chain variable domain of TCR clone 330440 (TRAV16, TRAJ10)
CAPAREEETNTPL

SEQ ID NO: 660880 - protein, 14 aa, Homo sapiens
  CDR3 for beta chain variable domain of TCR clone 330440 (TRBV7-2, TRBJ2-7)
CASRSQGAAYEQYF

SEQ ID NO: 660881 - protein, 14 aa, Homo sapiens
  CDR3 for alpha chain variable domain of TCR clone 330441 (TRAV12-2, TRAJ44)
CAVNPAVTASKLTF

SEQ ID NO: 660882 - protein, 13 aa, Homo sapiens
  CDR3 for beta chain variable domain of TCR clone 330441 (TRBV20-1, TRBJ1-6)
CSAPLGVGSPLYF

SEQ ID NO: 660883 - protein, 14 aa, Homo sapiens
  CDR3 for alpha chain variable domain of TCR clone 330442 (TRAV4, TRAJ17)
CLVGDMAAGNKLTF

SEQ ID NO: 660884 - protein, 14 aa, Homo sapiens
  CDR3 for beta chain variable domain of TCR clone 330442 (TRBV7-2, TRBJ2-3)
CASSRTSGADTQYF

SEQ ID NO: 660885 - protein, 23 aa, Homo sapiens
  CDR3 for alpha chain variable domain of TCR clone 330443 (TRAV30, TRAJ43)
CTLRPPSSVTQEPTSAALSDMRF

SEQ ID NO: 660886 - protein, 13 aa, Homo sapiens
  CDR3 for beta chain variable domain of TCR clone 330443 (TRBV12-4, TRBJ2-2)
CASSMTGSGELFF

SEQ ID NO: 660887 - protein, 14 aa, Homo sapiens
  CDR3 for alpha chain variable domain of TCR clone 330444 (TRAV29/DV5, TRAJ32)
CAAAYGGATNKRIF

SEQ ID NO: 660888 - protein, 11 aa, Homo sapiens
  CDR3 for beta chain variable domain of TCR clone 330444 (TRBV11-2, TRBJ2-2)
CASSLPGELFF

SEQ ID NO: 660889 - protein, 14 aa, Homo sapiens
  CDR3 for alpha chain variable domain of TCR clone 330445 (TRAV1-2, TRAJ16)
CAVNRFSDGQKLLF

SEQ ID NO: 660890 - protein, 16 aa, Homo sapiens
  CDR3 for beta chain variable domain of TCR clone 330445 (TRBV11-2, TRBJ1-1)
CASSLRPGGEHSKAFF

SEQ ID NO: 660891 - protein, 12 aa, Homo sapiens
  CDR3 for alpha chain variable domain of TCR clone 330446 (TRAV13-2, TRAJ23)
CAERHRGGKLIF

SEQ ID NO: 660892 - protein, 14 aa, Homo sapiens
  CDR3 for beta chain variable domain of TCR clone 330446 (TRBV20-1, TRBJ1-1)
CSAQTRSGGTEAFF

SEQ ID NO: 660893 - protein, 15 aa, Homo sapiens
  CDR3 for alpha chain variable domain of TCR clone 330447 (TRAV38-1, TRAJ37)
CAFIFGSGNTGKLIF

SEQ ID NO: 660894 - protein, 18 aa, Homo sapiens
  CDR3 for beta chain variable domain of TCR clone 330447 (TRBV11-2, TRBJ2-3)
CASSLGGASRGAPNTQYF

SEQ ID NO: 660895 - protein, 11 aa, Homo sapiens
  CDR3 for alpha chain variable domain of TCR clone 330448 (TRAV2, TRAJ33)
CAVDSNYQLIW

SEQ ID NO: 660896 - protein, 17 aa, Homo sapiens
  CDR3 for beta chain variable domain of TCR clone 330448 (TRBV13, TRBJ2-3)
CASSLSRVAGGRSTQYF

SEQ ID NO: 660897 - protein, 15 aa, Homo sapiens
  CDR3 for alpha chain variable domain of TCR clone 330449 (TRAV35, TRAJ40)
CAGQLGQAGTYKYIF

SEQ ID NO: 660898 - protein, 14 aa, Homo sapiens
  CDR3 for beta chain variable domain of TCR clone 330449 (TRBV7-3, TRBJ2-1)
CASSLTGGANEQFL

SEQ ID NO: 660899 - protein, 12 aa, Homo sapiens
  CDR3 for alpha chain variable domain of TCR clone 330450 (TRAV35, TRAJ39)
LAPNNAGYMLTF

SEQ ID NO: 660900 - protein, 16 aa, Homo sapiens
  CDR3 for beta chain variable domain of TCR clone 330450 (TRBV2, TRBJ2-3)
CASSTSVEGVTDTQYF

SEQ ID NO: 660901 - protein, 15 aa, Homo sapiens
  CDR3 for alpha chain variable domain of TCR clone 330451 (TRAV17, TRAJ57)
CATDWTPGGSEKPVF

SEQ ID NO: 660902 - protein, 15 aa, Homo sapiens
  CDR3 for beta chain variable domain of TCR clone 330451 (TRBV27, TRBJ2-1)
CASSLAGGPFNEQFF

SEQ ID NO: 660903 - protein, 12 aa, Homo sapiens
  CDR3 for alpha chain variable domain of TCR clone 330452 (TRAV17, TRAJ12)
CAGGDSSYKLIF

SEQ ID NO: 660904 - protein, 20 aa, Homo sapiens
  CDR3 for beta chain variable domain of TCR clone 330452 (TRBV19, TRBJ2-1)
CASSISRTVTSTRLNNEQFF

SEQ ID NO: 660905 - protein, 13 aa, Homo sapiens
  CDR3 for alpha chain variable domain of TCR clone 330453 (TRAV3, TRAJ21)
CAVREPDFNKFYF

SEQ ID NO: 660906 - protein, 15 aa, Homo sapiens
  CDR3 for beta chain variable domain of TCR clone 330453 (TRBV20-1, TRBJ2-7)
CSARDPVKGEGEQYF

SEQ ID NO: 660907 - protein, 15 aa, Homo sapiens
  CDR3 for alpha chain variable domain of TCR clone 330454 (TRAV26-1, TRAJ53)
CIVRVEGGSNYRLTF

SEQ ID NO: 660908 - protein, 14 aa, Homo sapiens
  CDR3 for beta chain variable domain of TCR clone 330454 (TRBV4-3, TRBJ2-1)
CASSRDRWRGEQFF

SEQ ID NO: 660909 - protein, 12 aa, Homo sapiens
  CDR3 for alpha chain variable domain of TCR clone 330455 (TRAV2, TRAJ5)
CASDTGRRALTF

SEQ ID NO: 660910 - protein, 16 aa, Homo sapiens
  CDR3 for beta chain variable domain of TCR clone 330455 (TRBV20-1, TRBJ1-4)
CSAPGQGLLTNEKLFF

SEQ ID NO: 660911 - protein, 14 aa, Homo sapiens
  CDR3 for alpha chain variable domain of TCR clone 330456 (TRAV26-1, TRAJ45)
CIEVTGGGADGLTF

SEQ ID NO: 660912 - protein, 14 aa, Homo sapiens
  CDR3 for beta chain variable domain of TCR clone 330456 (TRBV7-2, TRBJ1-1)
CASSFLTGTTEAFF

SEQ ID NO: 660913 - protein, 13 aa, Homo sapiens
  CDR3 for alpha chain variable domain of TCR clone 330457 (TRAV21, TRAJ27)
CAARPGNAGKSTF

SEQ ID NO: 660914 - protein, 11 aa, Homo sapiens
  CDR3 for beta chain variable domain of TCR clone 330457 (TRBV25-1, TRBJ2-1)
CASSEFKWQFF

SEQ ID NO: 660915 - protein, 17 aa, Homo sapiens
  CDR3 for alpha chain variable domain of TCR clone 330458 (TRAV23/DV6, TRAJ57)
CAASSTRSQGGSEKLVF

SEQ ID NO: 660916 - protein, 14 aa, Homo sapiens
  CDR3 for beta chain variable domain of TCR clone 330458 (TRBV25-1, TRBJ1-1)
CASTHLGGNTEAFF

SEQ ID NO: 660917 - protein, 14 aa, Homo sapiens
  CDR3 for alpha chain variable domain of TCR clone 330459 (TRAV1-2, TRAJ8)
CAVREDTGFQKLVF

SEQ ID NO: 660918 - protein, 14 aa, Homo sapiens
  CDR3 for beta chain variable domain of TCR clone 330459 (TRBV6-3, TRBJ2-7)
CGSSPGTVFYEQYF

SEQ ID NO: 660919 - protein, 14 aa, Homo sapiens
  CDR3 for alpha chain variable domain of TCR clone 330460 (TRAV26-1, TRAJ38)
CIADDAGNNRKLIW

SEQ ID NO: 660920 - protein, 17 aa, Homo sapiens
  CDR3 for beta chain variable domain of TCR clone 330460 (TRBV13, TRBJ2-3)
CASSLSRVAGGRNTQYF

SEQ ID NO: 660921 - protein, 12 aa, Homo sapiens
  CDR3 for alpha chain variable domain of TCR clone 330461 (TRAV12-3, TRAJ17)
CAMTLTGNKLTF

SEQ ID NO: 660922 - protein, 16 aa, Homo sapiens
  CDR3 for beta chain variable domain of TCR clone 330461 (TRBV2, TRBJ2-2)
CASSAFGDANTGELFF

SEQ ID NO: 660923 - protein, 15 aa, Homo sapiens
  CDR3 for alpha chain variable domain of TCR clone 330462 (TRAV1-2, TRAJ28)
CAVQYSGAGSYQLTF

SEQ ID NO: 660924 - protein, 13 aa, Homo sapiens
  CDR3 for beta chain variable domain of TCR clone 330462 (TRBV4-2, TRBJ1-1)
CASSQAGNTGAFF

SEQ ID NO: 660925 - protein, 14 aa, Homo sapiens
  CDR3 for alpha chain variable domain of TCR clone 330463 (TRAV1-2, TRAJ16)
CAVNRFSDGQNLLF

SEQ ID NO: 660926 - protein, 15 aa, Homo sapiens
  CDR3 for beta chain variable domain of TCR clone 330463 (TRBV9, TRBJ1-6)
CASSVAGTGDSTLHF

SEQ ID NO: 660927 - protein, 16 aa, Homo sapiens
  CDR3 for alpha chain variable domain of TCR clone 330464 (TRAV26-1, TRAJ41)
CIVRVAVANSGYALNF

SEQ ID NO: 660928 - protein, 15 aa, Homo sapiens
  CDR3 for beta chain variable domain of TCR clone 330464 (TRBV11-3, TRBJ2-3)
CASLKDGREGDTQYF

SEQ ID NO: 660929 - protein, 11 aa, Homo sapiens
  CDR3 for alpha chain variable domain of TCR clone 330465 (TRAV9-2, TRAJ42)
CALSDSVDLIF

SEQ ID NO: 660930 - protein, 11 aa, Homo sapiens
  CDR3 for beta chain variable domain of TCR clone 330465 (TRBV6-3, TRBJ2-3)
CATGQADTQYF

SEQ ID NO: 660931 - protein, 16 aa, Homo sapiens
  CDR3 for alpha chain variable domain of TCR clone 330466 (TRAV12-1, TRAJ12)
CVVNTLLMDSSYKLIF

SEQ ID NO: 660932 - protein, 16 aa, Homo sapiens
  CDR3 for beta chain variable domain of TCR clone 330466 (TRBV7-2, TRBJ2-1)
CASSLVAGAGYNEQFF

SEQ ID NO: 660933 - protein, 13 aa, Homo sapiens
  CDR3 for alpha chain variable domain of TCR clone 330467 (TRAV13-1, TRAJ39)
CSKYSNAGNMLTF

SEQ ID NO: 660934 - protein, 13 aa, Homo sapiens
  CDR3 for beta chain variable domain of TCR clone 330467 (TRBV20-1, TRBJ1-1)
CSARVGGNTEAFF

SEQ ID NO: 660935 - protein, 12 aa, Homo sapiens
  CDR3 for alpha chain variable domain of TCR clone 330468 (TRAV12-3, TRAJ17)
CAMTRTGNKLTF

SEQ ID NO: 660936 - protein, 15 aa, Homo sapiens
  CDR3 for beta chain variable domain of TCR clone 330468 (TRBV6-4, TRBJ2-7)
CASSDQGPPNYEQYF

SEQ ID NO: 660937 - protein, 19 aa, Homo sapiens
  CDR3 for alpha chain variable domain of TCR clone 330469 (TRAV2, TRAJ20)
ILQVREADAAVYRDCKLRF

SEQ ID NO: 660938 - protein, 12 aa, Homo sapiens
  CDR3 for beta chain variable domain of TCR clone 330469 (TRBV11-2, TRBJ2-1)
CASSPGNNEQFF

SEQ ID NO: 660939 - protein, 18 aa, Homo sapiens
  CDR3 for alpha chain variable domain of TCR clone 330470 (TRAV12-2, )
CAVEDIQNLDPAVSQLRD

SEQ ID NO: 660940 - protein, 16 aa, Homo sapiens
  CDR3 for beta chain variable domain of TCR clone 330470 (TRBV6-1, TRBJ1-2)
CASSGAWQGRSHGYTF

SEQ ID NO: 660941 - protein, 14 aa, Homo sapiens
  CDR3 for alpha chain variable domain of TCR clone 330471 (TRAV2, TRAJ37)
CAVDFTSNTGKLIF

SEQ ID NO: 660942 - protein, 13 aa, Homo sapiens
  CDR3 for beta chain variable domain of TCR clone 330471 (TRBV19, TRBJ2-1)
CASNGGVFSEQFF

SEQ ID NO: 660943 - protein, 13 aa, Homo sapiens
  CDR3 for alpha chain variable domain of TCR clone 330472 (TRAV27, TRAJ29)
CAGAHSGNTPLVF

SEQ ID NO: 660944 - protein, 18 aa, Homo sapiens
  CDR3 for beta chain variable domain of TCR clone 330472 (TRBV6-6, TRBJ1-3)
CASSYSKWNSISGNTIYF

SEQ ID NO: 660945 - protein, 15 aa, Homo sapiens
  CDR3 for alpha chain variable domain of TCR clone 330473 (TRAV8-1, TRAJ6)
CAVNAGAGGSYMPTF

SEQ ID NO: 660946 - protein, 14 aa, Homo sapiens
  CDR3 for beta chain variable domain of TCR clone 330473 (TRBV25-1, TRBJ1-6)
CASSLSADISPLHF

SEQ ID NO: 660947 - protein, 14 aa, Homo sapiens
  CDR3 for alpha chain variable domain of TCR clone 330474 (TRAV2, TRAJ9)
CAVEDRSGGFKTIF

SEQ ID NO: 660948 - protein, 16 aa, Homo sapiens
  CDR3 for beta chain variable domain of TCR clone 330474 (TRBV7-3, TRBJ2-2)
CASSLKRGTLSGELFV

SEQ ID NO: 660949 - protein, 13 aa, Homo sapiens
  CDR3 for alpha chain variable domain of TCR clone 330475 (TRAV1-2, TRAJ9)
TSVLYTGGFKTIF

SEQ ID NO: 660950 - protein, 15 aa, Homo sapiens
  CDR3 for beta chain variable domain of TCR clone 330475 (TRBV11-2, TRBJ2-1)
CASSPAGQSLNEQFF

SEQ ID NO: 660951 - protein, 13 aa, Homo sapiens
  CDR3 for alpha chain variable domain of TCR clone 330476 (TRAV12-1, TRAJ26)
CVVRRNYGQNFVF

SEQ ID NO: 660952 - protein, 13 aa, Homo sapiens
  CDR3 for beta chain variable domain of TCR clone 330476 (TRBV11-1, TRBJ1-1)
CASSLARGSQAFF

SEQ ID NO: 660953 - protein, 12 aa, Homo sapiens
  CDR3 for alpha chain variable domain of TCR clone 330477 (TRAV24, TRAJ5)
CASYTGRRALTF

SEQ ID NO: 660954 - protein, 16 aa, Homo sapiens
  CDR3 for beta chain variable domain of TCR clone 330477 (TRBV11-3, TRBJ2-6)
CASSQGAGAGANVLTF

SEQ ID NO: 660955 - protein, 12 aa, Homo sapiens
  CDR3 for alpha chain variable domain of TCR clone 330478 (TRAV16, TRAJ26)
CALRSYGQNFVF

SEQ ID NO: 660956 - protein, 14 aa, Homo sapiens
  CDR3 for beta chain variable domain of TCR clone 330478 (TRBV10-3, TRBJ2-1)
CAVSSDLAYNEQFS

SEQ ID NO: 660957 - protein, 13 aa, Homo sapiens
  CDR3 for alpha chain variable domain of TCR clone 330479 (TRAV16, TRAJ11)
CALTQSGYSTLTF

SEQ ID NO: 660958 - protein, 14 aa, Homo sapiens
  CDR3 for beta chain variable domain of TCR clone 330479 (TRBV19, TRBJ2-7)
CASSTTRSSCEQYF

SEQ ID NO: 660959 - protein, 14 aa, Homo sapiens
  CDR3 for alpha chain variable domain of TCR clone 330480 (TRAV1-2, TRAJ16)
CAVNRFSDVQKLLF

SEQ ID NO: 660960 - protein, 14 aa, Homo sapiens
  CDR3 for beta chain variable domain of TCR clone 330480 (TRBV7-2, TRBJ1-1)
CASSFLTGTTEAFF

SEQ ID NO: 660961 - protein, 16 aa, Homo sapiens
  CDR3 for alpha chain variable domain of TCR clone 330481 (TRAV12-2, TRAJ32)
CAVNWGQGGATNKLIF

SEQ ID NO: 660962 - protein, 15 aa, Homo sapiens
  CDR3 for beta chain variable domain of TCR clone 330481 (TRBV20-1, TRBJ2-7)
CSARGPLAGGREQYF

SEQ ID NO: 660963 - protein, 12 aa, Homo sapiens
  CDR3 for alpha chain variable domain of TCR clone 330482 (TRAV12-3, TRAJ20)
CAMVRGDYKLSF

SEQ ID NO: 660964 - protein, 12 aa, Homo sapiens
  CDR3 for beta chain variable domain of TCR clone 330482 (TRBV6-1, TRBJ2-7)
CASSDYTYEQYF

SEQ ID NO: 660965 - protein, 13 aa, Homo sapiens
  CDR3 for alpha chain variable domain of TCR clone 330483 (TRAV8-3, TRAJ43)
CAVGPDNNNDMRF

SEQ ID NO: 660966 - protein, 12 aa, Homo sapiens
  CDR3 for beta chain variable domain of TCR clone 330483 (TRBV7-2, TRBJ1-6)
CASSLSSSLLHF

SEQ ID NO: 660967 - protein, 15 aa, Homo sapiens
  CDR3 for alpha chain variable domain of TCR clone 330484 (TRAV26-1, TRAJ29)
CIVRVEGSGNTPLVF

SEQ ID NO: 660968 - protein, 12 aa, Homo sapiens
  CDR3 for beta chain variable domain of TCR clone 330484 (TRBV6-3, TRBJ2-7)
CASSLTPYEQYF

SEQ ID NO: 660969 - protein, 15 aa, Homo sapiens
  CDR3 for alpha chain variable domain of TCR clone 330485 (TRAV26-1, TRAJ29)
CIVRVEGSGNTPLVF

SEQ ID NO: 660970 - protein, 13 aa, Homo sapiens
  CDR3 for beta chain variable domain of TCR clone 330485 (TRBV7-2, TRBJ2-7)
CASSSPGSYEQYF

SEQ ID NO: 660971 - protein, 14 aa, Homo sapiens
  CDR3 for alpha chain variable domain of TCR clone 330486 (TRAV2, TRAJ29)
CAVASYSGNTPLVF

SEQ ID NO: 660972 - protein, 14 aa, Homo sapiens
  CDR3 for beta chain variable domain of TCR clone 330486 (TRBV11-2, TRBJ2-3)
CASSRLARTDTQYF

SEQ ID NO: 660973 - protein, 12 aa, Homo sapiens
  CDR3 for alpha chain variable domain of TCR clone 330487 (TRAV17, TRAJ21)
CALRYNLNKFYF

SEQ ID NO: 660974 - protein, 13 aa, Homo sapiens
  CDR3 for beta chain variable domain of TCR clone 330487 (TRBV24-1, TRBJ2-5)
CATSTGGTETQYF

SEQ ID NO: 660975 - protein, 12 aa, Homo sapiens
  CDR3 for alpha chain variable domain of TCR clone 330488 (TRAV30, TRAJ43)
CGTEERGNDMSF

SEQ ID NO: 660976 - protein, 14 aa, Homo sapiens
  CDR3 for beta chain variable domain of TCR clone 330488 (TRBV7-2, TRBJ2-7)
CASSPKTSFYEQYF

SEQ ID NO: 660977 - protein, 13 aa, Homo sapiens
  CDR3 for alpha chain variable domain of TCR clone 330489 (TRAV2, TRAJ15)
CAVASQAGTALIF

SEQ ID NO: 660978 - protein, 16 aa, Homo sapiens
  CDR3 for beta chain variable domain of TCR clone 330489 (TRBV18, TRBJ1-5)
CASSPYSVEGNQPQHF

SEQ ID NO: 660979 - protein, 16 aa, Homo sapiens
  CDR3 for alpha chain variable domain of TCR clone 330490 (TRAV3, TRAJ10)
CAVRDMRAGGGNKLTF

SEQ ID NO: 660980 - protein, 12 aa, Homo sapiens
  CDR3 for beta chain variable domain of TCR clone 330490 (TRBV2, TRBJ2-1)
CDYGPPGNEQFF

SEQ ID NO: 660981 - protein, 10 aa, Homo sapiens
  CDR3 for alpha chain variable domain of TCR clone 330491 (TRAV13-2, TRAJ49)
CADTGNQFYF

SEQ ID NO: 660982 - protein, 13 aa, Homo sapiens
  CDR3 for beta chain variable domain of TCR clone 330491 (TRBV7-7, TRBJ2-3)
CASSLSRADTQYF

SEQ ID NO: 660983 - protein, 14 aa, Homo sapiens
  CDR3 for alpha chain variable domain of TCR clone 330492 (TRAV12-2, TRAJ17)
CAVLFKAAGNKLTF

SEQ ID NO: 660984 - protein, 17 aa, Homo sapiens
  CDR3 for beta chain variable domain of TCR clone 330492 (TRBV20-1, TRBJ2-2)
CSASGSGQRGLTGELFF

SEQ ID NO: 660985 - protein, 11 aa, Homo sapiens
  CDR3 for alpha chain variable domain of TCR clone 330493 (TRAV21, TRAJ4)
HVSGGYNKLIF

SEQ ID NO: 660986 - protein, 13 aa, Homo sapiens
  CDR3 for beta chain variable domain of TCR clone 330493 (TRBV7-3, TRBJ2-5)
CASSLTAGENQYF

SEQ ID NO: 660987 - protein, 14 aa, Homo sapiens
  CDR3 for alpha chain variable domain of TCR clone 330494 (TRAV21, TRAJ11)
CAVRRNSGYSTLTF

SEQ ID NO: 660988 - protein, 13 aa, Homo sapiens
  CDR3 for beta chain variable domain of TCR clone 330494 (TRBV7-2, TRBJ2-2)
CASSSVRAGELFF

SEQ ID NO: 660989 - protein, 16 aa, Homo sapiens
  CDR3 for alpha chain variable domain of TCR clone 330495 (TRAV8-3, TRAJ28)
CAVPPQRGAGSYQLTF

SEQ ID NO: 660990 - protein, 14 aa, Homo sapiens
  CDR3 for beta chain variable domain of TCR clone 330495 (TRBV7-2, TRBJ2-7)
CASRSQGAAYEQYF

SEQ ID NO: 660991 - protein, 15 aa, Homo sapiens
  CDR3 for alpha chain variable domain of TCR clone 330496 (TRAV17, TRAJ42)
CATDHYGVSQGNLIF

SEQ ID NO: 660992 - protein, 14 aa, Homo sapiens
  CDR3 for beta chain variable domain of TCR clone 330496 (TRBV19, TRBJ2-5)
CASSIEHSQETQYF

SEQ ID NO: 660993 - protein, 15 aa, Homo sapiens
  CDR3 for alpha chain variable domain of TCR clone 330497 (TRAV3, TRAJ3)
CAVRDRDSSASKIIF

SEQ ID NO: 660994 - protein, 16 aa, Homo sapiens
  CDR3 for beta chain variable domain of TCR clone 330497 (TRBV7-9, TRBJ2-1)
CASSPRLGSSYNEQFF

SEQ ID NO: 660995 - protein, 11 aa, Homo sapiens
  CDR3 for alpha chain variable domain of TCR clone 330498 (TRAV2, TRAJ13)
CAYGGYQKVTF

SEQ ID NO: 660996 - protein, 15 aa, Homo sapiens
  CDR3 for beta chain variable domain of TCR clone 330498 (TRBV6-5, TRBJ2-1)
CASSYDAGAGNEQFF

SEQ ID NO: 660997 - protein, 13 aa, Homo sapiens
  CDR3 for alpha chain variable domain of TCR clone 330499 (TRAV3, TRAJ16)
CAVRDRNGQKLIF

SEQ ID NO: 660998 - protein, 15 aa, Homo sapiens
  CDR3 for beta chain variable domain of TCR clone 330499 (TRBV5-1, TRBJ2-1)
CASSPPRAPYNKQFF

SEQ ID NO: 660999 - protein, 13 aa, Homo sapiens
  CDR3 for alpha chain variable domain of TCR clone 330500 (TRAV20, TRAJ48)
CAMQGVGNEKLTF

SEQ ID NO: 661000 - protein, 14 aa, Homo sapiens
  CDR3 for beta chain variable domain of TCR clone 330500 (TRBV27, TRBJ2-7)
CASSFRDGPYEQYF

SEQ ID NO: 661001 - protein, 12 aa, Homo sapiens
  CDR3 for alpha chain variable domain of TCR clone 330501 (TRAV21, TRAJ33)
CAKMDSNYQLIW

SEQ ID NO: 661002 - protein, 13 aa, Homo sapiens
  CDR3 for beta chain variable domain of TCR clone 330501 (TRBV18, TRBJ2-5)
CASSLQGQETQHF

SEQ ID NO: 661003 - protein, 11 aa, Homo sapiens
  CDR3 for alpha chain variable domain of TCR clone 330502 (TRAV8-3, TRAJ34)
ASGYNTDKLIF

SEQ ID NO: 661004 - protein, 13 aa, Homo sapiens
  CDR3 for beta chain variable domain of TCR clone 330502 (TRBV6-4, TRBJ2-3)
CASSVSWADTQYF

SEQ ID NO: 661005 - protein, 22 aa, Homo sapiens
  CDR3 for alpha chain variable domain of TCR clone 330503 (TRAV12-3, TRAJ39)
IIDSQPSDSATYLSNAGNMLTF

SEQ ID NO: 661006 - protein, 13 aa, Homo sapiens
  CDR3 for beta chain variable domain of TCR clone 330503 (TRBV28, TRBJ1-2)
CASSPGSRNGYTF

SEQ ID NO: 661007 - protein, 14 aa, Homo sapiens
  CDR3 for alpha chain variable domain of TCR clone 330504 (TRAV1-2, TRAJ16)
CAVNRFLDGQKLLF

SEQ ID NO: 661008 - protein, 16 aa, Homo sapiens
  CDR3 for beta chain variable domain of TCR clone 330504 (TRBV13, TRBJ2-2)
CASSPRTGEHTGELFF

SEQ ID NO: 661009 - protein, 16 aa, Homo sapiens
  CDR3 for alpha chain variable domain of TCR clone 330505 (TRAV27, TRAJ13)
CAGAKSDSGGYQKVTF

SEQ ID NO: 661010 - protein, 13 aa, Homo sapiens
  CDR3 for beta chain variable domain of TCR clone 330505 (TRBV7-9, TRBJ2-3)
CASSPGSTDTQYF

SEQ ID NO: 661011 - protein, 17 aa, Homo sapiens
  CDR3 for alpha chain variable domain of TCR clone 330506 (TRAV26-1, TRAJ37)
CIVRVITVPSNTGKLIF

SEQ ID NO: 661012 - protein, 13 aa, Homo sapiens
  CDR3 for beta chain variable domain of TCR clone 330506 (TRBV7-3, TRBJ1-1)
CASSQDWGAEAFF

SEQ ID NO: 661013 - protein, 17 aa, Homo sapiens
  CDR3 for alpha chain variable domain of TCR clone 330507 (TRAV26-1, TRAJ53)
CIVRVDDSGGSNYKLTF

SEQ ID NO: 661014 - protein, 15 aa, Homo sapiens
  CDR3 for beta chain variable domain of TCR clone 330507 (TRBV20-1, TRBJ2-1)
CSARGIGGTYNEQFF

SEQ ID NO: 661015 - protein, 17 aa, Homo sapiens
  CDR3 for alpha chain variable domain of TCR clone 330508 (TRAV4, TRAJ13)
CLVGGQGSSGGYQKVTF

SEQ ID NO: 661016 - protein, 18 aa, Homo sapiens
  CDR3 for beta chain variable domain of TCR clone 330508 (TRBV15, TRBJ2-3)
CATSRDGARGWDTDTQYF

SEQ ID NO: 661017 - protein, 13 aa, Homo sapiens
  CDR3 for alpha chain variable domain of TCR clone 330509 (TRAV2, TRAJ13)
CAVESGGYQKVTF

SEQ ID NO: 661018 - protein, 13 aa, Homo sapiens
  CDR3 for beta chain variable domain of TCR clone 330509 (TRBV28, TRBJ2-5)
CASSFAGGEAQYF

SEQ ID NO: 661019 - protein, 15 aa, Homo sapiens
  CDR3 for alpha chain variable domain of TCR clone 330510 (TRAV3, TRAJ5)
CAVRDLDTGRRALTF

SEQ ID NO: 661020 - protein, 13 aa, Homo sapiens
  CDR3 for beta chain variable domain of TCR clone 330510 (TRBV12-4, TRBJ2-7)
CASSQTEAYEQYF

SEQ ID NO: 661021 - protein, 14 aa, Homo sapiens
  CDR3 for alpha chain variable domain of TCR clone 330511 (TRAV26-1, TRAJ38)
CIADDAGNNRKLIW

SEQ ID NO: 661022 - protein, 13 aa, Homo sapiens
  CDR3 for beta chain variable domain of TCR clone 330511 (TRBV2, TRBJ1-5)
CATAGPGNQPQHF

SEQ ID NO: 661023 - protein, 13 aa, Homo sapiens
  CDR3 for alpha chain variable domain of TCR clone 330512 (TRAV3, TRAJ16)
CAVRDRNGQKLLF

SEQ ID NO: 661024 - protein, 15 aa, Homo sapiens
  CDR3 for beta chain variable domain of TCR clone 330512 (TRBV5-1, TRBJ2-1)
GASSPPRAPYNEQFC

SEQ ID NO: 661025 - protein, 14 aa, Homo sapiens
  CDR3 for alpha chain variable domain of TCR clone 330513 (TRAV3, TRAJ9)
CAVRGNTGGFKTIF

SEQ ID NO: 661026 - protein, 12 aa, Homo sapiens
  CDR3 for beta chain variable domain of TCR clone 330513 (TRBV11-2, TRBJ2-2)
CASSLGGGELFF

SEQ ID NO: 661027 - protein, 16 aa, Homo sapiens
  CDR3 for alpha chain variable domain of TCR clone 330514 (TRAV8-4, TRAJ27)
CAVKEGGFTNAGKSTF

SEQ ID NO: 661028 - protein, 14 aa, Homo sapiens
  CDR3 for beta chain variable domain of TCR clone 330514 (TRBV12-5, TRBJ2-5)
CASGSRTHQETQYF

SEQ ID NO: 661029 - protein, 16 aa, Homo sapiens
  CDR3 for alpha chain variable domain of TCR clone 330515 (TRAV26-1, TRAJ53)
CIVRVAMGGSNYKLTF

SEQ ID NO: 661030 - protein, 14 aa, Homo sapiens
  CDR3 for beta chain variable domain of TCR clone 330515 (TRBV7-2, TRBJ2-7)
CASSPKTSFYEHYF

SEQ ID NO: 661031 - protein, 12 aa, Homo sapiens
  CDR3 for alpha chain variable domain of TCR clone 330516 (TRAV16, TRAJ13)
CITLRGYQKVTF

SEQ ID NO: 661032 - protein, 15 aa, Homo sapiens
  CDR3 for beta chain variable domain of TCR clone 330516 (TRBV9, TRBJ1-6)
CASSVAGTGDSPLHF

SEQ ID NO: 661033 - protein, 12 aa, Homo sapiens
  CDR3 for alpha chain variable domain of TCR clone 330517 (TRAV12-2, TRAJ31)
CAVNTPDARLMF

SEQ ID NO: 661034 - protein, 13 aa, Homo sapiens
  CDR3 for beta chain variable domain of TCR clone 330517 (TRBV10-3, TRBJ2-7)
CASKLAVNYEQYF

SEQ ID NO: 661035 - protein, 14 aa, Homo sapiens
  CDR3 for alpha chain variable domain of TCR clone 330518 (TRAV16, TRAJ33)
CALSAMDSNYQLIW

SEQ ID NO: 661036 - protein, 12 aa, Homo sapiens
  CDR3 for beta chain variable domain of TCR clone 330518 (TRBV7-9, TRBJ2-7)
CASSFGSYEQYF

SEQ ID NO: 661037 - protein, 14 aa, Homo sapiens
  CDR3 for alpha chain variable domain of TCR clone 330519 (TRAV8-3, TRAJ39)
CAVGANNAGNILTF

SEQ ID NO: 661038 - protein, 19 aa, Homo sapiens
  CDR3 for beta chain variable domain of TCR clone 330519 (TRBV25-1, TRBJ2-2)
CAILVYRVDRGRKTGELFF

SEQ ID NO: 661039 - protein, 16 aa, Homo sapiens
  CDR3 for alpha chain variable domain of TCR clone 330520 (TRAV30, TRAJ24)
CGTEIVDADSWGKFQS

SEQ ID NO: 661040 - protein, 15 aa, Homo sapiens
  CDR3 for beta chain variable domain of TCR clone 330520 (TRBV7-9, TRBJ1-4)
CASSARTGGNEKLFF

SEQ ID NO: 661041 - protein, 14 aa, Homo sapiens
  CDR3 for alpha chain variable domain of TCR clone 330521 (TRAV1-2, TRAJ8)
CAVRGETGFQKLVF

SEQ ID NO: 661042 - protein, 15 aa, Homo sapiens
  CDR3 for beta chain variable domain of TCR clone 330521 (TRBV6-3, TRBJ2-7)
CASSSPGTVFYEQYF

SEQ ID NO: 661043 - protein, 15 aa, Homo sapiens
  CDR3 for alpha chain variable domain of TCR clone 330522 (TRAV12-2, TRAJ53)
CAVNGGGGSNYKLTF

SEQ ID NO: 661044 - protein, 17 aa, Homo sapiens
  CDR3 for beta chain variable domain of TCR clone 330522 (TRBV7-3, TRBJ2-3)
RASSLMKRMRGADTQYC

SEQ ID NO: 661045 - protein, 13 aa, Homo sapiens
  CDR3 for alpha chain variable domain of TCR clone 330523 (TRAV17, TRAJ7)
CATDNYGNNRLAF

SEQ ID NO: 661046 - protein, 16 aa, Homo sapiens
  CDR3 for beta chain variable domain of TCR clone 330523 (TRBV7-3, TRBJ2-1)
CASSLEGYRSYNEQFF

SEQ ID NO: 661047 - protein, 14 aa, Homo sapiens
  CDR3 for alpha chain variable domain of TCR clone 330524 (TRAV2, TRAJ9)
CAVEDRSGGFKTIF

SEQ ID NO: 661048 - protein, 12 aa, Homo sapiens
  CDR3 for beta chain variable domain of TCR clone 330524 (TRBV19, TRBJ2-7)
CASTSVGSEQYF

SEQ ID NO: 661049 - protein, 15 aa, Homo sapiens
  CDR3 for alpha chain variable domain of TCR clone 330525 (TRAV23/DV6, TRAJ18)
CAARYRGSTLGRLYF

SEQ ID NO: 661050 - protein, 15 aa, Homo sapiens
  CDR3 for beta chain variable domain of TCR clone 330525 (TRBV18, TRBJ1-1)
CASSPVTGSGTEAFF

SEQ ID NO: 661051 - protein, 14 aa, Homo sapiens
  CDR3 for alpha chain variable domain of TCR clone 330526 (TRAV20, TRAJ40)
CAVSLTSGTYKYIF

SEQ ID NO: 661052 - protein, 15 aa, Homo sapiens
  CDR3 for beta chain variable domain of TCR clone 330526 (TRBV19, TRBJ1-1)
CASTSGQIQNTEAFF

SEQ ID NO: 661053 - protein, 20 aa, Homo sapiens
  CDR3 for alpha chain variable domain of TCR clone 330527 (TRAV13-1, )
CAASPMDIQNPDPAVYQLRE

SEQ ID NO: 661054 - protein, 13 aa, Homo sapiens
  CDR3 for beta chain variable domain of TCR clone 330527 (TRBV20-1, TRBJ2-2)
CSASAAGTGELFF

SEQ ID NO: 661055 - protein, 14 aa, Homo sapiens
  CDR3 for alpha chain variable domain of TCR clone 330528 (TRAV6, TRAJ37)
CALGSQGNTGKLIF

SEQ ID NO: 661056 - protein, 15 aa, Homo sapiens
  CDR3 for beta chain variable domain of TCR clone 330528 (TRBV2, TRBJ2-1)
CASSEEREGDNGQFF

SEQ ID NO: 661057 - protein, 16 aa, Homo sapiens
  CDR3 for alpha chain variable domain of TCR clone 330529 (TRAV12-1, TRAJ53)
CVVTSVAGGSNYKLTF

SEQ ID NO: 661058 - protein, 11 aa, Homo sapiens
  CDR3 for beta chain variable domain of TCR clone 330529 (TRBV29-1, TRBJ2-5)
CSEDRTGTQYF

SEQ ID NO: 661059 - protein, 15 aa, Homo sapiens
  CDR3 for alpha chain variable domain of TCR clone 330530 (TRAV38-1, TRAJ37)
WAFIHGSGNTGKLIF

SEQ ID NO: 661060 - protein, 12 aa, Homo sapiens
  CDR3 for beta chain variable domain of TCR clone 330530 (TRBV7-9, TRBJ2-7)
CASSFGSYEQYF

SEQ ID NO: 661061 - protein, 16 aa, Homo sapiens
  CDR3 for alpha chain variable domain of TCR clone 330531 (TRAV27, TRAJ45)
CPTRGRRGGGADGLTF

SEQ ID NO: 661062 - protein, 16 aa, Homo sapiens
  CDR3 for beta chain variable domain of TCR clone 330531 (TRBV7-2, TRBJ1-3)
CASSRLEASSGNTIYF

SEQ ID NO: 661063 - protein, 12 aa, Homo sapiens
  CDR3 for alpha chain variable domain of TCR clone 330532 (TRAV12-3, TRAJ17)
CAMTLTGNKLTF

SEQ ID NO: 661064 - protein, 16 aa, Homo sapiens
  CDR3 for beta chain variable domain of TCR clone 330532 (TRBV27, TRBJ2-2)
CASSSSGVSNTGKLFS

SEQ ID NO: 661065 - protein, 18 aa, Homo sapiens
  CDR3 for alpha chain variable domain of TCR clone 330533 (TRAV29/DV5, TRAJ52)
CSAGFRGAGGTSYGKLAF

SEQ ID NO: 661066 - protein, 16 aa, Homo sapiens
  CDR3 for beta chain variable domain of TCR clone 330533 (TRBV7-3, TRBJ2-2)
CASSLKRGTLSGELFF

SEQ ID NO: 661067 - protein, 16 aa, Homo sapiens
  CDR3 for alpha chain variable domain of TCR clone 330534 (TRAV12-2, TRAJ52)
CAVANAGGTSYGKLTF

SEQ ID NO: 661068 - protein, 13 aa, Homo sapiens
  CDR3 for beta chain variable domain of TCR clone 330534 (TRBV10-3, TRBJ2-7)
CASKLAVNYEQYF

SEQ ID NO: 661069 - protein, 13 aa, Homo sapiens
  CDR3 for alpha chain variable domain of TCR clone 330535 (TRAV26-1, TRAJ30)
CIVRVESNDKIIF

SEQ ID NO: 661070 - protein, 17 aa, Homo sapiens
  CDR3 for beta chain variable domain of TCR clone 330535 (TRBV13, TRBJ2-3)
CASCLSRVAGGRNTQYF

SEQ ID NO: 661071 - protein, 17 aa, Homo sapiens
  CDR3 for alpha chain variable domain of TCR clone 330536 (TRAV3, TRAJ42)
GAVRDRDYGGSQGNLIF

SEQ ID NO: 661072 - protein, 15 aa, Homo sapiens
  CDR3 for beta chain variable domain of TCR clone 330536 (TRBV12-4, TRBJ2-5)
CASSPPTGLQETQYF

SEQ ID NO: 661073 - protein, 11 aa, Homo sapiens
  CDR3 for alpha chain variable domain of TCR clone 330537 (TRAV2, TRAJ13)
CASGGYQKVTF

SEQ ID NO: 661074 - protein, 14 aa, Homo sapiens
  CDR3 for beta chain variable domain of TCR clone 330537 (TRBV7-2, TRBJ2-7)
CASSPKTSFYEQYV

SEQ ID NO: 661075 - protein, 14 aa, Homo sapiens
  CDR3 for alpha chain variable domain of TCR clone 330538 (TRAV2, TRAJ22)
CAVGRGGSARQLTF

SEQ ID NO: 661076 - protein, 15 aa, Homo sapiens
  CDR3 for beta chain variable domain of TCR clone 330538 (TRBV7-9, TRBJ2-7)
CASSPGGGLTYEQYF

SEQ ID NO: 661077 - protein, 14 aa, Homo sapiens
  CDR3 for alpha chain variable domain of TCR clone 330539 (TRAV35, TRAJ33)
CAGSSQDSNYQLFW

SEQ ID NO: 661078 - protein, 15 aa, Homo sapiens
  CDR3 for beta chain variable domain of TCR clone 330539 (TRBV5-1, TRBJ1-4)
FAPAAWKDGNEKLFF

SEQ ID NO: 661079 - protein, 12 aa, Homo sapiens
  CDR3 for alpha chain variable domain of TCR clone 330540 (TRAV38-1, TRAJ32)
CAPLGATNKLIF

SEQ ID NO: 661080 - protein, 14 aa, Homo sapiens
  CDR3 for beta chain variable domain of TCR clone 330540 (TRBV18, TRBJ2-5)
CASSPGVSQETQYF

SEQ ID NO: 661081 - protein, 13 aa, Homo sapiens
  CDR3 for alpha chain variable domain of TCR clone 330541 (TRAV26-1, TRAJ30)
CIVRVESNDQIIF

SEQ ID NO: 661082 - protein, 15 aa, Homo sapiens
  CDR3 for beta chain variable domain of TCR clone 330541 (TRBV6-1, TRBJ2-3)
CASSERGGITDTQYF

SEQ ID NO: 661083 - protein, 14 aa, Homo sapiens
  CDR3 for alpha chain variable domain of TCR clone 330542 (TRAV1-2, TRAJ29)
CAVRELTSANPLVF

SEQ ID NO: 661084 - protein, 14 aa, Homo sapiens
  CDR3 for beta chain variable domain of TCR clone 330542 (TRBV3-1, TRBJ2-5)
CASSQGPDQETQYF

SEQ ID NO: 661085 - protein, 13 aa, Homo sapiens
  CDR3 for alpha chain variable domain of TCR clone 330543 (TRAV30, TRAJ34)
CGTVGYNTDELIF

SEQ ID NO: 661086 - protein, 16 aa, Homo sapiens
  CDR3 for beta chain variable domain of TCR clone 330543 (TRBV7-9, TRBJ1-2)
CASSLGFSSGEDGYAF

SEQ ID NO: 661087 - protein, 21 aa, Homo sapiens
  CDR3 for alpha chain variable domain of TCR clone 330544 (TRAV23/DV6, TRAJ4)
CISWIPSLETQPPTSVQHEIF

SEQ ID NO: 661088 - protein, 13 aa, Homo sapiens
  CDR3 for beta chain variable domain of TCR clone 330544 (TRBV7-2, TRBJ1-1)
CASSRNTNTEAFF

SEQ ID NO: 661089 - protein, 13 aa, Homo sapiens
  CDR3 for alpha chain variable domain of TCR clone 330545 (TRAV21, TRAJ42)
CAVGGGSQGNLIF

SEQ ID NO: 661090 - protein, 15 aa, Homo sapiens
  CDR3 for beta chain variable domain of TCR clone 330545 (TRBV20-1, TRBJ2-7)
CSASDRVSGMDEQYF

SEQ ID NO: 661091 - protein, 19 aa, Homo sapiens
  CDR3 for alpha chain variable domain of TCR clone 330546 (TRAV26-1, TRAJ28)
CIVRVAHANSGAGSYQLTF

SEQ ID NO: 661092 - protein, 15 aa, Homo sapiens
  CDR3 for beta chain variable domain of TCR clone 330546 (TRBV20-1, TRBJ1-1)
CSASRGVTGNTEAFF

SEQ ID NO: 661093 - protein, 11 aa, Homo sapiens
  CDR3 for alpha chain variable domain of TCR clone 330547 (TRAV2, TRAJ33)
CAVESNHQLIW

SEQ ID NO: 661094 - protein, 17 aa, Homo sapiens
  CDR3 for beta chain variable domain of TCR clone 330547 (TRBV20-1, TRBJ2-3)
CSASLLGRGGSADTQYF

SEQ ID NO: 661095 - protein, 18 aa, Homo sapiens
  CDR3 for alpha chain variable domain of TCR clone 330548 (TRAV26-2, TRAJ45)
CILRVDKYSGGGADGRTF

SEQ ID NO: 661096 - protein, 16 aa, Homo sapiens
  CDR3 for beta chain variable domain of TCR clone 330548 (TRBV2, TRBJ1-4)
CASNLLQGTTNEKLFF

SEQ ID NO: 661097 - protein, 14 aa, Homo sapiens
  CDR3 for alpha chain variable domain of TCR clone 330549 (TRAV1-2, TRAJ8)
CAVREDTGFLKLVF

SEQ ID NO: 661098 - protein, 15 aa, Homo sapiens
  CDR3 for beta chain variable domain of TCR clone 330549 (TRBV7-3, TRBJ2-2)
CASSETGQGTGELFF

SEQ ID NO: 661099 - protein, 21 aa, Homo sapiens
  CDR3 for alpha chain variable domain of TCR clone 330550 (TRAV1-1, TRAJ6)
CLLLLRCERLERTEGSYIPTF

SEQ ID NO: 661100 - protein, 13 aa, Homo sapiens
  CDR3 for beta chain variable domain of TCR clone 330550 (TRBV10-2, TRBJ2-7)
CASGASGGYEQYF

SEQ ID NO: 661101 - protein, 13 aa, Homo sapiens
  CDR3 for alpha chain variable domain of TCR clone 330551 (TRAV2, TRAJ15)
CAVASQAGTALIF

SEQ ID NO: 661102 - protein, 16 aa, Homo sapiens
  CDR3 for beta chain variable domain of TCR clone 330551 (TRBV20-1, TRBJ1-4)
CSAPGQGVLTNEKLFF

SEQ ID NO: 661103 - protein, 14 aa, Homo sapiens
  CDR3 for alpha chain variable domain of TCR clone 330552 (TRAV24, TRAJ39)
CAFPSSQCRQHAHL

SEQ ID NO: 661104 - protein, 15 aa, Homo sapiens
  CDR3 for beta chain variable domain of TCR clone 330552 (TRBV7-3, TRBJ2-2)
CASSETGQGTGELFF

SEQ ID NO: 661105 - protein, 16 aa, Homo sapiens
  CDR3 for alpha chain variable domain of TCR clone 330553 (TRAV12-2, TRAJ45)
CAVIFLSGGGADGLTF

SEQ ID NO: 661106 - protein, 21 aa, Homo sapiens
  CDR3 for beta chain variable domain of TCR clone 330553 (TRBV28, TRBJ2-4)
CASSFQREGQPIPKTFSTSAP

SEQ ID NO: 661107 - protein, 18 aa, Homo sapiens
  CDR3 for alpha chain variable domain of TCR clone 330554 (TRAV26-1, TRAJ52)
CIVRVGRAGGTSYGKLTF

SEQ ID NO: 661108 - protein, 13 aa, Homo sapiens
  CDR3 for beta chain variable domain of TCR clone 330554 (TRBV7-3, TRBJ1-2)
CASSLKRGYGYTC

SEQ ID NO: 661109 - protein, 18 aa, Homo sapiens
  CDR3 for alpha chain variable domain of TCR clone 330555 (TRAV3, TRAJ42)
CAVRDEGTGGGSQGNRIV

SEQ ID NO: 661110 - protein, 16 aa, Homo sapiens
  CDR3 for beta chain variable domain of TCR clone 330555 (TRBV9, TRBJ1-2)
CASSVAKGRVDYGYTF

SEQ ID NO: 661111 - protein, 16 aa, Homo sapiens
  CDR3 for alpha chain variable domain of TCR clone 330556 (TRAV1-2, TRAJ10)
CAVRGVLTGGGNKLTF

SEQ ID NO: 661112 - protein, 15 aa, Homo sapiens
  CDR3 for beta chain variable domain of TCR clone 330556 (TRBV29-1, TRBJ2-1)
CSGRDRKSSYNEQFF

SEQ ID NO: 661113 - protein, 15 aa, Homo sapiens
  CDR3 for alpha chain variable domain of TCR clone 330557 (TRAV3, TRAJ47)
CAVRDIGEYGNKLVF

SEQ ID NO: 661114 - protein, 13 aa, Homo sapiens
  CDR3 for beta chain variable domain of TCR clone 330557 (TRBV13, TRBJ2-5)
CQQLRTVGETQYF

SEQ ID NO: 661115 - protein, 14 aa, Homo sapiens
  CDR3 for alpha chain variable domain of TCR clone 330558 (TRAV12-2, TRAJ36)
CAVKISTGANNLFF

SEQ ID NO: 661116 - protein, 14 aa, Homo sapiens
  CDR3 for beta chain variable domain of TCR clone 330558 (TRBV25-1, TRBJ1-2)
CPSSDTTGVVGYTF

SEQ ID NO: 661117 - protein, 11 aa, Homo sapiens
  CDR3 for alpha chain variable domain of TCR clone 330559 (TRAV2, TRAJ20)
CAVLNDYKLSF

SEQ ID NO: 661118 - protein, 13 aa, Homo sapiens
  CDR3 for beta chain variable domain of TCR clone 330559 (TRBV7-3, TRBJ1-1)
CASSQDWGAEAFF

SEQ ID NO: 661119 - protein, 13 aa, Homo sapiens
  CDR3 for alpha chain variable domain of TCR clone 330560 (TRAV22, TRAJ29)
CAVVGSGNTPLVF

SEQ ID NO: 661120 - protein, 14 aa, Homo sapiens
  CDR3 for beta chain variable domain of TCR clone 330560 (TRBV5-1, TRBJ2-7)
CASSRGESLYEQYF

SEQ ID NO: 661121 - protein, 14 aa, Homo sapiens
  CDR3 for alpha chain variable domain of TCR clone 330561 (TRAV1-2, TRAJ16)
CAVNRFSDGKKLLF

SEQ ID NO: 661122 - protein, 16 aa, Homo sapiens
  CDR3 for beta chain variable domain of TCR clone 330561 (TRBV12-4, TRBJ1-5)
CASSRPVGGSNQPQHF

SEQ ID NO: 661123 - protein, 18 aa, Homo sapiens
  CDR3 for alpha chain variable domain of TCR clone 330562 (TRAV12-3, TRAJ52)
CAMSVGGAGGTSYGKLTF

SEQ ID NO: 661124 - protein, 14 aa, Homo sapiens
  CDR3 for beta chain variable domain of TCR clone 330562 (TRBV7-2, TRBJ2-1)
CASSLSGVYNEQFF

SEQ ID NO: 661125 - protein, 15 aa, Homo sapiens
  CDR3 for alpha chain variable domain of TCR clone 330563 (TRAV21, TRAJ53)
CATLNSGGSNYKLTF

SEQ ID NO: 661126 - protein, 16 aa, Homo sapiens
  CDR3 for beta chain variable domain of TCR clone 330563 (TRBV12-4, TRBJ1-5)
RASSRPVGGSNQPQHF

SEQ ID NO: 661127 - protein, 18 aa, Homo sapiens
  CDR3 for alpha chain variable domain of TCR clone 330564 (TRAV17, TRAJ28)
CDTDPPRGSGAGRYQLTF

SEQ ID NO: 661128 - protein, 14 aa, Homo sapiens
  CDR3 for beta chain variable domain of TCR clone 330564 (TRBV13, TRBJ2-5)
CASSLDYPQETQYF

SEQ ID NO: 661129 - protein, 12 aa, Homo sapiens
  CDR3 for alpha chain variable domain of TCR clone 330565 (TRAV3, TRAJ27)
CDVRDGAGKSTF

SEQ ID NO: 661130 - protein, 15 aa, Homo sapiens
  CDR3 for beta chain variable domain of TCR clone 330565 (TRBV13, TRBJ2-2)
CASGYRGRRTGELFF

SEQ ID NO: 661131 - protein, 12 aa, Homo sapiens
  CDR3 for alpha chain variable domain of TCR clone 330566 (TRAV13-1, TRAJ27)
CAAHTNAGKSTF

SEQ ID NO: 661132 - protein, 14 aa, Homo sapiens
  CDR3 for beta chain variable domain of TCR clone 330566 (TRBV19, TRBJ2-2)
CASSGPGIAGELFF

SEQ ID NO: 661133 - protein, 16 aa, Homo sapiens
  CDR3 for alpha chain variable domain of TCR clone 330567 (TRAV30, TRAJ24)
CGTEIVDADSWGKFQF

SEQ ID NO: 661134 - protein, 15 aa, Homo sapiens
  CDR3 for beta chain variable domain of TCR clone 330567 (TRBV12-5, TRBJ2-1)
CASSSDSLNYNEQFF

SEQ ID NO: 661135 - protein, 10 aa, Homo sapiens
  CDR3 for alpha chain variable domain of TCR clone 330568 (TRAV5, TRAJ34)
CAEDTDKLIF

SEQ ID NO: 661136 - protein, 14 aa, Homo sapiens
  CDR3 for beta chain variable domain of TCR clone 330568 (TRBV7-2, TRBJ2-7)
CASRPKTSFYEQYF

SEQ ID NO: 661137 - protein, 15 aa, Homo sapiens
  CDR3 for alpha chain variable domain of TCR clone 330569 (TRAV12-2, TRAJ43)
CAFDMRPGAGTRLTV

SEQ ID NO: 661138 - protein, 18 aa, Homo sapiens
  CDR3 for beta chain variable domain of TCR clone 330569 (TRBV20-1, TRBJ2-3)
CSASGLAGGPGTTDTQYF

SEQ ID NO: 661139 - protein, 14 aa, Homo sapiens
  CDR3 for alpha chain variable domain of TCR clone 330570 (TRAV1-2, TRAJ6)
CAVSLSGGSYIPTF

SEQ ID NO: 661140 - protein, 14 aa, Homo sapiens
  CDR3 for beta chain variable domain of TCR clone 330570 (TRBV7-2, TRBJ2-3)
CASSSGISTDTQYF

SEQ ID NO: 661141 - protein, 14 aa, Homo sapiens
  CDR3 for alpha chain variable domain of TCR clone 330571 (TRAV1-2, TRAJ29)
CAVRELTRATPLVF

SEQ ID NO: 661142 - protein, 14 aa, Homo sapiens
  CDR3 for beta chain variable domain of TCR clone 330571 (TRBV3-1, TRBJ2-5)
CASSQGPDQETQYF

SEQ ID NO: 661143 - protein, 14 aa, Homo sapiens
  CDR3 for alpha chain variable domain of TCR clone 330572 (TRAV1-2, TRAJ16)
CAVNRFSDGQKLLF

SEQ ID NO: 661144 - protein, 12 aa, Homo sapiens
  CDR3 for beta chain variable domain of TCR clone 330572 (TRBV5-5, TRBJ2-5)
CASSYFGGTQYF

SEQ ID NO: 661145 - protein, 13 aa, Homo sapiens
  CDR3 for alpha chain variable domain of TCR clone 330573 (TRAV29/DV5, TRAJ33)
CAASVESNYQLIW

SEQ ID NO: 661146 - protein, 14 aa, Homo sapiens
  CDR3 for beta chain variable domain of TCR clone 330573 (TRBV11-2, TRBJ2-5)
CASSRTGGIDTQYF

SEQ ID NO: 661147 - protein, 13 aa, Homo sapiens
  CDR3 for alpha chain variable domain of TCR clone 330574 (TRAV12-3, TRAJ40)
CAMSDSGTYKYIF

SEQ ID NO: 661148 - protein, 22 aa, Homo sapiens
  CDR3 for beta chain variable domain of TCR clone 330574 (TRBV14, TRBJ1-5)
WASSQDGVTPYLPPIGNQPQHF

SEQ ID NO: 661149 - protein, 13 aa, Homo sapiens
  CDR3 for alpha chain variable domain of TCR clone 330575 (TRAV36/DV7, TRAJ37)
CAVFSSNTGKLIF

SEQ ID NO: 661150 - protein, 13 aa, Homo sapiens
  CDR3 for beta chain variable domain of TCR clone 330575 (TRBV20-1, TRBJ1-2)
CSASPEFNYGYTF

SEQ ID NO: 661151 - protein, 14 aa, Homo sapiens
  CDR3 for alpha chain variable domain of TCR clone 330576 (TRAV12-2, TRAJ40)
CAVKIPSGTYKYIF

SEQ ID NO: 661152 - protein, 13 aa, Homo sapiens
  CDR3 for beta chain variable domain of TCR clone 330576 (TRBV7-9, TRBJ2-1)
CASSVDVGNEQFF

SEQ ID NO: 661153 - protein, 14 aa, Homo sapiens
  CDR3 for alpha chain variable domain of TCR clone 330577 (TRAV21, TRAJ12)
CAVRNGDSSYKLIF

SEQ ID NO: 661154 - protein, 15 aa, Homo sapiens
  CDR3 for beta chain variable domain of TCR clone 330577 (TRBV7-6, TRBJ2-7)
CASSQGGRGIYEQYF

SEQ ID NO: 661155 - protein, 12 aa, Homo sapiens
  CDR3 for alpha chain variable domain of TCR clone 330578 (TRAV27, TRAJ11)
CAGGSGYSTLTF

SEQ ID NO: 661156 - protein, 12 aa, Homo sapiens
  CDR3 for beta chain variable domain of TCR clone 330578 (TRBV12-4, TRBJ2-7)
CASSLGGYEQYF

SEQ ID NO: 661157 - protein, 16 aa, Homo sapiens
  CDR3 for alpha chain variable domain of TCR clone 330579 (TRAV12-1, TRAJ42)
CVVTPYYGGNQGNPIF

SEQ ID NO: 661158 - protein, 15 aa, Homo sapiens
  CDR3 for beta chain variable domain of TCR clone 330579 (TRBV4-3, TRBJ2-7)
CASSQGGRGIYEQYF

SEQ ID NO: 661159 - protein, 14 aa, Homo sapiens
  CDR3 for alpha chain variable domain of TCR clone 330580 (TRAV4, TRAJ23)
CLVGWYNQGGKLIF

SEQ ID NO: 661160 - protein, 18 aa, Homo sapiens
  CDR3 for beta chain variable domain of TCR clone 330580 (TRBV6-5, TRBJ2-6)
CASRTPGQGKTGANVLTF

SEQ ID NO: 661161 - protein, 13 aa, Homo sapiens
  CDR3 for alpha chain variable domain of TCR clone 330581 (TRAV20, TRAJ29)
CAVQAVGNTPLVF

SEQ ID NO: 661162 - protein, 15 aa, Homo sapiens
  CDR3 for beta chain variable domain of TCR clone 330581 (TRBV10-2, TRBJ2-5)
CASRGSGGPKETQYF

SEQ ID NO: 661163 - protein, 13 aa, Homo sapiens
  CDR3 for alpha chain variable domain of TCR clone 330582 (TRAV30, TRAJ18)
CGTEASTLGRRYF

SEQ ID NO: 661164 - protein, 13 aa, Homo sapiens
  CDR3 for beta chain variable domain of TCR clone 330582 (TRBV18, TRBJ2-5)
CASSLQGQETQYF

SEQ ID NO: 661165 - protein, 13 aa, Homo sapiens
  CDR3 for alpha chain variable domain of TCR clone 330583 (TRAV12-2, TRAJ47)
CAVTMEYGNKLVF

SEQ ID NO: 661166 - protein, 14 aa, Homo sapiens
  CDR3 for beta chain variable domain of TCR clone 330583 (TRBV4-1, TRBJ2-2)
CASSQAVNTGELFF

SEQ ID NO: 661167 - protein, 17 aa, Homo sapiens
  CDR3 for alpha chain variable domain of TCR clone 330584 (TRAV38-2/DV8, TRAJ45)
CAYRSRHSGGGADGLTF

SEQ ID NO: 661168 - protein, 15 aa, Homo sapiens
  CDR3 for beta chain variable domain of TCR clone 330584 (TRBV19, TRBJ2-1)
CASIKGRGPYNEQFF

SEQ ID NO: 661169 - protein, 15 aa, Homo sapiens
  CDR3 for alpha chain variable domain of TCR clone 330585 (TRAV12-3, TRAJ47)
CAMTKVLEYGNKLVF

SEQ ID NO: 661170 - protein, 12 aa, Homo sapiens
  CDR3 for beta chain variable domain of TCR clone 330585 (TRBV12-4, TRBJ2-1)
CASSPGRNEQFF

SEQ ID NO: 661171 - protein, 12 aa, Homo sapiens
  CDR3 for alpha chain variable domain of TCR clone 330586 (TRAV3, TRAJ43)
CAVRDPNNDMRF

SEQ ID NO: 661172 - protein, 15 aa, Homo sapiens
  CDR3 for beta chain variable domain of TCR clone 330586 (TRBV6-5, TRBJ2-1)
CASSYDAVAGNEQFF

SEQ ID NO: 661173 - protein, 15 aa, Homo sapiens
  CDR3 for alpha chain variable domain of TCR clone 330587 (TRAV26-1, TRAJ40)
CIVSFATSGTYKYIF

SEQ ID NO: 661174 - protein, 15 aa, Homo sapiens
  CDR3 for beta chain variable domain of TCR clone 330587 (TRBV5-7, TRBJ2-3)
CASSPGLATTDTKYF

SEQ ID NO: 661175 - protein, 14 aa, Homo sapiens
  CDR3 for alpha chain variable domain of TCR clone 330588 (TRAV17, TRAJ15)
CATDRGLAGTALIF

SEQ ID NO: 661176 - protein, 17 aa, Homo sapiens
  CDR3 for beta chain variable domain of TCR clone 330588 (TRBV29-1, TRBJ2-1)
CSVVGLAGAYSYNEQFF

SEQ ID NO: 661177 - protein, 12 aa, Homo sapiens
  CDR3 for alpha chain variable domain of TCR clone 330589 (TRAV2, TRAJ33)
CAFMDSNYQLIW

SEQ ID NO: 661178 - protein, 18 aa, Homo sapiens
  CDR3 for beta chain variable domain of TCR clone 330589 (TRBV7-9, TRBJ2-7)
CASSLTTSGSRTWYEQYF

SEQ ID NO: 661179 - protein, 13 aa, Homo sapiens
  CDR3 for alpha chain variable domain of TCR clone 330590 (TRAV17, TRAJ5)
CATMDTGRRALTF

SEQ ID NO: 661180 - protein, 15 aa, Homo sapiens
  CDR3 for beta chain variable domain of TCR clone 330590 (TRBV20-1, TRBJ2-5)
CSVTRTSGSLETQYF

SEQ ID NO: 661181 - protein, 13 aa, Homo sapiens
  CDR3 for alpha chain variable domain of TCR clone 330591 (TRAV23/DV6, TRAJ22)
CAPWGGSARQLTF

SEQ ID NO: 661182 - protein, 14 aa, Homo sapiens
  CDR3 for beta chain variable domain of TCR clone 330591 (TRBV7-2, TRBJ2-7)
CASSPKTRFYEQYF

SEQ ID NO: 661183 - protein, 13 aa, Homo sapiens
  CDR3 for alpha chain variable domain of TCR clone 330592 (TRAV35, TRAJ42)
CAGFPGSQGNLIF

SEQ ID NO: 661184 - protein, 16 aa, Homo sapiens
  CDR3 for beta chain variable domain of TCR clone 330592 (TRBV28, TRBJ1-5)
CASSLTGQGWNQTQHF

SEQ ID NO: 661185 - protein, 15 aa, Homo sapiens
  CDR3 for alpha chain variable domain of TCR clone 330593 (TRAV8-3, TRAJ45)
CASSYSGGVADGLTF

SEQ ID NO: 661186 - protein, 13 aa, Homo sapiens
  CDR3 for beta chain variable domain of TCR clone 330593 (TRBV10-3, TRBJ2-7)
CVSKLAVNYEQYF

SEQ ID NO: 661187 - protein, 13 aa, Homo sapiens
  CDR3 for alpha chain variable domain of TCR clone 330594 (TRAV3, TRAJ21)
CAVREPDFNKFYF

SEQ ID NO: 661188 - protein, 16 aa, Homo sapiens
  CDR3 for beta chain variable domain of TCR clone 330594 (TRBV27, TRBJ2-2)
CASSFRELVRTGELFS

SEQ ID NO: 661189 - protein, 18 aa, Homo sapiens
  CDR3 for alpha chain variable domain of TCR clone 330595 (TRAV17, TRAJ45)
CASSLDLYSGGGAVGLTF

SEQ ID NO: 661190 - protein, 15 aa, Homo sapiens
  CDR3 for beta chain variable domain of TCR clone 330595 (TRBV11-2, TRBJ2-1)
CASSKNRGLIYEQFF

SEQ ID NO: 661191 - protein, 12 aa, Homo sapiens
  CDR3 for alpha chain variable domain of TCR clone 330596 (TRAV25, TRAJ11)
CAGASGYSTLTF

SEQ ID NO: 661192 - protein, 16 aa, Homo sapiens
  CDR3 for beta chain variable domain of TCR clone 330596 (TRBV15, TRBJ1-2)
CATSRGPRTGGGDYTF

SEQ ID NO: 661193 - protein, 17 aa, Homo sapiens
  CDR3 for alpha chain variable domain of TCR clone 330597 (TRAV8-6, TRAJ58)
CAVSSWVGETSGSRWTF

SEQ ID NO: 661194 - protein, 17 aa, Homo sapiens
  CDR3 for beta chain variable domain of TCR clone 330597 (TRBV4-3, TRBJ1-2)
CASSSRLQAGGSVGYTF

SEQ ID NO: 661195 - protein, 13 aa, Homo sapiens
  CDR3 for alpha chain variable domain of TCR clone 330598 (TRAV27, TRAJ29)
CAGAHSGNTPLVV

SEQ ID NO: 661196 - protein, 15 aa, Homo sapiens
  CDR3 for beta chain variable domain of TCR clone 330598 (TRBV15, TRBJ1-4)
CATSRDMGSYEKLFF

SEQ ID NO: 661197 - protein, 14 aa, Homo sapiens
  CDR3 for alpha chain variable domain of TCR clone 330599 (TRAV35, TRAJ22)
CAGLRPGSARQLTF

SEQ ID NO: 661198 - protein, 17 aa, Homo sapiens
  CDR3 for beta chain variable domain of TCR clone 330599 (TRBV15, TRBJ1-4)
CATSRYGTGDPNEKLFV

SEQ ID NO: 661199 - protein, 12 aa, Homo sapiens
  CDR3 for alpha chain variable domain of TCR clone 330600 (TRAV12-3, TRAJ17)
CAMTLTGNKLTF

SEQ ID NO: 661200 - protein, 17 aa, Homo sapiens
  CDR3 for beta chain variable domain of TCR clone 330600 (TRBV11-2, TRBJ2-1)
CANSLYPPGVEYNEQFF

SEQ ID NO: 661201 - protein, 14 aa, Homo sapiens
  CDR3 for alpha chain variable domain of TCR clone 330601 (TRAV8-3, TRAJ9)
CAVVYNTGGFKTIF

SEQ ID NO: 661202 - protein, 13 aa, Homo sapiens
  CDR3 for beta chain variable domain of TCR clone 330601 (TRBV27, TRBJ2-1)
CASRTLGVGEQFF

SEQ ID NO: 661203 - protein, 11 aa, Homo sapiens
  CDR3 for alpha chain variable domain of TCR clone 330602 (TRAV16, TRAJ33)
CALHSNYQLIW

SEQ ID NO: 661204 - protein, 15 aa, Homo sapiens
  CDR3 for beta chain variable domain of TCR clone 330602 (TRBV4-1, TRBJ2-7)
CDSSQQGQGFDEQYF

SEQ ID NO: 661205 - protein, 14 aa, Homo sapiens
  CDR3 for alpha chain variable domain of TCR clone 330603 (TRAV3, TRAJ40)
CAVRDRRGTYKDIF

SEQ ID NO: 661206 - protein, 16 aa, Homo sapiens
  CDR3 for beta chain variable domain of TCR clone 330603 (TRBV10-3, TRBJ2-7)
CAISADFADRPYEQYF

SEQ ID NO: 661207 - protein, 15 aa, Homo sapiens
  CDR3 for alpha chain variable domain of TCR clone 330604 (TRAV21, TRAJ40)
CAVRTQTSGTYKYIF

SEQ ID NO: 661208 - protein, 13 aa, Homo sapiens
  CDR3 for beta chain variable domain of TCR clone 330604 (TRBV7-2, TRBJ2-2)
CASSSVRAGELFF

SEQ ID NO: 661209 - protein, 13 aa, Homo sapiens
  CDR3 for alpha chain variable domain of TCR clone 330605 (TRAV8-4, TRAJ9)
CAVSETAGFKTIF

SEQ ID NO: 661210 - protein, 14 aa, Homo sapiens
  CDR3 for beta chain variable domain of TCR clone 330605 (TRBV18, TRBJ2-3)
CASSGLADTDTQYF

SEQ ID NO: 661211 - protein, 14 aa, Homo sapiens
  CDR3 for alpha chain variable domain of TCR clone 330606 (TRAV1-2, TRAJ16)
CAVNRFSDGQKLLF

SEQ ID NO: 661212 - protein, 13 aa, Homo sapiens
  CDR3 for beta chain variable domain of TCR clone 330606 (TRBV7-2, TRBJ1-1)
CASSFGGNTEAFF

SEQ ID NO: 661213 - protein, 16 aa, Homo sapiens
  CDR3 for alpha chain variable domain of TCR clone 330607 (TRAV26-1, TRAJ53)
CIVRVEMGGSNYKLTF

SEQ ID NO: 661214 - protein, 19 aa, Homo sapiens
  CDR3 for beta chain variable domain of TCR clone 330607 (TRBV25-1, TRBJ2-2)
CAILVYRVDRGRKTGELFF

SEQ ID NO: 661215 - protein, 14 aa, Homo sapiens
  CDR3 for alpha chain variable domain of TCR clone 330608 (TRAV1-1, TRAJ27)
CAVIYNTNAGKSTF

SEQ ID NO: 661216 - protein, 14 aa, Homo sapiens
  CDR3 for beta chain variable domain of TCR clone 330608 (TRBV25-1, TRBJ1-1)
CASTHLGGKTEAFF

SEQ ID NO: 661217 - protein, 15 aa, Homo sapiens
  CDR3 for alpha chain variable domain of TCR clone 330609 (TRAV35, TRAJ40)
CAGQLGTSATYTYIF

SEQ ID NO: 661218 - protein, 14 aa, Homo sapiens
  CDR3 for beta chain variable domain of TCR clone 330609 (TRBV7-3, TRBJ2-1)
CASSLAGGTNEQFF

SEQ ID NO: 661219 - protein, 15 aa, Homo sapiens
  CDR3 for alpha chain variable domain of TCR clone 330610 (TRAV3, TRAJ7)
CAVRDKDNGNNRLAF

SEQ ID NO: 661220 - protein, 12 aa, Homo sapiens
  CDR3 for beta chain variable domain of TCR clone 330610 (TRBV11-2, TRBJ2-2)
CASSLPTGELFF

SEQ ID NO: 661221 - protein, 14 aa, Homo sapiens
  CDR3 for alpha chain variable domain of TCR clone 330611 (TRAV12-2, TRAJ40)
CAVKIPSGTYDYIF

SEQ ID NO: 661222 - protein, 14 aa, Homo sapiens
  CDR3 for beta chain variable domain of TCR clone 330611 (TRBV20-1, TRBJ1-1)
CSAQTRIGGTEAFF

SEQ ID NO: 661223 - protein, 15 aa, Homo sapiens
  CDR3 for alpha chain variable domain of TCR clone 330612 (TRAV23/DV6, TRAJ18)
CAARYRGSTLGRLYF

SEQ ID NO: 661224 - protein, 13 aa, Homo sapiens
  CDR3 for beta chain variable domain of TCR clone 330612 (TRBV7-2, TRBJ2-7)
CASSSPSGSEQYF

SEQ ID NO: 661225 - protein, 15 aa, Homo sapiens
  CDR3 for alpha chain variable domain of TCR clone 330613 (TRAV26-1, TRAJ29)
CIIRVEGSGNTPLVF

SEQ ID NO: 661226 - protein, 14 aa, Homo sapiens
  CDR3 for beta chain variable domain of TCR clone 330613 (TRBV19, TRBJ2-1)
CASSKDRGQDEQFF

SEQ ID NO: 661227 - protein, 10 aa, Homo sapiens
  CDR3 for alpha chain variable domain of TCR clone 330614 (TRAV26-1, TRAJ36)
CIVTPRGSNW

SEQ ID NO: 661228 - protein, 15 aa, Homo sapiens
  CDR3 for beta chain variable domain of TCR clone 330614 (TRBV10-3, TRBJ2-6)
CATPAAASGANVLTF

SEQ ID NO: 661229 - protein, 11 aa, Homo sapiens
  CDR3 for alpha chain variable domain of TCR clone 330615 (TRAV1-1, TRAJ23)
CALRQGGKLIF

SEQ ID NO: 661230 - protein, 15 aa, Homo sapiens
  CDR3 for beta chain variable domain of TCR clone 330615 (TRBV27, TRBJ2-1)
CASSNGGGSSNEQFF

SEQ ID NO: 661231 - protein, 16 aa, Homo sapiens
  CDR3 for alpha chain variable domain of TCR clone 330616 (TRAV21, TRAJ37)
CAVRPRGSSNSGKLIF

SEQ ID NO: 661232 - protein, 13 aa, Homo sapiens
  CDR3 for beta chain variable domain of TCR clone 330616 (TRBV7-9, TRBJ2-5)
CASLSPGQETQYF

SEQ ID NO: 661233 - protein, 22 aa, Homo sapiens
  CDR3 for alpha chain variable domain of TCR clone 330617 (TRAV27, )
CAVRRNAGTNHIQNPDPAVYQL

SEQ ID NO: 661234 - protein, 13 aa, Homo sapiens
  CDR3 for beta chain variable domain of TCR clone 330617 (TRBV12-5, TRBJ2-3)
CASGDRQSDTQYF

SEQ ID NO: 661235 - protein, 11 aa, Homo sapiens
  CDR3 for alpha chain variable domain of TCR clone 330618 (TRAV23/DV6, TRAJ9)
CFHTGGFKTIF

SEQ ID NO: 661236 - protein, 14 aa, Homo sapiens
  CDR3 for beta chain variable domain of TCR clone 330618 (TRBV25-1, TRBJ1-1)
CASTHLGGNTEAFF

SEQ ID NO: 661237 - protein, 14 aa, Homo sapiens
  CDR3 for alpha chain variable domain of TCR clone 330619 (TRAV4, TRAJ9)
CLVGSGTGGFKTIF

SEQ ID NO: 661238 - protein, 14 aa, Homo sapiens
  CDR3 for beta chain variable domain of TCR clone 330619 (TRBV7-9, TRBJ2-4)
CDSSLAMGGNIQYF

SEQ ID NO: 661239 - protein, 14 aa, Homo sapiens
  CDR3 for alpha chain variable domain of TCR clone 330620 (TRAV9-2, TRAJ38)
CALSRAGNNRKLIG

SEQ ID NO: 661240 - protein, 12 aa, Homo sapiens
  CDR3 for beta chain variable domain of TCR clone 330620 (TRBV7-2, TRBJ2-5)
CASSQYQETQYF

SEQ ID NO: 661241 - protein, 15 aa, Homo sapiens
  CDR3 for alpha chain variable domain of TCR clone 330621 (TRAV8-3, TRAJ40)
CAAPSLGSGTYKYIF

SEQ ID NO: 661242 - protein, 16 aa, Homo sapiens
  CDR3 for beta chain variable domain of TCR clone 330621 (TRBV7-3, TRBJ2-3)
CASSLSGYRPEDAQYS

SEQ ID NO: 661243 - protein, 14 aa, Homo sapiens
  CDR3 for alpha chain variable domain of TCR clone 330622 (TRAV8-3, TRAJ44)
CAVGAGGTASKLTF

SEQ ID NO: 661244 - protein, 13 aa, Homo sapiens
  CDR3 for beta chain variable domain of TCR clone 330622 (TRBV10-3, TRBJ2-7)
CASKLAVNYEQYF

SEQ ID NO: 661245 - protein, 12 aa, Homo sapiens
  CDR3 for alpha chain variable domain of TCR clone 330623 (TRAV12-1, TRAJ40)
CVVYSGTYKYIF

SEQ ID NO: 661246 - protein, 14 aa, Homo sapiens
  CDR3 for beta chain variable domain of TCR clone 330623 (TRBV20-1, TRBJ2-3)
CSARGGTSTDTQDF

SEQ ID NO: 661247 - protein, 12 aa, Homo sapiens
  CDR3 for alpha chain variable domain of TCR clone 330624 (TRAV12-3, TRAJ17)
CSMTITGNKLTF

SEQ ID NO: 661248 - protein, 15 aa, Homo sapiens
  CDR3 for beta chain variable domain of TCR clone 330624 (TRBV20-1, TRBJ2-7)
CSARDRVSGMDEQYF

SEQ ID NO: 661249 - protein, 13 aa, Homo sapiens
  CDR3 for alpha chain variable domain of TCR clone 330625 (TRAV29/DV5, TRAJ31)
CAASRNNTARLMF

SEQ ID NO: 661250 - protein, 12 aa, Homo sapiens
  CDR3 for beta chain variable domain of TCR clone 330625 (TRBV11-2, TRBJ2-2)
CASSLGGGELFF

SEQ ID NO: 661251 - protein, 13 aa, Homo sapiens
  CDR3 for alpha chain variable domain of TCR clone 330626 (TRAV2, TRAJ40)
CAVVTSGTYKYIF

SEQ ID NO: 661252 - protein, 14 aa, Homo sapiens
  CDR3 for beta chain variable domain of TCR clone 330626 (TRBV19, TRBJ2-3)
CASSAPRGTDPQYF

SEQ ID NO: 661253 - protein, 13 aa, Homo sapiens
  CDR3 for alpha chain variable domain of TCR clone 330627 (TRAV12-3, TRAJ9)
CAMSAAGGFKTIF

SEQ ID NO: 661254 - protein, 13 aa, Homo sapiens
  CDR3 for beta chain variable domain of TCR clone 330627 (TRBV5-5, TRBJ1-2)
CASSFWRGEDYTF

SEQ ID NO: 661255 - protein, 11 aa, Homo sapiens
  CDR3 for alpha chain variable domain of TCR clone 330628 (TRAV1-2, TRAJ40)
CAVPGTYKYIF

SEQ ID NO: 661256 - protein, 15 aa, Homo sapiens
  CDR3 for beta chain variable domain of TCR clone 330628 (TRBV7-9, TRBJ2-7)
CASSLELAEAYEQYF

SEQ ID NO: 661257 - protein, 16 aa, Homo sapiens
  CDR3 for alpha chain variable domain of TCR clone 330629 (TRAV30, TRAJ24)
CGTEIVDADSWGKIQF

SEQ ID NO: 661258 - protein, 12 aa, Homo sapiens
  CDR3 for beta chain variable domain of TCR clone 330629 (TRBV7-8, TRBJ2-7)
CASSLGDREQYF

SEQ ID NO: 661259 - protein, 15 aa, Homo sapiens
  CDR3 for alpha chain variable domain of TCR clone 330630 (TRAV26-1, TRAJ52)
CIVSDLGTSYGKLTF

SEQ ID NO: 661260 - protein, 15 aa, Homo sapiens
  CDR3 for beta chain variable domain of TCR clone 330630 (TRBV11-2, TRBJ2-2)
CASSSDRVNAGELFF

SEQ ID NO: 661261 - protein, 16 aa, Homo sapiens
  CDR3 for alpha chain variable domain of TCR clone 330631 (TRAV30, TRAJ24)
CCTEIVDAYSWGKFQF

SEQ ID NO: 661262 - protein, 14 aa, Homo sapiens
  CDR3 for beta chain variable domain of TCR clone 330631 (TRBV12-5, TRBJ2-5)
CASGSRTHQETQYF

SEQ ID NO: 661263 - protein, 22 aa, Homo sapiens
  CDR3 for alpha chain variable domain of TCR clone 330632 (TRAV3, TRAJ38)
CAVRDCLNAGNNHIQNPDPAVY

SEQ ID NO: 661264 - protein, 13 aa, Homo sapiens
  CDR3 for beta chain variable domain of TCR clone 330632 (TRBV19, TRBJ1-2)
CASSVPGQDGYTF

SEQ ID NO: 661265 - protein, 14 aa, Homo sapiens
  CDR3 for alpha chain variable domain of TCR clone 330633 (TRAV12-2, TRAJ40)
CAVTIPPGTYKYIF

SEQ ID NO: 661266 - protein, 14 aa, Homo sapiens
  CDR3 for beta chain variable domain of TCR clone 330633 (TRBV20-1, TRBJ1-1)
CSAQTRIGGTEAFF

SEQ ID NO: 661267 - protein, 13 aa, Homo sapiens
  CDR3 for alpha chain variable domain of TCR clone 330634 (TRAV4, TRAJ9)
FLVAEGGGFKTIF

SEQ ID NO: 661268 - protein, 17 aa, Homo sapiens
  CDR3 for beta chain variable domain of TCR clone 330634 (TRBV27, TRBJ2-1)
CASSPMKGQGSYNEQFF

SEQ ID NO: 661269 - protein, 11 aa, Homo sapiens
  CDR3 for alpha chain variable domain of TCR clone 330635 (TRAV2, TRAJ13)
CASGGYQKVTF

SEQ ID NO: 661270 - protein, 15 aa, Homo sapiens
  CDR3 for beta chain variable domain of TCR clone 330635 (TRBV6-3, TRBJ2-3)
RLIHYSVGQADTRYF

SEQ ID NO: 661271 - protein, 14 aa, Homo sapiens
  CDR3 for alpha chain variable domain of TCR clone 330636 (TRAV2, TRAJ9)
CAVEDRSGGVTTIF

SEQ ID NO: 661272 - protein, 11 aa, Homo sapiens
  CDR3 for beta chain variable domain of TCR clone 330636 (TRBV7-9, TRBJ2-5)
CASSLGETQYF

SEQ ID NO: 661273 - protein, 14 aa, Homo sapiens
  CDR3 for alpha chain variable domain of TCR clone 330637 (TRAV12-2, TRAJ17)
CAALYKAAGNKLTF

SEQ ID NO: 661274 - protein, 16 aa, Homo sapiens
  CDR3 for beta chain variable domain of TCR clone 330637 (TRBV20-1, TRBJ2-2)
CSASASGIPGAGELFF

SEQ ID NO: 661275 - protein, 15 aa, Homo sapiens
  CDR3 for alpha chain variable domain of TCR clone 330638 (TRAV8-4, TRAJ3)
CAVTGENLVQQCFQD

SEQ ID NO: 661276 - protein, 16 aa, Homo sapiens
  CDR3 for beta chain variable domain of TCR clone 330638 (TRBV4-2, TRBJ1-1)
CASSQAGFGMNTEAFV

SEQ ID NO: 661277 - protein, 15 aa, Homo sapiens
  CDR3 for alpha chain variable domain of TCR clone 330639 (TRAV23/DV6, TRAJ44)
CAARLLTGTASKLTF

SEQ ID NO: 661278 - protein, 15 aa, Homo sapiens
  CDR3 for beta chain variable domain of TCR clone 330639 (TRBV12-4, TRBJ1-5)
CASTLIRVSNQPQHF

SEQ ID NO: 661279 - protein, 15 aa, Homo sapiens
  CDR3 for alpha chain variable domain of TCR clone 330640 (TRAV12-3, TRAJ13)
CAMSARSGGYQKVTF

SEQ ID NO: 661280 - protein, 13 aa, Homo sapiens
  CDR3 for beta chain variable domain of TCR clone 330640 (TRBV7-6, TRBJ1-2)
CASSLVADYGYTF

SEQ ID NO: 661281 - protein, 13 aa, Homo sapiens
  CDR3 for alpha chain variable domain of TCR clone 330641 (TRAV3, TRAJ27)
CAVRPLGAGKSTF

SEQ ID NO: 661282 - protein, 15 aa, Homo sapiens
  CDR3 for beta chain variable domain of TCR clone 330641 (TRBV20-1, TRBJ2-7)
CSTRDRVSGMDEQYF

SEQ ID NO: 661283 - protein, 15 aa, Homo sapiens
  CDR3 for alpha chain variable domain of TCR clone 330642 (TRAV30, TRAJ32)
CGTEILGGATNKLIF

SEQ ID NO: 661284 - protein, 13 aa, Homo sapiens
  CDR3 for beta chain variable domain of TCR clone 330642 (TRBV12-4, TRBJ1-2)
CASSLRQGKGYTF

SEQ ID NO: 661285 - protein, 15 aa, Homo sapiens
  CDR3 for alpha chain variable domain of TCR clone 330643 (TRAV8-1, TRAJ23)
CAVNSHYNQGGKLIF

SEQ ID NO: 661286 - protein, 15 aa, Homo sapiens
  CDR3 for beta chain variable domain of TCR clone 330643 (TRBV29-1, TRBJ2-1)
CSGRDRKSSYNEQFF

SEQ ID NO: 661287 - protein, 11 aa, Homo sapiens
  CDR3 for alpha chain variable domain of TCR clone 330644 (TRAV21, TRAJ41)
CAVRSGYALNF

SEQ ID NO: 661288 - protein, 13 aa, Homo sapiens
  CDR3 for beta chain variable domain of TCR clone 330644 (TRBV7-9, TRBJ1-2)
CASSLKQSYGYTF

SEQ ID NO: 661289 - protein, 17 aa, Homo sapiens
  CDR3 for alpha chain variable domain of TCR clone 330645 (TRAV3, TRAJ6)
CAVRDGPRAGGSYIPTF

SEQ ID NO: 661290 - protein, 16 aa, Homo sapiens
  CDR3 for beta chain variable domain of TCR clone 330645 (TRBV12-5, TRBJ2-5)
CAGGPRTSGNQETQYF

SEQ ID NO: 661291 - protein, 14 aa, Homo sapiens
  CDR3 for alpha chain variable domain of TCR clone 330646 (TRAV26-2, TRAJ27)
CILRDISDAGKSTF

SEQ ID NO: 661292 - protein, 14 aa, Homo sapiens
  CDR3 for beta chain variable domain of TCR clone 330646 (TRBV28, TRBJ1-1)
CASSSEQGYTEAFF

SEQ ID NO: 661293 - protein, 11 aa, Homo sapiens
  CDR3 for alpha chain variable domain of TCR clone 330647 (TRAV25, TRAJ43)
CAGPRNNDMRF

SEQ ID NO: 661294 - protein, 11 aa, Homo sapiens
  CDR3 for beta chain variable domain of TCR clone 330647 (TRBV28, TRBJ2-1)
CASRRVNEQFF

SEQ ID NO: 661295 - protein, 13 aa, Homo sapiens
  CDR3 for alpha chain variable domain of TCR clone 330648 (TRAV35, TRAJ42)
CAGFPGSHGNLIF

SEQ ID NO: 661296 - protein, 13 aa, Homo sapiens
  CDR3 for beta chain variable domain of TCR clone 330648 (TRBV10-3, TRBJ2-7)
CASKLAVNYEQYF

SEQ ID NO: 661297 - protein, 14 aa, Homo sapiens
  CDR3 for alpha chain variable domain of TCR clone 330649 (TRAV16, TRAJ39)
CALSKNNAGNMLTF

SEQ ID NO: 661298 - protein, 16 aa, Homo sapiens
  CDR3 for beta chain variable domain of TCR clone 330649 (TRBV16, TRBJ2-7)
CASSRPAGGSSYEQDF

SEQ ID NO: 661299 - protein, 15 aa, Homo sapiens
  CDR3 for alpha chain variable domain of TCR clone 330650 (TRAV10, TRAJ10)
CVVSADTRGGNKLTF

SEQ ID NO: 661300 - protein, 15 aa, Homo sapiens
  CDR3 for beta chain variable domain of TCR clone 330650 (TRBV11-3, TRBJ2-7)
CASSLLSGSSYEQYF

SEQ ID NO: 661301 - protein, 14 aa, Homo sapiens
  CDR3 for alpha chain variable domain of TCR clone 330651 (TRAV14/DV4, TRAJ7)
CAMREPYGNNRLAF

SEQ ID NO: 661302 - protein, 15 aa, Homo sapiens
  CDR3 for beta chain variable domain of TCR clone 330651 (TRBV19, TRBJ2-1)
CASSINREPSHEQFF

SEQ ID NO: 661303 - protein, 14 aa, Homo sapiens
  CDR3 for alpha chain variable domain of TCR clone 330652 (TRAV38-1, TRAJ45)
CASHSGGGADGLTF

SEQ ID NO: 661304 - protein, 15 aa, Homo sapiens
  CDR3 for beta chain variable domain of TCR clone 330652 (TRBV10-2, TRBJ2-6)
CASSEQGTGANDLTF

SEQ ID NO: 661305 - protein, 14 aa, Homo sapiens
  CDR3 for alpha chain variable domain of TCR clone 330653 (TRAV14/DV4, TRAJ27)
CVPKEGTNAGKSTF

SEQ ID NO: 661306 - protein, 16 aa, Homo sapiens
  CDR3 for beta chain variable domain of TCR clone 330653 (TRBV12-5, TRBJ2-5)
CASGPRTSGDQETQYF

SEQ ID NO: 661307 - protein, 12 aa, Homo sapiens
  CDR3 for alpha chain variable domain of TCR clone 330654 (TRAV8-3, TRAJ41)
CAVALSGYALNF

SEQ ID NO: 661308 - protein, 18 aa, Homo sapiens
  CDR3 for beta chain variable domain of TCR clone 330654 (TRBV20-1, TRBJ2-6)
CNAETTPTHGSGANVLTF

SEQ ID NO: 661309 - protein, 16 aa, Homo sapiens
  CDR3 for alpha chain variable domain of TCR clone 330655 (TRAV12-3, TRAJ53)
CAMSPGSGGSNYKLTF

SEQ ID NO: 661310 - protein, 14 aa, Homo sapiens
  CDR3 for beta chain variable domain of TCR clone 330655 (TRBV7-3, TRBJ2-1)
CASSLSGSYNEQFF

SEQ ID NO: 661311 - protein, 13 aa, Homo sapiens
  CDR3 for alpha chain variable domain of TCR clone 330656 (TRAV1-2, TRAJ20)
CAVPRSNDYKLSF

SEQ ID NO: 661312 - protein, 14 aa, Homo sapiens
  CDR3 for beta chain variable domain of TCR clone 330656 (TRBV20-1, TRBJ2-7)
CSARYGATYYEQYF

SEQ ID NO: 661313 - protein, 15 aa, Homo sapiens
  CDR3 for alpha chain variable domain of TCR clone 330657 (TRAV23/DV6, TRAJ57)
CAASSTLSQGGSVKL

SEQ ID NO: 661314 - protein, 14 aa, Homo sapiens
  CDR3 for beta chain variable domain of TCR clone 330657 (TRBV25-1, TRBJ1-1)
CASTHLGGNTEAFF

SEQ ID NO: 661315 - protein, 12 aa, Homo sapiens
  CDR3 for alpha chain variable domain of TCR clone 330658 (TRAV27, TRAJ13)
CAGVRGYQKVTF

SEQ ID NO: 661316 - protein, 16 aa, Homo sapiens
  CDR3 for beta chain variable domain of TCR clone 330658 (TRBV28, TRBJ2-1)
CASSSSYSGSLNEQFF

SEQ ID NO: 661317 - protein, 13 aa, Homo sapiens
  CDR3 for alpha chain variable domain of TCR clone 330659 (TRAV2, TRAJ40)
CAVVTSGTYKYIF

SEQ ID NO: 661318 - protein, 14 aa, Homo sapiens
  CDR3 for beta chain variable domain of TCR clone 330659 (TRBV7-3, TRBJ2-3)
CASSPGASRDTQYF

SEQ ID NO: 661319 - protein, 15 aa, Homo sapiens
  CDR3 for alpha chain variable domain of TCR clone 330660 (TRAV2, TRAJ37)
CAVGDGASNTGKLIF

SEQ ID NO: 661320 - protein, 13 aa, Homo sapiens
  CDR3 for beta chain variable domain of TCR clone 330660 (TRBV20-1, TRBJ2-7)
CSAQTGLSYEQYF

SEQ ID NO: 661321 - protein, 18 aa, Homo sapiens
  CDR3 for alpha chain variable domain of TCR clone 330661 (TRAV8-6, TRAJ52)
CAVSPLAAGGTSYGKLTF

SEQ ID NO: 661322 - protein, 14 aa, Homo sapiens
  CDR3 for beta chain variable domain of TCR clone 330661 (TRBV3-1, TRBJ2-2)
RASSQDWVQGELFF

SEQ ID NO: 661323 - protein, 13 aa, Homo sapiens
  CDR3 for alpha chain variable domain of TCR clone 330662 (TRAV3, TRAJ27)
CAVRPLGAGKSTF

SEQ ID NO: 661324 - protein, 13 aa, Homo sapiens
  CDR3 for beta chain variable domain of TCR clone 330662 (TRBV7-6, TRBJ1-2)
CASSLVADYGYTF

SEQ ID NO: 661325 - protein, 11 aa, Homo sapiens
  CDR3 for alpha chain variable domain of TCR clone 330663 (TRAV13-1, TRAJ6)
CATLGSYMPTF

SEQ ID NO: 661326 - protein, 12 aa, Homo sapiens
  CDR3 for beta chain variable domain of TCR clone 330663 (TRBV11-2, TRBJ2-1)
CASSPGNNEQFF

SEQ ID NO: 661327 - protein, 15 aa, Homo sapiens
  CDR3 for alpha chain variable domain of TCR clone 330664 (TRAV2, TRAJ9)
CAVEDRGTGGFKTIF

SEQ ID NO: 661328 - protein, 12 aa, Homo sapiens
  CDR3 for beta chain variable domain of TCR clone 330664 (TRBV5-1, TRBJ1-1)
CASSYGNTEAFF

SEQ ID NO: 661329 - protein, 15 aa, Homo sapiens
  CDR3 for alpha chain variable domain of TCR clone 330665 (TRAV8-1, TRAJ6)
CAVNTPPGGSYIPNF

SEQ ID NO: 661330 - protein, 14 aa, Homo sapiens
  CDR3 for beta chain variable domain of TCR clone 330665 (TRBV12-5, TRBJ2-5)
CASGSRTHQETQYF

SEQ ID NO: 661331 - protein, 14 aa, Homo sapiens
  CDR3 for alpha chain variable domain of TCR clone 330666 (TRAV2, TRAJ9)
CAVEDRSGGFKTIL

SEQ ID NO: 661332 - protein, 13 aa, Homo sapiens
  CDR3 for beta chain variable domain of TCR clone 330666 (TRBV7-3, TRBJ1-1)
CASSQDWGAEAFF

SEQ ID NO: 661333 - protein, 13 aa, Homo sapiens
  CDR3 for alpha chain variable domain of TCR clone 330667 (TRAV27, TRAJ53)
CAGPGGSNYNLTF

SEQ ID NO: 661334 - protein, 13 aa, Homo sapiens
  CDR3 for beta chain variable domain of TCR clone 330667 (TRBV29-1, TRBJ1-1)
CSVESGFGTEAFF

SEQ ID NO: 661335 - protein, 15 aa, Homo sapiens
  CDR3 for alpha chain variable domain of TCR clone 330668 (TRAV12-3, TRAJ6)
CAMSATSGGSYIPTF

SEQ ID NO: 661336 - protein, 11 aa, Homo sapiens
  CDR3 for beta chain variable domain of TCR clone 330668 (TRBV6-4, TRBJ2-1)
CASSDSYAQVF

SEQ ID NO: 661337 - protein, 16 aa, Homo sapiens
  CDR3 for alpha chain variable domain of TCR clone 330669 (TRAV3, TRAJ10)
CAVRDMRAGGGNKLAV

SEQ ID NO: 661338 - protein, 13 aa, Homo sapiens
  CDR3 for beta chain variable domain of TCR clone 330669 (TRBV7-9, TRBJ1-2)
CASSLKQNYGYTF

SEQ ID NO: 661339 - protein, 13 aa, Homo sapiens
  CDR3 for alpha chain variable domain of TCR clone 330670 (TRAV12-1, TRAJ26)
CVVRRNYGQNFVF

SEQ ID NO: 661340 - protein, 14 aa, Homo sapiens
  CDR3 for beta chain variable domain of TCR clone 330670 (TRBV5-4, TRBJ2-5)
CASSFSGGQETQYF

SEQ ID NO: 661341 - protein, 11 aa, Homo sapiens
  CDR3 for alpha chain variable domain of TCR clone 330671 (TRAV17, TRAJ9)
CGFTGGFKTIF

SEQ ID NO: 661342 - protein, 18 aa, Homo sapiens
  CDR3 for beta chain variable domain of TCR clone 330671 (TRBV12-4, TRBJ2-2)
YASSLVAGTRGRTGELFF

SEQ ID NO: 661343 - protein, 13 aa, Homo sapiens
  CDR3 for alpha chain variable domain of TCR clone 330672 (TRAV29/DV5, TRAJ54)
CAAHLQGAQKLVF

SEQ ID NO: 661344 - protein, 12 aa, Homo sapiens
  CDR3 for beta chain variable domain of TCR clone 330672 (TRBV5-7, TRBJ1-1)
CASSLGRGKAFF

SEQ ID NO: 661345 - protein, 14 aa, Homo sapiens
  CDR3 for alpha chain variable domain of TCR clone 330673 (TRAV12-3, TRAJ58)
SAMSTETSGSRLTF

SEQ ID NO: 661346 - protein, 15 aa, Homo sapiens
  CDR3 for beta chain variable domain of TCR clone 330673 (TRBV11-3, TRBJ1-1)
CASSLGGPGDTEAFF

SEQ ID NO: 661347 - protein, 15 aa, Homo sapiens
  CDR3 for alpha chain variable domain of TCR clone 330674 (TRAV26-1, TRAJ44)
CIVRANTGTASKLTF

SEQ ID NO: 661348 - protein, 12 aa, Homo sapiens
  CDR3 for beta chain variable domain of TCR clone 330674 (TRBV27, TRBJ2-2)
CASKLFTGELFF

SEQ ID NO: 661349 - protein, 12 aa, Homo sapiens
  CDR3 for alpha chain variable domain of TCR clone 330675 (TRAV2, TRAJ10)
CASTGGGNKLTF

SEQ ID NO: 661350 - protein, 15 aa, Homo sapiens
  CDR3 for beta chain variable domain of TCR clone 330675 (TRBV7-9, TRBJ1-6)
CASSSPGRGNSPLHF

SEQ ID NO: 661351 - protein, 18 aa, Homo sapiens
  CDR3 for alpha chain variable domain of TCR clone 330676 (TRAV12-3, TRAJ52)
CAMSVGGAGGTSYGKMTF

SEQ ID NO: 661352 - protein, 17 aa, Homo sapiens
  CDR3 for beta chain variable domain of TCR clone 330676 (TRBV13, TRBJ2-3)
CASSLSRVAGGRNTQYF

SEQ ID NO: 661353 - protein, 14 aa, Homo sapiens
  CDR3 for alpha chain variable domain of TCR clone 330677 (TRAV12-2, TRAJ53)
CAVKGGDSNYKLTF

SEQ ID NO: 661354 - protein, 14 aa, Homo sapiens
  CDR3 for beta chain variable domain of TCR clone 330677 (TRBV7-7, TRBJ2-2)
CATRQDSDTGELFF

SEQ ID NO: 661355 - protein, 16 aa, Homo sapiens
  CDR3 for alpha chain variable domain of TCR clone 330678 (TRAV12-2, TRAJ43)
CAGDDMRLGAGTRLTV

SEQ ID NO: 661356 - protein, 16 aa, Homo sapiens
  CDR3 for beta chain variable domain of TCR clone 330678 (TRBV2, TRBJ2-4)
CASSEAPGGEQNIQYF

SEQ ID NO: 661357 - protein, 13 aa, Homo sapiens
  CDR3 for alpha chain variable domain of TCR clone 330679 (TRAV2, TRAJ36)
CAVDQTGANNLFF

SEQ ID NO: 661358 - protein, 12 aa, Homo sapiens
  CDR3 for beta chain variable domain of TCR clone 330679 (TRBV19, TRBJ1-1)
RASMNRYTEAFF

SEQ ID NO: 661359 - protein, 17 aa, Homo sapiens
  CDR3 for alpha chain variable domain of TCR clone 330680 (TRAV3, TRAJ38)
CAVRDCLNAGNNRKLIW

SEQ ID NO: 661360 - protein, 15 aa, Homo sapiens
  CDR3 for beta chain variable domain of TCR clone 330680 (TRBV7-9, TRBJ2-3)
CASSRQGAGEDTQYF

SEQ ID NO: 661361 - protein, 15 aa, Homo sapiens
  CDR3 for alpha chain variable domain of TCR clone 330681 (TRAV20, TRAJ58)
CAVQDLETSGSRLTF

SEQ ID NO: 661362 - protein, 17 aa, Homo sapiens
  CDR3 for beta chain variable domain of TCR clone 330681 (TRBV20-1, TRBJ2-1)
CSASSSGLAGSYNEQFF

SEQ ID NO: 661363 - protein, 16 aa, Homo sapiens
  CDR3 for alpha chain variable domain of TCR clone 330682 (TRAV30, TRAJ24)
CGTEIVDADSWGKFQF

SEQ ID NO: 661364 - protein, 18 aa, Homo sapiens
  CDR3 for beta chain variable domain of TCR clone 330682 (TRBV7-9, TRBJ2-7)
WASSLTASGSRTWYEQYF

SEQ ID NO: 661365 - protein, 16 aa, Homo sapiens
  CDR3 for alpha chain variable domain of TCR clone 330683 (TRAV12-3, TRAJ53)
CAMSPGSGGSNYKITF

SEQ ID NO: 661366 - protein, 11 aa, Homo sapiens
  CDR3 for beta chain variable domain of TCR clone 330683 (TRBV29-1, TRBJ2-5)
CSEDRTGTQYF

SEQ ID NO: 661367 - protein, 10 aa, Homo sapiens
  CDR3 for alpha chain variable domain of TCR clone 330684 (TRAV12-1, TRAJ41)
MTGSGYALNF

SEQ ID NO: 661368 - protein, 17 aa, Homo sapiens
  CDR3 for beta chain variable domain of TCR clone 330684 (TRBV11-2, TRBJ2-1)
CASSLYPPGVEYNEQFF

SEQ ID NO: 661369 - protein, 16 aa, Homo sapiens
  CDR3 for alpha chain variable domain of TCR clone 330685 (TRAV8-3, TRAJ10)
CAVGPGVTGGGNKVTF

SEQ ID NO: 661370 - protein, 13 aa, Homo sapiens
  CDR3 for beta chain variable domain of TCR clone 330685 (TRBV18, TRBJ1-1)
CASSPGPSGEAFF

SEQ ID NO: 661371 - protein, 15 aa, Homo sapiens
  CDR3 for alpha chain variable domain of TCR clone 330686 (TRAV12-3, TRAJ6)
CAMSATAGGSYIPTF

SEQ ID NO: 661372 - protein, 14 aa, Homo sapiens
  CDR3 for beta chain variable domain of TCR clone 330686 (TRBV6-5, TRBJ1-2)
CASTRGGGSDGYTF

SEQ ID NO: 661373 - protein, 11 aa, Homo sapiens
  CDR3 for alpha chain variable domain of TCR clone 330687 (TRAV17, TRAJ36)
CAPTGANNLFF

SEQ ID NO: 661374 - protein, 14 aa, Homo sapiens
  CDR3 for beta chain variable domain of TCR clone 330687 (TRBV5-1, TRBJ2-1)
CASSVVTEYNEQFF

SEQ ID NO: 661375 - protein, 20 aa, Homo sapiens
  CDR3 for alpha chain variable domain of TCR clone 330688 (TRAV12-1, TRAJ42)
SSVIQPPTSVKGGSQGNPIF

SEQ ID NO: 661376 - protein, 18 aa, Homo sapiens
  CDR3 for beta chain variable domain of TCR clone 330688 (TRBV11-2, TRBJ2-3)
CASSFGGASRGAPNTQYF

SEQ ID NO: 661377 - protein, 14 aa, Homo sapiens
  CDR3 for alpha chain variable domain of TCR clone 330689 (TRAV27, TRAJ15)
CAGFDSQAGTALIF

SEQ ID NO: 661378 - protein, 11 aa, Homo sapiens
  CDR3 for beta chain variable domain of TCR clone 330689 (TRBV29-1, TRBJ1-1)
CSVEVGTRTFF

SEQ ID NO: 661379 - protein, 11 aa, Homo sapiens
  CDR3 for alpha chain variable domain of TCR clone 330690 (TRAV2, TRAJ13)
CASGGYQKVTF

SEQ ID NO: 661380 - protein, 14 aa, Homo sapiens
  CDR3 for beta chain variable domain of TCR clone 330690 (TRBV7-3, TRBJ2-1)
CASRLAGGTNEQFF

SEQ ID NO: 661381 - protein, 15 aa, Homo sapiens
  CDR3 for alpha chain variable domain of TCR clone 330691 (TRAV13-1, TRAJ10)
CAATILTGGGNKLTF

SEQ ID NO: 661382 - protein, 14 aa, Homo sapiens
  CDR3 for beta chain variable domain of TCR clone 330691 (TRBV7-2, TRBJ2-3)
CASRRGLAADTQYF

SEQ ID NO: 661383 - protein, 18 aa, Homo sapiens
  CDR3 for alpha chain variable domain of TCR clone 330692 (TRAV8-1, TRAJ5)
CAVKTEQPGRRAGEHLLL

SEQ ID NO: 661384 - protein, 15 aa, Homo sapiens
  CDR3 for beta chain variable domain of TCR clone 330692 (TRBV5-1, TRBJ2-1)
CASSWGPGPGGEQFF

SEQ ID NO: 661385 - protein, 17 aa, Homo sapiens
  CDR3 for alpha chain variable domain of TCR clone 330693 (TRAV3, TRAJ42)
CALRDRDYGGSQGNLIF

SEQ ID NO: 661386 - protein, 15 aa, Homo sapiens
  CDR3 for beta chain variable domain of TCR clone 330693 (TRBV3-1, TRBJ2-1)
CASSQVVDDGEEQFF

SEQ ID NO: 661387 - protein, 14 aa, Homo sapiens
  CDR3 for alpha chain variable domain of TCR clone 330694 (TRAV12-3, TRAJ10)
SHLPLTGGGNKLTF

SEQ ID NO: 661388 - protein, 16 aa, Homo sapiens
  CDR3 for beta chain variable domain of TCR clone 330694 (TRBV20-1, TRBJ2-1)
CSGESRTGTVRNEQFF

SEQ ID NO: 661389 - protein, 17 aa, Homo sapiens
  CDR3 for alpha chain variable domain of TCR clone 330695 (TRAV13-1, TRAJ5)
CSNPSLSRDTGRRALTF

SEQ ID NO: 661390 - protein, 17 aa, Homo sapiens
  CDR3 for beta chain variable domain of TCR clone 330695 (TRBV24-1, TRBJ2-1)
CATSDVSTSGTYNEKFF

SEQ ID NO: 661391 - protein, 14 aa, Homo sapiens
  CDR3 for alpha chain variable domain of TCR clone 330696 (TRAV13-1, TRAJ35)
CAASKGGFGNVLHC

SEQ ID NO: 661392 - protein, 15 aa, Homo sapiens
  CDR3 for beta chain variable domain of TCR clone 330696 (TRBV7-3, TRBJ1-1)
VSLGQQPGLGAEAFF

SEQ ID NO: 661393 - protein, 15 aa, Homo sapiens
  CDR3 for alpha chain variable domain of TCR clone 330697 (TRAV3, TRAJ5)
CAVRDLDTSRRALTF

SEQ ID NO: 661394 - protein, 14 aa, Homo sapiens
  CDR3 for beta chain variable domain of TCR clone 330697 (TRBV25-1, TRBJ1-1)
CASTHLGGNTEAFF

SEQ ID NO: 661395 - protein, 14 aa, Homo sapiens
  CDR3 for alpha chain variable domain of TCR clone 330698 (TRAV12-2, TRAJ13)
CAVKKTGGNQKVTF

SEQ ID NO: 661396 - protein, 13 aa, Homo sapiens
  CDR3 for beta chain variable domain of TCR clone 330698 (TRBV20-1, TRBJ1-1)
CSARLGQGTEAFF

SEQ ID NO: 661397 - protein, 14 aa, Homo sapiens
  CDR3 for alpha chain variable domain of TCR clone 330699 (TRAV2, TRAJ9)
CAVEDRSGGFKTIF

SEQ ID NO: 661398 - protein, 15 aa, Homo sapiens
  CDR3 for beta chain variable domain of TCR clone 330699 (TRBV19, TRBJ1-6)
CASSTQGAVGSPLHF

SEQ ID NO: 661399 - protein, 13 aa, Homo sapiens
  CDR3 for alpha chain variable domain of TCR clone 330700 (TRAV21, TRAJ27)
CAARPGNVGKSTF

SEQ ID NO: 661400 - protein, 14 aa, Homo sapiens
  CDR3 for beta chain variable domain of TCR clone 330700 (TRBV19, TRBJ2-7)
CASSLRDRGYEQYF

SEQ ID NO: 661401 - protein, 13 aa, Homo sapiens
  CDR3 for alpha chain variable domain of TCR clone 330701 (TRAV3, TRAJ27)
CAVRPLGAGNSTF

SEQ ID NO: 661402 - protein, 16 aa, Homo sapiens
  CDR3 for beta chain variable domain of TCR clone 330701 (TRBV7-3, TRBJ2-2)
CASSLKRGTLSGELFF

SEQ ID NO: 661403 - protein, 17 aa, Homo sapiens
  CDR3 for alpha chain variable domain of TCR clone 330702 (TRAV3, TRAJ6)
CAVRDGPRAGGSYIPTF

SEQ ID NO: 661404 - protein, 15 aa, Homo sapiens
  CDR3 for beta chain variable domain of TCR clone 330702 (TRBV2, TRBJ2-1)
CASSEARSAYNEQFF

SEQ ID NO: 661405 - protein, 15 aa, Homo sapiens
  CDR3 for alpha chain variable domain of TCR clone 330703 (TRAV2, TRAJ24)
CAVVRLKNSWGTLQF

SEQ ID NO: 661406 - protein, 16 aa, Homo sapiens
  CDR3 for beta chain variable domain of TCR clone 330703 (TRBV7-7, TRBJ2-3)
CASSPGTSGSTDTQYF

SEQ ID NO: 661407 - protein, 14 aa, Homo sapiens
  CDR3 for alpha chain variable domain of TCR clone 330704 (TRAV1-1, TRAJ28)
CAAPSGAGSYQLTF

SEQ ID NO: 661408 - protein, 16 aa, Homo sapiens
  CDR3 for beta chain variable domain of TCR clone 330704 (TRBV29-1, TRBJ1-2)
CSVEANRDIANYGYTF

SEQ ID NO: 661409 - protein, 11 aa, Homo sapiens
  CDR3 for alpha chain variable domain of TCR clone 330705 (TRAV12-3, TRAJ43)
CAMSVPNDMRL

SEQ ID NO: 661410 - protein, 13 aa, Homo sapiens
  CDR3 for beta chain variable domain of TCR clone 330705 (TRBV20-1, TRBJ1-1)
CSAPLGGGTEAFF

SEQ ID NO: 661411 - protein, 12 aa, Homo sapiens
  CDR3 for alpha chain variable domain of TCR clone 330706 (TRAV2, TRAJ33)
CAFMDSNYQLIW

SEQ ID NO: 661412 - protein, 17 aa, Homo sapiens
  CDR3 for beta chain variable domain of TCR clone 330706 (TRBV28, TRBJ2-5)
CASSTPEGDALQETQYF

SEQ ID NO: 661413 - protein, 14 aa, Homo sapiens
  CDR3 for alpha chain variable domain of TCR clone 330707 (TRAV17, TRAJ32)
CSTDPGGATNKLIF

SEQ ID NO: 661414 - protein, 14 aa, Homo sapiens
  CDR3 for beta chain variable domain of TCR clone 330707 (TRBV2, TRBJ1-5)
CASSENRGGQPQHF

SEQ ID NO: 661415 - protein, 15 aa, Homo sapiens
  CDR3 for alpha chain variable domain of TCR clone 330708 (TRAV26-1, TRAJ44)
CIVRANTGTASKLTF

SEQ ID NO: 661416 - protein, 13 aa, Homo sapiens
  CDR3 for beta chain variable domain of TCR clone 330708 (TRBV10-3, TRBJ2-7)
CTSKLAVNYEQYF

SEQ ID NO: 661417 - protein, 12 aa, Homo sapiens
  CDR3 for alpha chain variable domain of TCR clone 330709 (TRAV17, TRAJ30)
CVPERRDDKVIF

SEQ ID NO: 661418 - protein, 14 aa, Homo sapiens
  CDR3 for beta chain variable domain of TCR clone 330709 (TRBV7-7, TRBJ2-2)
CASSRDRSTGELFF

SEQ ID NO: 661419 - protein, 14 aa, Homo sapiens
  CDR3 for alpha chain variable domain of TCR clone 330710 (TRAV13-1, TRAJ44)
CAAKATGTASKLTF

SEQ ID NO: 661420 - protein, 15 aa, Homo sapiens
  CDR3 for beta chain variable domain of TCR clone 330710 (TRBV12-4, TRBJ2-5)
CASSGTGQAQETQYF

SEQ ID NO: 661421 - protein, 13 aa, Homo sapiens
  CDR3 for alpha chain variable domain of TCR clone 330711 (TRAV17, TRAJ21)
CATDGGNFNKFYF

SEQ ID NO: 661422 - protein, 14 aa, Homo sapiens
  CDR3 for beta chain variable domain of TCR clone 330711 (TRBV7-2, TRBJ2-7)
CASSPKTSFYEQYF

SEQ ID NO: 661423 - protein, 14 aa, Homo sapiens
  CDR3 for alpha chain variable domain of TCR clone 330712 (TRAV1-2, TRAJ16)
CAVSRVSDGQKLLF

SEQ ID NO: 661424 - protein, 11 aa, Homo sapiens
  CDR3 for beta chain variable domain of TCR clone 330712 (TRBV29-1, TRBJ2-5)
CSEDRTGTQYF

SEQ ID NO: 661425 - protein, 14 aa, Homo sapiens
  CDR3 for alpha chain variable domain of TCR clone 330713 (TRAV21, TRAJ58)
CAVRRVRSGSRVTF

SEQ ID NO: 661426 - protein, 13 aa, Homo sapiens
  CDR3 for beta chain variable domain of TCR clone 330713 (TRBV7-2, TRBJ1-6)
CASSLKFDSPLHF

SEQ ID NO: 661427 - protein, 13 aa, Homo sapiens
  CDR3 for alpha chain variable domain of TCR clone 330714 (TRAV8-2, TRAJ43)
CVVSDQGDNDMLF

SEQ ID NO: 661428 - protein, 12 aa, Homo sapiens
  CDR3 for beta chain variable domain of TCR clone 330714 (TRBV7-9, TRBJ2-7)
CASRTGFDEQYF

SEQ ID NO: 661429 - protein, 14 aa, Homo sapiens
  CDR3 for alpha chain variable domain of TCR clone 330715 (TRAV8-3, TRAJ44)
CAVGNTSTASKLTF

SEQ ID NO: 661430 - protein, 13 aa, Homo sapiens
  CDR3 for beta chain variable domain of TCR clone 330715 (TRBV7-9, TRBJ1-2)
CASSLKQNNGYTF

SEQ ID NO: 661431 - protein, 14 aa, Homo sapiens
  CDR3 for alpha chain variable domain of TCR clone 330716 (TRAV2, TRAJ37)
CAVDFTSNKGKLIF

SEQ ID NO: 661432 - protein, 13 aa, Homo sapiens
  CDR3 for beta chain variable domain of TCR clone 330716 (TRBV20-1, TRBJ1-1)
CSAPLGGGTEAFF

SEQ ID NO: 661433 - protein, 12 aa, Homo sapiens
  CDR3 for alpha chain variable domain of TCR clone 330717 (TRAV27, TRAJ11)
CAGASGYSTLTF

SEQ ID NO: 661434 - protein, 13 aa, Homo sapiens
  CDR3 for beta chain variable domain of TCR clone 330717 (TRBV7-3, TRBJ1-1)
CQQLKGGNTEAFF

SEQ ID NO: 661435 - protein, 13 aa, Homo sapiens
  CDR3 for alpha chain variable domain of TCR clone 330718 (TRAV21, TRAJ20)
CAVGLRVYYKLSF

SEQ ID NO: 661436 - protein, 13 aa, Homo sapiens
  CDR3 for beta chain variable domain of TCR clone 330718 (TRBV6-1, TRBJ1-1)
CASSRQGNNGAFL

SEQ ID NO: 661437 - protein, 14 aa, Homo sapiens
  CDR3 for alpha chain variable domain of TCR clone 330719 (TRAV38-1, TRAJ40)
CALRPTSGTYKYIF

SEQ ID NO: 661438 - protein, 18 aa, Homo sapiens
  CDR3 for beta chain variable domain of TCR clone 330719 (TRBV5-1, TRBJ1-6)
CASSVGGGYGERNSPLHF

SEQ ID NO: 661439 - protein, 15 aa, Homo sapiens
  CDR3 for alpha chain variable domain of TCR clone 330720 (TRAV21, TRAJ45)
CAVSYSGGGADGLTF

SEQ ID NO: 661440 - protein, 13 aa, Homo sapiens
  CDR3 for beta chain variable domain of TCR clone 330720 (TRBV7-7, TRBJ2-3)
CASSLSRADTQYF

SEQ ID NO: 661441 - protein, 15 aa, Homo sapiens
  CDR3 for alpha chain variable domain of TCR clone 330721 (TRAV8-3, TRAJ11)
CAVGLLNSGYSPLTF

SEQ ID NO: 661442 - protein, 16 aa, Homo sapiens
  CDR3 for beta chain variable domain of TCR clone 330721 (TRBV7-9, TRBJ1-2)
CASSLGFSSVEDGYTF

SEQ ID NO: 661443 - protein, 11 aa, Homo sapiens
  CDR3 for alpha chain variable domain of TCR clone 330722 (TRAV12-1, TRAJ21)
CVVNNFNKFYF

SEQ ID NO: 661444 - protein, 12 aa, Homo sapiens
  CDR3 for beta chain variable domain of TCR clone 330722 (TRBV11-2, TRBJ2-5)
CASSLGQETQYF

SEQ ID NO: 661445 - protein, 19 aa, Homo sapiens
  CDR3 for alpha chain variable domain of TCR clone 330723 (TRAV30, TRAJ52)
CGTEANTNAGGTSYGKLTF

SEQ ID NO: 661446 - protein, 17 aa, Homo sapiens
  CDR3 for beta chain variable domain of TCR clone 330723 (TRBV28, TRBJ2-7)
CASSPLRGRRWKGGQCF

SEQ ID NO: 661447 - protein, 13 aa, Homo sapiens
  CDR3 for alpha chain variable domain of TCR clone 330724 (TRAV12-3, TRAJ33)
WSMSVNSNYQLIW

SEQ ID NO: 661448 - protein, 13 aa, Homo sapiens
  CDR3 for beta chain variable domain of TCR clone 330724 (TRBV7-2, TRBJ2-2)
CASSLAVTGELFF

SEQ ID NO: 661449 - protein, 18 aa, Homo sapiens
  CDR3 for alpha chain variable domain of TCR clone 330725 (TRAV2, TRAJ32)
CCLLLCLHYGCATNKLIF

SEQ ID NO: 661450 - protein, 16 aa, Homo sapiens
  CDR3 for beta chain variable domain of TCR clone 330725 (TRBV7-9, TRBJ2-7)
CASSYPDREGGYEQYF

SEQ ID NO: 661451 - protein, 14 aa, Homo sapiens
  CDR3 for alpha chain variable domain of TCR clone 330726 (TRAV1-2, TRAJ8)
CAVREDTGSQKLVF

SEQ ID NO: 661452 - protein, 12 aa, Homo sapiens
  CDR3 for beta chain variable domain of TCR clone 330726 (TRBV12-4, TRBJ2-7)
CASSLGGYEQYF

SEQ ID NO: 661453 - protein, 14 aa, Homo sapiens
  CDR3 for alpha chain variable domain of TCR clone 330727 (TRAV2, TRAJ9)
CAVEDRSGGFKTIF

SEQ ID NO: 661454 - protein, 12 aa, Homo sapiens
  CDR3 for beta chain variable domain of TCR clone 330727 (TRBV12-5, TRBJ2-5)
CASGQGVETHYF

SEQ ID NO: 661455 - protein, 10 aa, Homo sapiens
  CDR3 for alpha chain variable domain of TCR clone 330728 (TRAV12-3, TRAJ49)
CAMNDDQFYF

SEQ ID NO: 661456 - protein, 15 aa, Homo sapiens
  CDR3 for beta chain variable domain of TCR clone 330728 (TRBV7-3, TRBJ2-2)
CASSETGQGTGELFF

SEQ ID NO: 661457 - protein, 15 aa, Homo sapiens
  CDR3 for alpha chain variable domain of TCR clone 330729 (TRAV17, TRAJ57)
CATGPSQGGSEKLVF

SEQ ID NO: 661458 - protein, 16 aa, Homo sapiens
  CDR3 for beta chain variable domain of TCR clone 330729 (TRBV19, TRBJ1-1)
CASRPRSEALNTEAFF

SEQ ID NO: 661459 - protein, 14 aa, Homo sapiens
  CDR3 for alpha chain variable domain of TCR clone 330730 (TRAV12-3, TRAJ29)
CSMILLSGNTPLVF

SEQ ID NO: 661460 - protein, 16 aa, Homo sapiens
  CDR3 for beta chain variable domain of TCR clone 330730 (TRBV28, TRBJ2-7)
CASSSGTSGRGYEQYF

SEQ ID NO: 661461 - protein, 17 aa, Homo sapiens
  CDR3 for alpha chain variable domain of TCR clone 330731 (TRAV20, TRAJ28)
CAVQGGYSGAGSYQLTF

SEQ ID NO: 661462 - protein, 15 aa, Homo sapiens
  CDR3 for beta chain variable domain of TCR clone 330731 (TRBV7-2, TRBJ2-7)
CASSLYSGRTYEQYF

SEQ ID NO: 661463 - protein, 17 aa, Homo sapiens
  CDR3 for alpha chain variable domain of TCR clone 330732 (TRAV27, TRAJ42)
CAERVIYYGGSQGNLIF

SEQ ID NO: 661464 - protein, 14 aa, Homo sapiens
  CDR3 for beta chain variable domain of TCR clone 330732 (TRBV19, TRBJ2-7)
CASSIFAGTYEQYF

SEQ ID NO: 661465 - protein, 18 aa, Homo sapiens
  CDR3 for alpha chain variable domain of TCR clone 330733 (TRAV13-1, TRAJ52)
CAAKNPNAGGTSYGKMTF

SEQ ID NO: 661466 - protein, 14 aa, Homo sapiens
  CDR3 for beta chain variable domain of TCR clone 330733 (TRBV7-8, TRBJ2-3)
CASSLEAGTDTQYF

SEQ ID NO: 661467 - protein, 15 aa, Homo sapiens
  CDR3 for alpha chain variable domain of TCR clone 330734 (TRAV3, TRAJ3)
CAVRDRRSSAAKISF

SEQ ID NO: 661468 - protein, 13 aa, Homo sapiens
  CDR3 for beta chain variable domain of TCR clone 330734 (TRBV9, TRBJ2-5)
CASSPAGLGTQYF

SEQ ID NO: 661469 - protein, 15 aa, Homo sapiens
  CDR3 for alpha chain variable domain of TCR clone 330735 (TRAV29/DV5, TRAJ42)
CAAKTDGGSQGNLIF

SEQ ID NO: 661470 - protein, 15 aa, Homo sapiens
  CDR3 for beta chain variable domain of TCR clone 330735 (TRBV5-1, TRBJ2-2)
CASSCQGGNTGELFF

SEQ ID NO: 661471 - protein, 13 aa, Homo sapiens
  CDR3 for alpha chain variable domain of TCR clone 330736 (TRAV12-2, TRAJ6)
CAVNVSWKLHTYI

SEQ ID NO: 661472 - protein, 12 aa, Homo sapiens
  CDR3 for beta chain variable domain of TCR clone 330736 (TRBV29-1, TRBJ2-3)
CSVTGGADTQYF

SEQ ID NO: 661473 - protein, 15 aa, Homo sapiens
  CDR3 for alpha chain variable domain of TCR clone 330737 (TRAV26-1, TRAJ39)
CIVRVARNAGNMLTF

SEQ ID NO: 661474 - protein, 16 aa, Homo sapiens
  CDR3 for beta chain variable domain of TCR clone 330737 (TRBV24-1, TRBJ2-3)
CATSDPGTGATDTQYF

SEQ ID NO: 661475 - protein, 16 aa, Homo sapiens
  CDR3 for alpha chain variable domain of TCR clone 330738 (TRAV30, TRAJ48)
CGTEIKSNFGNEKLTF

SEQ ID NO: 661476 - protein, 17 aa, Homo sapiens
  CDR3 for beta chain variable domain of TCR clone 330738 (TRBV27, TRBJ2-1)
CASSSERGGQPADEQFF

SEQ ID NO: 661477 - protein, 13 aa, Homo sapiens
  CDR3 for alpha chain variable domain of TCR clone 330739 (TRAV2, TRAJ40)
CAVVPSGTYKYIF

SEQ ID NO: 661478 - protein, 14 aa, Homo sapiens
  CDR3 for beta chain variable domain of TCR clone 330739 (TRBV28, TRBJ2-1)
CASSYYTAYNEQFF

SEQ ID NO: 661479 - protein, 14 aa, Homo sapiens
  CDR3 for alpha chain variable domain of TCR clone 330740 (TRAV35, TRAJ33)
CAGSSQDSNYQLSW

SEQ ID NO: 661480 - protein, 15 aa, Homo sapiens
  CDR3 for beta chain variable domain of TCR clone 330740 (TRBV20-1, TRBJ2-7)
CSAESGTSGAYEQYF

SEQ ID NO: 661481 - protein, 19 aa, Homo sapiens
  CDR3 for alpha chain variable domain of TCR clone 330741 (TRAV17, TRAJ40)
TASRAAETASYFCASKYIF

SEQ ID NO: 661482 - protein, 17 aa, Homo sapiens
  CDR3 for beta chain variable domain of TCR clone 330741 (TRBV11-2, TRBJ2-4)
CASSFLALGGAGDIQYF

SEQ ID NO: 661483 - protein, 14 aa, Homo sapiens
  CDR3 for alpha chain variable domain of TCR clone 330742 (TRAV12-2, TRAJ13)
CAAKKTGGYQKVTF

SEQ ID NO: 661484 - protein, 16 aa, Homo sapiens
  CDR3 for beta chain variable domain of TCR clone 330742 (TRBV4-1, TRBJ2-3)
CASSQSTSGAEDTQHF

SEQ ID NO: 661485 - protein, 17 aa, Homo sapiens
  CDR3 for alpha chain variable domain of TCR clone 330743 (TRAV26-2, TRAJ32)
ERGCCVGYGGATNKLIF

SEQ ID NO: 661486 - protein, 14 aa, Homo sapiens
  CDR3 for beta chain variable domain of TCR clone 330743 (TRBV4-2, TRBJ2-1)
CASGLDRAYNEQFF

SEQ ID NO: 661487 - protein, 13 aa, Homo sapiens
  CDR3 for alpha chain variable domain of TCR clone 330744 (TRAV8-3, TRAJ43)
CAVVPYNNNDMRF

SEQ ID NO: 661488 - protein, 16 aa, Homo sapiens
  CDR3 for beta chain variable domain of TCR clone 330744 (TRBV5-1, TRBJ2-5)
CASSLGTGEVGETQYF

SEQ ID NO: 661489 - protein, 16 aa, Homo sapiens
  CDR3 for alpha chain variable domain of TCR clone 330745 (TRAV8-3, TRAJ44)
CAVGASNTGTASKLTF

SEQ ID NO: 661490 - protein, 14 aa, Homo sapiens
  CDR3 for beta chain variable domain of TCR clone 330745 (TRBV7-2, TRBJ2-7)
CASRSQGAAYEQYF

SEQ ID NO: 661491 - protein, 14 aa, Homo sapiens
  CDR3 for alpha chain variable domain of TCR clone 330746 (TRAV2, TRAJ9)
CAVEDRRGGFKTIF

SEQ ID NO: 661492 - protein, 15 aa, Homo sapiens
  CDR3 for beta chain variable domain of TCR clone 330746 (TRBV28, TRBJ1-3)
CASSMGWASGNTIYF

SEQ ID NO: 661493 - protein, 14 aa, Homo sapiens
  CDR3 for alpha chain variable domain of TCR clone 330747 (TRAV12-2, TRAJ13)
CAVKKTGGYQKVTF

SEQ ID NO: 661494 - protein, 14 aa, Homo sapiens
  CDR3 for beta chain variable domain of TCR clone 330747 (TRBV10-3, TRBJ2-1)
CASSSDLAYNEQFF

SEQ ID NO: 661495 - protein, 13 aa, Homo sapiens
  CDR3 for alpha chain variable domain of TCR clone 330748 (TRAV27, TRAJ45)
CRSSGGGADGLTF

SEQ ID NO: 661496 - protein, 14 aa, Homo sapiens
  CDR3 for beta chain variable domain of TCR clone 330748 (TRBV7-2, TRBJ2-7)
CASRSQGAAYEQYF

SEQ ID NO: 661497 - protein, 14 aa, Homo sapiens
  CDR3 for alpha chain variable domain of TCR clone 330749 (TRAV3, TRAJ37)
CAVKESGNTGKLIF

SEQ ID NO: 661498 - protein, 14 aa, Homo sapiens
  CDR3 for beta chain variable domain of TCR clone 330749 (TRBV15, TRBJ2-3)
CATARDGGGDTQYF

SEQ ID NO: 661499 - protein, 12 aa, Homo sapiens
  CDR3 for alpha chain variable domain of TCR clone 330750 (TRAV21, TRAJ33)
CAKMDSNYQLIW

SEQ ID NO: 661500 - protein, 13 aa, Homo sapiens
  CDR3 for beta chain variable domain of TCR clone 330750 (TRBV7-6, TRBJ1-2)
CASSLVADYGYTF

SEQ ID NO: 661501 - protein, 13 aa, Homo sapiens
  CDR3 for alpha chain variable domain of TCR clone 330751 (TRAV25, TRAJ10)
CAGRTGGGNKLTF

SEQ ID NO: 661502 - protein, 15 aa, Homo sapiens
  CDR3 for beta chain variable domain of TCR clone 330751 (TRBV27, TRBJ1-4)
CASSPRHATNEKLFF

SEQ ID NO: 661503 - protein, 15 aa, Homo sapiens
  CDR3 for alpha chain variable domain of TCR clone 330752 (TRAV8-6, TRAJ6)
CAVSGESGGSYIPTF

SEQ ID NO: 661504 - protein, 16 aa, Homo sapiens
  CDR3 for beta chain variable domain of TCR clone 330752 (TRBV2, TRBJ2-1)
CASSVGGSLSYNEQFF

SEQ ID NO: 661505 - protein, 17 aa, Homo sapiens
  CDR3 for alpha chain variable domain of TCR clone 330753 (TRAV26-1, TRAJ46)
IASSESEKKSSGDKLTF

SEQ ID NO: 661506 - protein, 13 aa, Homo sapiens
  CDR3 for beta chain variable domain of TCR clone 330753 (TRBV7-2, TRBJ2-2)
CASSLAVTGELFF

SEQ ID NO: 661507 - protein, 19 aa, Homo sapiens
  CDR3 for alpha chain variable domain of TCR clone 330754 (TRAV26-1, TRAJ28)
CIVRVAHAYSGAGSYQLTF

SEQ ID NO: 661508 - protein, 12 aa, Homo sapiens
  CDR3 for beta chain variable domain of TCR clone 330754 (TRBV27, TRBJ2-2)
CASELFTGELFF

SEQ ID NO: 661509 - protein, 12 aa, Homo sapiens
  CDR3 for alpha chain variable domain of TCR clone 330755 (TRAV8-3, TRAJ26)
CAGDNYAQNFVF

SEQ ID NO: 661510 - protein, 11 aa, Homo sapiens
  CDR3 for beta chain variable domain of TCR clone 330755 (TRBV24-1, TRBJ2-3)
CATASTDTQYF

SEQ ID NO: 661511 - protein, 12 aa, Homo sapiens
  CDR3 for alpha chain variable domain of TCR clone 330756 (TRAV13-1, TRAJ49)
CAASPMGNKLYF

SEQ ID NO: 661512 - protein, 13 aa, Homo sapiens
  CDR3 for beta chain variable domain of TCR clone 330756 (TRBV20-1, TRBJ2-2)
CSASAAGTGELFF

SEQ ID NO: 661513 - protein, 12 aa, Homo sapiens
  CDR3 for alpha chain variable domain of TCR clone 330757 (TRAV3, TRAJ13)
CAVSPTYQKVTF

SEQ ID NO: 661514 - protein, 13 aa, Homo sapiens
  CDR3 for beta chain variable domain of TCR clone 330757 (TRBV12-4, TRBJ1-1)
CASSPGTGFEAFF

SEQ ID NO: 661515 - protein, 18 aa, Homo sapiens
  CDR3 for alpha chain variable domain of TCR clone 330758 (TRAV13-2, TRAJ20)
CSYSTWRLSCLLVHKLSF

SEQ ID NO: 661516 - protein, 13 aa, Homo sapiens
  CDR3 for beta chain variable domain of TCR clone 330758 (TRBV2, TRBJ1-4)
CASSERAGEKLFY

SEQ ID NO: 661517 - protein, 14 aa, Homo sapiens
  CDR3 for alpha chain variable domain of TCR clone 330759 (TRAV1-1, TRAJ27)
CAVIYNTNAGKSTF

SEQ ID NO: 661518 - protein, 15 aa, Homo sapiens
  CDR3 for beta chain variable domain of TCR clone 330759 (TRBV29-1, TRBJ2-1)
CSVPTGLALYNEQFF

SEQ ID NO: 661519 - protein, 14 aa, Homo sapiens
  CDR3 for alpha chain variable domain of TCR clone 330760 (TRAV3, TRAJ36)
CAVRDGTGANNLFF

SEQ ID NO: 661520 - protein, 16 aa, Homo sapiens
  CDR3 for beta chain variable domain of TCR clone 330760 (TRBV7-3, TRBJ2-5)
CDSIQPGGSVQETQYF

SEQ ID NO: 661521 - protein, 12 aa, Homo sapiens
  CDR3 for alpha chain variable domain of TCR clone 330761 (TRAV36/DV7, TRAJ26)
CAADNYGQNFVF

SEQ ID NO: 661522 - protein, 18 aa, Homo sapiens
  CDR3 for beta chain variable domain of TCR clone 330761 (TRBV7-6, TRBJ2-1)
CASSPRTSGMSSYNEQFF

SEQ ID NO: 661523 - protein, 16 aa, Homo sapiens
  CDR3 for alpha chain variable domain of TCR clone 330762 (TRAV30, TRAJ24)
CGTEIVDADSWGKFQF

SEQ ID NO: 661524 - protein, 12 aa, Homo sapiens
  CDR3 for beta chain variable domain of TCR clone 330762 (TRBV7-2, TRBJ2-2)
CASSLGGGELFF

SEQ ID NO: 661525 - protein, 15 aa, Homo sapiens
  CDR3 for alpha chain variable domain of TCR clone 330763 (TRAV2, TRAJ13)
CATPSYSGGYQKVTF

SEQ ID NO: 661526 - protein, 16 aa, Homo sapiens
  CDR3 for beta chain variable domain of TCR clone 330763 (TRBV19, TRBJ2-1)
CASSKAGPSSYNEQFF

SEQ ID NO: 661527 - protein, 15 aa, Homo sapiens
  CDR3 for alpha chain variable domain of TCR clone 330764 (TRAV3, TRAJ3)
CAVRDGHSSASKIFF

SEQ ID NO: 661528 - protein, 14 aa, Homo sapiens
  CDR3 for beta chain variable domain of TCR clone 330764 (TRBV28, TRBJ1-4)
CASSFGTFDEKLFF

SEQ ID NO: 661529 - protein, 18 aa, Homo sapiens
  CDR3 for alpha chain variable domain of TCR clone 330765 (TRAV12-3, TRAJ52)
CAMSRTNAGGTSYGKLTF

SEQ ID NO: 661530 - protein, 17 aa, Homo sapiens
  CDR3 for beta chain variable domain of TCR clone 330765 (TRBV7-3, TRBJ2-3)
CASSLMKRMRGADTEYF

SEQ ID NO: 661531 - protein, 13 aa, Homo sapiens
  CDR3 for alpha chain variable domain of TCR clone 330766 (TRAV13-1, TRAJ26)
CAIVFGPGTRLSV

SEQ ID NO: 661532 - protein, 15 aa, Homo sapiens
  CDR3 for beta chain variable domain of TCR clone 330766 (TRBV12-4, TRBJ2-1)
YASSLLGRTYNEQFF

SEQ ID NO: 661533 - protein, 15 aa, Homo sapiens
  CDR3 for alpha chain variable domain of TCR clone 330767 (TRAV27, TRAJ38)
CAARRNAGNNRKLIW

SEQ ID NO: 661534 - protein, 15 aa, Homo sapiens
  CDR3 for beta chain variable domain of TCR clone 330767 (TRBV5-1, TRBJ1-1)
CASSLGEGENTEAFF

SEQ ID NO: 661535 - protein, 14 aa, Homo sapiens
  CDR3 for alpha chain variable domain of TCR clone 330768 (TRAV34, TRAJ22)
CGADTSGSARQLTF

SEQ ID NO: 661536 - protein, 13 aa, Homo sapiens
  CDR3 for beta chain variable domain of TCR clone 330768 (TRBV7-3, TRBJ1-1)
CASSQDWGAEDFF

SEQ ID NO: 661537 - protein, 16 aa, Homo sapiens
  CDR3 for alpha chain variable domain of TCR clone 330769 (TRAV12-3, TRAJ53)
CAMSPGSGGRNYKLTF

SEQ ID NO: 661538 - protein, 20 aa, Homo sapiens
  CDR3 for beta chain variable domain of TCR clone 330769 (TRBV7-8, TRBJ2-2)
CACSHLFPGPTIHITGELFF

SEQ ID NO: 661539 - protein, 15 aa, Homo sapiens
  CDR3 for alpha chain variable domain of TCR clone 330770 (TRAV2, TRAJ24)
CAVEGLTDSWGKFQF

SEQ ID NO: 661540 - protein, 14 aa, Homo sapiens
  CDR3 for beta chain variable domain of TCR clone 330770 (TRBV19, TRBJ2-1)
CASSMGSGRRSSSS

SEQ ID NO: 661541 - protein, 14 aa, Homo sapiens
  CDR3 for alpha chain variable domain of TCR clone 330771 (TRAV26-1, TRAJ38)
VIADNAGNNRKLIW

SEQ ID NO: 661542 - protein, 13 aa, Homo sapiens
  CDR3 for beta chain variable domain of TCR clone 330771 (TRBV20-1, TRBJ1-1)
CSARGGGNTEAFF

SEQ ID NO: 661543 - protein, 12 aa, Homo sapiens
  CDR3 for alpha chain variable domain of TCR clone 330772 (TRAV23/DV6, TRAJ30)
CAASKGDDKIIF

SEQ ID NO: 661544 - protein, 15 aa, Homo sapiens
  CDR3 for beta chain variable domain of TCR clone 330772 (TRBV20-1, TRBJ2-7)
CSARDRVSGMDEQYV

SEQ ID NO: 661545 - protein, 14 aa, Homo sapiens
  CDR3 for alpha chain variable domain of TCR clone 330773 (TRAV1-2, TRAJ16)
CAVNRFSDGQKLLF

SEQ ID NO: 661546 - protein, 16 aa, Homo sapiens
  CDR3 for beta chain variable domain of TCR clone 330773 (TRBV5-1, TRBJ1-1)
CASSKTGTEVGTEAFF

SEQ ID NO: 661547 - protein, 12 aa, Homo sapiens
  CDR3 for alpha chain variable domain of TCR clone 330774 (TRAV24, TRAJ22)
CAPGGSARQLTF

SEQ ID NO: 661548 - protein, 16 aa, Homo sapiens
  CDR3 for beta chain variable domain of TCR clone 330774 (TRBV7-3, TRBJ2-1)
CASSLSSGGGAKEQFF

SEQ ID NO: 661549 - protein, 11 aa, Homo sapiens
  CDR3 for alpha chain variable domain of TCR clone 330775 (TRAV17, TRAJ43)
CATPRSNDMRF

SEQ ID NO: 661550 - protein, 15 aa, Homo sapiens
  CDR3 for beta chain variable domain of TCR clone 330775 (TRBV7-9, TRBJ2-7)
CASSLALAEAYEQYF

SEQ ID NO: 661551 - protein, 13 aa, Homo sapiens
  CDR3 for alpha chain variable domain of TCR clone 330776 (TRAV2, TRAJ40)
CALVTSGTYKYIF

SEQ ID NO: 661552 - protein, 13 aa, Homo sapiens
  CDR3 for beta chain variable domain of TCR clone 330776 (TRBV7-9, TRBJ2-5)
CASLPSGRETQYF

SEQ ID NO: 661553 - protein, 14 aa, Homo sapiens
  CDR3 for alpha chain variable domain of TCR clone 330777 (TRAV1-2, TRAJ8)
CAVREDTGFQKLVF

SEQ ID NO: 661554 - protein, 13 aa, Homo sapiens
  CDR3 for beta chain variable domain of TCR clone 330777 (TRBV6-1, TRBJ1-2)
CASSEGTHYGYTF

SEQ ID NO: 661555 - protein, 11 aa, Homo sapiens
  CDR3 for alpha chain variable domain of TCR clone 330778 (TRAV3, TRAJ21)
CAVGNFNKFYF

SEQ ID NO: 661556 - protein, 19 aa, Homo sapiens
  CDR3 for beta chain variable domain of TCR clone 330778 (TRBV7-9, TRBJ2-6)
CASSLESATVLPGANVLTF

SEQ ID NO: 661557 - protein, 10 aa, Homo sapiens
  CDR3 for alpha chain variable domain of TCR clone 330779 (TRAV16, TRAJ22)
SAMYLRQLTF

SEQ ID NO: 661558 - protein, 13 aa, Homo sapiens
  CDR3 for beta chain variable domain of TCR clone 330779 (TRBV7-9, TRBJ2-3)
CASSAAGSDTQYF

SEQ ID NO: 661559 - protein, 14 aa, Homo sapiens
  CDR3 for alpha chain variable domain of TCR clone 330780 (TRAV29/DV5, TRAJ36)
CAARRKTGAHTLFF

SEQ ID NO: 661560 - protein, 15 aa, Homo sapiens
  CDR3 for beta chain variable domain of TCR clone 330780 (TRBV11-3, TRBJ2-3)
CASLKDGREGDTQYF

SEQ ID NO: 661561 - protein, 12 aa, Homo sapiens
  CDR3 for alpha chain variable domain of TCR clone 330781 (TRAV30, TRAJ43)
CGTEERGNDIRF

SEQ ID NO: 661562 - protein, 11 aa, Homo sapiens
  CDR3 for beta chain variable domain of TCR clone 330781 (TRBV29-1, TRBJ2-5)
CSEDRTGTQYF

SEQ ID NO: 661563 - protein, 14 aa, Homo sapiens
  CDR3 for alpha chain variable domain of TCR clone 330782 (TRAV12-2, TRAJ24)
CAVTPADSWGQLPF

SEQ ID NO: 661564 - protein, 12 aa, Homo sapiens
  CDR3 for beta chain variable domain of TCR clone 330782 (TRBV3-1, TRBJ2-1)
CASSQGSSGQFF

SEQ ID NO: 661565 - protein, 12 aa, Homo sapiens
  CDR3 for alpha chain variable domain of TCR clone 330783 (TRAV12-3, TRAJ17)
CAMTLTGNKRTF

SEQ ID NO: 661566 - protein, 13 aa, Homo sapiens
  CDR3 for beta chain variable domain of TCR clone 330783 (TRBV12-4, TRBJ1-1)
CASSPGTGFEAFF

SEQ ID NO: 661567 - protein, 17 aa, Homo sapiens
  CDR3 for alpha chain variable domain of TCR clone 330784 (TRAV23/DV6, TRAJ28)
CAALLASSGAGSYQLTF

SEQ ID NO: 661568 - protein, 13 aa, Homo sapiens
  CDR3 for beta chain variable domain of TCR clone 330784 (TRBV4-2, TRBJ2-3)
CASSQVNTDTQYF

SEQ ID NO: 661569 - protein, 13 aa, Homo sapiens
  CDR3 for alpha chain variable domain of TCR clone 330785 (TRAV2, TRAJ29)
CAAQNSGNTPLVF

SEQ ID NO: 661570 - protein, 14 aa, Homo sapiens
  CDR3 for beta chain variable domain of TCR clone 330785 (TRBV7-9, TRBJ2-4)
CTSSLAMGGNIQYF

SEQ ID NO: 661571 - protein, 15 aa, Homo sapiens
  CDR3 for alpha chain variable domain of TCR clone 330786 (TRAV13-2, TRAJ8)
CAENKRDTCFQKLVF

SEQ ID NO: 661572 - protein, 14 aa, Homo sapiens
  CDR3 for beta chain variable domain of TCR clone 330786 (TRBV6-1, TRBJ1-3)
CASVQGGGGNTIYF

SEQ ID NO: 661573 - protein, 11 aa, Homo sapiens
  CDR3 for alpha chain variable domain of TCR clone 330787 (TRAV13-2, TRAJ20)
CADFNDYKLSF

SEQ ID NO: 661574 - protein, 12 aa, Homo sapiens
  CDR3 for beta chain variable domain of TCR clone 330787 (TRBV11-2, TRBJ2-2)
CASSLGGGELFF

SEQ ID NO: 661575 - protein, 15 aa, Homo sapiens
  CDR3 for alpha chain variable domain of TCR clone 330788 (TRAV8-4, TRAJ47)
CAVSDLLGYGNKLVF

SEQ ID NO: 661576 - protein, 16 aa, Homo sapiens
  CDR3 for beta chain variable domain of TCR clone 330788 (TRBV19, TRBJ2-2)
CASSSSGGLNTGELFF

SEQ ID NO: 661577 - protein, 17 aa, Homo sapiens
  CDR3 for alpha chain variable domain of TCR clone 330789 (TRAV3, TRAJ38)
CAVRDCLNAGNNRKLIW

SEQ ID NO: 661578 - protein, 15 aa, Homo sapiens
  CDR3 for beta chain variable domain of TCR clone 330789 (TRBV28, TRBJ1-4)
CASSVSGSGLEKLFF

SEQ ID NO: 661579 - protein, 15 aa, Homo sapiens
  CDR3 for alpha chain variable domain of TCR clone 330790 (TRAV17, TRAJ22)
CATAPISGSARQLTF

SEQ ID NO: 661580 - protein, 13 aa, Homo sapiens
  CDR3 for beta chain variable domain of TCR clone 330790 (TRBV6-5, TRBJ1-2)
CASSIDTYYGYTF

SEQ ID NO: 661581 - protein, 14 aa, Homo sapiens
  CDR3 for alpha chain variable domain of TCR clone 330791 (TRAV16, TRAJ57)
CALSGQGGSEKLVF

SEQ ID NO: 661582 - protein, 13 aa, Homo sapiens
  CDR3 for beta chain variable domain of TCR clone 330791 (TRBV5-4, TRBJ2-1)
CASSVQGPREQSF

SEQ ID NO: 661583 - protein, 15 aa, Homo sapiens
  CDR3 for alpha chain variable domain of TCR clone 330792 (TRAV3, TRAJ4)
CAVRDGTGGYTKMIF

SEQ ID NO: 661584 - protein, 16 aa, Homo sapiens
  CDR3 for beta chain variable domain of TCR clone 330792 (TRBV27, TRBJ2-2)
CASSSSGVSNTGELFF

SEQ ID NO: 661585 - protein, 15 aa, Homo sapiens
  CDR3 for alpha chain variable domain of TCR clone 330793 (TRAV1-1, TRAJ20)
CAVRDNLANDYKLSF

SEQ ID NO: 661586 - protein, 13 aa, Homo sapiens
  CDR3 for beta chain variable domain of TCR clone 330793 (TRBV4-1, TRBJ2-2)
CASSQENTGELFF

SEQ ID NO: 661587 - protein, 17 aa, Homo sapiens
  CDR3 for alpha chain variable domain of TCR clone 330794 (TRAV3, TRAJ42)
CAVRDRDYGVSQGNLIF

SEQ ID NO: 661588 - protein, 17 aa, Homo sapiens
  CDR3 for beta chain variable domain of TCR clone 330794 (TRBV7-9, TRBJ2-3)
CASSPTVAGDLTDTQYF

SEQ ID NO: 661589 - protein, 13 aa, Homo sapiens
  CDR3 for alpha chain variable domain of TCR clone 330795 (TRAV8-3, TRAJ36)
CAVGSTGANNLFF

SEQ ID NO: 661590 - protein, 15 aa, Homo sapiens
  CDR3 for beta chain variable domain of TCR clone 330795 (TRBV20-1, TRBJ2-3)
CSAEPLAGHGDTQYF

SEQ ID NO: 661591 - protein, 15 aa, Homo sapiens
  CDR3 for alpha chain variable domain of TCR clone 330796 (TRAV8-3, TRAJ45)
CASSYSGVGADGLTS

SEQ ID NO: 661592 - protein, 13 aa, Homo sapiens
  CDR3 for beta chain variable domain of TCR clone 330796 (TRBV10-3, TRBJ2-7)
CASKLAVNYEQYF

SEQ ID NO: 661593 - protein, 15 aa, Homo sapiens
  CDR3 for alpha chain variable domain of TCR clone 330797 (TRAV23/DV6, TRAJ44)
CAARLLTGTASKLTF

SEQ ID NO: 661594 - protein, 14 aa, Homo sapiens
  CDR3 for beta chain variable domain of TCR clone 330797 (TRBV12-4, TRBJ1-1)
CASSLGTGGTEAFF

SEQ ID NO: 661595 - protein, 16 aa, Homo sapiens
  CDR3 for alpha chain variable domain of TCR clone 330798 (TRAV12-3, TRAJ53)
CAMSPGSGGSNYKLTF

SEQ ID NO: 661596 - protein, 14 aa, Homo sapiens
  CDR3 for beta chain variable domain of TCR clone 330798 (TRBV7-9, TRBJ1-2)
CASSRQGANYGYTF

SEQ ID NO: 661597 - protein, 15 aa, Homo sapiens
  CDR3 for alpha chain variable domain of TCR clone 330799 (TRAV3, TRAJ5)
CAVRDLDTGRRALTF

SEQ ID NO: 661598 - protein, 13 aa, Homo sapiens
  CDR3 for beta chain variable domain of TCR clone 330799 (TRBV12-4, TRBJ2-7)
CASSPTVTYEQYF

SEQ ID NO: 661599 - protein, 12 aa, Homo sapiens
  CDR3 for alpha chain variable domain of TCR clone 330800 (TRAV12-3, TRAJ20)
CAMVRGDHKLSS

SEQ ID NO: 661600 - protein, 16 aa, Homo sapiens
  CDR3 for beta chain variable domain of TCR clone 330800 (TRBV19, TRBJ2-2)
CASSTARASNTGELFF

SEQ ID NO: 661601 - protein, 12 aa, Homo sapiens
  CDR3 for alpha chain variable domain of TCR clone 330801 (TRAV13-1, TRAJ53)
AASGGSNYKLTF

SEQ ID NO: 661602 - protein, 15 aa, Homo sapiens
  CDR3 for beta chain variable domain of TCR clone 330801 (TRBV5-1, TRBJ2-1)
WASSPPRAPYNEQFF

SEQ ID NO: 661603 - protein, 14 aa, Homo sapiens
  CDR3 for alpha chain variable domain of TCR clone 330802 (TRAV17, TRAJ45)
CATASGGGADGLTF

SEQ ID NO: 661604 - protein, 15 aa, Homo sapiens
  CDR3 for beta chain variable domain of TCR clone 330802 (TRBV4-1, TRBJ1-2)
CASSQERGEGYGYTF

SEQ ID NO: 661605 - protein, 14 aa, Homo sapiens
  CDR3 for alpha chain variable domain of TCR clone 330803 (TRAV4, TRAJ26)
CLVGPHNYGQNFVF

SEQ ID NO: 661606 - protein, 17 aa, Homo sapiens
  CDR3 for beta chain variable domain of TCR clone 330803 (TRBV24-1, TRBJ2-1)
CASSDVSTSGTYNEQFF

SEQ ID NO: 661607 - protein, 17 aa, Homo sapiens
  CDR3 for alpha chain variable domain of TCR clone 330804 (TRAV26-1, TRAJ27)
CIVSTPWINTHAGKSTF

SEQ ID NO: 661608 - protein, 16 aa, Homo sapiens
  CDR3 for beta chain variable domain of TCR clone 330804 (TRBV7-9, TRBJ2-1)
CASSLDPGLAIDEQFF

SEQ ID NO: 661609 - protein, 14 aa, Homo sapiens
  CDR3 for alpha chain variable domain of TCR clone 330805 (TRAV12-3, TRAJ21)
CAATDLYNFNKFYF

SEQ ID NO: 661610 - protein, 13 aa, Homo sapiens
  CDR3 for beta chain variable domain of TCR clone 330805 (TRBV19, TRBJ2-2)
CASSSKNTGELFF

SEQ ID NO: 661611 - protein, 13 aa, Homo sapiens
  CDR3 for alpha chain variable domain of TCR clone 330806 (TRAV1-2, TRAJ26)
CAVRPNYGQNFVF

SEQ ID NO: 661612 - protein, 14 aa, Homo sapiens
  CDR3 for beta chain variable domain of TCR clone 330806 (TRBV4-1, TRBJ2-5)
CVSSQELALETQYF

SEQ ID NO: 661613 - protein, 13 aa, Homo sapiens
  CDR3 for alpha chain variable domain of TCR clone 330807 (TRAV38-2/DV8, TRAJ34)
CAYRNYNTDKLIF

SEQ ID NO: 661614 - protein, 15 aa, Homo sapiens
  CDR3 for beta chain variable domain of TCR clone 330807 (TRBV6-6, TRBJ2-7)
CASSYSYGGSYEQYF

SEQ ID NO: 661615 - protein, 12 aa, Homo sapiens
  CDR3 for alpha chain variable domain of TCR clone 330808 (TRAV21, TRAJ49)
CAVNDGGNKFYF

SEQ ID NO: 661616 - protein, 14 aa, Homo sapiens
  CDR3 for beta chain variable domain of TCR clone 330808 (TRBV12-5, TRBJ2-5)
CASGSRTHQETQYF

SEQ ID NO: 661617 - protein, 13 aa, Homo sapiens
  CDR3 for alpha chain variable domain of TCR clone 330809 (TRAV2, TRAJ40)
CAVVTSGTYKYIY

SEQ ID NO: 661618 - protein, 13 aa, Homo sapiens
  CDR3 for beta chain variable domain of TCR clone 330809 (TRBV7-9, TRBJ2-5)
CASLPSGRETQYF

SEQ ID NO: 661619 - protein, 15 aa, Homo sapiens
  CDR3 for alpha chain variable domain of TCR clone 330810 (TRAV17, TRAJ13)
CATDAGSGGYQKVTF

SEQ ID NO: 661620 - protein, 15 aa, Homo sapiens
  CDR3 for beta chain variable domain of TCR clone 330810 (TRBV19, TRBJ1-1)
CASTSGQIQNTEAFF

SEQ ID NO: 661621 - protein, 14 aa, Homo sapiens
  CDR3 for alpha chain variable domain of TCR clone 330811 (TRAV1-2, TRAJ16)
CAVNRFSDGQKLLF

SEQ ID NO: 661622 - protein, 16 aa, Homo sapiens
  CDR3 for beta chain variable domain of TCR clone 330811 (TRBV7-2, TRBJ2-5)
CASSLESAGGRETQYF

SEQ ID NO: 661623 - protein, 13 aa, Homo sapiens
  CDR3 for alpha chain variable domain of TCR clone 330812 (TRAV8-3, TRAJ36)
CAVGATGENNLFF

SEQ ID NO: 661624 - protein, 13 aa, Homo sapiens
  CDR3 for beta chain variable domain of TCR clone 330812 (TRBV12-4, TRBJ1-2)
CASSLRQGKGYTF

SEQ ID NO: 661625 - protein, 15 aa, Homo sapiens
  CDR3 for alpha chain variable domain of TCR clone 330813 (TRAV4, TRAJ39)
CLVGPNNNAGNMPTF

SEQ ID NO: 661626 - protein, 15 aa, Homo sapiens
  CDR3 for beta chain variable domain of TCR clone 330813 (TRBV19, TRBJ1-1)
CASTSGQIQNTEAFF

SEQ ID NO: 661627 - protein, 15 aa, Homo sapiens
  CDR3 for alpha chain variable domain of TCR clone 330814 (TRAV3, TRAJ5)
CAVRDLDTGRRALTC

SEQ ID NO: 661628 - protein, 16 aa, Homo sapiens
  CDR3 for beta chain variable domain of TCR clone 330814 (TRBV20-1, TRBJ1-2)
CSASMGQGVANYGYTF

SEQ ID NO: 661629 - protein, 15 aa, Homo sapiens
  CDR3 for alpha chain variable domain of TCR clone 330815 (TRAV3, TRAJ22)
CAVRDRGGSARQLTF

SEQ ID NO: 661630 - protein, 20 aa, Homo sapiens
  CDR3 for beta chain variable domain of TCR clone 330815 (TRBV11-2, TRBJ1-6)
CASSLVFATGGSVHPSTLAT

SEQ ID NO: 661631 - protein, 12 aa, Homo sapiens
  CDR3 for alpha chain variable domain of TCR clone 330816 (TRAV1-1, TRAJ9)
CAVDTGGFKTIF

SEQ ID NO: 661632 - protein, 14 aa, Homo sapiens
  CDR3 for beta chain variable domain of TCR clone 330816 (TRBV7-8, TRBJ2-5)
YASSATGGQETQYF

SEQ ID NO: 661633 - protein, 12 aa, Homo sapiens
  CDR3 for alpha chain variable domain of TCR clone 330817 (TRAV3, TRAJ20)
CAVRDPDYKLSF

SEQ ID NO: 661634 - protein, 14 aa, Homo sapiens
  CDR3 for beta chain variable domain of TCR clone 330817 (TRBV7-2, TRBJ2-7)
CASSPKTSVHEQYF

SEQ ID NO: 661635 - protein, 12 aa, Homo sapiens
  CDR3 for alpha chain variable domain of TCR clone 330818 (TRAV17, TRAJ20)
CATQSNYYKLRF

SEQ ID NO: 661636 - protein, 13 aa, Homo sapiens
  CDR3 for beta chain variable domain of TCR clone 330818 (TRBV10-3, TRBJ1-1)
CAIIPEGGTEAFF

SEQ ID NO: 661637 - protein, 16 aa, Homo sapiens
  CDR3 for alpha chain variable domain of TCR clone 330819 (TRAV1-1, TRAJ29)
CAVRSTRNSGNTPPVF

SEQ ID NO: 661638 - protein, 14 aa, Homo sapiens
  CDR3 for beta chain variable domain of TCR clone 330819 (TRBV7-2, TRBJ2-7)
CASSPKTSFYEQYF

SEQ ID NO: 661639 - protein, 13 aa, Homo sapiens
  CDR3 for alpha chain variable domain of TCR clone 330820 (TRAV20, TRAJ31)
CAVQAIGGARLIF

SEQ ID NO: 661640 - protein, 14 aa, Homo sapiens
  CDR3 for beta chain variable domain of TCR clone 330820 (TRBV2, TRBJ1-5)
CASSGTVSNQTQHF

SEQ ID NO: 661641 - protein, 14 aa, Homo sapiens
  CDR3 for alpha chain variable domain of TCR clone 330821 (TRAV17, TRAJ45)
CATASGGGADGLTF

SEQ ID NO: 661642 - protein, 18 aa, Homo sapiens
  CDR3 for beta chain variable domain of TCR clone 330821 (TRBV20-1, TRBJ2-3)
CSASGLAGGPGTTDTQYF

SEQ ID NO: 661643 - protein, 14 aa, Homo sapiens
  CDR3 for alpha chain variable domain of TCR clone 330822 (TRAV1-2, TRAJ16)
CAVNRFSDCQTLLF

SEQ ID NO: 661644 - protein, 15 aa, Homo sapiens
  CDR3 for beta chain variable domain of TCR clone 330822 (TRBV7-9, TRBJ1-6)
CASSSPGRGNSPLHF

SEQ ID NO: 661645 - protein, 17 aa, Homo sapiens
  CDR3 for alpha chain variable domain of TCR clone 330823 (TRAV3, TRAJ38)
CAVRDCLNAGNNRKLIW

SEQ ID NO: 661646 - protein, 15 aa, Homo sapiens
  CDR3 for beta chain variable domain of TCR clone 330823 (TRBV12-4, TRBJ2-5)
CASSGTGQAQETQYF

SEQ ID NO: 661647 - protein, 13 aa, Homo sapiens
  CDR3 for alpha chain variable domain of TCR clone 330824 (TRAV16, TRAJ34)
CITVLSHTDKLIF

SEQ ID NO: 661648 - protein, 15 aa, Homo sapiens
  CDR3 for beta chain variable domain of TCR clone 330824 (TRBV4-1, TRBJ1-4)
CASSDTGGTNEKLFF

SEQ ID NO: 661649 - protein, 14 aa, Homo sapiens
  CDR3 for alpha chain variable domain of TCR clone 330825 (TRAV1-2, TRAJ8)
CAVREDTGFQRLVF

SEQ ID NO: 661650 - protein, 15 aa, Homo sapiens
  CDR3 for beta chain variable domain of TCR clone 330825 (TRBV6-3, TRBJ2-7)
CASSSPGTVSYEQYF

SEQ ID NO: 661651 - protein, 15 aa, Homo sapiens
  CDR3 for alpha chain variable domain of TCR clone 330826 (TRAV12-2, TRAJ50)
CAANGLETSYDKVIF

SEQ ID NO: 661652 - protein, 16 aa, Homo sapiens
  CDR3 for beta chain variable domain of TCR clone 330826 (TRBV5-4, TRBJ2-3)
CASQQPGAGGADTQYF

SEQ ID NO: 661653 - protein, 16 aa, Homo sapiens
  CDR3 for alpha chain variable domain of TCR clone 330827 (TRAV13-1, TRAJ48)
RAASIFGNFGNEKLTF

SEQ ID NO: 661654 - protein, 14 aa, Homo sapiens
  CDR3 for beta chain variable domain of TCR clone 330827 (TRBV7-3, TRBJ1-1)
CASSLKGGNTEAFF

SEQ ID NO: 661655 - protein, 17 aa, Homo sapiens
  CDR3 for alpha chain variable domain of TCR clone 330828 (TRAV3, TRAJ12)
CAVREIGGMDSSYKFIF

SEQ ID NO: 661656 - protein, 14 aa, Homo sapiens
  CDR3 for beta chain variable domain of TCR clone 330828 (TRBV12-4, TRBJ1-1)
CASSFQSFGTEAFF

SEQ ID NO: 661657 - protein, 19 aa, Homo sapiens
  CDR3 for alpha chain variable domain of TCR clone 330829 (TRAV2, TRAJ20)
ILQVREADAAVYRDCKLSF

SEQ ID NO: 661658 - protein, 14 aa, Homo sapiens
  CDR3 for beta chain variable domain of TCR clone 330829 (TRBV9, TRBJ2-4)
CASSPSGTSGFQYF

SEQ ID NO: 661659 - protein, 14 aa, Homo sapiens
  CDR3 for alpha chain variable domain of TCR clone 330830 (TRAV12-2, TRAJ13)
CAVKKTGGYQKVTF

SEQ ID NO: 661660 - protein, 11 aa, Homo sapiens
  CDR3 for beta chain variable domain of TCR clone 330830 (TRBV12-4, TRBJ2-3)
CARTATDTQYF

SEQ ID NO: 661661 - protein, 14 aa, Homo sapiens
  CDR3 for alpha chain variable domain of TCR clone 330831 (TRAV8-4, TRAJ16)
CAVSPVGRWPEAAL

SEQ ID NO: 661662 - protein, 15 aa, Homo sapiens
  CDR3 for beta chain variable domain of TCR clone 330831 (TRBV7-3, TRBJ1-6)
CASSLGRGACSPLHF

SEQ ID NO: 661663 - protein, 23 aa, Homo sapiens
  CDR3 for alpha chain variable domain of TCR clone 330832 (TRAV26-1, TRAJ38)
CIADNAGNNHIQNPDPSVYQLRD

SEQ ID NO: 661664 - protein, 13 aa, Homo sapiens
  CDR3 for beta chain variable domain of TCR clone 330832 (TRBV10-3, TRBJ2-7)
CASKLAVNYEQYF

SEQ ID NO: 661665 - protein, 12 aa, Homo sapiens
  CDR3 for alpha chain variable domain of TCR clone 330833 (TRAV1-1, TRAJ33)
CAASDSNYQLIW

SEQ ID NO: 661666 - protein, 18 aa, Homo sapiens
  CDR3 for beta chain variable domain of TCR clone 330833 (TRBV20-1, TRBJ2-2)
CSARVQTARPSGTGELCF

SEQ ID NO: 661667 - protein, 15 aa, Homo sapiens
  CDR3 for alpha chain variable domain of TCR clone 330834 (TRAV3, TRAJ22)
CAVRDRGGSARQLTL

SEQ ID NO: 661668 - protein, 13 aa, Homo sapiens
  CDR3 for beta chain variable domain of TCR clone 330834 (TRBV2, TRBJ1-5)
CATAGPGNQPQHF

SEQ ID NO: 661669 - protein, 11 aa, Homo sapiens
  CDR3 for alpha chain variable domain of TCR clone 330835 (TRAV3, TRAJ21)
CAVGNFNKFYF

SEQ ID NO: 661670 - protein, 18 aa, Homo sapiens
  CDR3 for beta chain variable domain of TCR clone 330835 (TRBV20-1, TRBJ2-1)
CSARGDRGPLGIQNEQFF

SEQ ID NO: 661671 - protein, 17 aa, Homo sapiens
  CDR3 for alpha chain variable domain of TCR clone 330836 (TRAV3, TRAJ6)
CAVRDGPRAGGSYIPTF

SEQ ID NO: 661672 - protein, 17 aa, Homo sapiens
  CDR3 for beta chain variable domain of TCR clone 330836 (TRBV11-2, TRBJ2-1)
CASSLYPPGVEYNEQFL

SEQ ID NO: 661673 - protein, 14 aa, Homo sapiens
  CDR3 for alpha chain variable domain of TCR clone 330837 (TRAV1-2, TRAJ16)
CAVNRFSDGQKLLF

SEQ ID NO: 661674 - protein, 17 aa, Homo sapiens
  CDR3 for beta chain variable domain of TCR clone 330837 (TRBV13, TRBJ2-3)
CSSSLSRVAGGRNTQYF

SEQ ID NO: 661675 - protein, 12 aa, Homo sapiens
  CDR3 for alpha chain variable domain of TCR clone 330838 (TRAV3, TRAJ31)
CAVRDGNARPMF

SEQ ID NO: 661676 - protein, 18 aa, Homo sapiens
  CDR3 for beta chain variable domain of TCR clone 330838 (TRBV7-2, TRBJ2-3)
CASSLKREGSGITDTQHF

SEQ ID NO: 661677 - protein, 13 aa, Homo sapiens
  CDR3 for alpha chain variable domain of TCR clone 330839 (TRAV20, TRAJ21)
CAVEGYNFNKFYF

SEQ ID NO: 661678 - protein, 13 aa, Homo sapiens
  CDR3 for beta chain variable domain of TCR clone 330839 (TRBV10-3, TRBJ2-7)
CASKLAVNYEQYF

SEQ ID NO: 661679 - protein, 14 aa, Homo sapiens
  CDR3 for alpha chain variable domain of TCR clone 330840 (TRAV1-2, TRAJ16)
CAVNRFSDGQKLLF

SEQ ID NO: 661680 - protein, 12 aa, Homo sapiens
  CDR3 for beta chain variable domain of TCR clone 330840 (TRBV7-9, TRBJ2-7)
CTSSLEGYEQYF

SEQ ID NO: 661681 - protein, 16 aa, Homo sapiens
  CDR3 for alpha chain variable domain of TCR clone 330841 (TRAV3, TRAJ13)
CAVRDLESGGYQKVTF

SEQ ID NO: 661682 - protein, 16 aa, Homo sapiens
  CDR3 for beta chain variable domain of TCR clone 330841 (TRBV27, TRBJ2-5)
CASSYGPGGQKETRYF

SEQ ID NO: 661683 - protein, 11 aa, Homo sapiens
  CDR3 for alpha chain variable domain of TCR clone 330842 (TRAV12-1, TRAJ8)
CVVTGFQKLVF

SEQ ID NO: 661684 - protein, 13 aa, Homo sapiens
  CDR3 for beta chain variable domain of TCR clone 330842 (TRBV4-2, TRBJ1-1)
CASSQAGNTEAFF

SEQ ID NO: 661685 - protein, 11 aa, Homo sapiens
  CDR3 for alpha chain variable domain of TCR clone 330843 (TRAV4, TRAJ23)
CLVAPGGKLIF

SEQ ID NO: 661686 - protein, 13 aa, Homo sapiens
  CDR3 for beta chain variable domain of TCR clone 330843 (TRBV19, TRBJ1-1)
RASSPSNGGEAFF

SEQ ID NO: 661687 - protein, 13 aa, Homo sapiens
  CDR3 for alpha chain variable domain of TCR clone 330844 (TRAV1-2, TRAJ9)
CAALNTGGFKTIF

SEQ ID NO: 661688 - protein, 15 aa, Homo sapiens
  CDR3 for beta chain variable domain of TCR clone 330844 (TRBV7-9, TRBJ2-2)
CASGPLDTFPGELFF

SEQ ID NO: 661689 - protein, 12 aa, Homo sapiens
  CDR3 for alpha chain variable domain of TCR clone 330845 (TRAV13-1, TRAJ21)
CAAKEGFNKFYF

SEQ ID NO: 661690 - protein, 13 aa, Homo sapiens
  CDR3 for beta chain variable domain of TCR clone 330845 (TRBV19, TRBJ2-7)
FASSPRQSYEQYF

SEQ ID NO: 661691 - protein, 13 aa, Homo sapiens
  CDR3 for alpha chain variable domain of TCR clone 330846 (TRAV30, TRAJ6)
CGFIEGGSYIPTF

SEQ ID NO: 661692 - protein, 16 aa, Homo sapiens
  CDR3 for beta chain variable domain of TCR clone 330846 (TRBV7-6, TRBJ2-3)
CASSARTSRGADTQYF

SEQ ID NO: 661693 - protein, 13 aa, Homo sapiens
  CDR3 for alpha chain variable domain of TCR clone 330847 (TRAV12-1, TRAJ7)
CVVNMRGNNRLAF

SEQ ID NO: 661694 - protein, 16 aa, Homo sapiens
  CDR3 for beta chain variable domain of TCR clone 330847 (TRBV7-9, TRBJ1-2)
CASSLGFSSGEDGYTF

SEQ ID NO: 661695 - protein, 13 aa, Homo sapiens
  CDR3 for alpha chain variable domain of TCR clone 330848 (TRAV8-3, TRAJ54)
CAVSIQGAQKLVF

SEQ ID NO: 661696 - protein, 16 aa, Homo sapiens
  CDR3 for beta chain variable domain of TCR clone 330848 (TRBV7-3, TRBJ2-2)
CASSLKRGTLSGELFF

SEQ ID NO: 661697 - protein, 16 aa, Homo sapiens
  CDR3 for alpha chain variable domain of TCR clone 330849 (TRAV3, TRAJ21)
CAVRDIERGNFNKFYF

SEQ ID NO: 661698 - protein, 16 aa, Homo sapiens
  CDR3 for beta chain variable domain of TCR clone 330849 (TRBV2, TRBJ2-1)
CASSVGGSLSYNEQFF

SEQ ID NO: 661699 - protein, 13 aa, Homo sapiens
  CDR3 for alpha chain variable domain of TCR clone 330850 (TRAV12-3, TRAJ54)
CAMKVQGEQKLVF

SEQ ID NO: 661700 - protein, 15 aa, Homo sapiens
  CDR3 for beta chain variable domain of TCR clone 330850 (TRBV28, TRBJ2-7)
CASSPTGTGSYEQYF

SEQ ID NO: 661701 - protein, 11 aa, Homo sapiens
  CDR3 for alpha chain variable domain of TCR clone 330851 (TRAV26-1, TRAJ37)
CIVRVGRKLIF

SEQ ID NO: 661702 - protein, 14 aa, Homo sapiens
  CDR3 for beta chain variable domain of TCR clone 330851 (TRBV7-2, TRBJ2-2)
CASRGQGAAGELFF

SEQ ID NO: 661703 - protein, 14 aa, Homo sapiens
  CDR3 for alpha chain variable domain of TCR clone 330852 (TRAV13-1, TRAJ44)
CAAKATGTASNLTF

SEQ ID NO: 661704 - protein, 16 aa, Homo sapiens
  CDR3 for beta chain variable domain of TCR clone 330852 (TRBV7-9, TRBJ2-6)
RASSVKGPLRANVLTF

SEQ ID NO: 661705 - protein, 13 aa, Homo sapiens
  CDR3 for alpha chain variable domain of TCR clone 330853 (TRAV12-1, TRAJ34)
CVVTGYNTDKLIF

SEQ ID NO: 661706 - protein, 13 aa, Homo sapiens
  CDR3 for beta chain variable domain of TCR clone 330853 (TRBV28, TRBJ2-7)
CASKAGEVYEQYF

SEQ ID NO: 661707 - protein, 14 aa, Homo sapiens
  CDR3 for alpha chain variable domain of TCR clone 330854 (TRAV1-2, TRAJ16)
CAVNRFSDGQKLIF

SEQ ID NO: 661708 - protein, 14 aa, Homo sapiens
  CDR3 for beta chain variable domain of TCR clone 330854 (TRBV6-1, TRBJ1-3)
CASVQGGGGNTIYF

SEQ ID NO: 661709 - protein, 17 aa, Homo sapiens
  CDR3 for alpha chain variable domain of TCR clone 330855 (TRAV3, TRAJ6)
CAVRDGPRAGGSYIPTF

SEQ ID NO: 661710 - protein, 12 aa, Homo sapiens
  CDR3 for beta chain variable domain of TCR clone 330855 (TRBV11-2, TRBJ2-2)
CASSLPTGALFF

SEQ ID NO: 661711 - protein, 11 aa, Homo sapiens
  CDR3 for alpha chain variable domain of TCR clone 330856 (TRAV12-3, TRAJ43)
CAMSVSNDMRF

SEQ ID NO: 661712 - protein, 15 aa, Homo sapiens
  CDR3 for beta chain variable domain of TCR clone 330856 (TRBV20-1, TRBJ2-1)
CSARGIGGTYNEQFF

SEQ ID NO: 661713 - protein, 14 aa, Homo sapiens
  CDR3 for alpha chain variable domain of TCR clone 330857 (TRAV12-2, TRAJ36)
FAVKISTGANNLFF

SEQ ID NO: 661714 - protein, 14 aa, Homo sapiens
  CDR3 for beta chain variable domain of TCR clone 330857 (TRBV25-1, TRBJ1-2)
CASSDTTGVVGYTF

SEQ ID NO: 661715 - protein, 16 aa, Homo sapiens
  CDR3 for alpha chain variable domain of TCR clone 330858 (TRAV20, TRAJ22)
CAVQASSSGSARQLTF

SEQ ID NO: 661716 - protein, 16 aa, Homo sapiens
  CDR3 for beta chain variable domain of TCR clone 330858 (TRBV20-1, TRBJ1-5)
CSASRGTGYSNQPHHF

SEQ ID NO: 661717 - protein, 14 aa, Homo sapiens
  CDR3 for alpha chain variable domain of TCR clone 330859 (TRAV12-3, TRAJ10)
SHLPLTGGGNKLTF

SEQ ID NO: 661718 - protein, 15 aa, Homo sapiens
  CDR3 for beta chain variable domain of TCR clone 330859 (TRBV11-2, TRBJ1-3)
CASSLGGTVGNTIYF

SEQ ID NO: 661719 - protein, 15 aa, Homo sapiens
  CDR3 for alpha chain variable domain of TCR clone 330860 (TRAV17, TRAJ6)
CATDLPSGGSYLPTF

SEQ ID NO: 661720 - protein, 14 aa, Homo sapiens
  CDR3 for beta chain variable domain of TCR clone 330860 (TRBV19, TRBJ2-7)
CASSMGQGAIEQYF

SEQ ID NO: 661721 - protein, 15 aa, Homo sapiens
  CDR3 for alpha chain variable domain of TCR clone 330861 (TRAV26-1, TRAJ17)
CSVSSFKAAGNKLTF

SEQ ID NO: 661722 - protein, 13 aa, Homo sapiens
  CDR3 for beta chain variable domain of TCR clone 330861 (TRBV20-1, TRBJ2-3)
CSASPPSTDTQYF

SEQ ID NO: 661723 - protein, 14 aa, Homo sapiens
  CDR3 for alpha chain variable domain of TCR clone 330862 (TRAV8-4, TRAJ45)
CASGGGGGAAGLTF

SEQ ID NO: 661724 - protein, 20 aa, Homo sapiens
  CDR3 for beta chain variable domain of TCR clone 330862 (TRBV4-3, TRBJ2-3)
CASSPRVEMRASGRPDTQYF

SEQ ID NO: 661725 - protein, 17 aa, Homo sapiens
  CDR3 for alpha chain variable domain of TCR clone 330863 (TRAV13-1, TRAJ52)
CAASLGAGGTSYGKLTF

SEQ ID NO: 661726 - protein, 15 aa, Homo sapiens
  CDR3 for beta chain variable domain of TCR clone 330863 (TRBV2, TRBJ2-1)
CASSELAGSYNEQFV

SEQ ID NO: 661727 - protein, 13 aa, Homo sapiens
  CDR3 for alpha chain variable domain of TCR clone 330864 (TRAV29/DV5, TRAJ34)
WAARVDNTDKLIF

SEQ ID NO: 661728 - protein, 17 aa, Homo sapiens
  CDR3 for beta chain variable domain of TCR clone 330864 (TRBV7-3, TRBJ2-5)
CASSLGSGRSGSETQYF

SEQ ID NO: 661729 - protein, 17 aa, Homo sapiens
  CDR3 for alpha chain variable domain of TCR clone 330865 (TRAV17, TRAJ7)
CATLGRLAFGKGNQVVV

SEQ ID NO: 661730 - protein, 13 aa, Homo sapiens
  CDR3 for beta chain variable domain of TCR clone 330865 (TRBV12-4, TRBJ2-7)
CASSLERVSEQYF

SEQ ID NO: 661731 - protein, 16 aa, Homo sapiens
  CDR3 for alpha chain variable domain of TCR clone 330866 (TRAV19, TRAJ20)
CALSCWRVPNDYKLSF

SEQ ID NO: 661732 - protein, 13 aa, Homo sapiens
  CDR3 for beta chain variable domain of TCR clone 330866 (TRBV7-9, TRBJ1-2)
CASSLKQNYGYTF

SEQ ID NO: 661733 - protein, 15 aa, Homo sapiens
  CDR3 for alpha chain variable domain of TCR clone 330867 (TRAV13-1, TRAJ44)
CAASRGGGTASKLTF

SEQ ID NO: 661734 - protein, 13 aa, Homo sapiens
  CDR3 for beta chain variable domain of TCR clone 330867 (TRBV7-2, TRBJ2-5)
CASLPSGRETQYF

SEQ ID NO: 661735 - protein, 10 aa, Homo sapiens
  CDR3 for alpha chain variable domain of TCR clone 330868 (TRAV12-3, TRAJ49)
CAMNDDQFYF

SEQ ID NO: 661736 - protein, 11 aa, Homo sapiens
  CDR3 for beta chain variable domain of TCR clone 330868 (TRBV7-3, TRBJ2-5)
CASSLSETQYF

SEQ ID NO: 661737 - protein, 20 aa, Homo sapiens
  CDR3 for alpha chain variable domain of TCR clone 330869 (TRAV12-3, TRAJ52)
CAMTQSYQNAGGTSYGKLTF

SEQ ID NO: 661738 - protein, 15 aa, Homo sapiens
  CDR3 for beta chain variable domain of TCR clone 330869 (TRBV7-3, TRBJ2-1)
CASSRIGTGSSEQFF

SEQ ID NO: 661739 - protein, 14 aa, Homo sapiens
  CDR3 for alpha chain variable domain of TCR clone 330870 (TRAV12-2, TRAJ44)
CAVNPAGTASKLTF

SEQ ID NO: 661740 - protein, 13 aa, Homo sapiens
  CDR3 for beta chain variable domain of TCR clone 330870 (TRBV12-4, TRBJ2-3)
RASSSPLGGTQYF

SEQ ID NO: 661741 - protein, 14 aa, Homo sapiens
  CDR3 for alpha chain variable domain of TCR clone 330871 (TRAV1-2, TRAJ16)
CAVNRFSDGKKLLF

SEQ ID NO: 661742 - protein, 13 aa, Homo sapiens
  CDR3 for beta chain variable domain of TCR clone 330871 (TRBV10-3, TRBJ2-7)
CASRLAVNYEQYF

SEQ ID NO: 661743 - protein, 15 aa, Homo sapiens
  CDR3 for alpha chain variable domain of TCR clone 330872 (TRAV4, TRAJ39)
CLVGPNNNAGNMLTF

SEQ ID NO: 661744 - protein, 14 aa, Homo sapiens
  CDR3 for beta chain variable domain of TCR clone 330872 (TRBV19, TRBJ2-1)
CASPTFVLSGEQSF

SEQ ID NO: 661745 - protein, 13 aa, Homo sapiens
  CDR3 for alpha chain variable domain of TCR clone 330873 (TRAV16, TRAJ10)
CAPAREDETNSPL

SEQ ID NO: 661746 - protein, 11 aa, Homo sapiens
  CDR3 for beta chain variable domain of TCR clone 330873 (TRBV29-1, TRBJ2-5)
CSEDRTGTQYF

SEQ ID NO: 661747 - protein, 11 aa, Homo sapiens
  CDR3 for alpha chain variable domain of TCR clone 330874 (TRAV3, TRAJ21)
CALGNFNKFYF

SEQ ID NO: 661748 - protein, 16 aa, Homo sapiens
  CDR3 for beta chain variable domain of TCR clone 330874 (TRBV19, TRBJ2-1)
CASSKAGPNSYNEQFF

SEQ ID NO: 661749 - protein, 16 aa, Homo sapiens
  CDR3 for alpha chain variable domain of TCR clone 330875 (TRAV12-1, TRAJ4)
CVVRRLPAGGYNKLIF

SEQ ID NO: 661750 - protein, 11 aa, Homo sapiens
  CDR3 for beta chain variable domain of TCR clone 330875 (TRBV29-1, TRBJ2-5)
CGEDRTGTQYF

SEQ ID NO: 661751 - protein, 14 aa, Homo sapiens
  CDR3 for alpha chain variable domain of TCR clone 330876 (TRAV8-4, TRAJ13)
CAVTLSGGYQKVTF

SEQ ID NO: 661752 - protein, 14 aa, Homo sapiens
  CDR3 for beta chain variable domain of TCR clone 330876 (TRBV7-2, TRBJ1-2)
CARSQTGSTYGYTV

SEQ ID NO: 661753 - protein, 13 aa, Homo sapiens
  CDR3 for alpha chain variable domain of TCR clone 330877 (TRAV8-2, TRAJ47)
CVVSEREGNKLVF

SEQ ID NO: 661754 - protein, 15 aa, Homo sapiens
  CDR3 for beta chain variable domain of TCR clone 330877 (TRBV6-3, TRBJ2-7)
CASSSPGTVFYEQFF

SEQ ID NO: 661755 - protein, 16 aa, Homo sapiens
  CDR3 for alpha chain variable domain of TCR clone 330878 (TRAV1-2, TRAJ27)
CAVSRGSNTNAGKSTF

SEQ ID NO: 661756 - protein, 14 aa, Homo sapiens
  CDR3 for beta chain variable domain of TCR clone 330878 (TRBV19, TRBJ2-1)
CASPTFVLSGEQFF

SEQ ID NO: 661757 - protein, 11 aa, Homo sapiens
  CDR3 for alpha chain variable domain of TCR clone 330879 (TRAV1-2, TRAJ20)
CAVANDYKLSF

SEQ ID NO: 661758 - protein, 12 aa, Homo sapiens
  CDR3 for beta chain variable domain of TCR clone 330879 (TRBV9, TRBJ1-1)
CASSEVNTEAFF

SEQ ID NO: 661759 - protein, 16 aa, Homo sapiens
  CDR3 for alpha chain variable domain of TCR clone 330880 (TRAV30, TRAJ57)
CGIGWAPQGGSEKLVL

SEQ ID NO: 661760 - protein, 14 aa, Homo sapiens
  CDR3 for beta chain variable domain of TCR clone 330880 (TRBV18, TRBJ1-1)
CASSHGFQGVEAFF

SEQ ID NO: 661761 - protein, 15 aa, Homo sapiens
  CDR3 for alpha chain variable domain of TCR clone 330881 (TRAV3, TRAJ20)
CSVRDIRLSDYKLSF

SEQ ID NO: 661762 - protein, 15 aa, Homo sapiens
  CDR3 for beta chain variable domain of TCR clone 330881 (TRBV7-9, TRBJ1-6)
CASSSPGRGNSPLHF

SEQ ID NO: 661763 - protein, 14 aa, Homo sapiens
  CDR3 for alpha chain variable domain of TCR clone 330882 (TRAV16, TRAJ33)
CALSAMDSNYQLIW

SEQ ID NO: 661764 - protein, 17 aa, Homo sapiens
  CDR3 for beta chain variable domain of TCR clone 330882 (TRBV25-1, TRBJ2-7)
CASSDASVVFSSYEQYF

SEQ ID NO: 661765 - protein, 15 aa, Homo sapiens
  CDR3 for alpha chain variable domain of TCR clone 330883 (TRAV12-1, TRAJ44)
CVADLPTGTASKLTL

SEQ ID NO: 661766 - protein, 13 aa, Homo sapiens
  CDR3 for beta chain variable domain of TCR clone 330883 (TRBV6-5, TRBJ2-5)
CASSPQGGETQYF

SEQ ID NO: 661767 - protein, 12 aa, Homo sapiens
  CDR3 for alpha chain variable domain of TCR clone 330884 (TRAV12-2, TRAJ45)
CASGGGDDGLTF

SEQ ID NO: 661768 - protein, 16 aa, Homo sapiens
  CDR3 for beta chain variable domain of TCR clone 330884 (TRBV19, TRBJ2-3)
CASSPGLLASTDTQYF

SEQ ID NO: 661769 - protein, 16 aa, Homo sapiens
  CDR3 for alpha chain variable domain of TCR clone 330885 (TRAV12-1, TRAJ53)
CVVTSVAGGSNYKLTF

SEQ ID NO: 661770 - protein, 16 aa, Homo sapiens
  CDR3 for beta chain variable domain of TCR clone 330885 (TRBV6-6, TRBJ2-3)
CASSYSRAGSTDTQYF

SEQ ID NO: 661771 - protein, 15 aa, Homo sapiens
  CDR3 for alpha chain variable domain of TCR clone 330886 (TRAV21, TRAJ53)
CATLNSGGSNYKLTF

SEQ ID NO: 661772 - protein, 17 aa, Homo sapiens
  CDR3 for beta chain variable domain of TCR clone 330886 (TRBV20-1, TRBJ2-2)
YSASGSGQGGLTGELFF

SEQ ID NO: 661773 - protein, 15 aa, Homo sapiens
  CDR3 for alpha chain variable domain of TCR clone 330887 (TRAV3, TRAJ47)
CAVRDIREYGNKLVF

SEQ ID NO: 661774 - protein, 14 aa, Homo sapiens
  CDR3 for beta chain variable domain of TCR clone 330887 (TRBV13, TRBJ2-5)
CASSLERVGETQYS

SEQ ID NO: 661775 - protein, 14 aa, Homo sapiens
  CDR3 for alpha chain variable domain of TCR clone 330888 (TRAV3, TRAJ22)
CAVRDYGSARQLTF

SEQ ID NO: 661776 - protein, 13 aa, Homo sapiens
  CDR3 for beta chain variable domain of TCR clone 330888 (TRBV11-2, TRBJ2-5)
CASGHGAKETLYF

SEQ ID NO: 661777 - protein, 16 aa, Homo sapiens
  CDR3 for alpha chain variable domain of TCR clone 330889 (TRAV30, TRAJ24)
CGTEIVDADSWGKIQF

SEQ ID NO: 661778 - protein, 18 aa, Homo sapiens
  CDR3 for beta chain variable domain of TCR clone 330889 (TRBV11-2, TRBJ2-3)
CASSLGGASRGAPNTQYF

SEQ ID NO: 661779 - protein, 15 aa, Homo sapiens
  CDR3 for alpha chain variable domain of TCR clone 330890 (TRAV8-1, TRAJ23)
CAVNSHYNQGGKLIF

SEQ ID NO: 661780 - protein, 17 aa, Homo sapiens
  CDR3 for beta chain variable domain of TCR clone 330890 (TRBV7-2, TRBJ2-1)
CASSLGPPWGGLDEQFF

SEQ ID NO: 661781 - protein, 15 aa, Homo sapiens
  CDR3 for alpha chain variable domain of TCR clone 330891 (TRAV17, TRAJ57)
CATGPSQGGSEKLVF

SEQ ID NO: 661782 - protein, 14 aa, Homo sapiens
  CDR3 for beta chain variable domain of TCR clone 330891 (TRBV20-1, TRBJ2-7)
CSARRGNGIYEQYF

SEQ ID NO: 661783 - protein, 14 aa, Homo sapiens
  CDR3 for alpha chain variable domain of TCR clone 330892 (TRAV12-3, TRAJ10)
SHLPLTGGGNKLIF

SEQ ID NO: 661784 - protein, 15 aa, Homo sapiens
  CDR3 for beta chain variable domain of TCR clone 330892 (TRBV10-3, TRBJ1-3)
CAISDSQGAGNTIYF

SEQ ID NO: 661785 - protein, 15 aa, Homo sapiens
  CDR3 for alpha chain variable domain of TCR clone 330893 (TRAV30, TRAJ32)
CGTEILGGATNKLIF

SEQ ID NO: 661786 - protein, 13 aa, Homo sapiens
  CDR3 for beta chain variable domain of TCR clone 330893 (TRBV6-3, TRBJ2-7)
CASGVSGGYEQYF

SEQ ID NO: 661787 - protein, 15 aa, Homo sapiens
  CDR3 for alpha chain variable domain of TCR clone 330894 (TRAV26-1, TRAJ44)
CIASVPFGTASKLTF

SEQ ID NO: 661788 - protein, 17 aa, Homo sapiens
  CDR3 for beta chain variable domain of TCR clone 330894 (TRBV24-1, TRBJ2-4)
CATSDAEARGVRNIQYF

SEQ ID NO: 661789 - protein, 14 aa, Homo sapiens
  CDR3 for alpha chain variable domain of TCR clone 330895 (TRAV8-2, TRAJ4)
CVVSPSGGYTKLIF

SEQ ID NO: 661790 - protein, 15 aa, Homo sapiens
  CDR3 for beta chain variable domain of TCR clone 330895 (TRBV4-1, TRBJ1-4)
CASSDTGGTNEKPFF

SEQ ID NO: 661791 - protein, 13 aa, Homo sapiens
  CDR3 for alpha chain variable domain of TCR clone 330896 (TRAV23/DV6, TRAJ9)
CAASTPGGFKTIF

SEQ ID NO: 661792 - protein, 14 aa, Homo sapiens
  CDR3 for beta chain variable domain of TCR clone 330896 (TRBV5-1, TRBJ2-3)
CASRVDGVSDTQYF

SEQ ID NO: 661793 - protein, 14 aa, Homo sapiens
  CDR3 for alpha chain variable domain of TCR clone 330897 (TRAV16, TRAJ15)
CALSGPQAGTALIF

SEQ ID NO: 661794 - protein, 14 aa, Homo sapiens
  CDR3 for beta chain variable domain of TCR clone 330897 (TRBV6-1, TRBJ2-5)
CASSGSGGAETQYF

SEQ ID NO: 661795 - protein, 12 aa, Homo sapiens
  CDR3 for alpha chain variable domain of TCR clone 330898 (TRAV3, TRAJ31)
CAVRDGNARLMF

SEQ ID NO: 661796 - protein, 18 aa, Homo sapiens
  CDR3 for beta chain variable domain of TCR clone 330898 (TRBV7-2, TRBJ2-3)
CARSLRREGSGITDTQYF

SEQ ID NO: 661797 - protein, 12 aa, Homo sapiens
  CDR3 for alpha chain variable domain of TCR clone 330899 (TRAV12-2, TRAJ49)
CAVLNTGNQFYF

SEQ ID NO: 661798 - protein, 14 aa, Homo sapiens
  CDR3 for beta chain variable domain of TCR clone 330899 (TRBV5-4, TRBJ2-3)
CASSLGQGADTRYF

SEQ ID NO: 661799 - protein, 14 aa, Homo sapiens
  CDR3 for alpha chain variable domain of TCR clone 330900 (TRAV12-1, TRAJ9)
CVVTGYTGGFKTIF

SEQ ID NO: 661800 - protein, 15 aa, Homo sapiens
  CDR3 for beta chain variable domain of TCR clone 330900 (TRBV5-4, TRBJ2-7)
CASSRFGPGSYEQYF

SEQ ID NO: 661801 - protein, 14 aa, Homo sapiens
  CDR3 for alpha chain variable domain of TCR clone 330901 (TRAV8-3, TRAJ39)
CAVGANNAGNMLTF

SEQ ID NO: 661802 - protein, 15 aa, Homo sapiens
  CDR3 for beta chain variable domain of TCR clone 330901 (TRBV19, TRBJ2-7)
CASSIGGGHVNEQYF

SEQ ID NO: 661803 - protein, 14 aa, Homo sapiens
  CDR3 for alpha chain variable domain of TCR clone 330902 (TRAV23/DV6, TRAJ11)
CAASLESGCSTLTF

SEQ ID NO: 661804 - protein, 13 aa, Homo sapiens
  CDR3 for beta chain variable domain of TCR clone 330902 (TRBV4-1, TRBJ2-5)
CASSLTRGETQYF

SEQ ID NO: 661805 - protein, 16 aa, Homo sapiens
  CDR3 for alpha chain variable domain of TCR clone 330903 (TRAV21, TRAJ45)
CAVSWGSGGGADGLTF

SEQ ID NO: 661806 - protein, 15 aa, Homo sapiens
  CDR3 for beta chain variable domain of TCR clone 330903 (TRBV2, TRBJ2-3)
CASSDFEKATDTQYF

SEQ ID NO: 661807 - protein, 14 aa, Homo sapiens
  CDR3 for alpha chain variable domain of TCR clone 330904 (TRAV1-2, TRAJ16)
CAVNRFSDGQKLLF

SEQ ID NO: 661808 - protein, 13 aa, Homo sapiens
  CDR3 for beta chain variable domain of TCR clone 330904 (TRBV7-9, TRBJ1-2)
CASSFKQNYGYTF

SEQ ID NO: 661809 - protein, 14 aa, Homo sapiens
  CDR3 for alpha chain variable domain of TCR clone 330905 (TRAV3, TRAJ35)
CAVMPIGFGNVLHC

SEQ ID NO: 661810 - protein, 12 aa, Homo sapiens
  CDR3 for beta chain variable domain of TCR clone 330905 (TRBV7-9, TRBJ2-7)
CASSIKREEQYF

SEQ ID NO: 661811 - protein, 14 aa, Homo sapiens
  CDR3 for alpha chain variable domain of TCR clone 330906 (TRAV40, TRAJ41)
CLLGPPNSGYALNF

SEQ ID NO: 661812 - protein, 14 aa, Homo sapiens
  CDR3 for beta chain variable domain of TCR clone 330906 (TRBV19, TRBJ1-5)
CASRAPDSFRAQHF

SEQ ID NO: 661813 - protein, 11 aa, Homo sapiens
  CDR3 for alpha chain variable domain of TCR clone 330907 (TRAV17, TRAJ9)
CATTGGFKTIF

SEQ ID NO: 661814 - protein, 15 aa, Homo sapiens
  CDR3 for beta chain variable domain of TCR clone 330907 (TRBV12-4, TRBJ2-5)
CASSPPTGLQETQYF

SEQ ID NO: 661815 - protein, 12 aa, Homo sapiens
  CDR3 for alpha chain variable domain of TCR clone 330908 (TRAV8-6, TRAJ8)
CAVTPGFQKLVF

SEQ ID NO: 661816 - protein, 16 aa, Homo sapiens
  CDR3 for beta chain variable domain of TCR clone 330908 (TRBV7-3, TRBJ2-2)
CASSLKRGTLSGELFC

SEQ ID NO: 661817 - protein, 11 aa, Homo sapiens
  CDR3 for alpha chain variable domain of TCR clone 330909 (TRAV21, TRAJ58)
CCRNQWLRLTF

SEQ ID NO: 661818 - protein, 15 aa, Homo sapiens
  CDR3 for beta chain variable domain of TCR clone 330909 (TRBV20-1, TRBJ2-7)
CSARDPVKGEGEQYF

SEQ ID NO: 661819 - protein, 13 aa, Homo sapiens
  CDR3 for alpha chain variable domain of TCR clone 330910 (TRAV9-2, TRAJ53)
CALSGGSNYKLTF

SEQ ID NO: 661820 - protein, 17 aa, Homo sapiens
  CDR3 for beta chain variable domain of TCR clone 330910 (TRBV11-2, TRBJ2-1)
CASSLYPPGVVYNEQFF

SEQ ID NO: 661821 - protein, 16 aa, Homo sapiens
  CDR3 for alpha chain variable domain of TCR clone 330911 (TRAV12-3, TRAJ53)
CAMSPGSGGSNYKLTF

SEQ ID NO: 661822 - protein, 13 aa, Homo sapiens
  CDR3 for beta chain variable domain of TCR clone 330911 (TRBV24-1, TRBJ2-2)
CATSEWSTGELFF

SEQ ID NO: 661823 - protein, 15 aa, Homo sapiens
  CDR3 for alpha chain variable domain of TCR clone 330912 (TRAV3, TRAJ30)
CAVRDEYGRDDKIIF

SEQ ID NO: 661824 - protein, 16 aa, Homo sapiens
  CDR3 for beta chain variable domain of TCR clone 330912 (TRBV5-1, TRBJ2-5)
CSSSLANHRGRETQYF

SEQ ID NO: 661825 - protein, 16 aa, Homo sapiens
  CDR3 for alpha chain variable domain of TCR clone 330913 (TRAV20, TRAJ52)
CAVLRAGGTSYGKLTF

SEQ ID NO: 661826 - protein, 16 aa, Homo sapiens
  CDR3 for beta chain variable domain of TCR clone 330913 (TRBV6-1, TRBJ2-5)
CASSETLDRGAETQYF

SEQ ID NO: 661827 - protein, 18 aa, Homo sapiens
  CDR3 for alpha chain variable domain of TCR clone 330914 (TRAV13-1, TRAJ52)
CAATKRSAGGTSYGKLTF

SEQ ID NO: 661828 - protein, 13 aa, Homo sapiens
  CDR3 for beta chain variable domain of TCR clone 330914 (TRBV12-4, TRBJ1-2)
CASSLRQGKGYTL

SEQ ID NO: 661829 - protein, 13 aa, Homo sapiens
  CDR3 for alpha chain variable domain of TCR clone 330915 (TRAV38-2/DV8, TRAJ34)
CAYRHYNTDKLIF

SEQ ID NO: 661830 - protein, 14 aa, Homo sapiens
  CDR3 for beta chain variable domain of TCR clone 330915 (TRBV7-6, TRBJ2-3)
CASSLGTVTDTQYF

SEQ ID NO: 661831 - protein, 18 aa, Homo sapiens
  CDR3 for alpha chain variable domain of TCR clone 330916 (TRAV26-2, TRAJ54)
CILRDVEVGIQGAQKLVF

SEQ ID NO: 661832 - protein, 17 aa, Homo sapiens
  CDR3 for beta chain variable domain of TCR clone 330916 (TRBV11-2, TRBJ2-1)
CASSLSPPGVEYNEQFF

SEQ ID NO: 661833 - protein, 16 aa, Homo sapiens
  CDR3 for alpha chain variable domain of TCR clone 330917 (TRAV14/DV4, TRAJ53)
CAMREGGGCSNYKLTF

SEQ ID NO: 661834 - protein, 16 aa, Homo sapiens
  CDR3 for beta chain variable domain of TCR clone 330917 (TRBV20-1, TRBJ1-4)
CSAPGQGLLTNEKLFF

SEQ ID NO: 661835 - protein, 14 aa, Homo sapiens
  CDR3 for alpha chain variable domain of TCR clone 330918 (TRAV35, TRAJ22)
CAGLRPGSARQLTF

SEQ ID NO: 661836 - protein, 14 aa, Homo sapiens
  CDR3 for beta chain variable domain of TCR clone 330918 (TRBV12-4, TRBJ2-5)
RQQSPDRPQETQYF

SEQ ID NO: 661837 - protein, 15 aa, Homo sapiens
  CDR3 for alpha chain variable domain of TCR clone 330919 (TRAV27, TRAJ38)
CAARRNAGNNRKRIW

SEQ ID NO: 661838 - protein, 15 aa, Homo sapiens
  CDR3 for beta chain variable domain of TCR clone 330919 (TRBV12-4, TRBJ2-5)
CASSPPTGLQETQYF

SEQ ID NO: 661839 - protein, 16 aa, Homo sapiens
  CDR3 for alpha chain variable domain of TCR clone 330920 (TRAV26-2, TRAJ48)
CILRASSNFGNEKLTF

SEQ ID NO: 661840 - protein, 14 aa, Homo sapiens
  CDR3 for beta chain variable domain of TCR clone 330920 (TRBV7-9, TRBJ2-7)
CASSLDRGPYEQYF

SEQ ID NO: 661841 - protein, 11 aa, Homo sapiens
  CDR3 for alpha chain variable domain of TCR clone 330921 (TRAV29/DV5, TRAJ37)
CATSNTGKLIF

SEQ ID NO: 661842 - protein, 11 aa, Homo sapiens
  CDR3 for beta chain variable domain of TCR clone 330921 (TRBV12-4, TRBJ2-3)
CASTATDTQYF

SEQ ID NO: 661843 - protein, 10 aa, Homo sapiens
  CDR3 for alpha chain variable domain of TCR clone 330922 (TRAV23/DV6, TRAJ57)
CAASSTLSQG

SEQ ID NO: 661844 - protein, 13 aa, Homo sapiens
  CDR3 for beta chain variable domain of TCR clone 330922 (TRBV5-1, TRBJ2-1)
CASRPFGYNEQFF

SEQ ID NO: 661845 - protein, 14 aa, Homo sapiens
  CDR3 for alpha chain variable domain of TCR clone 330923 (TRAV26-1, TRAJ45)
CIEVTGGGADGLTF

SEQ ID NO: 661846 - protein, 15 aa, Homo sapiens
  CDR3 for beta chain variable domain of TCR clone 330923 (TRBV11-2, TRBJ2-1)
CASSLGTSGLNEQFF

SEQ ID NO: 661847 - protein, 14 aa, Homo sapiens
  CDR3 for alpha chain variable domain of TCR clone 330924 (TRAV26-1, TRAJ45)
CIEVTGGGADGLTF

SEQ ID NO: 661848 - protein, 16 aa, Homo sapiens
  CDR3 for beta chain variable domain of TCR clone 330924 (TRBV11-2, TRBJ2-7)
CASSPTTGGVSYEQYF

SEQ ID NO: 661849 - protein, 10 aa, Homo sapiens
  CDR3 for alpha chain variable domain of TCR clone 330925 (TRAV38-2/DV8, TRAJ40)
CASGAYKYIF

SEQ ID NO: 661850 - protein, 15 aa, Homo sapiens
  CDR3 for beta chain variable domain of TCR clone 330925 (TRBV6-3, TRBJ2-7)
CASSSPGTVFYEQYF

SEQ ID NO: 661851 - protein, 16 aa, Homo sapiens
  CDR3 for alpha chain variable domain of TCR clone 330926 (TRAV26-1, TRAJ38)
CIVRPLNAGNNRKLIW

SEQ ID NO: 661852 - protein, 13 aa, Homo sapiens
  CDR3 for beta chain variable domain of TCR clone 330926 (TRBV18, TRBJ1-1)
CASSPNGDTEAVF

SEQ ID NO: 661853 - protein, 12 aa, Homo sapiens
  CDR3 for alpha chain variable domain of TCR clone 330927 (TRAV13-1, TRAJ21)
CAAKKGFNKFYF

SEQ ID NO: 661854 - protein, 14 aa, Homo sapiens
  CDR3 for beta chain variable domain of TCR clone 330927 (TRBV4-2, TRBJ1-2)
CASSPGGSNYGYTF

SEQ ID NO: 661855 - protein, 16 aa, Homo sapiens
  CDR3 for alpha chain variable domain of TCR clone 330928 (TRAV14/DV4, TRAJ20)
CALREGRSRDDYKHSF

SEQ ID NO: 661856 - protein, 15 aa, Homo sapiens
  CDR3 for beta chain variable domain of TCR clone 330928 (TRBV7-3, TRBJ2-1)
CASSLGQGPFGEQFF

SEQ ID NO: 661857 - protein, 14 aa, Homo sapiens
  CDR3 for alpha chain variable domain of TCR clone 330929 (TRAV12-2, TRAJ13)
CAVQKTGGYQKVTF

SEQ ID NO: 661858 - protein, 15 aa, Homo sapiens
  CDR3 for beta chain variable domain of TCR clone 330929 (TRBV27, TRBJ2-1)
CASSNGGGASNEQFF

SEQ ID NO: 661859 - protein, 13 aa, Homo sapiens
  CDR3 for alpha chain variable domain of TCR clone 330930 (TRAV12-3, TRAJ13)
CAMTSGGYQKVTF

SEQ ID NO: 661860 - protein, 13 aa, Homo sapiens
  CDR3 for beta chain variable domain of TCR clone 330930 (TRBV20-1, TRBJ2-2)
CSALSGGAVELFF

SEQ ID NO: 661861 - protein, 14 aa, Homo sapiens
  CDR3 for alpha chain variable domain of TCR clone 330931 (TRAV13-2, TRAJ9)
CAENLETGGFKTVF

SEQ ID NO: 661862 - protein, 16 aa, Homo sapiens
  CDR3 for beta chain variable domain of TCR clone 330931 (TRBV28, TRBJ2-5)
CASSFSPAGGWETQYF

SEQ ID NO: 661863 - protein, 10 aa, Homo sapiens
  CDR3 for alpha chain variable domain of TCR clone 330932 (TRAV26-1, TRAJ40)
CIAGTYKYIF

SEQ ID NO: 661864 - protein, 15 aa, Homo sapiens
  CDR3 for beta chain variable domain of TCR clone 330932 (TRBV28, TRBJ1-3)
CASSMGWASGNTIYF

SEQ ID NO: 661865 - protein, 15 aa, Homo sapiens
  CDR3 for alpha chain variable domain of TCR clone 330933 (TRAV8-3, TRAJ27)
CAVGRSKTNAGKSTF

SEQ ID NO: 661866 - protein, 14 aa, Homo sapiens
  CDR3 for beta chain variable domain of TCR clone 330933 (TRBV11-2, TRBJ2-3)
CASSRLARTDTQYF

SEQ ID NO: 661867 - protein, 22 aa, Homo sapiens
  CDR3 for alpha chain variable domain of TCR clone 330934 (TRAV3, TRAJ38)
CAVSDCLNAGNNHIQNPDPAVY

SEQ ID NO: 661868 - protein, 15 aa, Homo sapiens
  CDR3 for beta chain variable domain of TCR clone 330934 (TRBV6-3, TRBJ2-7)
CASSSPGTVFYEQYF

SEQ ID NO: 661869 - protein, 10 aa, Homo sapiens
  CDR3 for alpha chain variable domain of TCR clone 330935 (TRAV23/DV6, TRAJ3)
CAATTFALGG

SEQ ID NO: 661870 - protein, 15 aa, Homo sapiens
  CDR3 for beta chain variable domain of TCR clone 330935 (TRBV19, TRBJ1-6)
CASSTQGAVGSHLHF

SEQ ID NO: 661871 - protein, 13 aa, Homo sapiens
  CDR3 for alpha chain variable domain of TCR clone 330936 (TRAV13-1, TRAJ20)
CAARVSNDYKLSF

SEQ ID NO: 661872 - protein, 14 aa, Homo sapiens
  CDR3 for beta chain variable domain of TCR clone 330936 (TRBV6-1, TRBJ1-3)
CASVQGGGGNTIYF

SEQ ID NO: 661873 - protein, 12 aa, Homo sapiens
  CDR3 for alpha chain variable domain of TCR clone 330937 (TRAV8-6, TRAJ5)
CAVLDTGRSTYF

SEQ ID NO: 661874 - protein, 12 aa, Homo sapiens
  CDR3 for beta chain variable domain of TCR clone 330937 (TRBV7-9, TRBJ1-6)
CASSASESPLHF

SEQ ID NO: 661875 - protein, 14 aa, Homo sapiens
  CDR3 for alpha chain variable domain of TCR clone 330938 (TRAV8-2, TRAJ11)
CVVSEKSGYSTLTF

SEQ ID NO: 661876 - protein, 15 aa, Homo sapiens
  CDR3 for beta chain variable domain of TCR clone 330938 (TRBV27, TRBJ1-6)
CASSFDRGLGSPLHF

SEQ ID NO: 661877 - protein, 11 aa, Homo sapiens
  CDR3 for alpha chain variable domain of TCR clone 330939 (TRAV12-1, TRAJ30)
CVVIGQDKIIF

SEQ ID NO: 661878 - protein, 12 aa, Homo sapiens
  CDR3 for beta chain variable domain of TCR clone 330939 (TRBV27, TRBJ2-2)
CASKLFTGELFF

SEQ ID NO: 661879 - protein, 14 aa, Homo sapiens
  CDR3 for alpha chain variable domain of TCR clone 330940 (TRAV17, TRAJ37)
CATDGSSNTGKLIF

SEQ ID NO: 661880 - protein, 14 aa, Homo sapiens
  CDR3 for beta chain variable domain of TCR clone 330940 (TRBV4-3, TRBJ1-5)
CASSQGGQGWPQHF

SEQ ID NO: 661881 - protein, 14 aa, Homo sapiens
  CDR3 for alpha chain variable domain of TCR clone 330941 (TRAV8-6, TRAJ12)
CAVKAADSSDKLIF

SEQ ID NO: 661882 - protein, 15 aa, Homo sapiens
  CDR3 for beta chain variable domain of TCR clone 330941 (TRBV5-1, TRBJ2-5)
CASSLGLAEQETRYF

SEQ ID NO: 661883 - protein, 14 aa, Homo sapiens
  CDR3 for alpha chain variable domain of TCR clone 330942 (TRAV1-2, TRAJ8)
CAVREDTGFQKLVF

SEQ ID NO: 661884 - protein, 17 aa, Homo sapiens
  CDR3 for beta chain variable domain of TCR clone 330942 (TRBV20-1, TRBJ2-1)
CSASSSVLAGSYNEQFF

SEQ ID NO: 661885 - protein, 14 aa, Homo sapiens
  CDR3 for alpha chain variable domain of TCR clone 330943 (TRAV16, TRAJ33)
CALSAMDSNYQLIW

SEQ ID NO: 661886 - protein, 13 aa, Homo sapiens
  CDR3 for beta chain variable domain of TCR clone 330943 (TRBV12-4, TRBJ1-5)
CASSPDRAQPQHF

SEQ ID NO: 661887 - protein, 13 aa, Homo sapiens
  CDR3 for alpha chain variable domain of TCR clone 330944 (TRAV12-2, TRAJ20)
CAVYPSNDYKLSL

SEQ ID NO: 661888 - protein, 15 aa, Homo sapiens
  CDR3 for beta chain variable domain of TCR clone 330944 (TRBV18, TRBJ1-2)
CASSPGNGLRYGYTF

SEQ ID NO: 661889 - protein, 12 aa, Homo sapiens
  CDR3 for alpha chain variable domain of TCR clone 330945 (TRAV29/DV5, TRAJ15)
CASNQAGTALIF

SEQ ID NO: 661890 - protein, 19 aa, Homo sapiens
  CDR3 for beta chain variable domain of TCR clone 330945 (TRBV7-2, TRBJ2-3)
CASSFLSRNWGGGTDTQYF

SEQ ID NO: 661891 - protein, 15 aa, Homo sapiens
  CDR3 for alpha chain variable domain of TCR clone 330946 (TRAV8-4, TRAJ10)
CAVRDGPGGGNKLTF

SEQ ID NO: 661892 - protein, 13 aa, Homo sapiens
  CDR3 for beta chain variable domain of TCR clone 330946 (TRBV28, TRBJ1-3)
CASSFLGSGTIYF

SEQ ID NO: 661893 - protein, 15 aa, Homo sapiens
  CDR3 for alpha chain variable domain of TCR clone 330947 (TRAV36/DV7, TRAJ53)
CDVEGSGGSNYKLTF

SEQ ID NO: 661894 - protein, 16 aa, Homo sapiens
  CDR3 for beta chain variable domain of TCR clone 330947 (TRBV27, TRBJ2-2)
CASSLSGFWVTGELFF

SEQ ID NO: 661895 - protein, 14 aa, Homo sapiens
  CDR3 for alpha chain variable domain of TCR clone 330948 (TRAV12-3, TRAJ10)
SHLPLPGGGNKLTF

SEQ ID NO: 661896 - protein, 15 aa, Homo sapiens
  CDR3 for beta chain variable domain of TCR clone 330948 (TRBV6-3, TRBJ2-7)
CASSSPGTVFYEQYF

SEQ ID NO: 661897 - protein, 13 aa, Homo sapiens
  CDR3 for alpha chain variable domain of TCR clone 330949 (TRAV21, TRAJ27)
CAARPGNAGQSTF

SEQ ID NO: 661898 - protein, 14 aa, Homo sapiens
  CDR3 for beta chain variable domain of TCR clone 330949 (TRBV7-6, TRBJ2-3)
CASSLGTVSDTQYF

SEQ ID NO: 661899 - protein, 14 aa, Homo sapiens
  CDR3 for alpha chain variable domain of TCR clone 330950 (TRAV12-1, TRAJ30)
CVVNIGGRDDKIIF

SEQ ID NO: 661900 - protein, 13 aa, Homo sapiens
  CDR3 for beta chain variable domain of TCR clone 330950 (TRBV12-5, TRBJ2-1)
CASGLGRGNERFF

SEQ ID NO: 661901 - protein, 16 aa, Homo sapiens
  CDR3 for alpha chain variable domain of TCR clone 330951 (TRAV30, TRAJ24)
CGTEIVDADSGGKFQF

SEQ ID NO: 661902 - protein, 14 aa, Homo sapiens
  CDR3 for beta chain variable domain of TCR clone 330951 (TRBV20-1, TRBJ1-1)
CSAQTRIGGTEAFF

SEQ ID NO: 661903 - protein, 13 aa, Homo sapiens
  CDR3 for alpha chain variable domain of TCR clone 330952 (TRAV35, TRAJ48)
CAGHEFGNEKLTF

SEQ ID NO: 661904 - protein, 13 aa, Homo sapiens
  CDR3 for beta chain variable domain of TCR clone 330952 (TRBV7-2, TRBJ1-6)
CASSSVGSSHLHF

SEQ ID NO: 661905 - protein, 16 aa, Homo sapiens
  CDR3 for alpha chain variable domain of TCR clone 330953 (TRAV30, TRAJ24)
CGTEIVDADSWGKFQF

SEQ ID NO: 661906 - protein, 16 aa, Homo sapiens
  CDR3 for beta chain variable domain of TCR clone 330953 (TRBV11-2, TRBJ2-2)
CASSLRTGNLIGELFF

SEQ ID NO: 661907 - protein, 17 aa, Homo sapiens
  CDR3 for alpha chain variable domain of TCR clone 330954 (TRAV13-1, TRAJ32)
CAASNGWGCYKQAHLWN

SEQ ID NO: 661908 - protein, 17 aa, Homo sapiens
  CDR3 for beta chain variable domain of TCR clone 330954 (TRBV15, TRBJ1-2)
CATSGREIDVVNYGYTF

SEQ ID NO: 661909 - protein, 15 aa, Homo sapiens
  CDR3 for alpha chain variable domain of TCR clone 330955 (TRAV23/DV6, TRAJ18)
CAARYRGSTLGRLSF

SEQ ID NO: 661910 - protein, 15 aa, Homo sapiens
  CDR3 for beta chain variable domain of TCR clone 330955 (TRBV15, TRBJ1-1)
CATSLQGGRNTEAFF

SEQ ID NO: 661911 - protein, 17 aa, Homo sapiens
  CDR3 for alpha chain variable domain of TCR clone 330956 (TRAV3, TRAJ38)
CAVRDCLNAGNNRKLIW

SEQ ID NO: 661912 - protein, 13 aa, Homo sapiens
  CDR3 for beta chain variable domain of TCR clone 330956 (TRBV19, TRBJ2-7)
CASRKASGSEQYF

SEQ ID NO: 661913 - protein, 14 aa, Homo sapiens
  CDR3 for alpha chain variable domain of TCR clone 330957 (TRAV27, TRAJ37)
CAGERCSNTGKLIF

SEQ ID NO: 661914 - protein, 15 aa, Homo sapiens
  CDR3 for beta chain variable domain of TCR clone 330957 (TRBV11-3, TRBJ1-6)
CASSLDWGANSPLHF

SEQ ID NO: 661915 - protein, 12 aa, Homo sapiens
  CDR3 for alpha chain variable domain of TCR clone 330958 (TRAV21, TRAJ13)
PGPSGGCQKVTF

SEQ ID NO: 661916 - protein, 15 aa, Homo sapiens
  CDR3 for beta chain variable domain of TCR clone 330958 (TRBV7-9, TRBJ1-6)
CASSSPGRGNSPLHF

SEQ ID NO: 661917 - protein, 17 aa, Homo sapiens
  CDR3 for alpha chain variable domain of TCR clone 330959 (TRAV21, TRAJ52)
CAVGTNAGGTSYGKLTF

SEQ ID NO: 661918 - protein, 13 aa, Homo sapiens
  CDR3 for beta chain variable domain of TCR clone 330959 (TRBV5-1, TRBJ1-2)
CASSFSGNRGYTF

SEQ ID NO: 661919 - protein, 16 aa, Homo sapiens
  CDR3 for alpha chain variable domain of TCR clone 330960 (TRAV17, TRAJ52)
CATSNAGGTSYGTLAF

SEQ ID NO: 661920 - protein, 13 aa, Homo sapiens
  CDR3 for beta chain variable domain of TCR clone 330960 (TRBV27, TRBJ1-6)
CASSLVLVSPLHF

SEQ ID NO: 661921 - protein, 13 aa, Homo sapiens
  CDR3 for alpha chain variable domain of TCR clone 330961 (TRAV20, TRAJ7)
CAVLQGGNNRLAY

SEQ ID NO: 661922 - protein, 16 aa, Homo sapiens
  CDR3 for beta chain variable domain of TCR clone 330961 (TRBV6-1, TRBJ2-5)
CASSLRTGGVGETQYF

SEQ ID NO: 661923 - protein, 13 aa, Homo sapiens
  CDR3 for alpha chain variable domain of TCR clone 330962 (TRAV30, TRAJ6)
CGFIEGGSYIPSF

SEQ ID NO: 661924 - protein, 13 aa, Homo sapiens
  CDR3 for beta chain variable domain of TCR clone 330962 (TRBV5-4, TRBJ2-5)
CASSPVSQETQYF

SEQ ID NO: 661925 - protein, 15 aa, Homo sapiens
  CDR3 for alpha chain variable domain of TCR clone 330963 (TRAV3, TRAJ22)
CAVRDRGGSARQRTF

SEQ ID NO: 661926 - protein, 17 aa, Homo sapiens
  CDR3 for beta chain variable domain of TCR clone 330963 (TRBV13, TRBJ2-3)
CASSLSRVAGGRNTQYF

SEQ ID NO: 661927 - protein, 20 aa, Homo sapiens
  CDR3 for alpha chain variable domain of TCR clone 330964 (TRAV12-3, TRAJ52)
CAMTQSYQNAGGTSYGKLTF

SEQ ID NO: 661928 - protein, 15 aa, Homo sapiens
  CDR3 for beta chain variable domain of TCR clone 330964 (TRBV5-1, TRBJ2-3)
CASSVTSGSTDTQYF

SEQ ID NO: 661929 - protein, 16 aa, Homo sapiens
  CDR3 for alpha chain variable domain of TCR clone 330965 (TRAV3, TRAJ10)
CAVRDMRAGGGNKLTL

SEQ ID NO: 661930 - protein, 15 aa, Homo sapiens
  CDR3 for beta chain variable domain of TCR clone 330965 (TRBV11-2, TRBJ1-2)
CASSLEGVQRNGYTF

SEQ ID NO: 661931 - protein, 14 aa, Homo sapiens
  CDR3 for alpha chain variable domain of TCR clone 330966 (TRAV17, TRAJ16)
CATADFSDGQKLLF

SEQ ID NO: 661932 - protein, 15 aa, Homo sapiens
  CDR3 for beta chain variable domain of TCR clone 330966 (TRBV27, TRBJ2-1)
CASSNGGGSSNKQFF

SEQ ID NO: 661933 - protein, 12 aa, Homo sapiens
  CDR3 for alpha chain variable domain of TCR clone 330967 (TRAV16, TRAJ10)
CSRTGGGNKLTF

SEQ ID NO: 661934 - protein, 12 aa, Homo sapiens
  CDR3 for beta chain variable domain of TCR clone 330967 (TRBV11-3, TRBJ1-1)
CASSHRQGEALF

SEQ ID NO: 661935 - protein, 13 aa, Homo sapiens
  CDR3 for alpha chain variable domain of TCR clone 330968 (TRAV13-2, TRAJ48)
CAEMDFGNEKLTF

SEQ ID NO: 661936 - protein, 13 aa, Homo sapiens
  CDR3 for beta chain variable domain of TCR clone 330968 (TRBV11-3, TRBJ1-1)
CASTGSLNTEAFF

SEQ ID NO: 661937 - protein, 18 aa, Homo sapiens
  CDR3 for alpha chain variable domain of TCR clone 330969 (TRAV21, TRAJ52)
CAVRPSPAGGISYGKLTF

SEQ ID NO: 661938 - protein, 11 aa, Homo sapiens
  CDR3 for beta chain variable domain of TCR clone 330969 (TRBV12-4, TRBJ2-3)
CASTATDTQYF

SEQ ID NO: 661939 - protein, 15 aa, Homo sapiens
  CDR3 for alpha chain variable domain of TCR clone 330970 (TRAV27, TRAJ38)
CAARRNAGNNRKLIW

SEQ ID NO: 661940 - protein, 14 aa, Homo sapiens
  CDR3 for beta chain variable domain of TCR clone 330970 (TRBV7-8, TRBJ2-3)
CASSLEAGTDKQYF

SEQ ID NO: 661941 - protein, 11 aa, Homo sapiens
  CDR3 for alpha chain variable domain of TCR clone 330971 (TRAV12-1, TRAJ34)
WVVNKGRELIF

SEQ ID NO: 661942 - protein, 12 aa, Homo sapiens
  CDR3 for beta chain variable domain of TCR clone 330971 (TRBV11-2, TRBJ2-2)
CASSLGGGELFF

SEQ ID NO: 661943 - protein, 14 aa, Homo sapiens
  CDR3 for alpha chain variable domain of TCR clone 330972 (TRAV13-2, TRAJ39)
GDSVRNNAGNMLTF

SEQ ID NO: 661944 - protein, 13 aa, Homo sapiens
  CDR3 for beta chain variable domain of TCR clone 330972 (TRBV20-1, TRBJ1-1)
CSAPLGGGTEAFF

SEQ ID NO: 661945 - protein, 16 aa, Homo sapiens
  CDR3 for alpha chain variable domain of TCR clone 330973 (TRAV12-3, TRAJ53)
CAMSPGSGGSNYKLTF

SEQ ID NO: 661946 - protein, 14 aa, Homo sapiens
  CDR3 for beta chain variable domain of TCR clone 330973 (TRBV13, TRBJ2-5)
CASSLDYPQETQYF

SEQ ID NO: 661947 - protein, 11 aa, Homo sapiens
  CDR3 for alpha chain variable domain of TCR clone 330974 (TRAV27, TRAJ45)
CAGAQEEVLTD

SEQ ID NO: 661948 - protein, 17 aa, Homo sapiens
  CDR3 for beta chain variable domain of TCR clone 330974 (TRBV11-2, TRBJ2-1)
CASSLYPPGVEYNERFF

SEQ ID NO: 661949 - protein, 16 aa, Homo sapiens
  CDR3 for alpha chain variable domain of TCR clone 330975 (TRAV16, TRAJ42)
CALSGLLGGSQGNLIF

SEQ ID NO: 661950 - protein, 16 aa, Homo sapiens
  CDR3 for beta chain variable domain of TCR clone 330975 (TRBV19, TRBJ2-2)
CASSPSGGLNTGELFF

SEQ ID NO: 661951 - protein, 15 aa, Homo sapiens
  CDR3 for alpha chain variable domain of TCR clone 330976 (TRAV12-3, TRAJ6)
CAMSATTGGSYIPTF

SEQ ID NO: 661952 - protein, 13 aa, Homo sapiens
  CDR3 for beta chain variable domain of TCR clone 330976 (TRBV14, TRBJ2-7)
CASSQDRRYEQYF

SEQ ID NO: 661953 - protein, 15 aa, Homo sapiens
  CDR3 for alpha chain variable domain of TCR clone 330977 (TRAV1-2, TRAJ9)
CAVRDDGTGGFKTIF

SEQ ID NO: 661954 - protein, 18 aa, Homo sapiens
  CDR3 for beta chain variable domain of TCR clone 330977 (TRBV12-4, TRBJ2-2)
CASSLVAGTRGRTGELFF

SEQ ID NO: 661955 - protein, 13 aa, Homo sapiens
  CDR3 for alpha chain variable domain of TCR clone 330978 (TRAV21, TRAJ45)
CDVMGGGADGLTF

SEQ ID NO: 661956 - protein, 14 aa, Homo sapiens
  CDR3 for beta chain variable domain of TCR clone 330978 (TRBV4-3, TRBJ1-4)
CASSPLQRNEKLFF

SEQ ID NO: 661957 - protein, 13 aa, Homo sapiens
  CDR3 for alpha chain variable domain of TCR clone 330979 (TRAV12-1, TRAJ21)
RVETLYNFNKFYF

SEQ ID NO: 661958 - protein, 20 aa, Homo sapiens
  CDR3 for beta chain variable domain of TCR clone 330979 (TRBV7-8, TRBJ2-1)
CASSLAHRLAGVRSYNEQFF

SEQ ID NO: 661959 - protein, 16 aa, Homo sapiens
  CDR3 for alpha chain variable domain of TCR clone 330980 (TRAV12-2, TRAJ18)
CAVTTDRGSTLGRLYF

SEQ ID NO: 661960 - protein, 16 aa, Homo sapiens
  CDR3 for beta chain variable domain of TCR clone 330980 (TRBV7-2, TRBJ1-2)
CASSSNQDRRGHGYTF

SEQ ID NO: 661961 - protein, 13 aa, Homo sapiens
  CDR3 for alpha chain variable domain of TCR clone 330981 (TRAV3, TRAJ27)
CAVRPLGAGKSTF

SEQ ID NO: 661962 - protein, 13 aa, Homo sapiens
  CDR3 for beta chain variable domain of TCR clone 330981 (TRBV19, TRBJ2-7)
CASSRDRSYEQYF

SEQ ID NO: 661963 - protein, 15 aa, Homo sapiens
  CDR3 for alpha chain variable domain of TCR clone 330982 (TRAV13-1, TRAJ17)
CAASIERAAGNKLTF

SEQ ID NO: 661964 - protein, 16 aa, Homo sapiens
  CDR3 for beta chain variable domain of TCR clone 330982 (TRBV5-5, TRBJ1-2)
CASSPTWGRGLYGYTF

SEQ ID NO: 661965 - protein, 14 aa, Homo sapiens
  CDR3 for alpha chain variable domain of TCR clone 330983 (TRAV1-2, TRAJ16)
CAVNRLSDGQKLLF

SEQ ID NO: 661966 - protein, 18 aa, Homo sapiens
  CDR3 for beta chain variable domain of TCR clone 330983 (TRBV5-1, TRBJ1-6)
CASSVGGGYGERNSPLHF

SEQ ID NO: 661967 - protein, 12 aa, Homo sapiens
  CDR3 for alpha chain variable domain of TCR clone 330984 (TRAV17, TRAJ8)
CATDTGFQKLVF

SEQ ID NO: 661968 - protein, 14 aa, Homo sapiens
  CDR3 for beta chain variable domain of TCR clone 330984 (TRBV7-2, TRBJ2-7)
CASSPKTSFYEQYF

SEQ ID NO: 661969 - protein, 15 aa, Homo sapiens
  CDR3 for alpha chain variable domain of TCR clone 330985 (TRAV13-1, TRAJ11)
CAASNRNSGYSTLTF

SEQ ID NO: 661970 - protein, 15 aa, Homo sapiens
  CDR3 for beta chain variable domain of TCR clone 330985 (TRBV18, TRBJ1-5)
CASSPQARSNQPQHF

SEQ ID NO: 661971 - protein, 13 aa, Homo sapiens
  CDR3 for alpha chain variable domain of TCR clone 330986 (TRAV16, TRAJ26)
CITVLCLGQNVVF

SEQ ID NO: 661972 - protein, 12 aa, Homo sapiens
  CDR3 for beta chain variable domain of TCR clone 330986 (TRBV11-2, TRBJ2-1)
CASSPGNNEQFF

SEQ ID NO: 661973 - protein, 14 aa, Homo sapiens
  CDR3 for alpha chain variable domain of TCR clone 330987 (TRAV13-1, TRAJ24)
CAASRTDSWGKLQF

SEQ ID NO: 661974 - protein, 15 aa, Homo sapiens
  CDR3 for beta chain variable domain of TCR clone 330987 (TRBV11-2, TRBJ2-1)
CASSLGTSGLNEQFF

SEQ ID NO: 661975 - protein, 14 aa, Homo sapiens
  CDR3 for alpha chain variable domain of TCR clone 330988 (TRAV12-2, TRAJ17)
CAVLFKAAGNKLTF

SEQ ID NO: 661976 - protein, 16 aa, Homo sapiens
  CDR3 for beta chain variable domain of TCR clone 330988 (TRBV12-4, TRBJ2-7)
CASSPEGQGSSYEQYF

SEQ ID NO: 661977 - protein, 14 aa, Homo sapiens
  CDR3 for alpha chain variable domain of TCR clone 330989 (TRAV12-3, TRAJ6)
CAMSATGGSYIPTF

SEQ ID NO: 661978 - protein, 16 aa, Homo sapiens
  CDR3 for beta chain variable domain of TCR clone 330989 (TRBV12-5, TRBJ2-5)
CASGPRTSGNQETQYF

SEQ ID NO: 661979 - protein, 11 aa, Homo sapiens
  CDR3 for alpha chain variable domain of TCR clone 330990 (TRAV2, TRAJ33)
CAVESNYQLIW

SEQ ID NO: 661980 - protein, 12 aa, Homo sapiens
  CDR3 for beta chain variable domain of TCR clone 330990 (TRBV7-9, TRBJ1-5)
CASSPQGQPQHF

SEQ ID NO: 661981 - protein, 14 aa, Homo sapiens
  CDR3 for alpha chain variable domain of TCR clone 330991 (TRAV1-2, TRAJ33)
CALRAPDSNYQLIW

SEQ ID NO: 661982 - protein, 15 aa, Homo sapiens
  CDR3 for beta chain variable domain of TCR clone 330991 (TRBV10-3, TRBJ2-3)
CAISLTSGGTDTQYF

SEQ ID NO: 661983 - protein, 14 aa, Homo sapiens
  CDR3 for alpha chain variable domain of TCR clone 330992 (TRAV35, TRAJ13)
CAGRSPGGYQKVTF

SEQ ID NO: 661984 - protein, 14 aa, Homo sapiens
  CDR3 for beta chain variable domain of TCR clone 330992 (TRBV19, TRBJ2-2)
CASSMVGPSGELFF

SEQ ID NO: 661985 - protein, 13 aa, Homo sapiens
  CDR3 for alpha chain variable domain of TCR clone 330993 (TRAV21, TRAJ45)
CAAPGGGADGLTF

SEQ ID NO: 661986 - protein, 15 aa, Homo sapiens
  CDR3 for beta chain variable domain of TCR clone 330993 (TRBV28, TRBJ2-7)
CASRPWDRFSYEQYF

SEQ ID NO: 661987 - protein, 13 aa, Homo sapiens
  CDR3 for alpha chain variable domain of TCR clone 330994 (TRAV13-2, TRAJ48)
CAEMDCGNEKLTF

SEQ ID NO: 661988 - protein, 12 aa, Homo sapiens
  CDR3 for beta chain variable domain of TCR clone 330994 (TRBV5-1, TRBJ1-2)
CASSQDTYGYTF

SEQ ID NO: 661989 - protein, 14 aa, Homo sapiens
  CDR3 for alpha chain variable domain of TCR clone 330995 (TRAV12-2, TRAJ13)
CAVKKTGGYLKVTF

SEQ ID NO: 661990 - protein, 15 aa, Homo sapiens
  CDR3 for beta chain variable domain of TCR clone 330995 (TRBV12-4, TRBJ2-5)
CASSPPTGLQETQYF

SEQ ID NO: 661991 - protein, 15 aa, Homo sapiens
  CDR3 for alpha chain variable domain of TCR clone 330996 (TRAV8-3, TRAJ7)
CAVGSISYGNNRLAF

SEQ ID NO: 661992 - protein, 15 aa, Homo sapiens
  CDR3 for beta chain variable domain of TCR clone 330996 (TRBV20-1, TRBJ2-7)
CSARDRVSGMDEQYF

SEQ ID NO: 661993 - protein, 12 aa, Homo sapiens
  CDR3 for alpha chain variable domain of TCR clone 330997 (TRAV13-2, TRAJ42)
CAEGGSQGNLIF

SEQ ID NO: 661994 - protein, 14 aa, Homo sapiens
  CDR3 for beta chain variable domain of TCR clone 330997 (TRBV2, TRBJ2-7)
CASSLTSGGYEQYF

SEQ ID NO: 661995 - protein, 16 aa, Homo sapiens
  CDR3 for alpha chain variable domain of TCR clone 330998 (TRAV17, TRAJ28)
CATASVSGAGSYQFTF

SEQ ID NO: 661996 - protein, 11 aa, Homo sapiens
  CDR3 for beta chain variable domain of TCR clone 330998 (TRBV7-9, TRBJ2-5)
CASSLGETQYF

SEQ ID NO: 661997 - protein, 19 aa, Homo sapiens
  CDR3 for alpha chain variable domain of TCR clone 330999 (TRAV26-1, TRAJ52)
CIVRAHRNAGGTSYGKLTF

SEQ ID NO: 661998 - protein, 15 aa, Homo sapiens
  CDR3 for beta chain variable domain of TCR clone 330999 (TRBV29-1, TRBJ2-1)
CCGRDRKSSYNEQFF

SEQ ID NO: 661999 - protein, 15 aa, Homo sapiens
  CDR3 for alpha chain variable domain of TCR clone 331000 (TRAV21, TRAJ53)
CATLNSGGSNYKLTF

SEQ ID NO: 662000 - protein, 12 aa, Homo sapiens
  CDR3 for beta chain variable domain of TCR clone 331000 (TRBV5-1, TRBJ1-2)
CASSQDAYGYTF

SEQ ID NO: 662001 - protein, 16 aa, Homo sapiens
  CDR3 for alpha chain variable domain of TCR clone 331001 (TRAV1-2, TRAJ8)
CAVREDTGFQKLVLEL

SEQ ID NO: 662002 - protein, 14 aa, Homo sapiens
  CDR3 for beta chain variable domain of TCR clone 331001 (TRBV5-4, TRBJ1-1)
CASSLDSRRDEAFF

SEQ ID NO: 662003 - protein, 16 aa, Homo sapiens
  CDR3 for alpha chain variable domain of TCR clone 331002 (TRAV38-1, TRAJ32)
CASMKGGGGATNKLIF

SEQ ID NO: 662004 - protein, 13 aa, Homo sapiens
  CDR3 for beta chain variable domain of TCR clone 331002 (TRBV20-1, TRBJ2-5)
CSAREAFQETQCF

SEQ ID NO: 662005 - protein, 14 aa, Homo sapiens
  CDR3 for alpha chain variable domain of TCR clone 331003 (TRAV13-2, TRAJ4)
CAEKGPKGYNKLIL

SEQ ID NO: 662006 - protein, 13 aa, Homo sapiens
  CDR3 for beta chain variable domain of TCR clone 331003 (TRBV18, TRBJ2-5)
CASSPPGKETQYF

SEQ ID NO: 662007 - protein, 17 aa, Homo sapiens
  CDR3 for alpha chain variable domain of TCR clone 331004 (TRAV3, TRAJ12)
CCERRDGTMDSSYKLIF

SEQ ID NO: 662008 - protein, 15 aa, Homo sapiens
  CDR3 for beta chain variable domain of TCR clone 331004 (TRBV5-5, TRBJ1-5)
CASSLKGGGEKPQHF

SEQ ID NO: 662009 - protein, 18 aa, Homo sapiens
  CDR3 for alpha chain variable domain of TCR clone 331005 (TRAV26-2, TRAJ45)
CILRVDKYSGVGADGLTF

SEQ ID NO: 662010 - protein, 16 aa, Homo sapiens
  CDR3 for beta chain variable domain of TCR clone 331005 (TRBV12-5, TRBJ2-5)
CASGPRTSGNQETQYF

SEQ ID NO: 662011 - protein, 13 aa, Homo sapiens
  CDR3 for alpha chain variable domain of TCR clone 331006 (TRAV19, TRAJ57)
CALLQGGSEKLVC

SEQ ID NO: 662012 - protein, 13 aa, Homo sapiens
  CDR3 for beta chain variable domain of TCR clone 331006 (TRBV28, TRBJ2-1)
RASRSGGLNEQFF

SEQ ID NO: 662013 - protein, 16 aa, Homo sapiens
  CDR3 for alpha chain variable domain of TCR clone 331007 (TRAV13-1, TRAJ18)
CAASRMRGSTLGRLYF

SEQ ID NO: 662014 - protein, 14 aa, Homo sapiens
  CDR3 for beta chain variable domain of TCR clone 331007 (TRBV19, TRBJ2-2)
CASSTLHGSGELFF

SEQ ID NO: 662015 - protein, 14 aa, Homo sapiens
  CDR3 for alpha chain variable domain of TCR clone 331008 (TRAV12-3, TRAJ10)
SHLPLTGGGNKLTF

SEQ ID NO: 662016 - protein, 13 aa, Homo sapiens
  CDR3 for beta chain variable domain of TCR clone 331008 (TRBV27, TRBJ1-1)
CASSLSIGADAFF

SEQ ID NO: 662017 - protein, 17 aa, Homo sapiens
  CDR3 for alpha chain variable domain of TCR clone 331009 (TRAV8-6, TRAJ58)
CAVSSGVGETSGSRLTF

SEQ ID NO: 662018 - protein, 18 aa, Homo sapiens
  CDR3 for beta chain variable domain of TCR clone 331009 (TRBV20-1, TRBJ2-6)
CSAETTPTHGSGANVLTF

SEQ ID NO: 662019 - protein, 13 aa, Homo sapiens
  CDR3 for alpha chain variable domain of TCR clone 331010 (TRAV23/DV6, TRAJ22)
CASRAGSARQLTF

SEQ ID NO: 662020 - protein, 14 aa, Homo sapiens
  CDR3 for beta chain variable domain of TCR clone 331010 (TRBV7-2, TRBJ2-7)
CASSPKTSFYEQDF

SEQ ID NO: 662021 - protein, 17 aa, Homo sapiens
  CDR3 for alpha chain variable domain of TCR clone 331011 (TRAV3, TRAJ6)
CAVRDGPRAGGSYIPTF

SEQ ID NO: 662022 - protein, 20 aa, Homo sapiens
  CDR3 for beta chain variable domain of TCR clone 331011 (TRBV19, TRBJ2-1)
CASSISRTVTSTRLNNEQFF

SEQ ID NO: 662023 - protein, 12 aa, Homo sapiens
  CDR3 for alpha chain variable domain of TCR clone 331012 (TRAV26-1, TRAJ43)
CIVRPRGYDMRF

SEQ ID NO: 662024 - protein, 16 aa, Homo sapiens
  CDR3 for beta chain variable domain of TCR clone 331012 (TRBV3-1, TRBJ2-1)
CASSQGGRRSFDEQFF

SEQ ID NO: 662025 - protein, 13 aa, Homo sapiens
  CDR3 for alpha chain variable domain of TCR clone 331013 (TRAV12-3, TRAJ40)
CAMSDSGIYKYIF

SEQ ID NO: 662026 - protein, 14 aa, Homo sapiens
  CDR3 for beta chain variable domain of TCR clone 331013 (TRBV7-2, TRBJ1-5)
CASSTQGAGQPQHF

SEQ ID NO: 662027 - protein, 14 aa, Homo sapiens
  CDR3 for alpha chain variable domain of TCR clone 331014 (TRAV1-2, TRAJ16)
CAVNRFSYGQKLLF

SEQ ID NO: 662028 - protein, 14 aa, Homo sapiens
  CDR3 for beta chain variable domain of TCR clone 331014 (TRBV7-2, TRBJ1-5)
CASSTQGAGQPQHF

SEQ ID NO: 662029 - protein, 14 aa, Homo sapiens
  CDR3 for alpha chain variable domain of TCR clone 331015 (TRAV2, TRAJ9)
CAVEDRSGGFKTIF

SEQ ID NO: 662030 - protein, 16 aa, Homo sapiens
  CDR3 for beta chain variable domain of TCR clone 331015 (TRBV6-5, TRBJ2-1)
CASSETLAGHYNEQFF

SEQ ID NO: 662031 - protein, 13 aa, Homo sapiens
  CDR3 for alpha chain variable domain of TCR clone 331016 (TRAV16, TRAJ9)
CALRATGGFKTIF

SEQ ID NO: 662032 - protein, 16 aa, Homo sapiens
  CDR3 for beta chain variable domain of TCR clone 331016 (TRBV5-1, TRBJ1-3)
CASSRWGEDSGNTIYF

SEQ ID NO: 662033 - protein, 13 aa, Homo sapiens
  CDR3 for alpha chain variable domain of TCR clone 331017 (TRAV16, TRAJ9)
CALSNTGGFKTIF

SEQ ID NO: 662034 - protein, 14 aa, Homo sapiens
  CDR3 for beta chain variable domain of TCR clone 331017 (TRBV11-2, TRBJ2-7)
CASSLGAGAYEQYF

SEQ ID NO: 662035 - protein, 14 aa, Homo sapiens
  CDR3 for alpha chain variable domain of TCR clone 331018 (TRAV12-3, TRAJ57)
CAMSAWGGSEKRVF

SEQ ID NO: 662036 - protein, 18 aa, Homo sapiens
  CDR3 for beta chain variable domain of TCR clone 331018 (TRBV10-3, TRBJ2-3)
CAISESRVGPMRGDTQYF

SEQ ID NO: 662037 - protein, 13 aa, Homo sapiens
  CDR3 for alpha chain variable domain of TCR clone 331019 (TRAV4, TRAJ42)
CLVGGGSQGNLIF

SEQ ID NO: 662038 - protein, 16 aa, Homo sapiens
  CDR3 for beta chain variable domain of TCR clone 331019 (TRBV5-1, TRBJ2-3)
CDSSLQGRVGADTQYF

SEQ ID NO: 662039 - protein, 14 aa, Homo sapiens
  CDR3 for alpha chain variable domain of TCR clone 331020 (TRAV1-2, TRAJ16)
CAVNRFSDGQKLLF

SEQ ID NO: 662040 - protein, 16 aa, Homo sapiens
  CDR3 for beta chain variable domain of TCR clone 331020 (TRBV7-6, TRBJ2-1)
CASSLNEGPSYNEQFF

SEQ ID NO: 662041 - protein, 18 aa, Homo sapiens
  CDR3 for alpha chain variable domain of TCR clone 331021 (TRAV21, TRAJ52)
CAVRPSPAGGTSYGKLTF

SEQ ID NO: 662042 - protein, 17 aa, Homo sapiens
  CDR3 for beta chain variable domain of TCR clone 331021 (TRBV13, TRBJ2-3)
CASSRSRVAGGRSTQYF

SEQ ID NO: 662043 - protein, 16 aa, Homo sapiens
  CDR3 for alpha chain variable domain of TCR clone 331022 (TRAV16, TRAJ4)
CALSRMFSGGYNKLIF

SEQ ID NO: 662044 - protein, 14 aa, Homo sapiens
  CDR3 for beta chain variable domain of TCR clone 331022 (TRBV27, TRBJ1-1)
CASSLLSGLSEAFF

SEQ ID NO: 662045 - protein, 14 aa, Homo sapiens
  CDR3 for alpha chain variable domain of TCR clone 331023 (TRAV1-2, TRAJ8)
CAVREDTVFQKLVF

SEQ ID NO: 662046 - protein, 17 aa, Homo sapiens
  CDR3 for beta chain variable domain of TCR clone 331023 (TRBV11-2, TRBJ2-1)
CASSLYPPGVEYNEQFF

SEQ ID NO: 662047 - protein, 16 aa, Homo sapiens
  CDR3 for alpha chain variable domain of TCR clone 331024 (TRAV3, TRAJ10)
CAVRDMRAGEGNKLTF

SEQ ID NO: 662048 - protein, 14 aa, Homo sapiens
  CDR3 for beta chain variable domain of TCR clone 331024 (TRBV7-2, TRBJ1-1)
CASSFLTGTTEAFF

SEQ ID NO: 662049 - protein, 13 aa, Homo sapiens
  CDR3 for alpha chain variable domain of TCR clone 331025 (TRAV8-3, TRAJ48)
CAVAAGGNEKLTF

SEQ ID NO: 662050 - protein, 13 aa, Homo sapiens
  CDR3 for beta chain variable domain of TCR clone 331025 (TRBV7-9, TRBJ1-2)
CASSLKQNYGYTF

SEQ ID NO: 662051 - protein, 13 aa, Homo sapiens
  CDR3 for alpha chain variable domain of TCR clone 331026 (TRAV8-3, TRAJ28)
CAVGAVGSYQLTF

SEQ ID NO: 662052 - protein, 14 aa, Homo sapiens
  CDR3 for beta chain variable domain of TCR clone 331026 (TRBV7-2, TRBJ2-7)
CACRSQGAAYEQYF

SEQ ID NO: 662053 - protein, 11 aa, Homo sapiens
  CDR3 for alpha chain variable domain of TCR clone 331027 (TRAV8-2, TRAJ26)
CVVTLLIGSEF

SEQ ID NO: 662054 - protein, 15 aa, Homo sapiens
  CDR3 for beta chain variable domain of TCR clone 331027 (TRBV11-2, TRBJ2-2)
CASSSDRVNAGELFF

SEQ ID NO: 662055 - protein, 16 aa, Homo sapiens
  CDR3 for alpha chain variable domain of TCR clone 331028 (TRAV3, TRAJ37)
CAVRPHGSGNTGKLIC

SEQ ID NO: 662056 - protein, 17 aa, Homo sapiens
  CDR3 for beta chain variable domain of TCR clone 331028 (TRBV5-1, TRBJ2-5)
CASSPVALGQNQETQYF

SEQ ID NO: 662057 - protein, 18 aa, Homo sapiens
  CDR3 for alpha chain variable domain of TCR clone 331029 (TRAV13-1, TRAJ52)
CAASKRSAGGTSYGKLTC

SEQ ID NO: 662058 - protein, 12 aa, Homo sapiens
  CDR3 for beta chain variable domain of TCR clone 331029 (TRBV12-4, TRBJ1-2)
CQQLRQGKGYTF

SEQ ID NO: 662059 - protein, 16 aa, Homo sapiens
  CDR3 for alpha chain variable domain of TCR clone 331030 (TRAV3, TRAJ10)
CAVRDMSAGGGNKITF

SEQ ID NO: 662060 - protein, 17 aa, Homo sapiens
  CDR3 for beta chain variable domain of TCR clone 331030 (TRBV28, TRBJ2-5)
CASSTPEGDALQETQYF

SEQ ID NO: 662061 - protein, 14 aa, Homo sapiens
  CDR3 for alpha chain variable domain of TCR clone 331031 (TRAV3, TRAJ8)
CAALMNAGFQKLVF

SEQ ID NO: 662062 - protein, 15 aa, Homo sapiens
  CDR3 for beta chain variable domain of TCR clone 331031 (TRBV28, TRBJ2-5)
CASSLGLGNQETQYF

SEQ ID NO: 662063 - protein, 14 aa, Homo sapiens
  CDR3 for alpha chain variable domain of TCR clone 331032 (TRAV8-3, TRAJ39)
YAVGANNAGNMLTF

SEQ ID NO: 662064 - protein, 12 aa, Homo sapiens
  CDR3 for beta chain variable domain of TCR clone 331032 (TRBV28, TRBJ1-3)
CASVSSGNTIYF

SEQ ID NO: 662065 - protein, 15 aa, Homo sapiens
  CDR3 for alpha chain variable domain of TCR clone 331033 (TRAV1-2, TRAJ12)
CAVIPEVDSSYKLIF

SEQ ID NO: 662066 - protein, 14 aa, Homo sapiens
  CDR3 for beta chain variable domain of TCR clone 331033 (TRBV9, TRBJ2-2)
CASSVGQGAGELFF

SEQ ID NO: 662067 - protein, 12 aa, Homo sapiens
  CDR3 for alpha chain variable domain of TCR clone 331034 (TRAV16, TRAJ49)
CALNEGGNQFYF

SEQ ID NO: 662068 - protein, 14 aa, Homo sapiens
  CDR3 for beta chain variable domain of TCR clone 331034 (TRBV7-9, TRBJ2-1)
CASRPTGLRSEQFF

SEQ ID NO: 662069 - protein, 11 aa, Homo sapiens
  CDR3 for alpha chain variable domain of TCR clone 331035 (TRAV2, TRAJ13)
CASGGYQKVKF

SEQ ID NO: 662070 - protein, 16 aa, Homo sapiens
  CDR3 for beta chain variable domain of TCR clone 331035 (TRBV6-1, TRBJ2-5)
CASSETLDRGAETQYF

SEQ ID NO: 662071 - protein, 11 aa, Homo sapiens
  CDR3 for alpha chain variable domain of TCR clone 331036 (TRAV13-2, TRAJ36)
CTETGANNLFF

SEQ ID NO: 662072 - protein, 13 aa, Homo sapiens
  CDR3 for beta chain variable domain of TCR clone 331036 (TRBV7-9, TRBJ2-4)
RATEGLAGNIQYF

SEQ ID NO: 662073 - protein, 14 aa, Homo sapiens
  CDR3 for alpha chain variable domain of TCR clone 331037 (TRAV1-2, TRAJ16)
CAVNRFSDGQRLLF

SEQ ID NO: 662074 - protein, 10 aa, Homo sapiens
  CDR3 for beta chain variable domain of TCR clone 331037 (TRBV5-1, TRBJ2-2)
CASSLAGLSG

SEQ ID NO: 662075 - protein, 14 aa, Homo sapiens
  CDR3 for alpha chain variable domain of TCR clone 331038 (TRAV12-3, TRAJ9)
CAMSPNTGGFKTIF

SEQ ID NO: 662076 - protein, 12 aa, Homo sapiens
  CDR3 for beta chain variable domain of TCR clone 331038 (TRBV19, TRBJ1-4)
CASKDWPGGLFF

SEQ ID NO: 662077 - protein, 15 aa, Homo sapiens
  CDR3 for alpha chain variable domain of TCR clone 331039 (TRAV12-2, TRAJ53)
CAVNGGGGSNYKLPS

SEQ ID NO: 662078 - protein, 12 aa, Homo sapiens
  CDR3 for beta chain variable domain of TCR clone 331039 (TRBV11-2, TRBJ2-2)
CASSLPTGELVF

SEQ ID NO: 662079 - protein, 13 aa, Homo sapiens
  CDR3 for alpha chain variable domain of TCR clone 331040 (TRAV2, TRAJ40)
CAVATSGTYKYIF

SEQ ID NO: 662080 - protein, 15 aa, Homo sapiens
  CDR3 for beta chain variable domain of TCR clone 331040 (TRBV2, TRBJ2-1)
CASSELAGSYNEQFF

SEQ ID NO: 662081 - protein, 18 aa, Homo sapiens
  CDR3 for alpha chain variable domain of TCR clone 331041 (TRAV21, TRAJ52)
CAVRPSLAGGTSYGKLTF

SEQ ID NO: 662082 - protein, 15 aa, Homo sapiens
  CDR3 for beta chain variable domain of TCR clone 331041 (TRBV20-1, TRBJ2-7)
CSARKGLAESYEQYF

SEQ ID NO: 662083 - protein, 12 aa, Homo sapiens
  CDR3 for alpha chain variable domain of TCR clone 331042 (TRAV1-1, TRAJ9)
CAVDTGGFKTIF

SEQ ID NO: 662084 - protein, 16 aa, Homo sapiens
  CDR3 for beta chain variable domain of TCR clone 331042 (TRBV7-3, TRBJ2-1)
CASSLEGYRSYNEQFF

SEQ ID NO: 662085 - protein, 14 aa, Homo sapiens
  CDR3 for alpha chain variable domain of TCR clone 331043 (TRAV12-3, TRAJ10)
SHLPLTGGGNKLTF

SEQ ID NO: 662086 - protein, 15 aa, Homo sapiens
  CDR3 for beta chain variable domain of TCR clone 331043 (TRBV6-9, TRBJ1-5)
CASSYRGERDQPQHF

SEQ ID NO: 662087 - protein, 13 aa, Homo sapiens
  CDR3 for alpha chain variable domain of TCR clone 331044 (TRAV3, TRAJ21)
CAVREPDFNKFYF

SEQ ID NO: 662088 - protein, 13 aa, Homo sapiens
  CDR3 for beta chain variable domain of TCR clone 331044 (TRBV7-2, TRBJ2-7)
CASSSPSGSEQYF

SEQ ID NO: 662089 - protein, 14 aa, Homo sapiens
  CDR3 for alpha chain variable domain of TCR clone 331045 (TRAV12-1, TRAJ41)
CVVLNSNSGYALNF

SEQ ID NO: 662090 - protein, 14 aa, Homo sapiens
  CDR3 for beta chain variable domain of TCR clone 331045 (TRBV5-1, TRBJ2-4)
CASSRGESLYEQYF

SEQ ID NO: 662091 - protein, 20 aa, Homo sapiens
  CDR3 for alpha chain variable domain of TCR clone 331046 (TRAV26-1, TRAJ42)
CCVLLHRQTYYGGSQGNLIF

SEQ ID NO: 662092 - protein, 16 aa, Homo sapiens
  CDR3 for beta chain variable domain of TCR clone 331046 (TRBV7-3, TRBJ2-2)
CASSLKRGTVSGELFV

SEQ ID NO: 662093 - protein, 14 aa, Homo sapiens
  CDR3 for alpha chain variable domain of TCR clone 331047 (TRAV21, TRAJ56)
CAVTILGANSKLTF

SEQ ID NO: 662094 - protein, 14 aa, Homo sapiens
  CDR3 for beta chain variable domain of TCR clone 331047 (TRBV19, TRBJ2-1)
CASPTFVLSGEQFF

SEQ ID NO: 662095 - protein, 14 aa, Homo sapiens
  CDR3 for alpha chain variable domain of TCR clone 331048 (TRAV12-1, TRAJ17)
CVVNYKAAGNKLTF

SEQ ID NO: 662096 - protein, 16 aa, Homo sapiens
  CDR3 for beta chain variable domain of TCR clone 331048 (TRBV19, TRBJ1-5)
CASSTWTGGGNQPQHF

SEQ ID NO: 662097 - protein, 14 aa, Homo sapiens
  CDR3 for alpha chain variable domain of TCR clone 331049 (TRAV12-2, TRAJ53)
CAVKGGGSNYKLTF

SEQ ID NO: 662098 - protein, 12 aa, Homo sapiens
  CDR3 for beta chain variable domain of TCR clone 331049 (TRBV11-2, TRBJ2-1)
CASSPGNNEQFF

SEQ ID NO: 662099 - protein, 13 aa, Homo sapiens
  CDR3 for alpha chain variable domain of TCR clone 331050 (TRAV27, TRAJ49)
CAPRPYTVTSSIL

SEQ ID NO: 662100 - protein, 18 aa, Homo sapiens
  CDR3 for beta chain variable domain of TCR clone 331050 (TRBV7-3, TRBJ2-5)
CASSLGGAAQGRWETQYF

SEQ ID NO: 662101 - protein, 15 aa, Homo sapiens
  CDR3 for alpha chain variable domain of TCR clone 331051 (TRAV35, TRAJ50)
CAGQLRKTSYDKVIF

SEQ ID NO: 662102 - protein, 16 aa, Homo sapiens
  CDR3 for beta chain variable domain of TCR clone 331051 (TRBV5-1, TRBJ2-5)
CASSLGLDPVLRARHA

SEQ ID NO: 662103 - protein, 13 aa, Homo sapiens
  CDR3 for alpha chain variable domain of TCR clone 331052 (TRAV12-2, TRAJ15)
CAVFNQAGTALIF

SEQ ID NO: 662104 - protein, 23 aa, Homo sapiens
  CDR3 for beta chain variable domain of TCR clone 331052 (TRBV7-8, TRBJ1-5)
RRTPPFIPVPAAGGGGADQPQHF

SEQ ID NO: 662105 - protein, 11 aa, Homo sapiens
  CDR3 for alpha chain variable domain of TCR clone 331053 (TRAV2, TRAJ13)
CASGGYQKVTF

SEQ ID NO: 662106 - protein, 18 aa, Homo sapiens
  CDR3 for beta chain variable domain of TCR clone 331053 (TRBV6-1, TRBJ2-5)
CTSVPSETLDRGAETQYF

SEQ ID NO: 662107 - protein, 10 aa, Homo sapiens
  CDR3 for alpha chain variable domain of TCR clone 331054 (TRAV21, TRAJ31)
CAVDNARLMF

SEQ ID NO: 662108 - protein, 15 aa, Homo sapiens
  CDR3 for beta chain variable domain of TCR clone 331054 (TRBV4-2, TRBJ2-4)
CASSPLGAAKNIQYF

SEQ ID NO: 662109 - protein, 13 aa, Homo sapiens
  CDR3 for alpha chain variable domain of TCR clone 331055 (TRAV8-3, TRAJ44)
CAVVPGTASKPTF

SEQ ID NO: 662110 - protein, 15 aa, Homo sapiens
  CDR3 for beta chain variable domain of TCR clone 331055 (TRBV7-8, TRBJ2-1)
CASSLADSLYNEQFF

SEQ ID NO: 662111 - protein, 13 aa, Homo sapiens
  CDR3 for alpha chain variable domain of TCR clone 331056 (TRAV36/DV7, TRAJ40)
CAVEASGTYKYIF

SEQ ID NO: 662112 - protein, 14 aa, Homo sapiens
  CDR3 for beta chain variable domain of TCR clone 331056 (TRBV2, TRBJ1-2)
CASNEGTGPYGYTF

SEQ ID NO: 662113 - protein, 14 aa, Homo sapiens
  CDR3 for alpha chain variable domain of TCR clone 331057 (TRAV12-1, TRAJ30)
WLVNIGGRDDKIIF

SEQ ID NO: 662114 - protein, 13 aa, Homo sapiens
  CDR3 for beta chain variable domain of TCR clone 331057 (TRBV12-5, TRBJ2-1)
CASGLGRGNEQFF

SEQ ID NO: 662115 - protein, 14 aa, Homo sapiens
  CDR3 for alpha chain variable domain of TCR clone 331058 (TRAV17, TRAJ57)
CATDPQGGSEKLVF

SEQ ID NO: 662116 - protein, 17 aa, Homo sapiens
  CDR3 for beta chain variable domain of TCR clone 331058 (TRBV18, TRBJ2-1)
CASSKGLSGGADNEQFF

SEQ ID NO: 662117 - protein, 16 aa, Homo sapiens
  CDR3 for alpha chain variable domain of TCR clone 331059 (TRAV3, TRAJ3)
CAVRDRAKSSASKIIF

SEQ ID NO: 662118 - protein, 14 aa, Homo sapiens
  CDR3 for beta chain variable domain of TCR clone 331059 (TRBV12-4, TRBJ1-1)
CASSLGTGGTEAFF

SEQ ID NO: 662119 - protein, 12 aa, Homo sapiens
  CDR3 for alpha chain variable domain of TCR clone 331060 (TRAV8-6, TRAJ43)
CAVSNNNNEMRL

SEQ ID NO: 662120 - protein, 15 aa, Homo sapiens
  CDR3 for beta chain variable domain of TCR clone 331060 (TRBV7-3, TRBJ2-6)
CASSLGGSGANVLTF

SEQ ID NO: 662121 - protein, 16 aa, Homo sapiens
  CDR3 for alpha chain variable domain of TCR clone 331061 (TRAV8-3, TRAJ8)
CAVPRDGNTGFQKLVF

SEQ ID NO: 662122 - protein, 14 aa, Homo sapiens
  CDR3 for beta chain variable domain of TCR clone 331061 (TRBV28, TRBJ1-1)
CASSGSGRGTEAFF

SEQ ID NO: 662123 - protein, 18 aa, Homo sapiens
  CDR3 for alpha chain variable domain of TCR clone 331062 (TRAV26-2, TRAJ45)
CILRVDKYSGGGADGLTF

SEQ ID NO: 662124 - protein, 13 aa, Homo sapiens
  CDR3 for beta chain variable domain of TCR clone 331062 (TRBV7-2, TRBJ2-2)
CASSLAVTGELFF

SEQ ID NO: 662125 - protein, 15 aa, Homo sapiens
  CDR3 for alpha chain variable domain of TCR clone 331063 (TRAV12-1, TRAJ10)
CVFHILTGGGNKLTF

SEQ ID NO: 662126 - protein, 16 aa, Homo sapiens
  CDR3 for beta chain variable domain of TCR clone 331063 (TRBV27, TRBJ2-2)
CASSFRGLVRTGELFF

SEQ ID NO: 662127 - protein, 14 aa, Homo sapiens
  CDR3 for alpha chain variable domain of TCR clone 331064 (TRAV12-2, TRAJ5)
CAVNRSTGRRALTF

SEQ ID NO: 662128 - protein, 15 aa, Homo sapiens
  CDR3 for beta chain variable domain of TCR clone 331064 (TRBV28, TRBJ2-1)
CASSPPGLADHEQFF

SEQ ID NO: 662129 - protein, 17 aa, Homo sapiens
  CDR3 for alpha chain variable domain of TCR clone 331065 (TRAV23/DV6, TRAJ57)
CAASSTLSQGGSEKLFF

SEQ ID NO: 662130 - protein, 14 aa, Homo sapiens
  CDR3 for beta chain variable domain of TCR clone 331065 (TRBV20-1, TRBJ2-7)
CSAKRGRSSYEQYF

SEQ ID NO: 662131 - protein, 15 aa, Homo sapiens
  CDR3 for alpha chain variable domain of TCR clone 331066 (TRAV26-1, TRAJ3)
CIVRSGYSSTSKIIF

SEQ ID NO: 662132 - protein, 14 aa, Homo sapiens
  CDR3 for beta chain variable domain of TCR clone 331066 (TRBV13, TRBJ2-5)
CASYRRLAEETQYF

SEQ ID NO: 662133 - protein, 14 aa, Homo sapiens
  CDR3 for alpha chain variable domain of TCR clone 331067 (TRAV38-1, TRAJ40)
CALRPTSGTYKYIF

SEQ ID NO: 662134 - protein, 14 aa, Homo sapiens
  CDR3 for beta chain variable domain of TCR clone 331067 (TRBV19, TRBJ2-1)
CASPTCVLSGEQFF

SEQ ID NO: 662135 - protein, 18 aa, Homo sapiens
  CDR3 for alpha chain variable domain of TCR clone 331068 (TRAV3, TRAJ17)
CAVRARRGGRSCRQQANF

SEQ ID NO: 662136 - protein, 14 aa, Homo sapiens
  CDR3 for beta chain variable domain of TCR clone 331068 (TRBV4-1, TRBJ2-2)
CASSPAVNTGELFF

SEQ ID NO: 662137 - protein, 16 aa, Homo sapiens
  CDR3 for alpha chain variable domain of TCR clone 331069 (TRAV30, TRAJ24)
CGTEIVDADSWGKFQF

SEQ ID NO: 662138 - protein, 19 aa, Homo sapiens
  CDR3 for beta chain variable domain of TCR clone 331069 (TRBV28, TRBJ2-1)
CTSASTGPGLAVSEDEQFF

SEQ ID NO: 662139 - protein, 13 aa, Homo sapiens
  CDR3 for alpha chain variable domain of TCR clone 331070 (TRAV1-1, TRAJ9)
CSAKNTGGFKAIF

SEQ ID NO: 662140 - protein, 12 aa, Homo sapiens
  CDR3 for beta chain variable domain of TCR clone 331070 (TRBV11-2, TRBJ2-2)
CASSLGGGELFF

SEQ ID NO: 662141 - protein, 12 aa, Homo sapiens
  CDR3 for alpha chain variable domain of TCR clone 331071 (TRAV3, TRAJ43)
CAVRDPNNDMRF

SEQ ID NO: 662142 - protein, 15 aa, Homo sapiens
  CDR3 for beta chain variable domain of TCR clone 331071 (TRBV2, TRBJ1-1)
CASSEAQTMNTEAFF

SEQ ID NO: 662143 - protein, 11 aa, Homo sapiens
  CDR3 for alpha chain variable domain of TCR clone 331072 (TRAV2, TRAJ13)
CASGGYQKVTF

SEQ ID NO: 662144 - protein, 16 aa, Homo sapiens
  CDR3 for beta chain variable domain of TCR clone 331072 (TRBV6-1, TRBJ2-5)
CASSKTLDRGAETQYF

SEQ ID NO: 662145 - protein, 12 aa, Homo sapiens
  CDR3 for alpha chain variable domain of TCR clone 331073 (TRAV12-3, TRAJ17)
CAMTLTGNKITF

SEQ ID NO: 662146 - protein, 15 aa, Homo sapiens
  CDR3 for beta chain variable domain of TCR clone 331073 (TRBV20-1, TRBJ2-7)
CSDRDRVSGMDEQYF

SEQ ID NO: 662147 - protein, 13 aa, Homo sapiens
  CDR3 for alpha chain variable domain of TCR clone 331074 (TRAV13-2, TRAJ13)
CAERSRGYQKVTF

SEQ ID NO: 662148 - protein, 14 aa, Homo sapiens
  CDR3 for beta chain variable domain of TCR clone 331074 (TRBV23-1, TRBJ2-5)
CASSFLRSQETPYF

SEQ ID NO: 662149 - protein, 14 aa, Homo sapiens
  CDR3 for alpha chain variable domain of TCR clone 331075 (TRAV17, TRAJ54)
CATDANQGAQKLVF

SEQ ID NO: 662150 - protein, 16 aa, Homo sapiens
  CDR3 for beta chain variable domain of TCR clone 331075 (TRBV12-4, TRBJ1-5)
CASSRPVGGSNQPQHF

SEQ ID NO: 662151 - protein, 12 aa, Homo sapiens
  CDR3 for alpha chain variable domain of TCR clone 331076 (TRAV16, TRAJ10)
CSRTGGGNKLTF

SEQ ID NO: 662152 - protein, 15 aa, Homo sapiens
  CDR3 for beta chain variable domain of TCR clone 331076 (TRBV7-9, TRBJ1-6)
CASSSPGRGNSPLHF

SEQ ID NO: 662153 - protein, 14 aa, Homo sapiens
  CDR3 for alpha chain variable domain of TCR clone 331077 (TRAV12-2, TRAJ44)
CAVNKVGTASKLTF

SEQ ID NO: 662154 - protein, 16 aa, Homo sapiens
  CDR3 for beta chain variable domain of TCR clone 331077 (TRBV6-1, TRBJ1-3)
CASSEGGVTSGNTIYF

SEQ ID NO: 662155 - protein, 20 aa, Homo sapiens
  CDR3 for alpha chain variable domain of TCR clone 331078 (TRAV1-2, TRAJ8)
CAERGHRLSETCIWNWHPTS

SEQ ID NO: 662156 - protein, 14 aa, Homo sapiens
  CDR3 for beta chain variable domain of TCR clone 331078 (TRBV12-4, TRBJ1-1)
CASSFDRVNTEAFF

SEQ ID NO: 662157 - protein, 13 aa, Homo sapiens
  CDR3 for alpha chain variable domain of TCR clone 331079 (TRAV2, TRAJ40)
CAVVTSGTYKYIF

SEQ ID NO: 662158 - protein, 14 aa, Homo sapiens
  CDR3 for beta chain variable domain of TCR clone 331079 (TRBV13, TRBJ2-5)
CASSLGRGQETQYF

SEQ ID NO: 662159 - protein, 21 aa, Homo sapiens
  CDR3 for alpha chain variable domain of TCR clone 331080 (TRAV12-1, TRAJ37)
CVVNGGLWQHRQTNLWARDNF

SEQ ID NO: 662160 - protein, 15 aa, Homo sapiens
  CDR3 for beta chain variable domain of TCR clone 331080 (TRBV20-1, TRBJ2-7)
CSARDRVSGMDEQYF

SEQ ID NO: 662161 - protein, 14 aa, Homo sapiens
  CDR3 for alpha chain variable domain of TCR clone 331081 (TRAV13-1, TRAJ3)
CAAEGYSSASKIIF

SEQ ID NO: 662162 - protein, 16 aa, Homo sapiens
  CDR3 for beta chain variable domain of TCR clone 331081 (TRBV20-1, TRBJ1-2)
CSASMGQGVANYGYTF

SEQ ID NO: 662163 - protein, 15 aa, Homo sapiens
  CDR3 for alpha chain variable domain of TCR clone 331082 (TRAV23/DV6, TRAJ18)
CAASFRGSTLVRPYF

SEQ ID NO: 662164 - protein, 13 aa, Homo sapiens
  CDR3 for beta chain variable domain of TCR clone 331082 (TRBV28, TRBJ2-7)
CAILDRAGGEQYF

SEQ ID NO: 662165 - protein, 17 aa, Homo sapiens
  CDR3 for alpha chain variable domain of TCR clone 331083 (TRAV12-2, TRAJ39)
CAVNNMLTFGGGPRLMV

SEQ ID NO: 662166 - protein, 16 aa, Homo sapiens
  CDR3 for beta chain variable domain of TCR clone 331083 (TRBV9, TRBJ2-7)
CASSAGPDRSPYEQYF

SEQ ID NO: 662167 - protein, 12 aa, Homo sapiens
  CDR3 for alpha chain variable domain of TCR clone 331084 (TRAV1-2, TRAJ26)
CAVRYYGQNFVF

SEQ ID NO: 662168 - protein, 16 aa, Homo sapiens
  CDR3 for beta chain variable domain of TCR clone 331084 (TRBV11-1, TRBJ2-7)
CASSFRQGATSSTSGR

SEQ ID NO: 662169 - protein, 14 aa, Homo sapiens
  CDR3 for alpha chain variable domain of TCR clone 331085 (TRAV12-1, TRAJ13)
CVVIDSGGYQKVTF

SEQ ID NO: 662170 - protein, 18 aa, Homo sapiens
  CDR3 for beta chain variable domain of TCR clone 331085 (TRBV11-2, TRBJ2-3)
CASSLGGASRGAPNTQYF

SEQ ID NO: 662171 - protein, 12 aa, Homo sapiens
  CDR3 for alpha chain variable domain of TCR clone 331086 (TRAV13-1, TRAJ48)
CAANFGNEKLTF

SEQ ID NO: 662172 - protein, 14 aa, Homo sapiens
  CDR3 for beta chain variable domain of TCR clone 331086 (TRBV6-6, TRBJ2-7)
CASSDSGAGYEQYF

SEQ ID NO: 662173 - protein, 13 aa, Homo sapiens
  CDR3 for alpha chain variable domain of TCR clone 331087 (TRAV8-3, TRAJ43)
CAVVPYNNNAMRF

SEQ ID NO: 662174 - protein, 14 aa, Homo sapiens
  CDR3 for beta chain variable domain of TCR clone 331087 (TRBV6-1, TRBJ1-3)
CASVQGGGGNTIYF

SEQ ID NO: 662175 - protein, 17 aa, Homo sapiens
  CDR3 for alpha chain variable domain of TCR clone 331088 (TRAV3, )
CAISRTLTLPCTSWETL

SEQ ID NO: 662176 - protein, 15 aa, Homo sapiens
  CDR3 for beta chain variable domain of TCR clone 331088 (TRBV19, TRBJ1-5)
CASSDSGPRNQPQHF

SEQ ID NO: 662177 - protein, 15 aa, Homo sapiens
  CDR3 for alpha chain variable domain of TCR clone 331089 (TRAV12-1, TRAJ44)
CVAHLPTSTASKLTF

SEQ ID NO: 662178 - protein, 13 aa, Homo sapiens
  CDR3 for beta chain variable domain of TCR clone 331089 (TRBV20-1, TRBJ2-5)
CSARGDYQETQYF

SEQ ID NO: 662179 - protein, 12 aa, Homo sapiens
  CDR3 for alpha chain variable domain of TCR clone 331090 (TRAV1-1, TRAJ8)
CAGGTGFQKLVF

SEQ ID NO: 662180 - protein, 14 aa, Homo sapiens
  CDR3 for beta chain variable domain of TCR clone 331090 (TRBV7-3, TRBJ2-3)
CASSSLHTSDTQYF

SEQ ID NO: 662181 - protein, 12 aa, Homo sapiens
  CDR3 for alpha chain variable domain of TCR clone 331091 (TRAV12-2, TRAJ30)
CAVRNRDDKIIF

SEQ ID NO: 662182 - protein, 14 aa, Homo sapiens
  CDR3 for beta chain variable domain of TCR clone 331091 (TRBV20-1, TRBJ2-7)
CSAKRGRSSYEQYF

SEQ ID NO: 662183 - protein, 13 aa, Homo sapiens
  CDR3 for alpha chain variable domain of TCR clone 331092 (TRAV23/DV6, TRAJ58)
CAATGTSGSRLTF

SEQ ID NO: 662184 - protein, 13 aa, Homo sapiens
  CDR3 for beta chain variable domain of TCR clone 331092 (TRBV5-5, TRBJ1-2)
CTSSFWRGEDYTF

SEQ ID NO: 662185 - protein, 12 aa, Homo sapiens
  CDR3 for alpha chain variable domain of TCR clone 331093 (TRAV1-1, TRAJ8)
CAGGTGFQKLVF

SEQ ID NO: 662186 - protein, 13 aa, Homo sapiens
  CDR3 for beta chain variable domain of TCR clone 331093 (TRBV7-3, TRBJ1-1)
CASSQDWGAEASF

SEQ ID NO: 662187 - protein, 15 aa, Homo sapiens
  CDR3 for alpha chain variable domain of TCR clone 331094 (TRAV12-3, TRAJ6)
CAMSATTGGSYIPTF

SEQ ID NO: 662188 - protein, 11 aa, Homo sapiens
  CDR3 for beta chain variable domain of TCR clone 331094 (TRBV10-3, TRBJ2-7)
CAISEGLEQYF

SEQ ID NO: 662189 - protein, 14 aa, Homo sapiens
  CDR3 for alpha chain variable domain of TCR clone 331095 (TRAV26-1, TRAJ38)
CIADNAGNNRKLIW

SEQ ID NO: 662190 - protein, 17 aa, Homo sapiens
  CDR3 for beta chain variable domain of TCR clone 331095 (TRBV13, TRBJ2-3)
CAGSLSRVAGGRNTQYF

SEQ ID NO: 662191 - protein, 14 aa, Homo sapiens
  CDR3 for alpha chain variable domain of TCR clone 331096 (TRAV1-2, TRAJ8)
CAVREDTGFQKPVF

SEQ ID NO: 662192 - protein, 14 aa, Homo sapiens
  CDR3 for beta chain variable domain of TCR clone 331096 (TRBV5-4, TRBJ1-1)
CASSLDSRRDEAFF

SEQ ID NO: 662193 - protein, 11 aa, Homo sapiens
  CDR3 for alpha chain variable domain of TCR clone 331097 (TRAV21, TRAJ34)
CAVTNTDKIIF

SEQ ID NO: 662194 - protein, 16 aa, Homo sapiens
  CDR3 for beta chain variable domain of TCR clone 331097 (TRBV20-1, TRBJ1-4)
CSAPGQGLLTNEKLFF

SEQ ID NO: 662195 - protein, 11 aa, Homo sapiens
  CDR3 for alpha chain variable domain of TCR clone 331098 (TRAV16, TRAJ49)
CALRSGNQSYF

SEQ ID NO: 662196 - protein, 16 aa, Homo sapiens
  CDR3 for beta chain variable domain of TCR clone 331098 (TRBV20-1, TRBJ1-5)
CSARDVGGGWIQPQHF

SEQ ID NO: 662197 - protein, 19 aa, Homo sapiens
  CDR3 for alpha chain variable domain of TCR clone 331099 (TRAV29/DV5, TRAJ49)
CSVLLCSKLTVDTGNKFYF

SEQ ID NO: 662198 - protein, 15 aa, Homo sapiens
  CDR3 for beta chain variable domain of TCR clone 331099 (TRBV4-3, TRBJ2-2)
CASSQGGTPTGELFF

SEQ ID NO: 662199 - protein, 11 aa, Homo sapiens
  CDR3 for alpha chain variable domain of TCR clone 331100 (TRAV26-1, TRAJ37)
CIVRVGRKLIF

SEQ ID NO: 662200 - protein, 15 aa, Homo sapiens
  CDR3 for beta chain variable domain of TCR clone 331100 (TRBV4-1, TRBJ1-4)
CASSDTGGTNEKLFF

SEQ ID NO: 662201 - protein, 17 aa, Homo sapiens
  CDR3 for alpha chain variable domain of TCR clone 331101 (TRAV4, TRAJ18)
CLVGERSGGSTLGRLYF

SEQ ID NO: 662202 - protein, 14 aa, Homo sapiens
  CDR3 for beta chain variable domain of TCR clone 331101 (TRBV6-5, TRBJ1-2)
CASSYDGTGGGYTF

SEQ ID NO: 662203 - protein, 19 aa, Homo sapiens
  CDR3 for alpha chain variable domain of TCR clone 331102 (TRAV26-1, TRAJ52)
CIVRAHRNADGTSYGKLTF

SEQ ID NO: 662204 - protein, 15 aa, Homo sapiens
  CDR3 for beta chain variable domain of TCR clone 331102 (TRBV12-4, TRBJ2-5)
CASSPPTGLQETQYF

SEQ ID NO: 662205 - protein, 12 aa, Homo sapiens
  CDR3 for alpha chain variable domain of TCR clone 331103 (TRAV21, TRAJ31)
YAVSPARGRLMF

SEQ ID NO: 662206 - protein, 14 aa, Homo sapiens
  CDR3 for beta chain variable domain of TCR clone 331103 (TRBV28, TRBJ2-7)
CASSLLRISYEQYF

SEQ ID NO: 662207 - protein, 11 aa, Homo sapiens
  CDR3 for alpha chain variable domain of TCR clone 331104 (TRAV17, TRAJ9)
CATTGGFKTIF

SEQ ID NO: 662208 - protein, 11 aa, Homo sapiens
  CDR3 for beta chain variable domain of TCR clone 331104 (TRBV7-9, TRBJ2-2)
QRTSGHRELFF

SEQ ID NO: 662209 - protein, 14 aa, Homo sapiens
  CDR3 for alpha chain variable domain of TCR clone 331105 (TRAV1-2, TRAJ8)
CAVREDTGFQKLVF

SEQ ID NO: 662210 - protein, 15 aa, Homo sapiens
  CDR3 for beta chain variable domain of TCR clone 331105 (TRBV5-1, TRBJ2-7)
CASSLMTSGSNEQYF

SEQ ID NO: 662211 - protein, 13 aa, Homo sapiens
  CDR3 for alpha chain variable domain of TCR clone 331106 (TRAV2, TRAJ15)
CAVASQAGTALIF

SEQ ID NO: 662212 - protein, 16 aa, Homo sapiens
  CDR3 for beta chain variable domain of TCR clone 331106 (TRBV5-1, TRBJ1-1)
CASSSGGSALNTEAFF

SEQ ID NO: 662213 - protein, 18 aa, Homo sapiens
  CDR3 for alpha chain variable domain of TCR clone 331107 (TRAV13-1, TRAJ52)
CAAKNPNAGGTSYGKLTF

SEQ ID NO: 662214 - protein, 15 aa, Homo sapiens
  CDR3 for beta chain variable domain of TCR clone 331107 (TRBV6-1, TRBJ2-3)
CASSERGGITDTQYL

SEQ ID NO: 662215 - protein, 14 aa, Homo sapiens
  CDR3 for alpha chain variable domain of TCR clone 331108 (TRAV2, TRAJ37)
CAVDFTSNTGKLIF

SEQ ID NO: 662216 - protein, 15 aa, Homo sapiens
  CDR3 for beta chain variable domain of TCR clone 331108 (TRBV20-1, TRBJ1-1)
CSSSRGVTGYTEAFF

SEQ ID NO: 662217 - protein, 13 aa, Homo sapiens
  CDR3 for alpha chain variable domain of TCR clone 331109 (TRAV21, TRAJ15)
CASPNQAGTALIF

SEQ ID NO: 662218 - protein, 18 aa, Homo sapiens
  CDR3 for beta chain variable domain of TCR clone 331109 (TRBV11-2, TRBJ2-3)
CASSLGGASRGAPNTQYF

SEQ ID NO: 662219 - protein, 12 aa, Homo sapiens
  CDR3 for alpha chain variable domain of TCR clone 331110 (TRAV25, TRAJ31)
CAGHLNNARLMF

SEQ ID NO: 662220 - protein, 16 aa, Homo sapiens
  CDR3 for beta chain variable domain of TCR clone 331110 (TRBV27, TRBJ2-3)
CASSFRGQLLRDTQYF

SEQ ID NO: 662221 - protein, 13 aa, Homo sapiens
  CDR3 for alpha chain variable domain of TCR clone 331111 (TRAV21, TRAJ27)
CAARPGNAGKSTF

SEQ ID NO: 662222 - protein, 15 aa, Homo sapiens
  CDR3 for beta chain variable domain of TCR clone 331111 (TRBV7-9, TRBJ2-2)
CASGPLDTFPGELFF

SEQ ID NO: 662223 - protein, 15 aa, Homo sapiens
  CDR3 for alpha chain variable domain of TCR clone 331112 (TRAV8-3, TRAJ27)
CAVGPSKTNAGKSTF

SEQ ID NO: 662224 - protein, 12 aa, Homo sapiens
  CDR3 for beta chain variable domain of TCR clone 331112 (TRBV11-2, TRBJ2-2)
CASRLGGGELFF

SEQ ID NO: 662225 - protein, 11 aa, Homo sapiens
  CDR3 for alpha chain variable domain of TCR clone 331113 (TRAV2, TRAJ33)
CAVDSNYQLIW

SEQ ID NO: 662226 - protein, 15 aa, Homo sapiens
  CDR3 for beta chain variable domain of TCR clone 331113 (TRBV19, TRBJ1-1)
CASTSGRIQNTEAFF

SEQ ID NO: 662227 - protein, 12 aa, Homo sapiens
  CDR3 for alpha chain variable domain of TCR clone 331114 (TRAV12-1, TRAJ50)
FVGRTSYDKVIF

SEQ ID NO: 662228 - protein, 12 aa, Homo sapiens
  CDR3 for beta chain variable domain of TCR clone 331114 (TRBV5-7, TRBJ1-1)
CASSLVGTEAFF

SEQ ID NO: 662229 - protein, 14 aa, Homo sapiens
  CDR3 for alpha chain variable domain of TCR clone 331115 (TRAV8-3, TRAJ39)
CAVGANDAGNMLTF

SEQ ID NO: 662230 - protein, 12 aa, Homo sapiens
  CDR3 for beta chain variable domain of TCR clone 331115 (TRBV11-3, TRBJ1-1)
CASSHRQGEAFF

SEQ ID NO: 662231 - protein, 13 aa, Homo sapiens
  CDR3 for alpha chain variable domain of TCR clone 331116 (TRAV35, TRAJ53)
CAGQESSNYKLTF

SEQ ID NO: 662232 - protein, 11 aa, Homo sapiens
  CDR3 for beta chain variable domain of TCR clone 331116 (TRBV29-1, TRBJ2-5)
CSEDRTATQYF

SEQ ID NO: 662233 - protein, 16 aa, Homo sapiens
  CDR3 for alpha chain variable domain of TCR clone 331117 (TRAV3, TRAJ37)
CAVRVRGSGNTGKLIF

SEQ ID NO: 662234 - protein, 13 aa, Homo sapiens
  CDR3 for beta chain variable domain of TCR clone 331117 (TRBV24-1, TRBJ2-2)
CATSDWSTGELFF

SEQ ID NO: 662235 - protein, 10 aa, Homo sapiens
  CDR3 for alpha chain variable domain of TCR clone 331118 (TRAV14/DV4, TRAJ42)
CAMREGQLWR

SEQ ID NO: 662236 - protein, 12 aa, Homo sapiens
  CDR3 for beta chain variable domain of TCR clone 331118 (TRBV7-2, TRBJ1-6)
CASSLSSSPLHC

SEQ ID NO: 662237 - protein, 14 aa, Homo sapiens
  CDR3 for alpha chain variable domain of TCR clone 331119 (TRAV35, TRAJ33)
CAGSSQDSNYQLIW

SEQ ID NO: 662238 - protein, 15 aa, Homo sapiens
  CDR3 for beta chain variable domain of TCR clone 331119 (TRBV20-1, TRBJ2-7)
CSAESGTSGAYEQYL

SEQ ID NO: 662239 - protein, 12 aa, Homo sapiens
  CDR3 for alpha chain variable domain of TCR clone 331120 (TRAV25, TRAJ20)
CAGRSNDYKLSF

SEQ ID NO: 662240 - protein, 15 aa, Homo sapiens
  CDR3 for beta chain variable domain of TCR clone 331120 (TRBV5-1, TRBJ2-1)
CASSPPRAPYNEQFF

SEQ ID NO: 662241 - protein, 14 aa, Homo sapiens
  CDR3 for alpha chain variable domain of TCR clone 331121 (TRAV12-1, TRAJ12)
CVVTRMDSSYKLIF

SEQ ID NO: 662242 - protein, 14 aa, Homo sapiens
  CDR3 for beta chain variable domain of TCR clone 331121 (TRBV5-4, TRBJ1-1)
CASSLDSRRDEAFF

SEQ ID NO: 662243 - protein, 14 aa, Homo sapiens
  CDR3 for alpha chain variable domain of TCR clone 331122 (TRAV1-2, TRAJ8)
CAVREDAGFQKLVF

SEQ ID NO: 662244 - protein, 15 aa, Homo sapiens
  CDR3 for beta chain variable domain of TCR clone 331122 (TRBV7-9, TRBJ1-6)
CASSSPGRGNSPLHF

SEQ ID NO: 662245 - protein, 14 aa, Homo sapiens
  CDR3 for alpha chain variable domain of TCR clone 331123 (TRAV25, TRAJ35)
CARRMEGFGNVLHC

SEQ ID NO: 662246 - protein, 13 aa, Homo sapiens
  CDR3 for beta chain variable domain of TCR clone 331123 (TRBV3-1, TRBJ2-5)
CASSPVLSETQYF

SEQ ID NO: 662247 - protein, 16 aa, Homo sapiens
  CDR3 for alpha chain variable domain of TCR clone 331124 (TRAV3, TRAJ10)
CAVRDMRAGGGNKLTF

SEQ ID NO: 662248 - protein, 13 aa, Homo sapiens
  CDR3 for beta chain variable domain of TCR clone 331124 (TRBV7-9, TRBJ2-1)
CASSLDVGNEQFF

SEQ ID NO: 662249 - protein, 13 aa, Homo sapiens
  CDR3 for alpha chain variable domain of TCR clone 331125 (TRAV17, TRAJ5)
CATMDTGRRALTF

SEQ ID NO: 662250 - protein, 10 aa, Homo sapiens
  CDR3 for beta chain variable domain of TCR clone 331125 (TRBV20-1, TRBJ2-5)
TSGSLETQYF

SEQ ID NO: 662251 - protein, 18 aa, Homo sapiens
  CDR3 for alpha chain variable domain of TCR clone 331126 (TRAV21, TRAJ52)
CAVRPSPAGGTSYGKLTF

SEQ ID NO: 662252 - protein, 14 aa, Homo sapiens
  CDR3 for beta chain variable domain of TCR clone 331126 (TRBV20-1, TRBJ1-5)
CSASPGTVNQPQHF

SEQ ID NO: 662253 - protein, 14 aa, Homo sapiens
  CDR3 for alpha chain variable domain of TCR clone 331127 (TRAV12-3, TRAJ10)
SHLPLTGGGNKLTF

SEQ ID NO: 662254 - protein, 13 aa, Homo sapiens
  CDR3 for beta chain variable domain of TCR clone 331127 (TRBV2, TRBJ1-1)
CARNPTGGFHAFF

SEQ ID NO: 662255 - protein, 13 aa, Homo sapiens
  CDR3 for alpha chain variable domain of TCR clone 331128 (TRAV8-3, TRAJ43)
CAVGADNNNDMRF

SEQ ID NO: 662256 - protein, 13 aa, Homo sapiens
  CDR3 for beta chain variable domain of TCR clone 331128 (TRBV4-2, TRBJ1-1)
CASSQAGNAEAFF

SEQ ID NO: 662257 - protein, 14 aa, Homo sapiens
  CDR3 for alpha chain variable domain of TCR clone 331129 (TRAV12-2, TRAJ3)
CAVSLYSSASKITF

SEQ ID NO: 662258 - protein, 13 aa, Homo sapiens
  CDR3 for beta chain variable domain of TCR clone 331129 (TRBV20-1, TRBJ1-1)
CSARGGGNTEAFF

SEQ ID NO: 662259 - protein, 13 aa, Homo sapiens
  CDR3 for alpha chain variable domain of TCR clone 331130 (TRAV21, TRAJ27)
CAARPGNAGKSTF

SEQ ID NO: 662260 - protein, 14 aa, Homo sapiens
  CDR3 for beta chain variable domain of TCR clone 331130 (TRBV7-9, TRBJ1-5)
CASADLGSNQPQHF

SEQ ID NO: 662261 - protein, 12 aa, Homo sapiens
  CDR3 for alpha chain variable domain of TCR clone 331131 (TRAV16, TRAJ10)
CSRPGGGNKLTF

SEQ ID NO: 662262 - protein, 15 aa, Homo sapiens
  CDR3 for beta chain variable domain of TCR clone 331131 (TRBV6-3, TRBJ2-7)
CASSSPVTVFYEQYF

SEQ ID NO: 662263 - protein, 13 aa, Homo sapiens
  CDR3 for alpha chain variable domain of TCR clone 331132 (TRAV12-3, TRAJ7)
CAMSASGNNRLAF

SEQ ID NO: 662264 - protein, 14 aa, Homo sapiens
  CDR3 for beta chain variable domain of TCR clone 331132 (TRBV13, TRBJ2-5)
CASSLGPMGETQYF

SEQ ID NO: 662265 - protein, 15 aa, Homo sapiens
  CDR3 for alpha chain variable domain of TCR clone 331133 (TRAV8-3, TRAJ11)
CDVGLLNSGYSTLTF

SEQ ID NO: 662266 - protein, 16 aa, Homo sapiens
  CDR3 for beta chain variable domain of TCR clone 331133 (TRBV7-9, TRBJ1-2)
CASSLGFSSGEDVYTF

SEQ ID NO: 662267 - protein, 13 aa, Homo sapiens
  CDR3 for alpha chain variable domain of TCR clone 331134 (TRAV30, TRAJ24)
CGTVTDSWGKLQF

SEQ ID NO: 662268 - protein, 15 aa, Homo sapiens
  CDR3 for beta chain variable domain of TCR clone 331134 (TRBV11-2, TRBJ1-6)
CASSLDHWAVSPLHF

SEQ ID NO: 662269 - protein, 14 aa, Homo sapiens
  CDR3 for alpha chain variable domain of TCR clone 331135 (TRAV38-1, TRAJ40)
CALRPTSGTYKYIF

SEQ ID NO: 662270 - protein, 13 aa, Homo sapiens
  CDR3 for beta chain variable domain of TCR clone 331135 (TRBV20-1, TRBJ2-5)
CSARATGEETQYF

SEQ ID NO: 662271 - protein, 14 aa, Homo sapiens
  CDR3 for alpha chain variable domain of TCR clone 331136 (TRAV8-2, TRAJ37)
CVVSIAGNTGKLIF

SEQ ID NO: 662272 - protein, 18 aa, Homo sapiens
  CDR3 for beta chain variable domain of TCR clone 331136 (TRBV19, TRBJ1-1)
CASSIDGGDYTGNTEAFF

SEQ ID NO: 662273 - protein, 15 aa, Homo sapiens
  CDR3 for alpha chain variable domain of TCR clone 331137 (TRAV12-3, TRAJ6)
CAMSASTGGSYIPTF

SEQ ID NO: 662274 - protein, 16 aa, Homo sapiens
  CDR3 for beta chain variable domain of TCR clone 331137 (TRBV20-1, TRBJ1-2)
CSASMVQGVANYGYTF

SEQ ID NO: 662275 - protein, 12 aa, Homo sapiens
  CDR3 for alpha chain variable domain of TCR clone 331138 (TRAV17, TRAJ20)
CATYSNDYKLSF

SEQ ID NO: 662276 - protein, 15 aa, Homo sapiens
  CDR3 for beta chain variable domain of TCR clone 331138 (TRBV5-8, TRBJ2-2)
CASSLDRGATGELFF

SEQ ID NO: 662277 - protein, 12 aa, Homo sapiens
  CDR3 for alpha chain variable domain of TCR clone 331139 (TRAV3, TRAJ43)
CAVRDPNNDMRF

SEQ ID NO: 662278 - protein, 13 aa, Homo sapiens
  CDR3 for beta chain variable domain of TCR clone 331139 (TRBV27, TRBJ2-2)
CQQTRSKHRGAVF

SEQ ID NO: 662279 - protein, 13 aa, Homo sapiens
  CDR3 for alpha chain variable domain of TCR clone 331140 (TRAV12-1, TRAJ38)
CVVPAGNNRKLIW

SEQ ID NO: 662280 - protein, 14 aa, Homo sapiens
  CDR3 for beta chain variable domain of TCR clone 331140 (TRBV19, TRBJ2-1)
CASPTVVLSGEQFF

SEQ ID NO: 662281 - protein, 18 aa, Homo sapiens
  CDR3 for alpha chain variable domain of TCR clone 331141 (TRAV26-1, TRAJ57)
CIVRVALRFQGGAEKLVF

SEQ ID NO: 662282 - protein, 15 aa, Homo sapiens
  CDR3 for beta chain variable domain of TCR clone 331141 (TRBV27, TRBJ2-1)
CASSNGGGSSNEQFF

SEQ ID NO: 662283 - protein, 14 aa, Homo sapiens
  CDR3 for alpha chain variable domain of TCR clone 331142 (TRAV1-2, TRAJ16)
CAVNRFSDGQKLLF

SEQ ID NO: 662284 - protein, 13 aa, Homo sapiens
  CDR3 for beta chain variable domain of TCR clone 331142 (TRBV19, TRBJ1-1)
CASTRRGDTEAFF

SEQ ID NO: 662285 - protein, 14 aa, Homo sapiens
  CDR3 for alpha chain variable domain of TCR clone 331143 (TRAV16, TRAJ39)
CALSKNNAGNMLTF

SEQ ID NO: 662286 - protein, 15 aa, Homo sapiens
  CDR3 for beta chain variable domain of TCR clone 331143 (TRBV28, TRBJ2-1)
CASSLDTSSYNEQFF

SEQ ID NO: 662287 - protein, 16 aa, Homo sapiens
  CDR3 for alpha chain variable domain of TCR clone 331144 (TRAV3, TRAJ4)
CAVRAFFSGGYNKLIF

SEQ ID NO: 662288 - protein, 17 aa, Homo sapiens
  CDR3 for beta chain variable domain of TCR clone 331144 (TRBV23-1, TRBJ2-1)
CISAPAVNRDQGGEQFF

SEQ ID NO: 662289 - protein, 14 aa, Homo sapiens
  CDR3 for alpha chain variable domain of TCR clone 331145 (TRAV1-2, TRAJ16)
CAVNRFSDGQKLIF

SEQ ID NO: 662290 - protein, 16 aa, Homo sapiens
  CDR3 for beta chain variable domain of TCR clone 331145 (TRBV12-5, TRBJ2-5)
CASGPRTSGNQETQYF

SEQ ID NO: 662291 - protein, 14 aa, Homo sapiens
  CDR3 for alpha chain variable domain of TCR clone 331146 (TRAV8-3, TRAJ4)
CAVGAAGGYNKLIF

SEQ ID NO: 662292 - protein, 15 aa, Homo sapiens
  CDR3 for beta chain variable domain of TCR clone 331146 (TRBV19, TRBJ2-7)
CASSPAGSGEALRYF

SEQ ID NO: 662293 - protein, 14 aa, Homo sapiens
  CDR3 for alpha chain variable domain of TCR clone 331147 (TRAV1-2, TRAJ33)
CAVRAPDSNYQLIW

SEQ ID NO: 662294 - protein, 15 aa, Homo sapiens
  CDR3 for beta chain variable domain of TCR clone 331147 (TRBV10-3, TRBJ2-3)
CASSLTSGGTDTQYF

SEQ ID NO: 662295 - protein, 23 aa, Homo sapiens
  CDR3 for alpha chain variable domain of TCR clone 331148 (TRAV8-4, TRAJ38)
CAVRNAGNNHIQNPDPAVYQLRD

SEQ ID NO: 662296 - protein, 13 aa, Homo sapiens
  CDR3 for beta chain variable domain of TCR clone 331148 (TRBV20-1, TRBJ1-1)
CSARGGGNTEAFF

SEQ ID NO: 662297 - protein, 13 aa, Homo sapiens
  CDR3 for alpha chain variable domain of TCR clone 331149 (TRAV12-3, TRAJ7)
CAMTPYGNNRLAF

SEQ ID NO: 662298 - protein, 17 aa, Homo sapiens
  CDR3 for beta chain variable domain of TCR clone 331149 (TRBV11-2, TRBJ2-1)
CASSLYPPGVEYNEQFF

SEQ ID NO: 662299 - protein, 12 aa, Homo sapiens
  CDR3 for alpha chain variable domain of TCR clone 331150 (TRAV2, TRAJ9)
CAVGAGGCKTIS

SEQ ID NO: 662300 - protein, 16 aa, Homo sapiens
  CDR3 for beta chain variable domain of TCR clone 331150 (TRBV13, TRBJ2-2)
CASSPRTGEHTGELFF

SEQ ID NO: 662301 - protein, 14 aa, Homo sapiens
  CDR3 for alpha chain variable domain of TCR clone 331151 (TRAV2, TRAJ37)
CAVDFTSNTGKLIF

SEQ ID NO: 662302 - protein, 13 aa, Homo sapiens
  CDR3 for beta chain variable domain of TCR clone 331151 (TRBV4-2, TRBJ1-1)
CASSQAGKTEAFF

SEQ ID NO: 662303 - protein, 14 aa, Homo sapiens
  CDR3 for alpha chain variable domain of TCR clone 331152 (TRAV8-4, TRAJ8)
CAVSVNTGFQKLVF

SEQ ID NO: 662304 - protein, 15 aa, Homo sapiens
  CDR3 for beta chain variable domain of TCR clone 331152 (TRBV9, TRBJ1-6)
CASSVAGTGDSPLHF

SEQ ID NO: 662305 - protein, 15 aa, Homo sapiens
  CDR3 for alpha chain variable domain of TCR clone 331153 (TRAV17, TRAJ35)
CATAFVIGFGNVLHC

SEQ ID NO: 662306 - protein, 15 aa, Homo sapiens
  CDR3 for beta chain variable domain of TCR clone 331153 (TRBV2, TRBJ1-2)
CASSESRTVNYGYTF

SEQ ID NO: 662307 - protein, 17 aa, Homo sapiens
  CDR3 for alpha chain variable domain of TCR clone 331154 (TRAV3, TRAJ42)
CAVRDRDYGGSQGTLIF

SEQ ID NO: 662308 - protein, 15 aa, Homo sapiens
  CDR3 for beta chain variable domain of TCR clone 331154 (TRBV6-6, TRBJ2-7)
CASSHSYGGSYEQYF

SEQ ID NO: 662309 - protein, 13 aa, Homo sapiens
  CDR3 for alpha chain variable domain of TCR clone 331155 (TRAV8-3, TRAJ4)
WVFYSGGYNKLIF

SEQ ID NO: 662310 - protein, 13 aa, Homo sapiens
  CDR3 for beta chain variable domain of TCR clone 331155 (TRBV12-4, TRBJ1-1)
CASSPGTGCEAFF

SEQ ID NO: 662311 - protein, 12 aa, Homo sapiens
  CDR3 for alpha chain variable domain of TCR clone 331156 (TRAV12-3, TRAJ5)
CAMDTGRRALTF

SEQ ID NO: 662312 - protein, 13 aa, Homo sapiens
  CDR3 for beta chain variable domain of TCR clone 331156 (TRBV7-7, TRBJ2-2)
SASSLTSAGELFF

SEQ ID NO: 662313 - protein, 11 aa, Homo sapiens
  CDR3 for alpha chain variable domain of TCR clone 331157 (TRAV12-2, TRAJ33)
CAVTSIYQLIW

SEQ ID NO: 662314 - protein, 14 aa, Homo sapiens
  CDR3 for beta chain variable domain of TCR clone 331157 (TRBV28, TRBJ2-2)
CASRIRSGTGELFF

SEQ ID NO: 662315 - protein, 16 aa, Homo sapiens
  CDR3 for alpha chain variable domain of TCR clone 331158 (TRAV30, TRAJ24)
CGTEIVDADSWGKFQF

SEQ ID NO: 662316 - protein, 15 aa, Homo sapiens
  CDR3 for beta chain variable domain of TCR clone 331158 (TRBV11-2, TRBJ2-1)
CASSSSTISYNEQFF

SEQ ID NO: 662317 - protein, 17 aa, Homo sapiens
  CDR3 for alpha chain variable domain of TCR clone 331159 (TRAV17, TRAJ28)
CATDPRRGGAGSYQLTL

SEQ ID NO: 662318 - protein, 17 aa, Homo sapiens
  CDR3 for beta chain variable domain of TCR clone 331159 (TRBV18, TRBJ2-1)
CASSKGLSGGADNEQFF

SEQ ID NO: 662319 - protein, 15 aa, Homo sapiens
  CDR3 for alpha chain variable domain of TCR clone 331160 (TRAV26-2, TRAJ39)
CSLRGNNNAGNMLTF

SEQ ID NO: 662320 - protein, 15 aa, Homo sapiens
  CDR3 for beta chain variable domain of TCR clone 331160 (TRBV28, TRBJ2-5)
CASSQTSGSLETQYF

SEQ ID NO: 662321 - protein, 13 aa, Homo sapiens
  CDR3 for alpha chain variable domain of TCR clone 331161 (TRAV17, TRAJ22)
CAHHSGSARQLTF

SEQ ID NO: 662322 - protein, 14 aa, Homo sapiens
  CDR3 for beta chain variable domain of TCR clone 331161 (TRBV16, TRBJ1-1)
CAISQAGPNTEAFF

SEQ ID NO: 662323 - protein, 11 aa, Homo sapiens
  CDR3 for alpha chain variable domain of TCR clone 331162 (TRAV2, TRAJ40)
CAVEGTYKYIF

SEQ ID NO: 662324 - protein, 17 aa, Homo sapiens
  CDR3 for beta chain variable domain of TCR clone 331162 (TRBV10-3, TRBJ1-2)
CAIGQTGSASGVDGYTF

SEQ ID NO: 662325 - protein, 13 aa, Homo sapiens
  CDR3 for alpha chain variable domain of TCR clone 331163 (TRAV13-1, TRAJ10)
CAATLGGGNKLTF

SEQ ID NO: 662326 - protein, 12 aa, Homo sapiens
  CDR3 for beta chain variable domain of TCR clone 331163 (TRBV11-2, TRBJ2-2)
CASSLGGGELFF

SEQ ID NO: 662327 - protein, 15 aa, Homo sapiens
  CDR3 for alpha chain variable domain of TCR clone 331164 (TRAV10, TRAJ42)
SLLHMWGGSQGNLIF

SEQ ID NO: 662328 - protein, 13 aa, Homo sapiens
  CDR3 for beta chain variable domain of TCR clone 331164 (TRBV7-9, TRBJ1-2)
CASSLKQNYGYTF

SEQ ID NO: 662329 - protein, 12 aa, Homo sapiens
  CDR3 for alpha chain variable domain of TCR clone 331165 (TRAV4, TRAJ5)
RTMDTGRRALTF

SEQ ID NO: 662330 - protein, 17 aa, Homo sapiens
  CDR3 for beta chain variable domain of TCR clone 331165 (TRBV11-3, TRBJ2-1)
CASSLYPPGVEYNEQFF

SEQ ID NO: 662331 - protein, 16 aa, Homo sapiens
  CDR3 for alpha chain variable domain of TCR clone 331166 (TRAV30, TRAJ24)
CGTEIVDAHSWGKFQF

SEQ ID NO: 662332 - protein, 11 aa, Homo sapiens
  CDR3 for beta chain variable domain of TCR clone 331166 (TRBV19, TRBJ1-1)
CASSIGSEAFF

SEQ ID NO: 662333 - protein, 14 aa, Homo sapiens
  CDR3 for alpha chain variable domain of TCR clone 331167 (TRAV29/DV5, TRAJ36)
CAARRKTGANNLLG

SEQ ID NO: 662334 - protein, 14 aa, Homo sapiens
  CDR3 for beta chain variable domain of TCR clone 331167 (TRBV12-5, TRBJ2-5)
CASCSRTHQETQYF

SEQ ID NO: 662335 - protein, 15 aa, Homo sapiens
  CDR3 for alpha chain variable domain of TCR clone 331168 (TRAV26-2, TRAJ13)
CILSDLSGGYQKVTF

SEQ ID NO: 662336 - protein, 11 aa, Homo sapiens
  CDR3 for beta chain variable domain of TCR clone 331168 (TRBV7-9, TRBJ2-3)
CASSYTDTQYF

SEQ ID NO: 662337 - protein, 13 aa, Homo sapiens
  CDR3 for alpha chain variable domain of TCR clone 331169 (TRAV8-3, TRAJ28)
CAVGSVGSYQRTF

SEQ ID NO: 662338 - protein, 14 aa, Homo sapiens
  CDR3 for beta chain variable domain of TCR clone 331169 (TRBV7-2, TRBJ2-7)
CASRSQGAAYEQYF

SEQ ID NO: 662339 - protein, 14 aa, Homo sapiens
  CDR3 for alpha chain variable domain of TCR clone 331170 (TRAV13-1, TRAJ6)
CAASNGGGSYIPTF

SEQ ID NO: 662340 - protein, 15 aa, Homo sapiens
  CDR3 for beta chain variable domain of TCR clone 331170 (TRBV20-1, TRBJ2-7)
CSARDRVSGMDEQYF

SEQ ID NO: 662341 - protein, 16 aa, Homo sapiens
  CDR3 for alpha chain variable domain of TCR clone 331171 (TRAV26-1, TRAJ52)
CIVRNAGGTSYGKLTF

SEQ ID NO: 662342 - protein, 15 aa, Homo sapiens
  CDR3 for beta chain variable domain of TCR clone 331171 (TRBV7-3, TRBJ2-1)
CASSPTGGGEVEQSF

SEQ ID NO: 662343 - protein, 14 aa, Homo sapiens
  CDR3 for alpha chain variable domain of TCR clone 331172 (TRAV9-2, TRAJ39)
CSLYIYNSGNMLTF

SEQ ID NO: 662344 - protein, 16 aa, Homo sapiens
  CDR3 for beta chain variable domain of TCR clone 331172 (TRBV20-1, TRBJ1-4)
CSAPGQGLLTNEKLFF

SEQ ID NO: 662345 - protein, 13 aa, Homo sapiens
  CDR3 for alpha chain variable domain of TCR clone 331173 (TRAV36/DV7, TRAJ29)
CAVEPSGNTPLVF

SEQ ID NO: 662346 - protein, 14 aa, Homo sapiens
  CDR3 for beta chain variable domain of TCR clone 331173 (TRBV7-2, TRBJ2-5)
CASSFTQGQETQYF

SEQ ID NO: 662347 - protein, 11 aa, Homo sapiens
  CDR3 for alpha chain variable domain of TCR clone 331174 (TRAV16, TRAJ26)
CALTRWSEFCL

SEQ ID NO: 662348 - protein, 14 aa, Homo sapiens
  CDR3 for beta chain variable domain of TCR clone 331174 (TRBV11-2, TRBJ2-5)
CASRPLAGRETQYF

SEQ ID NO: 662349 - protein, 11 aa, Homo sapiens
  CDR3 for alpha chain variable domain of TCR clone 331175 (TRAV1-2, TRAJ20)
YAVSNDYKLSF

SEQ ID NO: 662350 - protein, 17 aa, Homo sapiens
  CDR3 for beta chain variable domain of TCR clone 331175 (TRBV7-8, TRBJ2-6)
CASSAGTGGAGANVLTF

SEQ ID NO: 662351 - protein, 16 aa, Homo sapiens
  CDR3 for alpha chain variable domain of TCR clone 331176 (TRAV3, TRAJ10)
CAVRDMRAGGGNKLTF

SEQ ID NO: 662352 - protein, 19 aa, Homo sapiens
  CDR3 for beta chain variable domain of TCR clone 331176 (TRBV6-3, TRBJ1-2)
CASSYSKGRTGPPNYGYNF

SEQ ID NO: 662353 - protein, 12 aa, Homo sapiens
  CDR3 for alpha chain variable domain of TCR clone 331177 (TRAV13-1, TRAJ15)
CAACKPGTALIF

SEQ ID NO: 662354 - protein, 16 aa, Homo sapiens
  CDR3 for beta chain variable domain of TCR clone 331177 (TRBV18, TRBJ2-7)
CASSPRVLGTDSEQYF

SEQ ID NO: 662355 - protein, 20 aa, Homo sapiens
  CDR3 for alpha chain variable domain of TCR clone 331178 (TRAV12-1, TRAJ42)
SSVIQPPTSVTGGSQGNLIF

SEQ ID NO: 662356 - protein, 15 aa, Homo sapiens
  CDR3 for beta chain variable domain of TCR clone 331178 (TRBV4-1, TRBJ2-7)
CASSQNTGRLYEQYF

SEQ ID NO: 662357 - protein, 16 aa, Homo sapiens
  CDR3 for alpha chain variable domain of TCR clone 331179 (TRAV1-2, TRAJ10)
CAVRGVLTGGGNKLTF

SEQ ID NO: 662358 - protein, 17 aa, Homo sapiens
  CDR3 for beta chain variable domain of TCR clone 331179 (TRBV7-9, TRBJ1-6)
CASSSPGRGNSPLHLGT

SEQ ID NO: 662359 - protein, 16 aa, Homo sapiens
  CDR3 for alpha chain variable domain of TCR clone 331180 (TRAV13-1, TRAJ48)
CAASIFGNFGNEKLTF

SEQ ID NO: 662360 - protein, 13 aa, Homo sapiens
  CDR3 for beta chain variable domain of TCR clone 331180 (TRBV27, TRBJ1-1)
CASSLSIGAEAFF

SEQ ID NO: 662361 - protein, 19 aa, Homo sapiens
  CDR3 for alpha chain variable domain of TCR clone 331181 (TRAV1-2, TRAJ26)
CLLPLCCERPDNYGQNFVF

SEQ ID NO: 662362 - protein, 16 aa, Homo sapiens
  CDR3 for beta chain variable domain of TCR clone 331181 (TRBV13, TRBJ2-3)
CQQPLQGSGGRNTQYF

SEQ ID NO: 662363 - protein, 13 aa, Homo sapiens
  CDR3 for alpha chain variable domain of TCR clone 331182 (TRAV3, TRAJ27)
CAVRPLGAGKSNF

SEQ ID NO: 662364 - protein, 14 aa, Homo sapiens
  CDR3 for beta chain variable domain of TCR clone 331182 (TRBV7-8, TRBJ2-3)
CASSLEAGTDTQYF

SEQ ID NO: 662365 - protein, 15 aa, Homo sapiens
  CDR3 for alpha chain variable domain of TCR clone 331183 (TRAV38-1, TRAJ37)
CAFIFGSGNTGKLIF

SEQ ID NO: 662366 - protein, 13 aa, Homo sapiens
  CDR3 for beta chain variable domain of TCR clone 331183 (TRBV20-1, TRBJ2-7)
CSARDGKSYEQYF

SEQ ID NO: 662367 - protein, 11 aa, Homo sapiens
  CDR3 for alpha chain variable domain of TCR clone 331184 (TRAV3, TRAJ21)
CALGNFNKFYF

SEQ ID NO: 662368 - protein, 16 aa, Homo sapiens
  CDR3 for beta chain variable domain of TCR clone 331184 (TRBV19, TRBJ2-1)
CASSKAGPSSYNEQYF

SEQ ID NO: 662369 - protein, 11 aa, Homo sapiens
  CDR3 for alpha chain variable domain of TCR clone 331185 (TRAV1-1, TRAJ23)
CAVRQGGKLIY

SEQ ID NO: 662370 - protein, 13 aa, Homo sapiens
  CDR3 for beta chain variable domain of TCR clone 331185 (TRBV7-3, TRBJ1-1)
CASSQDWGAEAFF

SEQ ID NO: 662371 - protein, 12 aa, Homo sapiens
  CDR3 for alpha chain variable domain of TCR clone 331186 (TRAV23/DV6, TRAJ30)
CAASKGDDKITF

SEQ ID NO: 662372 - protein, 18 aa, Homo sapiens
  CDR3 for beta chain variable domain of TCR clone 331186 (TRBV10-3, TRBJ2-3)
CAISESRVGPMRGDTQYF

SEQ ID NO: 662373 - protein, 11 aa, Homo sapiens
  CDR3 for alpha chain variable domain of TCR clone 331187 (TRAV12-2, TRAJ33)
CAVTSNYQLIW

SEQ ID NO: 662374 - protein, 14 aa, Homo sapiens
  CDR3 for beta chain variable domain of TCR clone 331187 (TRBV28, TRBJ2-2)
CASRVRSGTGELFF

SEQ ID NO: 662375 - protein, 15 aa, Homo sapiens
  CDR3 for alpha chain variable domain of TCR clone 331188 (TRAV8-6, TRAJ6)
CAVSGESGGSYIPTF

SEQ ID NO: 662376 - protein, 17 aa, Homo sapiens
  CDR3 for beta chain variable domain of TCR clone 331188 (TRBV19, TRBJ2-7)
CASSISFYDSYPYEQYF

SEQ ID NO: 662377 - protein, 15 aa, Homo sapiens
  CDR3 for alpha chain variable domain of TCR clone 331189 (TRAV35, TRAJ23)
CAGQRGYNQGGKIIF

SEQ ID NO: 662378 - protein, 16 aa, Homo sapiens
  CDR3 for beta chain variable domain of TCR clone 331189 (TRBV27, TRBJ2-1)
CASSSRLAGNYNEQFF

SEQ ID NO: 662379 - protein, 13 aa, Homo sapiens
  CDR3 for alpha chain variable domain of TCR clone 331190 (TRAV36/DV7, TRAJ49)
CAGDSNTGNQFYF

SEQ ID NO: 662380 - protein, 16 aa, Homo sapiens
  CDR3 for beta chain variable domain of TCR clone 331190 (TRBV5-1, TRBJ1-1)
CASSKTGTEVGSEAFF

SEQ ID NO: 662381 - protein, 13 aa, Homo sapiens
  CDR3 for alpha chain variable domain of TCR clone 331191 (TRAV2, TRAJ40)
CAVATAGTYKYIF

SEQ ID NO: 662382 - protein, 14 aa, Homo sapiens
  CDR3 for beta chain variable domain of TCR clone 331191 (TRBV19, TRBJ2-1)
CASPTFVLSGEQFF

SEQ ID NO: 662383 - protein, 17 aa, Homo sapiens
  CDR3 for alpha chain variable domain of TCR clone 331192 (TRAV3, TRAJ28)
CAVREAYSGAGSYQLTS

SEQ ID NO: 662384 - protein, 15 aa, Homo sapiens
  CDR3 for beta chain variable domain of TCR clone 331192 (TRBV5-1, TRBJ2-1)
CARSPPRAPYNEQFF

SEQ ID NO: 662385 - protein, 20 aa, Homo sapiens
  CDR3 for alpha chain variable domain of TCR clone 331193 (TRAV25, TRAJ21)
TATQTTDVGTYPLSFNKFYF

SEQ ID NO: 662386 - protein, 17 aa, Homo sapiens
  CDR3 for beta chain variable domain of TCR clone 331193 (TRBV20-1, TRBJ2-4)
CSARDLVRSGAKNIQYS

SEQ ID NO: 662387 - protein, 13 aa, Homo sapiens
  CDR3 for alpha chain variable domain of TCR clone 331194 (TRAV1-2, TRAJ9)
CAALNTGCFKTIF

SEQ ID NO: 662388 - protein, 13 aa, Homo sapiens
  CDR3 for beta chain variable domain of TCR clone 331194 (TRBV19, TRBJ1-2)
CASSVRGQDGYTF

SEQ ID NO: 662389 - protein, 15 aa, Homo sapiens
  CDR3 for alpha chain variable domain of TCR clone 331195 (TRAV21, TRAJ53)
CATLNSGGSNSKLTF

SEQ ID NO: 662390 - protein, 14 aa, Homo sapiens
  CDR3 for beta chain variable domain of TCR clone 331195 (TRBV9, TRBJ1-2)
CASSVSTRSYGYTF

SEQ ID NO: 662391 - protein, 13 aa, Homo sapiens
  CDR3 for alpha chain variable domain of TCR clone 331196 (TRAV20, TRAJ15)
CATINQAGTALIF

SEQ ID NO: 662392 - protein, 13 aa, Homo sapiens
  CDR3 for beta chain variable domain of TCR clone 331196 (TRBV12-4, TRBJ2-1)
CASRQPSNNERFF

SEQ ID NO: 662393 - protein, 13 aa, Homo sapiens
  CDR3 for alpha chain variable domain of TCR clone 331197 (TRAV12-1, TRAJ11)
CVVNREGYSTLTF

SEQ ID NO: 662394 - protein, 14 aa, Homo sapiens
  CDR3 for beta chain variable domain of TCR clone 331197 (TRBV19, TRBJ2-1)
CASPTFVLSGEQFF

SEQ ID NO: 662395 - protein, 14 aa, Homo sapiens
  CDR3 for alpha chain variable domain of TCR clone 331198 (TRAV25, TRAJ22)
FAVRSSGSARQLTF

SEQ ID NO: 662396 - protein, 16 aa, Homo sapiens
  CDR3 for beta chain variable domain of TCR clone 331198 (TRBV4-2, TRBJ1-1)
CASSPSPGRAAPEAFF

SEQ ID NO: 662397 - protein, 14 aa, Homo sapiens
  CDR3 for alpha chain variable domain of TCR clone 331199 (TRAV8-3, TRAJ4)
CAVGAAGGYNKLIF

SEQ ID NO: 662398 - protein, 13 aa, Homo sapiens
  CDR3 for beta chain variable domain of TCR clone 331199 (TRBV2, TRBJ2-5)
CASSGLVEETQYF

SEQ ID NO: 662399 - protein, 14 aa, Homo sapiens
  CDR3 for alpha chain variable domain of TCR clone 331200 (TRAV17, TRAJ57)
CATDPQVGSEKLVF

SEQ ID NO: 662400 - protein, 17 aa, Homo sapiens
  CDR3 for beta chain variable domain of TCR clone 331200 (TRBV5-1, TRBJ2-2)
YASSLAGLSGGTGELFF

SEQ ID NO: 662401 - protein, 16 aa, Homo sapiens
  CDR3 for alpha chain variable domain of TCR clone 331201 (TRAV3, TRAJ37)
CAVRGKGSGNTGKLIF

SEQ ID NO: 662402 - protein, 14 aa, Homo sapiens
  CDR3 for beta chain variable domain of TCR clone 331201 (TRBV16, TRBJ1-1)
CASSQAGPNTEAFF

SEQ ID NO: 662403 - protein, 16 aa, Homo sapiens
  CDR3 for alpha chain variable domain of TCR clone 331202 (TRAV8-3, TRAJ13)
CAVGASPSGGYQKVTF

SEQ ID NO: 662404 - protein, 13 aa, Homo sapiens
  CDR3 for beta chain variable domain of TCR clone 331202 (TRBV7-9, TRBJ1-2)
CASSLKQNYGYTF

SEQ ID NO: 662405 - protein, 16 aa, Homo sapiens
  CDR3 for alpha chain variable domain of TCR clone 331203 (TRAV27, )
CAARRNAGNKISRTLT

SEQ ID NO: 662406 - protein, 13 aa, Homo sapiens
  CDR3 for beta chain variable domain of TCR clone 331203 (TRBV12-5, TRBJ2-3)
CASGDRQSDTQYC

SEQ ID NO: 662407 - protein, 15 aa, Homo sapiens
  CDR3 for alpha chain variable domain of TCR clone 331204 (TRAV26-2, TRAJ57)
RILRDIRGGSEKLVF

SEQ ID NO: 662408 - protein, 15 aa, Homo sapiens
  CDR3 for beta chain variable domain of TCR clone 331204 (TRBV2, TRBJ2-1)
CASDIGLAGEGEQFF

SEQ ID NO: 662409 - protein, 11 aa, Homo sapiens
  CDR3 for alpha chain variable domain of TCR clone 331205 (TRAV3, TRAJ21)
CAVVNFNKFYF

SEQ ID NO: 662410 - protein, 16 aa, Homo sapiens
  CDR3 for beta chain variable domain of TCR clone 331205 (TRBV27, TRBJ2-2)
CASSFRGLVRTGELFF

SEQ ID NO: 662411 - protein, 15 aa, Homo sapiens
  CDR3 for alpha chain variable domain of TCR clone 331206 (TRAV2, TRAJ24)
CAVEVLTDSWGKFQF

SEQ ID NO: 662412 - protein, 14 aa, Homo sapiens
  CDR3 for beta chain variable domain of TCR clone 331206 (TRBV6-1, TRBJ1-3)
CASVQGGGGNTIYF

SEQ ID NO: 662413 - protein, 14 aa, Homo sapiens
  CDR3 for alpha chain variable domain of TCR clone 331207 (TRAV12-2, TRAJ13)
CAVKKTGGYQKVTF

SEQ ID NO: 662414 - protein, 14 aa, Homo sapiens
  CDR3 for beta chain variable domain of TCR clone 331207 (TRBV7-7, TRBJ2-3)
CASSLGTVTDTQYF

SEQ ID NO: 662415 - protein, 13 aa, Homo sapiens
  CDR3 for alpha chain variable domain of TCR clone 331208 (TRAV8-2, TRAJ45)
CVVSLVQEEVLTD

SEQ ID NO: 662416 - protein, 13 aa, Homo sapiens
  CDR3 for beta chain variable domain of TCR clone 331208 (TRBV13, TRBJ2-1)
CASILGGRGEQFF

SEQ ID NO: 662417 - protein, 15 aa, Homo sapiens
  CDR3 for alpha chain variable domain of TCR clone 331209 (TRAV23/DV6, TRAJ18)
CAASHAGSTLGRLYF

SEQ ID NO: 662418 - protein, 14 aa, Homo sapiens
  CDR3 for beta chain variable domain of TCR clone 331209 (TRBV7-6, TRBJ2-3)
CASSVAGGTDTQYF

SEQ ID NO: 662419 - protein, 18 aa, Homo sapiens
  CDR3 for alpha chain variable domain of TCR clone 331210 (TRAV3, TRAJ17)
CAVRARRGGRSCRQQANF

SEQ ID NO: 662420 - protein, 16 aa, Homo sapiens
  CDR3 for beta chain variable domain of TCR clone 331210 (TRBV20-1, TRBJ2-2)
CSARDDRVGLTGELFF

SEQ ID NO: 662421 - protein, 11 aa, Homo sapiens
  CDR3 for alpha chain variable domain of TCR clone 331211 (TRAV26-1, TRAJ37)
CIVRVGRKLIF

SEQ ID NO: 662422 - protein, 16 aa, Homo sapiens
  CDR3 for beta chain variable domain of TCR clone 331211 (TRBV13, TRBJ2-2)
CASSPRTGEHTGELFF

SEQ ID NO: 662423 - protein, 13 aa, Homo sapiens
  CDR3 for alpha chain variable domain of TCR clone 331212 (TRAV3, TRAJ15)
CAVRDQAGIAMIF

SEQ ID NO: 662424 - protein, 15 aa, Homo sapiens
  CDR3 for beta chain variable domain of TCR clone 331212 (TRBV11-1, TRBJ2-7)
CASSLNYGASYEQYF

SEQ ID NO: 662425 - protein, 13 aa, Homo sapiens
  CDR3 for alpha chain variable domain of TCR clone 331213 (TRAV12-2, TRAJ6)
CAVKVSRKLHTYI

SEQ ID NO: 662426 - protein, 12 aa, Homo sapiens
  CDR3 for beta chain variable domain of TCR clone 331213 (TRBV29-1, TRBJ2-3)
CSVTGGADTQYF

SEQ ID NO: 662427 - protein, 14 aa, Homo sapiens
  CDR3 for alpha chain variable domain of TCR clone 331214 (TRAV1-2, TRAJ16)
CAVNRFSDGQKLLF

SEQ ID NO: 662428 - protein, 15 aa, Homo sapiens
  CDR3 for beta chain variable domain of TCR clone 331214 (TRBV7-9, TRBJ1-6)
RASSSLGRGNSPLHF

SEQ ID NO: 662429 - protein, 15 aa, Homo sapiens
  CDR3 for alpha chain variable domain of TCR clone 331215 (TRAV25, TRAJ52)
CAGTSGGTSYGKLTF

SEQ ID NO: 662430 - protein, 16 aa, Homo sapiens
  CDR3 for beta chain variable domain of TCR clone 331215 (TRBV20-1, TRBJ1-2)
CSASMGQGVANYGYAF

SEQ ID NO: 662431 - protein, 13 aa, Homo sapiens
  CDR3 for alpha chain variable domain of TCR clone 331216 (TRAV13-1, TRAJ33)
CAASRAGNYQLIW

SEQ ID NO: 662432 - protein, 16 aa, Homo sapiens
  CDR3 for beta chain variable domain of TCR clone 331216 (TRBV2, TRBJ2-7)
CASSEQYFGPGTKLTV

SEQ ID NO: 662433 - protein, 14 aa, Homo sapiens
  CDR3 for alpha chain variable domain of TCR clone 331217 (TRAV26-1, TRAJ38)
CIANNAGNNRKLMW

SEQ ID NO: 662434 - protein, 13 aa, Homo sapiens
  CDR3 for beta chain variable domain of TCR clone 331217 (TRBV20-1, TRBJ1-1)
CSARGGGNTEAFF

SEQ ID NO: 662435 - protein, 15 aa, Homo sapiens
  CDR3 for alpha chain variable domain of TCR clone 331218 (TRAV26-1, TRAJ42)
CIVRVKGGSQGNLIF

SEQ ID NO: 662436 - protein, 14 aa, Homo sapiens
  CDR3 for beta chain variable domain of TCR clone 331218 (TRBV19, TRBJ2-2)
CATTGHANTGELFL

SEQ ID NO: 662437 - protein, 13 aa, Homo sapiens
  CDR3 for alpha chain variable domain of TCR clone 331219 (TRAV36/DV7, TRAJ7)
CAVERYGNNRLAF

SEQ ID NO: 662438 - protein, 15 aa, Homo sapiens
  CDR3 for beta chain variable domain of TCR clone 331219 (TRBV7-9, TRBJ1-5)
CASSQGHQPNQPQHF

SEQ ID NO: 662439 - protein, 12 aa, Homo sapiens
  CDR3 for alpha chain variable domain of TCR clone 331220 (TRAV13-1, TRAJ21)
CAAKEGFNKFYF

SEQ ID NO: 662440 - protein, 18 aa, Homo sapiens
  CDR3 for beta chain variable domain of TCR clone 331220 (TRBV20-1, TRBJ2-6)
CSAETTPTHGSGANVMTF

SEQ ID NO: 662441 - protein, 12 aa, Homo sapiens
  CDR3 for alpha chain variable domain of TCR clone 331221 (TRAV27, TRAJ52)
YAGGTSYGKLTF

SEQ ID NO: 662442 - protein, 14 aa, Homo sapiens
  CDR3 for beta chain variable domain of TCR clone 331221 (TRBV7-6, TRBJ2-3)
CASSLGTVTDTQYF

SEQ ID NO: 662443 - protein, 15 aa, Homo sapiens
  CDR3 for alpha chain variable domain of TCR clone 331222 (TRAV20, TRAJ53)
CAVQASGGSYYKLTF

SEQ ID NO: 662444 - protein, 12 aa, Homo sapiens
  CDR3 for beta chain variable domain of TCR clone 331222 (TRBV7-2, TRBJ2-1)
CASSPQDIEQFF

SEQ ID NO: 662445 - protein, 12 aa, Homo sapiens
  CDR3 for alpha chain variable domain of TCR clone 331223 (TRAV21, TRAJ49)
CAVRNTGNQFYF

SEQ ID NO: 662446 - protein, 13 aa, Homo sapiens
  CDR3 for beta chain variable domain of TCR clone 331223 (TRBV2, TRBJ1-4)
CASSERAGEKLFF

SEQ ID NO: 662447 - protein, 11 aa, Homo sapiens
  CDR3 for alpha chain variable domain of TCR clone 331224 (TRAV1-1, TRAJ23)
CAVRQGGNLIF

SEQ ID NO: 662448 - protein, 13 aa, Homo sapiens
  CDR3 for beta chain variable domain of TCR clone 331224 (TRBV7-3, TRBJ1-1)
CASSQDWGAEAFF

SEQ ID NO: 662449 - protein, 12 aa, Homo sapiens
  CDR3 for alpha chain variable domain of TCR clone 331225 (TRAV21, TRAJ43)
CAVSLNNNDMRF

SEQ ID NO: 662450 - protein, 15 aa, Homo sapiens
  CDR3 for beta chain variable domain of TCR clone 331225 (TRBV20-1, TRBJ2-1)
CSASPPSGGYNEQFF

SEQ ID NO: 662451 - protein, 18 aa, Homo sapiens
  CDR3 for alpha chain variable domain of TCR clone 331226 (TRAV12-3, TRAJ52)
CAMSVGGDGGTSYGKMTF

SEQ ID NO: 662452 - protein, 15 aa, Homo sapiens
  CDR3 for beta chain variable domain of TCR clone 331226 (TRBV27, TRBJ1-6)
CASSFDRGLGSPLHF

SEQ ID NO: 662453 - protein, 14 aa, Homo sapiens
  CDR3 for alpha chain variable domain of TCR clone 331227 (TRAV12-2, TRAJ24)
CAATPADSWGKLQF

SEQ ID NO: 662454 - protein, 12 aa, Homo sapiens
  CDR3 for beta chain variable domain of TCR clone 331227 (TRBV3-1, TRBJ2-1)
CASSQGSSGQFF

SEQ ID NO: 662455 - protein, 15 aa, Homo sapiens
  CDR3 for alpha chain variable domain of TCR clone 331228 (TRAV36/DV7, TRAJ54)
CAVEKPVQGAQNLVF

SEQ ID NO: 662456 - protein, 17 aa, Homo sapiens
  CDR3 for beta chain variable domain of TCR clone 331228 (TRBV6-5, TRBJ1-2)
CASSSPWEGAFDYGYTF

SEQ ID NO: 662457 - protein, 12 aa, Homo sapiens
  CDR3 for alpha chain variable domain of TCR clone 331229 (TRAV12-3, TRAJ17)
CAMTLTGDKLTF

SEQ ID NO: 662458 - protein, 15 aa, Homo sapiens
  CDR3 for beta chain variable domain of TCR clone 331229 (TRBV20-1, TRBJ2-7)
RSARVRVSGMDEQYF

SEQ ID NO: 662459 - protein, 14 aa, Homo sapiens
  CDR3 for alpha chain variable domain of TCR clone 331230 (TRAV1-2, TRAJ29)
CAVRTDSRNTPLVF

SEQ ID NO: 662460 - protein, 14 aa, Homo sapiens
  CDR3 for beta chain variable domain of TCR clone 331230 (TRBV7-2, TRBJ2-7)
CASSPKTSFYEQYF

SEQ ID NO: 662461 - protein, 16 aa, Homo sapiens
  CDR3 for alpha chain variable domain of TCR clone 331231 (TRAV13-1, TRAJ18)
CAASRMRGSTLGRLYF

SEQ ID NO: 662462 - protein, 14 aa, Homo sapiens
  CDR3 for beta chain variable domain of TCR clone 331231 (TRBV19, TRBJ2-1)
CASPTFVLSGEQFF

SEQ ID NO: 662463 - protein, 16 aa, Homo sapiens
  CDR3 for alpha chain variable domain of TCR clone 331232 (TRAV30, TRAJ24)
CGTEIVDADSWGKFQF

SEQ ID NO: 662464 - protein, 17 aa, Homo sapiens
  CDR3 for beta chain variable domain of TCR clone 331232 (TRBV7-3, TRBJ2-3)
CASSLMQRMRGADTQYF

SEQ ID NO: 662465 - protein, 12 aa, Homo sapiens
  CDR3 for alpha chain variable domain of TCR clone 331233 (TRAV27, TRAJ33)
CAGVGSNYQLIW

SEQ ID NO: 662466 - protein, 15 aa, Homo sapiens
  CDR3 for beta chain variable domain of TCR clone 331233 (TRBV2, TRBJ2-3)
CASSDFEKATDTQYF

SEQ ID NO: 662467 - protein, 18 aa, Homo sapiens
  CDR3 for alpha chain variable domain of TCR clone 331234 (TRAV12-2, )
CAVEDIQNPDPAVYQLRD

SEQ ID NO: 662468 - protein, 16 aa, Homo sapiens
  CDR3 for beta chain variable domain of TCR clone 331234 (TRBV6-1, TRBJ1-2)
CASSGAWQARSHGYTF

SEQ ID NO: 662469 - protein, 12 aa, Homo sapiens
  CDR3 for alpha chain variable domain of TCR clone 331235 (TRAV12-2, TRAJ7)
CAVRRGNNRLAF

SEQ ID NO: 662470 - protein, 17 aa, Homo sapiens
  CDR3 for beta chain variable domain of TCR clone 331235 (TRBV7-9, TRBJ2-3)
CASSPTVAGDLTDTQYF

SEQ ID NO: 662471 - protein, 13 aa, Homo sapiens
  CDR3 for alpha chain variable domain of TCR clone 331236 (TRAV20, TRAJ37)
CAGCSSNTGKLIF

SEQ ID NO: 662472 - protein, 11 aa, Homo sapiens
  CDR3 for beta chain variable domain of TCR clone 331236 (TRBV12-4, TRBJ2-3)
WASTATDTQYF

SEQ ID NO: 662473 - protein, 13 aa, Homo sapiens
  CDR3 for alpha chain variable domain of TCR clone 331237 (TRAV27, TRAJ56)
CAGKPGANSKLTF

SEQ ID NO: 662474 - protein, 18 aa, Homo sapiens
  CDR3 for beta chain variable domain of TCR clone 331237 (TRBV11-2, TRBJ2-3)
CAISFGGAARGAPNTQYF

SEQ ID NO: 662475 - protein, 12 aa, Homo sapiens
  CDR3 for alpha chain variable domain of TCR clone 331238 (TRAV12-3, TRAJ17)
CAMTLTSNKLTF

SEQ ID NO: 662476 - protein, 15 aa, Homo sapiens
  CDR3 for beta chain variable domain of TCR clone 331238 (TRBV20-1, TRBJ2-7)
CSARDRVSGMDEQYC

SEQ ID NO: 662477 - protein, 17 aa, Homo sapiens
  CDR3 for alpha chain variable domain of TCR clone 331239 (TRAV3, TRAJ42)
CAVRDRDYGGSQGNLIF

SEQ ID NO: 662478 - protein, 15 aa, Homo sapiens
  CDR3 for beta chain variable domain of TCR clone 331239 (TRBV18, TRBJ2-3)
CASSPLAGETDTQYF

SEQ ID NO: 662479 - protein, 15 aa, Homo sapiens
  CDR3 for alpha chain variable domain of TCR clone 331240 (TRAV36/DV7, TRAJ53)
CAVEGSGGSHYKLTF

SEQ ID NO: 662480 - protein, 16 aa, Homo sapiens
  CDR3 for beta chain variable domain of TCR clone 331240 (TRBV27, TRBJ2-2)
CASSLSGFWVTGELFF

SEQ ID NO: 662481 - protein, 13 aa, Homo sapiens
  CDR3 for alpha chain variable domain of TCR clone 331241 (TRAV21, TRAJ57)
CAVIKGGSEKLVF

SEQ ID NO: 662482 - protein, 15 aa, Homo sapiens
  CDR3 for beta chain variable domain of TCR clone 331241 (TRBV10-3, TRBJ2-5)
CAISEFGRGQETQYF

SEQ ID NO: 662483 - protein, 14 aa, Homo sapiens
  CDR3 for alpha chain variable domain of TCR clone 331242 (TRAV4, TRAJ17)
CLVGDIAAGKKLTF

SEQ ID NO: 662484 - protein, 13 aa, Homo sapiens
  CDR3 for beta chain variable domain of TCR clone 331242 (TRBV18, TRBJ2-7)
CASQSGGGYEQYF

SEQ ID NO: 662485 - protein, 16 aa, Homo sapiens
  CDR3 for alpha chain variable domain of TCR clone 331243 (TRAV3, TRAJ37)
CAVRGKGSGNTGKLIF

SEQ ID NO: 662486 - protein, 15 aa, Homo sapiens
  CDR3 for beta chain variable domain of TCR clone 331243 (TRBV5-1, TRBJ2-7)
FASSLNGGPAREQYF

SEQ ID NO: 662487 - protein, 11 aa, Homo sapiens
  CDR3 for alpha chain variable domain of TCR clone 331244 (TRAV12-1, TRAJ8)
CVVTGFQKLVF

SEQ ID NO: 662488 - protein, 14 aa, Homo sapiens
  CDR3 for beta chain variable domain of TCR clone 331244 (TRBV19, TRBJ2-1)
CASGNSTQYNEQFF

SEQ ID NO: 662489 - protein, 14 aa, Homo sapiens
  CDR3 for alpha chain variable domain of TCR clone 331245 (TRAV13-2, TRAJ57)
CAENFQGGSEKLVF

SEQ ID NO: 662490 - protein, 13 aa, Homo sapiens
  CDR3 for beta chain variable domain of TCR clone 331245 (TRBV7-9, TRBJ2-7)
CASSAGLQYEQYF

SEQ ID NO: 662491 - protein, 14 aa, Homo sapiens
  CDR3 for alpha chain variable domain of TCR clone 331246 (TRAV8-3, TRAJ39)
CAVGANNAGNMLTF

SEQ ID NO: 662492 - protein, 16 aa, Homo sapiens
  CDR3 for beta chain variable domain of TCR clone 331246 (TRBV6-1, TRBJ2-5)
CARSETLDRGAETQYF

SEQ ID NO: 662493 - protein, 15 aa, Homo sapiens
  CDR3 for alpha chain variable domain of TCR clone 331247 (TRAV4, TRAJ39)
CLVGPNNNAGNMLTF

SEQ ID NO: 662494 - protein, 12 aa, Homo sapiens
  CDR3 for beta chain variable domain of TCR clone 331247 (TRBV11-2, TRBJ2-2)
CASSLGGGELFL

SEQ ID NO: 662495 - protein, 14 aa, Homo sapiens
  CDR3 for alpha chain variable domain of TCR clone 331248 (TRAV13-1, TRAJ35)
CAASKGGFGNVLHC

SEQ ID NO: 662496 - protein, 15 aa, Homo sapiens
  CDR3 for beta chain variable domain of TCR clone 331248 (TRBV7-2, TRBJ2-7)
CASSLTGQGTYEQYF

SEQ ID NO: 662497 - protein, 13 aa, Homo sapiens
  CDR3 for alpha chain variable domain of TCR clone 331249 (TRAV1-2, TRAJ9)
CAALNTGGFKTIF

SEQ ID NO: 662498 - protein, 16 aa, Homo sapiens
  CDR3 for beta chain variable domain of TCR clone 331249 (TRBV20-1, TRBJ2-6)
CSASSQGYDGANVLTF

SEQ ID NO: 662499 - protein, 14 aa, Homo sapiens
  CDR3 for alpha chain variable domain of TCR clone 331250 (TRAV12-2, TRAJ36)
CAVKISTGANNLFF

SEQ ID NO: 662500 - protein, 14 aa, Homo sapiens
  CDR3 for beta chain variable domain of TCR clone 331250 (TRBV25-1, TRBJ1-2)
CASSDTTGVVGYTL

SEQ ID NO: 662501 - protein, 11 aa, Homo sapiens
  CDR3 for alpha chain variable domain of TCR clone 331251 (TRAV23/DV6, TRAJ48)
CAPRWGETLTF

SEQ ID NO: 662502 - protein, 14 aa, Homo sapiens
  CDR3 for beta chain variable domain of TCR clone 331251 (TRBV12-4, TRBJ2-1)
CASPTFVLSGEQFF

SEQ ID NO: 662503 - protein, 10 aa, Homo sapiens
  CDR3 for alpha chain variable domain of TCR clone 331252 (TRAV36/DV7, TRAJ31)
YAVGEARLMF

SEQ ID NO: 662504 - protein, 14 aa, Homo sapiens
  CDR3 for beta chain variable domain of TCR clone 331252 (TRBV19, TRBJ2-1)
CASPTFVLSGEQFF

SEQ ID NO: 662505 - protein, 14 aa, Homo sapiens
  CDR3 for alpha chain variable domain of TCR clone 331253 (TRAV12-2, TRAJ13)
CAVNPSGGYQKVTF

SEQ ID NO: 662506 - protein, 15 aa, Homo sapiens
  CDR3 for beta chain variable domain of TCR clone 331253 (TRBV20-1, TRBJ2-7)
CSARDRVSGMDEQYF

SEQ ID NO: 662507 - protein, 16 aa, Homo sapiens
  CDR3 for alpha chain variable domain of TCR clone 331254 (TRAV16, TRAJ42)
CARKMNYGGSQGNLIF

SEQ ID NO: 662508 - protein, 13 aa, Homo sapiens
  CDR3 for beta chain variable domain of TCR clone 331254 (TRBV20-1, TRBJ2-7)
CSASSPSSYEQYF

SEQ ID NO: 662509 - protein, 13 aa, Homo sapiens
  CDR3 for alpha chain variable domain of TCR clone 331255 (TRAV36/DV7, TRAJ54)
CAVEVHGAQKLVF

SEQ ID NO: 662510 - protein, 17 aa, Homo sapiens
  CDR3 for beta chain variable domain of TCR clone 331255 (TRBV6-1, TRBJ1-5)
CASSEAEFIRARQPQHF

SEQ ID NO: 662511 - protein, 14 aa, Homo sapiens
  CDR3 for alpha chain variable domain of TCR clone 331256 (TRAV12-2, TRAJ40)
CAVKIPSGTYNYIF

SEQ ID NO: 662512 - protein, 15 aa, Homo sapiens
  CDR3 for beta chain variable domain of TCR clone 331256 (TRBV11-3, TRBJ2-3)
CASLKDGREGDTQYF

SEQ ID NO: 662513 - protein, 13 aa, Homo sapiens
  CDR3 for alpha chain variable domain of TCR clone 331257 (TRAV29/DV5, TRAJ47)
CAASAEDGNKLVF

SEQ ID NO: 662514 - protein, 15 aa, Homo sapiens
  CDR3 for beta chain variable domain of TCR clone 331257 (TRBV7-9, TRBJ1-4)
CASSARTGGNEKLFF

SEQ ID NO: 662515 - protein, 18 aa, Homo sapiens
  CDR3 for alpha chain variable domain of TCR clone 331258 (TRAV12-3, TRAJ52)
CAMSRTNAGGTSYGKLTF

SEQ ID NO: 662516 - protein, 16 aa, Homo sapiens
  CDR3 for beta chain variable domain of TCR clone 331258 (TRBV12-4, TRBJ1-5)
CASSRPVGGSNRPQHF

SEQ ID NO: 662517 - protein, 15 aa, Homo sapiens
  CDR3 for alpha chain variable domain of TCR clone 331259 (TRAV14/DV4, TRAJ26)
CAMREGQNYGQNFVF

SEQ ID NO: 662518 - protein, 15 aa, Homo sapiens
  CDR3 for beta chain variable domain of TCR clone 331259 (TRBV28, TRBJ2-1)
CASSIIAGGRSEQFF

SEQ ID NO: 662519 - protein, 12 aa, Homo sapiens
  CDR3 for alpha chain variable domain of TCR clone 331260 (TRAV21, TRAJ31)
CVLAGHNARLMF

SEQ ID NO: 662520 - protein, 16 aa, Homo sapiens
  CDR3 for beta chain variable domain of TCR clone 331260 (TRBV27, TRBJ2-5)
CASSCGPGGTKETQYF

SEQ ID NO: 662521 - protein, 15 aa, Homo sapiens
  CDR3 for alpha chain variable domain of TCR clone 331261 (TRAV8-3, TRAJ45)
CASSYSGGGADGLTF

SEQ ID NO: 662522 - protein, 15 aa, Homo sapiens
  CDR3 for beta chain variable domain of TCR clone 331261 (TRBV2, TRBJ2-5)
CASTRDGGPQETQYF

SEQ ID NO: 662523 - protein, 11 aa, Homo sapiens
  CDR3 for alpha chain variable domain of TCR clone 331262 (TRAV1-2, TRAJ20)
CAVANGYKLSF

SEQ ID NO: 662524 - protein, 18 aa, Homo sapiens
  CDR3 for beta chain variable domain of TCR clone 331262 (TRBV20-1, TRBJ2-6)
CSPETTPTHGSGANVLTF

SEQ ID NO: 662525 - protein, 16 aa, Homo sapiens
  CDR3 for alpha chain variable domain of TCR clone 331263 (TRAV26-1, TRAJ32)
CIVRTNYGGATNKLIF

SEQ ID NO: 662526 - protein, 14 aa, Homo sapiens
  CDR3 for beta chain variable domain of TCR clone 331263 (TRBV27, TRBJ1-1)
CASSLLSGLSQPFF

SEQ ID NO: 662527 - protein, 12 aa, Homo sapiens
  CDR3 for alpha chain variable domain of TCR clone 331264 (TRAV12-1, TRAJ41)
CVARNSGYALNF

SEQ ID NO: 662528 - protein, 13 aa, Homo sapiens
  CDR3 for beta chain variable domain of TCR clone 331264 (TRBV20-1, TRBJ1-1)
CSARGGGNTEAFF

SEQ ID NO: 662529 - protein, 13 aa, Homo sapiens
  CDR3 for alpha chain variable domain of TCR clone 331265 (TRAV20, TRAJ31)
CAVQAWYNARLMF

SEQ ID NO: 662530 - protein, 16 aa, Homo sapiens
  CDR3 for beta chain variable domain of TCR clone 331265 (TRBV6-6, TRBJ2-1)
CASSWGGQGPYNEQFF

SEQ ID NO: 662531 - protein, 15 aa, Homo sapiens
  CDR3 for alpha chain variable domain of TCR clone 331266 (TRAV12-1, TRAJ47)
CVVTNRLKGGNKLVF

SEQ ID NO: 662532 - protein, 19 aa, Homo sapiens
  CDR3 for beta chain variable domain of TCR clone 331266 (TRBV20-1, TRBJ2-5)
CSARPQGLEGTSKSGTQYF

SEQ ID NO: 662533 - protein, 11 aa, Homo sapiens
  CDR3 for alpha chain variable domain of TCR clone 331267 (TRAV2, TRAJ13)
CASGGDQKVTF

SEQ ID NO: 662534 - protein, 15 aa, Homo sapiens
  CDR3 for beta chain variable domain of TCR clone 331267 (TRBV11-2, TRBJ2-2)
CASSSDRVNAGELFF

SEQ ID NO: 662535 - protein, 13 aa, Homo sapiens
  CDR3 for alpha chain variable domain of TCR clone 331268 (TRAV12-3, TRAJ7)
CAMTPYRSNRLAF

SEQ ID NO: 662536 - protein, 16 aa, Homo sapiens
  CDR3 for beta chain variable domain of TCR clone 331268 (TRBV20-1, TRBJ1-4)
CSARPYGGELNEKLFF

SEQ ID NO: 662537 - protein, 16 aa, Homo sapiens
  CDR3 for alpha chain variable domain of TCR clone 331269 (TRAV20, TRAJ22)
CAVQASSSGSARQLTF

SEQ ID NO: 662538 - protein, 14 aa, Homo sapiens
  CDR3 for beta chain variable domain of TCR clone 331269 (TRBV12-5, TRBJ2-5)
CASGSRTHQETQYF

SEQ ID NO: 662539 - protein, 12 aa, Homo sapiens
  CDR3 for alpha chain variable domain of TCR clone 331270 (TRAV13-2, TRAJ23)
CGERHRGGKLIF

SEQ ID NO: 662540 - protein, 13 aa, Homo sapiens
  CDR3 for beta chain variable domain of TCR clone 331270 (TRBV7-9, TRBJ2-3)
CASSPGSTDTQYF

SEQ ID NO: 662541 - protein, 15 aa, Homo sapiens
  CDR3 for alpha chain variable domain of TCR clone 331271 (TRAV23/DV6, TRAJ18)
CAARYRGSTLGRLYF

SEQ ID NO: 662542 - protein, 13 aa, Homo sapiens
  CDR3 for beta chain variable domain of TCR clone 331271 (TRBV7-2, TRBJ2-7)
CASSSPSGSEQYY

SEQ ID NO: 662543 - protein, 14 aa, Homo sapiens
  CDR3 for alpha chain variable domain of TCR clone 331272 (TRAV26-1, TRAJ15)
CIEAGNQAGTALIF

SEQ ID NO: 662544 - protein, 15 aa, Homo sapiens
  CDR3 for beta chain variable domain of TCR clone 331272 (TRBV7-6, TRBJ2-7)
CASSLGGAEPYEQYF

SEQ ID NO: 662545 - protein, 14 aa, Homo sapiens
  CDR3 for alpha chain variable domain of TCR clone 331273 (TRAV12-2, TRAJ11)
FAVEGGSGYSTLTF

SEQ ID NO: 662546 - protein, 16 aa, Homo sapiens
  CDR3 for beta chain variable domain of TCR clone 331273 (TRBV6-1, TRBJ1-2)
CASSGAWQGRSHGYTF

SEQ ID NO: 662547 - protein, 15 aa, Homo sapiens
  CDR3 for alpha chain variable domain of TCR clone 331274 (TRAV29/DV5, TRAJ54)
CAASPIIQGAQKLVF

SEQ ID NO: 662548 - protein, 15 aa, Homo sapiens
  CDR3 for beta chain variable domain of TCR clone 331274 (TRBV28, TRBJ2-5)
CASSSGRTIQETQYF

SEQ ID NO: 662549 - protein, 14 aa, Homo sapiens
  CDR3 for alpha chain variable domain of TCR clone 331275 (TRAV13-1, TRAJ35)
CAASKGGFGNVLHC

SEQ ID NO: 662550 - protein, 13 aa, Homo sapiens
  CDR3 for beta chain variable domain of TCR clone 331275 (TRBV7-3, TRBJ1-1)
CASSRKMNTEAFF

SEQ ID NO: 662551 - protein, 14 aa, Homo sapiens
  CDR3 for alpha chain variable domain of TCR clone 331276 (TRAV35, TRAJ22)
CAGLRPGSARQLTF

SEQ ID NO: 662552 - protein, 15 aa, Homo sapiens
  CDR3 for beta chain variable domain of TCR clone 331276 (TRBV11-2, TRBJ2-1)
CAGSKNRGLIYEQFF

SEQ ID NO: 662553 - protein, 15 aa, Homo sapiens
  CDR3 for alpha chain variable domain of TCR clone 331277 (TRAV12-2, TRAJ42)
CAVNSHGGSQGNLIF

SEQ ID NO: 662554 - protein, 13 aa, Homo sapiens
  CDR3 for beta chain variable domain of TCR clone 331277 (TRBV27, TRBJ1-1)
CDSSVSANTEAFF

SEQ ID NO: 662555 - protein, 11 aa, Homo sapiens
  CDR3 for alpha chain variable domain of TCR clone 331278 (TRAV3, TRAJ21)
CAVGNFNKFYF

SEQ ID NO: 662556 - protein, 14 aa, Homo sapiens
  CDR3 for beta chain variable domain of TCR clone 331278 (TRBV25-1, TRBJ1-1)
CASNHLGGNTEAFF

SEQ ID NO: 662557 - protein, 16 aa, Homo sapiens
  CDR3 for alpha chain variable domain of TCR clone 331279 (TRAV8-3, TRAJ13)
CAVGAYPSGGYQKVTF

SEQ ID NO: 662558 - protein, 10 aa, Homo sapiens
  CDR3 for beta chain variable domain of TCR clone 331279 (TRBV20-1, TRBJ2-5)
CSARFKTQYF

SEQ ID NO: 662559 - protein, 12 aa, Homo sapiens
  CDR3 for alpha chain variable domain of TCR clone 331280 (TRAV16, TRAJ12)
CAHGASSYKLIF

SEQ ID NO: 662560 - protein, 12 aa, Homo sapiens
  CDR3 for beta chain variable domain of TCR clone 331280 (TRBV28, TRBJ2-1)
CASSRLVGEQFF

SEQ ID NO: 662561 - protein, 15 aa, Homo sapiens
  CDR3 for alpha chain variable domain of TCR clone 331281 (TRAV35, TRAJ40)
CAGQLGQAGTSKYIF

SEQ ID NO: 662562 - protein, 14 aa, Homo sapiens
  CDR3 for beta chain variable domain of TCR clone 331281 (TRBV7-3, TRBJ2-1)
CASSLTGGANEQFF

SEQ ID NO: 662563 - protein, 19 aa, Homo sapiens
  CDR3 for alpha chain variable domain of TCR clone 331282 (TRAV2, TRAJ20)
ILQVREADAAVYRDCKLSF

SEQ ID NO: 662564 - protein, 16 aa, Homo sapiens
  CDR3 for beta chain variable domain of TCR clone 331282 (TRBV5-1, TRBJ2-5)
CGSSLALLRAGETQYF

SEQ ID NO: 662565 - protein, 14 aa, Homo sapiens
  CDR3 for alpha chain variable domain of TCR clone 331283 (TRAV12-2, TRAJ44)
CAVNPAGTASKLTF

SEQ ID NO: 662566 - protein, 13 aa, Homo sapiens
  CDR3 for beta chain variable domain of TCR clone 331283 (TRBV20-1, TRBJ1-6)
CSAPGGVGSPLHF

SEQ ID NO: 662567 - protein, 12 aa, Homo sapiens
  CDR3 for alpha chain variable domain of TCR clone 331284 (TRAV1-1, TRAJ8)
CAGGTGFQKLVF

SEQ ID NO: 662568 - protein, 12 aa, Homo sapiens
  CDR3 for beta chain variable domain of TCR clone 331284 (TRBV11-2, TRBJ2-2)
CASSLGGEELFF

SEQ ID NO: 662569 - protein, 12 aa, Homo sapiens
  CDR3 for alpha chain variable domain of TCR clone 331285 (TRAV13-1, TRAJ40)
CAAGKGTYKYIF

SEQ ID NO: 662570 - protein, 17 aa, Homo sapiens
  CDR3 for beta chain variable domain of TCR clone 331285 (TRBV28, TRBJ2-5)
CASSTPEGDALQETQYF

SEQ ID NO: 662571 - protein, 14 aa, Homo sapiens
  CDR3 for alpha chain variable domain of TCR clone 331286 (TRAV2, TRAJ37)
CIVDFTSNTGKLIF

SEQ ID NO: 662572 - protein, 15 aa, Homo sapiens
  CDR3 for beta chain variable domain of TCR clone 331286 (TRBV20-1, TRBJ1-1)
CSASRGVTGNTEAFF

SEQ ID NO: 662573 - protein, 16 aa, Homo sapiens
  CDR3 for alpha chain variable domain of TCR clone 331287 (TRAV3, TRAJ10)
CAVRDMRAGGGYKLTF

SEQ ID NO: 662574 - protein, 13 aa, Homo sapiens
  CDR3 for beta chain variable domain of TCR clone 331287 (TRBV6-1, TRBJ1-1)
CASSRQGNTEAFF

SEQ ID NO: 662575 - protein, 14 aa, Homo sapiens
  CDR3 for alpha chain variable domain of TCR clone 331288 (TRAV1-2, TRAJ16)
CAVNRFSDGQKLLF

SEQ ID NO: 662576 - protein, 16 aa, Homo sapiens
  CDR3 for beta chain variable domain of TCR clone 331288 (TRBV11-2, TRBJ1-2)
CASSLDTWGADYGYTF

SEQ ID NO: 662577 - protein, 15 aa, Homo sapiens
  CDR3 for alpha chain variable domain of TCR clone 331289 (TRAV3, TRAJ4)
CAVGDGTGGYNKLIF

SEQ ID NO: 662578 - protein, 15 aa, Homo sapiens
  CDR3 for beta chain variable domain of TCR clone 331289 (TRBV27, TRBJ2-1)
CASSNGGGSSNEQFF

SEQ ID NO: 662579 - protein, 12 aa, Homo sapiens
  CDR3 for alpha chain variable domain of TCR clone 331290 (TRAV12-3, TRAJ17)
CAMTLTGTKLTF

SEQ ID NO: 662580 - protein, 15 aa, Homo sapiens
  CDR3 for beta chain variable domain of TCR clone 331290 (TRBV12-4, TRBJ2-7)
CASSQRTSGNYEQYF

SEQ ID NO: 662581 - protein, 12 aa, Homo sapiens
  CDR3 for alpha chain variable domain of TCR clone 331291 (TRAV3, TRAJ20)
CAVRDGDYKLSF

SEQ ID NO: 662582 - protein, 15 aa, Homo sapiens
  CDR3 for beta chain variable domain of TCR clone 331291 (TRBV5-5, TRBJ1-2)
CISVPAASGGEDYTF

SEQ ID NO: 662583 - protein, 16 aa, Homo sapiens
  CDR3 for alpha chain variable domain of TCR clone 331292 (TRAV4, TRAJ18)
CCVLLIGGSTLGRLYF

SEQ ID NO: 662584 - protein, 16 aa, Homo sapiens
  CDR3 for beta chain variable domain of TCR clone 331292 (TRBV5-1, TRBJ1-1)
CASSSGGNSLNTEAFF

SEQ ID NO: 662585 - protein, 13 aa, Homo sapiens
  CDR3 for alpha chain variable domain of TCR clone 331293 (TRAV35, TRAJ33)
CAGQLYGVYQLIW

SEQ ID NO: 662586 - protein, 14 aa, Homo sapiens
  CDR3 for beta chain variable domain of TCR clone 331293 (TRBV7-2, TRBJ1-1)
CASSLGGAGTEACF

SEQ ID NO: 662587 - protein, 13 aa, Homo sapiens
  CDR3 for alpha chain variable domain of TCR clone 331294 (TRAV2, TRAJ27)
CAVEAPMQANQPL

SEQ ID NO: 662588 - protein, 14 aa, Homo sapiens
  CDR3 for beta chain variable domain of TCR clone 331294 (TRBV19, TRBJ2-1)
CASPTFVLSGEQFF

SEQ ID NO: 662589 - protein, 12 aa, Homo sapiens
  CDR3 for alpha chain variable domain of TCR clone 331295 (TRAV3, TRAJ20)
CAVRDPDYKLSF

SEQ ID NO: 662590 - protein, 15 aa, Homo sapiens
  CDR3 for beta chain variable domain of TCR clone 331295 (TRBV2, TRBJ2-2)
CGSSRETVGTGELFF

SEQ ID NO: 662591 - protein, 12 aa, Homo sapiens
  CDR3 for alpha chain variable domain of TCR clone 331296 (TRAV12-1, TRAJ40)
CVVYSGTYKYIF

SEQ ID NO: 662592 - protein, 10 aa, Homo sapiens
  CDR3 for beta chain variable domain of TCR clone 331296 (TRBV2, TRBJ2-4)
CASRGSIQYF

SEQ ID NO: 662593 - protein, 13 aa, Homo sapiens
  CDR3 for alpha chain variable domain of TCR clone 331297 (TRAV8-4, TRAJ49)
CAVRTLTGNQFYF

SEQ ID NO: 662594 - protein, 14 aa, Homo sapiens
  CDR3 for beta chain variable domain of TCR clone 331297 (TRBV19, TRBJ2-3)
CASSIRLAGDTQYF

SEQ ID NO: 662595 - protein, 11 aa, Homo sapiens
  CDR3 for alpha chain variable domain of TCR clone 331298 (TRAV2, TRAJ21)
CAVFNFNKFYF

SEQ ID NO: 662596 - protein, 19 aa, Homo sapiens
  CDR3 for beta chain variable domain of TCR clone 331298 (TRBV20-1, TRBJ2-1)
CSARGETSGNSPQIDEQFF

SEQ ID NO: 662597 - protein, 14 aa, Homo sapiens
  CDR3 for alpha chain variable domain of TCR clone 331299 (TRAV8-3, TRAJ36)
CAVGPITGANNLFF

SEQ ID NO: 662598 - protein, 14 aa, Homo sapiens
  CDR3 for beta chain variable domain of TCR clone 331299 (TRBV11-1, TRBJ2-7)
CASTFAVPSYEQYF

SEQ ID NO: 662599 - protein, 13 aa, Homo sapiens
  CDR3 for alpha chain variable domain of TCR clone 331300 (TRAV8-3, TRAJ28)
CAVGAVGSYQLNF

SEQ ID NO: 662600 - protein, 15 aa, Homo sapiens
  CDR3 for beta chain variable domain of TCR clone 331300 (TRBV28, TRBJ2-5)
CASSPGQGSIETQYF

SEQ ID NO: 662601 - protein, 13 aa, Homo sapiens
  CDR3 for alpha chain variable domain of TCR clone 331301 (TRAV36/DV7, TRAJ37)
CAVFSSNTGKLIF

SEQ ID NO: 662602 - protein, 17 aa, Homo sapiens
  CDR3 for beta chain variable domain of TCR clone 331301 (TRBV13, TRBJ2-3)
CASSLSRVAGGRNTQYL

SEQ ID NO: 662603 - protein, 17 aa, Homo sapiens
  CDR3 for alpha chain variable domain of TCR clone 331302 (TRAV3, TRAJ6)
CAVRDGPRAGGSYIPTF

SEQ ID NO: 662604 - protein, 15 aa, Homo sapiens
  CDR3 for beta chain variable domain of TCR clone 331302 (TRBV24-1, TRBJ2-5)
CATSDRTSGKETQYF

SEQ ID NO: 662605 - protein, 15 aa, Homo sapiens
  CDR3 for alpha chain variable domain of TCR clone 331303 (TRAV17, TRAJ57)
CASGPSQGGSEKLVF

SEQ ID NO: 662606 - protein, 14 aa, Homo sapiens
  CDR3 for beta chain variable domain of TCR clone 331303 (TRBV12-5, TRBJ2-5)
CASGSRTHQETQYF

SEQ ID NO: 662607 - protein, 12 aa, Homo sapiens
  CDR3 for alpha chain variable domain of TCR clone 331304 (TRAV8-3, TRAJ26)
CAGDNYGQNFVF

SEQ ID NO: 662608 - protein, 15 aa, Homo sapiens
  CDR3 for beta chain variable domain of TCR clone 331304 (TRBV11-2, TRBJ2-1)
CASSLGTSGLNEQFV

SEQ ID NO: 662609 - protein, 23 aa, Homo sapiens
  CDR3 for alpha chain variable domain of TCR clone 331305 (TRAV2, TRAJ26)
GRQMLLFTTVLGPPGDYGQNFVF

SEQ ID NO: 662610 - protein, 13 aa, Homo sapiens
  CDR3 for beta chain variable domain of TCR clone 331305 (TRBV7-9, TRBJ1-2)
CASSLKQNYGYTF

SEQ ID NO: 662611 - protein, 11 aa, Homo sapiens
  CDR3 for alpha chain variable domain of TCR clone 331306 (TRAV2, TRAJ13)
CASGGYQKVTF

SEQ ID NO: 662612 - protein, 14 aa, Homo sapiens
  CDR3 for beta chain variable domain of TCR clone 331306 (TRBV7-8, TRBJ2-3)
CASSSRDSTDTQYF

SEQ ID NO: 662613 - protein, 15 aa, Homo sapiens
  CDR3 for alpha chain variable domain of TCR clone 331307 (TRAV34, TRAJ38)
CGADFTPGNNRKRIG

SEQ ID NO: 662614 - protein, 16 aa, Homo sapiens
  CDR3 for beta chain variable domain of TCR clone 331307 (TRBV12-5, TRBJ2-5)
CASGPRTSGNQETQYF

SEQ ID NO: 662615 - protein, 14 aa, Homo sapiens
  CDR3 for alpha chain variable domain of TCR clone 331308 (TRAV6, TRAJ39)
CALPNNNAGNMLTF

SEQ ID NO: 662616 - protein, 12 aa, Homo sapiens
  CDR3 for beta chain variable domain of TCR clone 331308 (TRBV29-1, TRBJ2-3)
CSVTGGADTQYF

SEQ ID NO: 662617 - protein, 14 aa, Homo sapiens
  CDR3 for alpha chain variable domain of TCR clone 331309 (TRAV8-3, TRAJ36)
CAVGQITGANNLFF

SEQ ID NO: 662618 - protein, 15 aa, Homo sapiens
  CDR3 for beta chain variable domain of TCR clone 331309 (TRBV4-1, TRBJ2-1)
CGSSQDPGNYNEQFF

SEQ ID NO: 662619 - protein, 14 aa, Homo sapiens
  CDR3 for alpha chain variable domain of TCR clone 331310 (TRAV16, TRAJ29)
CALTRNSGNTPLVF

SEQ ID NO: 662620 - protein, 18 aa, Homo sapiens
  CDR3 for beta chain variable domain of TCR clone 331310 (TRBV11-2, TRBJ2-3)
CASSLGGASRGAPNTQYF

SEQ ID NO: 662621 - protein, 13 aa, Homo sapiens
  CDR3 for alpha chain variable domain of TCR clone 331311 (TRAV36/DV7, TRAJ49)
CAGDSNTGNQFYF

SEQ ID NO: 662622 - protein, 16 aa, Homo sapiens
  CDR3 for beta chain variable domain of TCR clone 331311 (TRBV19, TRBJ1-5)
CASSTWTGGGNQPQHF

SEQ ID NO: 662623 - protein, 12 aa, Homo sapiens
  CDR3 for alpha chain variable domain of TCR clone 331312 (TRAV38-1, TRAJ47)
CAFETYGNRLGF

SEQ ID NO: 662624 - protein, 14 aa, Homo sapiens
  CDR3 for beta chain variable domain of TCR clone 331312 (TRBV12-5, TRBJ2-5)
CASGSRTHQETQYF

SEQ ID NO: 662625 - protein, 12 aa, Homo sapiens
  CDR3 for alpha chain variable domain of TCR clone 331313 (TRAV21, TRAJ13)
PVPSGGYQQVTF

SEQ ID NO: 662626 - protein, 15 aa, Homo sapiens
  CDR3 for beta chain variable domain of TCR clone 331313 (TRBV27, TRBJ2-5)
CASSLYPRGGETQYF

SEQ ID NO: 662627 - protein, 12 aa, Homo sapiens
  CDR3 for alpha chain variable domain of TCR clone 331314 (TRAV16, TRAJ56)
CAPTGANSKLTF

SEQ ID NO: 662628 - protein, 17 aa, Homo sapiens
  CDR3 for beta chain variable domain of TCR clone 331314 (TRBV13, TRBJ2-6)
CASSLTGFASGANVLTF

SEQ ID NO: 662629 - protein, 13 aa, Homo sapiens
  CDR3 for alpha chain variable domain of TCR clone 331315 (TRAV13-1, TRAJ9)
CAASGTGCFKTIF

SEQ ID NO: 662630 - protein, 13 aa, Homo sapiens
  CDR3 for beta chain variable domain of TCR clone 331315 (TRBV12-4, TRBJ2-7)
CASSLERVREQYF

SEQ ID NO: 662631 - protein, 14 aa, Homo sapiens
  CDR3 for alpha chain variable domain of TCR clone 331316 (TRAV8-1, TRAJ5)
CAVRTDTGRRALTF

SEQ ID NO: 662632 - protein, 13 aa, Homo sapiens
  CDR3 for beta chain variable domain of TCR clone 331316 (TRBV25-1, TRBJ2-5)
CASSESGRETQYF

SEQ ID NO: 662633 - protein, 14 aa, Homo sapiens
  CDR3 for alpha chain variable domain of TCR clone 331317 (TRAV12-2, TRAJ40)
CAVKIPPGTYKYIF

SEQ ID NO: 662634 - protein, 13 aa, Homo sapiens
  CDR3 for beta chain variable domain of TCR clone 331317 (TRBV20-1, TRBJ1-3)
CSARVQGRDTIYF

SEQ ID NO: 662635 - protein, 13 aa, Homo sapiens
  CDR3 for alpha chain variable domain of TCR clone 331318 (TRAV17, TRAJ9)
CATFLTGGFKTIF

SEQ ID NO: 662636 - protein, 16 aa, Homo sapiens
  CDR3 for beta chain variable domain of TCR clone 331318 (TRBV5-7, TRBJ1-4)
CASSPSGGLKTEKLFV

SEQ ID NO: 662637 - protein, 12 aa, Homo sapiens
  CDR3 for alpha chain variable domain of TCR clone 331319 (TRAV29/DV5, TRAJ49)
CAATDTGNQFYF

SEQ ID NO: 662638 - protein, 14 aa, Homo sapiens
  CDR3 for beta chain variable domain of TCR clone 331319 (TRBV20-1, TRBJ2-7)
CSAPELAGVGEQYF

SEQ ID NO: 662639 - protein, 13 aa, Homo sapiens
  CDR3 for alpha chain variable domain of TCR clone 331320 (TRAV12-2, TRAJ11)
CAVPNSGYSTLTF

SEQ ID NO: 662640 - protein, 13 aa, Homo sapiens
  CDR3 for beta chain variable domain of TCR clone 331320 (TRBV4-1, TRBJ2-2)
CASSQENTGELFF

SEQ ID NO: 662641 - protein, 17 aa, Homo sapiens
  CDR3 for alpha chain variable domain of TCR clone 331321 (TRAV23/DV6, TRAJ58)
CAARLLRGETSGSRLTC

SEQ ID NO: 662642 - protein, 14 aa, Homo sapiens
  CDR3 for beta chain variable domain of TCR clone 331321 (TRBV2, TRBJ2-7)
CASSLTSGGYEQYF

SEQ ID NO: 662643 - protein, 16 aa, Homo sapiens
  CDR3 for alpha chain variable domain of TCR clone 331322 (TRAV3, TRAJ18)
CAVRDGRGSTLGRVYV

SEQ ID NO: 662644 - protein, 17 aa, Homo sapiens
  CDR3 for beta chain variable domain of TCR clone 331322 (TRBV5-1, TRBJ2-3)
CASSKIGLVDRTDTQYF

SEQ ID NO: 662645 - protein, 16 aa, Homo sapiens
  CDR3 for alpha chain variable domain of TCR clone 331323 (TRAV8-6, TRAJ28)
CAVTFKPGAGSYQLTL

SEQ ID NO: 662646 - protein, 18 aa, Homo sapiens
  CDR3 for beta chain variable domain of TCR clone 331323 (TRBV7-4, TRBJ2-7)
CISVPAATGTSGCYEQYF

SEQ ID NO: 662647 - protein, 14 aa, Homo sapiens
  CDR3 for alpha chain variable domain of TCR clone 331324 (TRAV26-1, TRAJ49)
CIVRLTNTGHQFYF

SEQ ID NO: 662648 - protein, 11 aa, Homo sapiens
  CDR3 for beta chain variable domain of TCR clone 331324 (TRBV29-1, TRBJ2-5)
CSEDRTGTQYF

SEQ ID NO: 662649 - protein, 18 aa, Homo sapiens
  CDR3 for alpha chain variable domain of TCR clone 331325 (TRAV12-3, TRAJ52)
CAMSVGGAGGTSYGKLTF

SEQ ID NO: 662650 - protein, 15 aa, Homo sapiens
  CDR3 for beta chain variable domain of TCR clone 331325 (TRBV11-2, TRBJ2-2)
CASRGLAANTGELFF

SEQ ID NO: 662651 - protein, 12 aa, Homo sapiens
  CDR3 for alpha chain variable domain of TCR clone 331326 (TRAV12-2, TRAJ21)
CAVRYNFNKFYF

SEQ ID NO: 662652 - protein, 14 aa, Homo sapiens
  CDR3 for beta chain variable domain of TCR clone 331326 (TRBV28, TRBJ2-1)
CASSYYTAYNEQCF

SEQ ID NO: 662653 - protein, 15 aa, Homo sapiens
  CDR3 for alpha chain variable domain of TCR clone 331327 (TRAV1-2, TRAJ36)
CAASADQTWANNLFF

SEQ ID NO: 662654 - protein, 15 aa, Homo sapiens
  CDR3 for beta chain variable domain of TCR clone 331327 (TRBV5-1, TRBJ2-7)
CASSFSTDSVYEQYF

SEQ ID NO: 662655 - protein, 14 aa, Homo sapiens
  CDR3 for alpha chain variable domain of TCR clone 331328 (TRAV1-2, TRAJ8)
CAVREDTGSQKLVF

SEQ ID NO: 662656 - protein, 13 aa, Homo sapiens
  CDR3 for beta chain variable domain of TCR clone 331328 (TRBV10-3, TRBJ1-2)
CAISERDSYGDTF

SEQ ID NO: 662657 - protein, 12 aa, Homo sapiens
  CDR3 for alpha chain variable domain of TCR clone 331329 (TRAV1-2, TRAJ42)
CVAGGSQGNLIF

SEQ ID NO: 662658 - protein, 13 aa, Homo sapiens
  CDR3 for beta chain variable domain of TCR clone 331329 (TRBV20-1, TRBJ1-6)
CSAPLGVGSPLHF

SEQ ID NO: 662659 - protein, 11 aa, Homo sapiens
  CDR3 for alpha chain variable domain of TCR clone 331330 (TRAV17, TRAJ9)
CGFTGGFKTIF

SEQ ID NO: 662660 - protein, 18 aa, Homo sapiens
  CDR3 for beta chain variable domain of TCR clone 331330 (TRBV12-4, TRBJ2-2)
CASSLVAGTRGWTGELFF

SEQ ID NO: 662661 - protein, 11 aa, Homo sapiens
  CDR3 for alpha chain variable domain of TCR clone 331331 (TRAV21, TRAJ48)
CAVDGNEKLTF

SEQ ID NO: 662662 - protein, 13 aa, Homo sapiens
  CDR3 for beta chain variable domain of TCR clone 331331 (TRBV9, TRBJ2-7)
CASSVAEYYEQYF

SEQ ID NO: 662663 - protein, 16 aa, Homo sapiens
  CDR3 for alpha chain variable domain of TCR clone 331332 (TRAV30, TRAJ57)
CGTGWAPQGGSEKLAF

SEQ ID NO: 662664 - protein, 14 aa, Homo sapiens
  CDR3 for beta chain variable domain of TCR clone 331332 (TRBV18, TRBJ1-1)
CASSPGFQGVEAFF

SEQ ID NO: 662665 - protein, 12 aa, Homo sapiens
  CDR3 for alpha chain variable domain of TCR clone 331333 (TRAV12-2, TRAJ31)
CAVNTPDARLLF

SEQ ID NO: 662666 - protein, 17 aa, Homo sapiens
  CDR3 for beta chain variable domain of TCR clone 331333 (TRBV20-1, TRBJ1-6)
CSARSGYTFSYNSPLHF

SEQ ID NO: 662667 - protein, 15 aa, Homo sapiens
  CDR3 for alpha chain variable domain of TCR clone 331334 (TRAV8-3, TRAJ21)
CAVGALPPRGYKFYF

SEQ ID NO: 662668 - protein, 13 aa, Homo sapiens
  CDR3 for beta chain variable domain of TCR clone 331334 (TRBV27, TRBJ1-1)
CASSLSIGAEAFF

SEQ ID NO: 662669 - protein, 14 aa, Homo sapiens
  CDR3 for alpha chain variable domain of TCR clone 331335 (TRAV17, TRAJ31)
CATVLRNNNARLMF

SEQ ID NO: 662670 - protein, 14 aa, Homo sapiens
  CDR3 for beta chain variable domain of TCR clone 331335 (TRBV7-9, TRBJ2-7)
CASSLGGSSYEQYF

SEQ ID NO: 662671 - protein, 15 aa, Homo sapiens
  CDR3 for alpha chain variable domain of TCR clone 331336 (TRAV38-2/DV8, TRAJ47)
CAYRSAKGYGNKLVF

SEQ ID NO: 662672 - protein, 15 aa, Homo sapiens
  CDR3 for beta chain variable domain of TCR clone 331336 (TRBV20-1, TRBJ2-7)
CSARDRVSGMDEQYF

SEQ ID NO: 662673 - protein, 15 aa, Homo sapiens
  CDR3 for alpha chain variable domain of TCR clone 331337 (TRAV3, TRAJ22)
CAVRDRGGSARQLTF

SEQ ID NO: 662674 - protein, 16 aa, Homo sapiens
  CDR3 for beta chain variable domain of TCR clone 331337 (TRBV7-9, TRBJ2-1)
CASSDVAGGSYNEQFF

SEQ ID NO: 662675 - protein, 15 aa, Homo sapiens
  CDR3 for alpha chain variable domain of TCR clone 331338 (TRAV17, TRAJ37)
CATDGGSSNRGKLIF

SEQ ID NO: 662676 - protein, 15 aa, Homo sapiens
  CDR3 for beta chain variable domain of TCR clone 331338 (TRBV28, TRBJ2-5)
CASSSGRTIQETQYF

SEQ ID NO: 662677 - protein, 14 aa, Homo sapiens
  CDR3 for alpha chain variable domain of TCR clone 331339 (TRAV25, TRAJ35)
CARRMEGIGNVLHC

SEQ ID NO: 662678 - protein, 13 aa, Homo sapiens
  CDR3 for beta chain variable domain of TCR clone 331339 (TRBV7-2, TRBJ1-4)
CASSLAGLEKLFF

SEQ ID NO: 662679 - protein, 13 aa, Homo sapiens
  CDR3 for alpha chain variable domain of TCR clone 331340 (TRAV26-1, TRAJ29)
CIVRRTGNTPLVF

SEQ ID NO: 662680 - protein, 17 aa, Homo sapiens
  CDR3 for beta chain variable domain of TCR clone 331340 (TRBV19, TRBJ1-1)
CASSIAGRGLMNTEAFF

SEQ ID NO: 662681 - protein, 16 aa, Homo sapiens
  CDR3 for alpha chain variable domain of TCR clone 331341 (TRAV13-1, TRAJ48)
CSKYRESNFGNEKLTF

SEQ ID NO: 662682 - protein, 17 aa, Homo sapiens
  CDR3 for beta chain variable domain of TCR clone 331341 (TRBV28, TRBJ2-1)
CASSSARQARTYNEQFF

SEQ ID NO: 662683 - protein, 15 aa, Homo sapiens
  CDR3 for alpha chain variable domain of TCR clone 331342 (TRAV4, TRAJ39)
CLVGPNNNAGNMLTF

SEQ ID NO: 662684 - protein, 14 aa, Homo sapiens
  CDR3 for beta chain variable domain of TCR clone 331342 (TRBV19, TRBJ2-7)
CASSIEASSYEQYF

SEQ ID NO: 662685 - protein, 16 aa, Homo sapiens
  CDR3 for alpha chain variable domain of TCR clone 331343 (TRAV26-1, TRAJ23)
CIVRPRFYNQGGKLIF

SEQ ID NO: 662686 - protein, 16 aa, Homo sapiens
  CDR3 for beta chain variable domain of TCR clone 331343 (TRBV7-2, TRBJ2-3)
CASSLVALYSTDTQYF

SEQ ID NO: 662687 - protein, 14 aa, Homo sapiens
  CDR3 for alpha chain variable domain of TCR clone 331344 (TRAV8-4, TRAJ8)
CAVSEDTGFQKLVF

SEQ ID NO: 662688 - protein, 13 aa, Homo sapiens
  CDR3 for beta chain variable domain of TCR clone 331344 (TRBV10-3, TRBJ2-7)
CASKLAVNYEQYF

SEQ ID NO: 662689 - protein, 12 aa, Homo sapiens
  CDR3 for alpha chain variable domain of TCR clone 331345 (TRAV12-1, TRAJ17)
CAMKLTGNKLTF

SEQ ID NO: 662690 - protein, 14 aa, Homo sapiens
  CDR3 for beta chain variable domain of TCR clone 331345 (TRBV28, TRBJ2-1)
CASSPSTGYNEQFF

SEQ ID NO: 662691 - protein, 12 aa, Homo sapiens
  CDR3 for alpha chain variable domain of TCR clone 331346 (TRAV1-2, TRAJ33)
CAALNSNYQLIW

SEQ ID NO: 662692 - protein, 14 aa, Homo sapiens
  CDR3 for beta chain variable domain of TCR clone 331346 (TRBV20-1, TRBJ2-1)
CSAQIGGSANEQFF

SEQ ID NO: 662693 - protein, 15 aa, Homo sapiens
  CDR3 for alpha chain variable domain of TCR clone 331347 (TRAV17, TRAJ28)
CATVDSGAGSYQLTF

SEQ ID NO: 662694 - protein, 13 aa, Homo sapiens
  CDR3 for beta chain variable domain of TCR clone 331347 (TRBV5-4, TRBJ2-5)
CASSRQEGEAQYF

SEQ ID NO: 662695 - protein, 16 aa, Homo sapiens
  CDR3 for alpha chain variable domain of TCR clone 331348 (TRAV30, TRAJ24)
CGTEIVDADSWGKFQF

SEQ ID NO: 662696 - protein, 13 aa, Homo sapiens
  CDR3 for beta chain variable domain of TCR clone 331348 (TRBV7-2, TRAJ42)
CASSLAGLEKLFF

SEQ ID NO: 662697 - protein, 13 aa, Homo sapiens
  CDR3 for alpha chain variable domain of TCR clone 331349 (TRAV1-1, TRAJ9)
CAAKNTGGFKTIF

SEQ ID NO: 662698 - protein, 14 aa, Homo sapiens
  CDR3 for beta chain variable domain of TCR clone 331349 (TRBV12-5, TRBJ2-5)
CASGSRTHQEIQYF

SEQ ID NO: 662699 - protein, 12 aa, Homo sapiens
  CDR3 for alpha chain variable domain of TCR clone 331350 (TRAV29/DV5, TRAJ15)
CASNQTGTALIF

SEQ ID NO: 662700 - protein, 15 aa, Homo sapiens
  CDR3 for beta chain variable domain of TCR clone 331350 (TRBV11-2, TRBJ2-2)
CASSSDRVNAGELFF

SEQ ID NO: 662701 - protein, 11 aa, Homo sapiens
  CDR3 for alpha chain variable domain of TCR clone 331351 (TRAV17, TRAJ36)
CAATGANNLFF

SEQ ID NO: 662702 - protein, 12 aa, Homo sapiens
  CDR3 for beta chain variable domain of TCR clone 331351 (TRBV29-1, TRBJ2-3)
CSVTGGADTQYF

SEQ ID NO: 662703 - protein, 14 aa, Homo sapiens
  CDR3 for alpha chain variable domain of TCR clone 331352 (TRAV20, TRAJ29)
CAVQAWVGHTPLVF

SEQ ID NO: 662704 - protein, 15 aa, Homo sapiens
  CDR3 for beta chain variable domain of TCR clone 331352 (TRBV29-1, TRBJ2-7)
CSVEFFDRGSYEQYF

SEQ ID NO: 662705 - protein, 17 aa, Homo sapiens
  CDR3 for alpha chain variable domain of TCR clone 331353 (TRAV3, TRAJ6)
CAVRDGPRAGGSCIPTF

SEQ ID NO: 662706 - protein, 15 aa, Homo sapiens
  CDR3 for beta chain variable domain of TCR clone 331353 (TRBV7-6, TRBJ2-3)
CASSPIIYSTDTQYF

SEQ ID NO: 662707 - protein, 14 aa, Homo sapiens
  CDR3 for alpha chain variable domain of TCR clone 331354 (TRAV12-3, TRAJ9)
CGMSPNTGGFKTIF

SEQ ID NO: 662708 - protein, 12 aa, Homo sapiens
  CDR3 for beta chain variable domain of TCR clone 331354 (TRBV11-2, TRBJ2-2)
CASSLGGGELFF

SEQ ID NO: 662709 - protein, 14 aa, Homo sapiens
  CDR3 for alpha chain variable domain of TCR clone 331355 (TRAV1-2, TRAJ16)
CAVNRFSDGQKLLF

SEQ ID NO: 662710 - protein, 14 aa, Homo sapiens
  CDR3 for beta chain variable domain of TCR clone 331355 (TRBV7-9, TRBJ1-6)
CSSSPGRGNSPLHF

SEQ ID NO: 662711 - protein, 15 aa, Homo sapiens
  CDR3 for alpha chain variable domain of TCR clone 331356 (TRAV21, TRAJ53)
CATLNSGGSNYKLTF

SEQ ID NO: 662712 - protein, 16 aa, Homo sapiens
  CDR3 for beta chain variable domain of TCR clone 331356 (TRBV19, TRBJ1-5)
CASSIDRGGPRQPQHF

SEQ ID NO: 662713 - protein, 16 aa, Homo sapiens
  CDR3 for alpha chain variable domain of TCR clone 331357 (TRAV17, TRAJ36)
CATVSLNWGKQPLLWD

SEQ ID NO: 662714 - protein, 16 aa, Homo sapiens
  CDR3 for beta chain variable domain of TCR clone 331357 (TRBV7-9, TRBJ1-2)
CASSLGFSSGEDGYTF

SEQ ID NO: 662715 - protein, 14 aa, Homo sapiens
  CDR3 for alpha chain variable domain of TCR clone 331358 (TRAV12-3, TRAJ10)
SHLPLTGGGNKLTF

SEQ ID NO: 662716 - protein, 13 aa, Homo sapiens
  CDR3 for beta chain variable domain of TCR clone 331358 (TRBV13, TRBJ2-1)
CASIVGGRGEQFF

SEQ ID NO: 662717 - protein, 16 aa, Homo sapiens
  CDR3 for alpha chain variable domain of TCR clone 331359 (TRAV8-3, TRAJ8)
CAVPRDGNPGFQKLVF

SEQ ID NO: 662718 - protein, 14 aa, Homo sapiens
  CDR3 for beta chain variable domain of TCR clone 331359 (TRBV28, TRBJ1-1)
CASSESGRGTEAFF

SEQ ID NO: 662719 - protein, 13 aa, Homo sapiens
  CDR3 for alpha chain variable domain of TCR clone 331360 (TRAV21, TRAJ27)
CAARPGNAAKSTF

SEQ ID NO: 662720 - protein, 14 aa, Homo sapiens
  CDR3 for beta chain variable domain of TCR clone 331360 (TRBV20-1, TRBJ2-1)
CSAAGSGEYNEQFF

SEQ ID NO: 662721 - protein, 15 aa, Homo sapiens
  CDR3 for alpha chain variable domain of TCR clone 331361 (TRAV17, TRAJ57)
CATGPSQGGSENLVF

SEQ ID NO: 662722 - protein, 17 aa, Homo sapiens
  CDR3 for beta chain variable domain of TCR clone 331361 (TRBV20-1, TRBJ2-1)
CSASSSGLAGSYNEQFF

SEQ ID NO: 662723 - protein, 18 aa, Homo sapiens
  CDR3 for alpha chain variable domain of TCR clone 331362 (TRAV13-1, TRAJ52)
CAAKNPNAGGTSYGKLTF

SEQ ID NO: 662724 - protein, 14 aa, Homo sapiens
  CDR3 for beta chain variable domain of TCR clone 331362 (TRBV7-3, TRBJ2-1)
CASSLTGGANEQFF

SEQ ID NO: 662725 - protein, 14 aa, Homo sapiens
  CDR3 for alpha chain variable domain of TCR clone 331363 (TRAV2, TRAJ9)
CAVEDRSGGFKTIF

SEQ ID NO: 662726 - protein, 14 aa, Homo sapiens
  CDR3 for beta chain variable domain of TCR clone 331363 (TRBV7-2, TRBJ1-6)
CASSLQGANSPLHF

SEQ ID NO: 662727 - protein, 12 aa, Homo sapiens
  CDR3 for alpha chain variable domain of TCR clone 331364 (TRAV12-3, TRAJ17)
CAMTLTGNKLTF

SEQ ID NO: 662728 - protein, 16 aa, Homo sapiens
  CDR3 for beta chain variable domain of TCR clone 331364 (TRBV7-3, TRBJ2-1)
CASSLSSGGGAKEQFF

SEQ ID NO: 662729 - protein, 16 aa, Homo sapiens
  CDR3 for alpha chain variable domain of TCR clone 331365 (TRAV8-3, TRAJ42)
CAVGEGNGGSQGNLIF

SEQ ID NO: 662730 - protein, 17 aa, Homo sapiens
  CDR3 for beta chain variable domain of TCR clone 331365 (TRBV7-9, TRBJ1-4)
CASSARTGGNEKLFLAV

SEQ ID NO: 662731 - protein, 12 aa, Homo sapiens
  CDR3 for alpha chain variable domain of TCR clone 331366 (TRAV8-3, TRAJ20)
CAVGGGDYKLSF

SEQ ID NO: 662732 - protein, 18 aa, Homo sapiens
  CDR3 for beta chain variable domain of TCR clone 331366 (TRBV7-3, TRBJ2-1)
CASSLTLASGRAMVSSSS

SEQ ID NO: 662733 - protein, 14 aa, Homo sapiens
  CDR3 for alpha chain variable domain of TCR clone 331367 (TRAV1-2, TRAJ16)
CAVNRFSDGQKLLF

SEQ ID NO: 662734 - protein, 12 aa, Homo sapiens
  CDR3 for beta chain variable domain of TCR clone 331367 (TRBV7-8, TRBJ2-7)
CASRLGDREQYF

SEQ ID NO: 662735 - protein, 15 aa, Homo sapiens
  CDR3 for alpha chain variable domain of TCR clone 331368 (TRAV29/DV5, TRAJ42)
CAAKTDGGSQGNLIF

SEQ ID NO: 662736 - protein, 12 aa, Homo sapiens
  CDR3 for beta chain variable domain of TCR clone 331368 (TRBV11-2, TRBJ2-2)
CASSLGGGELFF

SEQ ID NO: 662737 - protein, 11 aa, Homo sapiens
  CDR3 for alpha chain variable domain of TCR clone 331369 (TRAV3, TRAJ21)
CAVGNFTKFYF

SEQ ID NO: 662738 - protein, 15 aa, Homo sapiens
  CDR3 for beta chain variable domain of TCR clone 331369 (TRBV5-1, TRBJ2-1)
CASSLVANSYNEQFF

SEQ ID NO: 662739 - protein, 13 aa, Homo sapiens
  CDR3 for alpha chain variable domain of TCR clone 331370 (TRAV3, TRAJ27)
CAVRPLGAGKSTF

SEQ ID NO: 662740 - protein, 16 aa, Homo sapiens
  CDR3 for beta chain variable domain of TCR clone 331370 (TRBV11-3, TRBJ2-5)
CASSSVVAGYTETQYF

SEQ ID NO: 662741 - protein, 15 aa, Homo sapiens
  CDR3 for alpha chain variable domain of TCR clone 331371 (TRAV12-2, TRAJ53)
CAVNGGGGSNYKLTF

SEQ ID NO: 662742 - protein, 15 aa, Homo sapiens
  CDR3 for beta chain variable domain of TCR clone 331371 (TRBV11-3, TRBJ2-3)
CASLKDGREGDTQYY

SEQ ID NO: 662743 - protein, 14 aa, Homo sapiens
  CDR3 for alpha chain variable domain of TCR clone 331372 (TRAV8-2, TRAJ37)
CVVSISGNTGKLIF

SEQ ID NO: 662744 - protein, 14 aa, Homo sapiens
  CDR3 for beta chain variable domain of TCR clone 331372 (TRBV18, TRBJ2-5)
CASSPGVSQETQYF

SEQ ID NO: 662745 - protein, 12 aa, Homo sapiens
  CDR3 for alpha chain variable domain of TCR clone 331373 (TRAV38-1, TRAJ47)
CAFETYRNKLVF

SEQ ID NO: 662746 - protein, 15 aa, Homo sapiens
  CDR3 for beta chain variable domain of TCR clone 331373 (TRBV20-1, TRBJ2-7)
CSARKGLAESYEQYF

SEQ ID NO: 662747 - protein, 15 aa, Homo sapiens
  CDR3 for alpha chain variable domain of TCR clone 331374 (TRAV27, TRAJ56)
CAVRDGPGANSKLTF

SEQ ID NO: 662748 - protein, 14 aa, Homo sapiens
  CDR3 for beta chain variable domain of TCR clone 331374 (TRBV18, TRBJ2-7)
CANSPRGVAYEQYF

SEQ ID NO: 662749 - protein, 15 aa, Homo sapiens
  CDR3 for alpha chain variable domain of TCR clone 331375 (TRAV26-1, TRAJ40)
CIVRVTTSGTYKYIF

SEQ ID NO: 662750 - protein, 14 aa, Homo sapiens
  CDR3 for beta chain variable domain of TCR clone 331375 (TRBV6-3, TRBJ2-5)
CASRRDGGEETQYF

SEQ ID NO: 662751 - protein, 14 aa, Homo sapiens
  CDR3 for alpha chain variable domain of TCR clone 331376 (TRAV12-2, TRAJ13)
CAVKKTGGYQKVTF

SEQ ID NO: 662752 - protein, 14 aa, Homo sapiens
  CDR3 for beta chain variable domain of TCR clone 331376 (TRBV19, TRBJ1-5)
CASSLGPGGEPQHF

SEQ ID NO: 662753 - protein, 14 aa, Homo sapiens
  CDR3 for alpha chain variable domain of TCR clone 331377 (TRAV13-1, TRAJ35)
CAASKGGFGNALHC

SEQ ID NO: 662754 - protein, 14 aa, Homo sapiens
  CDR3 for beta chain variable domain of TCR clone 331377 (TRBV7-2, TRBJ2-7)
CASSPKTSFYEQYF

SEQ ID NO: 662755 - protein, 15 aa, Homo sapiens
  CDR3 for alpha chain variable domain of TCR clone 331378 (TRAV21, TRAJ45)
CAVSYSGGGADGLTF

SEQ ID NO: 662756 - protein, 14 aa, Homo sapiens
  CDR3 for beta chain variable domain of TCR clone 331378 (TRBV20-1, TRBJ1-3)
CSASPTGAGNTIYF

SEQ ID NO: 662757 - protein, 14 aa, Homo sapiens
  CDR3 for alpha chain variable domain of TCR clone 331379 (TRAV38-1, TRAJ40)
CALRPTSGTYKYIF

SEQ ID NO: 662758 - protein, 13 aa, Homo sapiens
  CDR3 for beta chain variable domain of TCR clone 331379 (TRBV20-1, TRBJ1-1)
CSPRGGGNTEAFF

SEQ ID NO: 662759 - protein, 15 aa, Homo sapiens
  CDR3 for alpha chain variable domain of TCR clone 331380 (TRAV27, TRAJ53)
CRAINSGGSNYKLTF

SEQ ID NO: 662760 - protein, 17 aa, Homo sapiens
  CDR3 for beta chain variable domain of TCR clone 331380 (TRBV7-3, TRBJ2-2)
CASSLSGTSGGTGELFF

SEQ ID NO: 662761 - protein, 13 aa, Homo sapiens
  CDR3 for alpha chain variable domain of TCR clone 331381 (TRAV12-3, TRAJ43)
CAMIRPNNNDMRF

SEQ ID NO: 662762 - protein, 15 aa, Homo sapiens
  CDR3 for beta chain variable domain of TCR clone 331381 (TRBV29-1, TRBJ2-1)
CSGRDRKSSYNEQFF

SEQ ID NO: 662763 - protein, 15 aa, Homo sapiens
  CDR3 for alpha chain variable domain of TCR clone 331382 (TRAV3, TRAJ32)
CAVSSYGGATNKLIF

SEQ ID NO: 662764 - protein, 13 aa, Homo sapiens
  CDR3 for beta chain variable domain of TCR clone 331382 (TRBV15, TRBJ1-6)
CATSGALNSPLHF

SEQ ID NO: 662765 - protein, 21 aa, Homo sapiens
  CDR3 for alpha chain variable domain of TCR clone 331383 (TRAV3, TRAJ17)
CSVRARRGGRSCRQQANFWRR

SEQ ID NO: 662766 - protein, 14 aa, Homo sapiens
  CDR3 for beta chain variable domain of TCR clone 331383 (TRBV4-1, TRBJ2-2)
CASSQAVNTGELFF

SEQ ID NO: 662767 - protein, 15 aa, Homo sapiens
  CDR3 for alpha chain variable domain of TCR clone 331384 (TRAV38-1, TRAJ37)
CAFIFGSGNTGKLIF

SEQ ID NO: 662768 - protein, 15 aa, Homo sapiens
  CDR3 for beta chain variable domain of TCR clone 331384 (TRBV19, TRBJ1-1)
CASSIRRQMNTEAFF

SEQ ID NO: 662769 - protein, 15 aa, Homo sapiens
  CDR3 for alpha chain variable domain of TCR clone 331385 (TRAV29/DV5, TRAJ48)
CAAKISNFGHEKLTF

SEQ ID NO: 662770 - protein, 15 aa, Homo sapiens
  CDR3 for beta chain variable domain of TCR clone 331385 (TRBV7-8, TRBJ2-1)
CASSPSGTIYNEQFF

SEQ ID NO: 662771 - protein, 15 aa, Homo sapiens
  CDR3 for alpha chain variable domain of TCR clone 331386 (TRAV20, TRAJ53)
CAVQASGGRNYKLTF

SEQ ID NO: 662772 - protein, 12 aa, Homo sapiens
  CDR3 for beta chain variable domain of TCR clone 331386 (TRBV7-2, TRBJ2-1)
CASSPQDIEQFF

SEQ ID NO: 662773 - protein, 16 aa, Homo sapiens
  CDR3 for alpha chain variable domain of TCR clone 331387 (TRAV26-1, TRAJ45)
RIVEKYSGGGADGLTF

SEQ ID NO: 662774 - protein, 16 aa, Homo sapiens
  CDR3 for beta chain variable domain of TCR clone 331387 (TRBV10-3, TRBJ1-6)
CAISERRGQGNSPLHF

SEQ ID NO: 662775 - protein, 13 aa, Homo sapiens
  CDR3 for alpha chain variable domain of TCR clone 331388 (TRAV8-3, TRAJ36)
CAVGATGAKNLFF

SEQ ID NO: 662776 - protein, 17 aa, Homo sapiens
  CDR3 for beta chain variable domain of TCR clone 331388 (TRBV4-2, TRBJ1-1)
CASTQFGGGSGNTEAFF

SEQ ID NO: 662777 - protein, 15 aa, Homo sapiens
  CDR3 for alpha chain variable domain of TCR clone 331389 (TRAV17, TRAJ57)
CATGPSQGGSKKLVF

SEQ ID NO: 662778 - protein, 16 aa, Homo sapiens
  CDR3 for beta chain variable domain of TCR clone 331389 (TRBV12-4, TRBJ1-5)
CASSRPVGGSDQPQHF

SEQ ID NO: 662779 - protein, 16 aa, Homo sapiens
  CDR3 for alpha chain variable domain of TCR clone 331390 (TRAV35, TRAJ28)
CAGQRYSGAGSYQLTF

SEQ ID NO: 662780 - protein, 14 aa, Homo sapiens
  CDR3 for beta chain variable domain of TCR clone 331390 (TRBV7-3, TRBJ1-1)
CASSLKGGNTEAFF

SEQ ID NO: 662781 - protein, 14 aa, Homo sapiens
  CDR3 for alpha chain variable domain of TCR clone 331391 (TRAV9-2, TRAJ39)
CALYIYNAGNMLTF

SEQ ID NO: 662782 - protein, 12 aa, Homo sapiens
  CDR3 for beta chain variable domain of TCR clone 331391 (TRBV5-8, TRBJ2-1)
CASRPGPLAQFF

SEQ ID NO: 662783 - protein, 13 aa, Homo sapiens
  CDR3 for alpha chain variable domain of TCR clone 331392 (TRAV21, TRAJ56)
WAVRTGANSKLTF

SEQ ID NO: 662784 - protein, 15 aa, Homo sapiens
  CDR3 for beta chain variable domain of TCR clone 331392 (TRBV7-9, TRBJ1-1)
CASSHRGTVNTEAFF

SEQ ID NO: 662785 - protein, 12 aa, Homo sapiens
  CDR3 for alpha chain variable domain of TCR clone 331393 (TRAV21, TRAJ11)
CAATSGYSALTF

SEQ ID NO: 662786 - protein, 14 aa, Homo sapiens
  CDR3 for beta chain variable domain of TCR clone 331393 (TRBV20-1, TRBJ2-7)
CSGPELAGVGEQYF

SEQ ID NO: 662787 - protein, 12 aa, Homo sapiens
  CDR3 for alpha chain variable domain of TCR clone 331394 (TRAV12-1, TRAJ40)
CVFYSGTYKYIF

SEQ ID NO: 662788 - protein, 18 aa, Homo sapiens
  CDR3 for beta chain variable domain of TCR clone 331394 (TRBV12-4, TRBJ2-2)
CASSMVAGTRGRTGELFF

SEQ ID NO: 662789 - protein, 14 aa, Homo sapiens
  CDR3 for alpha chain variable domain of TCR clone 331395 (TRAV8-3, TRAJ4)
CAVGAAGGYNKLIF

SEQ ID NO: 662790 - protein, 15 aa, Homo sapiens
  CDR3 for beta chain variable domain of TCR clone 331395 (TRBV10-3, TRBJ1-3)
CAISDSQGAGNTIYF

SEQ ID NO: 662791 - protein, 17 aa, Homo sapiens
  CDR3 for alpha chain variable domain of TCR clone 331396 (TRAV21, TRAJ52)
CDVGTNAGGTSYGKLTF

SEQ ID NO: 662792 - protein, 15 aa, Homo sapiens
  CDR3 for beta chain variable domain of TCR clone 331396 (TRBV6-3, TRBJ2-7)
CASSSPGTVFYEQYF

SEQ ID NO: 662793 - protein, 12 aa, Homo sapiens
  CDR3 for alpha chain variable domain of TCR clone 331397 (TRAV3, TRAJ43)
CAVRDPNNDIRF

SEQ ID NO: 662794 - protein, 14 aa, Homo sapiens
  CDR3 for beta chain variable domain of TCR clone 331397 (TRBV19, TRBJ2-5)
CASSMTGQQETQYF

SEQ ID NO: 662795 - protein, 15 aa, Homo sapiens
  CDR3 for alpha chain variable domain of TCR clone 331398 (TRAV17, TRAJ16)
CATALRCSDGQKLLF

SEQ ID NO: 662796 - protein, 15 aa, Homo sapiens
  CDR3 for beta chain variable domain of TCR clone 331398 (TRBV20-1, TRBJ1-1)
CSASRGVTGNTEAFS

SEQ ID NO: 662797 - protein, 14 aa, Homo sapiens
  CDR3 for alpha chain variable domain of TCR clone 331399 (TRAV12-1, TRAJ13)
CVVIDSGGCQKVTF

SEQ ID NO: 662798 - protein, 12 aa, Homo sapiens
  CDR3 for beta chain variable domain of TCR clone 331399 (TRBV11-2, TRBJ2-2)
CASSLGGGELFF

SEQ ID NO: 662799 - protein, 13 aa, Homo sapiens
  CDR3 for alpha chain variable domain of TCR clone 331400 (TRAV27, TRAJ45)
CRGGGGGADGLPF

SEQ ID NO: 662800 - protein, 13 aa, Homo sapiens
  CDR3 for beta chain variable domain of TCR clone 331400 (TRBV20-1, TRBJ1-1)
CSAPEGGNNEAFF

SEQ ID NO: 662801 - protein, 11 aa, Homo sapiens
  CDR3 for alpha chain variable domain of TCR clone 331401 (TRAV12-2, TRAJ49)
CALQGGNQFYF

SEQ ID NO: 662802 - protein, 14 aa, Homo sapiens
  CDR3 for beta chain variable domain of TCR clone 331401 (TRBV7-2, TRBJ2-7)
CASSPKTSCYEQYF

SEQ ID NO: 662803 - protein, 16 aa, Homo sapiens
  CDR3 for alpha chain variable domain of TCR clone 331402 (TRAV30, TRAJ24)
CGTEIVDADSWGKFQF

SEQ ID NO: 662804 - protein, 15 aa, Homo sapiens
  CDR3 for beta chain variable domain of TCR clone 331402 (TRBV28, TRBJ2-1)
CASSIMAGGRSEQLF

SEQ ID NO: 662805 - protein, 13 aa, Homo sapiens
  CDR3 for alpha chain variable domain of TCR clone 331403 (TRAV35, TRAJ21)
CAGQLSNFNKFYF

SEQ ID NO: 662806 - protein, 14 aa, Homo sapiens
  CDR3 for beta chain variable domain of TCR clone 331403 (TRBV20-1, TRBJ1-1)
CSAQTRIGGTEAFF

SEQ ID NO: 662807 - protein, 12 aa, Homo sapiens
  CDR3 for alpha chain variable domain of TCR clone 331404 (TRAV3, TRAJ15)
CCERQAGTALIF

SEQ ID NO: 662808 - protein, 15 aa, Homo sapiens
  CDR3 for beta chain variable domain of TCR clone 331404 (TRBV11-1, TRBJ2-7)
CASSLNYGASYEQYF

SEQ ID NO: 662809 - protein, 20 aa, Homo sapiens
  CDR3 for alpha chain variable domain of TCR clone 331405 (TRAV12-1, TRAJ42)
SSVIQPPTSVKGGSQGNLIF

SEQ ID NO: 662810 - protein, 17 aa, Homo sapiens
  CDR3 for beta chain variable domain of TCR clone 331405 (TRBV11-2, TRBJ2-3)
CQQLGGASRGAPNTQYF

SEQ ID NO: 662811 - protein, 16 aa, Homo sapiens
  CDR3 for alpha chain variable domain of TCR clone 331406 (TRAV38-1, TRAJ56)
CAFMKRQTGANSKLTF

SEQ ID NO: 662812 - protein, 16 aa, Homo sapiens
  CDR3 for beta chain variable domain of TCR clone 331406 (TRBV19, TRBJ2-2)
CASRSPGTGATGELFF

SEQ ID NO: 662813 - protein, 13 aa, Homo sapiens
  CDR3 for alpha chain variable domain of TCR clone 331407 (TRAV2, TRAJ40)
CAVVTSGTYKYIF

SEQ ID NO: 662814 - protein, 13 aa, Homo sapiens
  CDR3 for beta chain variable domain of TCR clone 331407 (TRBV5-8, TRBJ1-1)
CASSRRGGGEAFF

SEQ ID NO: 662815 - protein, 14 aa, Homo sapiens
  CDR3 for alpha chain variable domain of TCR clone 331408 (TRAV1-2, TRAJ16)
CAVNRFSDGQKLLF

SEQ ID NO: 662816 - protein, 15 aa, Homo sapiens
  CDR3 for beta chain variable domain of TCR clone 331408 (TRBV28, TRBJ1-3)
CASGATGNSGNTIYV

SEQ ID NO: 662817 - protein, 14 aa, Homo sapiens
  CDR3 for alpha chain variable domain of TCR clone 331409 (TRAV13-2, TRAJ4)
CAEKGPEGYNKLIF

SEQ ID NO: 662818 - protein, 13 aa, Homo sapiens
  CDR3 for beta chain variable domain of TCR clone 331409 (TRBV18, TRBJ2-5)
CAGSPPGKETQYF

SEQ ID NO: 662819 - protein, 15 aa, Homo sapiens
  CDR3 for alpha chain variable domain of TCR clone 331410 (TRAV23/DV6, TRAJ17)
CARGSCRQQANCWRR

SEQ ID NO: 662820 - protein, 14 aa, Homo sapiens
  CDR3 for beta chain variable domain of TCR clone 331410 (TRBV7-2, TRBJ1-2)
CASSQTGSTYGYTF

SEQ ID NO: 662821 - protein, 14 aa, Homo sapiens
  CDR3 for alpha chain variable domain of TCR clone 331411 (TRAV12-2, TRAJ13)
RAVKKTGGYQKVTF

SEQ ID NO: 662822 - protein, 15 aa, Homo sapiens
  CDR3 for beta chain variable domain of TCR clone 331411 (TRBV7-2, TRBJ2-2)
CASRRPGQNTGELFF

SEQ ID NO: 662823 - protein, 18 aa, Homo sapiens
  CDR3 for alpha chain variable domain of TCR clone 331412 (TRAV29/DV5, TRAJ52)
CAAGFRGAGGTSYGKLTF

SEQ ID NO: 662824 - protein, 15 aa, Homo sapiens
  CDR3 for beta chain variable domain of TCR clone 331412 (TRBV4-1, TRBJ2-5)
CASSQWDLYQETQYF

SEQ ID NO: 662825 - protein, 12 aa, Homo sapiens
  CDR3 for alpha chain variable domain of TCR clone 331413 (TRAV36/DV7, TRAJ40)
CAVGTGTYKYIF

SEQ ID NO: 662826 - protein, 16 aa, Homo sapiens
  CDR3 for beta chain variable domain of TCR clone 331413 (TRBV6-1, TRBJ2-2)
CASSAFRGGDTGELFF

SEQ ID NO: 662827 - protein, 10 aa, Homo sapiens
  CDR3 for alpha chain variable domain of TCR clone 331414 (TRAV5, TRAJ34)
CAEDTDKPIF

SEQ ID NO: 662828 - protein, 12 aa, Homo sapiens
  CDR3 for beta chain variable domain of TCR clone 331414 (TRBV11-3, TRBJ2-2)
CASSLGGGELFF

SEQ ID NO: 662829 - protein, 16 aa, Homo sapiens
  CDR3 for alpha chain variable domain of TCR clone 331415 (TRAV12-3, TRAJ50)
CAMRDPMKTSYVKVIF

SEQ ID NO: 662830 - protein, 13 aa, Homo sapiens
  CDR3 for beta chain variable domain of TCR clone 331415 (TRBV4-1, TRBJ2-3)
CASSLDFTDTQYF

SEQ ID NO: 662831 - protein, 16 aa, Homo sapiens
  CDR3 for alpha chain variable domain of TCR clone 331416 (TRAV30, TRAJ24)
CGTEIVDADSWGKFQF

SEQ ID NO: 662832 - protein, 15 aa, Homo sapiens
  CDR3 for beta chain variable domain of TCR clone 331416 (TRBV7-3, TRBJ2-7)
CASSVRLAGSYEKYF

SEQ ID NO: 662833 - protein, 12 aa, Homo sapiens
  CDR3 for alpha chain variable domain of TCR clone 331417 (TRAV6, TRAJ34)
CALHRGPDKLIF

SEQ ID NO: 662834 - protein, 11 aa, Homo sapiens
  CDR3 for beta chain variable domain of TCR clone 331417 (TRBV12-4, TRBJ2-2)
CASSSAGELFF

SEQ ID NO: 662835 - protein, 19 aa, Homo sapiens
  CDR3 for alpha chain variable domain of TCR clone 331418 (TRAV4, TRAJ13)
CLVGVQGSSGGYRKLPLEL

SEQ ID NO: 662836 - protein, 18 aa, Homo sapiens
  CDR3 for beta chain variable domain of TCR clone 331418 (TRBV15, TRBJ2-3)
CATSRDGARSWDTDTQYF

SEQ ID NO: 662837 - protein, 12 aa, Homo sapiens
  CDR3 for alpha chain variable domain of TCR clone 331419 (TRAV12-1, TRAJ40)
CVVYSGTYKYIF

SEQ ID NO: 662838 - protein, 14 aa, Homo sapiens
  CDR3 for beta chain variable domain of TCR clone 331419 (TRBV20-1, TRBJ2-3)
CSARGGTSTDTQYV

SEQ ID NO: 662839 - protein, 12 aa, Homo sapiens
  CDR3 for alpha chain variable domain of TCR clone 331420 (TRAV12-3, TRAJ17)
CAMTLTGNKLTF

SEQ ID NO: 662840 - protein, 15 aa, Homo sapiens
  CDR3 for beta chain variable domain of TCR clone 331420 (TRBV12-4, TRBJ2-5)
CASNTLAGYQETQYF

SEQ ID NO: 662841 - protein, 12 aa, Homo sapiens
  CDR3 for alpha chain variable domain of TCR clone 331421 (TRAV17, TRAJ20)
CAALSNDYKLSF

SEQ ID NO: 662842 - protein, 18 aa, Homo sapiens
  CDR3 for beta chain variable domain of TCR clone 331421 (TRBV28, TRBJ2-3)
CASSSGLAEATSTDTQYF

SEQ ID NO: 662843 - protein, 13 aa, Homo sapiens
  CDR3 for alpha chain variable domain of TCR clone 331422 (TRAV12-3, TRAJ33)
CAISVNSNYQLLR

SEQ ID NO: 662844 - protein, 13 aa, Homo sapiens
  CDR3 for beta chain variable domain of TCR clone 331422 (TRBV7-2, TRBJ2-2)
CASSLAVTGELFL

SEQ ID NO: 662845 - protein, 13 aa, Homo sapiens
  CDR3 for alpha chain variable domain of TCR clone 331423 (TRAV1-2, TRAJ9)
CAALKTGGFKTIF

SEQ ID NO: 662846 - protein, 15 aa, Homo sapiens
  CDR3 for beta chain variable domain of TCR clone 331423 (TRBV24-1, TRBJ2-1)
CATSGSGGFYNEQFF

SEQ ID NO: 662847 - protein, 15 aa, Homo sapiens
  CDR3 for alpha chain variable domain of TCR clone 331424 (TRAV3, TRAJ3)
CAVRDRDSSASKIIF

SEQ ID NO: 662848 - protein, 17 aa, Homo sapiens
  CDR3 for beta chain variable domain of TCR clone 331424 (TRBV3-1, TRBJ2-2)
CASSQFRDKVDTGELFF

SEQ ID NO: 662849 - protein, 14 aa, Homo sapiens
  CDR3 for alpha chain variable domain of TCR clone 331425 (TRAV1-2, TRAJ16)
CVVNRFSDGQKLLF

SEQ ID NO: 662850 - protein, 17 aa, Homo sapiens
  CDR3 for beta chain variable domain of TCR clone 331425 (TRBV24-1, TRBJ2-1)
CATSDVSTSGTYNEQFF

SEQ ID NO: 662851 - protein, 13 aa, Homo sapiens
  CDR3 for alpha chain variable domain of TCR clone 331426 (TRAV12-3, TRAJ7)
CAMTPYGNNRLAF

SEQ ID NO: 662852 - protein, 16 aa, Homo sapiens
  CDR3 for beta chain variable domain of TCR clone 331426 (TRBV20-1, TRBJ1-2)
CSASMGQGVANYGYTF

SEQ ID NO: 662853 - protein, 12 aa, Homo sapiens
  CDR3 for alpha chain variable domain of TCR clone 331427 (TRAV26-1, TRAJ31)
CIVRSINARLMF

SEQ ID NO: 662854 - protein, 16 aa, Homo sapiens
  CDR3 for beta chain variable domain of TCR clone 331427 (TRBV7-3, TRBJ2-3)
CASSLSGYRPEDTQYF

SEQ ID NO: 662855 - protein, 14 aa, Homo sapiens
  CDR3 for alpha chain variable domain of TCR clone 331428 (TRAV13-1, TRAJ45)
VSVPEGGGADGLTF

SEQ ID NO: 662856 - protein, 14 aa, Homo sapiens
  CDR3 for beta chain variable domain of TCR clone 331428 (TRBV27, TRBJ1-1)
CASSPQGKWAEAFF

SEQ ID NO: 662857 - protein, 18 aa, Homo sapiens
  CDR3 for alpha chain variable domain of TCR clone 331429 (TRAV14/DV4, TRAJ53)
CAMREGGGSGGSNYKLTF

SEQ ID NO: 662858 - protein, 13 aa, Homo sapiens
  CDR3 for beta chain variable domain of TCR clone 331429 (TRBV6-4, TRBJ2-3)
CASSPGITDTQYF

SEQ ID NO: 662859 - protein, 14 aa, Homo sapiens
  CDR3 for alpha chain variable domain of TCR clone 331430 (TRAV41, TRAJ57)
CAVLLQGGSEKLSL

SEQ ID NO: 662860 - protein, 12 aa, Homo sapiens
  CDR3 for beta chain variable domain of TCR clone 331430 (TRBV10-3, TRBJ1-1)
CATMDRPPEAFF

SEQ ID NO: 662861 - protein, 14 aa, Homo sapiens
  CDR3 for alpha chain variable domain of TCR clone 331431 (TRAV17, TRAJ16)
CATADCSDGQKLLC

SEQ ID NO: 662862 - protein, 15 aa, Homo sapiens
  CDR3 for beta chain variable domain of TCR clone 331431 (TRBV18, TRBJ2-1)
CASSPPSASYNEQFF

SEQ ID NO: 662863 - protein, 13 aa, Homo sapiens
  CDR3 for alpha chain variable domain of TCR clone 331432 (TRAV8-3, TRAJ28)
CAVGAVGSYQLTF

SEQ ID NO: 662864 - protein, 17 aa, Homo sapiens
  CDR3 for beta chain variable domain of TCR clone 331432 (TRBV20-1, TRBJ2-3)
CSAVSRTSGVSTDTQYF

SEQ ID NO: 662865 - protein, 14 aa, Homo sapiens
  CDR3 for alpha chain variable domain of TCR clone 331433 (TRAV35, TRAJ33)
CAGSSHDSNYQLIW

SEQ ID NO: 662866 - protein, 14 aa, Homo sapiens
  CDR3 for beta chain variable domain of TCR clone 331433 (TRBV7-9, TRBJ2-1)
CASSPRDSLYEQFF

SEQ ID NO: 662867 - protein, 14 aa, Homo sapiens
  CDR3 for alpha chain variable domain of TCR clone 331434 (TRAV16, TRAJ47)
CALSGPEYGNKLVF

SEQ ID NO: 662868 - protein, 14 aa, Homo sapiens
  CDR3 for beta chain variable domain of TCR clone 331434 (TRBV6-1, TRBJ1-3)
CASVQGGGGNTIYF

SEQ ID NO: 662869 - protein, 14 aa, Homo sapiens
  CDR3 for alpha chain variable domain of TCR clone 331435 (TRAV23/DV6, TRAJ40)
CAASLTSGTYNYIF

SEQ ID NO: 662870 - protein, 14 aa, Homo sapiens
  CDR3 for beta chain variable domain of TCR clone 331435 (TRBV5-1, TRBJ2-3)
CASSRGQGGGTQYY

SEQ ID NO: 662871 - protein, 14 aa, Homo sapiens
  CDR3 for alpha chain variable domain of TCR clone 331436 (TRAV26-1, TRAJ38)
CIADNAGNNRKLIW

SEQ ID NO: 662872 - protein, 15 aa, Homo sapiens
  CDR3 for beta chain variable domain of TCR clone 331436 (TRBV6-3, TRBJ2-7)
CASSSPGTVFYKQYF

SEQ ID NO: 662873 - protein, 15 aa, Homo sapiens
  CDR3 for alpha chain variable domain of TCR clone 331437 (TRAV3, TRAJ42)
CAVRGCTGSQGNLIF

SEQ ID NO: 662874 - protein, 14 aa, Homo sapiens
  CDR3 for beta chain variable domain of TCR clone 331437 (TRBV19, TRBJ1-2)
CASSSLFARDVYTF

SEQ ID NO: 662875 - protein, 11 aa, Homo sapiens
  CDR3 for alpha chain variable domain of TCR clone 331438 (TRAV1-2, TRAJ31)
CAVDNNARPMF

SEQ ID NO: 662876 - protein, 15 aa, Homo sapiens
  CDR3 for beta chain variable domain of TCR clone 331438 (TRBV28, TRBJ2-1)
CASSIIAGGRSEQFF

SEQ ID NO: 662877 - protein, 13 aa, Homo sapiens
  CDR3 for alpha chain variable domain of TCR clone 331439 (TRAV17, TRAJ5)
CAPMDTGRRALTF

SEQ ID NO: 662878 - protein, 14 aa, Homo sapiens
  CDR3 for beta chain variable domain of TCR clone 331439 (TRBV2, TRBJ2-3)
CASSEGQNTDTQYF

SEQ ID NO: 662879 - protein, 11 aa, Homo sapiens
  CDR3 for alpha chain variable domain of TCR clone 331440 (TRAV2, TRAJ13)
CASGGYQKVTF

SEQ ID NO: 662880 - protein, 15 aa, Homo sapiens
  CDR3 for beta chain variable domain of TCR clone 331440 (TRBV6-1, TRBJ2-6)
CASSEQGTGANVLTF

SEQ ID NO: 662881 - protein, 13 aa, Homo sapiens
  CDR3 for alpha chain variable domain of TCR clone 331441 (TRAV3, TRAJ21)
CAVREPDFNKFYF

SEQ ID NO: 662882 - protein, 14 aa, Homo sapiens
  CDR3 for beta chain variable domain of TCR clone 331441 (TRBV28, TRBJ2-1)
CASSLLQGTNEQFF

SEQ ID NO: 662883 - protein, 13 aa, Homo sapiens
  CDR3 for alpha chain variable domain of TCR clone 331442 (TRAV12-1, TRAJ22)
CVASGGSARQLTF

SEQ ID NO: 662884 - protein, 18 aa, Homo sapiens
  CDR3 for beta chain variable domain of TCR clone 331442 (TRBV18, TRBJ2-3)
CASSYTSGAAGGTDTQYF

SEQ ID NO: 662885 - protein, 16 aa, Homo sapiens
  CDR3 for alpha chain variable domain of TCR clone 331443 (TRAV30, TRAJ24)
CGTETVDADSWGKFQF

SEQ ID NO: 662886 - protein, 15 aa, Homo sapiens
  CDR3 for beta chain variable domain of TCR clone 331443 (TRBV27, TRBJ2-1)
CASSNGRGSSNEQFF

SEQ ID NO: 662887 - protein, 12 aa, Homo sapiens
  CDR3 for alpha chain variable domain of TCR clone 331444 (TRAV2, TRAJ33)
CAVPDSNYQLIW

SEQ ID NO: 662888 - protein, 14 aa, Homo sapiens
  CDR3 for beta chain variable domain of TCR clone 331444 (TRBV19, TRBJ2-5)
CACSMTGQQETQYF

SEQ ID NO: 662889 - protein, 16 aa, Homo sapiens
  CDR3 for alpha chain variable domain of TCR clone 331445 (TRAV3, TRAJ37)
CAVRPHGSGNTGKLIL

SEQ ID NO: 662890 - protein, 14 aa, Homo sapiens
  CDR3 for beta chain variable domain of TCR clone 331445 (TRBV2, TRBJ2-1)
CASSDRAYYKEQFF

SEQ ID NO: 662891 - protein, 16 aa, Homo sapiens
  CDR3 for alpha chain variable domain of TCR clone 331446 (TRAV26-1, TRAJ31)
CIVRPPVLNNNARLMF

SEQ ID NO: 662892 - protein, 17 aa, Homo sapiens
  CDR3 for beta chain variable domain of TCR clone 331446 (TRBV5-1, TRBJ1-5)
CASSLVGREEGKQPQHF

SEQ ID NO: 662893 - protein, 17 aa, Homo sapiens
  CDR3 for alpha chain variable domain of TCR clone 331447 (TRAV36/DV7, TRAJ42)
CAGGGMNYGGSQGNLIF

SEQ ID NO: 662894 - protein, 14 aa, Homo sapiens
  CDR3 for beta chain variable domain of TCR clone 331447 (TRBV25-1, TRBJ1-1)
CASTHLGGNTEAFF

SEQ ID NO: 662895 - protein, 15 aa, Homo sapiens
  CDR3 for alpha chain variable domain of TCR clone 331448 (TRAV26-1, TRAJ29)
CIVRVEGSGNTPLVF

SEQ ID NO: 662896 - protein, 15 aa, Homo sapiens
  CDR3 for beta chain variable domain of TCR clone 331448 (TRBV7-9, TRBJ1-4)
CASSATGGNNEKLFF

SEQ ID NO: 662897 - protein, 16 aa, Homo sapiens
  CDR3 for alpha chain variable domain of TCR clone 331449 (TRAV12-3, TRAJ53)
CAMSPGSGGSNYKLTF

SEQ ID NO: 662898 - protein, 17 aa, Homo sapiens
  CDR3 for beta chain variable domain of TCR clone 331449 (TRBV28, TRBJ2-5)
CASSTPEGDALQGTQYC

SEQ ID NO: 662899 - protein, 17 aa, Homo sapiens
  CDR3 for alpha chain variable domain of TCR clone 331450 (TRAV26-1, TRAJ58)
CIVRVGAEETSGARMTF

SEQ ID NO: 662900 - protein, 18 aa, Homo sapiens
  CDR3 for beta chain variable domain of TCR clone 331450 (TRBV7-9, TRBJ2-7)
CASSLTTSGSRTWYEQYF

SEQ ID NO: 662901 - protein, 13 aa, Homo sapiens
  CDR3 for alpha chain variable domain of TCR clone 331451 (TRAV2, TRAJ40)
CAVVPSGTYKYIF

SEQ ID NO: 662902 - protein, 15 aa, Homo sapiens
  CDR3 for beta chain variable domain of TCR clone 331451 (TRBV10-1, TRBJ2-1)
CASSTGTELYNEQFF

SEQ ID NO: 662903 - protein, 16 aa, Homo sapiens
  CDR3 for alpha chain variable domain of TCR clone 331452 (TRAV12-3, TRAJ53)
CAMSPGSGGSNDKLTF

SEQ ID NO: 662904 - protein, 14 aa, Homo sapiens
  CDR3 for beta chain variable domain of TCR clone 331452 (TRBV7-3, TRBJ2-2)
CASSSGGYTGELFF

SEQ ID NO: 662905 - protein, 14 aa, Homo sapiens
  CDR3 for alpha chain variable domain of TCR clone 331453 (TRAV1-1, TRAJ27)
CSVIYNTNAGKSTF

SEQ ID NO: 662906 - protein, 17 aa, Homo sapiens
  CDR3 for beta chain variable domain of TCR clone 331453 (TRBV19, TRBJ2-7)
CASSISFYDSYPYEQYF

SEQ ID NO: 662907 - protein, 17 aa, Homo sapiens
  CDR3 for alpha chain variable domain of TCR clone 331454 (TRAV26-2, TRAJ42)
CILRDVGYGGSQGNLIF

SEQ ID NO: 662908 - protein, 14 aa, Homo sapiens
  CDR3 for beta chain variable domain of TCR clone 331454 (TRBV19, TRBJ2-1)
CASPTFVLSGEQFF

SEQ ID NO: 662909 - protein, 15 aa, Homo sapiens
  CDR3 for alpha chain variable domain of TCR clone 331455 (TRAV4, TRAJ39)
CLVGSNNNAGNMLTF

SEQ ID NO: 662910 - protein, 13 aa, Homo sapiens
  CDR3 for beta chain variable domain of TCR clone 331455 (TRBV11-2, TRBJ2-5)
CASSSTGEETQYF

SEQ ID NO: 662911 - protein, 14 aa, Homo sapiens
  CDR3 for alpha chain variable domain of TCR clone 331456 (TRAV12-2, TRAJ5)
CAVKGDTGRRALTF

SEQ ID NO: 662912 - protein, 11 aa, Homo sapiens
  CDR3 for beta chain variable domain of TCR clone 331456 (TRBV11-2, TRBJ2-2)
CASSLPGELFF

SEQ ID NO: 662913 - protein, 14 aa, Homo sapiens
  CDR3 for alpha chain variable domain of TCR clone 331457 (TRAV1-2, TRAJ8)
CAVREDTGFQKLVF

SEQ ID NO: 662914 - protein, 15 aa, Homo sapiens
  CDR3 for beta chain variable domain of TCR clone 331457 (TRBV5-1, TRBJ2-2)
CARSSQGGNTGELFF

SEQ ID NO: 662915 - protein, 13 aa, Homo sapiens
  CDR3 for alpha chain variable domain of TCR clone 331458 (TRAV13-1, TRAJ5)
CAARVTGRRALTF

SEQ ID NO: 662916 - protein, 15 aa, Homo sapiens
  CDR3 for beta chain variable domain of TCR clone 331458 (TRBV7-9, TRBJ2-7)
CASSPGGGVTYEHYF

SEQ ID NO: 662917 - protein, 14 aa, Homo sapiens
  CDR3 for alpha chain variable domain of TCR clone 331459 (TRAV2, TRAJ9)
CAVEDRSGGFKPIF

SEQ ID NO: 662918 - protein, 19 aa, Homo sapiens
  CDR3 for beta chain variable domain of TCR clone 331459 (TRBV2, TRBJ2-7)
CASSDDETSGRANDYEQYF

SEQ ID NO: 662919 - protein, 16 aa, Homo sapiens
  CDR3 for alpha chain variable domain of TCR clone 331460 (TRAV3, TRAJ37)
CAVRGKGSGHTGKLIC

SEQ ID NO: 662920 - protein, 13 aa, Homo sapiens
  CDR3 for beta chain variable domain of TCR clone 331460 (TRBV7-3, TRBJ1-1)
CASSQDWGAEAFF

SEQ ID NO: 662921 - protein, 11 aa, Homo sapiens
  CDR3 for alpha chain variable domain of TCR clone 331461 (TRAV35, TRAJ30)
CAPGGDDKIIF

SEQ ID NO: 662922 - protein, 11 aa, Homo sapiens
  CDR3 for beta chain variable domain of TCR clone 331461 (TRBV29-1, TRBJ2-5)
CSEDRTGTQYF

SEQ ID NO: 662923 - protein, 14 aa, Homo sapiens
  CDR3 for alpha chain variable domain of TCR clone 331462 (TRAV1-2, TRAJ8)
CAVREDTGFQKLVF

SEQ ID NO: 662924 - protein, 17 aa, Homo sapiens
  CDR3 for beta chain variable domain of TCR clone 331462 (TRBV20-1, TRBJ2-2)
CSSSGSGQGGLTGELFF

SEQ ID NO: 662925 - protein, 13 aa, Homo sapiens
  CDR3 for alpha chain variable domain of TCR clone 331463 (TRAV38-1, TRAJ42)
CARWGGSQGNLIY

SEQ ID NO: 662926 - protein, 17 aa, Homo sapiens
  CDR3 for beta chain variable domain of TCR clone 331463 (TRBV20-1, TRBJ2-1)
CSARDPLAGVWDNEQFF

SEQ ID NO: 662927 - protein, 11 aa, Homo sapiens
  CDR3 for alpha chain variable domain of TCR clone 331464 (TRAV35, TRAJ34)
CWARNTDKLIF

SEQ ID NO: 662928 - protein, 14 aa, Homo sapiens
  CDR3 for beta chain variable domain of TCR clone 331464 (TRBV11-2, TRBJ2-5)
CASSRTGGIETQYF

SEQ ID NO: 662929 - protein, 14 aa, Homo sapiens
  CDR3 for alpha chain variable domain of TCR clone 331465 (TRAV23/DV6, TRAJ11)
CAASLESGYRTLTF

SEQ ID NO: 662930 - protein, 15 aa, Homo sapiens
  CDR3 for beta chain variable domain of TCR clone 331465 (TRBV28, TRBJ2-7)
CASSSPGTEPFEQYF

SEQ ID NO: 662931 - protein, 15 aa, Homo sapiens
  CDR3 for alpha chain variable domain of TCR clone 331466 (TRAV35, TRAJ20)
WADPSSGFNDYKLSF

SEQ ID NO: 662932 - protein, 16 aa, Homo sapiens
  CDR3 for beta chain variable domain of TCR clone 331466 (TRBV4-3, TRBJ1-6)
CASSAQPGGEGSPVHF

SEQ ID NO: 662933 - protein, 13 aa, Homo sapiens
  CDR3 for alpha chain variable domain of TCR clone 331467 (TRAV35, TRAJ48)
CAGHKFGNEKLTF

SEQ ID NO: 662934 - protein, 13 aa, Homo sapiens
  CDR3 for beta chain variable domain of TCR clone 331467 (TRBV7-2, TRBJ1-6)
CASSLVGSSPLHF

SEQ ID NO: 662935 - protein, 21 aa, Homo sapiens
  CDR3 for alpha chain variable domain of TCR clone 331468 (TRAV13-1, TRAJ6)
CAARRGGSYIPTLEEEPALLF

SEQ ID NO: 662936 - protein, 16 aa, Homo sapiens
  CDR3 for beta chain variable domain of TCR clone 331468 (TRBV7-9, TRBJ2-2)
CASSLATGVGTGELFF

SEQ ID NO: 662937 - protein, 15 aa, Homo sapiens
  CDR3 for alpha chain variable domain of TCR clone 331469 (TRAV8-6, TRAJ50)
CAVSVRRTSYDKVIF

SEQ ID NO: 662938 - protein, 17 aa, Homo sapiens
  CDR3 for beta chain variable domain of TCR clone 331469 (TRBV20-1, TRBJ2-1)
CSAPPRPAGTRYNEQFF

SEQ ID NO: 662939 - protein, 14 aa, Homo sapiens
  CDR3 for alpha chain variable domain of TCR clone 331470 (TRAV16, TRAJ15)
CALSFNQAGTALIF

SEQ ID NO: 662940 - protein, 13 aa, Homo sapiens
  CDR3 for beta chain variable domain of TCR clone 331470 (TRBV4-1, TRBJ2-5)
CASSQGHRETQYF

SEQ ID NO: 662941 - protein, 18 aa, Homo sapiens
  CDR3 for alpha chain variable domain of TCR clone 331471 (TRAV21, TRAJ52)
CAVRPSPAGGTSYGKLTF

SEQ ID NO: 662942 - protein, 15 aa, Homo sapiens
  CDR3 for beta chain variable domain of TCR clone 331471 (TRBV19, TRBJ1-1)
CASTSGQIQNTEAFC

SEQ ID NO: 662943 - protein, 11 aa, Homo sapiens
  CDR3 for alpha chain variable domain of TCR clone 331472 (TRAV1-1, TRAJ22)
CLGGFCQATDL

SEQ ID NO: 662944 - protein, 14 aa, Homo sapiens
  CDR3 for beta chain variable domain of TCR clone 331472 (TRBV27, TRBJ2-7)
CASSLAGLSYEQYF

SEQ ID NO: 662945 - protein, 11 aa, Homo sapiens
  CDR3 for alpha chain variable domain of TCR clone 331473 (TRAV13-2, TRAJ26)
RAEIPGQNFVF

SEQ ID NO: 662946 - protein, 19 aa, Homo sapiens
  CDR3 for beta chain variable domain of TCR clone 331473 (TRBV19, TRBJ2-2)
CASTRPGLAGGRVTGELFF

SEQ ID NO: 662947 - protein, 15 aa, Homo sapiens
  CDR3 for alpha chain variable domain of TCR clone 331474 (TRAV3, TRAJ3)
CAVRDGQSSASKIIF

SEQ ID NO: 662948 - protein, 14 aa, Homo sapiens
  CDR3 for beta chain variable domain of TCR clone 331474 (TRBV28, TRBJ1-4)
CASSFGTFDEKLFF

SEQ ID NO: 662949 - protein, 14 aa, Homo sapiens
  CDR3 for alpha chain variable domain of TCR clone 331475 (TRAV13-1, TRAJ44)
CAAKATGTASKLTF

SEQ ID NO: 662950 - protein, 16 aa, Homo sapiens
  CDR3 for beta chain variable domain of TCR clone 331475 (TRBV7-2, TRBJ2-6)
CASSLAGRSGANVLTF

SEQ ID NO: 662951 - protein, 15 aa, Homo sapiens
  CDR3 for alpha chain variable domain of TCR clone 331476 (TRAV8-3, TRAJ45)
CALSYSGGGADGLTF

SEQ ID NO: 662952 - protein, 16 aa, Homo sapiens
  CDR3 for beta chain variable domain of TCR clone 331476 (TRBV7-9, TRBJ2-2)
CASSGFGGANTGELFF

SEQ ID NO: 662953 - protein, 14 aa, Homo sapiens
  CDR3 for alpha chain variable domain of TCR clone 331477 (TRAV8-2, TRAJ5)
CVVIMDTGRRALTF

SEQ ID NO: 662954 - protein, 15 aa, Homo sapiens
  CDR3 for beta chain variable domain of TCR clone 331477 (TRBV2, TRBJ2-3)
CASSDFEKATDTQYF

SEQ ID NO: 662955 - protein, 23 aa, Homo sapiens
  CDR3 for alpha chain variable domain of TCR clone 331478 (TRAV26-1, TRAJ38)
CIANNAGNNHIQNPDPAVYQLRD

SEQ ID NO: 662956 - protein, 15 aa, Homo sapiens
  CDR3 for beta chain variable domain of TCR clone 331478 (TRBV27, TRBJ2-5)
CASSLYPRGGETQYF

SEQ ID NO: 662957 - protein, 13 aa, Homo sapiens
  CDR3 for alpha chain variable domain of TCR clone 331479 (TRAV35, TRAJ36)
CSGPRIGANNLFF

SEQ ID NO: 662958 - protein, 14 aa, Homo sapiens
  CDR3 for beta chain variable domain of TCR clone 331479 (TRBV7-2, TRBJ1-2)
CASSQTGSTYGYTF

SEQ ID NO: 662959 - protein, 11 aa, Homo sapiens
  CDR3 for alpha chain variable domain of TCR clone 331480 (TRAV2, TRAJ33)
CAVDSNYQLIL

SEQ ID NO: 662960 - protein, 12 aa, Homo sapiens
  CDR3 for beta chain variable domain of TCR clone 331480 (TRBV12-4, TRBJ2-7)
CASSLGGYEQYF

SEQ ID NO: 662961 - protein, 12 aa, Homo sapiens
  CDR3 for alpha chain variable domain of TCR clone 331481 (TRAV1-1, TRAJ39)
CAVPVVGNMLTF

SEQ ID NO: 662962 - protein, 17 aa, Homo sapiens
  CDR3 for beta chain variable domain of TCR clone 331481 (TRBV28, TRBJ2-5)
CASSTPAGDALQETQYF

SEQ ID NO: 662963 - protein, 17 aa, Homo sapiens
  CDR3 for alpha chain variable domain of TCR clone 331482 (TRAV3, TRAJ6)
CAVRDGPRAGGRYIPTF

SEQ ID NO: 662964 - protein, 12 aa, Homo sapiens
  CDR3 for beta chain variable domain of TCR clone 331482 (TRBV6-3, TRBJ2-7)
CASSLTPYEQYF

SEQ ID NO: 662965 - protein, 13 aa, Homo sapiens
  CDR3 for alpha chain variable domain of TCR clone 331483 (TRAV1-1, TRAJ23)
CAVVANQGGELIF

SEQ ID NO: 662966 - protein, 16 aa, Homo sapiens
  CDR3 for beta chain variable domain of TCR clone 331483 (TRBV5-5, TRBJ1-2)
CASSPTWGRGLYGYTF

SEQ ID NO: 662967 - protein, 12 aa, Homo sapiens
  CDR3 for alpha chain variable domain of TCR clone 331484 (TRAV21, TRAJ33)
CPVQDSDYQLIW

SEQ ID NO: 662968 - protein, 14 aa, Homo sapiens
  CDR3 for beta chain variable domain of TCR clone 331484 (TRBV28, TRBJ2-1)
CASSPGDGGNEQFF

SEQ ID NO: 662969 - protein, 15 aa, Homo sapiens
  CDR3 for alpha chain variable domain of TCR clone 331485 (TRAV26-1, TRAJ44)
CIVRANTGTASKLTF

SEQ ID NO: 662970 - protein, 16 aa, Homo sapiens
  CDR3 for beta chain variable domain of TCR clone 331485 (TRBV23-1, TRBJ2-1)
CISAPATGPTYNEQFF

SEQ ID NO: 662971 - protein, 15 aa, Homo sapiens
  CDR3 for alpha chain variable domain of TCR clone 331486 (TRAV17, TRAJ57)
CATGPSQGGSEKLLF

SEQ ID NO: 662972 - protein, 14 aa, Homo sapiens
  CDR3 for beta chain variable domain of TCR clone 331486 (TRBV12-5, TRBJ2-5)
CASGSRTHQETQYF

SEQ ID NO: 662973 - protein, 15 aa, Homo sapiens
  CDR3 for alpha chain variable domain of TCR clone 331487 (TRAV3, TRAJ5)
CAVRDLDTGRRALTF

SEQ ID NO: 662974 - protein, 15 aa, Homo sapiens
  CDR3 for beta chain variable domain of TCR clone 331487 (TRBV4-1, TRBJ2-3)
CASSNLAGGRDTQYF

SEQ ID NO: 662975 - protein, 13 aa, Homo sapiens
  CDR3 for alpha chain variable domain of TCR clone 331488 (TRAV8-3, TRAJ48)
CALVRFGNEKLTF

SEQ ID NO: 662976 - protein, 16 aa, Homo sapiens
  CDR3 for beta chain variable domain of TCR clone 331488 (TRBV20-1, TRBJ2-5)
CSARDFASGIQETQYF

SEQ ID NO: 662977 - protein, 13 aa, Homo sapiens
  CDR3 for alpha chain variable domain of TCR clone 331489 (TRAV3, TRAJ30)
CAVRDIPDDKIIF

SEQ ID NO: 662978 - protein, 15 aa, Homo sapiens
  CDR3 for beta chain variable domain of TCR clone 331489 (TRBV7-9, TRBJ1-5)
CASSQGHQPNQPQHF

SEQ ID NO: 662979 - protein, 14 aa, Homo sapiens
  CDR3 for alpha chain variable domain of TCR clone 331490 (TRAV12-2, TRAJ44)
CAVNPAGTASELTF

SEQ ID NO: 662980 - protein, 13 aa, Homo sapiens
  CDR3 for beta chain variable domain of TCR clone 331490 (TRBV20-1, TRBJ1-6)
CSAHLGVGSPLHF

SEQ ID NO: 662981 - protein, 13 aa, Homo sapiens
  CDR3 for alpha chain variable domain of TCR clone 331491 (TRAV13-2, TRAJ15)
CAERPQAGTSLIF

SEQ ID NO: 662982 - protein, 15 aa, Homo sapiens
  CDR3 for beta chain variable domain of TCR clone 331491 (TRBV11-2, TRBJ2-7)
CASRFPGTGGYEQYF

SEQ ID NO: 662983 - protein, 10 aa, Homo sapiens
  CDR3 for alpha chain variable domain of TCR clone 331492 (TRAV21, TRAJ43)
CAVRIGDMRF

SEQ ID NO: 662984 - protein, 14 aa, Homo sapiens
  CDR3 for beta chain variable domain of TCR clone 331492 (TRBV20-1, TRBJ2-1)
CSAPGLAGGNEQFF

SEQ ID NO: 662985 - protein, 16 aa, Homo sapiens
  CDR3 for alpha chain variable domain of TCR clone 331493 (TRAV30, TRAJ24)
CGTEIVDADSWGKFQF

SEQ ID NO: 662986 - protein, 13 aa, Homo sapiens
  CDR3 for beta chain variable domain of TCR clone 331493 (TRBV18, TRBJ1-2)
CDSSASATEGYTF

SEQ ID NO: 662987 - protein, 14 aa, Homo sapiens
  CDR3 for alpha chain variable domain of TCR clone 331494 (TRAV27, TRAJ22)
CAGLPSGSARQLTF

SEQ ID NO: 662988 - protein, 16 aa, Homo sapiens
  CDR3 for beta chain variable domain of TCR clone 331494 (TRBV19, TRBJ2-3)
CASSPGAASRTDTQYF

SEQ ID NO: 662989 - protein, 11 aa, Homo sapiens
  CDR3 for alpha chain variable domain of TCR clone 331495 (TRAV3, TRAJ21)
CAVGNFNKFYF

SEQ ID NO: 662990 - protein, 13 aa, Homo sapiens
  CDR3 for beta chain variable domain of TCR clone 331495 (TRBV7-3, TRBJ1-2)
CASSLKRGYGYTF

SEQ ID NO: 662991 - protein, 13 aa, Homo sapiens
  CDR3 for alpha chain variable domain of TCR clone 331496 (TRAV34, TRAJ22)
CGAGAGSARQLAF

SEQ ID NO: 662992 - protein, 16 aa, Homo sapiens
  CDR3 for beta chain variable domain of TCR clone 331496 (TRBV7-3, TRBJ2-1)
CASSKPLAGGYNEQFF

SEQ ID NO: 662993 - protein, 12 aa, Homo sapiens
  CDR3 for alpha chain variable domain of TCR clone 331497 (TRAV21, TRAJ11)
CAATSGYSTLTF

SEQ ID NO: 662994 - protein, 14 aa, Homo sapiens
  CDR3 for beta chain variable domain of TCR clone 331497 (TRBV7-8, TRBJ2-3)
CASSLEAGTDTQYF

SEQ ID NO: 662995 - protein, 12 aa, Homo sapiens
  CDR3 for alpha chain variable domain of TCR clone 331498 (TRAV12-3, TRAJ42)
CAPGGSQGNLIF

SEQ ID NO: 662996 - protein, 14 aa, Homo sapiens
  CDR3 for beta chain variable domain of TCR clone 331498 (TRBV7-2, TRBJ2-1)
CASSLSGVYNEQFF

SEQ ID NO: 662997 - protein, 13 aa, Homo sapiens
  CDR3 for alpha chain variable domain of TCR clone 331499 (TRAV27, TRAJ41)
CAGEGNSGYALNF

SEQ ID NO: 662998 - protein, 16 aa, Homo sapiens
  CDR3 for beta chain variable domain of TCR clone 331499 (TRBV29-1, TRBJ2-7)
CSVEVVGTSGSYEQYC

SEQ ID NO: 662999 - protein, 13 aa, Homo sapiens
  CDR3 for alpha chain variable domain of TCR clone 331500 (TRAV8-3, TRAJ36)
CAVGATGANNLFF

SEQ ID NO: 663000 - protein, 10 aa, Homo sapiens
  CDR3 for beta chain variable domain of TCR clone 331500 (TRBV2, TRBJ2-5)
CASSAATQYF

SEQ ID NO: 663001 - protein, 17 aa, Homo sapiens
  CDR3 for alpha chain variable domain of TCR clone 331501 (TRAV12-3, TRAJ6)
CAMSASGGAGGSYIPTF

SEQ ID NO: 663002 - protein, 12 aa, Homo sapiens
  CDR3 for beta chain variable domain of TCR clone 331501 (TRBV12-4, TRBJ2-3)
CASSTLPDTQYF

SEQ ID NO: 663003 - protein, 15 aa, Homo sapiens
  CDR3 for alpha chain variable domain of TCR clone 331502 (TRAV26-2, TRAJ13)
CILRDLSGGYQKVTF

SEQ ID NO: 663004 - protein, 11 aa, Homo sapiens
  CDR3 for beta chain variable domain of TCR clone 331502 (TRBV7-9, TRBJ2-5)
CASSLSDTQYF

SEQ ID NO: 663005 - protein, 13 aa, Homo sapiens
  CDR3 for alpha chain variable domain of TCR clone 331503 (TRAV3, TRAJ27)
CAVRPLGSGKSTF

SEQ ID NO: 663006 - protein, 13 aa, Homo sapiens
  CDR3 for beta chain variable domain of TCR clone 331503 (TRBV7-9, TRBJ2-3)
CASSPRSTDTQYF

SEQ ID NO: 663007 - protein, 12 aa, Homo sapiens
  CDR3 for alpha chain variable domain of TCR clone 331504 (TRAV21, TRAJ33)
CAKMDSNYQLIW

SEQ ID NO: 663008 - protein, 14 aa, Homo sapiens
  CDR3 for beta chain variable domain of TCR clone 331504 (TRBV7-2, TRBJ2-7)
CASSLPPGQGPQYF

SEQ ID NO: 663009 - protein, 12 aa, Homo sapiens
  CDR3 for alpha chain variable domain of TCR clone 331505 (TRAV17, TRAJ57)
CATDGGSEKLVF

SEQ ID NO: 663010 - protein, 10 aa, Homo sapiens
  CDR3 for beta chain variable domain of TCR clone 331505 (TRBV12-4, TRBJ1-2)
CASSFIRLHL

SEQ ID NO: 663011 - protein, 17 aa, Homo sapiens
  CDR3 for alpha chain variable domain of TCR clone 331506 (TRAV26-1, TRAJ53)
CIVRVDDSGGSNYKLTF

SEQ ID NO: 663012 - protein, 14 aa, Homo sapiens
  CDR3 for beta chain variable domain of TCR clone 331506 (TRBV27, TRBJ2-5)
CASSSLKGWETQYF

SEQ ID NO: 663013 - protein, 14 aa, Homo sapiens
  CDR3 for alpha chain variable domain of TCR clone 331507 (TRAV1-2, TRAJ10)
CAVRVTGGGNKRTF

SEQ ID NO: 663014 - protein, 12 aa, Homo sapiens
  CDR3 for beta chain variable domain of TCR clone 331507 (TRBV5-4, TRBJ1-1)
CASSFGQTEAFF

SEQ ID NO: 663015 - protein, 14 aa, Homo sapiens
  CDR3 for alpha chain variable domain of TCR clone 331508 (TRAV8-3, TRAJ23)
CAVIIYNQGGKLII

SEQ ID NO: 663016 - protein, 15 aa, Homo sapiens
  CDR3 for beta chain variable domain of TCR clone 331508 (TRBV18, TRBJ2-1)
CASSPPSASYNEQFF

SEQ ID NO: 663017 - protein, 15 aa, Homo sapiens
  CDR3 for alpha chain variable domain of TCR clone 331509 (TRAV21, TRAJ13)
CAVRPTSGGYQKVTF

SEQ ID NO: 663018 - protein, 15 aa, Homo sapiens
  CDR3 for beta chain variable domain of TCR clone 331509 (TRBV28, TRBJ2-7)
CASRPGGRGFYEQYF

SEQ ID NO: 663019 - protein, 15 aa, Homo sapiens
  CDR3 for alpha chain variable domain of TCR clone 331510 (TRAV17, TRAJ57)
CATVPSQGGSEKLVF

SEQ ID NO: 663020 - protein, 15 aa, Homo sapiens
  CDR3 for beta chain variable domain of TCR clone 331510 (TRBV25-1, TRBJ1-4)
CASSPGDSTNEKLFF

SEQ ID NO: 663021 - protein, 10 aa, Homo sapiens
  CDR3 for alpha chain variable domain of TCR clone 331511 (TRAV26-1, TRAJ40)
CIAGTYKYIF

SEQ ID NO: 663022 - protein, 13 aa, Homo sapiens
  CDR3 for beta chain variable domain of TCR clone 331511 (TRBV7-9, TRBJ1-2)
CASSLKQNYGYTF

SEQ ID NO: 663023 - protein, 18 aa, Homo sapiens
  CDR3 for alpha chain variable domain of TCR clone 331512 (TRAV8-3, TRAJ4)
WVRDPTSNDPGGYNKLIF

SEQ ID NO: 663024 - protein, 13 aa, Homo sapiens
  CDR3 for beta chain variable domain of TCR clone 331512 (TRBV20-1, TRBJ1-2)
RSATGIQGSGYTF

SEQ ID NO: 663025 - protein, 12 aa, Homo sapiens
  CDR3 for alpha chain variable domain of TCR clone 331513 (TRAV12-1, TRAJ31)
CVSWNNNARLMF

SEQ ID NO: 663026 - protein, 19 aa, Homo sapiens
  CDR3 for beta chain variable domain of TCR clone 331513 (TRBV7-2, TRBJ2-5)
CASSLSGGGGDPVLRARHA

SEQ ID NO: 663027 - protein, 16 aa, Homo sapiens
  CDR3 for alpha chain variable domain of TCR clone 331514 (TRAV21, TRAJ52)
CAVTNAGGTSYGKLTF

SEQ ID NO: 663028 - protein, 16 aa, Homo sapiens
  CDR3 for beta chain variable domain of TCR clone 331514 (TRBV2, TRBJ2-1)
CASSVGGSLSDNEQFF

SEQ ID NO: 663029 - protein, 16 aa, Homo sapiens
  CDR3 for alpha chain variable domain of TCR clone 331515 (TRAV4, TRAJ8)
CLVGDSGNTGFQKLVF

SEQ ID NO: 663030 - protein, 17 aa, Homo sapiens
  CDR3 for beta chain variable domain of TCR clone 331515 (TRBV7-8, TRBJ2-6)
CASSAGTGGAGANVLTF

SEQ ID NO: 663031 - protein, 13 aa, Homo sapiens
  CDR3 for alpha chain variable domain of TCR clone 331516 (TRAV12-1, TRAJ39)
CVVNYNAGNMLTF

SEQ ID NO: 663032 - protein, 12 aa, Homo sapiens
  CDR3 for beta chain variable domain of TCR clone 331516 (TRBV5-7, TRBJ1-1)
CASSLGRGKAVF

SEQ ID NO: 663033 - protein, 13 aa, Homo sapiens
  CDR3 for alpha chain variable domain of TCR clone 331517 (TRAV12-3, TRAJ6)
CANPSGGSYIPTF

SEQ ID NO: 663034 - protein, 14 aa, Homo sapiens
  CDR3 for beta chain variable domain of TCR clone 331517 (TRBV19, TRBJ1-1)
CASSRDRDATEAVF

SEQ ID NO: 663035 - protein, 12 aa, Homo sapiens
  CDR3 for alpha chain variable domain of TCR clone 331518 (TRAV12-1, TRAJ40)
CVVYSGTYKYIF

SEQ ID NO: 663036 - protein, 11 aa, Homo sapiens
  CDR3 for beta chain variable domain of TCR clone 331518 (TRBV11-3, TRBJ2-1)
CASSLGNEQFF

SEQ ID NO: 663037 - protein, 14 aa, Homo sapiens
  CDR3 for alpha chain variable domain of TCR clone 331519 (TRAV12-1, TRAJ12)
CVVNGRDSSYKLIF

SEQ ID NO: 663038 - protein, 13 aa, Homo sapiens
  CDR3 for beta chain variable domain of TCR clone 331519 (TRBV28, TRBJ2-2)
CASIRESTGEMFF

SEQ ID NO: 663039 - protein, 15 aa, Homo sapiens
  CDR3 for alpha chain variable domain of TCR clone 331520 (TRAV26-1, TRAJ44)
CIVRIGTGTASKLTF

SEQ ID NO: 663040 - protein, 13 aa, Homo sapiens
  CDR3 for beta chain variable domain of TCR clone 331520 (TRBV9, TRBJ2-1)
CASSVGQGGEQFF

SEQ ID NO: 663041 - protein, 14 aa, Homo sapiens
  CDR3 for alpha chain variable domain of TCR clone 331521 (TRAV21, TRAJ35)
CAVMPIGFVNLLHC

SEQ ID NO: 663042 - protein, 12 aa, Homo sapiens
  CDR3 for beta chain variable domain of TCR clone 331521 (TRBV7-9, TRBJ2-7)
CASSIKREEQYF

SEQ ID NO: 663043 - protein, 18 aa, Homo sapiens
  CDR3 for alpha chain variable domain of TCR clone 331522 (TRAV21, TRAJ52)
CAVRPSPAGGTSCGKLTF

SEQ ID NO: 663044 - protein, 17 aa, Homo sapiens
  CDR3 for beta chain variable domain of TCR clone 331522 (TRBV13, TRBJ2-3)
CASSLARVAGGRNTQYF

SEQ ID NO: 663045 - protein, 12 aa, Homo sapiens
  CDR3 for alpha chain variable domain of TCR clone 331523 (TRAV1-1, TRAJ30)
CAVRGRDDKIIF

SEQ ID NO: 663046 - protein, 16 aa, Homo sapiens
  CDR3 for beta chain variable domain of TCR clone 331523 (TRBV20-1, TRBJ1-2)
CSASMGQGVANYGYTF

SEQ ID NO: 663047 - protein, 14 aa, Homo sapiens
  CDR3 for alpha chain variable domain of TCR clone 331524 (TRAV12-3, TRAJ27)
CAMRGNTNAGKSTF

SEQ ID NO: 663048 - protein, 16 aa, Homo sapiens
  CDR3 for beta chain variable domain of TCR clone 331524 (TRBV2, TRBJ1-3)
CASSRTGGSTGNTIYF

SEQ ID NO: 663049 - protein, 15 aa, Homo sapiens
  CDR3 for alpha chain variable domain of TCR clone 331525 (TRAV14/DV4, TRAJ22)
CNERGPPGSARQLTF

SEQ ID NO: 663050 - protein, 15 aa, Homo sapiens
  CDR3 for beta chain variable domain of TCR clone 331525 (TRBV11-3, TRBJ2-2)
CASSLGGRPTGELFF

SEQ ID NO: 663051 - protein, 14 aa, Homo sapiens
  CDR3 for alpha chain variable domain of TCR clone 331526 (TRAV12-2, TRAJ17)
CAVLFKAAGKKLTF

SEQ ID NO: 663052 - protein, 13 aa, Homo sapiens
  CDR3 for beta chain variable domain of TCR clone 331526 (TRBV19, TRBJ1-2)
CTSSQGQVYGYTF

SEQ ID NO: 663053 - protein, 14 aa, Homo sapiens
  CDR3 for alpha chain variable domain of TCR clone 331527 (TRAV23/DV6, TRAJ8)
CAASKATGFQKLVF

SEQ ID NO: 663054 - protein, 16 aa, Homo sapiens
  CDR3 for beta chain variable domain of TCR clone 331527 (TRBV4-2, TRBJ2-5)
CASSQELVGSQETQYF

SEQ ID NO: 663055 - protein, 15 aa, Homo sapiens
  CDR3 for alpha chain variable domain of TCR clone 331528 (TRAV17, TRAJ37)
CATDGGSSNTGKLLF

SEQ ID NO: 663056 - protein, 15 aa, Homo sapiens
  CDR3 for beta chain variable domain of TCR clone 331528 (TRBV28, TRBJ2-5)
CASSSGRTIQETQYF

SEQ ID NO: 663057 - protein, 14 aa, Homo sapiens
  CDR3 for alpha chain variable domain of TCR clone 331529 (TRAV12-1, TRAJ17)
CVVNYKAAGNKLTF

SEQ ID NO: 663058 - protein, 12 aa, Homo sapiens
  CDR3 for beta chain variable domain of TCR clone 331529 (TRBV3-1, TRBJ2-1)
CASSQGSSGQFF

SEQ ID NO: 663059 - protein, 16 aa, Homo sapiens
  CDR3 for alpha chain variable domain of TCR clone 331530 (TRAV23/DV6, TRAJ9)
CAASIGGNTGGFKTIF

SEQ ID NO: 663060 - protein, 12 aa, Homo sapiens
  CDR3 for beta chain variable domain of TCR clone 331530 (TRBV7-8, TRBJ2-7)
CASSRGDREQYF

SEQ ID NO: 663061 - protein, 12 aa, Homo sapiens
  CDR3 for alpha chain variable domain of TCR clone 331531 (TRAV17, TRAJ12)
CAALRSSYKLIF

SEQ ID NO: 663062 - protein, 16 aa, Homo sapiens
  CDR3 for beta chain variable domain of TCR clone 331531 (TRBV28, TRBJ2-7)
CASSLFFETGGPEQYF

SEQ ID NO: 663063 - protein, 13 aa, Homo sapiens
  CDR3 for alpha chain variable domain of TCR clone 331532 (TRAV23/DV6, TRAJ47)
CAASSQYGNKLVF

SEQ ID NO: 663064 - protein, 15 aa, Homo sapiens
  CDR3 for beta chain variable domain of TCR clone 331532 (TRBV7-9, TRBJ1-6)
CASSSPGRGNSPLHF

SEQ ID NO: 663065 - protein, 13 aa, Homo sapiens
  CDR3 for alpha chain variable domain of TCR clone 331533 (TRAV1-2, TRAJ16)
CAVNRFSDGEAAL

SEQ ID NO: 663066 - protein, 15 aa, Homo sapiens
  CDR3 for beta chain variable domain of TCR clone 331533 (TRBV7-9, TRBJ1-6)
CASSSPGRGNSPLHF

SEQ ID NO: 663067 - protein, 14 aa, Homo sapiens
  CDR3 for alpha chain variable domain of TCR clone 331534 (TRAV17, TRAJ57)
CATDPQGGSEKLVF

SEQ ID NO: 663068 - protein, 16 aa, Homo sapiens
  CDR3 for beta chain variable domain of TCR clone 331534 (TRBV20-1, TRBJ1-4)
CSAPAQGLLTNEKLFF

SEQ ID NO: 663069 - protein, 15 aa, Homo sapiens
  CDR3 for alpha chain variable domain of TCR clone 331535 (TRAV8-3, TRAJ45)
CASSYSGGGADGPTF

SEQ ID NO: 663070 - protein, 12 aa, Homo sapiens
  CDR3 for beta chain variable domain of TCR clone 331535 (TRBV11-2, TRBJ2-3)
CASRPGTDTQYF

SEQ ID NO: 663071 - protein, 14 aa, Homo sapiens
  CDR3 for alpha chain variable domain of TCR clone 331536 (TRAV1-2, TRAJ8)
CAVREDTGFQKLVF

SEQ ID NO: 663072 - protein, 14 aa, Homo sapiens
  CDR3 for beta chain variable domain of TCR clone 331536 (TRBV7-9, TRBJ1-1)
CASTALQSYTEAFF

SEQ ID NO: 663073 - protein, 10 aa, Homo sapiens
  CDR3 for alpha chain variable domain of TCR clone 331537 (TRAV1-2, TRAJ31)
CVSEDARLMF

SEQ ID NO: 663074 - protein, 15 aa, Homo sapiens
  CDR3 for beta chain variable domain of TCR clone 331537 (TRBV20-1, TRBJ2-5)
CSAGLAGVSQETQYF

SEQ ID NO: 663075 - protein, 13 aa, Homo sapiens
  CDR3 for alpha chain variable domain of TCR clone 331538 (TRAV29/DV5, TRAJ31)
CAASSNNNARLMF

SEQ ID NO: 663076 - protein, 12 aa, Homo sapiens
  CDR3 for beta chain variable domain of TCR clone 331538 (TRBV11-2, TRBJ2-2)
CASSLGGGELFF

SEQ ID NO: 663077 - protein, 14 aa, Homo sapiens
  CDR3 for alpha chain variable domain of TCR clone 331539 (TRAV12-2, TRAJ17)
CSVLFKAAGNKLTF

SEQ ID NO: 663078 - protein, 13 aa, Homo sapiens
  CDR3 for beta chain variable domain of TCR clone 331539 (TRBV19, TRBJ1-2)
CASSQGQVYGYTF

SEQ ID NO: 663079 - protein, 14 aa, Homo sapiens
  CDR3 for alpha chain variable domain of TCR clone 331540 (TRAV1-2, TRAJ8)
CAVREDTGFQKLVF

SEQ ID NO: 663080 - protein, 19 aa, Homo sapiens
  CDR3 for beta chain variable domain of TCR clone 331540 (TRBV5-1, TRBJ2-2)
CASSLAPGLAGVRTGELFF

SEQ ID NO: 663081 - protein, 14 aa, Homo sapiens
  CDR3 for alpha chain variable domain of TCR clone 331541 (TRAV26-2, TRAJ32)
CCVGYGGTTNKLIF

SEQ ID NO: 663082 - protein, 14 aa, Homo sapiens
  CDR3 for beta chain variable domain of TCR clone 331541 (TRBV4-2, TRBJ2-1)
CASGLDRAYNEQFF

SEQ ID NO: 663083 - protein, 15 aa, Homo sapiens
  CDR3 for alpha chain variable domain of TCR clone 331542 (TRAV27, TRAJ38)
CAARFNAGNNRKLIW

SEQ ID NO: 663084 - protein, 13 aa, Homo sapiens
  CDR3 for beta chain variable domain of TCR clone 331542 (TRBV20-1, TRBJ2-1)
TSGALPPGNEQFF

SEQ ID NO: 663085 - protein, 11 aa, Homo sapiens
  CDR3 for alpha chain variable domain of TCR clone 331543 (TRAV13-2, TRAJ47)
CAEIRGNKLVF

SEQ ID NO: 663086 - protein, 15 aa, Homo sapiens
  CDR3 for beta chain variable domain of TCR clone 331543 (TRBV20-1, TRBJ2-2)
CSATGGFRGTGELFF

SEQ ID NO: 663087 - protein, 11 aa, Homo sapiens
  CDR3 for alpha chain variable domain of TCR clone 331544 (TRAV20, TRAJ31)
CAVQMRARLMF

SEQ ID NO: 663088 - protein, 14 aa, Homo sapiens
  CDR3 for beta chain variable domain of TCR clone 331544 (TRBV11-2, TRBJ1-4)
CASSFGGLGEKLFF

SEQ ID NO: 663089 - protein, 14 aa, Homo sapiens
  CDR3 for alpha chain variable domain of TCR clone 331545 (TRAV35, TRAJ33)
CAGSSQDSNYQLIW

SEQ ID NO: 663090 - protein, 15 aa, Homo sapiens
  CDR3 for beta chain variable domain of TCR clone 331545 (TRBV9, TRBJ1-6)
CASSVAGTGDSPLRF

SEQ ID NO: 663091 - protein, 15 aa, Homo sapiens
  CDR3 for alpha chain variable domain of TCR clone 331546 (TRAV8-3, TRAJ27)
CAVGPYKTNAGKATF

SEQ ID NO: 663092 - protein, 15 aa, Homo sapiens
  CDR3 for beta chain variable domain of TCR clone 331546 (TRBV27, TRBJ2-1)
CASSNGGGSSNEQFF

SEQ ID NO: 663093 - protein, 11 aa, Homo sapiens
  CDR3 for alpha chain variable domain of TCR clone 331547 (TRAV21, TRAJ11)
CAVNGYSTLTF

SEQ ID NO: 663094 - protein, 13 aa, Homo sapiens
  CDR3 for beta chain variable domain of TCR clone 331547 (TRBV19, TRBJ2-7)
CASSPRQSYEQYF

SEQ ID NO: 663095 - protein, 17 aa, Homo sapiens
  CDR3 for alpha chain variable domain of TCR clone 331548 (TRAV8-6, TRAJ58)
CAVSSWVGETSGSRLTF

SEQ ID NO: 663096 - protein, 10 aa, Homo sapiens
  CDR3 for beta chain variable domain of TCR clone 331548 (TRBV11-2, TRBJ2-1)
PGVEYNEQFF

SEQ ID NO: 663097 - protein, 13 aa, Homo sapiens
  CDR3 for alpha chain variable domain of TCR clone 331549 (TRAV27, TRAJ45)
CRSSGGGVDGLTF

SEQ ID NO: 663098 - protein, 11 aa, Homo sapiens
  CDR3 for beta chain variable domain of TCR clone 331549 (TRBV19, TRBJ1-1)
CASSIGSEAFF

SEQ ID NO: 663099 - protein, 12 aa, Homo sapiens
  CDR3 for alpha chain variable domain of TCR clone 331550 (TRAV21, TRAJ24)
CAVMDSWGKLQF

SEQ ID NO: 663100 - protein, 16 aa, Homo sapiens
  CDR3 for beta chain variable domain of TCR clone 331550 (TRBV13, TRBJ2-2)
CASSEVFGANTGEPFF

SEQ ID NO: 663101 - protein, 13 aa, Homo sapiens
  CDR3 for alpha chain variable domain of TCR clone 331551 (TRAV21, TRAJ57)
CAVTQGGSEKLVF

SEQ ID NO: 663102 - protein, 14 aa, Homo sapiens
  CDR3 for beta chain variable domain of TCR clone 331551 (TRBV11-2, TRBJ2-3)
CASSRLARADTQYF

SEQ ID NO: 663103 - protein, 18 aa, Homo sapiens
  CDR3 for alpha chain variable domain of TCR clone 331552 (TRAV13-1, TRAJ52)
CAAKNPNACGTSYGKLTF

SEQ ID NO: 663104 - protein, 18 aa, Homo sapiens
  CDR3 for beta chain variable domain of TCR clone 331552 (TRBV4-1, TRBJ1-4)
CASSPRTGGAWTNEKLFF

SEQ ID NO: 663105 - protein, 12 aa, Homo sapiens
  CDR3 for alpha chain variable domain of TCR clone 331553 (TRAV12-1, TRAJ31)
CVVRGNNARLMF

SEQ ID NO: 663106 - protein, 15 aa, Homo sapiens
  CDR3 for beta chain variable domain of TCR clone 331553 (TRBV7-9, TRBJ1-6)
CASSSPGRGNSPLHF

SEQ ID NO: 663107 - protein, 12 aa, Homo sapiens
  CDR3 for alpha chain variable domain of TCR clone 331554 (TRAV17, TRAJ58)
CGEETSGSRLTF

SEQ ID NO: 663108 - protein, 14 aa, Homo sapiens
  CDR3 for beta chain variable domain of TCR clone 331554 (TRBV2, TRBJ2-1)
CPSSEQMRESEQFF

SEQ ID NO: 663109 - protein, 16 aa, Homo sapiens
  CDR3 for alpha chain variable domain of TCR clone 331555 (TRAV30, TRAJ24)
CGTEIVDAKSWGKFQF

SEQ ID NO: 663110 - protein, 14 aa, Homo sapiens
  CDR3 for beta chain variable domain of TCR clone 331555 (TRBV12-5, TRBJ2-5)
CASGSRTHQETQYF

SEQ ID NO: 663111 - protein, 14 aa, Homo sapiens
  CDR3 for alpha chain variable domain of TCR clone 331556 (TRAV29/DV5, TRAJ37)
CAASGSGNTGTLIF

SEQ ID NO: 663112 - protein, 17 aa, Homo sapiens
  CDR3 for beta chain variable domain of TCR clone 331556 (TRBV4-1, TRBJ2-7)
CASSPFLTSGGVVEQYF

SEQ ID NO: 663113 - protein, 11 aa, Homo sapiens
  CDR3 for alpha chain variable domain of TCR clone 331557 (TRAV8-3, TRAJ49)
CAVNTGNQFYF

SEQ ID NO: 663114 - protein, 16 aa, Homo sapiens
  CDR3 for beta chain variable domain of TCR clone 331557 (TRBV7-3, TRBJ2-2)
CASSLKRGTLSGELFF

SEQ ID NO: 663115 - protein, 13 aa, Homo sapiens
  CDR3 for alpha chain variable domain of TCR clone 331558 (TRAV3, TRAJ21)
CAVREPDFNKFCF

SEQ ID NO: 663116 - protein, 15 aa, Homo sapiens
  CDR3 for beta chain variable domain of TCR clone 331558 (TRBV12-4, TRBJ2-5)
CASSPPTGLQETQYF

SEQ ID NO: 663117 - protein, 13 aa, Homo sapiens
  CDR3 for alpha chain variable domain of TCR clone 331559 (TRAV13-1, TRAJ5)
FAARVTGRRARTF

SEQ ID NO: 663118 - protein, 15 aa, Homo sapiens
  CDR3 for beta chain variable domain of TCR clone 331559 (TRBV7-9, TRBJ2-7)
CASSPGGGLTYEQYF

SEQ ID NO: 663119 - protein, 16 aa, Homo sapiens
  CDR3 for alpha chain variable domain of TCR clone 331560 (TRAV23/DV6, TRAJ9)
CAASIGGNTGGFKTIF

SEQ ID NO: 663120 - protein, 11 aa, Homo sapiens
  CDR3 for beta chain variable domain of TCR clone 331560 (TRBV12-4, TRBJ2-3)
CASSSVRGRYF

SEQ ID NO: 663121 - protein, 14 aa, Homo sapiens
  CDR3 for alpha chain variable domain of TCR clone 331561 (TRAV23/DV6, TRAJ8)
CAASKNTGFQKLVV

SEQ ID NO: 663122 - protein, 16 aa, Homo sapiens
  CDR3 for beta chain variable domain of TCR clone 331561 (TRBV11-2, TRBJ2-7)
CASSPTTGGVSYEQYF

SEQ ID NO: 663123 - protein, 12 aa, Homo sapiens
  CDR3 for alpha chain variable domain of TCR clone 331562 (TRAV8-3, TRAJ26)
CAGDNYGQNFVY

SEQ ID NO: 663124 - protein, 16 aa, Homo sapiens
  CDR3 for beta chain variable domain of TCR clone 331562 (TRBV13, TRBJ2-2)
CASSPRTGEHTGELFF

SEQ ID NO: 663125 - protein, 15 aa, Homo sapiens
  CDR3 for alpha chain variable domain of TCR clone 331563 (TRAV12-1, TRAJ4)
CVVNPFSGGYNKLIF

SEQ ID NO: 663126 - protein, 14 aa, Homo sapiens
  CDR3 for beta chain variable domain of TCR clone 331563 (TRBV19, TRBJ2-1)
CASPTFVLSGEQFF

SEQ ID NO: 663127 - protein, 13 aa, Homo sapiens
  CDR3 for alpha chain variable domain of TCR clone 331564 (TRAV13-2, TRAJ13)
CAETAGGYQKVTF

SEQ ID NO: 663128 - protein, 15 aa, Homo sapiens
  CDR3 for beta chain variable domain of TCR clone 331564 (TRBV20-1, TRBJ1-5)
CSARVGRLVSQPQHF

SEQ ID NO: 663129 - protein, 14 aa, Homo sapiens
  CDR3 for alpha chain variable domain of TCR clone 331565 (TRAV1-2, TRAJ6)
CAVSLSGGSYMPTF

SEQ ID NO: 663130 - protein, 15 aa, Homo sapiens
  CDR3 for beta chain variable domain of TCR clone 331565 (TRBV28, TRBJ2-7)
CASSPGGGGFYEQYF

SEQ ID NO: 663131 - protein, 12 aa, Homo sapiens
  CDR3 for alpha chain variable domain of TCR clone 331566 (TRAV12-3, TRAJ29)
CAAAKGNTPLVF

SEQ ID NO: 663132 - protein, 13 aa, Homo sapiens
  CDR3 for beta chain variable domain of TCR clone 331566 (TRBV7-3, TRBJ1-1)
CASSQDWGAEAFF

SEQ ID NO: 663133 - protein, 13 aa, Homo sapiens
  CDR3 for alpha chain variable domain of TCR clone 331567 (TRAV3, TRAJ21)
CAVREPDFNKFYF

SEQ ID NO: 663134 - protein, 15 aa, Homo sapiens
  CDR3 for beta chain variable domain of TCR clone 331567 (TRBV7-3, TRBJ2-1)
CASSLGQGPFGEQFF

SEQ ID NO: 663135 - protein, 13 aa, Homo sapiens
  CDR3 for alpha chain variable domain of TCR clone 331568 (TRAV12-3, TRAJ13)
CAMGTGGYQKVTF

SEQ ID NO: 663136 - protein, 15 aa, Homo sapiens
  CDR3 for beta chain variable domain of TCR clone 331568 (TRBV5-4, TRBJ2-1)
CASSLGLADINEQFF

SEQ ID NO: 663137 - protein, 15 aa, Homo sapiens
  CDR3 for alpha chain variable domain of TCR clone 331569 (TRAV8-3, TRAJ23)
CAVGDRYNQGGKLIF

SEQ ID NO: 663138 - protein, 14 aa, Homo sapiens
  CDR3 for beta chain variable domain of TCR clone 331569 (TRBV19, TRBJ2-1)
CASPTFVLSGEQFF

SEQ ID NO: 663139 - protein, 12 aa, Homo sapiens
  CDR3 for alpha chain variable domain of TCR clone 331570 (TRAV13-2, TRAJ23)
CAERHRGGKLIF

SEQ ID NO: 663140 - protein, 15 aa, Homo sapiens
  CDR3 for beta chain variable domain of TCR clone 331570 (TRBV9, TRBJ2-1)
CASSLAGSSYNEQFF

SEQ ID NO: 663141 - protein, 14 aa, Homo sapiens
  CDR3 for alpha chain variable domain of TCR clone 331571 (TRAV30, TRAJ33)
CGTVAPRSNYQLIW

SEQ ID NO: 663142 - protein, 16 aa, Homo sapiens
  CDR3 for beta chain variable domain of TCR clone 331571 (TRBV11-2, TRBJ2-7)
CASSPTTGGVSYEQYF

SEQ ID NO: 663143 - protein, 15 aa, Homo sapiens
  CDR3 for alpha chain variable domain of TCR clone 331572 (TRAV21, TRAJ40)
CAVGPQTSGTYKYIF

SEQ ID NO: 663144 - protein, 15 aa, Homo sapiens
  CDR3 for beta chain variable domain of TCR clone 331572 (TRBV5-1, TRBJ2-3)
CASSVTSGSTDTQYF

SEQ ID NO: 663145 - protein, 16 aa, Homo sapiens
  CDR3 for alpha chain variable domain of TCR clone 331573 (TRAV17, TRAJ36)
CATVSLNWGKQPLLSD

SEQ ID NO: 663146 - protein, 13 aa, Homo sapiens
  CDR3 for beta chain variable domain of TCR clone 331573 (TRBV4-1, TRBJ1-1)
CASSQLGTGEAFF

SEQ ID NO: 663147 - protein, 18 aa, Homo sapiens
  CDR3 for alpha chain variable domain of TCR clone 331574 (TRAV13-1, TRAJ45)
CAAPPQEYSGGGADGLTF

SEQ ID NO: 663148 - protein, 15 aa, Homo sapiens
  CDR3 for beta chain variable domain of TCR clone 331574 (TRBV10-2, TRBJ2-6)
CASSEQGTGANVLTF

SEQ ID NO: 663149 - protein, 18 aa, Homo sapiens
  CDR3 for alpha chain variable domain of TCR clone 331575 (TRAV21, TRAJ52)
CAVRPSPASGTSYGKLTF

SEQ ID NO: 663150 - protein, 17 aa, Homo sapiens
  CDR3 for beta chain variable domain of TCR clone 331575 (TRBV13, TRBJ2-3)
CASSLPRVAGGRNTQYF

SEQ ID NO: 663151 - protein, 12 aa, Homo sapiens
  CDR3 for alpha chain variable domain of TCR clone 331576 (TRAV12-3, TRAJ10)
CAPAGGGNKLTS

SEQ ID NO: 663152 - protein, 15 aa, Homo sapiens
  CDR3 for beta chain variable domain of TCR clone 331576 (TRBV18, TRBJ2-5)
CASSPDPGLQETQYF

SEQ ID NO: 663153 - protein, 15 aa, Homo sapiens
  CDR3 for alpha chain variable domain of TCR clone 331577 (TRAV17, TRAJ23)
CATDAEDNQGGKLIF

SEQ ID NO: 663154 - protein, 12 aa, Homo sapiens
  CDR3 for beta chain variable domain of TCR clone 331577 (TRBV11-2, TRBJ2-2)
CASSLGGGELFF

SEQ ID NO: 663155 - protein, 14 aa, Homo sapiens
  CDR3 for alpha chain variable domain of TCR clone 331578 (TRAV12-2, TRAJ13)
CAVKKTGGYQKVTF

SEQ ID NO: 663156 - protein, 16 aa, Homo sapiens
  CDR3 for beta chain variable domain of TCR clone 331578 (TRBV19, TRBJ1-6)
CASSVAPVAGNSPLHF

SEQ ID NO: 663157 - protein, 13 aa, Homo sapiens
  CDR3 for alpha chain variable domain of TCR clone 331579 (TRAV36/DV7, TRAJ37)
CAVFSSNTGKLIF

SEQ ID NO: 663158 - protein, 20 aa, Homo sapiens
  CDR3 for beta chain variable domain of TCR clone 331579 (TRBV11-2, TRBJ2-2)
LRTRPCISVPAALEAGSCFF

SEQ ID NO: 663159 - protein, 12 aa, Homo sapiens
  CDR3 for alpha chain variable domain of TCR clone 331580 (TRAV17, TRAJ52)
CATERPSGGTSY

SEQ ID NO: 663160 - protein, 15 aa, Homo sapiens
  CDR3 for beta chain variable domain of TCR clone 331580 (TRBV5-1, TRBJ2-1)
CASSLVANSYSEQFF

SEQ ID NO: 663161 - protein, 14 aa, Homo sapiens
  CDR3 for alpha chain variable domain of TCR clone 331581 (TRAV25, TRAJ35)
CARRMEGFGNVLDC

SEQ ID NO: 663162 - protein, 13 aa, Homo sapiens
  CDR3 for beta chain variable domain of TCR clone 331581 (TRBV7-2, TRBJ1-4)
CASSLAGLEKLFF

SEQ ID NO: 663163 - protein, 14 aa, Homo sapiens
  CDR3 for alpha chain variable domain of TCR clone 331582 (TRAV1-2, TRAJ16)
GAVNRFADGQKLLF

SEQ ID NO: 663164 - protein, 16 aa, Homo sapiens
  CDR3 for beta chain variable domain of TCR clone 331582 (TRBV11-2, TRBJ1-2)
CASSLDTGGADYGYTF

SEQ ID NO: 663165 - protein, 15 aa, Homo sapiens
  CDR3 for alpha chain variable domain of TCR clone 331583 (TRAV2, TRAJ9)
CAVEDRGTGGFKTIF

SEQ ID NO: 663166 - protein, 15 aa, Homo sapiens
  CDR3 for beta chain variable domain of TCR clone 331583 (TRBV6-5, TRBJ2-1)
CASSYDAGAGNEQFF

SEQ ID NO: 663167 - protein, 11 aa, Homo sapiens
  CDR3 for alpha chain variable domain of TCR clone 331584 (TRAV21, TRAJ34)
CAHYNTDKLIF

SEQ ID NO: 663168 - protein, 12 aa, Homo sapiens
  CDR3 for beta chain variable domain of TCR clone 331584 (TRBV7-3, TRBJ2-1)
CASSFQSGTQFF

SEQ ID NO: 663169 - protein, 10 aa, Homo sapiens
  CDR3 for alpha chain variable domain of TCR clone 331585 (TRAV12-2, TRAJ49)
CAVRRNQFYF

SEQ ID NO: 663170 - protein, 14 aa, Homo sapiens
  CDR3 for beta chain variable domain of TCR clone 331585 (TRBV7-2, TRBJ2-7)
CASSLRWEVNEQYF

SEQ ID NO: 663171 - protein, 12 aa, Homo sapiens
  CDR3 for alpha chain variable domain of TCR clone 331586 (TRAV1-1, TRAJ43)
CAPRVSSNNMRF

SEQ ID NO: 663172 - protein, 15 aa, Homo sapiens
  CDR3 for beta chain variable domain of TCR clone 331586 (TRBV5-1, TRBJ2-7)
CASSLGDFTTYEQYF

SEQ ID NO: 663173 - protein, 16 aa, Homo sapiens
  CDR3 for alpha chain variable domain of TCR clone 331587 (TRAV3, TRAJ18)
CAVRDGRGSTLGRLYF

SEQ ID NO: 663174 - protein, 15 aa, Homo sapiens
  CDR3 for beta chain variable domain of TCR clone 331587 (TRBV7-9, TRBJ1-6)
CVSSSPGRGNSPLHF

SEQ ID NO: 663175 - protein, 13 aa, Homo sapiens
  CDR3 for alpha chain variable domain of TCR clone 331588 (TRAV3, TRAJ41)
CAVSSNSGYARNF

SEQ ID NO: 663176 - protein, 13 aa, Homo sapiens
  CDR3 for beta chain variable domain of TCR clone 331588 (TRBV20-1, TRBJ2-2)
CSALSGGAGELFF

SEQ ID NO: 663177 - protein, 12 aa, Homo sapiens
  CDR3 for alpha chain variable domain of TCR clone 331589 (TRAV12-3, TRAJ17)
CAMTPTGNKLTF

SEQ ID NO: 663178 - protein, 17 aa, Homo sapiens
  CDR3 for beta chain variable domain of TCR clone 331589 (TRBV20-1, TRBJ2-7)
CSGRDRVSGWTSSTSGR

SEQ ID NO: 663179 - protein, 16 aa, Homo sapiens
  CDR3 for alpha chain variable domain of TCR clone 331590 (TRAV14/DV4, TRAJ20)
SAMREGRSRDDYKLSF

SEQ ID NO: 663180 - protein, 17 aa, Homo sapiens
  CDR3 for beta chain variable domain of TCR clone 331590 (TRBV11-2, TRBJ2-1)
CASSLYPPGVEYNEQFF

SEQ ID NO: 663181 - protein, 15 aa, Homo sapiens
  CDR3 for alpha chain variable domain of TCR clone 331591 (TRAV3, TRAJ5)
CAVRDLDTGRRALTF

SEQ ID NO: 663182 - protein, 13 aa, Homo sapiens
  CDR3 for beta chain variable domain of TCR clone 331591 (TRBV27, TRBJ2-7)
CASSLTTGYEQYF

SEQ ID NO: 663183 - protein, 15 aa, Homo sapiens
  CDR3 for alpha chain variable domain of TCR clone 331592 (TRAV36/DV7, TRAJ54)
CAVEKPVQGAQKLVF

SEQ ID NO: 663184 - protein, 17 aa, Homo sapiens
  CDR3 for beta chain variable domain of TCR clone 331592 (TRBV6-5, TRBJ1-2)
RASSSPWEGAFDYGYTF

SEQ ID NO: 663185 - protein, 14 aa, Homo sapiens
  CDR3 for alpha chain variable domain of TCR clone 331593 (TRAV29/DV5, TRAJ49)
CAASLSNTGNQFYF

SEQ ID NO: 663186 - protein, 15 aa, Homo sapiens
  CDR3 for beta chain variable domain of TCR clone 331593 (TRBV20-1, TRBJ2-1)
CSARGIGGTYNEQFC

SEQ ID NO: 663187 - protein, 14 aa, Homo sapiens
  CDR3 for alpha chain variable domain of TCR clone 331594 (TRAV6, TRAJ40)
CALSPTSGTYKYIF

SEQ ID NO: 663188 - protein, 14 aa, Homo sapiens
  CDR3 for beta chain variable domain of TCR clone 331594 (TRBV11-3, TRBJ2-3)
CASSLDPATDTQYF

SEQ ID NO: 663189 - protein, 17 aa, Homo sapiens
  CDR3 for alpha chain variable domain of TCR clone 331595 (TRAV3, TRAJ6)
CAVRDGPRAGGSYIPTF

SEQ ID NO: 663190 - protein, 13 aa, Homo sapiens
  CDR3 for beta chain variable domain of TCR clone 331595 (TRBV29-1, TRBJ1-1)
CSVGDSRNTEAVF

SEQ ID NO: 663191 - protein, 14 aa, Homo sapiens
  CDR3 for alpha chain variable domain of TCR clone 331596 (TRAV9-2, TRAJ39)
CALYIYNAGNMLTF

SEQ ID NO: 663192 - protein, 14 aa, Homo sapiens
  CDR3 for beta chain variable domain of TCR clone 331596 (TRBV19, TRBJ2-1)
SASPTFVLSGEQFF

SEQ ID NO: 663193 - protein, 17 aa, Homo sapiens
  CDR3 for alpha chain variable domain of TCR clone 331597 (TRAV3, TRAJ12)
CAVRDGGRMDSSYKLIF

SEQ ID NO: 663194 - protein, 13 aa, Homo sapiens
  CDR3 for beta chain variable domain of TCR clone 331597 (TRBV19, TRBJ1-5)
CASSIGGNQPQHF

SEQ ID NO: 663195 - protein, 13 aa, Homo sapiens
  CDR3 for alpha chain variable domain of TCR clone 331598 (TRAV30, TRAJ26)
CGTEIPLGKNFVF

SEQ ID NO: 663196 - protein, 16 aa, Homo sapiens
  CDR3 for beta chain variable domain of TCR clone 331598 (TRBV6-1, TRBJ1-5)
CASSDIAGQINQPQHF

SEQ ID NO: 663197 - protein, 16 aa, Homo sapiens
  CDR3 for alpha chain variable domain of TCR clone 331599 (TRAV3, TRAJ37)
CAVKGKGSGNTGKLIF

SEQ ID NO: 663198 - protein, 16 aa, Homo sapiens
  CDR3 for beta chain variable domain of TCR clone 331599 (TRBV12-5, TRBJ2-5)
CASGPRTSGNQETQYF

SEQ ID NO: 663199 - protein, 12 aa, Homo sapiens
  CDR3 for alpha chain variable domain of TCR clone 331600 (TRAV38-1, TRAJ30)
CAFMGRDDKIIF

SEQ ID NO: 663200 - protein, 13 aa, Homo sapiens
  CDR3 for beta chain variable domain of TCR clone 331600 (TRBV7-3, TRBJ1-1)
CASSQDWGAEAFF

SEQ ID NO: 663201 - protein, 21 aa, Homo sapiens
  CDR3 for alpha chain variable domain of TCR clone 331601 (TRAV8-4, TRAJ47)
HLTKPSAHMCDAAERGNKLVF

SEQ ID NO: 663202 - protein, 14 aa, Homo sapiens
  CDR3 for beta chain variable domain of TCR clone 331601 (TRBV7-9, TRBJ2-1)
CASSPRDSLYEQFF

SEQ ID NO: 663203 - protein, 11 aa, Homo sapiens
  CDR3 for alpha chain variable domain of TCR clone 331602 (TRAV1-1, TRAJ23)
CAVRQGGKLIF

SEQ ID NO: 663204 - protein, 15 aa, Homo sapiens
  CDR3 for beta chain variable domain of TCR clone 331602 (TRBV5-1, TRBJ2-2)
CASSTFNINTGELFF

SEQ ID NO: 663205 - protein, 16 aa, Homo sapiens
  CDR3 for alpha chain variable domain of TCR clone 331603 (TRAV9-2, TRAJ52)
CALQGAGGTSYGKLTF

SEQ ID NO: 663206 - protein, 15 aa, Homo sapiens
  CDR3 for beta chain variable domain of TCR clone 331603 (TRBV18, TRBJ1-5)
CASPPSDRSNQPQHF

SEQ ID NO: 663207 - protein, 15 aa, Homo sapiens
  CDR3 for alpha chain variable domain of TCR clone 331604 (TRAV26-1, TRAJ53)
CIVMRSGGSNYKLTF

SEQ ID NO: 663208 - protein, 13 aa, Homo sapiens
  CDR3 for beta chain variable domain of TCR clone 331604 (TRBV7-2, TRBJ2-2)
CASSLAVTGELFF

SEQ ID NO: 663209 - protein, 12 aa, Homo sapiens
  CDR3 for alpha chain variable domain of TCR clone 331605 (TRAV35, TRAJ40)
CAGRAGTYNYIF

SEQ ID NO: 663210 - protein, 14 aa, Homo sapiens
  CDR3 for beta chain variable domain of TCR clone 331605 (TRBV7-2, TRBJ1-3)
CASSRGGTGNTIYF

SEQ ID NO: 663211 - protein, 13 aa, Homo sapiens
  CDR3 for alpha chain variable domain of TCR clone 331606 (TRAV13-1, TRAJ32)
CARGSGATNKLIF

SEQ ID NO: 663212 - protein, 15 aa, Homo sapiens
  CDR3 for beta chain variable domain of TCR clone 331606 (TRBV5-5, TRBJ1-1)
CASSLVGKDNTEAFF

SEQ ID NO: 663213 - protein, 12 aa, Homo sapiens
  CDR3 for alpha chain variable domain of TCR clone 331607 (TRAV21, TRAJ39)
CAADNAGNMPAF

SEQ ID NO: 663214 - protein, 12 aa, Homo sapiens
  CDR3 for beta chain variable domain of TCR clone 331607 (TRBV5-4, TRBJ2-7)
CASSWAGQGENF

SEQ ID NO: 663215 - protein, 11 aa, Homo sapiens
  CDR3 for alpha chain variable domain of TCR clone 331608 (TRAV21, TRAJ23)
CAPQSRGKLIF

SEQ ID NO: 663216 - protein, 14 aa, Homo sapiens
  CDR3 for beta chain variable domain of TCR clone 331608 (TRBV12-4, TRBJ1-1)
CASTWTGHDTEAFF

SEQ ID NO: 663217 - protein, 13 aa, Homo sapiens
  CDR3 for alpha chain variable domain of TCR clone 331609 (TRAV2, TRAJ24)
CSVTTDSWVELQF

SEQ ID NO: 663218 - protein, 14 aa, Homo sapiens
  CDR3 for beta chain variable domain of TCR clone 331609 (TRBV13, TRBJ2-5)
CASSLGRGQETQYF

SEQ ID NO: 663219 - protein, 13 aa, Homo sapiens
  CDR3 for alpha chain variable domain of TCR clone 331610 (TRAV27, TRAJ16)
CAGACSDGQKLLF

SEQ ID NO: 663220 - protein, 14 aa, Homo sapiens
  CDR3 for beta chain variable domain of TCR clone 331610 (TRBV7-8, TRBJ2-3)
CASSLEAGTDTQYF

SEQ ID NO: 663221 - protein, 17 aa, Homo sapiens
  CDR3 for alpha chain variable domain of TCR clone 331611 (TRAV12-3, TRAJ6)
CAMSARGGAGGSYIPTF

SEQ ID NO: 663222 - protein, 16 aa, Homo sapiens
  CDR3 for beta chain variable domain of TCR clone 331611 (TRBV2, TRBJ2-7)
CASSEPWTGPSYEQYF

SEQ ID NO: 663223 - protein, 13 aa, Homo sapiens
  CDR3 for alpha chain variable domain of TCR clone 331612 (TRAV20, TRAJ21)
CAVEGYNFNKFYF

SEQ ID NO: 663224 - protein, 13 aa, Homo sapiens
  CDR3 for beta chain variable domain of TCR clone 331612 (TRBV24-1, TRBJ2-1)
CATSAGPYNEQFF

SEQ ID NO: 663225 - protein, 15 aa, Homo sapiens
  CDR3 for alpha chain variable domain of TCR clone 331613 (TRAV27, TRAJ38)
CAARRNAGDNRKLIW

SEQ ID NO: 663226 - protein, 13 aa, Homo sapiens
  CDR3 for beta chain variable domain of TCR clone 331613 (TRBV20-1, TRBJ1-1)
CSARAGGNTEAFF

SEQ ID NO: 663227 - protein, 10 aa, Homo sapiens
  CDR3 for alpha chain variable domain of TCR clone 331614 (TRAV23/DV6, TRAJ43)
CAAAVAALEQ

SEQ ID NO: 663228 - protein, 13 aa, Homo sapiens
  CDR3 for beta chain variable domain of TCR clone 331614 (TRBV12-4, TRBJ1-2)
CASSLRQGKGYTI

SEQ ID NO: 663229 - protein, 16 aa, Homo sapiens
  CDR3 for alpha chain variable domain of TCR clone 331615 (TRAV30, TRAJ24)
CGTEIVDADSWGKSQF

SEQ ID NO: 663230 - protein, 17 aa, Homo sapiens
  CDR3 for beta chain variable domain of TCR clone 331615 (TRBV20-1, TRBJ2-1)
CSAPPRLAGTRYNEQFF

SEQ ID NO: 663231 - protein, 11 aa, Homo sapiens
  CDR3 for alpha chain variable domain of TCR clone 331616 (TRAV12-1, TRAJ30)
CVVNGQDKIIF

SEQ ID NO: 663232 - protein, 16 aa, Homo sapiens
  CDR3 for beta chain variable domain of TCR clone 331616 (TRBV7-3, TRBJ2-2)
CASSLKRGTLSGELFF

SEQ ID NO: 663233 - protein, 18 aa, Homo sapiens
  CDR3 for alpha chain variable domain of TCR clone 331617 (TRAV12-3, TRAJ52)
CAMSRTNAGGTSYGKLTF

SEQ ID NO: 663234 - protein, 17 aa, Homo sapiens
  CDR3 for beta chain variable domain of TCR clone 331617 (TRBV7-9, TRBJ2-1)
CASSLVASYPSYNEQFF

SEQ ID NO: 663235 - protein, 15 aa, Homo sapiens
  CDR3 for alpha chain variable domain of TCR clone 331618 (TRAV8-3, TRAJ27)
CAVGPSKTNAGKSTF

SEQ ID NO: 663236 - protein, 15 aa, Homo sapiens
  CDR3 for beta chain variable domain of TCR clone 331618 (TRBV6-4, TRBJ1-5)
CASSASSRINQPQHF

SEQ ID NO: 663237 - protein, 12 aa, Homo sapiens
  CDR3 for alpha chain variable domain of TCR clone 331619 (TRAV12-1, TRAJ31)
CVSWNNNARLLF

SEQ ID NO: 663238 - protein, 15 aa, Homo sapiens
  CDR3 for beta chain variable domain of TCR clone 331619 (TRBV7-2, TRBJ1-5)
CASRLDRGQDPPQHF

SEQ ID NO: 663239 - protein, 14 aa, Homo sapiens
  CDR3 for alpha chain variable domain of TCR clone 331620 (TRAV12-1, TRAJ12)
CVVTRMDSSYKLIF

SEQ ID NO: 663240 - protein, 13 aa, Homo sapiens
  CDR3 for beta chain variable domain of TCR clone 331620 (TRBV20-1, TRBJ1-1)
CIARGGGNTEAFF

SEQ ID NO: 663241 - protein, 13 aa, Homo sapiens
  CDR3 for alpha chain variable domain of TCR clone 331621 (TRAV17, TRAJ34)
CATVTYNTDKLIF

SEQ ID NO: 663242 - protein, 14 aa, Homo sapiens
  CDR3 for beta chain variable domain of TCR clone 331621 (TRBV9, TRBJ2-3)
CASSAGGGPDTQYF

SEQ ID NO: 663243 - protein, 12 aa, Homo sapiens
  CDR3 for alpha chain variable domain of TCR clone 331622 (TRAV13-2, TRAJ23)
CAERHRGGNLIL

SEQ ID NO: 663244 - protein, 16 aa, Homo sapiens
  CDR3 for beta chain variable domain of TCR clone 331622 (TRBV20-1, TRBJ1-4)
CSAPGQGLLTNEKLFF

SEQ ID NO: 663245 - protein, 23 aa, Homo sapiens
  CDR3 for alpha chain variable domain of TCR clone 331623 (TRAV30, TRAJ43)
CTLRPPSSVTQEPTSAALSDMRF

SEQ ID NO: 663246 - protein, 14 aa, Homo sapiens
  CDR3 for beta chain variable domain of TCR clone 331623 (TRBV25-1, TRBJ1-1)
CASTHLGGNTEAFF

SEQ ID NO: 663247 - protein, 13 aa, Homo sapiens
  CDR3 for alpha chain variable domain of TCR clone 331624 (TRAV22, TRAJ29)
CAVGGSGNTPLVF

SEQ ID NO: 663248 - protein, 12 aa, Homo sapiens
  CDR3 for beta chain variable domain of TCR clone 331624 (TRBV6-3, TRBJ2-7)
CASSLTPYEQYF

SEQ ID NO: 663249 - protein, 14 aa, Homo sapiens
  CDR3 for alpha chain variable domain of TCR clone 331625 (TRAV6, TRAJ8)
CALERGTGFQKLLF

SEQ ID NO: 663250 - protein, 20 aa, Homo sapiens
  CDR3 for beta chain variable domain of TCR clone 331625 (TRBV28, TRBJ2-1)
CASTPIGRSPGLAGGNEQFF

SEQ ID NO: 663251 - protein, 12 aa, Homo sapiens
  CDR3 for alpha chain variable domain of TCR clone 331626 (TRAV26-1, TRAJ43)
RIVRPRGDDMRF

SEQ ID NO: 663252 - protein, 16 aa, Homo sapiens
  CDR3 for beta chain variable domain of TCR clone 331626 (TRBV3-1, TRBJ2-1)
CASSQGGRRSFDEQFF

SEQ ID NO: 663253 - protein, 17 aa, Homo sapiens
  CDR3 for alpha chain variable domain of TCR clone 331627 (TRAV8-6, TRAJ58)
CAVSSWVGETSGSRLTF

SEQ ID NO: 663254 - protein, 11 aa, Homo sapiens
  CDR3 for beta chain variable domain of TCR clone 331627 (TRBV7-2, TRBJ2-7)
CASSLGLAMHF

SEQ ID NO: 663255 - protein, 12 aa, Homo sapiens
  CDR3 for alpha chain variable domain of TCR clone 331628 (TRAV13-1, TRAJ53)
AASGGSNYKLTF

SEQ ID NO: 663256 - protein, 15 aa, Homo sapiens
  CDR3 for beta chain variable domain of TCR clone 331628 (TRBV5-1, TRBJ2-1)
CAGSPPRAPYNEQFF

SEQ ID NO: 663257 - protein, 10 aa, Homo sapiens
  CDR3 for alpha chain variable domain of TCR clone 331629 (TRAV1-2, TRAJ20)
CALNDYKLSF

SEQ ID NO: 663258 - protein, 14 aa, Homo sapiens
  CDR3 for beta chain variable domain of TCR clone 331629 (TRBV19, TRBJ2-1)
CASPTFVLSGGQFF

SEQ ID NO: 663259 - protein, 13 aa, Homo sapiens
  CDR3 for alpha chain variable domain of TCR clone 331630 (TRAV21, TRAJ27)
CAARPGNAGKSTF

SEQ ID NO: 663260 - protein, 16 aa, Homo sapiens
  CDR3 for beta chain variable domain of TCR clone 331630 (TRBV28, TRBJ2-2)
CASSLEGGSNTGELFF

SEQ ID NO: 663261 - protein, 16 aa, Homo sapiens
  CDR3 for alpha chain variable domain of TCR clone 331631 (TRAV13-2, TRAJ32)
CAENMNYGVATNKLIF

SEQ ID NO: 663262 - protein, 14 aa, Homo sapiens
  CDR3 for beta chain variable domain of TCR clone 331631 (TRBV15, TRBJ2-5)
CASSSTGYQETQYF

SEQ ID NO: 663263 - protein, 15 aa, Homo sapiens
  CDR3 for alpha chain variable domain of TCR clone 331632 (TRAV8-3, TRAJ40)
CAAPSLGSGTYKYIF

SEQ ID NO: 663264 - protein, 16 aa, Homo sapiens
  CDR3 for beta chain variable domain of TCR clone 331632 (TRBV7-3, TRBJ2-3)
CASSLSGFRPEDTQYF

SEQ ID NO: 663265 - protein, 16 aa, Homo sapiens
  CDR3 for alpha chain variable domain of TCR clone 331633 (TRAV12-3, TRAJ53)
CAMSPGSGGSNYKLTF

SEQ ID NO: 663266 - protein, 17 aa, Homo sapiens
  CDR3 for beta chain variable domain of TCR clone 331633 (TRBV28, TRBJ2-7)
CASSPRRGRRWKGGQYF

SEQ ID NO: 663267 - protein, 12 aa, Homo sapiens
  CDR3 for alpha chain variable domain of TCR clone 331634 (TRAV27, TRAJ21)
CAGVRQLQQILL

SEQ ID NO: 663268 - protein, 13 aa, Homo sapiens
  CDR3 for beta chain variable domain of TCR clone 331634 (TRBV7-9, TRBJ1-4)
CQSLEGQSEKLFF

SEQ ID NO: 663269 - protein, 16 aa, Homo sapiens
  CDR3 for alpha chain variable domain of TCR clone 331635 (TRAV6, TRAJ37)
CSLAFHGSGNTGQLIF

SEQ ID NO: 663270 - protein, 18 aa, Homo sapiens
  CDR3 for beta chain variable domain of TCR clone 331635 (TRBV4-3, TRBJ1-2)
CASSQDGQSAPSDYGYTF

SEQ ID NO: 663271 - protein, 11 aa, Homo sapiens
  CDR3 for alpha chain variable domain of TCR clone 331636 (TRAV2, TRAJ33)
CAVDSNYQLIW

SEQ ID NO: 663272 - protein, 16 aa, Homo sapiens
  CDR3 for beta chain variable domain of TCR clone 331636 (TRBV19, TRBJ2-1)
CASSMGGGSSYNEQFF

SEQ ID NO: 663273 - protein, 14 aa, Homo sapiens
  CDR3 for alpha chain variable domain of TCR clone 331637 (TRAV8-3, TRAJ39)
CAVGAWGAGNMLTF

SEQ ID NO: 663274 - protein, 16 aa, Homo sapiens
  CDR3 for beta chain variable domain of TCR clone 331637 (TRBV7-2, TRBJ1-3)
CASSSGRVLSGNTIYF

SEQ ID NO: 663275 - protein, 12 aa, Homo sapiens
  CDR3 for alpha chain variable domain of TCR clone 331638 (TRAV17, TRAJ57)
CATDGGSEKLVF

SEQ ID NO: 663276 - protein, 13 aa, Homo sapiens
  CDR3 for beta chain variable domain of TCR clone 331638 (TRBV7-9, TRBJ2-7)
CASSFAGAYEHYF

SEQ ID NO: 663277 - protein, 18 aa, Homo sapiens
  CDR3 for alpha chain variable domain of TCR clone 331639 (TRAV29/DV5, TRAJ52)
CAAGFRGAGGTSYGKLTF

SEQ ID NO: 663278 - protein, 15 aa, Homo sapiens
  CDR3 for beta chain variable domain of TCR clone 331639 (TRBV7-2, TRBJ2-7)
CASSLKGALTYEQYF

SEQ ID NO: 663279 - protein, 16 aa, Homo sapiens
  CDR3 for alpha chain variable domain of TCR clone 331640 (TRAV30, TRAJ24)
CGTEIVDADSWGKFQF

SEQ ID NO: 663280 - protein, 15 aa, Homo sapiens
  CDR3 for beta chain variable domain of TCR clone 331640 (TRBV27, TRBJ2-1)
CASSLARGAYNEQFF

SEQ ID NO: 663281 - protein, 14 aa, Homo sapiens
  CDR3 for alpha chain variable domain of TCR clone 331641 (TRAV13-1, TRAJ44)
CAAKATGTARKLTF

SEQ ID NO: 663282 - protein, 14 aa, Homo sapiens
  CDR3 for beta chain variable domain of TCR clone 331641 (TRBV19, TRBJ2-2)
CASSTPHRSGELFF

SEQ ID NO: 663283 - protein, 10 aa, Homo sapiens
  CDR3 for alpha chain variable domain of TCR clone 331642 (TRAV30, TRAJ24)
VAQRLWMLTA

SEQ ID NO: 663284 - protein, 14 aa, Homo sapiens
  CDR3 for beta chain variable domain of TCR clone 331642 (TRBV12-5, TRBJ2-5)
CASGSRTHQETQYF

SEQ ID NO: 663285 - protein, 13 aa, Homo sapiens
  CDR3 for alpha chain variable domain of TCR clone 331643 (TRAV16, TRAJ10)
CAPAREEETNSPL

SEQ ID NO: 663286 - protein, 15 aa, Homo sapiens
  CDR3 for beta chain variable domain of TCR clone 331643 (TRBV6-3, TRBJ2-7)
CASSSPGAVFYEQYF

SEQ ID NO: 663287 - protein, 16 aa, Homo sapiens
  CDR3 for alpha chain variable domain of TCR clone 331644 (TRAV30, TRAJ24)
CGTEIVGADSWGKFPF

SEQ ID NO: 663288 - protein, 14 aa, Homo sapiens
  CDR3 for beta chain variable domain of TCR clone 331644 (TRBV12-5, TRBJ2-5)
CASGSRTHQETQYF

SEQ ID NO: 663289 - protein, 16 aa, Homo sapiens
  CDR3 for alpha chain variable domain of TCR clone 331645 (TRAV30, TRAJ24)
CGTEIVDADSWGKFQF

SEQ ID NO: 663290 - protein, 14 aa, Homo sapiens
  CDR3 for beta chain variable domain of TCR clone 331645 (TRBV19, TRBJ2-1)
CASPTFVLSGERFF

SEQ ID NO: 663291 - protein, 12 aa, Homo sapiens
  CDR3 for alpha chain variable domain of TCR clone 331646 (TRAV16, TRAJ10)
CSRTGGGSKLNF

SEQ ID NO: 663292 - protein, 15 aa, Homo sapiens
  CDR3 for beta chain variable domain of TCR clone 331646 (TRBV6-3, TRBJ2-7)
CASSSPGTVFYEQYF

SEQ ID NO: 663293 - protein, 15 aa, Homo sapiens
  CDR3 for alpha chain variable domain of TCR clone 331647 (TRAV26-1, TRAJ29)
CIVRVEGSGKTPRVF

SEQ ID NO: 663294 - protein, 14 aa, Homo sapiens
  CDR3 for beta chain variable domain of TCR clone 331647 (TRBV18, TRBJ2-5)
CASSPGVSQETQYF

SEQ ID NO: 663295 - protein, 14 aa, Homo sapiens
  CDR3 for alpha chain variable domain of TCR clone 331648 (TRAV13-1, TRAJ52)
CAANGGTSYGKLTF

SEQ ID NO: 663296 - protein, 19 aa, Homo sapiens
  CDR3 for beta chain variable domain of TCR clone 331648 (TRBV25-1, TRBJ2-2)
CAILVYRVDRGRKTGELFF

SEQ ID NO: 663297 - protein, 11 aa, Homo sapiens
  CDR3 for alpha chain variable domain of TCR clone 331649 (TRAV1-2, TRAJ11)
FAVRGYSTLTF

SEQ ID NO: 663298 - protein, 15 aa, Homo sapiens
  CDR3 for beta chain variable domain of TCR clone 331649 (TRBV29-1, TRBJ2-1)
CSVPTGLALYNEQFF

SEQ ID NO: 663299 - protein, 10 aa, Homo sapiens
  CDR3 for alpha chain variable domain of TCR clone 331650 (TRAV13-2, TRAJ32)
CAETGLWLCY

SEQ ID NO: 663300 - protein, 15 aa, Homo sapiens
  CDR3 for beta chain variable domain of TCR clone 331650 (TRBV27, TRBJ1-6)
CASSFDRGLGSPLHF

SEQ ID NO: 663301 - protein, 14 aa, Homo sapiens
  CDR3 for alpha chain variable domain of TCR clone 331651 (TRAV8-1, TRAJ36)
CAVNSPTGANNLFF

SEQ ID NO: 663302 - protein, 15 aa, Homo sapiens
  CDR3 for beta chain variable domain of TCR clone 331651 (TRBV7-2, TRBJ2-3)
CASSLEQWGTDTQYF

SEQ ID NO: 663303 - protein, 16 aa, Homo sapiens
  CDR3 for alpha chain variable domain of TCR clone 331652 (TRAV1-2, TRAJ10)
CAVRGVLTGGGNKLTF

SEQ ID NO: 663304 - protein, 14 aa, Homo sapiens
  CDR3 for beta chain variable domain of TCR clone 331652 (TRBV7-9, TRBJ2-7)
CASSIGQGAGEQYF

SEQ ID NO: 663305 - protein, 13 aa, Homo sapiens
  CDR3 for alpha chain variable domain of TCR clone 331653 (TRAV27, TRAJ6)
CAGGTRGSYIPPF

SEQ ID NO: 663306 - protein, 13 aa, Homo sapiens
  CDR3 for beta chain variable domain of TCR clone 331653 (TRBV4-1, TRBJ2-2)
CASSQENTGELFF

SEQ ID NO: 663307 - protein, 15 aa, Homo sapiens
  CDR3 for alpha chain variable domain of TCR clone 331654 (TRAV26-1, TRAJ29)
CIVRVQGAGNTPLVF

SEQ ID NO: 663308 - protein, 15 aa, Homo sapiens
  CDR3 for beta chain variable domain of TCR clone 331654 (TRBV7-9, TRBJ1-5)
CASSQGHQPNQPQHF

SEQ ID NO: 663309 - protein, 16 aa, Homo sapiens
  CDR3 for alpha chain variable domain of TCR clone 331655 (TRAV21, TRAJ37)
CAVRPRGSSNTGKLIC

SEQ ID NO: 663310 - protein, 16 aa, Homo sapiens
  CDR3 for beta chain variable domain of TCR clone 331655 (TRBV2, TRBJ2-1)
CASSVGGSLSYNEQFF

SEQ ID NO: 663311 - protein, 12 aa, Homo sapiens
  CDR3 for alpha chain variable domain of TCR clone 331656 (TRAV1-1, TRAJ39)
CAVPVVGNMITF

SEQ ID NO: 663312 - protein, 15 aa, Homo sapiens
  CDR3 for beta chain variable domain of TCR clone 331656 (TRBV7-3, TRBJ2-2)
CASSETGQGTGELFF

SEQ ID NO: 663313 - protein, 12 aa, Homo sapiens
  CDR3 for alpha chain variable domain of TCR clone 331657 (TRAV13-1, TRAJ21)
RAAKEGLNKFYF

SEQ ID NO: 663314 - protein, 14 aa, Homo sapiens
  CDR3 for beta chain variable domain of TCR clone 331657 (TRBV5-4, TRBJ1-1)
CASSLDSRRDEAFF

SEQ ID NO: 663315 - protein, 13 aa, Homo sapiens
  CDR3 for alpha chain variable domain of TCR clone 331658 (TRAV13-1, TRAJ48)
CAAASFGNEKLTF

SEQ ID NO: 663316 - protein, 15 aa, Homo sapiens
  CDR3 for beta chain variable domain of TCR clone 331658 (TRBV19, TRBJ2-7)
CASSIGGGLVNEQYF

SEQ ID NO: 663317 - protein, 14 aa, Homo sapiens
  CDR3 for alpha chain variable domain of TCR clone 331659 (TRAV1-2, TRAJ8)
CAVREDTGFHKLVF

SEQ ID NO: 663318 - protein, 12 aa, Homo sapiens
  CDR3 for beta chain variable domain of TCR clone 331659 (TRBV2, TRBJ2-1)
CAYGPPGNEQFF

SEQ ID NO: 663319 - protein, 15 aa, Homo sapiens
  CDR3 for alpha chain variable domain of TCR clone 331660 (TRAV23/DV6, TRAJ18)
CEARYRGSTLGRHYF

SEQ ID NO: 663320 - protein, 13 aa, Homo sapiens
  CDR3 for beta chain variable domain of TCR clone 331660 (TRBV7-2, TRBJ2-7)
CASSSPSGSEQYF

SEQ ID NO: 663321 - protein, 12 aa, Homo sapiens
  CDR3 for alpha chain variable domain of TCR clone 331661 (TRAV12-2, TRAJ31)
CAVNTPDATLMF

SEQ ID NO: 663322 - protein, 15 aa, Homo sapiens
  CDR3 for beta chain variable domain of TCR clone 331661 (TRBV4-2, TRBJ1-1)
CASSQDQGLNTEAFF

SEQ ID NO: 663323 - protein, 13 aa, Homo sapiens
  CDR3 for alpha chain variable domain of TCR clone 331662 (TRAV1-2, TRAJ9)
CAVLNTGGSKTIF

SEQ ID NO: 663324 - protein, 17 aa, Homo sapiens
  CDR3 for beta chain variable domain of TCR clone 331662 (TRBV7-2, TRBJ2-3)
CASSLAGGLAGTAGQYF

SEQ ID NO: 663325 - protein, 17 aa, Homo sapiens
  CDR3 for alpha chain variable domain of TCR clone 331663 (TRAV3, TRAJ6)
CAVRDGTRAGGSYIPTF

SEQ ID NO: 663326 - protein, 14 aa, Homo sapiens
  CDR3 for beta chain variable domain of TCR clone 331663 (TRBV7-2, TRBJ2-7)
CASSPKTSLYEQYF

SEQ ID NO: 663327 - protein, 15 aa, Homo sapiens
  CDR3 for alpha chain variable domain of TCR clone 331664 (TRAV12-2, TRAJ53)
CAGNGGGGSNDKLTF

SEQ ID NO: 663328 - protein, 17 aa, Homo sapiens
  CDR3 for beta chain variable domain of TCR clone 331664 (TRBV7-3, TRBJ2-3)
RASSLMKRMRGAATQYF

SEQ ID NO: 663329 - protein, 14 aa, Homo sapiens
  CDR3 for alpha chain variable domain of TCR clone 331665 (TRAV35, TRAJ53)
CAGNSGGSNYKLTF

SEQ ID NO: 663330 - protein, 15 aa, Homo sapiens
  CDR3 for beta chain variable domain of TCR clone 331665 (TRBV6-5, TRBJ2-1)
CASRGDFDSYNEQFF

SEQ ID NO: 663331 - protein, 16 aa, Homo sapiens
  CDR3 for alpha chain variable domain of TCR clone 331666 (TRAV17, TRAJ36)
CATVSLNWGKQPLLWD

SEQ ID NO: 663332 - protein, 13 aa, Homo sapiens
  CDR3 for beta chain variable domain of TCR clone 331666 (TRBV4-1, TRBJ1-1)
CASSQLVTGEAFF

SEQ ID NO: 663333 - protein, 13 aa, Homo sapiens
  CDR3 for alpha chain variable domain of TCR clone 331667 (TRAV30, TRAJ49)
CGTEWDHRKPVLF

SEQ ID NO: 663334 - protein, 14 aa, Homo sapiens
  CDR3 for beta chain variable domain of TCR clone 331667 (TRBV19, TRBJ2-1)
CASGKSTQYNEQFF

SEQ ID NO: 663335 - protein, 13 aa, Homo sapiens
  CDR3 for alpha chain variable domain of TCR clone 331668 (TRAV27, TRAJ6)
CAAATRGSYIPTF

SEQ ID NO: 663336 - protein, 13 aa, Homo sapiens
  CDR3 for beta chain variable domain of TCR clone 331668 (TRBV4-1, TRBJ2-2)
CASSQENTGELFF

SEQ ID NO: 663337 - protein, 10 aa, Homo sapiens
  CDR3 for alpha chain variable domain of TCR clone 331669 (TRAV30, TRAJ32)
CGTEKDMVVL

SEQ ID NO: 663338 - protein, 15 aa, Homo sapiens
  CDR3 for beta chain variable domain of TCR clone 331669 (TRBV27, TRBJ2-7)
CASSLSVQGGYEQYF

SEQ ID NO: 663339 - protein, 15 aa, Homo sapiens
  CDR3 for alpha chain variable domain of TCR clone 331670 (TRAV12-2, TRAJ53)
CAVNGGGGSNYKLTF

SEQ ID NO: 663340 - protein, 16 aa, Homo sapiens
  CDR3 for beta chain variable domain of TCR clone 331670 (TRBV7-8, TRBJ2-4)
CASSAERTLAKNIQYF

SEQ ID NO: 663341 - protein, 15 aa, Homo sapiens
  CDR3 for alpha chain variable domain of TCR clone 331671 (TRAV8-3, TRAJ37)
CAVGAPSSSTGKLIF

SEQ ID NO: 663342 - protein, 15 aa, Homo sapiens
  CDR3 for beta chain variable domain of TCR clone 331671 (TRBV11-2, TRBJ1-2)
CASSQMRGLNYGYTF

SEQ ID NO: 663343 - protein, 14 aa, Homo sapiens
  CDR3 for alpha chain variable domain of TCR clone 331672 (TRAV38-1, TRAJ40)
CALRPTSGTYKYIF

SEQ ID NO: 663344 - protein, 13 aa, Homo sapiens
  CDR3 for beta chain variable domain of TCR clone 331672 (TRBV6-5, TRBJ2-5)
CASRPQGGETQYF

SEQ ID NO: 663345 - protein, 15 aa, Homo sapiens
  CDR3 for alpha chain variable domain of TCR clone 331673 (TRAV2, TRAJ36)
CAVQGAQTGANNLFF

SEQ ID NO: 663346 - protein, 17 aa, Homo sapiens
  CDR3 for beta chain variable domain of TCR clone 331673 (TRBV7-8, TRBJ2-6)
CASSAGTGGAGANVLTF

SEQ ID NO: 663347 - protein, 10 aa, Homo sapiens
  CDR3 for alpha chain variable domain of TCR clone 331674 (TRAV23/DV6, TRAJ57)
CAASSTLSQG

SEQ ID NO: 663348 - protein, 13 aa, Homo sapiens
  CDR3 for beta chain variable domain of TCR clone 331674 (TRBV12-4, TRBJ2-5)
CASSPGTEETQYF

SEQ ID NO: 663349 - protein, 14 aa, Homo sapiens
  CDR3 for alpha chain variable domain of TCR clone 331675 (TRAV38-1, TRAJ11)
CAFMKHEGYSTLTF

SEQ ID NO: 663350 - protein, 12 aa, Homo sapiens
  CDR3 for beta chain variable domain of TCR clone 331675 (TRBV10-3, TRBJ2-3)
CAISESPQARLF

SEQ ID NO: 663351 - protein, 14 aa, Homo sapiens
  CDR3 for alpha chain variable domain of TCR clone 331676 (TRAV8-6, TRAJ49)
CAVSDPSTGNQFYF

SEQ ID NO: 663352 - protein, 13 aa, Homo sapiens
  CDR3 for beta chain variable domain of TCR clone 331676 (TRBV7-9, TRBJ1-2)
CASSLKQNYGYTF

SEQ ID NO: 663353 - protein, 18 aa, Homo sapiens
  CDR3 for alpha chain variable domain of TCR clone 331677 (TRAV21, TRAJ52)
CAWRPSPAGGTSYGKLTF

SEQ ID NO: 663354 - protein, 15 aa, Homo sapiens
  CDR3 for beta chain variable domain of TCR clone 331677 (TRBV7-9, TRBJ2-7)
CASSSSGLAVYEQYF

SEQ ID NO: 663355 - protein, 15 aa, Homo sapiens
  CDR3 for alpha chain variable domain of TCR clone 331678 (TRAV23/DV6, TRAJ30)
CAASRQESRDDKNIF

SEQ ID NO: 663356 - protein, 17 aa, Homo sapiens
  CDR3 for beta chain variable domain of TCR clone 331678 (TRBV4-3, TRBJ2-1)
CASSQFSSGRASGEQFF

SEQ ID NO: 663357 - protein, 12 aa, Homo sapiens
  CDR3 for alpha chain variable domain of TCR clone 331679 (TRAV1-2, TRAJ26)
CAVRYYGQNFVF

SEQ ID NO: 663358 - protein, 19 aa, Homo sapiens
  CDR3 for beta chain variable domain of TCR clone 331679 (TRBV28, TRBJ2-7)
CASSYSGTSRLGWVYEQYF

SEQ ID NO: 663359 - protein, 18 aa, Homo sapiens
  CDR3 for alpha chain variable domain of TCR clone 331680 (TRAV26-1, TRAJ23)
CIVRVGLEVWDQGGKLIF

SEQ ID NO: 663360 - protein, 16 aa, Homo sapiens
  CDR3 for beta chain variable domain of TCR clone 331680 (TRBV12-4, TRBJ2-5)
CASSFFVRGRQETQYF

SEQ ID NO: 663361 - protein, 11 aa, Homo sapiens
  CDR3 for alpha chain variable domain of TCR clone 331681 (TRAV1-2, TRAJ20)
CAVANDYKLSF

SEQ ID NO: 663362 - protein, 12 aa, Homo sapiens
  CDR3 for beta chain variable domain of TCR clone 331681 (TRBV27, TRBJ2-5)
CASSPTGETQYF

SEQ ID NO: 663363 - protein, 13 aa, Homo sapiens
  CDR3 for alpha chain variable domain of TCR clone 331682 (TRAV13-1, TRAJ41)
CADAPNSGYALNF

SEQ ID NO: 663364 - protein, 15 aa, Homo sapiens
  CDR3 for beta chain variable domain of TCR clone 331682 (TRBV20-1, TRBJ2-7)
CSARDRVSGMDEQYF

SEQ ID NO: 663365 - protein, 15 aa, Homo sapiens
  CDR3 for alpha chain variable domain of TCR clone 331683 (TRAV21, TRAJ24)
CAARSSTDSWGKLQF

SEQ ID NO: 663366 - protein, 14 aa, Homo sapiens
  CDR3 for beta chain variable domain of TCR clone 331683 (TRBV11-2, TRBJ2-5)
CASSRTGGSETQYF

SEQ ID NO: 663367 - protein, 14 aa, Homo sapiens
  CDR3 for alpha chain variable domain of TCR clone 331684 (TRAV23/DV6, TRAJ13)
CAASDSGGYQKVTF

SEQ ID NO: 663368 - protein, 16 aa, Homo sapiens
  CDR3 for beta chain variable domain of TCR clone 331684 (TRBV19, TRBJ2-2)
CASRSPGTGATGELFF

SEQ ID NO: 663369 - protein, 22 aa, Homo sapiens
  CDR3 for alpha chain variable domain of TCR clone 331685 (TRAV2, TRAJ38)
CAVEDFPNAGNNHIQNPDPAVY

SEQ ID NO: 663370 - protein, 14 aa, Homo sapiens
  CDR3 for beta chain variable domain of TCR clone 331685 (TRBV29-1, TRBJ1-4)
CSVSGRQSGEKLFF

SEQ ID NO: 663371 - protein, 16 aa, Homo sapiens
  CDR3 for alpha chain variable domain of TCR clone 331686 (TRAV30, TRAJ24)
CGTEIVDADSWGKFQF

SEQ ID NO: 663372 - protein, 16 aa, Homo sapiens
  CDR3 for beta chain variable domain of TCR clone 331686 (TRBV12-4, TRBJ1-5)
CASSRPVGGSNQPQLF

SEQ ID NO: 663373 - protein, 13 aa, Homo sapiens
  CDR3 for alpha chain variable domain of TCR clone 331687 (TRAV27, TRAJ57)
CAGFQGGSDKLVF

SEQ ID NO: 663374 - protein, 14 aa, Homo sapiens
  CDR3 for beta chain variable domain of TCR clone 331687 (TRBV20-1, TRBJ1-2)
CSSRKDGRAYGYTF

SEQ ID NO: 663375 - protein, 10 aa, Homo sapiens
  CDR3 for alpha chain variable domain of TCR clone 331688 (TRAV1-2, TRAJ31)
CVSEYARLMF

SEQ ID NO: 663376 - protein, 14 aa, Homo sapiens
  CDR3 for beta chain variable domain of TCR clone 331688 (TRBV19, TRBJ2-1)
CASPTFVLSGEQFF

SEQ ID NO: 663377 - protein, 13 aa, Homo sapiens
  CDR3 for alpha chain variable domain of TCR clone 331689 (TRAV8-1, TRAJ30)
CAVIMNRDDKIIF

SEQ ID NO: 663378 - protein, 14 aa, Homo sapiens
  CDR3 for beta chain variable domain of TCR clone 331689 (TRBV7-2, TRBJ1-6)
CASSLKGANSPLHF

SEQ ID NO: 663379 - protein, 14 aa, Homo sapiens
  CDR3 for alpha chain variable domain of TCR clone 331690 (TRAV13-1, TRAJ40)
CAASMTSGTYKYIF

SEQ ID NO: 663380 - protein, 14 aa, Homo sapiens
  CDR3 for beta chain variable domain of TCR clone 331690 (TRBV15, TRBJ2-5)
CATSIGGLGETQYF

SEQ ID NO: 663381 - protein, 16 aa, Homo sapiens
  CDR3 for alpha chain variable domain of TCR clone 331691 (TRAV30, TRAJ24)
CGTESVDADSWGKSKF

SEQ ID NO: 663382 - protein, 14 aa, Homo sapiens
  CDR3 for beta chain variable domain of TCR clone 331691 (TRBV12-5, TRBJ2-5)
CASGSRTHQETQYF

SEQ ID NO: 663383 - protein, 12 aa, Homo sapiens
  CDR3 for alpha chain variable domain of TCR clone 331692 (TRAV3, TRAJ27)
CAVRDKAVKSTF

SEQ ID NO: 663384 - protein, 14 aa, Homo sapiens
  CDR3 for beta chain variable domain of TCR clone 331692 (TRBV5-1, TRBJ1-2)
CASSVDSTNYGYTF

SEQ ID NO: 663385 - protein, 14 aa, Homo sapiens
  CDR3 for alpha chain variable domain of TCR clone 331693 (TRAV17, TRAJ31)
CATVLRKNNARLMV

SEQ ID NO: 663386 - protein, 14 aa, Homo sapiens
  CDR3 for beta chain variable domain of TCR clone 331693 (TRBV12-4, TRBJ2-5)
CASSLWQKQETQYF

SEQ ID NO: 663387 - protein, 13 aa, Homo sapiens
  CDR3 for alpha chain variable domain of TCR clone 331694 (TRAV21, TRAJ26)
CAVLDNYGQTFVF

SEQ ID NO: 663388 - protein, 16 aa, Homo sapiens
  CDR3 for beta chain variable domain of TCR clone 331694 (TRBV29-1, TRBJ2-2)
CSVETRASGNTGELFF

SEQ ID NO: 663389 - protein, 16 aa, Homo sapiens
  CDR3 for alpha chain variable domain of TCR clone 331695 (TRAV8-4, TRAJ10)
CAVSDILPGGGNKLTF

SEQ ID NO: 663390 - protein, 15 aa, Homo sapiens
  CDR3 for beta chain variable domain of TCR clone 331695 (TRBV7-2, TRBJ1-6)
CASSLRYAYNSPLHF

SEQ ID NO: 663391 - protein, 13 aa, Homo sapiens
  CDR3 for alpha chain variable domain of TCR clone 331696 (TRAV12-1, TRAJ6)
CVVFPGGSYIPTF

SEQ ID NO: 663392 - protein, 14 aa, Homo sapiens
  CDR3 for beta chain variable domain of TCR clone 331696 (TRBV11-3, TRBJ2-2)
CASSRDTSTGELFF

SEQ ID NO: 663393 - protein, 16 aa, Homo sapiens
  CDR3 for alpha chain variable domain of TCR clone 331697 (TRAV8-3, TRAJ22)
CAVDLLGPGSARQLTF

SEQ ID NO: 663394 - protein, 14 aa, Homo sapiens
  CDR3 for beta chain variable domain of TCR clone 331697 (TRBV5-4, TRBJ1-1)
CASSLDSRRDEAFF

SEQ ID NO: 663395 - protein, 15 aa, Homo sapiens
  CDR3 for alpha chain variable domain of TCR clone 331698 (TRAV21, TRAJ24)
CAARSSTDSWGKLQF

SEQ ID NO: 663396 - protein, 15 aa, Homo sapiens
  CDR3 for beta chain variable domain of TCR clone 331698 (TRBV28, TRBJ2-7)
CASSPTGTGSYEQYF

SEQ ID NO: 663397 - protein, 15 aa, Homo sapiens
  CDR3 for alpha chain variable domain of TCR clone 331699 (TRAV21, TRAJ37)
CAVRPTLRNTGKLIF

SEQ ID NO: 663398 - protein, 16 aa, Homo sapiens
  CDR3 for beta chain variable domain of TCR clone 331699 (TRBV24-1, TRBJ2-3)
CATRDRRQDLTDTQYF

SEQ ID NO: 663399 - protein, 13 aa, Homo sapiens
  CDR3 for alpha chain variable domain of TCR clone 331700 (TRAV26-1, TRAJ48)
CIVRVVGDEKLTF

SEQ ID NO: 663400 - protein, 13 aa, Homo sapiens
  CDR3 for beta chain variable domain of TCR clone 331700 (TRBV4-2, TRBJ1-1)
CASIQAGNTEAFF

SEQ ID NO: 663401 - protein, 15 aa, Homo sapiens
  CDR3 for alpha chain variable domain of TCR clone 331701 (TRAV21, TRAJ38)
CAVVSDAGNNRKLIW

SEQ ID NO: 663402 - protein, 17 aa, Homo sapiens
  CDR3 for beta chain variable domain of TCR clone 331701 (TRBV24-1, TRBJ2-1)
CATSDVSTSGTYNEQFF

SEQ ID NO: 663403 - protein, 14 aa, Homo sapiens
  CDR3 for alpha chain variable domain of TCR clone 331702 (TRAV8-4, TRAJ13)
CAVTLSGGYQKVTF

SEQ ID NO: 663404 - protein, 13 aa, Homo sapiens
  CDR3 for beta chain variable domain of TCR clone 331702 (TRBV7-6, TRBJ1-2)
CASSLVADYGYTF

SEQ ID NO: 663405 - protein, 16 aa, Homo sapiens
  CDR3 for alpha chain variable domain of TCR clone 331703 (TRAV29/DV5, TRAJ30)
QCTSVQQANRDDKSIF

SEQ ID NO: 663406 - protein, 13 aa, Homo sapiens
  CDR3 for beta chain variable domain of TCR clone 331703 (TRBV12-5, TRBJ2-3)
CASQNRGIDTQYF

SEQ ID NO: 663407 - protein, 14 aa, Homo sapiens
  CDR3 for alpha chain variable domain of TCR clone 331704 (TRAV1-2, TRAJ8)
CAVREDTGFQNLVF

SEQ ID NO: 663408 - protein, 19 aa, Homo sapiens
  CDR3 for beta chain variable domain of TCR clone 331704 (TRBV28, TRBJ2-1)
CASSFSIRGSGRTRYEQFF

SEQ ID NO: 663409 - protein, 14 aa, Homo sapiens
  CDR3 for alpha chain variable domain of TCR clone 331705 (TRAV17, TRAJ31)
CATVLRNNNARLMF

SEQ ID NO: 663410 - protein, 14 aa, Homo sapiens
  CDR3 for beta chain variable domain of TCR clone 331705 (TRBV12-4, TRBJ2-5)
CASSLWRNQETQYF

SEQ ID NO: 663411 - protein, 15 aa, Homo sapiens
  CDR3 for alpha chain variable domain of TCR clone 331706 (TRAV26-1, TRAJ23)
CIVRVAGYQGGKLIF

SEQ ID NO: 663412 - protein, 18 aa, Homo sapiens
  CDR3 for beta chain variable domain of TCR clone 331706 (TRBV28, TRBJ2-1)
CASSSTSGRANSYNEKFF

SEQ ID NO: 663413 - protein, 14 aa, Homo sapiens
  CDR3 for alpha chain variable domain of TCR clone 331707 (TRAV12-2, TRAJ24)
CAVTPADSWGKLQF

SEQ ID NO: 663414 - protein, 13 aa, Homo sapiens
  CDR3 for beta chain variable domain of TCR clone 331707 (TRBV6-4, TRBJ1-5)
CASSADLNQPQHL

SEQ ID NO: 663415 - protein, 16 aa, Homo sapiens
  CDR3 for alpha chain variable domain of TCR clone 331708 (TRAV30, TRAJ24)
RGTEIVDADSWGKFQF

SEQ ID NO: 663416 - protein, 13 aa, Homo sapiens
  CDR3 for beta chain variable domain of TCR clone 331708 (TRBV20-1, TRBJ1-1)
CSARGGGNTEAFF

SEQ ID NO: 663417 - protein, 14 aa, Homo sapiens
  CDR3 for alpha chain variable domain of TCR clone 331709 (TRAV17, TRAJ45)
CATASGGGADGLTF

SEQ ID NO: 663418 - protein, 13 aa, Homo sapiens
  CDR3 for beta chain variable domain of TCR clone 331709 (TRBV15, TRBJ2-7)
CANSTTGHYEQYF

SEQ ID NO: 663419 - protein, 14 aa, Homo sapiens
  CDR3 for alpha chain variable domain of TCR clone 331710 (TRAV12-3, TRAJ56)
CAMSVTGANSKLTF

SEQ ID NO: 663420 - protein, 17 aa, Homo sapiens
  CDR3 for beta chain variable domain of TCR clone 331710 (TRBV20-1, TRBJ2-3)
CSASLLGRGGSADTQYV

SEQ ID NO: 663421 - protein, 14 aa, Homo sapiens
  CDR3 for alpha chain variable domain of TCR clone 331711 (TRAV1-2, TRAJ8)
CAVREDTGFQKLVF

SEQ ID NO: 663422 - protein, 12 aa, Homo sapiens
  CDR3 for beta chain variable domain of TCR clone 331711 (TRBV2, TRBJ2-3)
CASSGRFDTQYF

SEQ ID NO: 663423 - protein, 10 aa, Homo sapiens
  CDR3 for alpha chain variable domain of TCR clone 331712 (TRAV8-1, TRAJ43)
CAVNVDDMRF

SEQ ID NO: 663424 - protein, 17 aa, Homo sapiens
  CDR3 for beta chain variable domain of TCR clone 331712 (TRBV11-2, TRBJ2-1)
CASSLYPPGVEYNEQFF

SEQ ID NO: 663425 - protein, 14 aa, Homo sapiens
  CDR3 for alpha chain variable domain of TCR clone 331713 (TRAV12-2, TRAJ13)
CAVKKTGGYQKVTF

SEQ ID NO: 663426 - protein, 14 aa, Homo sapiens
  CDR3 for beta chain variable domain of TCR clone 331713 (TRBV25-1, TRBJ1-1)
CASTHLGGDTEAFF

SEQ ID NO: 663427 - protein, 14 aa, Homo sapiens
  CDR3 for alpha chain variable domain of TCR clone 331714 (TRAV9-2, TRAJ39)
WALYIYNAGNMLTF

SEQ ID NO: 663428 - protein, 15 aa, Homo sapiens
  CDR3 for beta chain variable domain of TCR clone 331714 (TRBV11-3, TRBJ2-3)
CASLKDGREGDTQYF

SEQ ID NO: 663429 - protein, 17 aa, Homo sapiens
  CDR3 for alpha chain variable domain of TCR clone 331715 (TRAV12-2, TRAJ53)
CAPLTASQEGSNYKLTF

SEQ ID NO: 663430 - protein, 16 aa, Homo sapiens
  CDR3 for beta chain variable domain of TCR clone 331715 (TRBV20-1, TRBJ2-3)
CSAVRDRGPIADTQYF

SEQ ID NO: 663431 - protein, 13 aa, Homo sapiens
  CDR3 for alpha chain variable domain of TCR clone 331716 (TRAV8-3, TRAJ36)
WAVGATGANNLFF

SEQ ID NO: 663432 - protein, 15 aa, Homo sapiens
  CDR3 for beta chain variable domain of TCR clone 331716 (TRBV7-2, TRBJ1-2)
CASSPRAGWNYGYTF

SEQ ID NO: 663433 - protein, 16 aa, Homo sapiens
  CDR3 for alpha chain variable domain of TCR clone 331717 (TRAV20, TRAJ53)
CAVRRGSGGSNYKLTS

SEQ ID NO: 663434 - protein, 12 aa, Homo sapiens
  CDR3 for beta chain variable domain of TCR clone 331717 (TRBV29-1, TRBJ2-3)
CSVVLGADTQYF

SEQ ID NO: 663435 - protein, 15 aa, Homo sapiens
  CDR3 for alpha chain variable domain of TCR clone 331718 (TRAV3, TRAJ22)
CAVRDRGGSATQLTF

SEQ ID NO: 663436 - protein, 15 aa, Homo sapiens
  CDR3 for beta chain variable domain of TCR clone 331718 (TRBV19, TRBJ2-5)
CASSIVRASQETQYF

SEQ ID NO: 663437 - protein, 10 aa, Homo sapiens
  CDR3 for alpha chain variable domain of TCR clone 331719 (TRAV23/DV6, TRAJ31)
CARGGARLMF

SEQ ID NO: 663438 - protein, 13 aa, Homo sapiens
  CDR3 for beta chain variable domain of TCR clone 331719 (TRBV7-9, TRBJ2-2)
CASSLDPTGELFF

SEQ ID NO: 663439 - protein, 16 aa, Homo sapiens
  CDR3 for alpha chain variable domain of TCR clone 331720 (TRAV3, TRAJ37)
CAVRPHGSGNTGKLIF

SEQ ID NO: 663440 - protein, 14 aa, Homo sapiens
  CDR3 for beta chain variable domain of TCR clone 331720 (TRBV10-3, TRBJ2-7)
CAISAPRGAYEQYF

SEQ ID NO: 663441 - protein, 12 aa, Homo sapiens
  CDR3 for alpha chain variable domain of TCR clone 331721 (TRAV12-2, TRAJ21)
CAVRYNFNKFYF

SEQ ID NO: 663442 - protein, 15 aa, Homo sapiens
  CDR3 for beta chain variable domain of TCR clone 331721 (TRBV10-3, TRBJ2-3)
CAISLTSGGTDTQYF

SEQ ID NO: 663443 - protein, 16 aa, Homo sapiens
  CDR3 for alpha chain variable domain of TCR clone 331722 (TRAV30, TRAJ24)
CGTEIVDADSWGKFQF

SEQ ID NO: 663444 - protein, 15 aa, Homo sapiens
  CDR3 for beta chain variable domain of TCR clone 331722 (TRBV20-1, TRBJ2-5)
CSAPPRTGFGETQYF

SEQ ID NO: 663445 - protein, 15 aa, Homo sapiens
  CDR3 for alpha chain variable domain of TCR clone 331723 (TRAV8-4, TRAJ6)
CAVSAPSGGSYIPTF

SEQ ID NO: 663446 - protein, 15 aa, Homo sapiens
  CDR3 for beta chain variable domain of TCR clone 331723 (TRBV2, TRBJ2-1)
CASSEVRSAYNEQFF

SEQ ID NO: 663447 - protein, 13 aa, Homo sapiens
  CDR3 for alpha chain variable domain of TCR clone 331724 (TRAV29/DV5, TRAJ31)
CAASRNNNARLMC

SEQ ID NO: 663448 - protein, 15 aa, Homo sapiens
  CDR3 for beta chain variable domain of TCR clone 331724 (TRBV2, TRBJ2-1)
CASSELAGSYNEQFF

SEQ ID NO: 663449 - protein, 13 aa, Homo sapiens
  CDR3 for alpha chain variable domain of TCR clone 331725 (TRAV30, TRAJ6)
CGTEAGGSYIPTF

SEQ ID NO: 663450 - protein, 15 aa, Homo sapiens
  CDR3 for beta chain variable domain of TCR clone 331725 (TRBV7-2, TRBJ1-2)
CASSLVSGGDYGYTF

SEQ ID NO: 663451 - protein, 14 aa, Homo sapiens
  CDR3 for alpha chain variable domain of TCR clone 331726 (TRAV26-1, TRAJ38)
CIADNAGNNRKLIC

SEQ ID NO: 663452 - protein, 14 aa, Homo sapiens
  CDR3 for beta chain variable domain of TCR clone 331726 (TRBV20-1, TRBJ1-1)
CSAQTRIGGTEAFF

SEQ ID NO: 663453 - protein, 14 aa, Homo sapiens
  CDR3 for alpha chain variable domain of TCR clone 331727 (TRAV21, TRAJ32)
CCGDYGGATNKLIF

SEQ ID NO: 663454 - protein, 15 aa, Homo sapiens
  CDR3 for beta chain variable domain of TCR clone 331727 (TRBV9, TRBJ1-6)
CASSVAGTGDSHLHF

SEQ ID NO: 663455 - protein, 11 aa, Homo sapiens
  CDR3 for alpha chain variable domain of TCR clone 331728 (TRAV21, TRAJ33)
CAVIRNYQLIW

SEQ ID NO: 663456 - protein, 16 aa, Homo sapiens
  CDR3 for beta chain variable domain of TCR clone 331728 (TRBV13, TRBJ2-7)
CASSLDRRRGFYEQYF

SEQ ID NO: 663457 - protein, 14 aa, Homo sapiens
  CDR3 for alpha chain variable domain of TCR clone 331729 (TRAV12-2, TRAJ24)
CAVTPADSWGKLQF

SEQ ID NO: 663458 - protein, 16 aa, Homo sapiens
  CDR3 for beta chain variable domain of TCR clone 331729 (TRBV4-3, TRBJ2-1)
CASSPALDRGVNEQFF

SEQ ID NO: 663459 - protein, 16 aa, Homo sapiens
  CDR3 for alpha chain variable domain of TCR clone 331730 (TRAV30, TRAJ24)
CGTEIVGADSWGKFQF

SEQ ID NO: 663460 - protein, 15 aa, Homo sapiens
  CDR3 for beta chain variable domain of TCR clone 331730 (TRBV7-9, TRBJ1-4)
CASSARTGGKEKLFF

SEQ ID NO: 663461 - protein, 14 aa, Homo sapiens
  CDR3 for alpha chain variable domain of TCR clone 331731 (TRAV26-1, TRAJ21)
CIVRPPYNFNKFYF

SEQ ID NO: 663462 - protein, 12 aa, Homo sapiens
  CDR3 for beta chain variable domain of TCR clone 331731 (TRBV7-8, TRBJ2-7)
CASSLGDREEYF

SEQ ID NO: 663463 - protein, 14 aa, Homo sapiens
  CDR3 for alpha chain variable domain of TCR clone 331732 (TRAV1-1, TRAJ34)
CAVSPSYNTDKLIF

SEQ ID NO: 663464 - protein, 16 aa, Homo sapiens
  CDR3 for beta chain variable domain of TCR clone 331732 (TRBV19, TRBJ2-1)
CASSSKGTGSYNEQFF

SEQ ID NO: 663465 - protein, 15 aa, Homo sapiens
  CDR3 for alpha chain variable domain of TCR clone 331733 (TRAV8-3, TRAJ11)
CAVGLLNSGYSTLTF

SEQ ID NO: 663466 - protein, 16 aa, Homo sapiens
  CDR3 for beta chain variable domain of TCR clone 331733 (TRBV11-2, TRBJ2-3)
CASSSRTSGGAGTQYF

SEQ ID NO: 663467 - protein, 13 aa, Homo sapiens
  CDR3 for alpha chain variable domain of TCR clone 331734 (TRAV6, TRAJ5)
CAPADTGRRALTF

SEQ ID NO: 663468 - protein, 15 aa, Homo sapiens
  CDR3 for beta chain variable domain of TCR clone 331734 (TRBV7-2, TRBJ1-1)
CASSFAGDRDTEAFF

SEQ ID NO: 663469 - protein, 14 aa, Homo sapiens
  CDR3 for alpha chain variable domain of TCR clone 331735 (TRAV12-3, TRAJ10)
SHLPLTGGGNKLIF

SEQ ID NO: 663470 - protein, 16 aa, Homo sapiens
  CDR3 for beta chain variable domain of TCR clone 331735 (TRBV10-3, TRBJ2-1)
CAISGVGDGGGGEQFF

SEQ ID NO: 663471 - protein, 17 aa, Homo sapiens
  CDR3 for alpha chain variable domain of TCR clone 331736 (TRAV35, TRAJ28)
CAGLQVYSGAGSYQLTF

SEQ ID NO: 663472 - protein, 15 aa, Homo sapiens
  CDR3 for beta chain variable domain of TCR clone 331736 (TRBV2, TRBJ1-2)
CASSEIGGANYGCTF

SEQ ID NO: 663473 - protein, 14 aa, Homo sapiens
  CDR3 for alpha chain variable domain of TCR clone 331737 (TRAV1-2, TRAJ16)
CAANRFSDGQKLLF

SEQ ID NO: 663474 - protein, 13 aa, Homo sapiens
  CDR3 for beta chain variable domain of TCR clone 331737 (TRBV20-1, TRBJ1-1)
CSARLGQGTEAFF

SEQ ID NO: 663475 - protein, 14 aa, Homo sapiens
  CDR3 for alpha chain variable domain of TCR clone 331738 (TRAV12-3, TRAJ28)
CAMWSGAGSYQRTF

SEQ ID NO: 663476 - protein, 14 aa, Homo sapiens
  CDR3 for beta chain variable domain of TCR clone 331738 (TRBV19, TRBJ1-5)
CASSLSGGSQPQHF

SEQ ID NO: 663477 - protein, 13 aa, Homo sapiens
  CDR3 for alpha chain variable domain of TCR clone 331739 (TRAV21, TRAJ20)
CAVGLRVDYKFSF

SEQ ID NO: 663478 - protein, 16 aa, Homo sapiens
  CDR3 for beta chain variable domain of TCR clone 331739 (TRBV5-1, TRBJ2-2)
CASSSRTGGRTGELFF

SEQ ID NO: 663479 - protein, 13 aa, Homo sapiens
  CDR3 for alpha chain variable domain of TCR clone 331740 (TRAV12-2, TRAJ4)
CAVFSGGYNELIF

SEQ ID NO: 663480 - protein, 13 aa, Homo sapiens
  CDR3 for beta chain variable domain of TCR clone 331740 (TRBV19, TRBJ1-5)
CASSIDRDQPQHF

SEQ ID NO: 663481 - protein, 18 aa, Homo sapiens
  CDR3 for alpha chain variable domain of TCR clone 331741 (TRAV13-1, TRAJ52)
CAAQNPNAGGTSYGKLTF

SEQ ID NO: 663482 - protein, 14 aa, Homo sapiens
  CDR3 for beta chain variable domain of TCR clone 331741 (TRBV7-3, TRBJ2-1)
CASSLAGGTNEQFF

SEQ ID NO: 663483 - protein, 17 aa, Homo sapiens
  CDR3 for alpha chain variable domain of TCR clone 331742 (TRAV36/DV7, TRAJ52)
CAVAQRAGGTSYGKLTF

SEQ ID NO: 663484 - protein, 16 aa, Homo sapiens
  CDR3 for beta chain variable domain of TCR clone 331742 (TRBV4-1, TRBJ1-2)
CASSQDAGQVLYGYTF

SEQ ID NO: 663485 - protein, 15 aa, Homo sapiens
  CDR3 for alpha chain variable domain of TCR clone 331743 (TRAV27, TRAJ53)
CAGVVGGGSNYKLTF

SEQ ID NO: 663486 - protein, 15 aa, Homo sapiens
  CDR3 for beta chain variable domain of TCR clone 331743 (TRBV20-1, TRBJ2-1)
CSARGIGGTYNEQFF

SEQ ID NO: 663487 - protein, 18 aa, Homo sapiens
  CDR3 for alpha chain variable domain of TCR clone 331744 (TRAV12-3, TRAJ52)
CAMSVGGAGGTSYGKLTF

SEQ ID NO: 663488 - protein, 15 aa, Homo sapiens
  CDR3 for beta chain variable domain of TCR clone 331744 (TRBV7-2, TRBJ2-3)
CASSLAGAFIDTQYF

SEQ ID NO: 663489 - protein, 13 aa, Homo sapiens
  CDR3 for alpha chain variable domain of TCR clone 331745 (TRAV21, TRAJ57)
CAVTQGGSEKLVF

SEQ ID NO: 663490 - protein, 14 aa, Homo sapiens
  CDR3 for beta chain variable domain of TCR clone 331745 (TRBV12-4, TRBJ1-6)
CASRPDGYNSPLHF

SEQ ID NO: 663491 - protein, 14 aa, Homo sapiens
  CDR3 for alpha chain variable domain of TCR clone 331746 (TRAV26-2, TRAJ27)
CILRDISDAGTSTF

SEQ ID NO: 663492 - protein, 15 aa, Homo sapiens
  CDR3 for beta chain variable domain of TCR clone 331746 (TRBV10-3, TRBJ2-7)
CATREQGLRSYEQYF

SEQ ID NO: 663493 - protein, 13 aa, Homo sapiens
  CDR3 for alpha chain variable domain of TCR clone 331747 (TRAV12-1, TRAJ42)
CVVNDPLQGNLIF

SEQ ID NO: 663494 - protein, 15 aa, Homo sapiens
  CDR3 for beta chain variable domain of TCR clone 331747 (TRBV20-1, TRBJ2-3)
CSARESRGQGYTQYF

SEQ ID NO: 663495 - protein, 11 aa, Homo sapiens
  CDR3 for alpha chain variable domain of TCR clone 331748 (TRAV2, TRAJ13)
CASGGYQKVTF

SEQ ID NO: 663496 - protein, 12 aa, Homo sapiens
  CDR3 for beta chain variable domain of TCR clone 331748 (TRBV7-8, TRBJ2-7)
CASSLGDREQYL

SEQ ID NO: 663497 - protein, 15 aa, Homo sapiens
  CDR3 for alpha chain variable domain of TCR clone 331749 (TRAV21, TRAJ53)
CATLNSGGSNYKLTF

SEQ ID NO: 663498 - protein, 16 aa, Homo sapiens
  CDR3 for beta chain variable domain of TCR clone 331749 (TRBV9, TRBJ2-1)
CASSVGGGGNYNEHFF

SEQ ID NO: 663499 - protein, 15 aa, Homo sapiens
  CDR3 for alpha chain variable domain of TCR clone 331750 (TRAV12-2, TRAJ43)
CAFDMRFGAGTRLTV

SEQ ID NO: 663500 - protein, 18 aa, Homo sapiens
  CDR3 for beta chain variable domain of TCR clone 331750 (TRBV20-1, TRBJ2-3)
CSDSGLAGGPGTTDTQYC

SEQ ID NO: 663501 - protein, 12 aa, Homo sapiens
  CDR3 for alpha chain variable domain of TCR clone 331751 (TRAV17, TRAJ20)
CATALNDYKPSF

SEQ ID NO: 663502 - protein, 15 aa, Homo sapiens
  CDR3 for beta chain variable domain of TCR clone 331751 (TRBV7-8, TRBJ1-6)
CASSLVEGAYSPLHF

SEQ ID NO: 663503 - protein, 13 aa, Homo sapiens
  CDR3 for alpha chain variable domain of TCR clone 331752 (TRAV21, TRAJ49)
CAVRQSTGNQFYF

SEQ ID NO: 663504 - protein, 15 aa, Homo sapiens
  CDR3 for beta chain variable domain of TCR clone 331752 (TRBV7-3, TRBJ2-1)
CASSLDGNSYNEQFF

SEQ ID NO: 663505 - protein, 13 aa, Homo sapiens
  CDR3 for alpha chain variable domain of TCR clone 331753 (TRAV2, TRAJ24)
CAVSTDSWGKLQF

SEQ ID NO: 663506 - protein, 14 aa, Homo sapiens
  CDR3 for beta chain variable domain of TCR clone 331753 (TRBV13, TRBJ2-5)
CASSLGTAQEIQYF

SEQ ID NO: 663507 - protein, 15 aa, Homo sapiens
  CDR3 for alpha chain variable domain of TCR clone 331754 (TRAV26-1, TRAJ40)
CIVRAVPPGTYKYIF

SEQ ID NO: 663508 - protein, 15 aa, Homo sapiens
  CDR3 for beta chain variable domain of TCR clone 331754 (TRBV20-1, TRBJ2-7)
CSARDRVSGMDEQYF

SEQ ID NO: 663509 - protein, 14 aa, Homo sapiens
  CDR3 for alpha chain variable domain of TCR clone 331755 (TRAV1-1, TRAJ23)
CAVGIYNQGGKLIF

SEQ ID NO: 663510 - protein, 13 aa, Homo sapiens
  CDR3 for beta chain variable domain of TCR clone 331755 (TRBV20-1, TRBJ1-1)
CSAPLGGGTEAFF

SEQ ID NO: 663511 - protein, 11 aa, Homo sapiens
  CDR3 for alpha chain variable domain of TCR clone 331756 (TRAV12-3, TRAJ43)
CAMSVSNDMRF

SEQ ID NO: 663512 - protein, 11 aa, Homo sapiens
  CDR3 for beta chain variable domain of TCR clone 331756 (TRBV11-2, TRBJ2-2)
CASSLPGELFF

SEQ ID NO: 663513 - protein, 15 aa, Homo sapiens
  CDR3 for alpha chain variable domain of TCR clone 331757 (TRAV2, TRAJ9)
CAVEDRGTGGFKTIF

SEQ ID NO: 663514 - protein, 16 aa, Homo sapiens
  CDR3 for beta chain variable domain of TCR clone 331757 (TRBV24-1, TRBJ2-3)
CATSDPGTGATDTQYY

SEQ ID NO: 663515 - protein, 15 aa, Homo sapiens
  CDR3 for alpha chain variable domain of TCR clone 331758 (TRAV2, TRAJ24)
CAVEVLTDSWGKFQF

SEQ ID NO: 663516 - protein, 15 aa, Homo sapiens
  CDR3 for beta chain variable domain of TCR clone 331758 (TRBV4-1, TRBJ2-7)
CASSQNTGRLYEQYF

SEQ ID NO: 663517 - protein, 15 aa, Homo sapiens
  CDR3 for alpha chain variable domain of TCR clone 331759 (TRAV3, TRAJ22)
CAVRDRGDSARQLTF

SEQ ID NO: 663518 - protein, 15 aa, Homo sapiens
  CDR3 for beta chain variable domain of TCR clone 331759 (TRBV10-3, TRBJ2-3)
CAISLTSGGTDTQYF

SEQ ID NO: 663519 - protein, 13 aa, Homo sapiens
  CDR3 for alpha chain variable domain of TCR clone 331760 (TRAV16, TRAJ30)
CALAQNRDDKIIF

SEQ ID NO: 663520 - protein, 18 aa, Homo sapiens
  CDR3 for beta chain variable domain of TCR clone 331760 (TRBV11-2, TRBJ2-3)
CASSLGVASRGAPNTQYF

SEQ ID NO: 663521 - protein, 15 aa, Homo sapiens
  CDR3 for alpha chain variable domain of TCR clone 331761 (TRAV12-1, TRAJ9)
CVVSFGDTGGFKTIF

SEQ ID NO: 663522 - protein, 12 aa, Homo sapiens
  CDR3 for beta chain variable domain of TCR clone 331761 (TRBV14, TRBJ2-5)
CASSQLKETQYF

SEQ ID NO: 663523 - protein, 12 aa, Homo sapiens
  CDR3 for alpha chain variable domain of TCR clone 331762 (TRAV27, TRAJ9)
CAVESGGFKTIF

SEQ ID NO: 663524 - protein, 14 aa, Homo sapiens
  CDR3 for beta chain variable domain of TCR clone 331762 (TRBV6-1, TRBJ2-1)
CASAKDGFYNEQFF

SEQ ID NO: 663525 - protein, 12 aa, Homo sapiens
  CDR3 for alpha chain variable domain of TCR clone 331763 (TRAV27, TRAJ9)
CAGESGGFKTIF

SEQ ID NO: 663526 - protein, 13 aa, Homo sapiens
  CDR3 for beta chain variable domain of TCR clone 331763 (TRBV4-2, TRBJ1-1)
CASSQAGNTEAFF

SEQ ID NO: 663527 - protein, 14 aa, Homo sapiens
  CDR3 for alpha chain variable domain of TCR clone 331764 (TRAV12-1, TRAJ17)
CVVNYKAAGNKLTF

SEQ ID NO: 663528 - protein, 13 aa, Homo sapiens
  CDR3 for beta chain variable domain of TCR clone 331764 (TRBV20-1, TRBJ1-1)
CSARGGGNTEAVF

SEQ ID NO: 663529 - protein, 12 aa, Homo sapiens
  CDR3 for alpha chain variable domain of TCR clone 331765 (TRAV12-3, TRAJ17)
CAMTLTGNKLTF

SEQ ID NO: 663530 - protein, 15 aa, Homo sapiens
  CDR3 for beta chain variable domain of TCR clone 331765 (TRBV5-1, TRBJ2-3)
CASRNQAGSTDTQYF

SEQ ID NO: 663531 - protein, 14 aa, Homo sapiens
  CDR3 for alpha chain variable domain of TCR clone 331766 (TRAV12-3, TRAJ17)
CAMTLTGNKLTLRR

SEQ ID NO: 663532 - protein, 15 aa, Homo sapiens
  CDR3 for beta chain variable domain of TCR clone 331766 (TRBV20-1, TRBJ2-7)
CSARDRVSGMDEQYF

SEQ ID NO: 663533 - protein, 14 aa, Homo sapiens
  CDR3 for alpha chain variable domain of TCR clone 331767 (TRAV1-2, TRAJ16)
CAVNRFSDGQKLLF

SEQ ID NO: 663534 - protein, 15 aa, Homo sapiens
  CDR3 for beta chain variable domain of TCR clone 331767 (TRBV7-2, TRBJ1-2)
CASSPRASWNYGYTF

SEQ ID NO: 663535 - protein, 16 aa, Homo sapiens
  CDR3 for alpha chain variable domain of TCR clone 331768 (TRAV14/DV4, TRAJ54)
CAMRGGRIQGAQKLVF

SEQ ID NO: 663536 - protein, 15 aa, Homo sapiens
  CDR3 for beta chain variable domain of TCR clone 331768 (TRBV20-1, TRBJ2-7)
CSARDRVSGMDEQYF

SEQ ID NO: 663537 - protein, 15 aa, Homo sapiens
  CDR3 for alpha chain variable domain of TCR clone 331769 (TRAV12-2, TRAJ32)
GAVNHYGGATNKLIF

SEQ ID NO: 663538 - protein, 14 aa, Homo sapiens
  CDR3 for beta chain variable domain of TCR clone 331769 (TRBV27, TRBJ2-1)
CASSFGREANEQFF

SEQ ID NO: 663539 - protein, 11 aa, Homo sapiens
  CDR3 for alpha chain variable domain of TCR clone 331770 (TRAV2, TRAJ33)
CAVDSNHQLIW

SEQ ID NO: 663540 - protein, 17 aa, Homo sapiens
  CDR3 for beta chain variable domain of TCR clone 331770 (TRBV20-1, TRBJ2-2)
CSASGSGQGGLTGELFF

SEQ ID NO: 663541 - protein, 15 aa, Homo sapiens
  CDR3 for alpha chain variable domain of TCR clone 331771 (TRAV16, TRAJ57)
CALSGGQGGSEKLVF

SEQ ID NO: 663542 - protein, 14 aa, Homo sapiens
  CDR3 for beta chain variable domain of TCR clone 331771 (TRBV11-2, TRBJ1-2)
CASSLGTANYGYTF

SEQ ID NO: 663543 - protein, 14 aa, Homo sapiens
  CDR3 for alpha chain variable domain of TCR clone 331772 (TRAV12-2, TRAJ17)
CAVLFKAAGNKLTF

SEQ ID NO: 663544 - protein, 14 aa, Homo sapiens
  CDR3 for beta chain variable domain of TCR clone 331772 (TRBV12-5, TRBJ2-5)
CASGSRKHQETQYF

SEQ ID NO: 663545 - protein, 14 aa, Homo sapiens
  CDR3 for alpha chain variable domain of TCR clone 331773 (TRAV13-2, TRAJ4)
CAEKGPKGYNKLIF

SEQ ID NO: 663546 - protein, 13 aa, Homo sapiens
  CDR3 for beta chain variable domain of TCR clone 331773 (TRBV18, TRBJ2-5)
CASSPPGNETQYF

SEQ ID NO: 663547 - protein, 13 aa, Homo sapiens
  CDR3 for alpha chain variable domain of TCR clone 331774 (TRAV20, TRAJ54)
CAVQAGGAQKLAF

SEQ ID NO: 663548 - protein, 14 aa, Homo sapiens
  CDR3 for beta chain variable domain of TCR clone 331774 (TRBV20-1, TRBJ2-7)
CSAKAGTGGYEQYF

SEQ ID NO: 663549 - protein, 18 aa, Homo sapiens
  CDR3 for alpha chain variable domain of TCR clone 331775 (TRAV1-2, TRAJ10)
CAVRALTPVTGGGNKLTI

SEQ ID NO: 663550 - protein, 14 aa, Homo sapiens
  CDR3 for beta chain variable domain of TCR clone 331775 (TRBV4-1, TRBJ1-1)
CASSQQGNGNEAFF

SEQ ID NO: 663551 - protein, 11 aa, Homo sapiens
  CDR3 for alpha chain variable domain of TCR clone 331776 (TRAV3, TRAJ21)
FAVGNFNKFYF

SEQ ID NO: 663552 - protein, 13 aa, Homo sapiens
  CDR3 for beta chain variable domain of TCR clone 331776 (TRBV9, TRBJ2-1)
CASSVGQGGEQFF

SEQ ID NO: 663553 - protein, 17 aa, Homo sapiens
  CDR3 for alpha chain variable domain of TCR clone 331777 (TRAV4, TRAJ13)
CLVGVQGSSGGYQKVHF

SEQ ID NO: 663554 - protein, 18 aa, Homo sapiens
  CDR3 for beta chain variable domain of TCR clone 331777 (TRBV15, TRBJ2-3)
CATSRDGARSWDTDTQYF

SEQ ID NO: 663555 - protein, 14 aa, Homo sapiens
  CDR3 for alpha chain variable domain of TCR clone 331778 (TRAV8-4, TRAJ48)
CAVSEPFGNEQLTF

SEQ ID NO: 663556 - protein, 14 aa, Homo sapiens
  CDR3 for beta chain variable domain of TCR clone 331778 (TRBV13, TRBJ2-7)
CASSLKGASYEQYF

SEQ ID NO: 663557 - protein, 13 aa, Homo sapiens
  CDR3 for alpha chain variable domain of TCR clone 331779 (TRAV26-1, TRAJ30)
CIVNMHRDDKIIF

SEQ ID NO: 663558 - protein, 16 aa, Homo sapiens
  CDR3 for beta chain variable domain of TCR clone 331779 (TRBV16, TRBJ2-7)
CASSRPAGESSYEQYF

SEQ ID NO: 663559 - protein, 14 aa, Homo sapiens
  CDR3 for alpha chain variable domain of TCR clone 331780 (TRAV12-2, TRAJ13)
CAVKKTGGYQKVTF

SEQ ID NO: 663560 - protein, 11 aa, Homo sapiens
  CDR3 for beta chain variable domain of TCR clone 331780 (TRBV29-1, TRBJ2-5)
CSEDRTGNQYF

SEQ ID NO: 663561 - protein, 16 aa, Homo sapiens
  CDR3 for alpha chain variable domain of TCR clone 331781 (TRAV30, TRAJ24)
CGTEIVDADSWGKFQF

SEQ ID NO: 663562 - protein, 17 aa, Homo sapiens
  CDR3 for beta chain variable domain of TCR clone 331781 (TRBV20-1, TRBJ2-1)
CSAPPRLAGTTYNEQFF

SEQ ID NO: 663563 - protein, 10 aa, Homo sapiens
  CDR3 for alpha chain variable domain of TCR clone 331782 (TRAV25, TRAJ20)
CAVNDYKLSF

SEQ ID NO: 663564 - protein, 13 aa, Homo sapiens
  CDR3 for beta chain variable domain of TCR clone 331782 (TRBV6-3, TRBJ2-7)
CASSFSGGYEQFF

SEQ ID NO: 663565 - protein, 12 aa, Homo sapiens
  CDR3 for alpha chain variable domain of TCR clone 331783 (TRAV12-1, TRAJ31)
CVSWNNNARLLF

SEQ ID NO: 663566 - protein, 15 aa, Homo sapiens
  CDR3 for beta chain variable domain of TCR clone 331783 (TRBV7-2, TRBJ1-5)
CASSLDRGQDQPQHF

SEQ ID NO: 663567 - protein, 14 aa, Homo sapiens
  CDR3 for alpha chain variable domain of TCR clone 331784 (TRAV8-6, TRAJ4)
CAVSGFGGYNKLIF

SEQ ID NO: 663568 - protein, 13 aa, Homo sapiens
  CDR3 for beta chain variable domain of TCR clone 331784 (TRBV3-1, TRBJ2-5)
CASSPGLQETQYF

SEQ ID NO: 663569 - protein, 14 aa, Homo sapiens
  CDR3 for alpha chain variable domain of TCR clone 331785 (TRAV8-2, TRAJ37)
CVVSIPGNTGKLIF

SEQ ID NO: 663570 - protein, 13 aa, Homo sapiens
  CDR3 for beta chain variable domain of TCR clone 331785 (TRBV7-8, TRBJ2-7)
RRVRLTEMGEQYF

SEQ ID NO: 663571 - protein, 13 aa, Homo sapiens
  CDR3 for alpha chain variable domain of TCR clone 331786 (TRAV29/DV5, TRAJ22)
CAASRNNNARLMF

SEQ ID NO: 663572 - protein, 16 aa, Homo sapiens
  CDR3 for beta chain variable domain of TCR clone 331786 (TRBV7-9, TRBJ2-1)
CASSDVAGGSYNEQFF

SEQ ID NO: 663573 - protein, 16 aa, Homo sapiens
  CDR3 for alpha chain variable domain of TCR clone 331787 (TRAV3, TRAJ5)
CAVRNLMDTGRRALIF

SEQ ID NO: 663574 - protein, 16 aa, Homo sapiens
  CDR3 for beta chain variable domain of TCR clone 331787 (TRBV4-2, TRBJ2-7)
CASSQEGLANSYEQYF

SEQ ID NO: 663575 - protein, 11 aa, Homo sapiens
  CDR3 for alpha chain variable domain of TCR clone 331788 (TRAV16, TRAJ49)
CSLNTGNQFYF

SEQ ID NO: 663576 - protein, 16 aa, Homo sapiens
  CDR3 for beta chain variable domain of TCR clone 331788 (TRBV7-3, TRBJ2-2)
CASSLKRGTLSGELFF

SEQ ID NO: 663577 - protein, 11 aa, Homo sapiens
  CDR3 for alpha chain variable domain of TCR clone 331789 (TRAV3, TRAJ21)
CAVGNFNKFYF

SEQ ID NO: 663578 - protein, 19 aa, Homo sapiens
  CDR3 for beta chain variable domain of TCR clone 331789 (TRBV7-3, TRBJ2-7)
CASSLTGVAGGWPSYEQYF

SEQ ID NO: 663579 - protein, 12 aa, Homo sapiens
  CDR3 for alpha chain variable domain of TCR clone 331790 (TRAV35, TRAJ39)
LAPNNAGNRLTF

SEQ ID NO: 663580 - protein, 16 aa, Homo sapiens
  CDR3 for beta chain variable domain of TCR clone 331790 (TRBV2, TRBJ2-3)
CASSTSVEGVTDKQYF

SEQ ID NO: 663581 - protein, 12 aa, Homo sapiens
  CDR3 for alpha chain variable domain of TCR clone 331791 (TRAV12-1, TRAJ40)
CVVYSGTYKYIF

SEQ ID NO: 663582 - protein, 17 aa, Homo sapiens
  CDR3 for beta chain variable domain of TCR clone 331791 (TRBV11-3, TRBJ1-5)
CASSSLTGLRGNQPQHF

SEQ ID NO: 663583 - protein, 13 aa, Homo sapiens
  CDR3 for alpha chain variable domain of TCR clone 331792 (TRAV8-1, TRAJ28)
FAVSGAGSYQLTF

SEQ ID NO: 663584 - protein, 14 aa, Homo sapiens
  CDR3 for beta chain variable domain of TCR clone 331792 (TRBV7-2, TRBJ2-2)
CASRGQGAAGELFL

SEQ ID NO: 663585 - protein, 16 aa, Homo sapiens
  CDR3 for alpha chain variable domain of TCR clone 331793 (TRAV12-1, TRAJ18)
CVVNPRGGSTLGRLCF

SEQ ID NO: 663586 - protein, 14 aa, Homo sapiens
  CDR3 for beta chain variable domain of TCR clone 331793 (TRBV27, TRBJ2-1)
CASRPMGQGVEQFF

SEQ ID NO: 663587 - protein, 13 aa, Homo sapiens
  CDR3 for alpha chain variable domain of TCR clone 331794 (TRAV29/DV5, TRAJ31)
CAASRNNNARLMF

SEQ ID NO: 663588 - protein, 15 aa, Homo sapiens
  CDR3 for beta chain variable domain of TCR clone 331794 (TRBV27, TRBJ2-1)
CASSQDFTPYNEQFF

SEQ ID NO: 663589 - protein, 12 aa, Homo sapiens
  CDR3 for alpha chain variable domain of TCR clone 331795 (TRAV3, TRAJ39)
CAVIEWSNMLIF

SEQ ID NO: 663590 - protein, 14 aa, Homo sapiens
  CDR3 for beta chain variable domain of TCR clone 331795 (TRBV7-8, TRBJ2-3)
CASSFPDGQDTQYF

SEQ ID NO: 663591 - protein, 11 aa, Homo sapiens
  CDR3 for alpha chain variable domain of TCR clone 331796 (TRAV12-2, )
CAVASLATTIS

SEQ ID NO: 663592 - protein, 16 aa, Homo sapiens
  CDR3 for beta chain variable domain of TCR clone 331796 (TRBV5-1, TRBJ2-2)
CAGSSRTGGRTGELFF

SEQ ID NO: 663593 - protein, 14 aa, Homo sapiens
  CDR3 for alpha chain variable domain of TCR clone 331797 (TRAV1-2, TRAJ16)
CAVNRFSDGQKLLF

SEQ ID NO: 663594 - protein, 15 aa, Homo sapiens
  CDR3 for beta chain variable domain of TCR clone 331797 (TRBV11-3, TRBJ2-3)
CASLKVGREGDTQYF

SEQ ID NO: 663595 - protein, 14 aa, Homo sapiens
  CDR3 for alpha chain variable domain of TCR clone 331798 (TRAV12-2, TRAJ13)
CAVKKTGGYQKVTF

SEQ ID NO: 663596 - protein, 16 aa, Homo sapiens
  CDR3 for beta chain variable domain of TCR clone 331798 (TRBV12-5, TRBJ2-7)
CASGSKGAPTSSTSGR

SEQ ID NO: 663597 - protein, 14 aa, Homo sapiens
  CDR3 for alpha chain variable domain of TCR clone 331799 (TRAV29/DV5, TRAJ36)
CAARRKTGANNLSF

SEQ ID NO: 663598 - protein, 14 aa, Homo sapiens
  CDR3 for beta chain variable domain of TCR clone 331799 (TRBV18, TRBJ2-4)
CASSPQNGGDIQYF

SEQ ID NO: 663599 - protein, 16 aa, Homo sapiens
  CDR3 for alpha chain variable domain of TCR clone 331800 (TRAV30, TRAJ24)
CGTEIVEADSWGNSSL

SEQ ID NO: 663600 - protein, 14 aa, Homo sapiens
  CDR3 for beta chain variable domain of TCR clone 331800 (TRBV19, TRBJ2-7)
CASNFRDTFTGMYF

SEQ ID NO: 663601 - protein, 13 aa, Homo sapiens
  CDR3 for alpha chain variable domain of TCR clone 331801 (TRAV27, TRAJ41)
CAGEGNSGYALNF

SEQ ID NO: 663602 - protein, 13 aa, Homo sapiens
  CDR3 for beta chain variable domain of TCR clone 331801 (TRBV29-1, TRBJ1-1)
CSVGDSRNTEAFF

SEQ ID NO: 663603 - protein, 14 aa, Homo sapiens
  CDR3 for alpha chain variable domain of TCR clone 331802 (TRAV12-1, TRAJ33)
CVLNPEDSNYQLIW

SEQ ID NO: 663604 - protein, 11 aa, Homo sapiens
  CDR3 for beta chain variable domain of TCR clone 331802 (TRBV7-6, TRBJ2-1)
CASSNYGEQLF

SEQ ID NO: 663605 - protein, 17 aa, Homo sapiens
  CDR3 for alpha chain variable domain of TCR clone 331803 (TRAV26-1, TRAJ11)
CIVRVGQSNSGYSTLPF

SEQ ID NO: 663606 - protein, 15 aa, Homo sapiens
  CDR3 for beta chain variable domain of TCR clone 331803 (TRBV27, TRBJ2-5)
CASSLIPSGGETQYF

SEQ ID NO: 663607 - protein, 14 aa, Homo sapiens
  CDR3 for alpha chain variable domain of TCR clone 331804 (TRAV1-2, TRAJ8)
CAVREDTGFQKLVF

SEQ ID NO: 663608 - protein, 10 aa, Homo sapiens
  CDR3 for beta chain variable domain of TCR clone 331804 (TRBV7-9, TRBJ1-1)
CASSFTEAFF

SEQ ID NO: 663609 - protein, 16 aa, Homo sapiens
  CDR3 for alpha chain variable domain of TCR clone 331805 (TRAV12-3, TRAJ53)
CAMSPWSGGSNYKLTF

SEQ ID NO: 663610 - protein, 14 aa, Homo sapiens
  CDR3 for beta chain variable domain of TCR clone 331805 (TRBV4-2, TRBJ2-1)
CASGLERAYNEQFF

SEQ ID NO: 663611 - protein, 15 aa, Homo sapiens
  CDR3 for alpha chain variable domain of TCR clone 331806 (TRAV9-2, TRAJ16)
CALRDRFSDGQKLLF

SEQ ID NO: 663612 - protein, 17 aa, Homo sapiens
  CDR3 for beta chain variable domain of TCR clone 331806 (TRBV19, TRBJ2-6)
CASSKGATASGANVLTF

SEQ ID NO: 663613 - protein, 13 aa, Homo sapiens
  CDR3 for alpha chain variable domain of TCR clone 331807 (TRAV26-1, TRAJ29)
CIVRRSGNTPLVF

SEQ ID NO: 663614 - protein, 15 aa, Homo sapiens
  CDR3 for beta chain variable domain of TCR clone 331807 (TRBV11-2, TRBJ2-7)
CQSLAPTGVNYEQYF

SEQ ID NO: 663615 - protein, 15 aa, Homo sapiens
  CDR3 for alpha chain variable domain of TCR clone 331808 (TRAV8-3, TRAJ48)
CAVGAADFGNEKLTF

SEQ ID NO: 663616 - protein, 15 aa, Homo sapiens
  CDR3 for beta chain variable domain of TCR clone 331808 (TRBV19, TRBJ2-1)
CASSIQATSYNEQFF

SEQ ID NO: 663617 - protein, 14 aa, Homo sapiens
  CDR3 for alpha chain variable domain of TCR clone 331809 (TRAV27, TRAJ22)
CAGVVPGSARQLTF

SEQ ID NO: 663618 - protein, 16 aa, Homo sapiens
  CDR3 for beta chain variable domain of TCR clone 331809 (TRBV9, TRBJ2-7)
CASSVGLGGGTYEPYF

SEQ ID NO: 663619 - protein, 15 aa, Homo sapiens
  CDR3 for alpha chain variable domain of TCR clone 331810 (TRAV27, TRAJ38)
CAARRNAGNNSKLIW

SEQ ID NO: 663620 - protein, 13 aa, Homo sapiens
  CDR3 for beta chain variable domain of TCR clone 331810 (TRBV7-3, TRBJ2-1)
CASSLDSYNEQFF

SEQ ID NO: 663621 - protein, 13 aa, Homo sapiens
  CDR3 for alpha chain variable domain of TCR clone 331811 (TRAV12-2, TRAJ39)
CAVNNNARNMLTF

SEQ ID NO: 663622 - protein, 13 aa, Homo sapiens
  CDR3 for beta chain variable domain of TCR clone 331811 (TRBV7-3, TRBJ2-1)
CQQPGGGGNEQFF

SEQ ID NO: 663623 - protein, 13 aa, Homo sapiens
  CDR3 for alpha chain variable domain of TCR clone 331812 (TRAV27, TRAJ42)
CAGARGSQANLIF

SEQ ID NO: 663624 - protein, 14 aa, Homo sapiens
  CDR3 for beta chain variable domain of TCR clone 331812 (TRBV20-1, TRBJ1-1)
CSAQTRIGGTEAFF

SEQ ID NO: 663625 - protein, 13 aa, Homo sapiens
  CDR3 for alpha chain variable domain of TCR clone 331813 (TRAV27, TRAJ56)
CAGLTGANSKLTF

SEQ ID NO: 663626 - protein, 15 aa, Homo sapiens
  CDR3 for beta chain variable domain of TCR clone 331813 (TRBV10-3, TRBJ2-3)
CAISLTSGGTDTQYF

SEQ ID NO: 663627 - protein, 10 aa, Homo sapiens
  CDR3 for alpha chain variable domain of TCR clone 331814 (TRAV1-2, TRAJ18)
CAVRGEAQPW

SEQ ID NO: 663628 - protein, 13 aa, Homo sapiens
  CDR3 for beta chain variable domain of TCR clone 331814 (TRBV7-9, TRBJ2-2)
CASSSAGTGELFF

SEQ ID NO: 663629 - protein, 15 aa, Homo sapiens
  CDR3 for alpha chain variable domain of TCR clone 331815 (TRAV21, TRAJ53)
CATLNSGGSNYKLTF

SEQ ID NO: 663630 - protein, 17 aa, Homo sapiens
  CDR3 for beta chain variable domain of TCR clone 331815 (TRBV5-1, TRBJ2-5)
CASSLLGLAANQETQYF

SEQ ID NO: 663631 - protein, 15 aa, Homo sapiens
  CDR3 for alpha chain variable domain of TCR clone 331816 (TRAV4, TRAJ10)
CLVGDEEGGGNKLTF

SEQ ID NO: 663632 - protein, 15 aa, Homo sapiens
  CDR3 for beta chain variable domain of TCR clone 331816 (TRBV7-2, TRBJ2-7)
CANSLTGQGTYEQYF

SEQ ID NO: 663633 - protein, 12 aa, Homo sapiens
  CDR3 for alpha chain variable domain of TCR clone 331817 (TRAV13-2, TRAJ23)
CAERHRGGKLIF

SEQ ID NO: 663634 - protein, 16 aa, Homo sapiens
  CDR3 for beta chain variable domain of TCR clone 331817 (TRBV7-9, TRBJ1-2)
CASSLGFASGEDGYTF

SEQ ID NO: 663635 - protein, 16 aa, Homo sapiens
  CDR3 for alpha chain variable domain of TCR clone 331818 (TRAV3, TRAJ28)
CAVLPRSGAGSYQFTF

SEQ ID NO: 663636 - protein, 13 aa, Homo sapiens
  CDR3 for beta chain variable domain of TCR clone 331818 (TRBV12-4, TRBJ2-5)
CASRLAVQETQYF

SEQ ID NO: 663637 - protein, 12 aa, Homo sapiens
  CDR3 for alpha chain variable domain of TCR clone 331819 (TRAV2, TRAJ40)
CCGYLRNLKYIF

SEQ ID NO: 663638 - protein, 15 aa, Homo sapiens
  CDR3 for beta chain variable domain of TCR clone 331819 (TRBV11-3, TRBJ2-3)
CASLKDGREGDTQYF

SEQ ID NO: 663639 - protein, 14 aa, Homo sapiens
  CDR3 for alpha chain variable domain of TCR clone 331820 (TRAV26-1, TRAJ49)
CIVRLTNTGNQFYF

SEQ ID NO: 663640 - protein, 12 aa, Homo sapiens
  CDR3 for beta chain variable domain of TCR clone 331820 (TRBV11-2, TRBJ2-2)
CASSLPTGELFF

SEQ ID NO: 663641 - protein, 15 aa, Homo sapiens
  CDR3 for alpha chain variable domain of TCR clone 331821 (TRAV26-1, TRAJ37)
CIVRVATGNTGKLIF

SEQ ID NO: 663642 - protein, 12 aa, Homo sapiens
  CDR3 for beta chain variable domain of TCR clone 331821 (TRBV12-4, TRBJ1-1)
CASSLVDTEAFV

SEQ ID NO: 663643 - protein, 15 aa, Homo sapiens
  CDR3 for alpha chain variable domain of TCR clone 331822 (TRAV21, TRAJ24)
CAARSSTASWGNLQF

SEQ ID NO: 663644 - protein, 13 aa, Homo sapiens
  CDR3 for beta chain variable domain of TCR clone 331822 (TRBV11-2, TRBJ2-5)
CASSSTGEETQYF

SEQ ID NO: 663645 - protein, 14 aa, Homo sapiens
  CDR3 for alpha chain variable domain of TCR clone 331823 (TRAV3, TRAJ36)
CAVRDGTGANNRFF

SEQ ID NO: 663646 - protein, 16 aa, Homo sapiens
  CDR3 for beta chain variable domain of TCR clone 331823 (TRBV7-3, TRBJ2-5)
CASIQPGGSVQETQYF

SEQ ID NO: 663647 - protein, 15 aa, Homo sapiens
  CDR3 for alpha chain variable domain of TCR clone 331824 (TRAV21, TRAJ40)
CAVRPQTSGTYKTIF

SEQ ID NO: 663648 - protein, 13 aa, Homo sapiens
  CDR3 for beta chain variable domain of TCR clone 331824 (TRBV7-2, TRBJ2-2)
CASSSVRAGELFF

SEQ ID NO: 663649 - protein, 18 aa, Homo sapiens
  CDR3 for alpha chain variable domain of TCR clone 331825 (TRAV26-1, TRAJ52)
CIVRGRNAGCTSYGKLTF

SEQ ID NO: 663650 - protein, 14 aa, Homo sapiens
  CDR3 for beta chain variable domain of TCR clone 331825 (TRBV6-6, TRBJ1-3)
CASVAGDSGNTIYF

SEQ ID NO: 663651 - protein, 15 aa, Homo sapiens
  CDR3 for alpha chain variable domain of TCR clone 331826 (TRAV27, TRAJ38)
CAACRNGGNNHKLIW

SEQ ID NO: 663652 - protein, 13 aa, Homo sapiens
  CDR3 for beta chain variable domain of TCR clone 331826 (TRBV12-5, TRBJ2-3)
CASGDRQSDTQYF

SEQ ID NO: 663653 - protein, 14 aa, Homo sapiens
  CDR3 for alpha chain variable domain of TCR clone 331827 (TRAV1-2, TRAJ16)
CAVTRFSDGQKLLF

SEQ ID NO: 663654 - protein, 15 aa, Homo sapiens
  CDR3 for beta chain variable domain of TCR clone 331827 (TRBV7-2, TRBJ2-7)
CASSTPGLTRGEQYF

SEQ ID NO: 663655 - protein, 13 aa, Homo sapiens
  CDR3 for alpha chain variable domain of TCR clone 331828 (TRAV3, TRAJ36)
CAVRDTGANNLFF

SEQ ID NO: 663656 - protein, 16 aa, Homo sapiens
  CDR3 for beta chain variable domain of TCR clone 331828 (TRBV12-4, TRBJ2-7)
CASSLIGGTGTYEQYF

SEQ ID NO: 663657 - protein, 16 aa, Homo sapiens
  CDR3 for alpha chain variable domain of TCR clone 331829 (TRAV12-3, TRAJ53)
CAMSPGSGGSNYKLTF

SEQ ID NO: 663658 - protein, 14 aa, Homo sapiens
  CDR3 for beta chain variable domain of TCR clone 331829 (TRBV7-2, TRBJ1-1)
CASSLLTGTTEAFF

SEQ ID NO: 663659 - protein, 15 aa, Homo sapiens
  CDR3 for alpha chain variable domain of TCR clone 331830 (TRAV27, TRAJ38)
CAGRLNAGDNRKLIW

SEQ ID NO: 663660 - protein, 13 aa, Homo sapiens
  CDR3 for beta chain variable domain of TCR clone 331830 (TRBV12-5, TRBJ2-3)
CASQNRGTDTQYF

SEQ ID NO: 663661 - protein, 13 aa, Homo sapiens
  CDR3 for alpha chain variable domain of TCR clone 331831 (TRAV35, TRAJ42)
CAGFPGSQGNLIF

SEQ ID NO: 663662 - protein, 14 aa, Homo sapiens
  CDR3 for beta chain variable domain of TCR clone 331831 (TRBV4-1, TRBJ2-2)
CASGQAVNTGELFF

SEQ ID NO: 663663 - protein, 17 aa, Homo sapiens
  CDR3 for alpha chain variable domain of TCR clone 331832 (TRAV13-1, TRAJ31)
CAPRDRLMFGDGTQLVV

SEQ ID NO: 663664 - protein, 12 aa, Homo sapiens
  CDR3 for beta chain variable domain of TCR clone 331832 (TRBV7-9, TRBJ2-7)
CPSSLEGYEQYF

SEQ ID NO: 663665 - protein, 14 aa, Homo sapiens
  CDR3 for alpha chain variable domain of TCR clone 331833 (TRAV1-2, TRAJ8)
CAEREDTGFQKLVF

SEQ ID NO: 663666 - protein, 15 aa, Homo sapiens
  CDR3 for beta chain variable domain of TCR clone 331833 (TRBV4-3, TRBJ2-7)
CASSQDLGSSYEQYF

SEQ ID NO: 663667 - protein, 15 aa, Homo sapiens
  CDR3 for alpha chain variable domain of TCR clone 331834 (TRAV21, TRAJ24)
CAARSSTDSWGKLQF

SEQ ID NO: 663668 - protein, 15 aa, Homo sapiens
  CDR3 for beta chain variable domain of TCR clone 331834 (TRBV7-9, TRBJ2-1)
CASTPWEGNYNEQFF

SEQ ID NO: 663669 - protein, 10 aa, Homo sapiens
  CDR3 for alpha chain variable domain of TCR clone 331835 (TRAV12-2, TRAJ31)
CAVNNARLMF

SEQ ID NO: 663670 - protein, 15 aa, Homo sapiens
  CDR3 for beta chain variable domain of TCR clone 331835 (TRBV20-1, TRBJ1-1)
CSASRGVTGNTEAFF

SEQ ID NO: 663671 - protein, 13 aa, Homo sapiens
  CDR3 for alpha chain variable domain of TCR clone 331836 (TRAV12-1, TRAJ39)
CVVNYNAGKMLTF

SEQ ID NO: 663672 - protein, 14 aa, Homo sapiens
  CDR3 for beta chain variable domain of TCR clone 331836 (TRBV27, TRBJ2-3)
CASSPLGTTDTQYF

SEQ ID NO: 663673 - protein, 15 aa, Homo sapiens
  CDR3 for alpha chain variable domain of TCR clone 331837 (TRAV12-3, TRAJ6)
CAMSATTGGSYIPTF

SEQ ID NO: 663674 - protein, 16 aa, Homo sapiens
  CDR3 for beta chain variable domain of TCR clone 331837 (TRBV15, TRBJ2-3)
CATSRDLGIVTDTQYF

SEQ ID NO: 663675 - protein, 14 aa, Homo sapiens
  CDR3 for alpha chain variable domain of TCR clone 331838 (TRAV3, TRAJ33)
CAVRDMGSNYQLIW

SEQ ID NO: 663676 - protein, 17 aa, Homo sapiens
  CDR3 for beta chain variable domain of TCR clone 331838 (TRBV19, TRBJ2-1)
CASSIWSAQPAHNEQFF

SEQ ID NO: 663677 - protein, 14 aa, Homo sapiens
  CDR3 for alpha chain variable domain of TCR clone 331839 (TRAV21, TRAJ15)
CAVSLNQAGTALIF

SEQ ID NO: 663678 - protein, 13 aa, Homo sapiens
  CDR3 for beta chain variable domain of TCR clone 331839 (TRBV7-9, TRBJ1-2)
CASSLKQNYGYTF

SEQ ID NO: 663679 - protein, 13 aa, Homo sapiens
  CDR3 for alpha chain variable domain of TCR clone 331840 (TRAV3, TRAJ29)
CAVRDIIDTPLVV

SEQ ID NO: 663680 - protein, 14 aa, Homo sapiens
  CDR3 for beta chain variable domain of TCR clone 331840 (TRBV27, TRBJ2-1)
CASRATGGYNEQFF

SEQ ID NO: 663681 - protein, 14 aa, Homo sapiens
  CDR3 for alpha chain variable domain of TCR clone 331841 (TRAV26-1, TRAJ38)
CIAENAGNNRKLIG

SEQ ID NO: 663682 - protein, 13 aa, Homo sapiens
  CDR3 for beta chain variable domain of TCR clone 331841 (TRBV7-9, TRBJ1-2)
CASSLKQNYGYTF

SEQ ID NO: 663683 - protein, 14 aa, Homo sapiens
  CDR3 for alpha chain variable domain of TCR clone 331842 (TRAV1-2, TRAJ16)
CAVNRFSDGQKLLF

SEQ ID NO: 663684 - protein, 13 aa, Homo sapiens
  CDR3 for beta chain variable domain of TCR clone 331842 (TRBV19, TRBJ2-7)
CASSTSGSYEQYV

SEQ ID NO: 663685 - protein, 11 aa, Homo sapiens
  CDR3 for alpha chain variable domain of TCR clone 331843 (TRAV21, TRAJ9)
CAVPGGFKTIF

SEQ ID NO: 663686 - protein, 20 aa, Homo sapiens
  CDR3 for beta chain variable domain of TCR clone 331843 (TRBV7-9, TRBJ2-5)
RGTRPCISVALQGAQETQYF

SEQ ID NO: 663687 - protein, 14 aa, Homo sapiens
  CDR3 for alpha chain variable domain of TCR clone 331844 (TRAV12-2, TRAJ13)
CAVKKTGGYQRVTF

SEQ ID NO: 663688 - protein, 13 aa, Homo sapiens
  CDR3 for beta chain variable domain of TCR clone 331844 (TRBV7-9, TRBJ1-2)
CASSLKQNYGYTF

SEQ ID NO: 663689 - protein, 14 aa, Homo sapiens
  CDR3 for alpha chain variable domain of TCR clone 331845 (TRAV16, TRAJ54)
CSLSLIQGAQKLVF

SEQ ID NO: 663690 - protein, 17 aa, Homo sapiens
  CDR3 for beta chain variable domain of TCR clone 331845 (TRBV11-2, TRBJ2-4)
CASSSVGPGGHRNMQYF

SEQ ID NO: 663691 - protein, 16 aa, Homo sapiens
  CDR3 for alpha chain variable domain of TCR clone 331846 (TRAV3, TRAJ37)
CAVRPHGSGNPGKLIF

SEQ ID NO: 663692 - protein, 16 aa, Homo sapiens
  CDR3 for beta chain variable domain of TCR clone 331846 (TRBV7-9, TRBJ2-3)
CASSPWREVGTDTQYF

SEQ ID NO: 663693 - protein, 15 aa, Homo sapiens
  CDR3 for alpha chain variable domain of TCR clone 331847 (TRAV12-1, TRAJ4)
CVVNPFSGGYNKLIF

SEQ ID NO: 663694 - protein, 16 aa, Homo sapiens
  CDR3 for beta chain variable domain of TCR clone 331847 (TRBV5-1, TRBJ1-1)
CASSKTGTEVGTVAFF

SEQ ID NO: 663695 - protein, 11 aa, Homo sapiens
  CDR3 for alpha chain variable domain of TCR clone 331848 (TRAV3, TRAJ21)
CAVGNFNKFYF

SEQ ID NO: 663696 - protein, 12 aa, Homo sapiens
  CDR3 for beta chain variable domain of TCR clone 331848 (TRBV3-1, TRBJ2-3)
CASSRIGDTQYF

SEQ ID NO: 663697 - protein, 14 aa, Homo sapiens
  CDR3 for alpha chain variable domain of TCR clone 331849 (TRAV23/DV6, TRAJ50)
CAADMKTSYDKVIF

SEQ ID NO: 663698 - protein, 16 aa, Homo sapiens
  CDR3 for beta chain variable domain of TCR clone 331849 (TRBV6-6, TRBJ2-1)
CASSLLSDSSYNEQFF

SEQ ID NO: 663699 - protein, 15 aa, Homo sapiens
  CDR3 for alpha chain variable domain of TCR clone 331850 (TRAV1-1, TRAJ39)
NALDGLEETGNMLTF

SEQ ID NO: 663700 - protein, 13 aa, Homo sapiens
  CDR3 for beta chain variable domain of TCR clone 331850 (TRBV7-9, TRBJ1-2)
CASSLKQNYGYTF

SEQ ID NO: 663701 - protein, 16 aa, Homo sapiens
  CDR3 for alpha chain variable domain of TCR clone 331851 (TRAV16, TRAJ4)
CALSRMFSGGYNKLIF

SEQ ID NO: 663702 - protein, 16 aa, Homo sapiens
  CDR3 for beta chain variable domain of TCR clone 331851 (TRBV4-1, TRBJ2-1)
CASSQEAGQGSDEQFF

SEQ ID NO: 663703 - protein, 15 aa, Homo sapiens
  CDR3 for alpha chain variable domain of TCR clone 331852 (TRAV25, TRAJ53)
CAATGGGGCNYKLTL

SEQ ID NO: 663704 - protein, 19 aa, Homo sapiens
  CDR3 for beta chain variable domain of TCR clone 331852 (TRBV7-2, TRBJ2-3)
CASSFLSRNWGGGTDTQYF

SEQ ID NO: 663705 - protein, 16 aa, Homo sapiens
  CDR3 for alpha chain variable domain of TCR clone 331853 (TRAV30, TRAJ24)
CGTEIGDADRWGKFQF

SEQ ID NO: 663706 - protein, 14 aa, Homo sapiens
  CDR3 for beta chain variable domain of TCR clone 331853 (TRBV12-5, TRBJ2-5)
CASGSRTHQETQYF

SEQ ID NO: 663707 - protein, 14 aa, Homo sapiens
  CDR3 for alpha chain variable domain of TCR clone 331854 (TRAV1-1, TRAJ29)
CAVRELTSATPLVF

SEQ ID NO: 663708 - protein, 14 aa, Homo sapiens
  CDR3 for beta chain variable domain of TCR clone 331854 (TRBV3-1, TRBJ2-5)
CASSQGPDQETQYF

SEQ ID NO: 663709 - protein, 13 aa, Homo sapiens
  CDR3 for alpha chain variable domain of TCR clone 331855 (TRAV3, TRAJ21)
CAVREPDFNKFYF

SEQ ID NO: 663710 - protein, 12 aa, Homo sapiens
  CDR3 for beta chain variable domain of TCR clone 331855 (TRBV12-4, TRBJ2-1)
CASGLQGSEQFF

SEQ ID NO: 663711 - protein, 11 aa, Homo sapiens
  CDR3 for alpha chain variable domain of TCR clone 331856 (TRAV2, TRAJ13)
CASGGYQKVTF

SEQ ID NO: 663712 - protein, 12 aa, Homo sapiens
  CDR3 for beta chain variable domain of TCR clone 331856 (TRBV7-8, TRBJ2-7)
CASSLGDWEQYF

SEQ ID NO: 663713 - protein, 14 aa, Homo sapiens
  CDR3 for alpha chain variable domain of TCR clone 331857 (TRAV1-2, TRAJ8)
CAVREDTGFQKLVF

SEQ ID NO: 663714 - protein, 13 aa, Homo sapiens
  CDR3 for beta chain variable domain of TCR clone 331857 (TRBV11-2, TRBJ2-1)
CASSSEAYNEQFF

SEQ ID NO: 663715 - protein, 14 aa, Homo sapiens
  CDR3 for alpha chain variable domain of TCR clone 331858 (TRAV26-1, TRAJ15)
CIVRANQAGTALIF

SEQ ID NO: 663716 - protein, 13 aa, Homo sapiens
  CDR3 for beta chain variable domain of TCR clone 331858 (TRBV7-3, TRBJ1-1)
CASSQDWGAEAFF

SEQ ID NO: 663717 - protein, 14 aa, Homo sapiens
  CDR3 for alpha chain variable domain of TCR clone 331859 (TRAV22, TRAJ6)
CAGVGPGGSYIPTF

SEQ ID NO: 663718 - protein, 15 aa, Homo sapiens
  CDR3 for beta chain variable domain of TCR clone 331859 (TRBV20-1, TRBJ2-5)
CSATRTSGSLETQYF

SEQ ID NO: 663719 - protein, 15 aa, Homo sapiens
  CDR3 for alpha chain variable domain of TCR clone 331860 (TRAV16, TRAJ16)
CALQGGGSDGQKLLF

SEQ ID NO: 663720 - protein, 15 aa, Homo sapiens
  CDR3 for beta chain variable domain of TCR clone 331860 (TRBV20-1, TRBJ2-7)
CSARDRVSGMDEQYV

SEQ ID NO: 663721 - protein, 18 aa, Homo sapiens
  CDR3 for alpha chain variable domain of TCR clone 331861 (TRAV26-1, TRAJ52)
CIVRVEGAGGTSYGKLTF

SEQ ID NO: 663722 - protein, 15 aa, Homo sapiens
  CDR3 for beta chain variable domain of TCR clone 331861 (TRBV5-1, TRBJ2-3)
CASSVTSGSTDTQYF

SEQ ID NO: 663723 - protein, 11 aa, Homo sapiens
  CDR3 for alpha chain variable domain of TCR clone 331862 (TRAV21, TRAJ48)
CAVDGNEKLTF

SEQ ID NO: 663724 - protein, 16 aa, Homo sapiens
  CDR3 for beta chain variable domain of TCR clone 331862 (TRBV19, TRBJ2-1)
CASSSKGTRSDNEQFC

SEQ ID NO: 663725 - protein, 17 aa, Homo sapiens
  CDR3 for alpha chain variable domain of TCR clone 331863 (TRAV3, TRAJ6)
CAVRDGPRAGGSYIPTF

SEQ ID NO: 663726 - protein, 20 aa, Homo sapiens
  CDR3 for beta chain variable domain of TCR clone 331863 (TRBV7-8, TRBJ2-2)
CASNHLFPGPTIHITGELFF

SEQ ID NO: 663727 - protein, 14 aa, Homo sapiens
  CDR3 for alpha chain variable domain of TCR clone 331864 (TRAV1-2, TRAJ16)
CAVNRFSDGQKLLF

SEQ ID NO: 663728 - protein, 18 aa, Homo sapiens
  CDR3 for beta chain variable domain of TCR clone 331864 (TRBV11-2, TRBJ2-3)
CASRLGGASRGAPNTQYF

SEQ ID NO: 663729 - protein, 14 aa, Homo sapiens
  CDR3 for alpha chain variable domain of TCR clone 331865 (TRAV26-1, TRAJ38)
CIADNAGNNRKLIW

SEQ ID NO: 663730 - protein, 15 aa, Homo sapiens
  CDR3 for beta chain variable domain of TCR clone 331865 (TRBV11-2, TRBJ2-1)
CASSLGTSGLNEQFF

SEQ ID NO: 663731 - protein, 14 aa, Homo sapiens
  CDR3 for alpha chain variable domain of TCR clone 331866 (TRAV23/DV6, TRAJ37)
CAASTSSNTGKLIF

SEQ ID NO: 663732 - protein, 15 aa, Homo sapiens
  CDR3 for beta chain variable domain of TCR clone 331866 (TRBV13, TRBJ1-5)
CASSRTGRGHQPQHF

SEQ ID NO: 663733 - protein, 13 aa, Homo sapiens
  CDR3 for alpha chain variable domain of TCR clone 331867 (TRAV2, TRAJ40)
CAVVTSGTYKYIF

SEQ ID NO: 663734 - protein, 15 aa, Homo sapiens
  CDR3 for beta chain variable domain of TCR clone 331867 (TRBV6-1, TRBJ2-6)
CASTGSRSGANVLTF

SEQ ID NO: 663735 - protein, 15 aa, Homo sapiens
  CDR3 for alpha chain variable domain of TCR clone 331868 (TRAV2, TRAJ13)
CAVEPEFWGLPESYL

SEQ ID NO: 663736 - protein, 16 aa, Homo sapiens
  CDR3 for beta chain variable domain of TCR clone 331868 (TRBV5-1, TRBJ1-1)
CASSSGGNSLNTEAFF

SEQ ID NO: 663737 - protein, 14 aa, Homo sapiens
  CDR3 for alpha chain variable domain of TCR clone 331869 (TRAV17, TRAJ42)
CATAKGGSQGNLIF

SEQ ID NO: 663738 - protein, 18 aa, Homo sapiens
  CDR3 for beta chain variable domain of TCR clone 331869 (TRBV5-5, TRBJ1-5)
CASSLRQVKGSSNQPQHF

SEQ ID NO: 663739 - protein, 13 aa, Homo sapiens
  CDR3 for alpha chain variable domain of TCR clone 331870 (TRAV30, TRAJ24)
CGTVTDSWGKLLF

SEQ ID NO: 663740 - protein, 15 aa, Homo sapiens
  CDR3 for beta chain variable domain of TCR clone 331870 (TRBV4-1, TRBJ2-1)
CASSQDPGNYNEQFF

SEQ ID NO: 663741 - protein, 15 aa, Homo sapiens
  CDR3 for alpha chain variable domain of TCR clone 331871 (TRAV1-1, TRAJ24)
CALSGVTDSWGKFQF

SEQ ID NO: 663742 - protein, 16 aa, Homo sapiens
  CDR3 for beta chain variable domain of TCR clone 331871 (TRBV2, TRBJ2-7)
CASSEPWTGPSYEQYF

SEQ ID NO: 663743 - protein, 16 aa, Homo sapiens
  CDR3 for alpha chain variable domain of TCR clone 331872 (TRAV20, TRAJ10)
SAVLRGLTGGGNKLTF

SEQ ID NO: 663744 - protein, 14 aa, Homo sapiens
  CDR3 for beta chain variable domain of TCR clone 331872 (TRBV19, TRBJ1-5)
CASRAPDSFLSQHF

SEQ ID NO: 663745 - protein, 12 aa, Homo sapiens
  CDR3 for alpha chain variable domain of TCR clone 331873 (TRAV8-6, TRAJ36)
CAVSDWLGQTTS

SEQ ID NO: 663746 - protein, 16 aa, Homo sapiens
  CDR3 for beta chain variable domain of TCR clone 331873 (TRBV7-2, TRBJ2-3)
CASSPQGLSNTDTQYF

SEQ ID NO: 663747 - protein, 13 aa, Homo sapiens
  CDR3 for alpha chain variable domain of TCR clone 331874 (TRAV2, TRAJ40)
CAVVTSGTYKYIF

SEQ ID NO: 663748 - protein, 16 aa, Homo sapiens
  CDR3 for beta chain variable domain of TCR clone 331874 (TRBV29-1, TRBJ1-2)
CSVEANRDIANYGYTF

SEQ ID NO: 663749 - protein, 19 aa, Homo sapiens
  CDR3 for alpha chain variable domain of TCR clone 331875 (TRAV25, TRAJ20)
TATQTTDVGILPHDYKLSF

SEQ ID NO: 663750 - protein, 14 aa, Homo sapiens
  CDR3 for beta chain variable domain of TCR clone 331875 (TRBV19, TRBJ2-3)
CASSAPRGTDTQYL

SEQ ID NO: 663751 - protein, 13 aa, Homo sapiens
  CDR3 for alpha chain variable domain of TCR clone 331876 (TRAV1-2, TRAJ9)
CAALNTGGFKTIF

SEQ ID NO: 663752 - protein, 14 aa, Homo sapiens
  CDR3 for beta chain variable domain of TCR clone 331876 (TRBV5-7, TRBJ2-1)
CASSSVANYNEQFF

SEQ ID NO: 663753 - protein, 14 aa, Homo sapiens
  CDR3 for alpha chain variable domain of TCR clone 331877 (TRAV12-3, TRAJ15)
CAVIPPQAGTALIF

SEQ ID NO: 663754 - protein, 14 aa, Homo sapiens
  CDR3 for beta chain variable domain of TCR clone 331877 (TRBV20-1, TRBJ2-2)
CSARRRLATGELFF

SEQ ID NO: 663755 - protein, 14 aa, Homo sapiens
  CDR3 for alpha chain variable domain of TCR clone 331878 (TRAV4, TRAJ17)
CLVGDMAAGNKLTL

SEQ ID NO: 663756 - protein, 13 aa, Homo sapiens
  CDR3 for beta chain variable domain of TCR clone 331878 (TRBV18, TRBJ2-7)
CASQSGGGYEQYF

SEQ ID NO: 663757 - protein, 11 aa, Homo sapiens
  CDR3 for alpha chain variable domain of TCR clone 331879 (TRAV17, TRAJ39)
CATNPYNMLTF

SEQ ID NO: 663758 - protein, 14 aa, Homo sapiens
  CDR3 for beta chain variable domain of TCR clone 331879 (TRBV4-2, TRBJ2-1)
CASGLDRAYNEQFF

SEQ ID NO: 663759 - protein, 15 aa, Homo sapiens
  CDR3 for alpha chain variable domain of TCR clone 331880 (TRAV27, TRAJ38)
CAAHRNAGNNRKPIW

SEQ ID NO: 663760 - protein, 13 aa, Homo sapiens
  CDR3 for beta chain variable domain of TCR clone 331880 (TRBV12-5, TRBJ2-3)
CASGDRQSDTQYF

SEQ ID NO: 663761 - protein, 14 aa, Homo sapiens
  CDR3 for alpha chain variable domain of TCR clone 331881 (TRAV12-3, TRAJ54)
CAMRGIQGAQKLVF

SEQ ID NO: 663762 - protein, 13 aa, Homo sapiens
  CDR3 for beta chain variable domain of TCR clone 331881 (TRBV19, TRBJ1-1)
CASCPSNGGEAFF

SEQ ID NO: 663763 - protein, 22 aa, Homo sapiens
  CDR3 for alpha chain variable domain of TCR clone 331882 (TRAV8-3, TRAJ32)
CAVEVVLQTSSSLELAPCLLSS

SEQ ID NO: 663764 - protein, 15 aa, Homo sapiens
  CDR3 for beta chain variable domain of TCR clone 331882 (TRBV6-3, TRBJ2-7)
CASSSPGTVFYEQYF

SEQ ID NO: 663765 - protein, 13 aa, Homo sapiens
  CDR3 for alpha chain variable domain of TCR clone 331883 (TRAV8-3, TRAJ5)
LAVGPRGRRALTF

SEQ ID NO: 663766 - protein, 16 aa, Homo sapiens
  CDR3 for beta chain variable domain of TCR clone 331883 (TRBV11-3, TRBJ2-3)
CASSPGGLLGTDTQYF

SEQ ID NO: 663767 - protein, 13 aa, Homo sapiens
  CDR3 for alpha chain variable domain of TCR clone 331884 (TRAV8-3, TRAJ15)
CAVGHQAGTALIF

SEQ ID NO: 663768 - protein, 15 aa, Homo sapiens
  CDR3 for beta chain variable domain of TCR clone 331884 (TRBV27, TRBJ2-1)
CASSNGGGSSNEQFF

SEQ ID NO: 663769 - protein, 14 aa, Homo sapiens
  CDR3 for alpha chain variable domain of TCR clone 331885 (TRAV12-2, TRAJ17)
CAVLFKAAGNKLTF

SEQ ID NO: 663770 - protein, 14 aa, Homo sapiens
  CDR3 for beta chain variable domain of TCR clone 331885 (TRBV10-3, TRBJ1-1)
CAISDTDRGVEAFF

SEQ ID NO: 663771 - protein, 15 aa, Homo sapiens
  CDR3 for alpha chain variable domain of TCR clone 331886 (TRAV17, TRAJ42)
CATDHYGGSQGNLIF

SEQ ID NO: 663772 - protein, 19 aa, Homo sapiens
  CDR3 for beta chain variable domain of TCR clone 331886 (TRBV28, TRBJ2-1)
CASSFSIRGSGRTRYEQFF

SEQ ID NO: 663773 - protein, 16 aa, Homo sapiens
  CDR3 for alpha chain variable domain of TCR clone 331887 (TRAV30, TRAJ24)
CGTAIVDADSWGKFQF

SEQ ID NO: 663774 - protein, 17 aa, Homo sapiens
  CDR3 for beta chain variable domain of TCR clone 331887 (TRBV20-1, TRBJ2-1)
CSAPPRLAGTRYNEQFF

SEQ ID NO: 663775 - protein, 17 aa, Homo sapiens
  CDR3 for alpha chain variable domain of TCR clone 331888 (TRAV16, TRAJ58)
CITVLSNGETSGSRLTF

SEQ ID NO: 663776 - protein, 17 aa, Homo sapiens
  CDR3 for beta chain variable domain of TCR clone 331888 (TRBV18, TRBJ2-1)
CASSKGLSGGADNEQLF

SEQ ID NO: 663777 - protein, 12 aa, Homo sapiens
  CDR3 for alpha chain variable domain of TCR clone 331889 (TRAV21, TRAJ31)
CAVSPARGRLMF

SEQ ID NO: 663778 - protein, 14 aa, Homo sapiens
  CDR3 for beta chain variable domain of TCR clone 331889 (TRBV28, TRBJ2-7)
CASILLRISYEQYF

SEQ ID NO: 663779 - protein, 11 aa, Homo sapiens
  CDR3 for alpha chain variable domain of TCR clone 331890 (TRAV2, TRAJ21)
CAVFNLNKFYF

SEQ ID NO: 663780 - protein, 14 aa, Homo sapiens
  CDR3 for beta chain variable domain of TCR clone 331890 (TRBV15, TRBJ2-3)
CATRSGTSRDTQYF

SEQ ID NO: 663781 - protein, 13 aa, Homo sapiens
  CDR3 for alpha chain variable domain of TCR clone 331891 (TRAV23/DV6, TRAJ57)
ALPFLGGSEKLVF

SEQ ID NO: 663782 - protein, 14 aa, Homo sapiens
  CDR3 for beta chain variable domain of TCR clone 331891 (TRBV20-1, TRBJ2-7)
CSAKRGRSSYEQYF

SEQ ID NO: 663783 - protein, 15 aa, Homo sapiens
  CDR3 for alpha chain variable domain of TCR clone 331892 (TRAV38-1, TRAJ37)
GAFIFGSGNTGKLIF

SEQ ID NO: 663784 - protein, 12 aa, Homo sapiens
  CDR3 for beta chain variable domain of TCR clone 331892 (TRBV7-9, TRBJ2-7)
CASSLEGYEQYF

SEQ ID NO: 663785 - protein, 16 aa, Homo sapiens
  CDR3 for alpha chain variable domain of TCR clone 331893 (TRAV30, TRAJ24)
CGTEIVDVDSWGKSQF

SEQ ID NO: 663786 - protein, 14 aa, Homo sapiens
  CDR3 for beta chain variable domain of TCR clone 331893 (TRBV12-5, TRBJ2-5)
CASGSRTHQETQYF

SEQ ID NO: 663787 - protein, 15 aa, Homo sapiens
  CDR3 for alpha chain variable domain of TCR clone 331894 (TRAV21, TRAJ32)
CAVNSYGGATNKLIF

SEQ ID NO: 663788 - protein, 18 aa, Homo sapiens
  CDR3 for beta chain variable domain of TCR clone 331894 (TRBV7-9, TRBJ2-1)
CASSTGLAEESSYNEQFF

SEQ ID NO: 663789 - protein, 16 aa, Homo sapiens
  CDR3 for alpha chain variable domain of TCR clone 331895 (TRAV4, TRAJ22)
CLVGDLYSGSARQLTF

SEQ ID NO: 663790 - protein, 17 aa, Homo sapiens
  CDR3 for beta chain variable domain of TCR clone 331895 (TRBV5-1, TRBJ1-5)
CASSLVGREEGNQPQHF

SEQ ID NO: 663791 - protein, 13 aa, Homo sapiens
  CDR3 for alpha chain variable domain of TCR clone 331896 (TRAV12-1, TRAJ20)
GVGQRFNDYKLSF

SEQ ID NO: 663792 - protein, 14 aa, Homo sapiens
  CDR3 for beta chain variable domain of TCR clone 331896 (TRBV6-3, TRBJ1-5)
CASSYSRFAQPQHF

SEQ ID NO: 663793 - protein, 13 aa, Homo sapiens
  CDR3 for alpha chain variable domain of TCR clone 331897 (TRAV27, TRAJ6)
CAGGTRGSYIPTF

SEQ ID NO: 663794 - protein, 17 aa, Homo sapiens
  CDR3 for beta chain variable domain of TCR clone 331897 (TRBV18, TRBJ1-5)
CASSPTMGQGTNQPQHF

SEQ ID NO: 663795 - protein, 17 aa, Homo sapiens
  CDR3 for alpha chain variable domain of TCR clone 331898 (TRAV13-2, TRAJ31)
CAENARLMFGDGTQLGV

SEQ ID NO: 663796 - protein, 14 aa, Homo sapiens
  CDR3 for beta chain variable domain of TCR clone 331898 (TRBV7-9, TRBJ2-1)
CASSLGVADNEQFF

SEQ ID NO: 663797 - protein, 16 aa, Homo sapiens
  CDR3 for alpha chain variable domain of TCR clone 331899 (TRAV1-2, TRAJ35)
CAVRGLTIGFGNELHC

SEQ ID NO: 663798 - protein, 13 aa, Homo sapiens
  CDR3 for beta chain variable domain of TCR clone 331899 (TRBV6-6, TRBJ2-1)
CASSLHQGDEQFF

SEQ ID NO: 663799 - protein, 14 aa, Homo sapiens
  CDR3 for alpha chain variable domain of TCR clone 331900 (TRAV8-3, TRAJ39)
CAVGSNNAGNMLTF

SEQ ID NO: 663800 - protein, 19 aa, Homo sapiens
  CDR3 for beta chain variable domain of TCR clone 331900 (TRBV25-1, TRBJ2-2)
CAILVYRVDRGRKTGELFF

SEQ ID NO: 663801 - protein, 14 aa, Homo sapiens
  CDR3 for alpha chain variable domain of TCR clone 331901 (TRAV26-1, TRAJ38)
CIADNAGNNRKLIW

SEQ ID NO: 663802 - protein, 14 aa, Homo sapiens
  CDR3 for beta chain variable domain of TCR clone 331901 (TRBV4-1, TRBJ2-2)
CASSHAVNTGELSF

SEQ ID NO: 663803 - protein, 15 aa, Homo sapiens
  CDR3 for alpha chain variable domain of TCR clone 331902 (TRAV21, TRAJ32)
CAVNSYGGATNKLIF

SEQ ID NO: 663804 - protein, 18 aa, Homo sapiens
  CDR3 for beta chain variable domain of TCR clone 331902 (TRBV7-9, TRBJ2-1)
CASSTGLAEGSSYNEQFS

SEQ ID NO: 663805 - protein, 14 aa, Homo sapiens
  CDR3 for alpha chain variable domain of TCR clone 331903 (TRAV12-3, TRAJ58)
CAMSTETRGSRLTF

SEQ ID NO: 663806 - protein, 15 aa, Homo sapiens
  CDR3 for beta chain variable domain of TCR clone 331903 (TRBV11-3, TRBJ2-3)
CASLKDGREGETQYF

SEQ ID NO: 663807 - protein, 11 aa, Homo sapiens
  CDR3 for alpha chain variable domain of TCR clone 331904 (TRAV1-2, TRAJ20)
CAVANDYKLRF

SEQ ID NO: 663808 - protein, 13 aa, Homo sapiens
  CDR3 for beta chain variable domain of TCR clone 331904 (TRBV7-3, TRBJ1-1)
CASSQDWGAEAFF

SEQ ID NO: 663809 - protein, 11 aa, Homo sapiens
  CDR3 for alpha chain variable domain of TCR clone 331905 (TRAV3, TRAJ21)
CAVGNFNKFYF

SEQ ID NO: 663810 - protein, 13 aa, Homo sapiens
  CDR3 for beta chain variable domain of TCR clone 331905 (TRBV7-3, TRBJ2-3)
CASSYLRGDTQYF

SEQ ID NO: 663811 - protein, 12 aa, Homo sapiens
  CDR3 for alpha chain variable domain of TCR clone 331906 (TRAV8-3, TRAJ20)
CAVGANDYKLSF

SEQ ID NO: 663812 - protein, 16 aa, Homo sapiens
  CDR3 for beta chain variable domain of TCR clone 331906 (TRBV19, TRBJ2-2)
CASRSPRTGATGEPFS

SEQ ID NO: 663813 - protein, 11 aa, Homo sapiens
  CDR3 for alpha chain variable domain of TCR clone 331907 (TRAV27, TRAJ40)
SLTSETYNYIF

SEQ ID NO: 663814 - protein, 13 aa, Homo sapiens
  CDR3 for beta chain variable domain of TCR clone 331907 (TRBV2, TRBJ2-5)
CASGTPYQETQYF

SEQ ID NO: 663815 - protein, 12 aa, Homo sapiens
  CDR3 for alpha chain variable domain of TCR clone 331908 (TRAV12-2, TRAJ6)
CAVKVGSYIPTF

SEQ ID NO: 663816 - protein, 17 aa, Homo sapiens
  CDR3 for beta chain variable domain of TCR clone 331908 (TRBV28, TRBJ2-5)
CASSTPEGDALQETQYF

SEQ ID NO: 663817 - protein, 13 aa, Homo sapiens
  CDR3 for alpha chain variable domain of TCR clone 331909 (TRAV13-1, TRAJ17)
CAADGAAGNKLTF

SEQ ID NO: 663818 - protein, 13 aa, Homo sapiens
  CDR3 for beta chain variable domain of TCR clone 331909 (TRBV7-3, TRBJ2-1)
CASSLDSYNEQFF

SEQ ID NO: 663819 - protein, 16 aa, Homo sapiens
  CDR3 for alpha chain variable domain of TCR clone 331910 (TRAV27, TRAJ53)
CAAPEGSGGSNYKLTF

SEQ ID NO: 663820 - protein, 14 aa, Homo sapiens
  CDR3 for beta chain variable domain of TCR clone 331910 (TRBV4-3, TRBJ1-5)
CASGQGGQGWPLHF

SEQ ID NO: 663821 - protein, 13 aa, Homo sapiens
  CDR3 for alpha chain variable domain of TCR clone 331911 (TRAV8-6, TRAJ54)
CAVEAQGAQKLAF

SEQ ID NO: 663822 - protein, 13 aa, Homo sapiens
  CDR3 for beta chain variable domain of TCR clone 331911 (TRBV6-5, TRBJ2-2)
CASRTVNTGELFF

SEQ ID NO: 663823 - protein, 18 aa, Homo sapiens
  CDR3 for alpha chain variable domain of TCR clone 331912 (TRAV21, TRAJ52)
CAVRPSPAGGTSYGKLTF

SEQ ID NO: 663824 - protein, 13 aa, Homo sapiens
  CDR3 for beta chain variable domain of TCR clone 331912 (TRBV29-1, TRBJ2-1)
CSVEGGRVNEQFL

SEQ ID NO: 663825 - protein, 15 aa, Homo sapiens
  CDR3 for alpha chain variable domain of TCR clone 331913 (TRAV26-2, TRAJ39)
CSLRGNNNAGNMLTF

SEQ ID NO: 663826 - protein, 15 aa, Homo sapiens
  CDR3 for beta chain variable domain of TCR clone 331913 (TRBV11-2, TRBJ2-1)
CASSRNRGLMYEQFF

SEQ ID NO: 663827 - protein, 16 aa, Homo sapiens
  CDR3 for alpha chain variable domain of TCR clone 331914 (TRAV17, TRAJ9)
CATGEWVGTGGFKTIF

SEQ ID NO: 663828 - protein, 15 aa, Homo sapiens
  CDR3 for beta chain variable domain of TCR clone 331914 (TRBV20-1, TRBJ1-2)
CSARDSRGRNYGYTF

SEQ ID NO: 663829 - protein, 12 aa, Homo sapiens
  CDR3 for alpha chain variable domain of TCR clone 331915 (TRAV8-6, TRAJ43)
CAVSNNNNDMRF

SEQ ID NO: 663830 - protein, 16 aa, Homo sapiens
  CDR3 for beta chain variable domain of TCR clone 331915 (TRBV7-3, TRBJ2-1)
CASSLSSGGGAKEQFF

SEQ ID NO: 663831 - protein, 12 aa, Homo sapiens
  CDR3 for alpha chain variable domain of TCR clone 331916 (TRAV1-2, TRAJ29)
CAVPSGNTPLVF

SEQ ID NO: 663832 - protein, 17 aa, Homo sapiens
  CDR3 for beta chain variable domain of TCR clone 331916 (TRBV7-6, TRBJ2-1)
HASLCQQLGGGADEQFF

SEQ ID NO: 663833 - protein, 14 aa, Homo sapiens
  CDR3 for alpha chain variable domain of TCR clone 331917 (TRAV1-2, TRAJ8)
CAVREDTGFQKLVF

SEQ ID NO: 663834 - protein, 13 aa, Homo sapiens
  CDR3 for beta chain variable domain of TCR clone 331917 (TRBV20-1, TRBJ1-4)
CSARTPYNEKLFC

SEQ ID NO: 663835 - protein, 14 aa, Homo sapiens
  CDR3 for alpha chain variable domain of TCR clone 331918 (TRAV1-2, TRAJ16)
CAGNRFSDGQKLLF

SEQ ID NO: 663836 - protein, 13 aa, Homo sapiens
  CDR3 for beta chain variable domain of TCR clone 331918 (TRBV7-2, TRBJ2-2)
CASSLAVTGELFF

SEQ ID NO: 663837 - protein, 12 aa, Homo sapiens
  CDR3 for alpha chain variable domain of TCR clone 331919 (TRAV12-2, TRAJ31)
CAVNTPDARLMF

SEQ ID NO: 663838 - protein, 14 aa, Homo sapiens
  CDR3 for beta chain variable domain of TCR clone 331919 (TRBV11-1, TRBJ2-7)
CASSFRQGSYEQYF

SEQ ID NO: 663839 - protein, 16 aa, Homo sapiens
  CDR3 for alpha chain variable domain of TCR clone 331920 (TRAV14/DV4, TRAJ20)
CAMREGRSRDDYKLSF

SEQ ID NO: 663840 - protein, 14 aa, Homo sapiens
  CDR3 for beta chain variable domain of TCR clone 331920 (TRBV11-2, TRBJ1-2)
CASSLGTANYGYTF

SEQ ID NO: 663841 - protein, 12 aa, Homo sapiens
  CDR3 for alpha chain variable domain of TCR clone 331921 (TRAV21, TRAJ37)
CAVRGNTGILIF

SEQ ID NO: 663842 - protein, 15 aa, Homo sapiens
  CDR3 for beta chain variable domain of TCR clone 331921 (TRBV20-1, TRBJ2-1)
CSARGGTRYYNEQFF

SEQ ID NO: 663843 - protein, 12 aa, Homo sapiens
  CDR3 for alpha chain variable domain of TCR clone 331922 (TRAV8-6, TRAJ33)
CAVTDSNYQLIW

SEQ ID NO: 663844 - protein, 15 aa, Homo sapiens
  CDR3 for beta chain variable domain of TCR clone 331922 (TRBV4-3, TRBJ1-2)
CASSRGQGRNYGDTF

SEQ ID NO: 663845 - protein, 13 aa, Homo sapiens
  CDR3 for alpha chain variable domain of TCR clone 331923 (TRAV21, TRAJ24)
CAVRADSWGKFQF

SEQ ID NO: 663846 - protein, 17 aa, Homo sapiens
  CDR3 for beta chain variable domain of TCR clone 331923 (TRBV7-8, TRBJ2-6)
CDSSAGTGGAGANVLTF

SEQ ID NO: 663847 - protein, 15 aa, Homo sapiens
  CDR3 for alpha chain variable domain of TCR clone 331924 (TRAV8-3, TRAJ15)
CAVGAPNQAGTALIF

SEQ ID NO: 663848 - protein, 14 aa, Homo sapiens
  CDR3 for beta chain variable domain of TCR clone 331924 (TRBV5-7, TRBJ2-7)
CASSFKGATGEQYF

SEQ ID NO: 663849 - protein, 18 aa, Homo sapiens
  CDR3 for alpha chain variable domain of TCR clone 331925 (TRAV26-1, TRAJ52)
CIVRVAGAGGTRYGKLTF

SEQ ID NO: 663850 - protein, 12 aa, Homo sapiens
  CDR3 for beta chain variable domain of TCR clone 331925 (TRBV29-1, TRBJ2-3)
CSVTGGADTQYF

SEQ ID NO: 663851 - protein, 13 aa, Homo sapiens
  CDR3 for alpha chain variable domain of TCR clone 331926 (TRAV2, TRAJ40)
CAVVTSGTYKYIF

SEQ ID NO: 663852 - protein, 11 aa, Homo sapiens
  CDR3 for beta chain variable domain of TCR clone 331926 (TRBV7-2, TRBJ2-3)
CASSSSDTQYF

SEQ ID NO: 663853 - protein, 14 aa, Homo sapiens
  CDR3 for alpha chain variable domain of TCR clone 331927 (TRAV2, TRAJ37)
CAVDFTSNTGKLIF

SEQ ID NO: 663854 - protein, 14 aa, Homo sapiens
  CDR3 for beta chain variable domain of TCR clone 331927 (TRBV5-1, TRBJ2-5)
CASSFGGSQEAQYF

SEQ ID NO: 663855 - protein, 10 aa, Homo sapiens
  CDR3 for alpha chain variable domain of TCR clone 331928 (TRAV23/DV6, TRAJ3)
CAATTVALGG

SEQ ID NO: 663856 - protein, 15 aa, Homo sapiens
  CDR3 for beta chain variable domain of TCR clone 331928 (TRBV19, TRBJ1-6)
CASSTQGAVGSPLHF

SEQ ID NO: 663857 - protein, 12 aa, Homo sapiens
  CDR3 for alpha chain variable domain of TCR clone 331929 (TRAV12-2, TRAJ10)
WGVTGGGNQLTF

SEQ ID NO: 663858 - protein, 16 aa, Homo sapiens
  CDR3 for beta chain variable domain of TCR clone 331929 (TRBV6-4, TRBJ1-2)
CASSEAVGDPNYGYTF

SEQ ID NO: 663859 - protein, 19 aa, Homo sapiens
  CDR3 for alpha chain variable domain of TCR clone 331930 (TRAV29/DV5, TRAJ49)
CSVLLCSKLTVDTGNQFYF

SEQ ID NO: 663860 - protein, 18 aa, Homo sapiens
  CDR3 for beta chain variable domain of TCR clone 331930 (TRBV12-4, TRBJ2-2)
CASSLVAGTRGRTGELFF

SEQ ID NO: 663861 - protein, 14 aa, Homo sapiens
  CDR3 for alpha chain variable domain of TCR clone 331931 (TRAV1-2, TRAJ8)
CSVREDTGFQKLVF

SEQ ID NO: 663862 - protein, 14 aa, Homo sapiens
  CDR3 for beta chain variable domain of TCR clone 331931 (TRBV6-1, TRBJ2-5)
CASSPRTAQGTQYF

SEQ ID NO: 663863 - protein, 14 aa, Homo sapiens
  CDR3 for alpha chain variable domain of TCR clone 331932 (TRAV12-3, TRAJ10)
SHLPLTGGGNKLTF

SEQ ID NO: 663864 - protein, 14 aa, Homo sapiens
  CDR3 for beta chain variable domain of TCR clone 331932 (TRBV7-6, TRBJ2-3)
CASSVGTVTDTQYF

SEQ ID NO: 663865 - protein, 13 aa, Homo sapiens
  CDR3 for alpha chain variable domain of TCR clone 331933 (TRAV8-4, TRAJ10)
CAAFTGGGNKLTS

SEQ ID NO: 663866 - protein, 15 aa, Homo sapiens
  CDR3 for beta chain variable domain of TCR clone 331933 (TRBV2, TRBJ2-3)
CASSDFEKATDTQYF

SEQ ID NO: 663867 - protein, 13 aa, Homo sapiens
  CDR3 for alpha chain variable domain of TCR clone 331934 (TRAV3, TRAJ27)
CAVRPLGAGKSTF

SEQ ID NO: 663868 - protein, 13 aa, Homo sapiens
  CDR3 for beta chain variable domain of TCR clone 331934 (TRBV7-9, TRBJ2-2)
CASSSVRAGELFF

SEQ ID NO: 663869 - protein, 14 aa, Homo sapiens
  CDR3 for alpha chain variable domain of TCR clone 331935 (TRAV8-3, TRAJ15)
CAVGRHQAGTALIF

SEQ ID NO: 663870 - protein, 13 aa, Homo sapiens
  CDR3 for beta chain variable domain of TCR clone 331935 (TRBV4-2, TRBJ1-1)
CASSQAGNTEAFF

SEQ ID NO: 663871 - protein, 15 aa, Homo sapiens
  CDR3 for alpha chain variable domain of TCR clone 331936 (TRAV17, TRAJ57)
CATGPSPGGSEKLGF

SEQ ID NO: 663872 - protein, 16 aa, Homo sapiens
  CDR3 for beta chain variable domain of TCR clone 331936 (TRBV12-4, TRBJ1-5)
CASSRPVGGSNQPQHF

SEQ ID NO: 663873 - protein, 13 aa, Homo sapiens
  CDR3 for alpha chain variable domain of TCR clone 331937 (TRAV38-1, TRAJ42)
CARWGGSQGNLIF

SEQ ID NO: 663874 - protein, 10 aa, Homo sapiens
  CDR3 for beta chain variable domain of TCR clone 331937 (TRBV2, TRBJ2-5)
CDSSAATQYF

SEQ ID NO: 663875 - protein, 19 aa, Homo sapiens
  CDR3 for alpha chain variable domain of TCR clone 331938 (TRAV12-2, TRAJ24)
CAVTPADSWGEIAVWSRDP

SEQ ID NO: 663876 - protein, 12 aa, Homo sapiens
  CDR3 for beta chain variable domain of TCR clone 331938 (TRBV3-1, TRBJ2-1)
CASSQGSSGQFF

SEQ ID NO: 663877 - protein, 14 aa, Homo sapiens
  CDR3 for alpha chain variable domain of TCR clone 331939 (TRAV12-2, TRAJ17)
CAALFKAAGNKLPF

SEQ ID NO: 663878 - protein, 15 aa, Homo sapiens
  CDR3 for beta chain variable domain of TCR clone 331939 (TRBV18, TRBJ2-3)
CASSPLAGETDTQYF

SEQ ID NO: 663879 - protein, 14 aa, Homo sapiens
  CDR3 for alpha chain variable domain of TCR clone 331940 (TRAV8-4, TRAJ12)
CAVSHGDSSYKLIF

SEQ ID NO: 663880 - protein, 13 aa, Homo sapiens
  CDR3 for beta chain variable domain of TCR clone 331940 (TRBV4-1, TRBJ2-7)
CASSWTGGYEQYF

SEQ ID NO: 663881 - protein, 15 aa, Homo sapiens
  CDR3 for alpha chain variable domain of TCR clone 331941 (TRAV38-2/DV8, TRAJ48)
CAYGGRDFGNEKLTF

SEQ ID NO: 663882 - protein, 18 aa, Homo sapiens
  CDR3 for beta chain variable domain of TCR clone 331941 (TRBV5-1, TRBJ1-6)
CASIRSGQGTARGSPLHF

SEQ ID NO: 663883 - protein, 17 aa, Homo sapiens
  CDR3 for alpha chain variable domain of TCR clone 331942 (TRAV3, TRAJ6)
CAVRDGPRAGGSYIPTF

SEQ ID NO: 663884 - protein, 14 aa, Homo sapiens
  CDR3 for beta chain variable domain of TCR clone 331942 (TRBV12-4, TRBJ1-1)
CASSLDGLNTEAFF

SEQ ID NO: 663885 - protein, 13 aa, Homo sapiens
  CDR3 for alpha chain variable domain of TCR clone 331943 (TRAV23/DV6, TRAJ8)
CSKQGTGFHKLVF

SEQ ID NO: 663886 - protein, 15 aa, Homo sapiens
  CDR3 for beta chain variable domain of TCR clone 331943 (TRBV28, TRBJ2-3)
CASSPDRQGANTQYF

SEQ ID NO: 663887 - protein, 17 aa, Homo sapiens
  CDR3 for alpha chain variable domain of TCR clone 331944 (TRAV3, TRAJ6)
CAVRDCPRVGGSYIPTF

SEQ ID NO: 663888 - protein, 12 aa, Homo sapiens
  CDR3 for beta chain variable domain of TCR clone 331944 (TRBV11-2, TRBJ2-2)
CASSLGGGELFF

SEQ ID NO: 663889 - protein, 13 aa, Homo sapiens
  CDR3 for alpha chain variable domain of TCR clone 331945 (TRAV21, TRAJ57)
CAVTQGGSAKLVF

SEQ ID NO: 663890 - protein, 15 aa, Homo sapiens
  CDR3 for beta chain variable domain of TCR clone 331945 (TRBV3-1, TRBJ2-2)
CASSQDLAGTGELFF

SEQ ID NO: 663891 - protein, 15 aa, Homo sapiens
  CDR3 for alpha chain variable domain of TCR clone 331946 (TRAV8-3, TRAJ40)
CAAPSLGSGTYSYIF

SEQ ID NO: 663892 - protein, 16 aa, Homo sapiens
  CDR3 for beta chain variable domain of TCR clone 331946 (TRBV7-3, TRBJ2-3)
CASSLSGYRPEETQYF

SEQ ID NO: 663893 - protein, 12 aa, Homo sapiens
  CDR3 for alpha chain variable domain of TCR clone 331947 (TRAV12-3, TRAJ3)
CAIDSSASKIIF

SEQ ID NO: 663894 - protein, 17 aa, Homo sapiens
  CDR3 for beta chain variable domain of TCR clone 331947 (TRBV7-9, TRBJ2-3)
CASSLEEAGAYPDTQYI

SEQ ID NO: 663895 - protein, 11 aa, Homo sapiens
  CDR3 for alpha chain variable domain of TCR clone 331948 (TRAV1-2, TRAJ31)
CAVANNARLMF

SEQ ID NO: 663896 - protein, 15 aa, Homo sapiens
  CDR3 for beta chain variable domain of TCR clone 331948 (TRBV28, TRBJ2-1)
CASSIIAGGRSEQFF

SEQ ID NO: 663897 - protein, 14 aa, Homo sapiens
  CDR3 for alpha chain variable domain of TCR clone 331949 (TRAV26-1, TRAJ45)
CIEVTGGGADGLTF

SEQ ID NO: 663898 - protein, 16 aa, Homo sapiens
  CDR3 for beta chain variable domain of TCR clone 331949 (TRBV2, TRBJ2-5)
CASSETQGVGEETQYF

SEQ ID NO: 663899 - protein, 14 aa, Homo sapiens
  CDR3 for alpha chain variable domain of TCR clone 331950 (TRAV29/DV5, TRAJ34)
CAASASRETDKLIF

SEQ ID NO: 663900 - protein, 15 aa, Homo sapiens
  CDR3 for beta chain variable domain of TCR clone 331950 (TRBV7-8, TRBJ2-7)
CASSLERAGSCEQYF

SEQ ID NO: 663901 - protein, 10 aa, Homo sapiens
  CDR3 for alpha chain variable domain of TCR clone 331951 (TRAV36/DV7, TRAJ48)
CAVGNEKLTF

SEQ ID NO: 663902 - protein, 13 aa, Homo sapiens
  CDR3 for beta chain variable domain of TCR clone 331951 (TRBV7-3, TRBJ2-2)
CQQLNSNTGELFF

SEQ ID NO: 663903 - protein, 14 aa, Homo sapiens
  CDR3 for alpha chain variable domain of TCR clone 331952 (TRAV23/DV6, TRAJ13)
CAAMYSGGYQKIPF

SEQ ID NO: 663904 - protein, 16 aa, Homo sapiens
  CDR3 for beta chain variable domain of TCR clone 331952 (TRBV9, TRBJ2-1)
CASSALGGIGNNEQFF

SEQ ID NO: 663905 - protein, 14 aa, Homo sapiens
  CDR3 for alpha chain variable domain of TCR clone 331953 (TRAV26-1, TRAJ16)
CIVRVRSDGQKLLF

SEQ ID NO: 663906 - protein, 17 aa, Homo sapiens
  CDR3 for beta chain variable domain of TCR clone 331953 (TRBV20-1, TRBJ2-1)
CSASSSGLAGSYNEQFF

SEQ ID NO: 663907 - protein, 16 aa, Homo sapiens
  CDR3 for alpha chain variable domain of TCR clone 331954 (TRAV30, TRAJ24)
CGTEIGDAESWGKFQF

SEQ ID NO: 663908 - protein, 14 aa, Homo sapiens
  CDR3 for beta chain variable domain of TCR clone 331954 (TRBV12-5, TRBJ2-5)
CASGSRTHQETQYF

SEQ ID NO: 663909 - protein, 16 aa, Homo sapiens
  CDR3 for alpha chain variable domain of TCR clone 331955 (TRAV30, TRAJ24)
CGTEIVDADSWGKFQF

SEQ ID NO: 663910 - protein, 13 aa, Homo sapiens
  CDR3 for beta chain variable domain of TCR clone 331955 (TRBV11-2, TRBJ2-5)
CAGSSTGEETQYF

SEQ ID NO: 663911 - protein, 16 aa, Homo sapiens
  CDR3 for alpha chain variable domain of TCR clone 331956 (TRAV17, TRAJ22)
CATDAISSGSGRQLTF

SEQ ID NO: 663912 - protein, 15 aa, Homo sapiens
  CDR3 for beta chain variable domain of TCR clone 331956 (TRBV5-1, TRBJ2-1)
CASSPPRAPYNEQFF

SEQ ID NO: 663913 - protein, 12 aa, Homo sapiens
  CDR3 for alpha chain variable domain of TCR clone 331957 (TRAV3, TRAJ20)
CAVRDPDYKLSI

SEQ ID NO: 663914 - protein, 13 aa, Homo sapiens
  CDR3 for beta chain variable domain of TCR clone 331957 (TRBV9, TRBJ2-1)
CASSVGQGGEQFF

SEQ ID NO: 663915 - protein, 10 aa, Homo sapiens
  CDR3 for alpha chain variable domain of TCR clone 331958 (TRAV35, TRAJ48)
CAGTNIKLTF

SEQ ID NO: 663916 - protein, 16 aa, Homo sapiens
  CDR3 for beta chain variable domain of TCR clone 331958 (TRBV2, TRBJ2-3)
CASSTSVEGVTDTQYF

SEQ ID NO: 663917 - protein, 13 aa, Homo sapiens
  CDR3 for alpha chain variable domain of TCR clone 331959 (TRAV3, TRAJ21)
CAVREPDFNKFYF

SEQ ID NO: 663918 - protein, 12 aa, Homo sapiens
  CDR3 for beta chain variable domain of TCR clone 331959 (TRBV12-4, TRBJ2-1)
CASSLQGSEQFF

SEQ ID NO: 663919 - protein, 14 aa, Homo sapiens
  CDR3 for alpha chain variable domain of TCR clone 331960 (TRAV12-2, TRAJ13)
CAVKKTGGYQKVTF

SEQ ID NO: 663920 - protein, 15 aa, Homo sapiens
  CDR3 for beta chain variable domain of TCR clone 331960 (TRBV5-1, TRBJ1-3)
CASSLEGGSGNTIYF

SEQ ID NO: 663921 - protein, 16 aa, Homo sapiens
  CDR3 for alpha chain variable domain of TCR clone 331961 (TRAV8-3, TRAJ10)
CAVGPILTGGGNKLTF

SEQ ID NO: 663922 - protein, 15 aa, Homo sapiens
  CDR3 for beta chain variable domain of TCR clone 331961 (TRBV11-2, TRBJ2-1)
CASSLGTSGLNEQFF

SEQ ID NO: 663923 - protein, 12 aa, Homo sapiens
  CDR3 for alpha chain variable domain of TCR clone 331962 (TRAV8-3, TRAJ20)
CAVGANDYKFSF

SEQ ID NO: 663924 - protein, 15 aa, Homo sapiens
  CDR3 for beta chain variable domain of TCR clone 331962 (TRBV6-3, TRBJ2-7)
CASSSPGTVFYEQYF

SEQ ID NO: 663925 - protein, 16 aa, Homo sapiens
  CDR3 for alpha chain variable domain of TCR clone 331963 (TRAV23/DV6, TRAJ48)
CAASGVVNFGNEKLTF

SEQ ID NO: 663926 - protein, 15 aa, Homo sapiens
  CDR3 for beta chain variable domain of TCR clone 331963 (TRBV7-3, TRBJ2-2)
CASSETGQGTGELFF

SEQ ID NO: 663927 - protein, 16 aa, Homo sapiens
  CDR3 for alpha chain variable domain of TCR clone 331964 (TRAV12-2, TRAJ43)
CAGDDMRFGAGTRLTA

SEQ ID NO: 663928 - protein, 16 aa, Homo sapiens
  CDR3 for beta chain variable domain of TCR clone 331964 (TRBV2, TRBJ2-4)
CASSEAPGGEQNIQYF

SEQ ID NO: 663929 - protein, 13 aa, Homo sapiens
  CDR3 for alpha chain variable domain of TCR clone 331965 (TRAV16, TRAJ31)
CALSAHNNARFMF

SEQ ID NO: 663930 - protein, 16 aa, Homo sapiens
  CDR3 for beta chain variable domain of TCR clone 331965 (TRBV7-2, TRBJ2-6)
CAILSGVSSGANVLTF

SEQ ID NO: 663931 - protein, 16 aa, Homo sapiens
  CDR3 for alpha chain variable domain of TCR clone 331966 (TRAV8-3, TRAJ13)
CAVGAYPSGGYQKVTF

SEQ ID NO: 663932 - protein, 15 aa, Homo sapiens
  CDR3 for beta chain variable domain of TCR clone 331966 (TRBV10-3, TRBJ2-1)
CAIRNGTSGHNEQFF

SEQ ID NO: 663933 - protein, 14 aa, Homo sapiens
  CDR3 for alpha chain variable domain of TCR clone 331967 (TRAV6, TRAJ6)
CALPTSGGSYIPTF

SEQ ID NO: 663934 - protein, 17 aa, Homo sapiens
  CDR3 for beta chain variable domain of TCR clone 331967 (TRBV7-8, TRBJ2-6)
CASSAGTGGAGANVLAF

SEQ ID NO: 663935 - protein, 16 aa, Homo sapiens
  CDR3 for alpha chain variable domain of TCR clone 331968 (TRAV13-1, TRAJ45)
CAARGSRKGGADGLTF

SEQ ID NO: 663936 - protein, 13 aa, Homo sapiens
  CDR3 for beta chain variable domain of TCR clone 331968 (TRBV12-4, TRBJ2-5)
CASRKRGKDTQYF

SEQ ID NO: 663937 - protein, 12 aa, Homo sapiens
  CDR3 for alpha chain variable domain of TCR clone 331969 (TRAV20, TRAJ33)
CAVRGSNYQLIW

SEQ ID NO: 663938 - protein, 13 aa, Homo sapiens
  CDR3 for beta chain variable domain of TCR clone 331969 (TRBV4-3, TRBJ1-1)
CASSPTGKTEAFF

SEQ ID NO: 663939 - protein, 16 aa, Homo sapiens
  CDR3 for alpha chain variable domain of TCR clone 331970 (TRAV1-1, TRAJ29)
CAVRSTRNSGNTPLVF

SEQ ID NO: 663940 - protein, 14 aa, Homo sapiens
  CDR3 for beta chain variable domain of TCR clone 331970 (TRBV7-2, TRBJ2-7)
CASSTKTSFYEQYF

SEQ ID NO: 663941 - protein, 11 aa, Homo sapiens
  CDR3 for alpha chain variable domain of TCR clone 331971 (TRAV1-2, TRAJ20)
CAVAKDYKLSL

SEQ ID NO: 663942 - protein, 18 aa, Homo sapiens
  CDR3 for beta chain variable domain of TCR clone 331971 (TRBV20-1, TRBJ2-6)
CSAETTATHGSGANVLTF

SEQ ID NO: 663943 - protein, 15 aa, Homo sapiens
  CDR3 for alpha chain variable domain of TCR clone 331972 (TRAV3, TRAJ22)
CAVRDRGGSARQLTF

SEQ ID NO: 663944 - protein, 16 aa, Homo sapiens
  CDR3 for beta chain variable domain of TCR clone 331972 (TRBV5-4, TRBJ2-3)
SASQQPGAGGADTQYF

SEQ ID NO: 663945 - protein, 12 aa, Homo sapiens
  CDR3 for alpha chain variable domain of TCR clone 331973 (TRAV8-4, TRAJ31)
CAVSDSNARHMF

SEQ ID NO: 663946 - protein, 14 aa, Homo sapiens
  CDR3 for beta chain variable domain of TCR clone 331973 (TRBV20-1, TRBJ2-7)
CSAKRGRSSYEQYF

SEQ ID NO: 663947 - protein, 14 aa, Homo sapiens
  CDR3 for alpha chain variable domain of TCR clone 331974 (TRAV8-3, TRAJ9)
CAVVYNTGGFKTIF

SEQ ID NO: 663948 - protein, 14 aa, Homo sapiens
  CDR3 for beta chain variable domain of TCR clone 331974 (TRBV7-3, TRBJ2-2)
CASSSGVYTGELFF

SEQ ID NO: 663949 - protein, 15 aa, Homo sapiens
  CDR3 for alpha chain variable domain of TCR clone 331975 (TRAV3, TRAJ32)
CAVSQRGGATNKLIF

SEQ ID NO: 663950 - protein, 13 aa, Homo sapiens
  CDR3 for beta chain variable domain of TCR clone 331975 (TRBV7-7, TRBJ2-3)
CASSLSRADTQYF

SEQ ID NO: 663951 - protein, 14 aa, Homo sapiens
  CDR3 for alpha chain variable domain of TCR clone 331976 (TRAV13-1, TRAJ13)
CAASRVGGYQKVTC

SEQ ID NO: 663952 - protein, 14 aa, Homo sapiens
  CDR3 for beta chain variable domain of TCR clone 331976 (TRBV5-1, TRBJ2-7)
CASSATGGYDEQYF

SEQ ID NO: 663953 - protein, 13 aa, Homo sapiens
  CDR3 for alpha chain variable domain of TCR clone 331977 (TRAV8-3, TRAJ42)
CDRYGGSQGNLIF

SEQ ID NO: 663954 - protein, 14 aa, Homo sapiens
  CDR3 for beta chain variable domain of TCR clone 331977 (TRBV20-1, TRBJ2-1)
CSALDRGTYNEQFF

SEQ ID NO: 663955 - protein, 14 aa, Homo sapiens
  CDR3 for alpha chain variable domain of TCR clone 331978 (TRAV20, TRAJ32)
CCGRYGGATNQLIF

SEQ ID NO: 663956 - protein, 16 aa, Homo sapiens
  CDR3 for beta chain variable domain of TCR clone 331978 (TRBV19, TRBJ2-2)
CASRSPGTGATGELFF

SEQ ID NO: 663957 - protein, 12 aa, Homo sapiens
  CDR3 for alpha chain variable domain of TCR clone 331979 (TRAV3, TRAJ27)
WAVRDGAGKSTF

SEQ ID NO: 663958 - protein, 13 aa, Homo sapiens
  CDR3 for beta chain variable domain of TCR clone 331979 (TRBV10-3, TRBJ1-2)
CAINADLNYGYTF

SEQ ID NO: 663959 - protein, 16 aa, Homo sapiens
  CDR3 for alpha chain variable domain of TCR clone 331980 (TRAV3, TRAJ21)
CAVRDIERGNFNKFYF

SEQ ID NO: 663960 - protein, 13 aa, Homo sapiens
  CDR3 for beta chain variable domain of TCR clone 331980 (TRBV4-2, TRBJ1-1)
CASSQAGNTEALF

SEQ ID NO: 663961 - protein, 13 aa, Homo sapiens
  CDR3 for alpha chain variable domain of TCR clone 331981 (TRAV2, TRAJ16)
CAVEGSDGQKLLF

SEQ ID NO: 663962 - protein, 15 aa, Homo sapiens
  CDR3 for beta chain variable domain of TCR clone 331981 (TRBV20-1, TRBJ2-5)
CSAIKGQGSQETQYF

SEQ ID NO: 663963 - protein, 13 aa, Homo sapiens
  CDR3 for alpha chain variable domain of TCR clone 331982 (TRAV29/DV5, TRAJ31)
CAASRNNNARLMF

SEQ ID NO: 663964 - protein, 14 aa, Homo sapiens
  CDR3 for beta chain variable domain of TCR clone 331982 (TRBV5-1, TRBJ1-1)
CASSFTGRNTEAFF

SEQ ID NO: 663965 - protein, 12 aa, Homo sapiens
  CDR3 for alpha chain variable domain of TCR clone 331983 (TRAV35, TRAJ39)
LAPNNAGNMLTF

SEQ ID NO: 663966 - protein, 14 aa, Homo sapiens
  CDR3 for beta chain variable domain of TCR clone 331983 (TRBV27, TRBJ2-7)
CASSSATMVLEQYF

SEQ ID NO: 663967 - protein, 14 aa, Homo sapiens
  CDR3 for alpha chain variable domain of TCR clone 331984 (TRAV12-2, TRAJ13)
CAVKKTGVYQKVTF

SEQ ID NO: 663968 - protein, 15 aa, Homo sapiens
  CDR3 for beta chain variable domain of TCR clone 331984 (TRBV27, TRBJ2-1)
CASSNRGGSSNEQFF

SEQ ID NO: 663969 - protein, 14 aa, Homo sapiens
  CDR3 for alpha chain variable domain of TCR clone 331985 (TRAV20, TRAJ56)
CAVQFGGANSKLTF

SEQ ID NO: 663970 - protein, 13 aa, Homo sapiens
  CDR3 for beta chain variable domain of TCR clone 331985 (TRBV7-9, TRBJ2-7)
CASSFAGAYEQYF

SEQ ID NO: 663971 - protein, 15 aa, Homo sapiens
  CDR3 for alpha chain variable domain of TCR clone 331986 (TRAV21, TRAJ40)
CAVRPQTSGTYKYIF

SEQ ID NO: 663972 - protein, 13 aa, Homo sapiens
  CDR3 for beta chain variable domain of TCR clone 331986 (TRBV24-1, TRBJ2-2)
CATSDWSTGELFF

SEQ ID NO: 663973 - protein, 14 aa, Homo sapiens
  CDR3 for alpha chain variable domain of TCR clone 331987 (TRAV1-2, TRAJ16)
CAVNRFSDGQKLLF

SEQ ID NO: 663974 - protein, 16 aa, Homo sapiens
  CDR3 for beta chain variable domain of TCR clone 331987 (TRBV7-9, TRBJ1-2)
CASSPGGGAINYGYTF

SEQ ID NO: 663975 - protein, 14 aa, Homo sapiens
  CDR3 for alpha chain variable domain of TCR clone 331988 (TRAV12-3, TRAJ29)
CAMILLSGNTPLVV

SEQ ID NO: 663976 - protein, 16 aa, Homo sapiens
  CDR3 for beta chain variable domain of TCR clone 331988 (TRBV28, TRBJ2-7)
CASSSGTSGRGYEQYF

SEQ ID NO: 663977 - protein, 14 aa, Homo sapiens
  CDR3 for alpha chain variable domain of TCR clone 331989 (TRAV23/DV6, TRAJ40)
CAASLTPGTYKYIF

SEQ ID NO: 663978 - protein, 14 aa, Homo sapiens
  CDR3 for beta chain variable domain of TCR clone 331989 (TRBV5-1, TRBJ2-3)
CAGSRGQGGGTQYF

SEQ ID NO: 663979 - protein, 12 aa, Homo sapiens
  CDR3 for alpha chain variable domain of TCR clone 331990 (TRAV16, TRAJ26)
CALRMYGQNFVF

SEQ ID NO: 663980 - protein, 15 aa, Homo sapiens
  CDR3 for beta chain variable domain of TCR clone 331990 (TRBV11-2, TRBJ2-1)
CASSLGTSGLNEQFF

SEQ ID NO: 663981 - protein, 14 aa, Homo sapiens
  CDR3 for alpha chain variable domain of TCR clone 331991 (TRAV16, TRAJ54)
CALSDGQGAQKLVF

SEQ ID NO: 663982 - protein, 13 aa, Homo sapiens
  CDR3 for beta chain variable domain of TCR clone 331991 (TRBV20-1, TRBJ2-4)
CSAPTWAGNIQFF

SEQ ID NO: 663983 - protein, 12 aa, Homo sapiens
  CDR3 for alpha chain variable domain of TCR clone 331992 (TRAV16, TRAJ12)
CALEDSSYKLIF

SEQ ID NO: 663984 - protein, 14 aa, Homo sapiens
  CDR3 for beta chain variable domain of TCR clone 331992 (TRBV12-4, TRBJ2-1)
CASSLGQGASEQFF

SEQ ID NO: 663985 - protein, 17 aa, Homo sapiens
  CDR3 for alpha chain variable domain of TCR clone 331993 (TRAV2, TRAJ29)
CCLLLSAGNSGNTPLVF

SEQ ID NO: 663986 - protein, 16 aa, Homo sapiens
  CDR3 for beta chain variable domain of TCR clone 331993 (TRBV7-9, TRBJ1-2)
CASSPGGGAINYGYTF

SEQ ID NO: 663987 - protein, 15 aa, Homo sapiens
  CDR3 for alpha chain variable domain of TCR clone 331994 (TRAV8-4, TRAJ48)
CAVSAASFGNEKLTF

SEQ ID NO: 663988 - protein, 13 aa, Homo sapiens
  CDR3 for beta chain variable domain of TCR clone 331994 (TRBV7-3, TRBJ1-1)
CASSQDWGAEAFF

SEQ ID NO: 663989 - protein, 14 aa, Homo sapiens
  CDR3 for alpha chain variable domain of TCR clone 331995 (TRAV1-2, TRAJ8)
CAVREDTGFQKLVF

SEQ ID NO: 663990 - protein, 15 aa, Homo sapiens
  CDR3 for beta chain variable domain of TCR clone 331995 (TRBV28, TRBJ2-4)
CASGSGTLLMGIQYF

SEQ ID NO: 663991 - protein, 12 aa, Homo sapiens
  CDR3 for alpha chain variable domain of TCR clone 331996 (TRAV26-2, TRAJ47)
CILVEYGNKLVF

SEQ ID NO: 663992 - protein, 16 aa, Homo sapiens
  CDR3 for beta chain variable domain of TCR clone 331996 (TRBV18, TRBJ1-4)
CASPPLVGDRAEKLFF

SEQ ID NO: 663993 - protein, 22 aa, Homo sapiens
  CDR3 for alpha chain variable domain of TCR clone 331997 (TRAV21, TRAJ38)
CAVRQDAGNNRIQNPDPAVYQL

SEQ ID NO: 663994 - protein, 16 aa, Homo sapiens
  CDR3 for beta chain variable domain of TCR clone 331997 (TRBV4-2, TRBJ1-1)
CASRPLDGGGDTEAFF

SEQ ID NO: 663995 - protein, 12 aa, Homo sapiens
  CDR3 for alpha chain variable domain of TCR clone 331998 (TRAV1-1, TRAJ30)
CAVRGRDDKIIF

SEQ ID NO: 663996 - protein, 13 aa, Homo sapiens
  CDR3 for beta chain variable domain of TCR clone 331998 (TRBV27, TRBJ2-7)
CASSFVSSYEQYF

SEQ ID NO: 663997 - protein, 12 aa, Homo sapiens
  CDR3 for alpha chain variable domain of TCR clone 331999 (TRAV21, TRAJ49)
CAVNDGGHQFYF

SEQ ID NO: 663998 - protein, 14 aa, Homo sapiens
  CDR3 for beta chain variable domain of TCR clone 331999 (TRBV12-5, TRBJ2-5)
CASGSRTHQETQYF

SEQ ID NO: 663999 - protein, 13 aa, Homo sapiens
  CDR3 for alpha chain variable domain of TCR clone 332000 (TRAV12-2, TRAJ15)
CAVFNQAGTALIF

SEQ ID NO: 664000 - protein, 14 aa, Homo sapiens
  CDR3 for beta chain variable domain of TCR clone 332000 (TRBV4-1, TRBJ1-1)
CASSPRVDNTEAFF

SEQ ID NO: 664001 - protein, 14 aa, Homo sapiens
  CDR3 for alpha chain variable domain of TCR clone 332001 (TRAV26-1, TRAJ38)
CIADNTGNNRKLIW

SEQ ID NO: 664002 - protein, 13 aa, Homo sapiens
  CDR3 for beta chain variable domain of TCR clone 332001 (TRBV20-1, TRBJ1-1)
CSARGGGNTEAFS

SEQ ID NO: 664003 - protein, 12 aa, Homo sapiens
  CDR3 for alpha chain variable domain of TCR clone 332002 (TRAV8-4, TRAJ37)
CAKSSNTGKLIL

SEQ ID NO: 664004 - protein, 15 aa, Homo sapiens
  CDR3 for beta chain variable domain of TCR clone 332002 (TRBV7-9, TRBJ2-7)
CASSSSGLAVYEQYF

SEQ ID NO: 664005 - protein, 14 aa, Homo sapiens
  CDR3 for alpha chain variable domain of TCR clone 332003 (TRAV8-3, TRAJ28)
CAVSSGAGSYQLTF

SEQ ID NO: 664006 - protein, 15 aa, Homo sapiens
  CDR3 for beta chain variable domain of TCR clone 332003 (TRBV7-2, TRBJ2-3)
CASSSTGLETDTQYF

SEQ ID NO: 664007 - protein, 14 aa, Homo sapiens
  CDR3 for alpha chain variable domain of TCR clone 332004 (TRAV27, TRAJ23)
CAGLSYNQGGKLIF

SEQ ID NO: 664008 - protein, 17 aa, Homo sapiens
  CDR3 for beta chain variable domain of TCR clone 332004 (TRBV13, TRBJ2-3)
CASSLSRVAGGRNTQYF

SEQ ID NO: 664009 - protein, 14 aa, Homo sapiens
  CDR3 for alpha chain variable domain of TCR clone 332005 (TRAV1-2, TRAJ16)
CAVNRFSDGQKLLF

SEQ ID NO: 664010 - protein, 14 aa, Homo sapiens
  CDR3 for beta chain variable domain of TCR clone 332005 (TRBV19, TRBJ2-7)
CASSIRLGDHEQYF

SEQ ID NO: 664011 - protein, 16 aa, Homo sapiens
  CDR3 for alpha chain variable domain of TCR clone 332006 (TRAV3, TRAJ10)
CAVRDWLTGGGNKLTF

SEQ ID NO: 664012 - protein, 15 aa, Homo sapiens
  CDR3 for beta chain variable domain of TCR clone 332006 (TRBV4-1, TRBJ2-7)
CASSQNTGRLYEQYF

SEQ ID NO: 664013 - protein, 16 aa, Homo sapiens
  CDR3 for alpha chain variable domain of TCR clone 332007 (TRAV30, TRAJ24)
CGTEIVDADSWGKFQF

SEQ ID NO: 664014 - protein, 14 aa, Homo sapiens
  CDR3 for beta chain variable domain of TCR clone 332007 (TRBV20-1, TRBJ1-1)
CSAQTRIGGNEAFF

SEQ ID NO: 664015 - protein, 15 aa, Homo sapiens
  CDR3 for alpha chain variable domain of TCR clone 332008 (TRAV8-3, TRAJ45)
CASSYSGGGADGLTF

SEQ ID NO: 664016 - protein, 17 aa, Homo sapiens
  CDR3 for beta chain variable domain of TCR clone 332008 (TRBV7-8, TRBJ1-2)
CASSLRPLQGHLCGYTF

SEQ ID NO: 664017 - protein, 12 aa, Homo sapiens
  CDR3 for alpha chain variable domain of TCR clone 332009 (TRAV1-1, TRAJ39)
CAVPVVGNMLTF

SEQ ID NO: 664018 - protein, 14 aa, Homo sapiens
  CDR3 for beta chain variable domain of TCR clone 332009 (TRBV23-1, TRBJ2-5)
CASSFLRSQETQYF

SEQ ID NO: 664019 - protein, 13 aa, Homo sapiens
  CDR3 for alpha chain variable domain of TCR clone 332010 (TRAV2, TRAJ40)
CSVVTSGTYKYIF

SEQ ID NO: 664020 - protein, 14 aa, Homo sapiens
  CDR3 for beta chain variable domain of TCR clone 332010 (TRBV19, TRBJ2-1)
CAIPTFVLSGEQFF

SEQ ID NO: 664021 - protein, 11 aa, Homo sapiens
  CDR3 for alpha chain variable domain of TCR clone 332011 (TRAV1-2, TRAJ31)
CAVNNNARLMF

SEQ ID NO: 664022 - protein, 14 aa, Homo sapiens
  CDR3 for beta chain variable domain of TCR clone 332011 (TRBV28, TRBJ2-5)
CASSLGDRAETQYF

SEQ ID NO: 664023 - protein, 12 aa, Homo sapiens
  CDR3 for alpha chain variable domain of TCR clone 332012 (TRAV8-3, TRAJ4)
PAVSGGYNKLIF

SEQ ID NO: 664024 - protein, 13 aa, Homo sapiens
  CDR3 for beta chain variable domain of TCR clone 332012 (TRBV20-1, TRBJ1-3)
CSAGAYSGNTIYF

SEQ ID NO: 664025 - protein, 12 aa, Homo sapiens
  CDR3 for alpha chain variable domain of TCR clone 332013 (TRAV21, TRAJ29)
CCEDSGNTPLVF

SEQ ID NO: 664026 - protein, 17 aa, Homo sapiens
  CDR3 for beta chain variable domain of TCR clone 332013 (TRBV7-3, TRBJ2-3)
CASSPGGLAGFGDTQYF

SEQ ID NO: 664027 - protein, 14 aa, Homo sapiens
  CDR3 for alpha chain variable domain of TCR clone 332014 (TRAV9-2, TRAJ39)
CALYIYNAGNMLTF

SEQ ID NO: 664028 - protein, 15 aa, Homo sapiens
  CDR3 for beta chain variable domain of TCR clone 332014 (TRBV12-4, TRBJ2-1)
CASSLLATGNNEQFF

SEQ ID NO: 664029 - protein, 14 aa, Homo sapiens
  CDR3 for alpha chain variable domain of TCR clone 332015 (TRAV12-3, TRAJ29)
CAMSPYSGNTPLVF

SEQ ID NO: 664030 - protein, 15 aa, Homo sapiens
  CDR3 for beta chain variable domain of TCR clone 332015 (TRBV27, TRBJ2-1)
CASSNGGGSSNEQVF

SEQ ID NO: 664031 - protein, 10 aa, Homo sapiens
  CDR3 for alpha chain variable domain of TCR clone 332016 (TRAV13-1, TRAJ47)
CAAPKLVFGA

SEQ ID NO: 664032 - protein, 14 aa, Homo sapiens
  CDR3 for beta chain variable domain of TCR clone 332016 (TRBV27, TRBJ2-2)
CASSSRLVPRELFF

SEQ ID NO: 664033 - protein, 13 aa, Homo sapiens
  CDR3 for alpha chain variable domain of TCR clone 332017 (TRAV13-1, TRAJ40)
CAASTSGTYKYIF

SEQ ID NO: 664034 - protein, 16 aa, Homo sapiens
  CDR3 for beta chain variable domain of TCR clone 332017 (TRBV4-2, TRBJ1-1)
CASRPLDGGGDTEAFF

SEQ ID NO: 664035 - protein, 11 aa, Homo sapiens
  CDR3 for alpha chain variable domain of TCR clone 332018 (TRAV2, TRAJ13)
CASGGYQKVTF

SEQ ID NO: 664036 - protein, 15 aa, Homo sapiens
  CDR3 for beta chain variable domain of TCR clone 332018 (TRBV2, TRBJ2-1)
CATQARLVMIGEQFF

SEQ ID NO: 664037 - protein, 15 aa, Homo sapiens
  CDR3 for alpha chain variable domain of TCR clone 332019 (TRAV8-2, TRAJ15)
CAVTMGNQAGTALIF

SEQ ID NO: 664038 - protein, 12 aa, Homo sapiens
  CDR3 for beta chain variable domain of TCR clone 332019 (TRBV6-1, TRBJ2-7)
CASSDYSYEQYF

SEQ ID NO: 664039 - protein, 14 aa, Homo sapiens
  CDR3 for alpha chain variable domain of TCR clone 332020 (TRAV16, TRAJ40)
CVLHESYYLRDLQI

SEQ ID NO: 664040 - protein, 12 aa, Homo sapiens
  CDR3 for beta chain variable domain of TCR clone 332020 (TRBV7-3, TRBJ2-3)
CASSSLTDTQYF

SEQ ID NO: 664041 - protein, 14 aa, Homo sapiens
  CDR3 for alpha chain variable domain of TCR clone 332021 (TRAV38-1, TRAJ29)
CAFITPSGNTPLVF

SEQ ID NO: 664042 - protein, 14 aa, Homo sapiens
  CDR3 for beta chain variable domain of TCR clone 332021 (TRBV7-2, TRBJ2-7)
CASSLYPGRYEQYF

SEQ ID NO: 664043 - protein, 14 aa, Homo sapiens
  CDR3 for alpha chain variable domain of TCR clone 332022 (TRAV29/DV5, TRAJ40)
CAAAVASGTYNYIF

SEQ ID NO: 664044 - protein, 13 aa, Homo sapiens
  CDR3 for beta chain variable domain of TCR clone 332022 (TRBV7-9, TRBJ2-7)
CASSFAGAYEQYF

SEQ ID NO: 664045 - protein, 14 aa, Homo sapiens
  CDR3 for alpha chain variable domain of TCR clone 332023 (TRAV8-3, TRAJ4)
CAVGAAGGYNKLIF

SEQ ID NO: 664046 - protein, 15 aa, Homo sapiens
  CDR3 for beta chain variable domain of TCR clone 332023 (TRBV6-5, TRBJ2-7)
CASSYDAGAGNEQFF

SEQ ID NO: 664047 - protein, 19 aa, Homo sapiens
  CDR3 for alpha chain variable domain of TCR clone 332024 (TRAV17, TRAJ40)
TASRAADTASYFCTSKYIF

SEQ ID NO: 664048 - protein, 17 aa, Homo sapiens
  CDR3 for beta chain variable domain of TCR clone 332024 (TRBV11-2, TRBJ2-4)
CASSFLALGGAGDIQYF

SEQ ID NO: 664049 - protein, 14 aa, Homo sapiens
  CDR3 for alpha chain variable domain of TCR clone 332025 (TRAV1-2, TRAJ8)
CAVREDTGFQKLVF

SEQ ID NO: 664050 - protein, 11 aa, Homo sapiens
  CDR3 for beta chain variable domain of TCR clone 332025 (TRBV27, TRBJ2-7)
CASSLGYEQYF

SEQ ID NO: 664051 - protein, 17 aa, Homo sapiens
  CDR3 for alpha chain variable domain of TCR clone 332026 (TRAV3, TRAJ42)
CAVIDRDYGGSLGNLIF

SEQ ID NO: 664052 - protein, 15 aa, Homo sapiens
  CDR3 for beta chain variable domain of TCR clone 332026 (TRBV6-6, TRBJ2-7)
CASSYSYGGSYEQYF

SEQ ID NO: 664053 - protein, 13 aa, Homo sapiens
  CDR3 for alpha chain variable domain of TCR clone 332027 (TRAV8-6, TRAJ21)
CAVSPSSLNKFYF

SEQ ID NO: 664054 - protein, 13 aa, Homo sapiens
  CDR3 for beta chain variable domain of TCR clone 332027 (TRBV7-9, TRBJ1-2)
CAISLKQNYGYTF

SEQ ID NO: 664055 - protein, 14 aa, Homo sapiens
  CDR3 for alpha chain variable domain of TCR clone 332028 (TRAV10, TRAJ32)
CGEPRGCATNKLIF

SEQ ID NO: 664056 - protein, 14 aa, Homo sapiens
  CDR3 for beta chain variable domain of TCR clone 332028 (TRBV5-4, TRBJ2-2)
CASRLDGGTGELFF

SEQ ID NO: 664057 - protein, 10 aa, Homo sapiens
  CDR3 for alpha chain variable domain of TCR clone 332029 (TRAV26-1, TRAJ40)
CIAGTYKYIF

SEQ ID NO: 664058 - protein, 15 aa, Homo sapiens
  CDR3 for beta chain variable domain of TCR clone 332029 (TRBV7-9, TRBJ1-6)
CASSSPGRGNSPLHF

SEQ ID NO: 664059 - protein, 16 aa, Homo sapiens
  CDR3 for alpha chain variable domain of TCR clone 332030 (TRAV20, TRAJ22)
CAVQASSSGSARQLTF

SEQ ID NO: 664060 - protein, 15 aa, Homo sapiens
  CDR3 for beta chain variable domain of TCR clone 332030 (TRBV20-1, TRBJ2-1)
CSARGIGGTYNEQFF

SEQ ID NO: 664061 - protein, 15 aa, Homo sapiens
  CDR3 for alpha chain variable domain of TCR clone 332031 (TRAV26-1, TRAJ29)
CIVRVEGSGNTPLVF

SEQ ID NO: 664062 - protein, 12 aa, Homo sapiens
  CDR3 for beta chain variable domain of TCR clone 332031 (TRBV7-8, TRBJ2-7)
CASSLGDKEQYF

SEQ ID NO: 664063 - protein, 13 aa, Homo sapiens
  CDR3 for alpha chain variable domain of TCR clone 332032 (TRAV12-2, TRAJ37)
CAGGSGNTGKLIF

SEQ ID NO: 664064 - protein, 14 aa, Homo sapiens
  CDR3 for beta chain variable domain of TCR clone 332032 (TRBV20-1, TRBJ2-3)
CRAYAGGRTDTQYF

SEQ ID NO: 664065 - protein, 16 aa, Homo sapiens
  CDR3 for alpha chain variable domain of TCR clone 332033 (TRAV8-3, TRAJ45)
CAVGDGSGGGADGLTF

SEQ ID NO: 664066 - protein, 20 aa, Homo sapiens
  CDR3 for beta chain variable domain of TCR clone 332033 (TRBV7-8, TRBJ2-2)
CASSHLFPGPTIHITGELFF

SEQ ID NO: 664067 - protein, 15 aa, Homo sapiens
  CDR3 for alpha chain variable domain of TCR clone 332034 (TRAV16, TRAJ28)
CSKPHSGAGSYQLTF

SEQ ID NO: 664068 - protein, 15 aa, Homo sapiens
  CDR3 for beta chain variable domain of TCR clone 332034 (TRBV11-1, TRBJ2-3)
CASSLLLASTDTQYF

SEQ ID NO: 664069 - protein, 13 aa, Homo sapiens
  CDR3 for alpha chain variable domain of TCR clone 332035 (TRAV21, TRAJ27)
CAQWGGNAGNSTF

SEQ ID NO: 664070 - protein, 14 aa, Homo sapiens
  CDR3 for beta chain variable domain of TCR clone 332035 (TRBV2, TRBJ2-3)
CAVGGTISTDTQYF

SEQ ID NO: 664071 - protein, 12 aa, Homo sapiens
  CDR3 for alpha chain variable domain of TCR clone 332036 (TRAV13-1, TRAJ3)
CAATGGQQCFQD

SEQ ID NO: 664072 - protein, 16 aa, Homo sapiens
  CDR3 for beta chain variable domain of TCR clone 332036 (TRBV7-3, TRBJ2-2)
CASSLKRGTLSGELFF

SEQ ID NO: 664073 - protein, 14 aa, Homo sapiens
  CDR3 for alpha chain variable domain of TCR clone 332037 (TRAV12-2, TRAJ13)
CAVKKTGGYQKVTF

SEQ ID NO: 664074 - protein, 13 aa, Homo sapiens
  CDR3 for beta chain variable domain of TCR clone 332037 (TRBV6-5, TRBJ1-1)
QTSVYFCALRAFF

SEQ ID NO: 664075 - protein, 14 aa, Homo sapiens
  CDR3 for alpha chain variable domain of TCR clone 332038 (TRAV12-2, TRAJ40)
CAVKIPSGTYKYIF

SEQ ID NO: 664076 - protein, 12 aa, Homo sapiens
  CDR3 for beta chain variable domain of TCR clone 332038 (TRBV11-2, TRBJ2-2)
CASSHGGGELFF

SEQ ID NO: 664077 - protein, 21 aa, Homo sapiens
  CDR3 for alpha chain variable domain of TCR clone 332039 (TRAV25, TRAJ53)
TATQTTDVGTGSGGSNYKLTF

SEQ ID NO: 664078 - protein, 17 aa, Homo sapiens
  CDR3 for beta chain variable domain of TCR clone 332039 (TRBV5-1, TRBJ2-5)
CASSLLGLAANQETQYF

SEQ ID NO: 664079 - protein, 17 aa, Homo sapiens
  CDR3 for alpha chain variable domain of TCR clone 332040 (TRAV8-3, TRAJ42)
CAVGKGNYGGSQGNLIF

SEQ ID NO: 664080 - protein, 14 aa, Homo sapiens
  CDR3 for beta chain variable domain of TCR clone 332040 (TRBV19, TRBJ2-1)
CASGKSTQYNEQFF

SEQ ID NO: 664081 - protein, 19 aa, Homo sapiens
  CDR3 for alpha chain variable domain of TCR clone 332041 (TRAV26-1, TRAJ22)
CCVLLHRWVFSGSARQLTF

SEQ ID NO: 664082 - protein, 12 aa, Homo sapiens
  CDR3 for beta chain variable domain of TCR clone 332041 (TRBV14, TRBJ2-5)
CASSHLKETQYF

SEQ ID NO: 664083 - protein, 14 aa, Homo sapiens
  CDR3 for alpha chain variable domain of TCR clone 332042 (TRAV34, TRAJ44)
CGADGTGTASKITF

SEQ ID NO: 664084 - protein, 16 aa, Homo sapiens
  CDR3 for beta chain variable domain of TCR clone 332042 (TRBV2, TRBJ2-5)
CASSETQGVGEETQYF

SEQ ID NO: 664085 - protein, 14 aa, Homo sapiens
  CDR3 for alpha chain variable domain of TCR clone 332043 (TRAV20, TRAJ36)
CAVQARTGANNLFF

SEQ ID NO: 664086 - protein, 16 aa, Homo sapiens
  CDR3 for beta chain variable domain of TCR clone 332043 (TRBV4-2, TRBJ2-5)
CASSQELVGSQEIQYF

SEQ ID NO: 664087 - protein, 11 aa, Homo sapiens
  CDR3 for alpha chain variable domain of TCR clone 332044 (TRAV12-1, TRAJ30)
CVVNGQDKIIF

SEQ ID NO: 664088 - protein, 12 aa, Homo sapiens
  CDR3 for beta chain variable domain of TCR clone 332044 (TRBV27, TRBJ2-2)
CASKLFTGERFF

SEQ ID NO: 664089 - protein, 12 aa, Homo sapiens
  CDR3 for alpha chain variable domain of TCR clone 332045 (TRAV12-3, TRAJ17)
CAMTLTGNKLTF

SEQ ID NO: 664090 - protein, 14 aa, Homo sapiens
  CDR3 for beta chain variable domain of TCR clone 332045 (TRBV19, TRBJ2-1)
CASPTLVLSGEQFF

SEQ ID NO: 664091 - protein, 23 aa, Homo sapiens
  CDR3 for alpha chain variable domain of TCR clone 332046 (TRAV26-1, TRAJ38)
CVADNAGNNHIQNPDPAVYQLRD

SEQ ID NO: 664092 - protein, 15 aa, Homo sapiens
  CDR3 for beta chain variable domain of TCR clone 332046 (TRBV4-1, TRBJ2-2)
CASSQDSRGTGELFF

SEQ ID NO: 664093 - protein, 14 aa, Homo sapiens
  CDR3 for alpha chain variable domain of TCR clone 332047 (TRAV1-2, TRAJ16)
CAVHRFSDGQKLLF

SEQ ID NO: 664094 - protein, 16 aa, Homo sapiens
  CDR3 for beta chain variable domain of TCR clone 332047 (TRBV20-1, TRBJ1-2)
CSASMGQGVANYGYTF

SEQ ID NO: 664095 - protein, 10 aa, Homo sapiens
  CDR3 for alpha chain variable domain of TCR clone 332048 (TRAV12-1, TRAJ49)
CVVNPNQFYF

SEQ ID NO: 664096 - protein, 20 aa, Homo sapiens
  CDR3 for beta chain variable domain of TCR clone 332048 (TRBV7-8, TRBJ2-2)
CASSHLFPGPTIHITGELFF

SEQ ID NO: 664097 - protein, 16 aa, Homo sapiens
  CDR3 for alpha chain variable domain of TCR clone 332049 (TRAV4, TRAJ22)
CLVGDLYSGSARQLTF

SEQ ID NO: 664098 - protein, 15 aa, Homo sapiens
  CDR3 for beta chain variable domain of TCR clone 332049 (TRBV7-3, TRBJ2-2)
CASSETGQGTGELFF

SEQ ID NO: 664099 - protein, 16 aa, Homo sapiens
  CDR3 for alpha chain variable domain of TCR clone 332050 (TRAV3, TRAJ10)
CAVRDMRAGGGNKLTF

SEQ ID NO: 664100 - protein, 14 aa, Homo sapiens
  CDR3 for beta chain variable domain of TCR clone 332050 (TRBV25-1, TRBJ1-1)
CASTHLGGSTEAFF

SEQ ID NO: 664101 - protein, 11 aa, Homo sapiens
  CDR3 for alpha chain variable domain of TCR clone 332051 (TRAV1-2, TRAJ20)
CAVSIDYKLSF

SEQ ID NO: 664102 - protein, 17 aa, Homo sapiens
  CDR3 for beta chain variable domain of TCR clone 332051 (TRBV7-8, TRBJ2-6)
CASSAGTGGAGANVLTF

SEQ ID NO: 664103 - protein, 15 aa, Homo sapiens
  CDR3 for alpha chain variable domain of TCR clone 332052 (TRAV21, TRAJ53)
CATLNSVGSNYKLTF

SEQ ID NO: 664104 - protein, 16 aa, Homo sapiens
  CDR3 for beta chain variable domain of TCR clone 332052 (TRBV9, TRBJ2-1)
CASSVGGGGNYNEQFV

SEQ ID NO: 664105 - protein, 15 aa, Homo sapiens
  CDR3 for alpha chain variable domain of TCR clone 332053 (TRAV8-3, TRAJ28)
CCGCNSGAGSYQLTF

SEQ ID NO: 664106 - protein, 14 aa, Homo sapiens
  CDR3 for beta chain variable domain of TCR clone 332053 (TRBV7-2, TRBJ2-1)
CASSLGVGYNEQFF

SEQ ID NO: 664107 - protein, 15 aa, Homo sapiens
  CDR3 for alpha chain variable domain of TCR clone 332054 (TRAV21, TRAJ53)
CATLNSGGSNYKLTF

SEQ ID NO: 664108 - protein, 12 aa, Homo sapiens
  CDR3 for beta chain variable domain of TCR clone 332054 (TRBV7-2, TRBJ1-2)
CASRDSIYGYTF

SEQ ID NO: 664109 - protein, 13 aa, Homo sapiens
  CDR3 for alpha chain variable domain of TCR clone 332055 (TRAV27, TRAJ45)
CRSSGGGADGLTF

SEQ ID NO: 664110 - protein, 15 aa, Homo sapiens
  CDR3 for beta chain variable domain of TCR clone 332055 (TRBV7-9, TRBJ2-7)
CASSSSGLAVYEQYF

SEQ ID NO: 664111 - protein, 11 aa, Homo sapiens
  CDR3 for alpha chain variable domain of TCR clone 332056 (TRAV13-1, TRAJ40)
CAVSGTYKYIF

SEQ ID NO: 664112 - protein, 13 aa, Homo sapiens
  CDR3 for beta chain variable domain of TCR clone 332056 (TRBV19, TRBJ1-5)
CASSIGGNQPLHF

SEQ ID NO: 664113 - protein, 14 aa, Homo sapiens
  CDR3 for alpha chain variable domain of TCR clone 332057 (TRAV1-2, TRAJ8)
CAMREDTGFQKLVF

SEQ ID NO: 664114 - protein, 17 aa, Homo sapiens
  CDR3 for beta chain variable domain of TCR clone 332057 (TRBV9, TRBJ2-2)
CASSVGGQGTDTGELFF

SEQ ID NO: 664115 - protein, 15 aa, Homo sapiens
  CDR3 for alpha chain variable domain of TCR clone 332058 (TRAV8-3, TRAJ8)
CCPRDGNTGFQKLVF

SEQ ID NO: 664116 - protein, 14 aa, Homo sapiens
  CDR3 for beta chain variable domain of TCR clone 332058 (TRBV28, TRBJ1-1)
CASSESGRGTEAFF

SEQ ID NO: 664117 - protein, 17 aa, Homo sapiens
  CDR3 for alpha chain variable domain of TCR clone 332059 (TRAV12-2, TRAJ4)
CAVNVRPVSGGYNKLIF

SEQ ID NO: 664118 - protein, 17 aa, Homo sapiens
  CDR3 for beta chain variable domain of TCR clone 332059 (TRBV7-8, TRBJ2-6)
CASSAGTGGAGANVLTF

SEQ ID NO: 664119 - protein, 12 aa, Homo sapiens
  CDR3 for alpha chain variable domain of TCR clone 332060 (TRAV20, TRAJ37)
CALPSNTGKLIF

SEQ ID NO: 664120 - protein, 16 aa, Homo sapiens
  CDR3 for beta chain variable domain of TCR clone 332060 (TRBV19, TRBJ2-2)
CASRSPGTGATGELFF

SEQ ID NO: 664121 - protein, 14 aa, Homo sapiens
  CDR3 for alpha chain variable domain of TCR clone 332061 (TRAV23/DV6, TRAJ27)
CAASRDTNAGKSTF

SEQ ID NO: 664122 - protein, 13 aa, Homo sapiens
  CDR3 for beta chain variable domain of TCR clone 332061 (TRBV20-1, TRBJ1-5)
CSASGRGSQPQHF

SEQ ID NO: 664123 - protein, 13 aa, Homo sapiens
  CDR3 for alpha chain variable domain of TCR clone 332062 (TRAV20, TRAJ48)
CAVHLFGNEKLTF

SEQ ID NO: 664124 - protein, 15 aa, Homo sapiens
  CDR3 for beta chain variable domain of TCR clone 332062 (TRBV6-5, TRBJ2-6)
CSSSQWEAGANVLTF

SEQ ID NO: 664125 - protein, 13 aa, Homo sapiens
  CDR3 for alpha chain variable domain of TCR clone 332063 (TRAV12-3, TRAJ33)
CAMSVNSNHQLIW

SEQ ID NO: 664126 - protein, 13 aa, Homo sapiens
  CDR3 for beta chain variable domain of TCR clone 332063 (TRBV7-2, TRBJ2-2)
CASSLAGTGELFF

SEQ ID NO: 664127 - protein, 13 aa, Homo sapiens
  CDR3 for alpha chain variable domain of TCR clone 332064 (TRAV36/DV7, TRAJ33)
CAVDMDSNYQLIW

SEQ ID NO: 664128 - protein, 16 aa, Homo sapiens
  CDR3 for beta chain variable domain of TCR clone 332064 (TRBV15, TRBJ2-3)
CATRLSGGKAPDTQYF

SEQ ID NO: 664129 - protein, 20 aa, Homo sapiens
  CDR3 for alpha chain variable domain of TCR clone 332065 (TRAV12-1, TRAJ42)
SSVIQPPTSVKGGSQGNLIF

SEQ ID NO: 664130 - protein, 18 aa, Homo sapiens
  CDR3 for beta chain variable domain of TCR clone 332065 (TRBV11-2, TRBJ2-3)
CASSLGGASRGAPNTQFF

SEQ ID NO: 664131 - protein, 12 aa, Homo sapiens
  CDR3 for alpha chain variable domain of TCR clone 332066 (TRAV21, TRAJ49)
CAVTNTGNQFYF

SEQ ID NO: 664132 - protein, 17 aa, Homo sapiens
  CDR3 for beta chain variable domain of TCR clone 332066 (TRBV13, TRBJ2-3)
CASSLPRVAGGRNTRYF

SEQ ID NO: 664133 - protein, 14 aa, Homo sapiens
  CDR3 for alpha chain variable domain of TCR clone 332067 (TRAV12-2, TRAJ17)
CAVLFKAAGNKLTF

SEQ ID NO: 664134 - protein, 13 aa, Homo sapiens
  CDR3 for beta chain variable domain of TCR clone 332067 (TRBV4-1, TRBJ1-1)
CASSRKMNTEAFF

SEQ ID NO: 664135 - protein, 14 aa, Homo sapiens
  CDR3 for alpha chain variable domain of TCR clone 332068 (TRAV8-2, TRAJ4)
CVVSPSGGYNKLIF

SEQ ID NO: 664136 - protein, 13 aa, Homo sapiens
  CDR3 for beta chain variable domain of TCR clone 332068 (TRBV11-3, TRBJ1-1)
CASTGSLNTEAFF

SEQ ID NO: 664137 - protein, 14 aa, Homo sapiens
  CDR3 for alpha chain variable domain of TCR clone 332069 (TRAV13-1, TRAJ44)
CAAKATGTARKLTF

SEQ ID NO: 664138 - protein, 15 aa, Homo sapiens
  CDR3 for beta chain variable domain of TCR clone 332069 (TRBV10-3, TRBJ2-1)
CAISDVQDRAYEQFF

SEQ ID NO: 664139 - protein, 16 aa, Homo sapiens
  CDR3 for alpha chain variable domain of TCR clone 332070 (TRAV30, TRAJ24)
CGTEIVDADSWGNSQF

SEQ ID NO: 664140 - protein, 14 aa, Homo sapiens
  CDR3 for beta chain variable domain of TCR clone 332070 (TRBV7-9, TRBJ2-5)
CASSLDTAQETQYF

SEQ ID NO: 664141 - protein, 14 aa, Homo sapiens
  CDR3 for alpha chain variable domain of TCR clone 332071 (TRAV35, TRAJ42)
CAGRYGGSQGNLIF

SEQ ID NO: 664142 - protein, 15 aa, Homo sapiens
  CDR3 for beta chain variable domain of TCR clone 332071 (TRBV7-9, TRBJ2-1)
CSSSLGWGRANEQFF

SEQ ID NO: 664143 - protein, 16 aa, Homo sapiens
  CDR3 for alpha chain variable domain of TCR clone 332072 (TRAV13-1, TRAJ45)
CAARGSRKGGADGLTF

SEQ ID NO: 664144 - protein, 14 aa, Homo sapiens
  CDR3 for beta chain variable domain of TCR clone 332072 (TRBV7-3, TRBJ2-2)
CASSSGGYTGELFF

SEQ ID NO: 664145 - protein, 16 aa, Homo sapiens
  CDR3 for alpha chain variable domain of TCR clone 332073 (TRAV8-3, TRAJ42)
CAVGEGNGGSQGNLIF

SEQ ID NO: 664146 - protein, 14 aa, Homo sapiens
  CDR3 for beta chain variable domain of TCR clone 332073 (TRBV7-2, TRBJ2-1)
CASSRGGARNEQFV

SEQ ID NO: 664147 - protein, 10 aa, Homo sapiens
  CDR3 for alpha chain variable domain of TCR clone 332074 (TRAV13-1, TRAJ8)
CAAPFQKLVF

SEQ ID NO: 664148 - protein, 12 aa, Homo sapiens
  CDR3 for beta chain variable domain of TCR clone 332074 (TRBV12-4, TRBJ1-3)
CASSFSGNTIYF

SEQ ID NO: 664149 - protein, 16 aa, Homo sapiens
  CDR3 for alpha chain variable domain of TCR clone 332075 (TRAV3, TRAJ23)
CAVKIGNYNQGGKLIF

SEQ ID NO: 664150 - protein, 17 aa, Homo sapiens
  CDR3 for beta chain variable domain of TCR clone 332075 (TRBV10-3, TRBJ2-6)
CAISESTAPSGANVLTF

SEQ ID NO: 664151 - protein, 13 aa, Homo sapiens
  CDR3 for alpha chain variable domain of TCR clone 332076 (TRAV38-2/DV8, TRAJ57)
CAYTQGGSEKLVF

SEQ ID NO: 664152 - protein, 18 aa, Homo sapiens
  CDR3 for beta chain variable domain of TCR clone 332076 (TRBV5-5, TRBJ1-5)
CASSLQQVKGSSNQPQHF

SEQ ID NO: 664153 - protein, 16 aa, Homo sapiens
  CDR3 for alpha chain variable domain of TCR clone 332077 (TRAV30, TRAJ24)
CGTEIVDADSWGKFQF

SEQ ID NO: 664154 - protein, 13 aa, Homo sapiens
  CDR3 for beta chain variable domain of TCR clone 332077 (TRBV18, TRBJ1-1)
CASSPGRNTEAFF

SEQ ID NO: 664155 - protein, 17 aa, Homo sapiens
  CDR3 for alpha chain variable domain of TCR clone 332078 (TRAV3, TRAJ6)
CAVRDGPRAGGSYIPTF

SEQ ID NO: 664156 - protein, 15 aa, Homo sapiens
  CDR3 for beta chain variable domain of TCR clone 332078 (TRBV29-1, TRBJ2-1)
CSGRDRKSSYNEQFF

SEQ ID NO: 664157 - protein, 22 aa, Homo sapiens
  CDR3 for alpha chain variable domain of TCR clone 332079 (TRAV3, )
CAVRDCLYAGNNHIQNPDPAVY

SEQ ID NO: 664158 - protein, 19 aa, Homo sapiens
  CDR3 for beta chain variable domain of TCR clone 332079 (TRBV7-2, TRBJ2-3)
CASSFLSRNWGGGTDTQYF

SEQ ID NO: 664159 - protein, 17 aa, Homo sapiens
  CDR3 for alpha chain variable domain of TCR clone 332080 (TRAV8-6, TRAJ58)
CAVSSWVGETCGSRLTF

SEQ ID NO: 664160 - protein, 14 aa, Homo sapiens
  CDR3 for beta chain variable domain of TCR clone 332080 (TRBV4-2, TRBJ2-1)
CASGLDRAYNEQFF

SEQ ID NO: 664161 - protein, 11 aa, Homo sapiens
  CDR3 for alpha chain variable domain of TCR clone 332081 (TRAV2, TRAJ33)
CAVERNYQLIW

SEQ ID NO: 664162 - protein, 16 aa, Homo sapiens
  CDR3 for beta chain variable domain of TCR clone 332081 (TRBV20-1, TRBJ1-4)
CSAPGQGLLTNEKLFF

SEQ ID NO: 664163 - protein, 13 aa, Homo sapiens
  CDR3 for alpha chain variable domain of TCR clone 332082 (TRAV21, TRAJ57)
RAVTKGGSEKLVF

SEQ ID NO: 664164 - protein, 16 aa, Homo sapiens
  CDR3 for beta chain variable domain of TCR clone 332082 (TRBV29-1, TRBJ2-7)
CSVEDAEDGTAYEQYF

SEQ ID NO: 664165 - protein, 14 aa, Homo sapiens
  CDR3 for alpha chain variable domain of TCR clone 332083 (TRAV26-1, TRAJ38)
CIADNAGNNRKLIW

SEQ ID NO: 664166 - protein, 15 aa, Homo sapiens
  CDR3 for beta chain variable domain of TCR clone 332083 (TRBV10-3, TRBJ2-7)
CAISGRDSTSDEQYF

SEQ ID NO: 664167 - protein, 17 aa, Homo sapiens
  CDR3 for alpha chain variable domain of TCR clone 332084 (TRAV8-6, TRAJ58)
CAVSSLVGETSGPRLTF

SEQ ID NO: 664168 - protein, 14 aa, Homo sapiens
  CDR3 for beta chain variable domain of TCR clone 332084 (TRBV4-2, TRBJ2-1)
CASGLDRAYNEQFF

SEQ ID NO: 664169 - protein, 13 aa, Homo sapiens
  CDR3 for alpha chain variable domain of TCR clone 332085 (TRAV12-1, TRAJ20)
CVVNRETDYKLSF

SEQ ID NO: 664170 - protein, 15 aa, Homo sapiens
  CDR3 for beta chain variable domain of TCR clone 332085 (TRBV14, TRBJ2-1)
CASGLGLAGGTEQFF

SEQ ID NO: 664171 - protein, 14 aa, Homo sapiens
  CDR3 for alpha chain variable domain of TCR clone 332086 (TRAV35, TRAJ50)
CAGPRKTSYDKVIF

SEQ ID NO: 664172 - protein, 13 aa, Homo sapiens
  CDR3 for beta chain variable domain of TCR clone 332086 (TRBV7-7, TRBJ2-3)
CASSLSRADTQYF

SEQ ID NO: 664173 - protein, 13 aa, Homo sapiens
  CDR3 for alpha chain variable domain of TCR clone 332087 (TRAV20, TRAJ37)
CAGCSSNTGKLIF

SEQ ID NO: 664174 - protein, 13 aa, Homo sapiens
  CDR3 for beta chain variable domain of TCR clone 332087 (TRBV20-1, TRBJ2-5)
CSAREAFQETQYF

SEQ ID NO: 664175 - protein, 13 aa, Homo sapiens
  CDR3 for alpha chain variable domain of TCR clone 332088 (TRAV3, TRAJ21)
CAVREPDFNKFYF

SEQ ID NO: 664176 - protein, 14 aa, Homo sapiens
  CDR3 for beta chain variable domain of TCR clone 332088 (TRBV5-1, TRBJ2-5)
CASSLAGKQETQYF

SEQ ID NO: 664177 - protein, 13 aa, Homo sapiens
  CDR3 for alpha chain variable domain of TCR clone 332089 (TRAV2, TRAJ40)
CAVVTSGTYKYIF

SEQ ID NO: 664178 - protein, 14 aa, Homo sapiens
  CDR3 for beta chain variable domain of TCR clone 332089 (TRBV7-9, TRBJ2-1)
CASSSMVGCGEQFF

SEQ ID NO: 664179 - protein, 13 aa, Homo sapiens
  CDR3 for alpha chain variable domain of TCR clone 332090 (TRAV38-1, TRAJ42)
CARWGGSQGNLIF

SEQ ID NO: 664180 - protein, 14 aa, Homo sapiens
  CDR3 for beta chain variable domain of TCR clone 332090 (TRBV5-1, TRBJ2-3)
CASSFPGNTDTQYF

SEQ ID NO: 664181 - protein, 18 aa, Homo sapiens
  CDR3 for alpha chain variable domain of TCR clone 332091 (TRAV2, TRAJ20)
LHVREADAAVYRDCKLSF

SEQ ID NO: 664182 - protein, 18 aa, Homo sapiens
  CDR3 for beta chain variable domain of TCR clone 332091 (TRBV7-3, TRBJ2-3)
CASSSTGTYPSSTDTQYF

SEQ ID NO: 664183 - protein, 19 aa, Homo sapiens
  CDR3 for alpha chain variable domain of TCR clone 332092 (TRAV26-1, TRAJ28)
CIVRVAHAYSGAGSYQLTF

SEQ ID NO: 664184 - protein, 13 aa, Homo sapiens
  CDR3 for beta chain variable domain of TCR clone 332092 (TRBV7-2, TRBJ2-1)
CASSLGVYNEQFF

SEQ ID NO: 664185 - protein, 13 aa, Homo sapiens
  CDR3 for alpha chain variable domain of TCR clone 332093 (TRAV14/DV4, TRAJ20)
CAMRESNDYKHSF

SEQ ID NO: 664186 - protein, 15 aa, Homo sapiens
  CDR3 for beta chain variable domain of TCR clone 332093 (TRBV7-9, TRBJ1-1)
CASSRPGTANTEAFF

SEQ ID NO: 664187 - protein, 13 aa, Homo sapiens
  CDR3 for alpha chain variable domain of TCR clone 332094 (TRAV2, TRAJ15)
CAVASQAGTAMIF

SEQ ID NO: 664188 - protein, 16 aa, Homo sapiens
  CDR3 for beta chain variable domain of TCR clone 332094 (TRBV5-1, TRBJ1-1)
CASSSGGNSLNTEAFF

SEQ ID NO: 664189 - protein, 12 aa, Homo sapiens
  CDR3 for alpha chain variable domain of TCR clone 332095 (TRAV16, TRAJ30)
CALEDRDDKIIF

SEQ ID NO: 664190 - protein, 13 aa, Homo sapiens
  CDR3 for beta chain variable domain of TCR clone 332095 (TRBV7-9, TRBJ1-2)
CASSLKQNYGYTF

SEQ ID NO: 664191 - protein, 14 aa, Homo sapiens
  CDR3 for alpha chain variable domain of TCR clone 332096 (TRAV9-2, TRAJ38)
CALRGAGNNRKLIW

SEQ ID NO: 664192 - protein, 14 aa, Homo sapiens
  CDR3 for beta chain variable domain of TCR clone 332096 (TRBV13, TRBJ2-2)
FASSFQGGAGELFF

SEQ ID NO: 664193 - protein, 14 aa, Homo sapiens
  CDR3 for alpha chain variable domain of TCR clone 332097 (TRAV3, TRAJ9)
CAVRGNTGGFKTIF

SEQ ID NO: 664194 - protein, 12 aa, Homo sapiens
  CDR3 for beta chain variable domain of TCR clone 332097 (TRBV7-8, TRBJ2-7)
CASSLGDREQYF

SEQ ID NO: 664195 - protein, 13 aa, Homo sapiens
  CDR3 for alpha chain variable domain of TCR clone 332098 (TRAV1-1, TRAJ13)
CAVNSGGYQKVTY

SEQ ID NO: 664196 - protein, 12 aa, Homo sapiens
  CDR3 for beta chain variable domain of TCR clone 332098 (TRBV28, TRBJ2-1)
CASSVQINEQFF

SEQ ID NO: 664197 - protein, 14 aa, Homo sapiens
  CDR3 for alpha chain variable domain of TCR clone 332099 (TRAV17, TRAJ16)
CATADFSDGQKLLF

SEQ ID NO: 664198 - protein, 14 aa, Homo sapiens
  CDR3 for beta chain variable domain of TCR clone 332099 (TRBV20-1, TRBJ2-1)
CSAQIGGSANEQFF

SEQ ID NO: 664199 - protein, 13 aa, Homo sapiens
  CDR3 for alpha chain variable domain of TCR clone 332100 (TRAV22, TRAJ12)
CAGRMDSSYKLIF

SEQ ID NO: 664200 - protein, 14 aa, Homo sapiens
  CDR3 for beta chain variable domain of TCR clone 332100 (TRBV7-2, TRBJ2-7)
CASRSQGAAYEQYF

SEQ ID NO: 664201 - protein, 14 aa, Homo sapiens
  CDR3 for alpha chain variable domain of TCR clone 332101 (TRAV12-3, TRAJ57)
CAMSAWGGSEKLVF

SEQ ID NO: 664202 - protein, 14 aa, Homo sapiens
  CDR3 for beta chain variable domain of TCR clone 332101 (TRBV27, TRBJ2-5)
CASSSLKGWETQYF

SEQ ID NO: 664203 - protein, 16 aa, Homo sapiens
  CDR3 for alpha chain variable domain of TCR clone 332102 (TRAV4, TRAJ5)
CLVGPDHGHGQESTYF

SEQ ID NO: 664204 - protein, 16 aa, Homo sapiens
  CDR3 for beta chain variable domain of TCR clone 332102 (TRBV7-9, TRBJ2-1)
CASSDVAGGSYNEQFF

SEQ ID NO: 664205 - protein, 13 aa, Homo sapiens
  CDR3 for alpha chain variable domain of TCR clone 332103 (TRAV2, TRAJ12)
CAVGADSSYNLIF

SEQ ID NO: 664206 - protein, 13 aa, Homo sapiens
  CDR3 for beta chain variable domain of TCR clone 332103 (TRBV20-1, TRBJ2-1)
CSARSSPRDEQFF

SEQ ID NO: 664207 - protein, 11 aa, Homo sapiens
  CDR3 for alpha chain variable domain of TCR clone 332104 (TRAV12-2, TRAJ23)
CAVDQGGKLIF

SEQ ID NO: 664208 - protein, 14 aa, Homo sapiens
  CDR3 for beta chain variable domain of TCR clone 332104 (TRBV5-4, TRBJ1-1)
CASSLDSRRDEAFF

SEQ ID NO: 664209 - protein, 14 aa, Homo sapiens
  CDR3 for alpha chain variable domain of TCR clone 332105 (TRAV2, TRAJ37)
CAVDFTSNTGKLIF

SEQ ID NO: 664210 - protein, 12 aa, Homo sapiens
  CDR3 for beta chain variable domain of TCR clone 332105 (TRBV18, TRBJ1-4)
CASSPSREKLFF

SEQ ID NO: 664211 - protein, 15 aa, Homo sapiens
  CDR3 for alpha chain variable domain of TCR clone 332106 (TRAV13-1, TRAJ15)
CAASIERQAGIALIF

SEQ ID NO: 664212 - protein, 13 aa, Homo sapiens
  CDR3 for beta chain variable domain of TCR clone 332106 (TRBV5-1, TRBJ2-7)
CASSATGGNEQYF

SEQ ID NO: 664213 - protein, 14 aa, Homo sapiens
  CDR3 for alpha chain variable domain of TCR clone 332107 (TRAV17, TRAJ11)
CATDTSRGYSTLTF

SEQ ID NO: 664214 - protein, 14 aa, Homo sapiens
  CDR3 for beta chain variable domain of TCR clone 332107 (TRBV5-7, TRBJ1-1)
CASSLMAVNTEAFF

SEQ ID NO: 664215 - protein, 23 aa, Homo sapiens
  CDR3 for alpha chain variable domain of TCR clone 332108 (TRAV12-2, TRAJ39)
CSSETQPSDSATYLCAVNNMLTF

SEQ ID NO: 664216 - protein, 16 aa, Homo sapiens
  CDR3 for beta chain variable domain of TCR clone 332108 (TRBV5-3, TRBJ2-2)
CARSFGTGTNTGELFF

SEQ ID NO: 664217 - protein, 13 aa, Homo sapiens
  CDR3 for alpha chain variable domain of TCR clone 332109 (TRAV27, TRAJ23)
CAGVLPKGGKLIF

SEQ ID NO: 664218 - protein, 13 aa, Homo sapiens
  CDR3 for beta chain variable domain of TCR clone 332109 (TRBV20-1, TRBJ1-1)
CSARGGGNTGAFF

SEQ ID NO: 664219 - protein, 13 aa, Homo sapiens
  CDR3 for alpha chain variable domain of TCR clone 332110 (TRAV21, TRAJ27)
CAARPGNAGKSTF

SEQ ID NO: 664220 - protein, 16 aa, Homo sapiens
  CDR3 for beta chain variable domain of TCR clone 332110 (TRBV28, TRBJ2-7)
CASRYRQGSIAYEQYF

SEQ ID NO: 664221 - protein, 14 aa, Homo sapiens
  CDR3 for alpha chain variable domain of TCR clone 332111 (TRAV12-3, TRAJ9)
CAMSPNTGGFKTIF

SEQ ID NO: 664222 - protein, 15 aa, Homo sapiens
  CDR3 for beta chain variable domain of TCR clone 332111 (TRBV7-8, TRBJ2-1)
CASSLADSLYNEQFF

SEQ ID NO: 664223 - protein, 13 aa, Homo sapiens
  CDR3 for alpha chain variable domain of TCR clone 332112 (TRAV27, TRAJ45)
CRSSGGGADGLTF

SEQ ID NO: 664224 - protein, 16 aa, Homo sapiens
  CDR3 for beta chain variable domain of TCR clone 332112 (TRBV19, TRBJ2-6)
CASSGQVVSGANVLTF

SEQ ID NO: 664225 - protein, 15 aa, Homo sapiens
  CDR3 for alpha chain variable domain of TCR clone 332113 (TRAV13-2, TRAJ10)
CAENKIGGGGNKLTF

SEQ ID NO: 664226 - protein, 16 aa, Homo sapiens
  CDR3 for beta chain variable domain of TCR clone 332113 (TRBV13, TRBJ2-2)
CASSPRTGEHTGELFF

SEQ ID NO: 664227 - protein, 17 aa, Homo sapiens
  CDR3 for alpha chain variable domain of TCR clone 332114 (TRAV3, TRAJ12)
CAVRDGGRMDSSYKLIF

SEQ ID NO: 664228 - protein, 13 aa, Homo sapiens
  CDR3 for beta chain variable domain of TCR clone 332114 (TRBV15, TRBJ1-6)
CATSGGLNSPFHF

SEQ ID NO: 664229 - protein, 14 aa, Homo sapiens
  CDR3 for alpha chain variable domain of TCR clone 332115 (TRAV1-1, TRAJ27)
CAVIYNTNAGKSTF

SEQ ID NO: 664230 - protein, 15 aa, Homo sapiens
  CDR3 for beta chain variable domain of TCR clone 332115 (TRBV5-1, TRBJ1-4)
CASSSWTGREEKLFF

SEQ ID NO: 664231 - protein, 14 aa, Homo sapiens
  CDR3 for alpha chain variable domain of TCR clone 332116 (TRAV13-1, TRAJ9)
CAASALTGGFKTIF

SEQ ID NO: 664232 - protein, 14 aa, Homo sapiens
  CDR3 for beta chain variable domain of TCR clone 332116 (TRBV19, TRBJ2-1)
CARGARSFQWEQFF

SEQ ID NO: 664233 - protein, 17 aa, Homo sapiens
  CDR3 for alpha chain variable domain of TCR clone 332117 (TRAV3, TRAJ42)
CAVRDRDYGGSQGNLIF

SEQ ID NO: 664234 - protein, 17 aa, Homo sapiens
  CDR3 for beta chain variable domain of TCR clone 332117 (TRBV7-9, TRBJ2-3)
CASSPTVAGDLTYTQYF

SEQ ID NO: 664235 - protein, 13 aa, Homo sapiens
  CDR3 for alpha chain variable domain of TCR clone 332118 (TRAV12-2, TRAJ52)
CAVSGTSYGKLTF

SEQ ID NO: 664236 - protein, 18 aa, Homo sapiens
  CDR3 for beta chain variable domain of TCR clone 332118 (TRBV6-6, TRBJ1-3)
CASSYSKWDSISGNTIYF

SEQ ID NO: 664237 - protein, 14 aa, Homo sapiens
  CDR3 for alpha chain variable domain of TCR clone 332119 (TRAV30, TRAJ33)
CGTVAPRSNYQLIW

SEQ ID NO: 664238 - protein, 15 aa, Homo sapiens
  CDR3 for beta chain variable domain of TCR clone 332119 (TRBV25-1, TRBJ1-4)
CASSKRIATNEKLFF

SEQ ID NO: 664239 - protein, 13 aa, Homo sapiens
  CDR3 for alpha chain variable domain of TCR clone 332120 (TRAV12-3, TRAJ33)
CAMSGNSNYQLIW

SEQ ID NO: 664240 - protein, 16 aa, Homo sapiens
  CDR3 for beta chain variable domain of TCR clone 332120 (TRBV6-1, TRBJ2-5)
CASSETLDRGAETQYF

SEQ ID NO: 664241 - protein, 18 aa, Homo sapiens
  CDR3 for alpha chain variable domain of TCR clone 332121 (TRAV13-1, TRAJ52)
CAAKNPNAGGTSYGKLTF

SEQ ID NO: 664242 - protein, 14 aa, Homo sapiens
  CDR3 for beta chain variable domain of TCR clone 332121 (TRBV7-8, TRBJ2-3)
CASSSRDSTDTQYF

SEQ ID NO: 664243 - protein, 15 aa, Homo sapiens
  CDR3 for alpha chain variable domain of TCR clone 332122 (TRAV35, TRAJ58)
CAGRRQETSGSRLTF

SEQ ID NO: 664244 - protein, 15 aa, Homo sapiens
  CDR3 for beta chain variable domain of TCR clone 332122 (TRBV19, TRBJ1-2)
CASSVGQVLNYGYTF

SEQ ID NO: 664245 - protein, 15 aa, Homo sapiens
  CDR3 for alpha chain variable domain of TCR clone 332123 (TRAV4, TRAJ39)
CLVGPNNNAGNMLTF

SEQ ID NO: 664246 - protein, 14 aa, Homo sapiens
  CDR3 for beta chain variable domain of TCR clone 332123 (TRBV19, TRBJ2-7)
CASNVRDTFTGMYF

SEQ ID NO: 664247 - protein, 14 aa, Homo sapiens
  CDR3 for alpha chain variable domain of TCR clone 332124 (TRAV12-2, TRAJ26)
CAVNDDNYGQNFVF

SEQ ID NO: 664248 - protein, 13 aa, Homo sapiens
  CDR3 for beta chain variable domain of TCR clone 332124 (TRBV12-4, TRBJ2-7)
CASSPTETYEQYF

SEQ ID NO: 664249 - protein, 14 aa, Homo sapiens
  CDR3 for alpha chain variable domain of TCR clone 332125 (TRAV6, TRAJ39)
CALPNNNAGNMLTF

SEQ ID NO: 664250 - protein, 17 aa, Homo sapiens
  CDR3 for beta chain variable domain of TCR clone 332125 (TRBV18, TRBJ2-3)
CASSSRGPASSTHTQYL

SEQ ID NO: 664251 - protein, 11 aa, Homo sapiens
  CDR3 for alpha chain variable domain of TCR clone 332126 (TRAV3, TRAJ21)
CAVGNFNKFYF

SEQ ID NO: 664252 - protein, 14 aa, Homo sapiens
  CDR3 for beta chain variable domain of TCR clone 332126 (TRBV5-4, TRBJ1-1)
CASSLDSRRDESFF

SEQ ID NO: 664253 - protein, 14 aa, Homo sapiens
  CDR3 for alpha chain variable domain of TCR clone 332127 (TRAV1-2, TRAJ16)
CAVNRFSDGQKLLL

SEQ ID NO: 664254 - protein, 14 aa, Homo sapiens
  CDR3 for beta chain variable domain of TCR clone 332127 (TRBV4-1, TRBJ2-2)
CASSQAVNTGELFF

SEQ ID NO: 664255 - protein, 14 aa, Homo sapiens
  CDR3 for alpha chain variable domain of TCR clone 332128 (TRAV12-2, TRAJ45)
CALPERGGADGLTF

SEQ ID NO: 664256 - protein, 15 aa, Homo sapiens
  CDR3 for beta chain variable domain of TCR clone 332128 (TRBV27, TRBJ2-1)
CASSNGGGSSNEQFF

SEQ ID NO: 664257 - protein, 19 aa, Homo sapiens
  CDR3 for alpha chain variable domain of TCR clone 332129 (TRAV26-1, TRAJ52)
CIVRAHCNAGGTSYGKLTF

SEQ ID NO: 664258 - protein, 13 aa, Homo sapiens
  CDR3 for beta chain variable domain of TCR clone 332129 (TRBV19, TRBJ2-7)
CASRKAGGSVQYF

SEQ ID NO: 664259 - protein, 15 aa, Homo sapiens
  CDR3 for alpha chain variable domain of TCR clone 332130 (TRAV25, TRAJ52)
CAGRPGGTNYGKLTF

SEQ ID NO: 664260 - protein, 14 aa, Homo sapiens
  CDR3 for beta chain variable domain of TCR clone 332130 (TRBV11-2, TRBJ2-1)
CASSLEPSGRGKFF

SEQ ID NO: 664261 - protein, 16 aa, Homo sapiens
  CDR3 for alpha chain variable domain of TCR clone 332131 (TRAV30, TRAJ24)
CGTEIVDADSWGKFQF

SEQ ID NO: 664262 - protein, 16 aa, Homo sapiens
  CDR3 for beta chain variable domain of TCR clone 332131 (TRBV12-4, TRBJ1-5)
CASRQPVEGSNHPQHF

SEQ ID NO: 664263 - protein, 14 aa, Homo sapiens
  CDR3 for alpha chain variable domain of TCR clone 332132 (TRAV8-6, TRAJ13)
CAVFSSGGYQKGTF

SEQ ID NO: 664264 - protein, 14 aa, Homo sapiens
  CDR3 for beta chain variable domain of TCR clone 332132 (TRBV7-2, TRBJ1-5)
CASSLTGNNQPQHF

SEQ ID NO: 664265 - protein, 14 aa, Homo sapiens
  CDR3 for alpha chain variable domain of TCR clone 332133 (TRAV35, TRAJ10)
CAGILTGGGNKLTF

SEQ ID NO: 664266 - protein, 16 aa, Homo sapiens
  CDR3 for beta chain variable domain of TCR clone 332133 (TRBV12-5, TRBJ2-5)
CASGPRTSVNQETQYF

SEQ ID NO: 664267 - protein, 10 aa, Homo sapiens
  CDR3 for alpha chain variable domain of TCR clone 332134 (TRAV12-3, TRAJ49)
CPMNDDQFYF

SEQ ID NO: 664268 - protein, 13 aa, Homo sapiens
  CDR3 for beta chain variable domain of TCR clone 332134 (TRBV12-4, TRBJ1-1)
CASSPGTGFEAFF

SEQ ID NO: 664269 - protein, 12 aa, Homo sapiens
  CDR3 for alpha chain variable domain of TCR clone 332135 (TRAV23/DV6, TRAJ16)
CAATGTGQKLPF

SEQ ID NO: 664270 - protein, 12 aa, Homo sapiens
  CDR3 for beta chain variable domain of TCR clone 332135 (TRBV11-2, TRBJ2-2)
CASSLPTGELFF

SEQ ID NO: 664271 - protein, 13 aa, Homo sapiens
  CDR3 for alpha chain variable domain of TCR clone 332136 (TRAV13-1, TRAJ6)
CAASKGGSHIPTF

SEQ ID NO: 664272 - protein, 14 aa, Homo sapiens
  CDR3 for beta chain variable domain of TCR clone 332136 (TRBV7-2, TRBJ2-1)
CASSLGVGYNEQFF

SEQ ID NO: 664273 - protein, 12 aa, Homo sapiens
  CDR3 for alpha chain variable domain of TCR clone 332137 (TRAV21, TRAJ33)
CAKMDSNYQLIW

SEQ ID NO: 664274 - protein, 13 aa, Homo sapiens
  CDR3 for beta chain variable domain of TCR clone 332137 (TRBV12-4, TRBJ1-3)
CASSLASGNTIYF

SEQ ID NO: 664275 - protein, 18 aa, Homo sapiens
  CDR3 for alpha chain variable domain of TCR clone 332138 (TRAV26-1, TRAJ52)
CIVRVEGAGGTSFGKLKF

SEQ ID NO: 664276 - protein, 13 aa, Homo sapiens
  CDR3 for beta chain variable domain of TCR clone 332138 (TRBV7-3, TRBJ1-2)
CASSLKRGYGYTF

SEQ ID NO: 664277 - protein, 11 aa, Homo sapiens
  CDR3 for alpha chain variable domain of TCR clone 332139 (TRAV1-1, TRAJ23)
CAVRQGGKLIF

SEQ ID NO: 664278 - protein, 20 aa, Homo sapiens
  CDR3 for beta chain variable domain of TCR clone 332139 (TRBV7-8, TRBJ2-2)
CASSHLFPGLTIHTTGELFF

SEQ ID NO: 664279 - protein, 15 aa, Homo sapiens
  CDR3 for alpha chain variable domain of TCR clone 332140 (TRAV20, TRAJ4)
CAVEGPSGGYNKLIF

SEQ ID NO: 664280 - protein, 14 aa, Homo sapiens
  CDR3 for beta chain variable domain of TCR clone 332140 (TRBV7-8, TRBJ2-7)
CASTLGGALGEQYF

SEQ ID NO: 664281 - protein, 18 aa, Homo sapiens
  CDR3 for alpha chain variable domain of TCR clone 332141 (TRAV21, TRAJ52)
CAVRPSPAGGTSYGKLTF

SEQ ID NO: 664282 - protein, 17 aa, Homo sapiens
  CDR3 for beta chain variable domain of TCR clone 332141 (TRBV19, TRBJ2-2)
CASSIGGGGANTGELFF

SEQ ID NO: 664283 - protein, 14 aa, Homo sapiens
  CDR3 for alpha chain variable domain of TCR clone 332142 (TRAV1-2, TRAJ6)
CAVRLSGGSYIPTF

SEQ ID NO: 664284 - protein, 16 aa, Homo sapiens
  CDR3 for beta chain variable domain of TCR clone 332142 (TRBV7-3, TRBJ2-2)
CASSLKRGTLSGELFF

SEQ ID NO: 664285 - protein, 14 aa, Homo sapiens
  CDR3 for alpha chain variable domain of TCR clone 332143 (TRAV2, TRAJ9)
CAVEDRSGGFKTIL

SEQ ID NO: 664286 - protein, 15 aa, Homo sapiens
  CDR3 for beta chain variable domain of TCR clone 332143 (TRBV28, TRBJ1-3)
CASSMGWASGNTIYF

SEQ ID NO: 664287 - protein, 14 aa, Homo sapiens
  CDR3 for alpha chain variable domain of TCR clone 332144 (TRAV23/DV6, TRAJ36)
CAASRRTGANNLFF

SEQ ID NO: 664288 - protein, 14 aa, Homo sapiens
  CDR3 for beta chain variable domain of TCR clone 332144 (TRBV7-2, TRBJ2-7)
CASSPKTSFYEQYF

SEQ ID NO: 664289 - protein, 14 aa, Homo sapiens
  CDR3 for alpha chain variable domain of TCR clone 332145 (TRAV38-1, TRAJ40)
CALRPTSGTYRYIF

SEQ ID NO: 664290 - protein, 14 aa, Homo sapiens
  CDR3 for beta chain variable domain of TCR clone 332145 (TRBV7-2, TRBJ1-3)
CASSLGTAGNTIYF

SEQ ID NO: 664291 - protein, 14 aa, Homo sapiens
  CDR3 for alpha chain variable domain of TCR clone 332146 (TRAV8-3, TRAJ48)
CCGCGQFGNEKLTF

SEQ ID NO: 664292 - protein, 15 aa, Homo sapiens
  CDR3 for beta chain variable domain of TCR clone 332146 (TRBV7-9, TRBJ1-5)
CASSQGHQPNQPQHF

SEQ ID NO: 664293 - protein, 16 aa, Homo sapiens
  CDR3 for alpha chain variable domain of TCR clone 332147 (TRAV30, TRAJ24)
CGTEIVDADSWGKFQF

SEQ ID NO: 664294 - protein, 14 aa, Homo sapiens
  CDR3 for beta chain variable domain of TCR clone 332147 (TRBV7-9, TRBJ2-7)
CASSLDRPTDEQYF

SEQ ID NO: 664295 - protein, 10 aa, Homo sapiens
  CDR3 for alpha chain variable domain of TCR clone 332148 (TRAV1-2, TRAJ20)
CACNDYKLSF

SEQ ID NO: 664296 - protein, 13 aa, Homo sapiens
  CDR3 for beta chain variable domain of TCR clone 332148 (TRBV10-3, TRBJ2-7)
CASKLAVNYEQYL

SEQ ID NO: 664297 - protein, 16 aa, Homo sapiens
  CDR3 for alpha chain variable domain of TCR clone 332149 (TRAV30, TRAJ24)
CGTEMVDADSWGKFQF

SEQ ID NO: 664298 - protein, 12 aa, Homo sapiens
  CDR3 for beta chain variable domain of TCR clone 332149 (TRBV14, TRBJ2-5)
CASSQLKETQYF

SEQ ID NO: 664299 - protein, 13 aa, Homo sapiens
  CDR3 for alpha chain variable domain of TCR clone 332150 (TRAV23/DV6, TRAJ43)
CAASMGGNNDMRF

SEQ ID NO: 664300 - protein, 15 aa, Homo sapiens
  CDR3 for beta chain variable domain of TCR clone 332150 (TRBV20-1, TRBJ2-7)
CSARDRVSGMDEQYF

SEQ ID NO: 664301 - protein, 16 aa, Homo sapiens
  CDR3 for alpha chain variable domain of TCR clone 332151 (TRAV3, TRAJ10)
CDVRDMNAGGGNKLTF

SEQ ID NO: 664302 - protein, 14 aa, Homo sapiens
  CDR3 for beta chain variable domain of TCR clone 332151 (TRBV7-3, TRBJ1-1)
CASSLGTGYTEAFF

SEQ ID NO: 664303 - protein, 11 aa, Homo sapiens
  CDR3 for alpha chain variable domain of TCR clone 332152 (TRAV29/DV5, TRAJ49)
CAAFTGNQFYF

SEQ ID NO: 664304 - protein, 18 aa, Homo sapiens
  CDR3 for beta chain variable domain of TCR clone 332152 (TRBV12-4, TRBJ2-4)
CASSRTGAVDVAKNIQYF

SEQ ID NO: 664305 - protein, 14 aa, Homo sapiens
  CDR3 for alpha chain variable domain of TCR clone 332153 (TRAV12-2, TRAJ33)
CAVKRARSNYQLIW

SEQ ID NO: 664306 - protein, 14 aa, Homo sapiens
  CDR3 for beta chain variable domain of TCR clone 332153 (TRBV5-4, TRBJ2-2)
CASRLDGGTGELFF

SEQ ID NO: 664307 - protein, 16 aa, Homo sapiens
  CDR3 for alpha chain variable domain of TCR clone 332154 (TRAV21, TRAJ37)
CAVRTAGSSNTGKLIF

SEQ ID NO: 664308 - protein, 15 aa, Homo sapiens
  CDR3 for beta chain variable domain of TCR clone 332154 (TRBV4-3, TRBJ2-1)
CASSQESAIYNEQFF

SEQ ID NO: 664309 - protein, 11 aa, Homo sapiens
  CDR3 for alpha chain variable domain of TCR clone 332155 (TRAV1-2, TRAJ11)
CAVRGYSTLTF

SEQ ID NO: 664310 - protein, 17 aa, Homo sapiens
  CDR3 for beta chain variable domain of TCR clone 332155 (TRBV11-2, TRBJ2-1)
YASSLYPPGVEYNEQFF

SEQ ID NO: 664311 - protein, 13 aa, Homo sapiens
  CDR3 for alpha chain variable domain of TCR clone 332156 (TRAV4, TRAJ27)
CLVGDPGAGKSTF

SEQ ID NO: 664312 - protein, 13 aa, Homo sapiens
  CDR3 for beta chain variable domain of TCR clone 332156 (TRBV7-3, TRBJ1-1)
CASSQDWGAEAFF

SEQ ID NO: 664313 - protein, 17 aa, Homo sapiens
  CDR3 for alpha chain variable domain of TCR clone 332157 (TRAV26-1, TRAJ37)
CIVRVITVSSNTGKLIF

SEQ ID NO: 664314 - protein, 17 aa, Homo sapiens
  CDR3 for beta chain variable domain of TCR clone 332157 (TRBV7-3, TRBJ2-5)
CASSLGSGRSGSETQYF

SEQ ID NO: 664315 - protein, 14 aa, Homo sapiens
  CDR3 for alpha chain variable domain of TCR clone 332158 (TRAV1-2, TRAJ16)
CVVNRFSDGQKLLF

SEQ ID NO: 664316 - protein, 13 aa, Homo sapiens
  CDR3 for beta chain variable domain of TCR clone 332158 (TRBV29-1, TRBJ1-1)
CSVGDSRNTEAFF

SEQ ID NO: 664317 - protein, 14 aa, Homo sapiens
  CDR3 for alpha chain variable domain of TCR clone 332159 (TRAV36/DV7, TRAJ53)
CAVVDGGSNYKLTF

SEQ ID NO: 664318 - protein, 15 aa, Homo sapiens
  CDR3 for beta chain variable domain of TCR clone 332159 (TRBV2, TRBJ2-5)
CASTRDGGPQETQYF

SEQ ID NO: 664319 - protein, 13 aa, Homo sapiens
  CDR3 for alpha chain variable domain of TCR clone 332160 (TRAV9-2, TRAJ53)
CALSVGSNYKLTF

SEQ ID NO: 664320 - protein, 15 aa, Homo sapiens
  CDR3 for beta chain variable domain of TCR clone 332160 (TRBV20-1, TRBJ2-7)
CSARDRVSGMDEQYF

SEQ ID NO: 664321 - protein, 13 aa, Homo sapiens
  CDR3 for alpha chain variable domain of TCR clone 332161 (TRAV12-2, TRAJ34)
CAVRGYNTDKLMF

SEQ ID NO: 664322 - protein, 15 aa, Homo sapiens
  CDR3 for beta chain variable domain of TCR clone 332161 (TRBV28, TRBJ2-1)
CAGRTGAGVIARQFF

SEQ ID NO: 664323 - protein, 14 aa, Homo sapiens
  CDR3 for alpha chain variable domain of TCR clone 332162 (TRAV17, TRAJ6)
CATNPAGGSYIPTI

SEQ ID NO: 664324 - protein, 15 aa, Homo sapiens
  CDR3 for beta chain variable domain of TCR clone 332162 (TRBV2, TRBJ2-5)
CASSGTVAAGETQYF

SEQ ID NO: 664325 - protein, 14 aa, Homo sapiens
  CDR3 for alpha chain variable domain of TCR clone 332163 (TRAV2, TRAJ9)
CAVDPNTGGFKNIF

SEQ ID NO: 664326 - protein, 13 aa, Homo sapiens
  CDR3 for beta chain variable domain of TCR clone 332163 (TRBV20-1, TRBJ2-1)
CSASTGTSNEQFF

SEQ ID NO: 664327 - protein, 12 aa, Homo sapiens
  CDR3 for alpha chain variable domain of TCR clone 332164 (TRAV3, TRAJ31)
CAVRDGNARLMF

SEQ ID NO: 664328 - protein, 15 aa, Homo sapiens
  CDR3 for beta chain variable domain of TCR clone 332164 (TRBV7-2, TRBJ1-2)
CASSPRAGWNYGYTF

SEQ ID NO: 664329 - protein, 15 aa, Homo sapiens
  CDR3 for alpha chain variable domain of TCR clone 332165 (TRAV20, TRAJ50)
FAVRQMKTSYDKVII

SEQ ID NO: 664330 - protein, 16 aa, Homo sapiens
  CDR3 for beta chain variable domain of TCR clone 332165 (TRBV15, TRBJ1-2)
CATSRGPRTGGGGYTF

SEQ ID NO: 664331 - protein, 14 aa, Homo sapiens
  CDR3 for alpha chain variable domain of TCR clone 332166 (TRAV12-2, TRAJ40)
CAVNIPSGTYKYIF

SEQ ID NO: 664332 - protein, 16 aa, Homo sapiens
  CDR3 for beta chain variable domain of TCR clone 332166 (TRBV13, TRBJ2-3)
CQQPLQGSRGRNTQYF

SEQ ID NO: 664333 - protein, 12 aa, Homo sapiens
  CDR3 for alpha chain variable domain of TCR clone 332167 (TRAV12-3, TRAJ4)
CAMTGAGTRLAV

SEQ ID NO: 664334 - protein, 12 aa, Homo sapiens
  CDR3 for beta chain variable domain of TCR clone 332167 (TRBV11-2, TRBJ2-2)
CASSLGGGELFF

SEQ ID NO: 664335 - protein, 13 aa, Homo sapiens
  CDR3 for alpha chain variable domain of TCR clone 332168 (TRAV8-4, TRAJ30)
CALSVNRDDKIIF

SEQ ID NO: 664336 - protein, 13 aa, Homo sapiens
  CDR3 for beta chain variable domain of TCR clone 332168 (TRBV3-1, TRBJ2-2)
CASLARGSGELFF

SEQ ID NO: 664337 - protein, 13 aa, Homo sapiens
  CDR3 for alpha chain variable domain of TCR clone 332169 (TRAV8-4, TRAJ9)
CAVSDTGGLQTIF

SEQ ID NO: 664338 - protein, 14 aa, Homo sapiens
  CDR3 for beta chain variable domain of TCR clone 332169 (TRBV6-1, TRBJ1-3)
CASVQGGGGNTIYF

SEQ ID NO: 664339 - protein, 14 aa, Homo sapiens
  CDR3 for alpha chain variable domain of TCR clone 332170 (TRAV2, TRAJ9)
CAVEDRSGGFKTIF

SEQ ID NO: 664340 - protein, 13 aa, Homo sapiens
  CDR3 for beta chain variable domain of TCR clone 332170 (TRBV19, TRBJ2-1)
CASSMYRVNEQFF

SEQ ID NO: 664341 - protein, 14 aa, Homo sapiens
  CDR3 for alpha chain variable domain of TCR clone 332171 (TRAV35, TRAJ22)
CAGLRPGSARQLTF

SEQ ID NO: 664342 - protein, 14 aa, Homo sapiens
  CDR3 for beta chain variable domain of TCR clone 332171 (TRBV7-9, TRBJ1-2)
CASSRQGANYGYTF

SEQ ID NO: 664343 - protein, 15 aa, Homo sapiens
  CDR3 for alpha chain variable domain of TCR clone 332172 (TRAV23/DV6, TRAJ18)
CAARYRGPTLERLYF

SEQ ID NO: 664344 - protein, 13 aa, Homo sapiens
  CDR3 for beta chain variable domain of TCR clone 332172 (TRBV7-2, TRBJ2-7)
CASSSPSGSEQYF

SEQ ID NO: 664345 - protein, 16 aa, Homo sapiens
  CDR3 for alpha chain variable domain of TCR clone 332173 (TRAV14/DV4, TRAJ53)
CAMREGGGGSNYKLTF

SEQ ID NO: 664346 - protein, 12 aa, Homo sapiens
  CDR3 for beta chain variable domain of TCR clone 332173 (TRBV29-1, TRBJ2-3)
CRVTGGADTQYF

SEQ ID NO: 664347 - protein, 16 aa, Homo sapiens
  CDR3 for alpha chain variable domain of TCR clone 332174 (TRAV12-3, TRAJ53)
CAMSSGSGGSNYKLTF

SEQ ID NO: 664348 - protein, 13 aa, Homo sapiens
  CDR3 for beta chain variable domain of TCR clone 332174 (TRBV12-5, TRBJ2-3)
CASGDRQSDTQYF

SEQ ID NO: 664349 - protein, 15 aa, Homo sapiens
  CDR3 for alpha chain variable domain of TCR clone 332175 (TRAV40, TRAJ48)
CLLFISNFGNEKLTF

SEQ ID NO: 664350 - protein, 11 aa, Homo sapiens
  CDR3 for beta chain variable domain of TCR clone 332175 (TRBV7-9, TRBJ2-5)
CASSLGETQYF

SEQ ID NO: 664351 - protein, 13 aa, Homo sapiens
  CDR3 for alpha chain variable domain of TCR clone 332176 (TRAV16, TRAJ28)
CAPTGAGSYQPTF

SEQ ID NO: 664352 - protein, 16 aa, Homo sapiens
  CDR3 for beta chain variable domain of TCR clone 332176 (TRBV28, TRBJ1-5)
CASGLTGQGWNQPQHF

SEQ ID NO: 664353 - protein, 12 aa, Homo sapiens
  CDR3 for alpha chain variable domain of TCR clone 332177 (TRAV12-3, TRAJ17)
CAMTLTGNKITF

SEQ ID NO: 664354 - protein, 17 aa, Homo sapiens
  CDR3 for beta chain variable domain of TCR clone 332177 (TRBV20-1, TRBJ2-7)
CSARDRVSGWTSSTSGR

SEQ ID NO: 664355 - protein, 16 aa, Homo sapiens
  CDR3 for alpha chain variable domain of TCR clone 332178 (TRAV8-3, TRAJ44)
CAVGASYTGTASKLTF

SEQ ID NO: 664356 - protein, 15 aa, Homo sapiens
  CDR3 for beta chain variable domain of TCR clone 332178 (TRBV27, TRBJ1-5)
CASTFNRGSNQPQHF

SEQ ID NO: 664357 - protein, 12 aa, Homo sapiens
  CDR3 for alpha chain variable domain of TCR clone 332179 (TRAV12-3, TRAJ17)
CAVTLTGNKLTF

SEQ ID NO: 664358 - protein, 14 aa, Homo sapiens
  CDR3 for beta chain variable domain of TCR clone 332179 (TRBV19, TRBJ2-1)
CASPTFVLSGEQFF

SEQ ID NO: 664359 - protein, 14 aa, Homo sapiens
  CDR3 for alpha chain variable domain of TCR clone 332180 (TRAV12-2, TRAJ11)
CAVEGGSGYSTLTF

SEQ ID NO: 664360 - protein, 15 aa, Homo sapiens
  CDR3 for beta chain variable domain of TCR clone 332180 (TRBV28, TRBJ2-7)
CASRPWDRFSYEQYF

SEQ ID NO: 664361 - protein, 15 aa, Homo sapiens
  CDR3 for alpha chain variable domain of TCR clone 332181 (TRAV8-4, TRAJ40)
CAVRDDTSGTYKYIF

SEQ ID NO: 664362 - protein, 11 aa, Homo sapiens
  CDR3 for beta chain variable domain of TCR clone 332181 (TRBV19, TRBJ1-2)
CASSISSGYTF

SEQ ID NO: 664363 - protein, 13 aa, Homo sapiens
  CDR3 for alpha chain variable domain of TCR clone 332182 (TRAV12-1, TRAJ40)
CVVPTSGTYKYIF

SEQ ID NO: 664364 - protein, 18 aa, Homo sapiens
  CDR3 for beta chain variable domain of TCR clone 332182 (TRBV7-6, TRBJ2-1)
FASSPRTSGMSSYNEQFF

SEQ ID NO: 664365 - protein, 12 aa, Homo sapiens
  CDR3 for alpha chain variable domain of TCR clone 332183 (TRAV26-2, TRAJ21)
CILTGHFNKFYF

SEQ ID NO: 664366 - protein, 14 aa, Homo sapiens
  CDR3 for beta chain variable domain of TCR clone 332183 (TRBV7-9, TRBJ1-1)
CASTPLQSYTEAFF

SEQ ID NO: 664367 - protein, 13 aa, Homo sapiens
  CDR3 for alpha chain variable domain of TCR clone 332184 (TRAV8-3, TRAJ37)
CAVGSGNTGKLIF

SEQ ID NO: 664368 - protein, 13 aa, Homo sapiens
  CDR3 for beta chain variable domain of TCR clone 332184 (TRBV20-1, TRBJ1-1)
CSARVGGNTEAFF

SEQ ID NO: 664369 - protein, 13 aa, Homo sapiens
  CDR3 for alpha chain variable domain of TCR clone 332185 (TRAV35, TRAJ36)
CAWPRIGANNLFF

SEQ ID NO: 664370 - protein, 15 aa, Homo sapiens
  CDR3 for beta chain variable domain of TCR clone 332185 (TRBV28, TRBJ2-5)
CASSPPWSYQETQSF

SEQ ID NO: 664371 - protein, 14 aa, Homo sapiens
  CDR3 for alpha chain variable domain of TCR clone 332186 (TRAV17, TRAJ45)
CATASGGGADGLTF

SEQ ID NO: 664372 - protein, 12 aa, Homo sapiens
  CDR3 for beta chain variable domain of TCR clone 332186 (TRBV11-2, TRBJ2-2)
CASSLPTGELFF

SEQ ID NO: 664373 - protein, 13 aa, Homo sapiens
  CDR3 for alpha chain variable domain of TCR clone 332187 (TRAV21, TRAJ27)
CAARPGNAANQPL

SEQ ID NO: 664374 - protein, 16 aa, Homo sapiens
  CDR3 for beta chain variable domain of TCR clone 332187 (TRBV20-1, TRBJ1-2)
CSASMGQGVANYGYTF

SEQ ID NO: 664375 - protein, 13 aa, Homo sapiens
  CDR3 for alpha chain variable domain of TCR clone 332188 (TRAV2, TRAJ40)
CAVVTSGTYKYIF

SEQ ID NO: 664376 - protein, 21 aa, Homo sapiens
  CDR3 for beta chain variable domain of TCR clone 332188 (TRBV24-1, TRBJ2-5)
ESAIPNQTALYFCATRETQYF

SEQ ID NO: 664377 - protein, 15 aa, Homo sapiens
  CDR3 for alpha chain variable domain of TCR clone 332189 (TRAV25, TRAJ52)
CAGTSGGTSYGKLTF

SEQ ID NO: 664378 - protein, 16 aa, Homo sapiens
  CDR3 for beta chain variable domain of TCR clone 332189 (TRBV15, TRBJ1-2)
CATSRGPRTGGGDYSF

SEQ ID NO: 664379 - protein, 14 aa, Homo sapiens
  CDR3 for alpha chain variable domain of TCR clone 332190 (TRAV13-2, TRAJ17)
CAENSKAAGNKLTF

SEQ ID NO: 664380 - protein, 13 aa, Homo sapiens
  CDR3 for beta chain variable domain of TCR clone 332190 (TRBV2, TRBJ1-1)
CASRWTVNTEAFF

SEQ ID NO: 664381 - protein, 14 aa, Homo sapiens
  CDR3 for alpha chain variable domain of TCR clone 332191 (TRAV1-2, TRAJ16)
CAANRFSDGQKLLF

SEQ ID NO: 664382 - protein, 15 aa, Homo sapiens
  CDR3 for beta chain variable domain of TCR clone 332191 (TRBV9, TRBJ1-6)
CASSVAGTGDSPLYF

SEQ ID NO: 664383 - protein, 13 aa, Homo sapiens
  CDR3 for alpha chain variable domain of TCR clone 332192 (TRAV26-1, TRAJ43)
CIVRVGLNNDMRF

SEQ ID NO: 664384 - protein, 17 aa, Homo sapiens
  CDR3 for beta chain variable domain of TCR clone 332192 (TRBV7-8, TRBJ2-6)
CASSAGTGGAGANVLTF

SEQ ID NO: 664385 - protein, 16 aa, Homo sapiens
  CDR3 for alpha chain variable domain of TCR clone 332193 (TRAV16, TRAJ42)
CALSGYYGGTQGNLIF

SEQ ID NO: 664386 - protein, 14 aa, Homo sapiens
  CDR3 for beta chain variable domain of TCR clone 332193 (TRBV3-1, TRBJ2-5)
CASSQAVRQETQYF

SEQ ID NO: 664387 - protein, 14 aa, Homo sapiens
  CDR3 for alpha chain variable domain of TCR clone 332194 (TRAV17, TRAJ31)
CATVLRNNNARLKF

SEQ ID NO: 664388 - protein, 14 aa, Homo sapiens
  CDR3 for beta chain variable domain of TCR clone 332194 (TRBV12-4, TRBJ2-5)
CASSLWQKQETQYF

SEQ ID NO: 664389 - protein, 13 aa, Homo sapiens
  CDR3 for alpha chain variable domain of TCR clone 332195 (TRAV12-3, TRAJ21)
CAPGPHNFNKFYF

SEQ ID NO: 664390 - protein, 16 aa, Homo sapiens
  CDR3 for beta chain variable domain of TCR clone 332195 (TRBV5-1, TRBJ2-2)
CASSAYREGDTGELFF

SEQ ID NO: 664391 - protein, 13 aa, Homo sapiens
  CDR3 for alpha chain variable domain of TCR clone 332196 (TRAV17, TRAJ4)
CATKSGGYNKLIC

SEQ ID NO: 664392 - protein, 14 aa, Homo sapiens
  CDR3 for beta chain variable domain of TCR clone 332196 (TRBV20-1, TRBJ1-5)
CSARDDRGNQPQHF

SEQ ID NO: 664393 - protein, 13 aa, Homo sapiens
  CDR3 for alpha chain variable domain of TCR clone 332197 (TRAV27, TRAJ41)
CAGEGNSGYDLNF

SEQ ID NO: 664394 - protein, 14 aa, Homo sapiens
  CDR3 for beta chain variable domain of TCR clone 332197 (TRBV7-2, TRBJ1-1)
CASSFLTGTTEAFF

SEQ ID NO: 664395 - protein, 11 aa, Homo sapiens
  CDR3 for alpha chain variable domain of TCR clone 332198 (TRAV21, TRAJ41)
CAVRSGYALNF

SEQ ID NO: 664396 - protein, 16 aa, Homo sapiens
  CDR3 for beta chain variable domain of TCR clone 332198 (TRBV7-9, TRBJ1-2)
CASSLGFSSGEDGYTF

SEQ ID NO: 664397 - protein, 14 aa, Homo sapiens
  CDR3 for alpha chain variable domain of TCR clone 332199 (TRAV12-1, TRAJ30)
CVPTGTNRDDKIIF

SEQ ID NO: 664398 - protein, 14 aa, Homo sapiens
  CDR3 for beta chain variable domain of TCR clone 332199 (TRBV18, TRBJ1-5)
CASSPPEGDQPQHF

SEQ ID NO: 664399 - protein, 14 aa, Homo sapiens
  CDR3 for alpha chain variable domain of TCR clone 332200 (TRAV13-1, TRAJ13)
CAASRVGGYQKVTF

SEQ ID NO: 664400 - protein, 17 aa, Homo sapiens
  CDR3 for beta chain variable domain of TCR clone 332200 (TRBV15, TRBJ1-5)
CATSRAPPGTRNPPQHF

SEQ ID NO: 664401 - protein, 13 aa, Homo sapiens
  CDR3 for alpha chain variable domain of TCR clone 332201 (TRAV2, TRAJ29)
CDAQNSGNTPLVF

SEQ ID NO: 664402 - protein, 14 aa, Homo sapiens
  CDR3 for beta chain variable domain of TCR clone 332201 (TRBV7-9, TRBJ2-4)
CASSLAMGGNIQYF

SEQ ID NO: 664403 - protein, 14 aa, Homo sapiens
  CDR3 for alpha chain variable domain of TCR clone 332202 (TRAV1-2, TRAJ8)
CAVREYTGFQKLVF

SEQ ID NO: 664404 - protein, 15 aa, Homo sapiens
  CDR3 for beta chain variable domain of TCR clone 332202 (TRBV12-4, TRBJ2-5)
CASSPPTGLQETQYF

SEQ ID NO: 664405 - protein, 11 aa, Homo sapiens
  CDR3 for alpha chain variable domain of TCR clone 332203 (TRAV13-1, TRAJ39)
YASHAGNMLTF

SEQ ID NO: 664406 - protein, 15 aa, Homo sapiens
  CDR3 for beta chain variable domain of TCR clone 332203 (TRBV20-1, TRBJ2-7)
CSARDRVSGMDEQYF

SEQ ID NO: 664407 - protein, 12 aa, Homo sapiens
  CDR3 for alpha chain variable domain of TCR clone 332204 (TRAV13-2, TRAJ23)
CAERHRGGKLIF

SEQ ID NO: 664408 - protein, 13 aa, Homo sapiens
  CDR3 for beta chain variable domain of TCR clone 332204 (TRBV2, TRBJ1-6)
CADSGSCNSPLLF

SEQ ID NO: 664409 - protein, 10 aa, Homo sapiens
  CDR3 for alpha chain variable domain of TCR clone 332205 (TRAV12-2, TRAJ41)
CAVTGYALNF

SEQ ID NO: 664410 - protein, 12 aa, Homo sapiens
  CDR3 for beta chain variable domain of TCR clone 332205 (TRBV11-2, TRBJ2-7)
CASSSFDYEQYF

SEQ ID NO: 664411 - protein, 12 aa, Homo sapiens
  CDR3 for alpha chain variable domain of TCR clone 332206 (TRAV27, TRAJ33)
CAGDGSNYQLIW

SEQ ID NO: 664412 - protein, 15 aa, Homo sapiens
  CDR3 for beta chain variable domain of TCR clone 332206 (TRBV24-1, TRBJ2-1)
CATRASGGQYNEQFF

SEQ ID NO: 664413 - protein, 12 aa, Homo sapiens
  CDR3 for alpha chain variable domain of TCR clone 332207 (TRAV16, TRAJ56)
CAPTGANSKLTF

SEQ ID NO: 664414 - protein, 17 aa, Homo sapiens
  CDR3 for beta chain variable domain of TCR clone 332207 (TRBV27, TRBJ2-6)
CAGSLSGFASGANVLTF

SEQ ID NO: 664415 - protein, 17 aa, Homo sapiens
  CDR3 for alpha chain variable domain of TCR clone 332208 (TRAV35, TRAJ47)
GLLDCRTHTEYGTKLVF

SEQ ID NO: 664416 - protein, 11 aa, Homo sapiens
  CDR3 for beta chain variable domain of TCR clone 332208 (TRBV29-1, TRBJ1-1)
CSVEVGTRTFF

SEQ ID NO: 664417 - protein, 16 aa, Homo sapiens
  CDR3 for alpha chain variable domain of TCR clone 332209 (TRAV26-1, TRAJ38)
CTVRVELGGNNRKLIW

SEQ ID NO: 664418 - protein, 14 aa, Homo sapiens
  CDR3 for beta chain variable domain of TCR clone 332209 (TRBV5-1, TRBJ2-3)
CASSPGLAADTQYF

SEQ ID NO: 664419 - protein, 15 aa, Homo sapiens
  CDR3 for alpha chain variable domain of TCR clone 332210 (TRAV38-1, TRAJ37)
CAFIFGSGNTGQLIF

SEQ ID NO: 664420 - protein, 12 aa, Homo sapiens
  CDR3 for beta chain variable domain of TCR clone 332210 (TRBV7-9, TRBJ2-7)
CASSLEGYEQYF

SEQ ID NO: 664421 - protein, 12 aa, Homo sapiens
  CDR3 for alpha chain variable domain of TCR clone 332211 (TRAV2, TRAJ31)
CAVEDNNARLMF

SEQ ID NO: 664422 - protein, 16 aa, Homo sapiens
  CDR3 for beta chain variable domain of TCR clone 332211 (TRBV10-3, TRBJ2-1)
WAISGVGDGGGGEQFF

SEQ ID NO: 664423 - protein, 16 aa, Homo sapiens
  CDR3 for alpha chain variable domain of TCR clone 332212 (TRAV21, TRAJ45)
CAVSWGSGGGADGLTF

SEQ ID NO: 664424 - protein, 14 aa, Homo sapiens
  CDR3 for beta chain variable domain of TCR clone 332212 (TRBV4-2, TRBJ1-2)
CASSPGGSNYGYPF

SEQ ID NO: 664425 - protein, 14 aa, Homo sapiens
  CDR3 for alpha chain variable domain of TCR clone 332213 (TRAV1-2, TRAJ16)
CSVNRFSDGQKLLF

SEQ ID NO: 664426 - protein, 16 aa, Homo sapiens
  CDR3 for beta chain variable domain of TCR clone 332213 (TRBV20-1, TRBJ1-4)
CSAPGQGLLTNENLFF

SEQ ID NO: 664427 - protein, 15 aa, Homo sapiens
  CDR3 for alpha chain variable domain of TCR clone 332214 (TRAV12-3, TRAJ11)
CAMSEENSGYSTLTF

SEQ ID NO: 664428 - protein, 12 aa, Homo sapiens
  CDR3 for beta chain variable domain of TCR clone 332214 (TRBV19, TRBJ2-1)
CASSRQGAEQFF

SEQ ID NO: 664429 - protein, 13 aa, Homo sapiens
  CDR3 for alpha chain variable domain of TCR clone 332215 (TRAV8-1, TRAJ8)
CAVNRTGFKKLVF

SEQ ID NO: 664430 - protein, 16 aa, Homo sapiens
  CDR3 for beta chain variable domain of TCR clone 332215 (TRBV12-4, TRBJ1-5)
CASSRPVGGSNQPQHF

SEQ ID NO: 664431 - protein, 16 aa, Homo sapiens
  CDR3 for alpha chain variable domain of TCR clone 332216 (TRAV3, TRAJ37)
CAVRPHGSGNTGKLIF

SEQ ID NO: 664432 - protein, 17 aa, Homo sapiens
  CDR3 for beta chain variable domain of TCR clone 332216 (TRBV7-2, TRBJ2-7)
CASSFETSGSTSSTPGR

SEQ ID NO: 664433 - protein, 15 aa, Homo sapiens
  CDR3 for alpha chain variable domain of TCR clone 332217 (TRAV34, TRAJ36)
CGAPSRLGGANNLFF

SEQ ID NO: 664434 - protein, 13 aa, Homo sapiens
  CDR3 for beta chain variable domain of TCR clone 332217 (TRBV4-3, TRBJ2-5)
CASSSTGEETQYF

SEQ ID NO: 664435 - protein, 17 aa, Homo sapiens
  CDR3 for alpha chain variable domain of TCR clone 332218 (TRAV3, TRAJ6)
CAVRDGPRAGGSYIPTF

SEQ ID NO: 664436 - protein, 15 aa, Homo sapiens
  CDR3 for beta chain variable domain of TCR clone 332218 (TRBV3-1, TRBJ2-1)
CASSQVVDDGEEQFF

SEQ ID NO: 664437 - protein, 11 aa, Homo sapiens
  CDR3 for alpha chain variable domain of TCR clone 332219 (TRAV17, TRAJ20)
CATDAGYKLSF

SEQ ID NO: 664438 - protein, 17 aa, Homo sapiens
  CDR3 for beta chain variable domain of TCR clone 332219 (TRBV20-1, TRBJ2-7)
CSAAPGLARGISYEQYF

SEQ ID NO: 664439 - protein, 14 aa, Homo sapiens
  CDR3 for alpha chain variable domain of TCR clone 332220 (TRAV1-2, TRAJ8)
CAVREDTGFQKLVF

SEQ ID NO: 664440 - protein, 13 aa, Homo sapiens
  CDR3 for beta chain variable domain of TCR clone 332220 (TRBV5-6, TRBJ2-6)
CASTSSGANVLTF

SEQ ID NO: 664441 - protein, 13 aa, Homo sapiens
  CDR3 for alpha chain variable domain of TCR clone 332221 (TRAV3, TRAJ21)
CAVREPDFNKFYF

SEQ ID NO: 664442 - protein, 14 aa, Homo sapiens
  CDR3 for beta chain variable domain of TCR clone 332221 (TRBV7-3, TRBJ2-7)
CASSYDQDYYEQYF

SEQ ID NO: 664443 - protein, 14 aa, Homo sapiens
  CDR3 for alpha chain variable domain of TCR clone 332222 (TRAV26-1, TRAJ38)
CIADNAGNKRKLIW

SEQ ID NO: 664444 - protein, 13 aa, Homo sapiens
  CDR3 for beta chain variable domain of TCR clone 332222 (TRBV12-4, TRBJ2-7)
CASSPTETYEQYF

SEQ ID NO: 664445 - protein, 13 aa, Homo sapiens
  CDR3 for alpha chain variable domain of TCR clone 332223 (TRAV12-1, TRAJ33)
CGDAPDSNYQLIW

SEQ ID NO: 664446 - protein, 12 aa, Homo sapiens
  CDR3 for beta chain variable domain of TCR clone 332223 (TRBV11-2, TRBJ2-2)
CASSVGGGELFF

SEQ ID NO: 664447 - protein, 13 aa, Homo sapiens
  CDR3 for alpha chain variable domain of TCR clone 332224 (TRAV13-2, TRAJ48)
CAEMDFGNEKLTF

SEQ ID NO: 664448 - protein, 13 aa, Homo sapiens
  CDR3 for beta chain variable domain of TCR clone 332224 (TRBV11-2, TRBJ1-6)
CASSLAGVSPLHF

SEQ ID NO: 664449 - protein, 12 aa, Homo sapiens
  CDR3 for alpha chain variable domain of TCR clone 332225 (TRAV21, TRAJ13)
LGPSGGYQKVTF

SEQ ID NO: 664450 - protein, 15 aa, Homo sapiens
  CDR3 for beta chain variable domain of TCR clone 332225 (TRBV27, TRBJ2-5)
CASSLYPRGGETQYF

SEQ ID NO: 664451 - protein, 12 aa, Homo sapiens
  CDR3 for alpha chain variable domain of TCR clone 332226 (TRAV13-1, TRAJ4)
CASKGGYNKLIF

SEQ ID NO: 664452 - protein, 14 aa, Homo sapiens
  CDR3 for beta chain variable domain of TCR clone 332226 (TRBV12-4, TRBJ1-1)
CASSFSQMNTEAFF

SEQ ID NO: 664453 - protein, 16 aa, Homo sapiens
  CDR3 for alpha chain variable domain of TCR clone 332227 (TRAV3, TRAJ10)
CAVRDMGAGGENKLTF

SEQ ID NO: 664454 - protein, 16 aa, Homo sapiens
  CDR3 for beta chain variable domain of TCR clone 332227 (TRBV9, TRBJ1-2)
CASSVEEKVSPYGYTF

SEQ ID NO: 664455 - protein, 15 aa, Homo sapiens
  CDR3 for alpha chain variable domain of TCR clone 332228 (TRAV8-3, TRAJ11)
CAVGLLNSGYSTLTF

SEQ ID NO: 664456 - protein, 14 aa, Homo sapiens
  CDR3 for beta chain variable domain of TCR clone 332228 (TRBV19, TRBJ2-1)
CASSMGSGATEQFF

SEQ ID NO: 664457 - protein, 13 aa, Homo sapiens
  CDR3 for alpha chain variable domain of TCR clone 332229 (TRAV8-6, TRAJ37)
CAVSAGNTGKLIF

SEQ ID NO: 664458 - protein, 12 aa, Homo sapiens
  CDR3 for beta chain variable domain of TCR clone 332229 (TRBV12-4, TRBJ2-7)
CASSLGGYEQYF

SEQ ID NO: 664459 - protein, 16 aa, Homo sapiens
  CDR3 for alpha chain variable domain of TCR clone 332230 (TRAV4, TRAJ22)
CLVGDLYSGSARQLTF

SEQ ID NO: 664460 - protein, 16 aa, Homo sapiens
  CDR3 for beta chain variable domain of TCR clone 332230 (TRBV7-9, TRBJ2-1)
CASSDVAGGSYTEPFF

SEQ ID NO: 664461 - protein, 14 aa, Homo sapiens
  CDR3 for alpha chain variable domain of TCR clone 332231 (TRAV26-1, TRAJ52)
YIVRVGTSYGKLTF

SEQ ID NO: 664462 - protein, 13 aa, Homo sapiens
  CDR3 for beta chain variable domain of TCR clone 332231 (TRBV7-2, TRBJ1-1)
CASSLKASTEAFF

SEQ ID NO: 664463 - protein, 14 aa, Homo sapiens
  CDR3 for alpha chain variable domain of TCR clone 332232 (TRAV34, TRAJ22)
CGADTSGSARPLTF

SEQ ID NO: 664464 - protein, 16 aa, Homo sapiens
  CDR3 for beta chain variable domain of TCR clone 332232 (TRBV2, TRBJ2-3)
CQHRGAPRRWTDTQYF

SEQ ID NO: 664465 - protein, 14 aa, Homo sapiens
  CDR3 for alpha chain variable domain of TCR clone 332233 (TRAV12-3, TRAJ13)
CAMRNSGGYQKVTF

SEQ ID NO: 664466 - protein, 14 aa, Homo sapiens
  CDR3 for beta chain variable domain of TCR clone 332233 (TRBV4-1, TRBJ1-6)
CASSPRSDSSPLHF

SEQ ID NO: 664467 - protein, 13 aa, Homo sapiens
  CDR3 for alpha chain variable domain of TCR clone 332234 (TRAV38-2/DV8, TRAJ34)
CAYRNYNTDKLIF

SEQ ID NO: 664468 - protein, 15 aa, Homo sapiens
  CDR3 for beta chain variable domain of TCR clone 332234 (TRBV20-1, TRBJ2-5)
CSAEGTGGLKETQYF

SEQ ID NO: 664469 - protein, 16 aa, Homo sapiens
  CDR3 for alpha chain variable domain of TCR clone 332235 (TRAV26-1, TRAJ23)
CIVSVERYNQGGELIF

SEQ ID NO: 664470 - protein, 16 aa, Homo sapiens
  CDR3 for beta chain variable domain of TCR clone 332235 (TRBV9, TRBJ1-2)
CASSVDKGGGNYGYTF

SEQ ID NO: 664471 - protein, 15 aa, Homo sapiens
  CDR3 for alpha chain variable domain of TCR clone 332236 (TRAV3, TRAJ17)
CAVRDTGAAGNKLTF

SEQ ID NO: 664472 - protein, 16 aa, Homo sapiens
  CDR3 for beta chain variable domain of TCR clone 332236 (TRBV11-3, TRBJ2-5)
CASSSVVAGSTETQYF

SEQ ID NO: 664473 - protein, 15 aa, Homo sapiens
  CDR3 for alpha chain variable domain of TCR clone 332237 (TRAV20, TRAJ40)
CAVQRGTSGTYKYIF

SEQ ID NO: 664474 - protein, 19 aa, Homo sapiens
  CDR3 for beta chain variable domain of TCR clone 332237 (TRBV28, TRBJ2-7)
CASSYSGTRRLGWVYEQYF

SEQ ID NO: 664475 - protein, 16 aa, Homo sapiens
  CDR3 for alpha chain variable domain of TCR clone 332238 (TRAV30, TRAJ24)
RGTEIVDADSWGKFQF

SEQ ID NO: 664476 - protein, 16 aa, Homo sapiens
  CDR3 for beta chain variable domain of TCR clone 332238 (TRBV6-1, TRBJ2-1)
CASILRQGSSYNEQFF

SEQ ID NO: 664477 - protein, 12 aa, Homo sapiens
  CDR3 for alpha chain variable domain of TCR clone 332239 (TRAV12-3, TRAJ17)
CAMTLTGNKLTF

SEQ ID NO: 664478 - protein, 12 aa, Homo sapiens
  CDR3 for beta chain variable domain of TCR clone 332239 (TRBV11-2, TRBJ2-7)
CDSSLPTYEQYF

SEQ ID NO: 664479 - protein, 14 aa, Homo sapiens
  CDR3 for alpha chain variable domain of TCR clone 332240 (TRAV35, TRAJ13)
CAGSTSGGYQKVTF

SEQ ID NO: 664480 - protein, 13 aa, Homo sapiens
  CDR3 for beta chain variable domain of TCR clone 332240 (TRBV29-1, TRBJ1-1)
CSVGDSRNTEAFF

SEQ ID NO: 664481 - protein, 13 aa, Homo sapiens
  CDR3 for alpha chain variable domain of TCR clone 332241 (TRAV24, TRAJ5)
CACCVAGRRALTF

SEQ ID NO: 664482 - protein, 18 aa, Homo sapiens
  CDR3 for beta chain variable domain of TCR clone 332241 (TRBV4-3, TRBJ2-6)
CASSQDIQGGPGANVLTF

SEQ ID NO: 664483 - protein, 17 aa, Homo sapiens
  CDR3 for alpha chain variable domain of TCR clone 332242 (TRAV3, TRAJ6)
CAARDGPRAGGSDIPTF

SEQ ID NO: 664484 - protein, 15 aa, Homo sapiens
  CDR3 for beta chain variable domain of TCR clone 332242 (TRBV20-1, TRBJ2-7)
CSARDRVSGMDEQYF

SEQ ID NO: 664485 - protein, 14 aa, Homo sapiens
  CDR3 for alpha chain variable domain of TCR clone 332243 (TRAV12-2, TRAJ13)
CAVKKPGGYQNVTF

SEQ ID NO: 664486 - protein, 12 aa, Homo sapiens
  CDR3 for beta chain variable domain of TCR clone 332243 (TRBV11-2, TRBJ2-2)
CASSLGGGELFF

SEQ ID NO: 664487 - protein, 16 aa, Homo sapiens
  CDR3 for alpha chain variable domain of TCR clone 332244 (TRAV8-3, TRAJ10)
CAVGPGVTGGGSKLTF

SEQ ID NO: 664488 - protein, 13 aa, Homo sapiens
  CDR3 for beta chain variable domain of TCR clone 332244 (TRBV18, TRBJ1-1)
CASSPGPSGEAFF

SEQ ID NO: 664489 - protein, 13 aa, Homo sapiens
  CDR3 for alpha chain variable domain of TCR clone 332245 (TRAV3, TRAJ30)
CAVRDRGDDKIIF

SEQ ID NO: 664490 - protein, 15 aa, Homo sapiens
  CDR3 for beta chain variable domain of TCR clone 332245 (TRBV4-3, TRBJ2-3)
CASSPSLLSTDTQYF

SEQ ID NO: 664491 - protein, 14 aa, Homo sapiens
  CDR3 for alpha chain variable domain of TCR clone 332246 (TRAV17, TRAJ40)
CATALTSGTYKYIF

SEQ ID NO: 664492 - protein, 18 aa, Homo sapiens
  CDR3 for beta chain variable domain of TCR clone 332246 (TRBV11-2, TRBJ2-3)
CASSLGGASRGAPNTQYF

SEQ ID NO: 664493 - protein, 15 aa, Homo sapiens
  CDR3 for alpha chain variable domain of TCR clone 332247 (TRAV4, TRAJ15)
CLVGDIRRAGTALIF

SEQ ID NO: 664494 - protein, 12 aa, Homo sapiens
  CDR3 for beta chain variable domain of TCR clone 332247 (TRBV7-9, TRBJ1-5)
CASSPQGQPQHF

SEQ ID NO: 664495 - protein, 13 aa, Homo sapiens
  CDR3 for alpha chain variable domain of TCR clone 332248 (TRAV21, TRAJ20)
CAVGLRVDYKLSF

SEQ ID NO: 664496 - protein, 15 aa, Homo sapiens
  CDR3 for beta chain variable domain of TCR clone 332248 (TRBV5-1, TRBJ2-5)
CASSLGLAEQETQYF

SEQ ID NO: 664497 - protein, 17 aa, Homo sapiens
  CDR3 for alpha chain variable domain of TCR clone 332249 (TRAV3, TRAJ6)
CAVRDGPRAGGSYIPTF

SEQ ID NO: 664498 - protein, 20 aa, Homo sapiens
  CDR3 for beta chain variable domain of TCR clone 332249 (TRBV28, TRBJ2-1)
CASTPIGRSPGLAGGNELFF

SEQ ID NO: 664499 - protein, 11 aa, Homo sapiens
  CDR3 for alpha chain variable domain of TCR clone 332250 (TRAV12-1, TRAJ21)
CVVNNFNKFYF

SEQ ID NO: 664500 - protein, 12 aa, Homo sapiens
  CDR3 for beta chain variable domain of TCR clone 332250 (TRBV28, TRBJ2-3)
CASSLYRDTQYF

SEQ ID NO: 664501 - protein, 16 aa, Homo sapiens
  CDR3 for alpha chain variable domain of TCR clone 332251 (TRAV20, TRAJ22)
CAVQASSSDSARQLTF

SEQ ID NO: 664502 - protein, 13 aa, Homo sapiens
  CDR3 for beta chain variable domain of TCR clone 332251 (TRBV7-2, TRBJ2-5)
CASSQTSVETQYF

SEQ ID NO: 664503 - protein, 20 aa, Homo sapiens
  CDR3 for alpha chain variable domain of TCR clone 332252 (TRAV12-1, TRAJ42)
SSVIQPPTSVKGGSQGNLIF

SEQ ID NO: 664504 - protein, 15 aa, Homo sapiens
  CDR3 for beta chain variable domain of TCR clone 332252 (TRBV4-1, TRBJ2-7)
CASSQNTGRLHEQYF

SEQ ID NO: 664505 - protein, 15 aa, Homo sapiens
  CDR3 for alpha chain variable domain of TCR clone 332253 (TRAV16, TRAJ48)
CALFISNFGNEKLTF

SEQ ID NO: 664506 - protein, 15 aa, Homo sapiens
  CDR3 for beta chain variable domain of TCR clone 332253 (TRBV7-3, TRBJ2-1)
CASSYFRGTYNEQFF

SEQ ID NO: 664507 - protein, 16 aa, Homo sapiens
  CDR3 for alpha chain variable domain of TCR clone 332254 (TRAV30, TRAJ24)
CGTEIVDADSWGKFQF

SEQ ID NO: 664508 - protein, 14 aa, Homo sapiens
  CDR3 for beta chain variable domain of TCR clone 332254 (TRBV5-1, TRBJ1-2)
CASSLEPVNYGYTC

SEQ ID NO: 664509 - protein, 11 aa, Homo sapiens
  CDR3 for alpha chain variable domain of TCR clone 332255 (TRAV3, TRAJ17)
PKGAAGNKLTF

SEQ ID NO: 664510 - protein, 12 aa, Homo sapiens
  CDR3 for beta chain variable domain of TCR clone 332255 (TRBV11-3, TRBJ2-2)
CASSLGGGELFF

SEQ ID NO: 664511 - protein, 13 aa, Homo sapiens
  CDR3 for alpha chain variable domain of TCR clone 332256 (TRAV12-1, TRAJ26)
CVVNPVYGQNFVF

SEQ ID NO: 664512 - protein, 17 aa, Homo sapiens
  CDR3 for beta chain variable domain of TCR clone 332256 (TRBV13, TRBJ2-3)
CASSLSRVAGGRNTQYF

SEQ ID NO: 664513 - protein, 14 aa, Homo sapiens
  CDR3 for alpha chain variable domain of TCR clone 332257 (TRAV12-2, TRAJ40)
CSVKIPSGTYKYIF

SEQ ID NO: 664514 - protein, 12 aa, Homo sapiens
  CDR3 for beta chain variable domain of TCR clone 332257 (TRBV11-2, TRBJ2-2)
CASSLGGGELFF

SEQ ID NO: 664515 - protein, 13 aa, Homo sapiens
  CDR3 for alpha chain variable domain of TCR clone 332258 (TRAV35, TRAJ53)
CAGQESSNYKLTF

SEQ ID NO: 664516 - protein, 11 aa, Homo sapiens
  CDR3 for beta chain variable domain of TCR clone 332258 (TRBV29-1, TRBJ2-5)
CTEDRTGTQYF

SEQ ID NO: 664517 - protein, 17 aa, Homo sapiens
  CDR3 for alpha chain variable domain of TCR clone 332259 (TRAV23/DV6, TRAJ57)
CAAVSTLSQGGSEKLVF

SEQ ID NO: 664518 - protein, 14 aa, Homo sapiens
  CDR3 for beta chain variable domain of TCR clone 332259 (TRBV25-1, TRBJ1-1)
CASTHLGGNTEAFF

SEQ ID NO: 664519 - protein, 12 aa, Homo sapiens
  CDR3 for alpha chain variable domain of TCR clone 332260 (TRAV12-3, TRAJ17)
CAMTLTGNKLTF

SEQ ID NO: 664520 - protein, 15 aa, Homo sapiens
  CDR3 for beta chain variable domain of TCR clone 332260 (TRBV10-2, TRBJ2-6)
CASSERGTGANVLSF

SEQ ID NO: 664521 - protein, 16 aa, Homo sapiens
  CDR3 for alpha chain variable domain of TCR clone 332261 (TRAV8-3, TRAJ8)
CAVPRDGNTGLQKLVF

SEQ ID NO: 664522 - protein, 14 aa, Homo sapiens
  CDR3 for beta chain variable domain of TCR clone 332261 (TRBV11-2, TRBJ2-7)
CASSSTGEGYEQYF

SEQ ID NO: 664523 - protein, 18 aa, Homo sapiens
  CDR3 for alpha chain variable domain of TCR clone 332262 (TRAV13-1, TRAJ52)
CAASKRSAGGTSYGKLTF

SEQ ID NO: 664524 - protein, 15 aa, Homo sapiens
  CDR3 for beta chain variable domain of TCR clone 332262 (TRBV19, TRBJ2-7)
CASSFNSGGVWEQYF

SEQ ID NO: 664525 - protein, 17 aa, Homo sapiens
  CDR3 for alpha chain variable domain of TCR clone 332263 (TRAV8-6, TRAJ8)
CAVKEGIEKPGFQKLVF

SEQ ID NO: 664526 - protein, 12 aa, Homo sapiens
  CDR3 for beta chain variable domain of TCR clone 332263 (TRBV19, TRBJ1-4)
CASKDWPGGLFF

SEQ ID NO: 664527 - protein, 14 aa, Homo sapiens
  CDR3 for alpha chain variable domain of TCR clone 332264 (TRAV1-2, TRAJ16)
CAVNRFSDGQKLLF

SEQ ID NO: 664528 - protein, 16 aa, Homo sapiens
  CDR3 for beta chain variable domain of TCR clone 332264 (TRBV15, TRBJ2-7)
CATSRDGGIPSYEQYF

SEQ ID NO: 664529 - protein, 15 aa, Homo sapiens
  CDR3 for alpha chain variable domain of TCR clone 332265 (TRAV26-1, TRAJ22)
CIVRVSFLFCKATSL

SEQ ID NO: 664530 - protein, 13 aa, Homo sapiens
  CDR3 for beta chain variable domain of TCR clone 332265 (TRBV7-9, TRBJ1-2)
CASSLKQNYGYTF

SEQ ID NO: 664531 - protein, 15 aa, Homo sapiens
  CDR3 for alpha chain variable domain of TCR clone 332266 (TRAV21, TRAJ32)
CAVRRYGGATNKLIF

SEQ ID NO: 664532 - protein, 13 aa, Homo sapiens
  CDR3 for beta chain variable domain of TCR clone 332266 (TRBV18, TRBJ2-3)
CASSPGVTDTQYF

SEQ ID NO: 664533 - protein, 16 aa, Homo sapiens
  CDR3 for alpha chain variable domain of TCR clone 332267 (TRAV30, TRAJ24)
CGTEIVDADSWGKLQF

SEQ ID NO: 664534 - protein, 13 aa, Homo sapiens
  CDR3 for beta chain variable domain of TCR clone 332267 (TRBV19, TRBJ1-2)
CASSVPGQDGYTF

SEQ ID NO: 664535 - protein, 14 aa, Homo sapiens
  CDR3 for alpha chain variable domain of TCR clone 332268 (TRAV12-1, TRAJ17)
CVVNYKAAGNKLTF

SEQ ID NO: 664536 - protein, 12 aa, Homo sapiens
  CDR3 for beta chain variable domain of TCR clone 332268 (TRBV7-3, TRBJ2-1)
CASSFQSGPQFF

SEQ ID NO: 664537 - protein, 10 aa, Homo sapiens
  CDR3 for alpha chain variable domain of TCR clone 332269 (TRAV13-1, TRAJ7)
LIGGNNRLAF

SEQ ID NO: 664538 - protein, 14 aa, Homo sapiens
  CDR3 for beta chain variable domain of TCR clone 332269 (TRBV16, TRBJ1-1)
CASSQAGPNTEAFS

SEQ ID NO: 664539 - protein, 14 aa, Homo sapiens
  CDR3 for alpha chain variable domain of TCR clone 332270 (TRAV35, TRAJ39)
CAGQLGNAGNMLTF

SEQ ID NO: 664540 - protein, 13 aa, Homo sapiens
  CDR3 for beta chain variable domain of TCR clone 332270 (TRBV20-1, TRBJ1-1)
CSAGTVGNTEAFF

SEQ ID NO: 664541 - protein, 15 aa, Homo sapiens
  CDR3 for alpha chain variable domain of TCR clone 332271 (TRAV17, TRAJ45)
CATAYLGGGADGLTF

SEQ ID NO: 664542 - protein, 17 aa, Homo sapiens
  CDR3 for beta chain variable domain of TCR clone 332271 (TRBV5-1, TRBJ1-5)
CASSLVGREEGNQPQHF

SEQ ID NO: 664543 - protein, 18 aa, Homo sapiens
  CDR3 for alpha chain variable domain of TCR clone 332272 (TRAV13-1, TRAJ52)
CAASKRSAGGTSYGMLTF

SEQ ID NO: 664544 - protein, 13 aa, Homo sapiens
  CDR3 for beta chain variable domain of TCR clone 332272 (TRBV12-4, TRBJ1-2)
CASSLRQGKGYTF

SEQ ID NO: 664545 - protein, 12 aa, Homo sapiens
  CDR3 for alpha chain variable domain of TCR clone 332273 (TRAV21, TRAJ49)
RAVNDGGNQFYF

SEQ ID NO: 664546 - protein, 14 aa, Homo sapiens
  CDR3 for beta chain variable domain of TCR clone 332273 (TRBV18, TRBJ2-7)
CASSPRGGSYEQYF

SEQ ID NO: 664547 - protein, 12 aa, Homo sapiens
  CDR3 for alpha chain variable domain of TCR clone 332274 (TRAV8-4, TRAJ9)
CAVTFNTGGFRN

SEQ ID NO: 664548 - protein, 15 aa, Homo sapiens
  CDR3 for beta chain variable domain of TCR clone 332274 (TRBV7-9, TRBJ2-2)
CASSPETGAGGELFF

SEQ ID NO: 664549 - protein, 17 aa, Homo sapiens
  CDR3 for alpha chain variable domain of TCR clone 332275 (TRAV12-2, TRAJ42)
CAGNILNYGGSQGNLIF

SEQ ID NO: 664550 - protein, 13 aa, Homo sapiens
  CDR3 for beta chain variable domain of TCR clone 332275 (TRBV3-1, TRBJ1-5)
CASSQDLDQPQHF

SEQ ID NO: 664551 - protein, 12 aa, Homo sapiens
  CDR3 for alpha chain variable domain of TCR clone 332276 (TRAV1-2, TRAJ11)
CAVRWGYSTLTF

SEQ ID NO: 664552 - protein, 16 aa, Homo sapiens
  CDR3 for beta chain variable domain of TCR clone 332276 (TRBV7-9, TRBJ2-1)
CASSSPQGTTRNEQFF

SEQ ID NO: 664553 - protein, 13 aa, Homo sapiens
  CDR3 for alpha chain variable domain of TCR clone 332277 (TRAV30, TRAJ6)
CGTEAGGSYIPTF

SEQ ID NO: 664554 - protein, 15 aa, Homo sapiens
  CDR3 for beta chain variable domain of TCR clone 332277 (TRBV6-3, TRBJ2-7)
CASSSPGTVFYEQYF

SEQ ID NO: 664555 - protein, 15 aa, Homo sapiens
  CDR3 for alpha chain variable domain of TCR clone 332278 (TRAV8-2, TRAJ40)
CVVLGTTSGNYKYTF

SEQ ID NO: 664556 - protein, 16 aa, Homo sapiens
  CDR3 for beta chain variable domain of TCR clone 332278 (TRBV7-3, TRBJ2-1)
CASSLEGYRSYNEQFF

SEQ ID NO: 664557 - protein, 16 aa, Homo sapiens
  CDR3 for alpha chain variable domain of TCR clone 332279 (TRAV27, TRAJ13)
CAGAQSDSGGYQKVTF

SEQ ID NO: 664558 - protein, 15 aa, Homo sapiens
  CDR3 for beta chain variable domain of TCR clone 332279 (TRBV29-1, TRBJ2-1)
CSVGRHALVYNEQFF

SEQ ID NO: 664559 - protein, 12 aa, Homo sapiens
  CDR3 for alpha chain variable domain of TCR clone 332280 (TRAV13-1, TRAJ21)
CAAKEGFNKFYF

SEQ ID NO: 664560 - protein, 13 aa, Homo sapiens
  CDR3 for beta chain variable domain of TCR clone 332280 (TRBV20-1, TRBJ2-2)
CSASAAGTGELFF

SEQ ID NO: 664561 - protein, 15 aa, Homo sapiens
  CDR3 for alpha chain variable domain of TCR clone 332281 (TRAV26-2, TRAJ57)
CILRDIRGGSEKLVF

SEQ ID NO: 664562 - protein, 15 aa, Homo sapiens
  CDR3 for beta chain variable domain of TCR clone 332281 (TRBV2, TRBJ2-1)
CASDIGLAGEGEQLF

SEQ ID NO: 664563 - protein, 13 aa, Homo sapiens
  CDR3 for alpha chain variable domain of TCR clone 332282 (TRAV3, TRAJ30)
CAVRDRGDDKIIL

SEQ ID NO: 664564 - protein, 16 aa, Homo sapiens
  CDR3 for beta chain variable domain of TCR clone 332282 (TRBV7-3, TRBJ2-2)
CASSLKRGTLSGEPFF

SEQ ID NO: 664565 - protein, 10 aa, Homo sapiens
  CDR3 for alpha chain variable domain of TCR clone 332283 (TRAV17, TRAJ36)
CATVAGNLFF

SEQ ID NO: 664566 - protein, 13 aa, Homo sapiens
  CDR3 for beta chain variable domain of TCR clone 332283 (TRBV12-4, TRBJ2-7)
CASSFVRGYEQYF

SEQ ID NO: 664567 - protein, 17 aa, Homo sapiens
  CDR3 for alpha chain variable domain of TCR clone 332284 (TRAV3, TRAJ38)
CAVRDCLNAGNNRKLIW

SEQ ID NO: 664568 - protein, 16 aa, Homo sapiens
  CDR3 for beta chain variable domain of TCR clone 332284 (TRBV11-2, TRBJ2-2)
CASSLRTGNLIGELFF

SEQ ID NO: 664569 - protein, 12 aa, Homo sapiens
  CDR3 for alpha chain variable domain of TCR clone 332285 (TRAV12-3, TRAJ17)
CAMTLTGNKLTF

SEQ ID NO: 664570 - protein, 17 aa, Homo sapiens
  CDR3 for beta chain variable domain of TCR clone 332285 (TRBV7-3, TRBJ2-3)
CASSLMKRMRGADTQNF

SEQ ID NO: 664571 - protein, 12 aa, Homo sapiens
  CDR3 for alpha chain variable domain of TCR clone 332286 (TRAV12-2, TRAJ10)
WWVTGGGNKLTF

SEQ ID NO: 664572 - protein, 13 aa, Homo sapiens
  CDR3 for beta chain variable domain of TCR clone 332286 (TRBV5-7, TRBJ2-3)
CASSLGRTDTQYF

SEQ ID NO: 664573 - protein, 14 aa, Homo sapiens
  CDR3 for alpha chain variable domain of TCR clone 332287 (TRAV38-2/DV8, TRAJ23)
CAYRSQNQGGKLIF

SEQ ID NO: 664574 - protein, 17 aa, Homo sapiens
  CDR3 for beta chain variable domain of TCR clone 332287 (TRBV11-2, TRBJ2-1)
CASSLYPPGVEYNEQFF

SEQ ID NO: 664575 - protein, 12 aa, Homo sapiens
  CDR3 for alpha chain variable domain of TCR clone 332288 (TRAV27, TRAJ35)
CAGADFGNVLHF

SEQ ID NO: 664576 - protein, 16 aa, Homo sapiens
  CDR3 for beta chain variable domain of TCR clone 332288 (TRBV6-1, TRBJ2-1)
CASILRQGSAYNEQFF

SEQ ID NO: 664577 - protein, 14 aa, Homo sapiens
  CDR3 for alpha chain variable domain of TCR clone 332289 (TRAV24, TRAJ42)
CALSYGGSQGNLIF

SEQ ID NO: 664578 - protein, 15 aa, Homo sapiens
  CDR3 for beta chain variable domain of TCR clone 332289 (TRBV20-1, TRBJ2-7)
CSARDRVSGMDEQYF

SEQ ID NO: 664579 - protein, 14 aa, Homo sapiens
  CDR3 for alpha chain variable domain of TCR clone 332290 (TRAV1-2, TRAJ8)
CAVREDTGFEKLVF

SEQ ID NO: 664580 - protein, 13 aa, Homo sapiens
  CDR3 for beta chain variable domain of TCR clone 332290 (TRBV4-2, TRBJ2-2)
CASEDRGTGELFF

SEQ ID NO: 664581 - protein, 13 aa, Homo sapiens
  CDR3 for alpha chain variable domain of TCR clone 332291 (TRAV1-2, TRAJ9)
CAALNTGGFEPIF

SEQ ID NO: 664582 - protein, 20 aa, Homo sapiens
  CDR3 for beta chain variable domain of TCR clone 332291 (TRBV28, TRBJ2-1)
CASTPIGRSPGLAGGNEQFF

SEQ ID NO: 664583 - protein, 15 aa, Homo sapiens
  CDR3 for alpha chain variable domain of TCR clone 332292 (TRAV26-1, TRAJ44)
CIVRANPGTASKLTF

SEQ ID NO: 664584 - protein, 16 aa, Homo sapiens
  CDR3 for beta chain variable domain of TCR clone 332292 (TRBV7-7, TRBJ2-1)
CASSLASGTSYNEQFF

SEQ ID NO: 664585 - protein, 14 aa, Homo sapiens
  CDR3 for alpha chain variable domain of TCR clone 332293 (TRAV16, TRAJ17)
CALSGRAAGNQLTF

SEQ ID NO: 664586 - protein, 15 aa, Homo sapiens
  CDR3 for beta chain variable domain of TCR clone 332293 (TRBV3-1, TRBJ1-2)
CASSPTRLPEGGYTF

SEQ ID NO: 664587 - protein, 14 aa, Homo sapiens
  CDR3 for alpha chain variable domain of TCR clone 332294 (TRAV12-2, TRAJ45)
CAVYSGGGTDGLTF

SEQ ID NO: 664588 - protein, 14 aa, Homo sapiens
  CDR3 for beta chain variable domain of TCR clone 332294 (TRBV6-5, TRBJ1-2)
CASTRGGGSDGYTF

SEQ ID NO: 664589 - protein, 14 aa, Homo sapiens
  CDR3 for alpha chain variable domain of TCR clone 332295 (TRAV1-2, TRAJ29)
CAVRELTSATPLVF

SEQ ID NO: 664590 - protein, 14 aa, Homo sapiens
  CDR3 for beta chain variable domain of TCR clone 332295 (TRBV3-1, TRBJ2-5)
CASSQGPDHETPYF

SEQ ID NO: 664591 - protein, 15 aa, Homo sapiens
  CDR3 for alpha chain variable domain of TCR clone 332296 (TRAV38-2/DV8, TRAJ48)
CAYMSPESGNEKLTF

SEQ ID NO: 664592 - protein, 13 aa, Homo sapiens
  CDR3 for beta chain variable domain of TCR clone 332296 (TRBV4-2, TRBJ1-2)
CASSLSASGGYTF

SEQ ID NO: 664593 - protein, 11 aa, Homo sapiens
  CDR3 for alpha chain variable domain of TCR clone 332297 (TRAV13-1, TRAJ30)
CEASRDDKIIF

SEQ ID NO: 664594 - protein, 15 aa, Homo sapiens
  CDR3 for beta chain variable domain of TCR clone 332297 (TRBV18, TRBJ1-1)
CASSPSSWVNTEAFF

SEQ ID NO: 664595 - protein, 16 aa, Homo sapiens
  CDR3 for alpha chain variable domain of TCR clone 332298 (TRAV26-1, TRAJ31)
CIVRPPVLNNNARLMF

SEQ ID NO: 664596 - protein, 15 aa, Homo sapiens
  CDR3 for beta chain variable domain of TCR clone 332298 (TRBV20-1, TRBJ2-7)
CSARDRVSGMDEQYF

SEQ ID NO: 664597 - protein, 11 aa, Homo sapiens
  CDR3 for alpha chain variable domain of TCR clone 332299 (TRAV12-1, TRAJ8)
CVVTGFQKLVF

SEQ ID NO: 664598 - protein, 14 aa, Homo sapiens
  CDR3 for beta chain variable domain of TCR clone 332299 (TRBV7-3, TRBJ2-1)
CASSLAGGTNEQFF

SEQ ID NO: 664599 - protein, 17 aa, Homo sapiens
  CDR3 for alpha chain variable domain of TCR clone 332300 (TRAV3, TRAJ13)
CAVRDMRRTGGYQNVTF

SEQ ID NO: 664600 - protein, 14 aa, Homo sapiens
  CDR3 for beta chain variable domain of TCR clone 332300 (TRBV5-1, TRBJ2-7)
CASSLTGSGYEQYF

SEQ ID NO: 664601 - protein, 18 aa, Homo sapiens
  CDR3 for alpha chain variable domain of TCR clone 332301 (TRAV21, TRAJ52)
CAVMPSPSGGTSYGKLTF

SEQ ID NO: 664602 - protein, 16 aa, Homo sapiens
  CDR3 for beta chain variable domain of TCR clone 332301 (TRBV7-3, TRBJ2-1)
CASSLEGYRSYNEQFF

SEQ ID NO: 664603 - protein, 13 aa, Homo sapiens
  CDR3 for alpha chain variable domain of TCR clone 332302 (TRAV21, TRAJ20)
CAVGLRVDYKLSF

SEQ ID NO: 664604 - protein, 16 aa, Homo sapiens
  CDR3 for beta chain variable domain of TCR clone 332302 (TRBV7-3, TRBJ2-2)
CASSLKRGTLSGELVF

SEQ ID NO: 664605 - protein, 14 aa, Homo sapiens
  CDR3 for alpha chain variable domain of TCR clone 332303 (TRAV20, TRAJ9)
CAVQASTGGFKTIF

SEQ ID NO: 664606 - protein, 14 aa, Homo sapiens
  CDR3 for beta chain variable domain of TCR clone 332303 (TRBV7-8, TRBJ2-7)
CASSPRDRVYEQYF

SEQ ID NO: 664607 - protein, 13 aa, Homo sapiens
  CDR3 for alpha chain variable domain of TCR clone 332304 (TRAV8-4, TRAJ48)
CAVSLFGNEKLTF

SEQ ID NO: 664608 - protein, 13 aa, Homo sapiens
  CDR3 for beta chain variable domain of TCR clone 332304 (TRBV20-1, TRBJ1-1)
CSAFDRENTEAFF

SEQ ID NO: 664609 - protein, 17 aa, Homo sapiens
  CDR3 for alpha chain variable domain of TCR clone 332305 (TRAV3, TRAJ6)
CAVRDGPRAGGRYIPTF

SEQ ID NO: 664610 - protein, 13 aa, Homo sapiens
  CDR3 for beta chain variable domain of TCR clone 332305 (TRBV27, TRBJ2-1)
CASRTLGVGEQFF

SEQ ID NO: 664611 - protein, 13 aa, Homo sapiens
  CDR3 for alpha chain variable domain of TCR clone 332306 (TRAV3, TRAJ21)
CAVREPDFNKFYF

SEQ ID NO: 664612 - protein, 10 aa, Homo sapiens
  CDR3 for beta chain variable domain of TCR clone 332306 (TRBV12-4, TRBJ2-2)
CASSLVAGTR

SEQ ID NO: 664613 - protein, 14 aa, Homo sapiens
  CDR3 for alpha chain variable domain of TCR clone 332307 (TRAV4, TRAJ41)
CLVGDGDSGYALNF

SEQ ID NO: 664614 - protein, 14 aa, Homo sapiens
  CDR3 for beta chain variable domain of TCR clone 332307 (TRBV25-1, TRBJ1-1)
CASTHLGGNTEAFF

SEQ ID NO: 664615 - protein, 16 aa, Homo sapiens
  CDR3 for alpha chain variable domain of TCR clone 332308 (TRAV3, TRAJ21)
CAVRDIERGNFNQFYF

SEQ ID NO: 664616 - protein, 13 aa, Homo sapiens
  CDR3 for beta chain variable domain of TCR clone 332308 (TRBV27, TRBJ2-7)
CASSLTTGYEQYF

SEQ ID NO: 664617 - protein, 16 aa, Homo sapiens
  CDR3 for alpha chain variable domain of TCR clone 332309 (TRAV8-3, TRAJ13)
CAVGAYPSGGYQKVTF

SEQ ID NO: 664618 - protein, 12 aa, Homo sapiens
  CDR3 for beta chain variable domain of TCR clone 332309 (TRBV19, TRBJ2-1)
CASSMQDTEQFF

SEQ ID NO: 664619 - protein, 14 aa, Homo sapiens
  CDR3 for alpha chain variable domain of TCR clone 332310 (TRAV1-1, TRAJ28)
CAAPSGAGSYQLTF

SEQ ID NO: 664620 - protein, 14 aa, Homo sapiens
  CDR3 for beta chain variable domain of TCR clone 332310 (TRBV2, TRBJ2-7)
CASSLTSGGYEQYF

SEQ ID NO: 664621 - protein, 16 aa, Homo sapiens
  CDR3 for alpha chain variable domain of TCR clone 332311 (TRAV3, TRAJ37)
CAVRGKGSGNTGKLIF

SEQ ID NO: 664622 - protein, 13 aa, Homo sapiens
  CDR3 for beta chain variable domain of TCR clone 332311 (TRBV24-1, TRBJ2-2)
CATSDWSTGELFF

SEQ ID NO: 664623 - protein, 14 aa, Homo sapiens
  CDR3 for alpha chain variable domain of TCR clone 332312 (TRAV2, TRAJ29)
CAVEDRVGNTPRVC

SEQ ID NO: 664624 - protein, 15 aa, Homo sapiens
  CDR3 for beta chain variable domain of TCR clone 332312 (TRBV10-3, TRBJ2-1)
CAISDVQDRAYEQFF

SEQ ID NO: 664625 - protein, 14 aa, Homo sapiens
  CDR3 for alpha chain variable domain of TCR clone 332313 (TRAV1-1, TRAJ9)
CAVRGGNGGFKTIF

SEQ ID NO: 664626 - protein, 16 aa, Homo sapiens
  CDR3 for beta chain variable domain of TCR clone 332313 (TRBV19, TRBJ2-1)
CASSKAGPSSYNEQFF

SEQ ID NO: 664627 - protein, 13 aa, Homo sapiens
  CDR3 for alpha chain variable domain of TCR clone 332314 (TRAV35, TRAJ43)
CAGYPYNNNDMRF

SEQ ID NO: 664628 - protein, 15 aa, Homo sapiens
  CDR3 for beta chain variable domain of TCR clone 332314 (TRBV25-1, TRBJ1-4)
CASSKRRATNQELFF

SEQ ID NO: 664629 - protein, 16 aa, Homo sapiens
  CDR3 for alpha chain variable domain of TCR clone 332315 (TRAV12-1, TRAJ45)
CVVIRYSGVGADVLTF

SEQ ID NO: 664630 - protein, 12 aa, Homo sapiens
  CDR3 for beta chain variable domain of TCR clone 332315 (TRBV6-5, TRBJ2-2)
CASRQITGELFF

SEQ ID NO: 664631 - protein, 13 aa, Homo sapiens
  CDR3 for alpha chain variable domain of TCR clone 332316 (TRAV20, TRAJ15)
CAVHRGAGTALIF

SEQ ID NO: 664632 - protein, 14 aa, Homo sapiens
  CDR3 for beta chain variable domain of TCR clone 332316 (TRBV6-1, TRBJ2-7)
CASSDIANSYEQYF

SEQ ID NO: 664633 - protein, 15 aa, Homo sapiens
  CDR3 for alpha chain variable domain of TCR clone 332317 (TRAV4, TRAJ3)
CLVGDSDSSASKINF

SEQ ID NO: 664634 - protein, 14 aa, Homo sapiens
  CDR3 for beta chain variable domain of TCR clone 332317 (TRBV7-9, TRBJ2-7)
CASSLQQGGYERYF

SEQ ID NO: 664635 - protein, 18 aa, Homo sapiens
  CDR3 for alpha chain variable domain of TCR clone 332318 (TRAV13-1, TRAJ52)
CAAKNPNAGGTSYGKLTF

SEQ ID NO: 664636 - protein, 16 aa, Homo sapiens
  CDR3 for beta chain variable domain of TCR clone 332318 (TRBV7-2, TRBJ2-7)
CASRSRGRRTSSTSGR

SEQ ID NO: 664637 - protein, 16 aa, Homo sapiens
  CDR3 for alpha chain variable domain of TCR clone 332319 (TRAV14/DV4, TRAJ54)
CAMREGRIQGAQKLVF

SEQ ID NO: 664638 - protein, 12 aa, Homo sapiens
  CDR3 for beta chain variable domain of TCR clone 332319 (TRBV7-8, TRBJ2-7)
CASSLGDREQYF

SEQ ID NO: 664639 - protein, 14 aa, Homo sapiens
  CDR3 for alpha chain variable domain of TCR clone 332320 (TRAV17, TRAJ22)
CATSPSGSARQLTF

SEQ ID NO: 664640 - protein, 12 aa, Homo sapiens
  CDR3 for beta chain variable domain of TCR clone 332320 (TRBV7-8, TRBJ2-1)
CASSLGHNEQFF

SEQ ID NO: 664641 - protein, 13 aa, Homo sapiens
  CDR3 for alpha chain variable domain of TCR clone 332321 (TRAV13-2, TRAJ13)
CAERPGGYQKVTF

SEQ ID NO: 664642 - protein, 14 aa, Homo sapiens
  CDR3 for beta chain variable domain of TCR clone 332321 (TRBV23-1, TRBJ2-5)
CARSFLRSQETQYF

SEQ ID NO: 664643 - protein, 14 aa, Homo sapiens
  CDR3 for alpha chain variable domain of TCR clone 332322 (TRAV1-1, TRAJ27)
CAVIYNTNAGKSTF

SEQ ID NO: 664644 - protein, 15 aa, Homo sapiens
  CDR3 for beta chain variable domain of TCR clone 332322 (TRBV7-2, TRBJ2-1)
CASSSGLAGGNEQFV

SEQ ID NO: 664645 - protein, 13 aa, Homo sapiens
  CDR3 for alpha chain variable domain of TCR clone 332323 (TRAV12-3, TRAJ10)
CAVGTGGGNKLTF

SEQ ID NO: 664646 - protein, 16 aa, Homo sapiens
  CDR3 for beta chain variable domain of TCR clone 332323 (TRBV20-1, TRBJ1-4)
CSAPGQGLLTNEKLFF

SEQ ID NO: 664647 - protein, 11 aa, Homo sapiens
  CDR3 for alpha chain variable domain of TCR clone 332324 (TRAV23/DV6, TRAJ47)
CAAGYGNKLVF

SEQ ID NO: 664648 - protein, 16 aa, Homo sapiens
  CDR3 for beta chain variable domain of TCR clone 332324 (TRBV27, TRBJ2-2)
CASSFRGLVRTGELFF

SEQ ID NO: 664649 - protein, 13 aa, Homo sapiens
  CDR3 for alpha chain variable domain of TCR clone 332325 (TRAV21, TRAJ57)
CAVTQGGSAKLVF

SEQ ID NO: 664650 - protein, 12 aa, Homo sapiens
  CDR3 for beta chain variable domain of TCR clone 332325 (TRBV14, TRBJ1-1)
CASSQLKGLAFF

SEQ ID NO: 664651 - protein, 12 aa, Homo sapiens
  CDR3 for alpha chain variable domain of TCR clone 332326 (TRAV13-2, TRAJ23)
CAERHRGGKLIF

SEQ ID NO: 664652 - protein, 15 aa, Homo sapiens
  CDR3 for beta chain variable domain of TCR clone 332326 (TRBV19, TRBJ1-2)
CASSVGQVLKYGYTF

SEQ ID NO: 664653 - protein, 14 aa, Homo sapiens
  CDR3 for alpha chain variable domain of TCR clone 332327 (TRAV3, TRAJ36)
CAVRDGTGANHLFF

SEQ ID NO: 664654 - protein, 16 aa, Homo sapiens
  CDR3 for beta chain variable domain of TCR clone 332327 (TRBV20-1, TRBJ2-6)
CSAREGPGVGANVLTF

SEQ ID NO: 664655 - protein, 14 aa, Homo sapiens
  CDR3 for alpha chain variable domain of TCR clone 332328 (TRAV12-2, TRAJ3)
CAVSLYSSASKIIF

SEQ ID NO: 664656 - protein, 16 aa, Homo sapiens
  CDR3 for beta chain variable domain of TCR clone 332328 (TRBV12-4, TRBJ1-5)
CASSRPVGGSNQPQHF

SEQ ID NO: 664657 - protein, 14 aa, Homo sapiens
  CDR3 for alpha chain variable domain of TCR clone 332329 (TRAV12-1, TRAJ13)
CVVIDSGGYQKVTF

SEQ ID NO: 664658 - protein, 13 aa, Homo sapiens
  CDR3 for beta chain variable domain of TCR clone 332329 (TRBV12-4, TRBJ2-7)
CASSPTETYEQYF

SEQ ID NO: 664659 - protein, 13 aa, Homo sapiens
  CDR3 for alpha chain variable domain of TCR clone 332330 (TRAV3, TRAJ21)
CAVREPDFNKFYF

SEQ ID NO: 664660 - protein, 14 aa, Homo sapiens
  CDR3 for beta chain variable domain of TCR clone 332330 (TRBV28, TRBJ1-1)
CASSFPRKNTEAFF

SEQ ID NO: 664661 - protein, 19 aa, Homo sapiens
  CDR3 for alpha chain variable domain of TCR clone 332331 (TRAV26-1, TRAJ52)
CIVRAHRNAGGTSYGKLTF

SEQ ID NO: 664662 - protein, 13 aa, Homo sapiens
  CDR3 for beta chain variable domain of TCR clone 332331 (TRBV7-3, TRBJ2-1)
CASSLDSYNEQFF

SEQ ID NO: 664663 - protein, 15 aa, Homo sapiens
  CDR3 for alpha chain variable domain of TCR clone 332332 (TRAV26-2, TRAJ50)
CILRDEETSYDKVIF

SEQ ID NO: 664664 - protein, 12 aa, Homo sapiens
  CDR3 for beta chain variable domain of TCR clone 332332 (TRBV5-7, TRBJ1-2)
CASSDGPYGETF

SEQ ID NO: 664665 - protein, 13 aa, Homo sapiens
  CDR3 for alpha chain variable domain of TCR clone 332333 (TRAV25, TRAJ54)
CAGTIQGAQKLVL

SEQ ID NO: 664666 - protein, 15 aa, Homo sapiens
  CDR3 for beta chain variable domain of TCR clone 332333 (TRBV19, TRBJ1-5)
CASSILTGENQPQHF

SEQ ID NO: 664667 - protein, 13 aa, Homo sapiens
  CDR3 for alpha chain variable domain of TCR clone 332334 (TRAV13-1, TRAJ5)
CAASDTGRRALTF

SEQ ID NO: 664668 - protein, 12 aa, Homo sapiens
  CDR3 for beta chain variable domain of TCR clone 332334 (TRBV28, TRBJ2-3)
CASSLYRDQQYF

SEQ ID NO: 664669 - protein, 13 aa, Homo sapiens
  CDR3 for alpha chain variable domain of TCR clone 332335 (TRAV26-2, TRAJ37)
CIRGSSNTGRLIF

SEQ ID NO: 664670 - protein, 16 aa, Homo sapiens
  CDR3 for beta chain variable domain of TCR clone 332335 (TRBV7-2, TRBJ2-5)
CASSPGGARRGETQYF

SEQ ID NO: 664671 - protein, 13 aa, Homo sapiens
  CDR3 for alpha chain variable domain of TCR clone 332336 (TRAV8-3, TRAJ28)
CAVGAVGSYQLTF

SEQ ID NO: 664672 - protein, 20 aa, Homo sapiens
  CDR3 for beta chain variable domain of TCR clone 332336 (TRBV7-8, TRBJ2-2)
CASSHLFPGPTIHITGEPFF

SEQ ID NO: 664673 - protein, 16 aa, Homo sapiens
  CDR3 for alpha chain variable domain of TCR clone 332337 (TRAV1-2, TRAJ10)
CAVRGVPTGGGNKLTF

SEQ ID NO: 664674 - protein, 14 aa, Homo sapiens
  CDR3 for beta chain variable domain of TCR clone 332337 (TRBV12-4, TRBJ2-1)
CASSLGQGASEQFF

SEQ ID NO: 664675 - protein, 14 aa, Homo sapiens
  CDR3 for alpha chain variable domain of TCR clone 332338 (TRAV13-1, TRAJ20)
CAARPGSNDYKLIF

SEQ ID NO: 664676 - protein, 13 aa, Homo sapiens
  CDR3 for beta chain variable domain of TCR clone 332338 (TRBV20-1, TRBJ1-1)
CSAPPGGHTEAFF

SEQ ID NO: 664677 - protein, 12 aa, Homo sapiens
  CDR3 for alpha chain variable domain of TCR clone 332339 (TRAV13-2, TRAJ23)
CAERYRGGKLIF

SEQ ID NO: 664678 - protein, 16 aa, Homo sapiens
  CDR3 for beta chain variable domain of TCR clone 332339 (TRBV7-2, TRBJ2-6)
CAILSGVSSGANVLTF

SEQ ID NO: 664679 - protein, 15 aa, Homo sapiens
  CDR3 for alpha chain variable domain of TCR clone 332340 (TRAV2, TRAJ24)
CAVVRLKNSWGKLQF

SEQ ID NO: 664680 - protein, 17 aa, Homo sapiens
  CDR3 for beta chain variable domain of TCR clone 332340 (TRBV13, TRBJ2-3)
CASSLSRVAGGRKTQYF

SEQ ID NO: 664681 - protein, 13 aa, Homo sapiens
  CDR3 for alpha chain variable domain of TCR clone 332341 (TRAV29/DV5, TRAJ44)
CAANTGTASKLTF

SEQ ID NO: 664682 - protein, 13 aa, Homo sapiens
  CDR3 for beta chain variable domain of TCR clone 332341 (TRBV19, TRBJ2-7)
CASRKAGGSEQYF

SEQ ID NO: 664683 - protein, 12 aa, Homo sapiens
  CDR3 for alpha chain variable domain of TCR clone 332342 (TRAV13-1, TRAJ21)
CAAKEGFNKFYS

SEQ ID NO: 664684 - protein, 14 aa, Homo sapiens
  CDR3 for beta chain variable domain of TCR clone 332342 (TRBV5-4, TRBJ1-1)
CASSWDSRRDEAFF

SEQ ID NO: 664685 - protein, 13 aa, Homo sapiens
  CDR3 for alpha chain variable domain of TCR clone 332343 (TRAV22, TRAJ29)
CAVGGSGITPLVF

SEQ ID NO: 664686 - protein, 13 aa, Homo sapiens
  CDR3 for beta chain variable domain of TCR clone 332343 (TRBV4-3, TRBJ1-1)
CASSQAGNTEAFF

SEQ ID NO: 664687 - protein, 15 aa, Homo sapiens
  CDR3 for alpha chain variable domain of TCR clone 332344 (TRAV26-1, TRAJ29)
CIVRVEGSGNTPLVF

SEQ ID NO: 664688 - protein, 15 aa, Homo sapiens
  CDR3 for beta chain variable domain of TCR clone 332344 (TRBV7-9, TRBJ1-5)
CASSHGHQPNPPQHF

SEQ ID NO: 664689 - protein, 19 aa, Homo sapiens
  CDR3 for alpha chain variable domain of TCR clone 332345 (TRAV2, TRAJ20)
ILQVREADAAVYRDCKLSF

SEQ ID NO: 664690 - protein, 16 aa, Homo sapiens
  CDR3 for beta chain variable domain of TCR clone 332345 (TRBV7-2, TRBJ2-7)
CASTSQAASGGYEQYF

SEQ ID NO: 664691 - protein, 15 aa, Homo sapiens
  CDR3 for alpha chain variable domain of TCR clone 332346 (TRAV3, TRAJ22)
CAVSDRGGSARQLTF

SEQ ID NO: 664692 - protein, 13 aa, Homo sapiens
  CDR3 for beta chain variable domain of TCR clone 332346 (TRBV2, TRBJ1-5)
CATAGPGNQPQHF

SEQ ID NO: 664693 - protein, 22 aa, Homo sapiens
  CDR3 for alpha chain variable domain of TCR clone 332347 (TRAV27, )
CAARRNAGDNHIQNPDPAVYQL

SEQ ID NO: 664694 - protein, 13 aa, Homo sapiens
  CDR3 for beta chain variable domain of TCR clone 332347 (TRBV12-5, TRBJ2-3)
CASGDRQSDTQYF

SEQ ID NO: 664695 - protein, 14 aa, Homo sapiens
  CDR3 for alpha chain variable domain of TCR clone 332348 (TRAV27, TRAJ22)
CAGLPSGSARQLTF

SEQ ID NO: 664696 - protein, 14 aa, Homo sapiens
  CDR3 for beta chain variable domain of TCR clone 332348 (TRBV7-9, TRBJ2-3)
CASSLEDGTDTQYF

SEQ ID NO: 664697 - protein, 15 aa, Homo sapiens
  CDR3 for alpha chain variable domain of TCR clone 332349 (TRAV23/DV6, TRAJ28)
CAAKRTGAGSYQLTF

SEQ ID NO: 664698 - protein, 12 aa, Homo sapiens
  CDR3 for beta chain variable domain of TCR clone 332349 (TRBV12-4, TRBJ2-5)
CQQFQFRETQYF

SEQ ID NO: 664699 - protein, 10 aa, Homo sapiens
  CDR3 for alpha chain variable domain of TCR clone 332350 (TRAV8-6, TRAJ34)
CAGRADKLIF

SEQ ID NO: 664700 - protein, 14 aa, Homo sapiens
  CDR3 for beta chain variable domain of TCR clone 332350 (TRBV20-1, TRBJ2-1)
CSAQIGGSANEQFF

SEQ ID NO: 664701 - protein, 13 aa, Homo sapiens
  CDR3 for alpha chain variable domain of TCR clone 332351 (TRAV10, TRAJ15)
CVVSGQAGTALIF

SEQ ID NO: 664702 - protein, 15 aa, Homo sapiens
  CDR3 for beta chain variable domain of TCR clone 332351 (TRBV6-1, TRBJ1-2)
CASSDTIDRGYGYSF

SEQ ID NO: 664703 - protein, 13 aa, Homo sapiens
  CDR3 for alpha chain variable domain of TCR clone 332352 (TRAV27, TRAJ57)
CRSAQGRSEKLVF

SEQ ID NO: 664704 - protein, 16 aa, Homo sapiens
  CDR3 for beta chain variable domain of TCR clone 332352 (TRBV10-3, TRBJ2-1)
CAISGVGDGGGGEQFF

SEQ ID NO: 664705 - protein, 14 aa, Homo sapiens
  CDR3 for alpha chain variable domain of TCR clone 332353 (TRAV3, TRAJ6)
CAVRDSRRKLHTYN

SEQ ID NO: 664706 - protein, 15 aa, Homo sapiens
  CDR3 for beta chain variable domain of TCR clone 332353 (TRBV18, TRBJ2-7)
CASSPLQGRTYEQYF

SEQ ID NO: 664707 - protein, 14 aa, Homo sapiens
  CDR3 for alpha chain variable domain of TCR clone 332354 (TRAV12-3, TRAJ15)
CAMIPPPAGTALIF

SEQ ID NO: 664708 - protein, 14 aa, Homo sapiens
  CDR3 for beta chain variable domain of TCR clone 332354 (TRBV20-1, TRBJ2-2)
CSARKRLTTGELFF

SEQ ID NO: 664709 - protein, 15 aa, Homo sapiens
  CDR3 for alpha chain variable domain of TCR clone 332355 (TRAV38-1, TRAJ37)
CAFIFGSGNTGKLIF

SEQ ID NO: 664710 - protein, 12 aa, Homo sapiens
  CDR3 for beta chain variable domain of TCR clone 332355 (TRBV7-9, TRBJ2-7)
CASSLEGYEQYC

SEQ ID NO: 664711 - protein, 14 aa, Homo sapiens
  CDR3 for alpha chain variable domain of TCR clone 332356 (TRAV1-2, TRAJ16)
CAVNRFSDGQKLLF

SEQ ID NO: 664712 - protein, 13 aa, Homo sapiens
  CDR3 for beta chain variable domain of TCR clone 332356 (TRBV7-9, TRBJ1-4)
CHTEGEANEKLFF

SEQ ID NO: 664713 - protein, 15 aa, Homo sapiens
  CDR3 for alpha chain variable domain of TCR clone 332357 (TRAV8-3, TRAJ27)
CAVGAGDTNAGKSTF

SEQ ID NO: 664714 - protein, 16 aa, Homo sapiens
  CDR3 for beta chain variable domain of TCR clone 332357 (TRBV20-1, TRBJ2-7)
CSARAPGLALSYEQYF

SEQ ID NO: 664715 - protein, 15 aa, Homo sapiens
  CDR3 for alpha chain variable domain of TCR clone 332358 (TRAV20, TRAJ58)
CAVQDLETSGSRLTF

SEQ ID NO: 664716 - protein, 14 aa, Homo sapiens
  CDR3 for beta chain variable domain of TCR clone 332358 (TRBV11-2, TRBJ2-7)
CASSPGQGLYEQYF

SEQ ID NO: 664717 - protein, 14 aa, Homo sapiens
  CDR3 for alpha chain variable domain of TCR clone 332359 (TRAV2, TRAJ9)
CAVEDRSAGFKTIF

SEQ ID NO: 664718 - protein, 16 aa, Homo sapiens
  CDR3 for beta chain variable domain of TCR clone 332359 (TRBV15, TRBJ2-7)
CATSRDGGIPSYEQYF

SEQ ID NO: 664719 - protein, 14 aa, Homo sapiens
  CDR3 for alpha chain variable domain of TCR clone 332360 (TRAV35, TRAJ33)
CAGSSQDSNYQLIW

SEQ ID NO: 664720 - protein, 17 aa, Homo sapiens
  CDR3 for beta chain variable domain of TCR clone 332360 (TRBV20-1, TRBJ2-7)
CSAESGTSGAYEQYLGR

SEQ ID NO: 664721 - protein, 12 aa, Homo sapiens
  CDR3 for alpha chain variable domain of TCR clone 332361 (TRAV3, TRAJ20)
CAVRDPDYKLSF

SEQ ID NO: 664722 - protein, 18 aa, Homo sapiens
  CDR3 for beta chain variable domain of TCR clone 332361 (TRBV23-1, TRBJ2-3)
CASSLTFGLAVFTDTQYF

SEQ ID NO: 664723 - protein, 13 aa, Homo sapiens
  CDR3 for alpha chain variable domain of TCR clone 332362 (TRAV27, TRAJ42)
RAGARGSQGNLIF

SEQ ID NO: 664724 - protein, 14 aa, Homo sapiens
  CDR3 for beta chain variable domain of TCR clone 332362 (TRBV20-1, TRBJ1-1)
CSAQTRIGGTEAFF

SEQ ID NO: 664725 - protein, 17 aa, Homo sapiens
  CDR3 for alpha chain variable domain of TCR clone 332363 (TRAV3, TRAJ6)
CAVRDGPRAGGSHIPTF

SEQ ID NO: 664726 - protein, 13 aa, Homo sapiens
  CDR3 for beta chain variable domain of TCR clone 332363 (TRBV27, TRBJ2-1)
CASRTLGVGEQFF

SEQ ID NO: 664727 - protein, 11 aa, Homo sapiens
  CDR3 for alpha chain variable domain of TCR clone 332364 (TRAV12-2, TRAJ43)
CAVNIGNDMRF

SEQ ID NO: 664728 - protein, 15 aa, Homo sapiens
  CDR3 for beta chain variable domain of TCR clone 332364 (TRBV7-9, TRBJ2-7)
CASSSSGLAVYEQYF

SEQ ID NO: 664729 - protein, 13 aa, Homo sapiens
  CDR3 for alpha chain variable domain of TCR clone 332365 (TRAV2, TRAJ40)
CAVVTSGTYKYIL

SEQ ID NO: 664730 - protein, 14 aa, Homo sapiens
  CDR3 for beta chain variable domain of TCR clone 332365 (TRBV28, TRBJ2-7)
CASSGLAEPAEQYF

SEQ ID NO: 664731 - protein, 14 aa, Homo sapiens
  CDR3 for alpha chain variable domain of TCR clone 332366 (TRAV29/DV5, TRAJ32)
CAAAYGGATNKLIF

SEQ ID NO: 664732 - protein, 15 aa, Homo sapiens
  CDR3 for beta chain variable domain of TCR clone 332366 (TRBV7-2, TRBJ2-2)
CASRRPGQNTGELFF

SEQ ID NO: 664733 - protein, 15 aa, Homo sapiens
  CDR3 for alpha chain variable domain of TCR clone 332367 (TRAV8-3, TRAJ11)
CAVGLLNSGYSTPTF

SEQ ID NO: 664734 - protein, 23 aa, Homo sapiens
  CDR3 for beta chain variable domain of TCR clone 332367 (TRBV7-9, TRBJ1-2)
EAQLEKSRLLSDRFSSGEDGYTF

SEQ ID NO: 664735 - protein, 14 aa, Homo sapiens
  CDR3 for alpha chain variable domain of TCR clone 332368 (TRAV12-2, TRAJ13)
CAVKKTGGYQKVTF

SEQ ID NO: 664736 - protein, 13 aa, Homo sapiens
  CDR3 for beta chain variable domain of TCR clone 332368 (TRBV7-2, TRBJ2-5)
CASSQSSVETQYF

SEQ ID NO: 664737 - protein, 12 aa, Homo sapiens
  CDR3 for alpha chain variable domain of TCR clone 332369 (TRAV25, TRAJ20)
CAGRSNDYKLSF

SEQ ID NO: 664738 - protein, 15 aa, Homo sapiens
  CDR3 for beta chain variable domain of TCR clone 332369 (TRBV7-6, TRBJ2-7)
CASSGRRDTFGGQYF

SEQ ID NO: 664739 - protein, 13 aa, Homo sapiens
  CDR3 for alpha chain variable domain of TCR clone 332370 (TRAV21, TRAJ27)
CAARPGNAGKSTF

SEQ ID NO: 664740 - protein, 20 aa, Homo sapiens
  CDR3 for beta chain variable domain of TCR clone 332370 (TRBV4-2, TRBJ2-7)
CASSQARGGNLRAVLRAGHQ

SEQ ID NO: 664741 - protein, 15 aa, Homo sapiens
  CDR3 for alpha chain variable domain of TCR clone 332371 (TRAV12-2, TRAJ13)
CRESLGSGGYQKVTF

SEQ ID NO: 664742 - protein, 15 aa, Homo sapiens
  CDR3 for beta chain variable domain of TCR clone 332371 (TRBV6-5, TRBJ2-1)
CASRRAQLSYTEQFF

SEQ ID NO: 664743 - protein, 16 aa, Homo sapiens
  CDR3 for alpha chain variable domain of TCR clone 332372 (TRAV4, TRAJ22)
CLVGDLYSGSARQLTC

SEQ ID NO: 664744 - protein, 14 aa, Homo sapiens
  CDR3 for beta chain variable domain of TCR clone 332372 (TRBV28, TRBJ2-3)
CASSWRGRADTQYF

SEQ ID NO: 664745 - protein, 13 aa, Homo sapiens
  CDR3 for alpha chain variable domain of TCR clone 332373 (TRAV12-3, TRAJ9)
CAMRNTGGFKTIF

SEQ ID NO: 664746 - protein, 15 aa, Homo sapiens
  CDR3 for beta chain variable domain of TCR clone 332373 (TRBV27, TRBJ2-1)
CASSNGGGSSNEQFF

SEQ ID NO: 664747 - protein, 18 aa, Homo sapiens
  CDR3 for alpha chain variable domain of TCR clone 332374 (TRAV1-2, TRAJ18)
CAVRDMGDRGSTLGWLYF

SEQ ID NO: 664748 - protein, 16 aa, Homo sapiens
  CDR3 for beta chain variable domain of TCR clone 332374 (TRBV29-1, TRBJ1-2)
CSVEANRDIANYGYTF

SEQ ID NO: 664749 - protein, 13 aa, Homo sapiens
  CDR3 for alpha chain variable domain of TCR clone 332375 (TRAV12-1, TRAJ16)
CVVNGPDGQKLPF

SEQ ID NO: 664750 - protein, 13 aa, Homo sapiens
  CDR3 for beta chain variable domain of TCR clone 332375 (TRBV2, TRBJ1-1)
CARNPTGGCHAFF

SEQ ID NO: 664751 - protein, 14 aa, Homo sapiens
  CDR3 for alpha chain variable domain of TCR clone 332376 (TRAV12-2, TRAJ4)
CAEDLSGGYNKLIF

SEQ ID NO: 664752 - protein, 12 aa, Homo sapiens
  CDR3 for beta chain variable domain of TCR clone 332376 (TRBV5-1, TRBJ2-7)
CASSLDSYEQYF

SEQ ID NO: 664753 - protein, 12 aa, Homo sapiens
  CDR3 for alpha chain variable domain of TCR clone 332377 (TRAV17, TRAJ4)
CATDGGYNKLIF

SEQ ID NO: 664754 - protein, 14 aa, Homo sapiens
  CDR3 for beta chain variable domain of TCR clone 332377 (TRBV29-1, TRBJ2-2)
SAAQQGSTPGELFF

SEQ ID NO: 664755 - protein, 14 aa, Homo sapiens
  CDR3 for alpha chain variable domain of TCR clone 332378 (TRAV35, TRAJ46)
CAGPQRSSGDKLTF

SEQ ID NO: 664756 - protein, 12 aa, Homo sapiens
  CDR3 for beta chain variable domain of TCR clone 332378 (TRBV19, TRBJ2-1)
CASSMQDTEQFF

SEQ ID NO: 664757 - protein, 17 aa, Homo sapiens
  CDR3 for alpha chain variable domain of TCR clone 332379 (TRAV13-1, TRAJ29)
CAATTPLAFGKGTRLSV

SEQ ID NO: 664758 - protein, 16 aa, Homo sapiens
  CDR3 for beta chain variable domain of TCR clone 332379 (TRBV7-2, TRBJ2-1)
CASSSQGAAADNEQFF

SEQ ID NO: 664759 - protein, 15 aa, Homo sapiens
  CDR3 for alpha chain variable domain of TCR clone 332380 (TRAV17, TRAJ57)
CATGPSQGASEKLVF

SEQ ID NO: 664760 - protein, 14 aa, Homo sapiens
  CDR3 for beta chain variable domain of TCR clone 332380 (TRBV12-5, TRBJ2-5)
CASGSRTHQETQYF

SEQ ID NO: 664761 - protein, 13 aa, Homo sapiens
  CDR3 for alpha chain variable domain of TCR clone 332381 (TRAV25, TRAJ26)
CAGMDNYGKNFVF

SEQ ID NO: 664762 - protein, 13 aa, Homo sapiens
  CDR3 for beta chain variable domain of TCR clone 332381 (TRBV4-2, TRBJ1-1)
CASSQAGNTEAFF

SEQ ID NO: 664763 - protein, 13 aa, Homo sapiens
  CDR3 for alpha chain variable domain of TCR clone 332382 (TRAV13-1, TRAJ20)
RAARVSNDYKLSF

SEQ ID NO: 664764 - protein, 16 aa, Homo sapiens
  CDR3 for beta chain variable domain of TCR clone 332382 (TRBV11-1, TRBJ1-1)
CATNPRDRAFNTEAFF

SEQ ID NO: 664765 - protein, 17 aa, Homo sapiens
  CDR3 for alpha chain variable domain of TCR clone 332383 (TRAV38-1, TRAJ45)
CAFMKHYMGGGADGLTF

SEQ ID NO: 664766 - protein, 16 aa, Homo sapiens
  CDR3 for beta chain variable domain of TCR clone 332383 (TRBV13, TRBJ2-2)
CASSPRTGEHTGELFF

SEQ ID NO: 664767 - protein, 15 aa, Homo sapiens
  CDR3 for alpha chain variable domain of TCR clone 332384 (TRAV29/DV5, TRAJ53)
CAASARGGSNYKLTF

SEQ ID NO: 664768 - protein, 19 aa, Homo sapiens
  CDR3 for beta chain variable domain of TCR clone 332384 (TRBV5-1, TRBJ2-3)
CASSLWLAGGITTTDTQYF

SEQ ID NO: 664769 - protein, 15 aa, Homo sapiens
  CDR3 for alpha chain variable domain of TCR clone 332385 (TRAV20, TRAJ12)
CAVRILMDSSYKLIF

SEQ ID NO: 664770 - protein, 14 aa, Homo sapiens
  CDR3 for beta chain variable domain of TCR clone 332385 (TRBV20-1, TRBJ1-6)
CSARQGRDNSPLHF

SEQ ID NO: 664771 - protein, 14 aa, Homo sapiens
  CDR3 for alpha chain variable domain of TCR clone 332386 (TRAV38-1, TRAJ45)
CASHSGGGADGLTF

SEQ ID NO: 664772 - protein, 16 aa, Homo sapiens
  CDR3 for beta chain variable domain of TCR clone 332386 (TRBV2, TRBJ1-4)
CASNLLQGATNEKLFF

SEQ ID NO: 664773 - protein, 14 aa, Homo sapiens
  CDR3 for alpha chain variable domain of TCR clone 332387 (TRAV4, TRAJ17)
CLVGDMAAGNKLTF

SEQ ID NO: 664774 - protein, 18 aa, Homo sapiens
  CDR3 for beta chain variable domain of TCR clone 332387 (TRBV20-1, TRBJ2-3)
CSASGLAGGPGTTDTQYF

SEQ ID NO: 664775 - protein, 14 aa, Homo sapiens
  CDR3 for alpha chain variable domain of TCR clone 332388 (TRAV12-2, TRAJ17)
CAVLFKAAGNKLTF

SEQ ID NO: 664776 - protein, 11 aa, Homo sapiens
  CDR3 for beta chain variable domain of TCR clone 332388 (TRBV19, TRBJ1-1)
CASSIGSEAFF

SEQ ID NO: 664777 - protein, 14 aa, Homo sapiens
  CDR3 for alpha chain variable domain of TCR clone 332389 (TRAV12-1, TRAJ12)
CVVTKMDSSYKLIF

SEQ ID NO: 664778 - protein, 18 aa, Homo sapiens
  CDR3 for beta chain variable domain of TCR clone 332389 (TRBV20-1, TRBJ2-6)
CSAETTPTHGSGANVLTF

SEQ ID NO: 664779 - protein, 15 aa, Homo sapiens
  CDR3 for alpha chain variable domain of TCR clone 332390 (TRAV3, TRAJ5)
CAVRDRETGRRALTF

SEQ ID NO: 664780 - protein, 15 aa, Homo sapiens
  CDR3 for beta chain variable domain of TCR clone 332390 (TRBV7-8, TRBJ2-1)
CASSLADSLYNEQFL

SEQ ID NO: 664781 - protein, 16 aa, Homo sapiens
  CDR3 for alpha chain variable domain of TCR clone 332391 (TRAV13-1, TRAJ48)
CAASIFGNFGNDKLTF

SEQ ID NO: 664782 - protein, 14 aa, Homo sapiens
  CDR3 for beta chain variable domain of TCR clone 332391 (TRBV7-3, TRBJ1-1)
RASSLKGGNTEAFF

SEQ ID NO: 664783 - protein, 11 aa, Homo sapiens
  CDR3 for alpha chain variable domain of TCR clone 332392 (TRAV21, TRAJ34)
CAVTNTDKHIF

SEQ ID NO: 664784 - protein, 16 aa, Homo sapiens
  CDR3 for beta chain variable domain of TCR clone 332392 (TRBV18, TRBJ1-1)
CASSPGVGGRGGEAFF

SEQ ID NO: 664785 - protein, 15 aa, Homo sapiens
  CDR3 for alpha chain variable domain of TCR clone 332393 (TRAV8-3, TRAJ27)
CAVGPSKTNAGKSTF

SEQ ID NO: 664786 - protein, 15 aa, Homo sapiens
  CDR3 for beta chain variable domain of TCR clone 332393 (TRBV6-5, TRBJ2-1)
CASSYDAGAGNEQFF

SEQ ID NO: 664787 - protein, 14 aa, Homo sapiens
  CDR3 for alpha chain variable domain of TCR clone 332394 (TRAV1-2, TRAJ8)
CAVREDTGFQKLVF

SEQ ID NO: 664788 - protein, 15 aa, Homo sapiens
  CDR3 for beta chain variable domain of TCR clone 332394 (TRBV7-2, TRBJ2-5)
CASSLVSRGGETQYF

SEQ ID NO: 664789 - protein, 12 aa, Homo sapiens
  CDR3 for alpha chain variable domain of TCR clone 332395 (TRAV13-1, TRAJ15)
CAESQAGSALIF

SEQ ID NO: 664790 - protein, 14 aa, Homo sapiens
  CDR3 for beta chain variable domain of TCR clone 332395 (TRBV19, TRBJ2-2)
CASSTLHRSGELFF

SEQ ID NO: 664791 - protein, 12 aa, Homo sapiens
  CDR3 for alpha chain variable domain of TCR clone 332396 (TRAV8-4, TRAJ31)
CAVSDSDARLMF

SEQ ID NO: 664792 - protein, 15 aa, Homo sapiens
  CDR3 for beta chain variable domain of TCR clone 332396 (TRBV19, TRBJ2-7)
CASRFWGQGAGEQYF

SEQ ID NO: 664793 - protein, 15 aa, Homo sapiens
  CDR3 for alpha chain variable domain of TCR clone 332397 (TRAV4, TRAJ39)
CLVGPNNNAGNMLTF

SEQ ID NO: 664794 - protein, 13 aa, Homo sapiens
  CDR3 for beta chain variable domain of TCR clone 332397 (TRBV11-2, TRBJ2-5)
CGSSATGEETQYF

SEQ ID NO: 664795 - protein, 15 aa, Homo sapiens
  CDR3 for alpha chain variable domain of TCR clone 332398 (TRAV2, TRAJ15)
CAVEDRGQAGTALIF

SEQ ID NO: 664796 - protein, 15 aa, Homo sapiens
  CDR3 for beta chain variable domain of TCR clone 332398 (TRBV4-1, TRBJ2-3)
CASRSTRAGTDTQCF

SEQ ID NO: 664797 - protein, 12 aa, Homo sapiens
  CDR3 for alpha chain variable domain of TCR clone 332399 (TRAV35, TRAJ21)
CILKGNFNKFYF

SEQ ID NO: 664798 - protein, 14 aa, Homo sapiens
  CDR3 for beta chain variable domain of TCR clone 332399 (TRBV12-4, TRBJ1-1)
CASSLGTGGTEAFF

SEQ ID NO: 664799 - protein, 15 aa, Homo sapiens
  CDR3 for alpha chain variable domain of TCR clone 332400 (TRAV3, TRAJ3)
CAVRDRDSSASKIIF

SEQ ID NO: 664800 - protein, 16 aa, Homo sapiens
  CDR3 for beta chain variable domain of TCR clone 332400 (TRBV6-1, TRBJ2-5)
CASSETLDRGAETQYF

SEQ ID NO: 664801 - protein, 18 aa, Homo sapiens
  CDR3 for alpha chain variable domain of TCR clone 332401 (TRAV12-3, TRAJ52)
CAMSVGGAGGTSYGKLTF

SEQ ID NO: 664802 - protein, 13 aa, Homo sapiens
  CDR3 for beta chain variable domain of TCR clone 332401 (TRBV19, TRBJ2-7)
CASSKTGTHEQYF

SEQ ID NO: 664803 - protein, 14 aa, Homo sapiens
  CDR3 for alpha chain variable domain of TCR clone 332402 (TRAV8-6, TRAJ5)
CAVSVDTGRRARTF

SEQ ID NO: 664804 - protein, 11 aa, Homo sapiens
  CDR3 for beta chain variable domain of TCR clone 332402 (TRBV7-3, TRBJ2-5)
CASSLSETQYF

SEQ ID NO: 664805 - protein, 16 aa, Homo sapiens
  CDR3 for alpha chain variable domain of TCR clone 332403 (TRAV30, TRAJ24)
CGPEIVDADSWGKFQF

SEQ ID NO: 664806 - protein, 18 aa, Homo sapiens
  CDR3 for beta chain variable domain of TCR clone 332403 (TRBV11-2, TRBJ2-3)
CASSLGGASRGAPNTQYF

SEQ ID NO: 664807 - protein, 11 aa, Homo sapiens
  CDR3 for alpha chain variable domain of TCR clone 332404 (TRAV35, TRAJ30)
FAPGGDDKIIF

SEQ ID NO: 664808 - protein, 13 aa, Homo sapiens
  CDR3 for beta chain variable domain of TCR clone 332404 (TRBV7-6, TRBJ2-1)
CQQLGGGADEQFF

SEQ ID NO: 664809 - protein, 11 aa, Homo sapiens
  CDR3 for alpha chain variable domain of TCR clone 332405 (TRAV23/DV6, TRAJ48)
CAPRWVERLTF

SEQ ID NO: 664810 - protein, 13 aa, Homo sapiens
  CDR3 for beta chain variable domain of TCR clone 332405 (TRBV12-4, TRBJ2-5)
CASSPGTEETQYF

SEQ ID NO: 664811 - protein, 17 aa, Homo sapiens
  CDR3 for alpha chain variable domain of TCR clone 332406 (TRAV13-1, TRAJ52)
CAASSCAGGTRYGKLTF

SEQ ID NO: 664812 - protein, 15 aa, Homo sapiens
  CDR3 for beta chain variable domain of TCR clone 332406 (TRBV2, TRBJ2-1)
CASSELAGSYNEQFF

SEQ ID NO: 664813 - protein, 14 aa, Homo sapiens
  CDR3 for alpha chain variable domain of TCR clone 332407 (TRAV21, TRAJ6)
CAGKLSGGSYIPTF

SEQ ID NO: 664814 - protein, 13 aa, Homo sapiens
  CDR3 for beta chain variable domain of TCR clone 332407 (TRBV19, TRBJ2-7)
CASQSYGAGEQYF

SEQ ID NO: 664815 - protein, 12 aa, Homo sapiens
  CDR3 for alpha chain variable domain of TCR clone 332408 (TRAV3, TRAJ20)
CAVRDPDYKLSF

SEQ ID NO: 664816 - protein, 15 aa, Homo sapiens
  CDR3 for beta chain variable domain of TCR clone 332408 (TRBV9, TRBJ1-6)
CASSVAGTGDSPLYF

SEQ ID NO: 664817 - protein, 14 aa, Homo sapiens
  CDR3 for alpha chain variable domain of TCR clone 332409 (TRAV23/DV6, TRAJ37)
CAASTSTNTGKLIF

SEQ ID NO: 664818 - protein, 13 aa, Homo sapiens
  CDR3 for beta chain variable domain of TCR clone 332409 (TRBV7-7, TRBJ1-1)
CASSLGANTEAFF

SEQ ID NO: 664819 - protein, 14 aa, Homo sapiens
  CDR3 for alpha chain variable domain of TCR clone 332410 (TRAV12-2, TRAJ13)
CAVKKTGGYQKVTF

SEQ ID NO: 664820 - protein, 16 aa, Homo sapiens
  CDR3 for beta chain variable domain of TCR clone 332410 (TRBV2, TRBJ2-5)
CASSETQGVGEETQYF

SEQ ID NO: 664821 - protein, 13 aa, Homo sapiens
  CDR3 for alpha chain variable domain of TCR clone 332411 (TRAV13-2, TRAJ48)
CAEMDFGNEKLTF

SEQ ID NO: 664822 - protein, 14 aa, Homo sapiens
  CDR3 for beta chain variable domain of TCR clone 332411 (TRBV11-2, TRBJ2-1)
CASSLSGPYNEQFF

SEQ ID NO: 664823 - protein, 15 aa, Homo sapiens
  CDR3 for alpha chain variable domain of TCR clone 332412 (TRAV8-4, TRAJ12)
CAVSDRVDSSYKLIF

SEQ ID NO: 664824 - protein, 15 aa, Homo sapiens
  CDR3 for beta chain variable domain of TCR clone 332412 (TRBV11-3, TRBJ2-1)
CASSSAGQTYNEQFF

SEQ ID NO: 664825 - protein, 16 aa, Homo sapiens
  CDR3 for alpha chain variable domain of TCR clone 332413 (TRAV30, TRAJ36)
CGTEMIGGAGANNLFF

SEQ ID NO: 664826 - protein, 12 aa, Homo sapiens
  CDR3 for beta chain variable domain of TCR clone 332413 (TRBV15, TRBJ1-5)
CATSRGDQPQHF

SEQ ID NO: 664827 - protein, 10 aa, Homo sapiens
  CDR3 for alpha chain variable domain of TCR clone 332414 (TRAV30, TRAJ48)
CGIGNEKLTF

SEQ ID NO: 664828 - protein, 16 aa, Homo sapiens
  CDR3 for beta chain variable domain of TCR clone 332414 (TRBV4-3, TRBJ2-1)
CASSPALDRGVNGQFF

SEQ ID NO: 664829 - protein, 11 aa, Homo sapiens
  CDR3 for alpha chain variable domain of TCR clone 332415 (TRAV1-1, TRAJ23)
CAVRQGGKLLF

SEQ ID NO: 664830 - protein, 20 aa, Homo sapiens
  CDR3 for beta chain variable domain of TCR clone 332415 (TRBV7-8, TRBJ2-2)
CASSHLFPGPTIHTTGELFF

SEQ ID NO: 664831 - protein, 19 aa, Homo sapiens
  CDR3 for alpha chain variable domain of TCR clone 332416 (TRAV26-1, TRAJ52)
CIVIAHRNAGGTSYGKLTF

SEQ ID NO: 664832 - protein, 11 aa, Homo sapiens
  CDR3 for beta chain variable domain of TCR clone 332416 (TRBV11-2, TRBJ1-1)
CASSINTEAFF

SEQ ID NO: 664833 - protein, 18 aa, Homo sapiens
  CDR3 for alpha chain variable domain of TCR clone 332417 (TRAV21, TRAJ52)
CAVRPSPAGGTSYGKLTF

SEQ ID NO: 664834 - protein, 17 aa, Homo sapiens
  CDR3 for beta chain variable domain of TCR clone 332417 (TRBV13, TRBJ2-3)
CASSRSGVAGGRNTQYF

SEQ ID NO: 664835 - protein, 17 aa, Homo sapiens
  CDR3 for alpha chain variable domain of TCR clone 332418 (TRAV38-2/DV8, TRAJ23)
CALSRKLIFGQGTELSV

SEQ ID NO: 664836 - protein, 12 aa, Homo sapiens
  CDR3 for beta chain variable domain of TCR clone 332418 (TRBV12-5, TRBJ2-5)
CASGQGVETQYF

SEQ ID NO: 664837 - protein, 15 aa, Homo sapiens
  CDR3 for alpha chain variable domain of TCR clone 332419 (TRAV26-1, TRAJ29)
CIVIVEGSGNTPLVF

SEQ ID NO: 664838 - protein, 14 aa, Homo sapiens
  CDR3 for beta chain variable domain of TCR clone 332419 (TRBV18, TRBJ2-5)
CASSPGVSKETQYF

SEQ ID NO: 664839 - protein, 13 aa, Homo sapiens
  CDR3 for alpha chain variable domain of TCR clone 332420 (TRAV2, TRAJ36)
CAVEPPGLGQTTS

SEQ ID NO: 664840 - protein, 14 aa, Homo sapiens
  CDR3 for beta chain variable domain of TCR clone 332420 (TRBV19, TRBJ2-5)
CASSMTGQQETQYF

SEQ ID NO: 664841 - protein, 10 aa, Homo sapiens
  CDR3 for alpha chain variable domain of TCR clone 332421 (TRAV6, TRAJ20)
CAQDDYKLSF

SEQ ID NO: 664842 - protein, 15 aa, Homo sapiens
  CDR3 for beta chain variable domain of TCR clone 332421 (TRBV4-1, TRBJ2-7)
CASSQQGQGFDEQYF

SEQ ID NO: 664843 - protein, 13 aa, Homo sapiens
  CDR3 for alpha chain variable domain of TCR clone 332422 (TRAV2, TRAJ40)
CAVVTSVTYKYIF

SEQ ID NO: 664844 - protein, 20 aa, Homo sapiens
  CDR3 for beta chain variable domain of TCR clone 332422 (TRBV28, TRBJ2-1)
CASTPIGRSPGLAGGNEQFF

SEQ ID NO: 664845 - protein, 15 aa, Homo sapiens
  CDR3 for alpha chain variable domain of TCR clone 332423 (TRAV8-3, TRAJ27)
CAVGPSKTNAGKSTF

SEQ ID NO: 664846 - protein, 17 aa, Homo sapiens
  CDR3 for beta chain variable domain of TCR clone 332423 (TRBV28, TRBJ2-2)
CASSFVAGGLYGGELFF

SEQ ID NO: 664847 - protein, 14 aa, Homo sapiens
  CDR3 for alpha chain variable domain of TCR clone 332424 (TRAV8-4, TRAJ34)
CAVSDPGDTDKLIF

SEQ ID NO: 664848 - protein, 14 aa, Homo sapiens
  CDR3 for beta chain variable domain of TCR clone 332424 (TRBV7-6, TRBJ2-3)
CASSVAGGTDTQYF

SEQ ID NO: 664849 - protein, 13 aa, Homo sapiens
  CDR3 for alpha chain variable domain of TCR clone 332425 (TRAV2, TRAJ40)
CAVVTSVTYKYIF

SEQ ID NO: 664850 - protein, 15 aa, Homo sapiens
  CDR3 for beta chain variable domain of TCR clone 332425 (TRBV11-3, TRBJ2-3)
CASMKDGREGDTQYF

SEQ ID NO: 664851 - protein, 23 aa, Homo sapiens
  CDR3 for alpha chain variable domain of TCR clone 332426 (TRAV26-1, TRAJ38)
CIADNAGNNHIQNPDPAVYRLRD

SEQ ID NO: 664852 - protein, 13 aa, Homo sapiens
  CDR3 for beta chain variable domain of TCR clone 332426 (TRBV20-1, TRBJ1-1)
CSASGGGNTEAFF

SEQ ID NO: 664853 - protein, 14 aa, Homo sapiens
  CDR3 for alpha chain variable domain of TCR clone 332427 (TRAV1-2, TRAJ8)
CAVREDTGFQQLVF

SEQ ID NO: 664854 - protein, 15 aa, Homo sapiens
  CDR3 for beta chain variable domain of TCR clone 332427 (TRBV7-9, TRBJ1-4)
CASSARTGGNEKLFF

SEQ ID NO: 664855 - protein, 12 aa, Homo sapiens
  CDR3 for alpha chain variable domain of TCR clone 332428 (TRAV3, TRAJ26)
CAVRDYGQNFVF

SEQ ID NO: 664856 - protein, 13 aa, Homo sapiens
  CDR3 for beta chain variable domain of TCR clone 332428 (TRBV7-9, TRBJ1-2)
CASSLKQNYGYTF

SEQ ID NO: 664857 - protein, 14 aa, Homo sapiens
  CDR3 for alpha chain variable domain of TCR clone 332429 (TRAV34, TRAJ44)
CGADGTGTASKLTF

SEQ ID NO: 664858 - protein, 12 aa, Homo sapiens
  CDR3 for beta chain variable domain of TCR clone 332429 (TRBV11-2, TRBJ2-2)
CASSLGGRELFF

SEQ ID NO: 664859 - protein, 12 aa, Homo sapiens
  CDR3 for alpha chain variable domain of TCR clone 332430 (TRAV38-1, TRAJ47)
CAFETYGNKLVF

SEQ ID NO: 664860 - protein, 16 aa, Homo sapiens
  CDR3 for beta chain variable domain of TCR clone 332430 (TRBV7-3, TRBJ2-1)
CASSLEGYRSYNEQFF

SEQ ID NO: 664861 - protein, 16 aa, Homo sapiens
  CDR3 for alpha chain variable domain of TCR clone 332431 (TRAV4, TRAJ18)
CCVLLSGGPTLGRLYF

SEQ ID NO: 664862 - protein, 12 aa, Homo sapiens
  CDR3 for beta chain variable domain of TCR clone 332431 (TRBV6-3, TRBJ2-7)
CASSLTPYEQYF

SEQ ID NO: 664863 - protein, 15 aa, Homo sapiens
  CDR3 for alpha chain variable domain of TCR clone 332432 (TRAV2, TRAJ11)
CAVGGRNSRYSTLTF

SEQ ID NO: 664864 - protein, 14 aa, Homo sapiens
  CDR3 for beta chain variable domain of TCR clone 332432 (TRBV6-1, TRBJ1-3)
CASVQGGGGNTIYF

SEQ ID NO: 664865 - protein, 18 aa, Homo sapiens
  CDR3 for alpha chain variable domain of TCR clone 332433 (TRAV21, TRAJ52)
CAVRPSPAGGTSYGKLTF

SEQ ID NO: 664866 - protein, 17 aa, Homo sapiens
  CDR3 for beta chain variable domain of TCR clone 332433 (TRBV13, TRBJ2-3)
CASSPSRGAGGRNTQYF

SEQ ID NO: 664867 - protein, 15 aa, Homo sapiens
  CDR3 for alpha chain variable domain of TCR clone 332434 (TRAV26-1, TRAJ44)
CIVRPNTGTASKLTF

SEQ ID NO: 664868 - protein, 16 aa, Homo sapiens
  CDR3 for beta chain variable domain of TCR clone 332434 (TRBV7-7, TRBJ2-1)
CASSLASGTSYDEQFF

SEQ ID NO: 664869 - protein, 16 aa, Homo sapiens
  CDR3 for alpha chain variable domain of TCR clone 332435 (TRAV3, TRAJ37)
CAVRGKGPGNTGKLIF

SEQ ID NO: 664870 - protein, 15 aa, Homo sapiens
  CDR3 for beta chain variable domain of TCR clone 332435 (TRBV7-9, TRBJ2-2)
CASGPLDTFPGELFF

SEQ ID NO: 664871 - protein, 18 aa, Homo sapiens
  CDR3 for alpha chain variable domain of TCR clone 332436 (TRAV21, TRAJ52)
CAVRPSPAGGTSYGKLTF

SEQ ID NO: 664872 - protein, 16 aa, Homo sapiens
  CDR3 for beta chain variable domain of TCR clone 332436 (TRBV20-1, TRBJ1-4)
CSAPGQGLLANEKLFF

SEQ ID NO: 664873 - protein, 15 aa, Homo sapiens
  CDR3 for alpha chain variable domain of TCR clone 332437 (TRAV26-1, TRAJ29)
CIVRVDGSGNTPLVI

SEQ ID NO: 664874 - protein, 15 aa, Homo sapiens
  CDR3 for beta chain variable domain of TCR clone 332437 (TRBV7-9, TRBJ1-5)
CASSQGHQPNQPQHF

SEQ ID NO: 664875 - protein, 21 aa, Homo sapiens
  CDR3 for alpha chain variable domain of TCR clone 332438 (TRAV30, TRAJ43)
GLPAQLLRNPLPIIELDDMRF

SEQ ID NO: 664876 - protein, 14 aa, Homo sapiens
  CDR3 for beta chain variable domain of TCR clone 332438 (TRBV27, TRBJ2-1)
CASRHLGGGKEQFF

SEQ ID NO: 664877 - protein, 11 aa, Homo sapiens
  CDR3 for alpha chain variable domain of TCR clone 332439 (TRAV16, TRAJ26)
CALTRWSEFCL

SEQ ID NO: 664878 - protein, 14 aa, Homo sapiens
  CDR3 for beta chain variable domain of TCR clone 332439 (TRBV12-4, TRBJ1-1)
CASSLGTGGTEAFF

SEQ ID NO: 664879 - protein, 15 aa, Homo sapiens
  CDR3 for alpha chain variable domain of TCR clone 332440 (TRAV17, TRAJ22)
CATVAPSGSARQRTF

SEQ ID NO: 664880 - protein, 16 aa, Homo sapiens
  CDR3 for beta chain variable domain of TCR clone 332440 (TRBV10-3, TRBJ2-7)
CAISADFADRPYEQYL

SEQ ID NO: 664881 - protein, 15 aa, Homo sapiens
  CDR3 for alpha chain variable domain of TCR clone 332441 (TRAV8-4, TRAJ54)
CAVSDLQQGAQKLVF

SEQ ID NO: 664882 - protein, 14 aa, Homo sapiens
  CDR3 for beta chain variable domain of TCR clone 332441 (TRBV12-5, TRBJ2-5)
CASGSRTHQETQYF

SEQ ID NO: 664883 - protein, 14 aa, Homo sapiens
  CDR3 for alpha chain variable domain of TCR clone 332442 (TRAV35, TRAJ38)
CAGSNAGNNRNLIW

SEQ ID NO: 664884 - protein, 12 aa, Homo sapiens
  CDR3 for beta chain variable domain of TCR clone 332442 (TRBV19, TRBJ2-7)
CASTDRGYEQYF

SEQ ID NO: 664885 - protein, 13 aa, Homo sapiens
  CDR3 for alpha chain variable domain of TCR clone 332443 (TRAV21, TRAJ15)
CAVANQAGTALIF

SEQ ID NO: 664886 - protein, 14 aa, Homo sapiens
  CDR3 for beta chain variable domain of TCR clone 332443 (TRBV27, TRBJ2-2)
CASSLGAATKELFF

SEQ ID NO: 664887 - protein, 14 aa, Homo sapiens
  CDR3 for alpha chain variable domain of TCR clone 332444 (TRAV12-2, TRAJ40)
CAVKNPSGTYKYIF

SEQ ID NO: 664888 - protein, 17 aa, Homo sapiens
  CDR3 for beta chain variable domain of TCR clone 332444 (TRBV13, TRBJ2-3)
CASSLSRVAGGRNTQYF

SEQ ID NO: 664889 - protein, 17 aa, Homo sapiens
  CDR3 for alpha chain variable domain of TCR clone 332445 (TRAV3, TRAJ28)
CAVREAYSGAGSYQLTF

SEQ ID NO: 664890 - protein, 12 aa, Homo sapiens
  CDR3 for beta chain variable domain of TCR clone 332445 (TRBV7-9, TRBJ2-7)
CASSIKREEQYF

SEQ ID NO: 664891 - protein, 16 aa, Homo sapiens
  CDR3 for alpha chain variable domain of TCR clone 332446 (TRAV8-3, TRAJ13)
CAVGAYPSGGYQKVTF

SEQ ID NO: 664892 - protein, 10 aa, Homo sapiens
  CDR3 for beta chain variable domain of TCR clone 332446 (TRBV19, TRBJ1-5)
CASSIVWGQS

SEQ ID NO: 664893 - protein, 15 aa, Homo sapiens
  CDR3 for alpha chain variable domain of TCR clone 332447 (TRAV13-1, TRAJ28)
CAANQPGAGSYQLTF

SEQ ID NO: 664894 - protein, 12 aa, Homo sapiens
  CDR3 for beta chain variable domain of TCR clone 332447 (TRBV27, TRBJ2-1)
CASRGFYNEQFF

SEQ ID NO: 664895 - protein, 16 aa, Homo sapiens
  CDR3 for alpha chain variable domain of TCR clone 332448 (TRAV14/DV4, TRAJ15)
CALREGPAQAGTALIF

SEQ ID NO: 664896 - protein, 12 aa, Homo sapiens
  CDR3 for beta chain variable domain of TCR clone 332448 (TRBV28, TRBJ2-6)
CAIQAGANVLTF

SEQ ID NO: 664897 - protein, 14 aa, Homo sapiens
  CDR3 for alpha chain variable domain of TCR clone 332449 (TRAV1-2, TRAJ16)
CAVNRFSDGQKLLF

SEQ ID NO: 664898 - protein, 13 aa, Homo sapiens
  CDR3 for beta chain variable domain of TCR clone 332449 (TRBV12-4, TRBJ2-1)
CASSFQGYNEQFF

SEQ ID NO: 664899 - protein, 16 aa, Homo sapiens
  CDR3 for alpha chain variable domain of TCR clone 332450 (TRAV14/DV4, TRAJ53)
CAMREGGGGSNYKLKF

SEQ ID NO: 664900 - protein, 15 aa, Homo sapiens
  CDR3 for beta chain variable domain of TCR clone 332450 (TRBV6-3, TRBJ2-7)
CASSSPGTVFYEQYF

SEQ ID NO: 664901 - protein, 16 aa, Homo sapiens
  CDR3 for alpha chain variable domain of TCR clone 332451 (TRAV26-1, )
CLDIQNPDPAVYQLRD

SEQ ID NO: 664902 - protein, 19 aa, Homo sapiens
  CDR3 for beta chain variable domain of TCR clone 332451 (TRBV19, TRBJ2-5)
CASSIGQVTDFFLGETQYF

SEQ ID NO: 664903 - protein, 13 aa, Homo sapiens
  CDR3 for alpha chain variable domain of TCR clone 332452 (TRAV12-3, TRAJ53)
CATRGGSNYKLTF

SEQ ID NO: 664904 - protein, 15 aa, Homo sapiens
  CDR3 for beta chain variable domain of TCR clone 332452 (TRBV2, TRBJ2-1)
CATQARLVMIGEQFF

SEQ ID NO: 664905 - protein, 16 aa, Homo sapiens
  CDR3 for alpha chain variable domain of TCR clone 332453 (TRAV3, TRAJ37)
CAVRGKGSGNTGKRIF

SEQ ID NO: 664906 - protein, 14 aa, Homo sapiens
  CDR3 for beta chain variable domain of TCR clone 332453 (TRBV7-8, TRBJ2-3)
CASSLEAGTDTQYF

SEQ ID NO: 664907 - protein, 14 aa, Homo sapiens
  CDR3 for alpha chain variable domain of TCR clone 332454 (TRAV2, TRAJ37)
CAGEDQGNTGKLIF

SEQ ID NO: 664908 - protein, 14 aa, Homo sapiens
  CDR3 for beta chain variable domain of TCR clone 332454 (TRBV18, TRBJ2-1)
CASSPQGRFNEQFF

SEQ ID NO: 664909 - protein, 12 aa, Homo sapiens
  CDR3 for alpha chain variable domain of TCR clone 332455 (TRAV23/DV6, TRAJ30)
CAASKGDDKIIF

SEQ ID NO: 664910 - protein, 15 aa, Homo sapiens
  CDR3 for beta chain variable domain of TCR clone 332455 (TRBV7-3, TRBJ2-2)
CASSETGQGTGELFF

SEQ ID NO: 664911 - protein, 13 aa, Homo sapiens
  CDR3 for alpha chain variable domain of TCR clone 332456 (TRAV8-3, TRAJ6)
CAARRGGSYIPTF

SEQ ID NO: 664912 - protein, 14 aa, Homo sapiens
  CDR3 for beta chain variable domain of TCR clone 332456 (TRBV4-1, TRBJ2-3)
RQQQPSGGRDTLYF

SEQ ID NO: 664913 - protein, 14 aa, Homo sapiens
  CDR3 for alpha chain variable domain of TCR clone 332457 (TRAV8-2, TRAJ4)
CVVSPSCGSNKLIF

SEQ ID NO: 664914 - protein, 15 aa, Homo sapiens
  CDR3 for beta chain variable domain of TCR clone 332457 (TRBV4-1, TRBJ1-4)
CASSDTGGTNEKLFF

SEQ ID NO: 664915 - protein, 15 aa, Homo sapiens
  CDR3 for alpha chain variable domain of TCR clone 332458 (TRAV27, TRAJ38)
CAARRNAGNNLKLIW

SEQ ID NO: 664916 - protein, 13 aa, Homo sapiens
  CDR3 for beta chain variable domain of TCR clone 332458 (TRBV12-5, TRBJ2-3)
CASDDRQSDTQYF

SEQ ID NO: 664917 - protein, 15 aa, Homo sapiens
  CDR3 for alpha chain variable domain of TCR clone 332459 (TRAV3, TRAJ17)
CAVSPKEAAGNKLTF

SEQ ID NO: 664918 - protein, 12 aa, Homo sapiens
  CDR3 for beta chain variable domain of TCR clone 332459 (TRBV7-9, TRBJ1-6)
CASSLMTSPLPF

SEQ ID NO: 664919 - protein, 14 aa, Homo sapiens
  CDR3 for alpha chain variable domain of TCR clone 332460 (TRAV23/DV6, TRAJ37)
CAASTSSNTGKLIF

SEQ ID NO: 664920 - protein, 13 aa, Homo sapiens
  CDR3 for beta chain variable domain of TCR clone 332460 (TRBV7-7, TRBJ1-1)
CASSLGANTEAFF

SEQ ID NO: 664921 - protein, 15 aa, Homo sapiens
  CDR3 for alpha chain variable domain of TCR clone 332461 (TRAV8-3, TRAJ32)
CAVGPYGVATNKRIF

SEQ ID NO: 664922 - protein, 14 aa, Homo sapiens
  CDR3 for beta chain variable domain of TCR clone 332461 (TRBV29-1, TRBJ2-2)
CSVLAETNTGELFF

SEQ ID NO: 664923 - protein, 20 aa, Homo sapiens
  CDR3 for alpha chain variable domain of TCR clone 332462 (TRAV26-1, TRAJ42)
CCVLLHRHTYYGGSQRNLIF

SEQ ID NO: 664924 - protein, 16 aa, Homo sapiens
  CDR3 for beta chain variable domain of TCR clone 332462 (TRBV7-3, TRBJ2-2)
CASSLKRGTLSGELFF

SEQ ID NO: 664925 - protein, 15 aa, Homo sapiens
  CDR3 for alpha chain variable domain of TCR clone 332463 (TRAV13-1, TRAJ45)
QVGRYSGGGADGLTF

SEQ ID NO: 664926 - protein, 10 aa, Homo sapiens
  CDR3 for beta chain variable domain of TCR clone 332463 (TRBV7-9, TRBJ2-3)
CASSLDTQYF

SEQ ID NO: 664927 - protein, 13 aa, Homo sapiens
  CDR3 for alpha chain variable domain of TCR clone 332464 (TRAV12-3, TRAJ54)
CAMKVQGAQKLVF

SEQ ID NO: 664928 - protein, 15 aa, Homo sapiens
  CDR3 for beta chain variable domain of TCR clone 332464 (TRBV28, TRBJ2-7)
CASSPTRTGSYEQYF

SEQ ID NO: 664929 - protein, 12 aa, Homo sapiens
  CDR3 for alpha chain variable domain of TCR clone 332465 (TRAV36/DV7, TRAJ54)
CAVVRGAQKLVF

SEQ ID NO: 664930 - protein, 11 aa, Homo sapiens
  CDR3 for beta chain variable domain of TCR clone 332465 (TRBV19, TRBJ1-1)
CASSIGSEAFF

SEQ ID NO: 664931 - protein, 15 aa, Homo sapiens
  CDR3 for alpha chain variable domain of TCR clone 332466 (TRAV26-1, TRAJ48)
CIARWSWFGNEKLTF

SEQ ID NO: 664932 - protein, 12 aa, Homo sapiens
  CDR3 for beta chain variable domain of TCR clone 332466 (TRBV19, TRBJ2-5)
CASRTSEDTQYF

SEQ ID NO: 664933 - protein, 16 aa, Homo sapiens
  CDR3 for alpha chain variable domain of TCR clone 332467 (TRAV17, TRAJ35)
CATAEGGTGFGNVLHC

SEQ ID NO: 664934 - protein, 16 aa, Homo sapiens
  CDR3 for beta chain variable domain of TCR clone 332467 (TRBV6-5, TRBJ2-7)
CASSSDPTSGFYEQYF

SEQ ID NO: 664935 - protein, 13 aa, Homo sapiens
  CDR3 for alpha chain variable domain of TCR clone 332468 (TRAV2, TRAJ15)
CAVASQAGTALIF

SEQ ID NO: 664936 - protein, 15 aa, Homo sapiens
  CDR3 for beta chain variable domain of TCR clone 332468 (TRBV5-7, TRBJ1-2)
CASSLGVAANYGYTF

SEQ ID NO: 664937 - protein, 14 aa, Homo sapiens
  CDR3 for alpha chain variable domain of TCR clone 332469 (TRAV12-1, TRAJ10)
CVVNLAGGGNKLPF

SEQ ID NO: 664938 - protein, 14 aa, Homo sapiens
  CDR3 for beta chain variable domain of TCR clone 332469 (TRBV12-4, TRBJ1-1)
CASSLGTGGTEAFF

SEQ ID NO: 664939 - protein, 14 aa, Homo sapiens
  CDR3 for alpha chain variable domain of TCR clone 332470 (TRAV12-2, TRAJ9)
CAVNMEGGGLKTIF

SEQ ID NO: 664940 - protein, 14 aa, Homo sapiens
  CDR3 for beta chain variable domain of TCR clone 332470 (TRBV2, TRBJ2-5)
CASSEVLAQETQYF

SEQ ID NO: 664941 - protein, 13 aa, Homo sapiens
  CDR3 for alpha chain variable domain of TCR clone 332471 (TRAV8-3, TRAJ28)
CAVGAVGSYQLTF

SEQ ID NO: 664942 - protein, 12 aa, Homo sapiens
  CDR3 for beta chain variable domain of TCR clone 332471 (TRBV7-9, TRBJ1-4)
CASSTDREELFF

SEQ ID NO: 664943 - protein, 15 aa, Homo sapiens
  CDR3 for alpha chain variable domain of TCR clone 332472 (TRAV12-3, TRAJ6)
CAMSATTGGSYIPTF

SEQ ID NO: 664944 - protein, 15 aa, Homo sapiens
  CDR3 for beta chain variable domain of TCR clone 332472 (TRBV7-2, TRBJ2-5)
CASSGILAGEETQYF

SEQ ID NO: 664945 - protein, 14 aa, Homo sapiens
  CDR3 for alpha chain variable domain of TCR clone 332473 (TRAV14/DV4, TRAJ15)
CAMRRDQAGTALIF

SEQ ID NO: 664946 - protein, 14 aa, Homo sapiens
  CDR3 for beta chain variable domain of TCR clone 332473 (TRBV7-9, TRBJ2-2)
CASSLVQDTGELFF

SEQ ID NO: 664947 - protein, 16 aa, Homo sapiens
  CDR3 for alpha chain variable domain of TCR clone 332474 (TRAV30, TRAJ24)
RGTEIVDADSWGKFQF

SEQ ID NO: 664948 - protein, 18 aa, Homo sapiens
  CDR3 for beta chain variable domain of TCR clone 332474 (TRBV7-9, TRBJ2-7)
WASSLTTSGSRTWYEQYF

SEQ ID NO: 664949 - protein, 12 aa, Homo sapiens
  CDR3 for alpha chain variable domain of TCR clone 332475 (TRAV4, TRAJ26)
CLVGDYGQNFVF

SEQ ID NO: 664950 - protein, 15 aa, Homo sapiens
  CDR3 for beta chain variable domain of TCR clone 332475 (TRBV19, TRBJ1-1)
CASTSGQIQNTEAFF

SEQ ID NO: 664951 - protein, 12 aa, Homo sapiens
  CDR3 for alpha chain variable domain of TCR clone 332476 (TRAV13-1, TRAJ27)
CAAHTKCRQINL

SEQ ID NO: 664952 - protein, 14 aa, Homo sapiens
  CDR3 for beta chain variable domain of TCR clone 332476 (TRBV19, TRBJ2-2)
CASSGQGIAGELFF

SEQ ID NO: 664953 - protein, 12 aa, Homo sapiens
  CDR3 for alpha chain variable domain of TCR clone 332477 (TRAV13-1, TRAJ53)
AASGGSNYKLTF

SEQ ID NO: 664954 - protein, 15 aa, Homo sapiens
  CDR3 for beta chain variable domain of TCR clone 332477 (TRBV5-1, TRBJ2-1)
CASSPPRARYNEQFF

SEQ ID NO: 664955 - protein, 12 aa, Homo sapiens
  CDR3 for alpha chain variable domain of TCR clone 332478 (TRAV12-3, TRAJ17)
CAMTLTGNKLTF

SEQ ID NO: 664956 - protein, 15 aa, Homo sapiens
  CDR3 for beta chain variable domain of TCR clone 332478 (TRBV10-2, TRBJ2-6)
CASSEQGTGANVLTY

SEQ ID NO: 664957 - protein, 13 aa, Homo sapiens
  CDR3 for alpha chain variable domain of TCR clone 332479 (TRAV8-3, TRAJ28)
CAVGAVGSYQLTF

SEQ ID NO: 664958 - protein, 16 aa, Homo sapiens
  CDR3 for beta chain variable domain of TCR clone 332479 (TRBV7-2, TRBJ2-7)
CAAGHRGRRTSRTSGR

SEQ ID NO: 664959 - protein, 18 aa, Homo sapiens
  CDR3 for alpha chain variable domain of TCR clone 332480 (TRAV12-3, TRAJ52)
CAMSRTNAGGTSYGKLTF

SEQ ID NO: 664960 - protein, 13 aa, Homo sapiens
  CDR3 for beta chain variable domain of TCR clone 332480 (TRBV12-4, TRBJ2-7)
CASSLSGVYEQYF

SEQ ID NO: 664961 - protein, 12 aa, Homo sapiens
  CDR3 for alpha chain variable domain of TCR clone 332481 (TRAV17, TRAJ5)
CAILTGRRALTF

SEQ ID NO: 664962 - protein, 15 aa, Homo sapiens
  CDR3 for beta chain variable domain of TCR clone 332481 (TRBV6-3, TRBJ2-7)
CASSSPGTVFYEQYF

SEQ ID NO: 664963 - protein, 13 aa, Homo sapiens
  CDR3 for alpha chain variable domain of TCR clone 332482 (TRAV17, TRAJ11)
CATRNSGYSTLTF

SEQ ID NO: 664964 - protein, 19 aa, Homo sapiens
  CDR3 for beta chain variable domain of TCR clone 332482 (TRBV2, TRBJ2-7)
CASSDDETSGRANDYEQYF

SEQ ID NO: 664965 - protein, 14 aa, Homo sapiens
  CDR3 for alpha chain variable domain of TCR clone 332483 (TRAV23/DV6, TRAJ11)
CAASLESGYSTLTF

SEQ ID NO: 664966 - protein, 12 aa, Homo sapiens
  CDR3 for beta chain variable domain of TCR clone 332483 (TRBV4-1, TRBJ2-5)
RQQPTRGETQYF

SEQ ID NO: 664967 - protein, 17 aa, Homo sapiens
  CDR3 for alpha chain variable domain of TCR clone 332484 (TRAV23/DV6, TRAJ57)
CAASSTLSQCGSEKRVF

SEQ ID NO: 664968 - protein, 14 aa, Homo sapiens
  CDR3 for beta chain variable domain of TCR clone 332484 (TRBV7-8, TRBJ2-5)
CASSATGGQETRYF

SEQ ID NO: 664969 - protein, 16 aa, Homo sapiens
  CDR3 for alpha chain variable domain of TCR clone 332485 (TRAV30, TRAJ24)
CGTEIVDADRWGKFQF

SEQ ID NO: 664970 - protein, 14 aa, Homo sapiens
  CDR3 for beta chain variable domain of TCR clone 332485 (TRBV12-5, TRBJ2-5)
CASGSLTHQETQYF

SEQ ID NO: 664971 - protein, 17 aa, Homo sapiens
  CDR3 for alpha chain variable domain of TCR clone 332486 (TRAV3, TRAJ6)
CAVRDGPRAGGSYIPTF

SEQ ID NO: 664972 - protein, 13 aa, Homo sapiens
  CDR3 for beta chain variable domain of TCR clone 332486 (TRBV27, TRBJ2-1)
CASRTLGVGDQFF

SEQ ID NO: 664973 - protein, 13 aa, Homo sapiens
  CDR3 for alpha chain variable domain of TCR clone 332487 (TRAV8-3, TRAJ28)
CDVGAVGSSQLTF

SEQ ID NO: 664974 - protein, 15 aa, Homo sapiens
  CDR3 for beta chain variable domain of TCR clone 332487 (TRBV7-9, TRBJ1-5)
CASSQGHQPNQPQHF

SEQ ID NO: 664975 - protein, 12 aa, Homo sapiens
  CDR3 for alpha chain variable domain of TCR clone 332488 (TRAV12-3, TRAJ17)
CAMTLTGNKLTF

SEQ ID NO: 664976 - protein, 15 aa, Homo sapiens
  CDR3 for beta chain variable domain of TCR clone 332488 (TRBV6-4, TRBJ2-7)
CASSDQGPPNSEQYF

SEQ ID NO: 664977 - protein, 13 aa, Homo sapiens
  CDR3 for alpha chain variable domain of TCR clone 332489 (TRAV1-2, TRAJ30)
CAVRDDRDDKIIF

SEQ ID NO: 664978 - protein, 13 aa, Homo sapiens
  CDR3 for beta chain variable domain of TCR clone 332489 (TRBV7-2, TRBJ2-7)
CASSSPSGSEQYF

SEQ ID NO: 664979 - protein, 14 aa, Homo sapiens
  CDR3 for alpha chain variable domain of TCR clone 332490 (TRAV12-2, TRAJ13)
CAVKKTGGYQKVTF

SEQ ID NO: 664980 - protein, 15 aa, Homo sapiens
  CDR3 for beta chain variable domain of TCR clone 332490 (TRBV27, TRBJ2-1)
YASSNGGGSSNEQFF

SEQ ID NO: 664981 - protein, 16 aa, Homo sapiens
  CDR3 for alpha chain variable domain of TCR clone 332491 (TRAV12-3, TRAJ53)
CAMSPGSGVSNYKLTF

SEQ ID NO: 664982 - protein, 11 aa, Homo sapiens
  CDR3 for beta chain variable domain of TCR clone 332491 (TRBV29-1, TRBJ2-5)
SAADRTGTQYF

SEQ ID NO: 664983 - protein, 11 aa, Homo sapiens
  CDR3 for alpha chain variable domain of TCR clone 332492 (TRAV20, TRAJ40)
CAVGGTYKYIF

SEQ ID NO: 664984 - protein, 15 aa, Homo sapiens
  CDR3 for beta chain variable domain of TCR clone 332492 (TRBV6-3, TRBJ2-2)
CSSSFLATLTGELFF

SEQ ID NO: 664985 - protein, 17 aa, Homo sapiens
  CDR3 for alpha chain variable domain of TCR clone 332493 (TRAV3, TRAJ42)
CAVIDRDYGGSKGNLIF

SEQ ID NO: 664986 - protein, 15 aa, Homo sapiens
  CDR3 for beta chain variable domain of TCR clone 332493 (TRBV6-6, TRBJ2-7)
CASSYSYGGSYEQYF

SEQ ID NO: 664987 - protein, 12 aa, Homo sapiens
  CDR3 for alpha chain variable domain of TCR clone 332494 (TRAV2, TRAJ10)
CASTGGGNKLTF

SEQ ID NO: 664988 - protein, 16 aa, Homo sapiens
  CDR3 for beta chain variable domain of TCR clone 332494 (TRBV20-1, TRBJ1-4)
CSAPGQGLLTNEKLFF

SEQ ID NO: 664989 - protein, 15 aa, Homo sapiens
  CDR3 for alpha chain variable domain of TCR clone 332495 (TRAV1-2, TRAJ39)
CAVRDRDNAGNMLTF

SEQ ID NO: 664990 - protein, 15 aa, Homo sapiens
  CDR3 for beta chain variable domain of TCR clone 332495 (TRBV4-1, TRBJ2-7)
CASSQNTGRLYEQYF

SEQ ID NO: 664991 - protein, 14 aa, Homo sapiens
  CDR3 for alpha chain variable domain of TCR clone 332496 (TRAV12-2, TRAJ13)
CAVKKTGGYQKVTF

SEQ ID NO: 664992 - protein, 12 aa, Homo sapiens
  CDR3 for beta chain variable domain of TCR clone 332496 (TRBV28, TRBJ2-6)
CSIQAGANVLTF

SEQ ID NO: 664993 - protein, 16 aa, Homo sapiens
  CDR3 for alpha chain variable domain of TCR clone 332497 (TRAV23/DV6, TRAJ9)
CAASIGGNTGGFKTIF

SEQ ID NO: 664994 - protein, 16 aa, Homo sapiens
  CDR3 for beta chain variable domain of TCR clone 332497 (TRBV15, TRBJ1-2)
CATSRGPRTGGGGYTF

SEQ ID NO: 664995 - protein, 14 aa, Homo sapiens
  CDR3 for alpha chain variable domain of TCR clone 332498 (TRAV38-1, TRAJ29)
CAFITPSGNTPLVF

SEQ ID NO: 664996 - protein, 14 aa, Homo sapiens
  CDR3 for beta chain variable domain of TCR clone 332498 (TRBV18, TRBJ2-7)
CASSPRGAAYEQYF

SEQ ID NO: 664997 - protein, 12 aa, Homo sapiens
  CDR3 for alpha chain variable domain of TCR clone 332499 (TRAV12-1, TRAJ40)
CVFYSGTYKYIF

SEQ ID NO: 664998 - protein, 18 aa, Homo sapiens
  CDR3 for beta chain variable domain of TCR clone 332499 (TRBV12-4, TRBJ2-2)
CACSSVAGTRGRTGELFF

SEQ ID NO: 664999 - protein, 18 aa, Homo sapiens
  CDR3 for alpha chain variable domain of TCR clone 332500 (TRAV21, TRAJ52)
CAVRPSPAGGTSYGKLTF

SEQ ID NO: 665000 - protein, 14 aa, Homo sapiens
  CDR3 for beta chain variable domain of TCR clone 332500 (TRBV13, TRBJ1-2)
CASSLERGGYGYTF

SEQ ID NO: 665001 - protein, 12 aa, Homo sapiens
  CDR3 for alpha chain variable domain of TCR clone 332501 (TRAV8-3, TRAJ26)
CAGDNYGQNFVF

SEQ ID NO: 665002 - protein, 11 aa, Homo sapiens
  CDR3 for beta chain variable domain of TCR clone 332501 (TRBV19, TRBJ1-1)
CASSIGGEAFF

SEQ ID NO: 665003 - protein, 10 aa, Homo sapiens
  CDR3 for alpha chain variable domain of TCR clone 332502 (TRAV16, TRAJ39)
CSSAGNMLTF

SEQ ID NO: 665004 - protein, 14 aa, Homo sapiens
  CDR3 for beta chain variable domain of TCR clone 332502 (TRBV27, TRBJ1-4)
CASSLDGEWEKLFF

SEQ ID NO: 665005 - protein, 21 aa, Homo sapiens
  CDR3 for alpha chain variable domain of TCR clone 332503 (TRAV26-1, )
CIADNAGNHHIQDPDPAVYQL

SEQ ID NO: 665006 - protein, 13 aa, Homo sapiens
  CDR3 for beta chain variable domain of TCR clone 332503 (TRBV20-1, TRBJ1-1)
CSARGGGNTEAFF

SEQ ID NO: 665007 - protein, 15 aa, Homo sapiens
  CDR3 for alpha chain variable domain of TCR clone 332504 (TRAV38-1, TRAJ38)
CAFMKHAGNNRKLIW

SEQ ID NO: 665008 - protein, 14 aa, Homo sapiens
  CDR3 for beta chain variable domain of TCR clone 332504 (TRBV2, TRBJ1-5)
CASSGTVNNQPQHF

SEQ ID NO: 665009 - protein, 14 aa, Homo sapiens
  CDR3 for alpha chain variable domain of TCR clone 332505 (TRAV12-2, TRAJ11)
CAVNRGSGYSTLTF

SEQ ID NO: 665010 - protein, 15 aa, Homo sapiens
  CDR3 for beta chain variable domain of TCR clone 332505 (TRBV5-1, TRBJ2-7)
CASSLNGGPAREQYF

SEQ ID NO: 665011 - protein, 15 aa, Homo sapiens
  CDR3 for alpha chain variable domain of TCR clone 332506 (TRAV13-1, TRAJ8)
CAASIPNTGFQKLVF

SEQ ID NO: 665012 - protein, 16 aa, Homo sapiens
  CDR3 for beta chain variable domain of TCR clone 332506 (TRBV7-2, TRBJ2-7)
CASSLAGLAGTYEQYF

SEQ ID NO: 665013 - protein, 13 aa, Homo sapiens
  CDR3 for alpha chain variable domain of TCR clone 332507 (TRAV8-3, TRAJ48)
CAVVRCGNEKLTF

SEQ ID NO: 665014 - protein, 16 aa, Homo sapiens
  CDR3 for beta chain variable domain of TCR clone 332507 (TRBV20-1, TRBJ2-5)
CSARDFASGIQETQYF

SEQ ID NO: 665015 - protein, 15 aa, Homo sapiens
  CDR3 for alpha chain variable domain of TCR clone 332508 (TRAV27, TRAJ38)
CAARRNAGNNRKLIG

SEQ ID NO: 665016 - protein, 13 aa, Homo sapiens
  CDR3 for beta chain variable domain of TCR clone 332508 (TRBV12-5, TRBJ2-3)
CARGDRQSDTQYF

SEQ ID NO: 665017 - protein, 13 aa, Homo sapiens
  CDR3 for alpha chain variable domain of TCR clone 332509 (TRAV29/DV5, TRAJ48)
CAACSFGNEKLTF

SEQ ID NO: 665018 - protein, 14 aa, Homo sapiens
  CDR3 for beta chain variable domain of TCR clone 332509 (TRBV3-1, TRBJ2-2)
CASSQDWVQGELSF

SEQ ID NO: 665019 - protein, 15 aa, Homo sapiens
  CDR3 for alpha chain variable domain of TCR clone 332510 (TRAV8-3, TRAJ37)
CAVGAPSSNTGKLIF

SEQ ID NO: 665020 - protein, 12 aa, Homo sapiens
  CDR3 for beta chain variable domain of TCR clone 332510 (TRBV24-1, TRBJ1-1)
CATLYPDTEAFF

SEQ ID NO: 665021 - protein, 13 aa, Homo sapiens
  CDR3 for alpha chain variable domain of TCR clone 332511 (TRAV12-1, TRAJ40)
CVVPTSGPYKHIF

SEQ ID NO: 665022 - protein, 18 aa, Homo sapiens
  CDR3 for beta chain variable domain of TCR clone 332511 (TRBV7-6, TRBJ2-1)
CASSPRTSGMSSYNEQFF

SEQ ID NO: 665023 - protein, 16 aa, Homo sapiens
  CDR3 for alpha chain variable domain of TCR clone 332512 (TRAV13-1, TRAJ3)
CAATGVQQCFQDNLWF

SEQ ID NO: 665024 - protein, 16 aa, Homo sapiens
  CDR3 for beta chain variable domain of TCR clone 332512 (TRBV7-3, TRBJ2-2)
CASSSKRGTLSGELFF

SEQ ID NO: 665025 - protein, 14 aa, Homo sapiens
  CDR3 for alpha chain variable domain of TCR clone 332513 (TRAV1-2, TRAJ16)
CAVNRFSDGQKLLF

SEQ ID NO: 665026 - protein, 12 aa, Homo sapiens
  CDR3 for beta chain variable domain of TCR clone 332513 (TRBV2, TRBJ1-5)
CASTGGDQPQHF

SEQ ID NO: 665027 - protein, 17 aa, Homo sapiens
  CDR3 for alpha chain variable domain of TCR clone 332514 (TRAV35, TRAJ47)
GLLDCRTHTEYGNKLVF

SEQ ID NO: 665028 - protein, 11 aa, Homo sapiens
  CDR3 for beta chain variable domain of TCR clone 332514 (TRBV29-1, TRBJ1-1)
CSVEVGTRTFL

SEQ ID NO: 665029 - protein, 10 aa, Homo sapiens
  CDR3 for alpha chain variable domain of TCR clone 332515 (TRAV29/DV5, TRAJ54)
LIQGAQKLVF

SEQ ID NO: 665030 - protein, 18 aa, Homo sapiens
  CDR3 for beta chain variable domain of TCR clone 332515 (TRBV3-1, TRBJ1-2)
CASSQDVIGWNGDYGYTL

SEQ ID NO: 665031 - protein, 14 aa, Homo sapiens
  CDR3 for alpha chain variable domain of TCR clone 332516 (TRAV20, TRAJ10)
CAVRVEVGGNKLTF

SEQ ID NO: 665032 - protein, 18 aa, Homo sapiens
  CDR3 for beta chain variable domain of TCR clone 332516 (TRBV24-1, TRBJ2-1)
CATSDLMFLGRGVHEQFF

SEQ ID NO: 665033 - protein, 15 aa, Homo sapiens
  CDR3 for alpha chain variable domain of TCR clone 332517 (TRAV3, TRAJ4)
CAQNMFSGGYNKLIF

SEQ ID NO: 665034 - protein, 16 aa, Homo sapiens
  CDR3 for beta chain variable domain of TCR clone 332517 (TRBV3-1, TRBJ1-6)
CASSQEFQGSYAPLHF

SEQ ID NO: 665035 - protein, 11 aa, Homo sapiens
  CDR3 for alpha chain variable domain of TCR clone 332518 (TRAV12-3, TRAJ27)
CAMANAGKSTF

SEQ ID NO: 665036 - protein, 17 aa, Homo sapiens
  CDR3 for beta chain variable domain of TCR clone 332518 (TRBV11-2, TRBJ2-3)
CASSPTGTGGLTDTQYF

SEQ ID NO: 665037 - protein, 14 aa, Homo sapiens
  CDR3 for alpha chain variable domain of TCR clone 332519 (TRAV17, TRAJ17)
CATDHRAAGIKLTF

SEQ ID NO: 665038 - protein, 15 aa, Homo sapiens
  CDR3 for beta chain variable domain of TCR clone 332519 (TRBV19, TRBJ2-4)
CASRGPRRGENIQYF

SEQ ID NO: 665039 - protein, 10 aa, Homo sapiens
  CDR3 for alpha chain variable domain of TCR clone 332520 (TRAV13-1, TRAJ41)
CAASGPRRTQ

SEQ ID NO: 665040 - protein, 21 aa, Homo sapiens
  CDR3 for beta chain variable domain of TCR clone 332520 (TRBV18, TRBJ2-3)
CASSPPAGGPRKYAVFWPRHP

SEQ ID NO: 665041 - protein, 16 aa, Homo sapiens
  CDR3 for alpha chain variable domain of TCR clone 332521 (TRAV12-2, TRAJ10)
CAVNRVLTGGGNKLTF

SEQ ID NO: 665042 - protein, 20 aa, Homo sapiens
  CDR3 for beta chain variable domain of TCR clone 332521 (TRBV11-2, TRBJ2-2)
LRTRPCISVPAALEAGSCFF

SEQ ID NO: 665043 - protein, 17 aa, Homo sapiens
  CDR3 for alpha chain variable domain of TCR clone 332522 (TRAV3, TRAJ6)
CAVRDGPRAGGSYIPTF

SEQ ID NO: 665044 - protein, 14 aa, Homo sapiens
  CDR3 for beta chain variable domain of TCR clone 332522 (TRBV6-1, TRBJ2-2)
CASVEHIESGELFF

SEQ ID NO: 665045 - protein, 14 aa, Homo sapiens
  CDR3 for alpha chain variable domain of TCR clone 332523 (TRAV26-1, TRAJ45)
CIEVTGGGADGLTF

SEQ ID NO: 665046 - protein, 10 aa, Homo sapiens
  CDR3 for beta chain variable domain of TCR clone 332523 (TRBV7-6, TRBJ1-2)
CASSLVADYG

SEQ ID NO: 665047 - protein, 11 aa, Homo sapiens
  CDR3 for alpha chain variable domain of TCR clone 332524 (TRAV12-2, TRAJ39)
CAVNNMLTFGG

SEQ ID NO: 665048 - protein, 16 aa, Homo sapiens
  CDR3 for beta chain variable domain of TCR clone 332524 (TRBV2, TRBJ2-1)
CASRSPAGGKYNEQFF

SEQ ID NO: 665049 - protein, 14 aa, Homo sapiens
  CDR3 for alpha chain variable domain of TCR clone 332525 (TRAV17, TRAJ6)
CATFSSGGSYIPTF

SEQ ID NO: 665050 - protein, 14 aa, Homo sapiens
  CDR3 for beta chain variable domain of TCR clone 332525 (TRBV25-1, TRBJ1-1)
CASTHLGGNTEAFF

SEQ ID NO: 665051 - protein, 14 aa, Homo sapiens
  CDR3 for alpha chain variable domain of TCR clone 332526 (TRAV17, TRAJ56)
CATEDTGANSKLTF

SEQ ID NO: 665052 - protein, 16 aa, Homo sapiens
  CDR3 for beta chain variable domain of TCR clone 332526 (TRBV19, TRBJ2-1)
CASSIKLAGSCNEQFF

SEQ ID NO: 665053 - protein, 11 aa, Homo sapiens
  CDR3 for alpha chain variable domain of TCR clone 332527 (TRAV12-3, TRAJ27)
CAMANAGKSTF

SEQ ID NO: 665054 - protein, 14 aa, Homo sapiens
  CDR3 for beta chain variable domain of TCR clone 332527 (TRBV13, TRBJ2-7)
CASSLKGASYEQYF

SEQ ID NO: 665055 - protein, 13 aa, Homo sapiens
  CDR3 for alpha chain variable domain of TCR clone 332528 (TRAV26-1, TRAJ40)
CIVRVEGTYKYIF

SEQ ID NO: 665056 - protein, 16 aa, Homo sapiens
  CDR3 for beta chain variable domain of TCR clone 332528 (TRBV12-4, TRBJ2-3)
CASSLRLAETTDTQYF

SEQ ID NO: 665057 - protein, 16 aa, Homo sapiens
  CDR3 for alpha chain variable domain of TCR clone 332529 (TRAV8-2, TRAJ45)
CVVSEGTGGGADGLTF

SEQ ID NO: 665058 - protein, 15 aa, Homo sapiens
  CDR3 for beta chain variable domain of TCR clone 332529 (TRBV7-9, TRBJ2-5)
CASSLAAGGLETQYF

SEQ ID NO: 665059 - protein, 11 aa, Homo sapiens
  CDR3 for alpha chain variable domain of TCR clone 332530 (TRAV17, TRAJ49)
CATGAGNQFYF

SEQ ID NO: 665060 - protein, 16 aa, Homo sapiens
  CDR3 for beta chain variable domain of TCR clone 332530 (TRBV7-2, TRBJ1-2)
CASSTTSGTSLGGYTF

SEQ ID NO: 665061 - protein, 13 aa, Homo sapiens
  CDR3 for alpha chain variable domain of TCR clone 332531 (TRAV12-3, TRAJ9)
CAMRNTGGFKTIF

SEQ ID NO: 665062 - protein, 15 aa, Homo sapiens
  CDR3 for beta chain variable domain of TCR clone 332531 (TRBV20-1, TRBJ2-7)
CSAIDRVSGMDEQYF

SEQ ID NO: 665063 - protein, 14 aa, Homo sapiens
  CDR3 for alpha chain variable domain of TCR clone 332532 (TRAV12-2, TRAJ44)
CAVNPAGTASKLTF

SEQ ID NO: 665064 - protein, 16 aa, Homo sapiens
  CDR3 for beta chain variable domain of TCR clone 332532 (TRBV29-1, TRBJ2-7)
CSVEDAEDGTAYEQYF

SEQ ID NO: 665065 - protein, 11 aa, Homo sapiens
  CDR3 for alpha chain variable domain of TCR clone 332533 (TRAV1-1, TRAJ23)
CAVHQGGKLIF

SEQ ID NO: 665066 - protein, 13 aa, Homo sapiens
  CDR3 for beta chain variable domain of TCR clone 332533 (TRBV7-3, TRBJ1-1)
CASSQDWGAEAFF

SEQ ID NO: 665067 - protein, 16 aa, Homo sapiens
  CDR3 for alpha chain variable domain of TCR clone 332534 (TRAV17, TRAJ22)
CSTDAISSGSARQLTF

SEQ ID NO: 665068 - protein, 15 aa, Homo sapiens
  CDR3 for beta chain variable domain of TCR clone 332534 (TRBV5-1, TRBJ2-1)
CASSPPRAPYNEQFF

SEQ ID NO: 665069 - protein, 10 aa, Homo sapiens
  CDR3 for alpha chain variable domain of TCR clone 332535 (TRAV13-1, TRAJ5)
CAASRRALTF

SEQ ID NO: 665070 - protein, 16 aa, Homo sapiens
  CDR3 for beta chain variable domain of TCR clone 332535 (TRBV4-3, TRBJ2-3)
CASSQGGLAGTDTQYV

SEQ ID NO: 665071 - protein, 15 aa, Homo sapiens
  CDR3 for alpha chain variable domain of TCR clone 332536 (TRAV27, TRAJ38)
CAARRNAGNNRKPTW

SEQ ID NO: 665072 - protein, 13 aa, Homo sapiens
  CDR3 for beta chain variable domain of TCR clone 332536 (TRBV12-5, TRBJ2-3)
CASGDRQSDTQYF

SEQ ID NO: 665073 - protein, 14 aa, Homo sapiens
  CDR3 for alpha chain variable domain of TCR clone 332537 (TRAV1-2, TRAJ8)
CAVREDTGFQKLVF

SEQ ID NO: 665074 - protein, 15 aa, Homo sapiens
  CDR3 for beta chain variable domain of TCR clone 332537 (TRBV19, TRBJ2-1)
CASSTGTSSYNEQSF

SEQ ID NO: 665075 - protein, 13 aa, Homo sapiens
  CDR3 for alpha chain variable domain of TCR clone 332538 (TRAV8-4, TRAJ9)
CAVSETGGFKTIF

SEQ ID NO: 665076 - protein, 17 aa, Homo sapiens
  CDR3 for beta chain variable domain of TCR clone 332538 (TRBV13, TRBJ2-3)
CASSLSRVAGGRNTQYF

SEQ ID NO: 665077 - protein, 14 aa, Homo sapiens
  CDR3 for alpha chain variable domain of TCR clone 332539 (TRAV1-2, TRAJ8)
CSVREDTGFQKLVF

SEQ ID NO: 665078 - protein, 18 aa, Homo sapiens
  CDR3 for beta chain variable domain of TCR clone 332539 (TRBV10-2, TRBJ2-2)
CISAPAVHRQADAGELFF

SEQ ID NO: 665079 - protein, 14 aa, Homo sapiens
  CDR3 for alpha chain variable domain of TCR clone 332540 (TRAV8-3, TRAJ30)
FAVGDMNRDDKIIF

SEQ ID NO: 665080 - protein, 17 aa, Homo sapiens
  CDR3 for beta chain variable domain of TCR clone 332540 (TRBV19, TRBJ2-2)
CASSRNPGGFGTGELFL

SEQ ID NO: 665081 - protein, 15 aa, Homo sapiens
  CDR3 for alpha chain variable domain of TCR clone 332541 (TRAV12-2, TRAJ43)
CAFDMRFGAGTRLTV

SEQ ID NO: 665082 - protein, 11 aa, Homo sapiens
  CDR3 for beta chain variable domain of TCR clone 332541 (TRBV12-4, TRBJ2-2)
CASSSAGELFF

SEQ ID NO: 665083 - protein, 11 aa, Homo sapiens
  CDR3 for alpha chain variable domain of TCR clone 332542 (TRAV12-3, TRAJ43)
CAMSVSNDMRF

SEQ ID NO: 665084 - protein, 12 aa, Homo sapiens
  CDR3 for beta chain variable domain of TCR clone 332542 (TRBV12-4, TRBJ1-3)
CASSFSGNTIYF

SEQ ID NO: 665085 - protein, 14 aa, Homo sapiens
  CDR3 for alpha chain variable domain of TCR clone 332543 (TRAV13-1, TRAJ10)
CAAKEPGGGNKLTF

SEQ ID NO: 665086 - protein, 15 aa, Homo sapiens
  CDR3 for beta chain variable domain of TCR clone 332543 (TRBV7-2, TRBJ2-2)
CASRRPGQNTGEPFF

SEQ ID NO: 665087 - protein, 15 aa, Homo sapiens
  CDR3 for alpha chain variable domain of TCR clone 332544 (TRAV12-2, TRAJ53)
CAVNGGGGSTYKLTF

SEQ ID NO: 665088 - protein, 15 aa, Homo sapiens
  CDR3 for beta chain variable domain of TCR clone 332544 (TRBV20-1, TRBJ2-7)
CSARDRVSGMDEQYF

SEQ ID NO: 665089 - protein, 14 aa, Homo sapiens
  CDR3 for alpha chain variable domain of TCR clone 332545 (TRAV2, TRAJ22)
CAVGRGGSARQLTF

SEQ ID NO: 665090 - protein, 13 aa, Homo sapiens
  CDR3 for beta chain variable domain of TCR clone 332545 (TRBV12-4, TRBJ2-5)
CASSPGTEETQYF

SEQ ID NO: 665091 - protein, 11 aa, Homo sapiens
  CDR3 for alpha chain variable domain of TCR clone 332546 (TRAV12-3, TRAJ43)
CAISVSNDMRF

SEQ ID NO: 665092 - protein, 19 aa, Homo sapiens
  CDR3 for beta chain variable domain of TCR clone 332546 (TRBV7-2, TRBJ2-3)
CASSFLSRNWGGGTDTQYF

SEQ ID NO: 665093 - protein, 15 aa, Homo sapiens
  CDR3 for alpha chain variable domain of TCR clone 332547 (TRAV12-3, TRAJ6)
CAMSATSGGSYIPTF

SEQ ID NO: 665094 - protein, 15 aa, Homo sapiens
  CDR3 for beta chain variable domain of TCR clone 332547 (TRBV27, TRBJ2-3)
CASSSLAGVIDTHYF

SEQ ID NO: 665095 - protein, 15 aa, Homo sapiens
  CDR3 for alpha chain variable domain of TCR clone 332548 (TRAV1-2, TRAJ30)
CAVRPHGNGDDKIIF

SEQ ID NO: 665096 - protein, 13 aa, Homo sapiens
  CDR3 for beta chain variable domain of TCR clone 332548 (TRBV4-1, TRBJ2-7)
CASSQGQAYEQYF

SEQ ID NO: 665097 - protein, 14 aa, Homo sapiens
  CDR3 for alpha chain variable domain of TCR clone 332549 (TRAV22, TRAJ9)
CAVEPGTGGFKTIF

SEQ ID NO: 665098 - protein, 15 aa, Homo sapiens
  CDR3 for beta chain variable domain of TCR clone 332549 (TRBV28, TRBJ2-7)
CASSPGGRGFYEQYF

SEQ ID NO: 665099 - protein, 14 aa, Homo sapiens
  CDR3 for alpha chain variable domain of TCR clone 332550 (TRAV26-1, TRAJ45)
CIEVKGGGADGLTF

SEQ ID NO: 665100 - protein, 19 aa, Homo sapiens
  CDR3 for beta chain variable domain of TCR clone 332550 (TRBV19, TRBJ2-2)
CASTRPGLAGGRVTGELFF

SEQ ID NO: 665101 - protein, 10 aa, Homo sapiens
  CDR3 for alpha chain variable domain of TCR clone 332551 (TRAV13-1, TRAJ5)
CAASRRALTF

SEQ ID NO: 665102 - protein, 16 aa, Homo sapiens
  CDR3 for beta chain variable domain of TCR clone 332551 (TRBV4-3, TRBJ2-3)
CASSQGGLAGTDTHYF

SEQ ID NO: 665103 - protein, 16 aa, Homo sapiens
  CDR3 for alpha chain variable domain of TCR clone 332552 (TRAV3, TRAJ37)
SAVRGKGSGNTGKLIF

SEQ ID NO: 665104 - protein, 16 aa, Homo sapiens
  CDR3 for beta chain variable domain of TCR clone 332552 (TRBV12-4, TRBJ1-5)
CASSRPVGGSNQPQHF

SEQ ID NO: 665105 - protein, 19 aa, Homo sapiens
  CDR3 for alpha chain variable domain of TCR clone 332553 (TRAV1-2, TRAJ26)
CLLPLCCERPDNYGQNFVF

SEQ ID NO: 665106 - protein, 15 aa, Homo sapiens
  CDR3 for beta chain variable domain of TCR clone 332553 (TRBV13, TRBJ1-5)
CASSFGQGGVQPQHF

SEQ ID NO: 665107 - protein, 13 aa, Homo sapiens
  CDR3 for alpha chain variable domain of TCR clone 332554 (TRAV26-1, TRAJ34)
CIVRGHNTNKLIF

SEQ ID NO: 665108 - protein, 15 aa, Homo sapiens
  CDR3 for beta chain variable domain of TCR clone 332554 (TRBV4-1, TRBJ2-7)
CASSQEWGPSYEQYF

SEQ ID NO: 665109 - protein, 12 aa, Homo sapiens
  CDR3 for alpha chain variable domain of TCR clone 332555 (TRAV12-3, TRAJ17)
CAMTLTGNKLTF

SEQ ID NO: 665110 - protein, 14 aa, Homo sapiens
  CDR3 for beta chain variable domain of TCR clone 332555 (TRBV12-4, TRBJ1-1)
CASSPIRRTGEAFF

SEQ ID NO: 665111 - protein, 14 aa, Homo sapiens
  CDR3 for alpha chain variable domain of TCR clone 332556 (TRAV23/DV6, TRAJ57)
CAASNQGGSEKLVF

SEQ ID NO: 665112 - protein, 14 aa, Homo sapiens
  CDR3 for beta chain variable domain of TCR clone 332556 (TRBV7-8, TRBJ2-3)
CASSLEAGTDTQYF

SEQ ID NO: 665113 - protein, 13 aa, Homo sapiens
  CDR3 for alpha chain variable domain of TCR clone 332557 (TRAV39, TRAJ48)
CAAVNFGNEKLTF

SEQ ID NO: 665114 - protein, 12 aa, Homo sapiens
  CDR3 for beta chain variable domain of TCR clone 332557 (TRBV5-5, TRBJ2-5)
CASSYFGETRYF

SEQ ID NO: 665115 - protein, 15 aa, Homo sapiens
  CDR3 for alpha chain variable domain of TCR clone 332558 (TRAV8-3, TRAJ45)
CAVASSGGGADGLTF

SEQ ID NO: 665116 - protein, 15 aa, Homo sapiens
  CDR3 for beta chain variable domain of TCR clone 332558 (TRBV7-9, TRBJ2-1)
CASSLGWGRANEQFF

SEQ ID NO: 665117 - protein, 12 aa, Homo sapiens
  CDR3 for alpha chain variable domain of TCR clone 332559 (TRAV8-3, TRAJ40)
CAVTSGTYKYIC

SEQ ID NO: 665118 - protein, 14 aa, Homo sapiens
  CDR3 for beta chain variable domain of TCR clone 332559 (TRBV12-4, TRBJ2-3)
CASSGQGSTDTQYF

SEQ ID NO: 665119 - protein, 15 aa, Homo sapiens
  CDR3 for alpha chain variable domain of TCR clone 332560 (TRAV13-1, TRAJ43)
CAASGGFGAGTRLTV

SEQ ID NO: 665120 - protein, 15 aa, Homo sapiens
  CDR3 for beta chain variable domain of TCR clone 332560 (TRBV5-1, TRBJ1-1)
CASSPTGFDVTEAFF

SEQ ID NO: 665121 - protein, 13 aa, Homo sapiens
  CDR3 for alpha chain variable domain of TCR clone 332561 (TRAV23/DV6, TRAJ9)
CAASTTGGFQTIF

SEQ ID NO: 665122 - protein, 14 aa, Homo sapiens
  CDR3 for beta chain variable domain of TCR clone 332561 (TRBV5-1, TRBJ2-3)
CASRVDGVSDTQYF

SEQ ID NO: 665123 - protein, 17 aa, Homo sapiens
  CDR3 for alpha chain variable domain of TCR clone 332562 (TRAV13-1, TRAJ28)
CAASPPYSGAGSYQLTF

SEQ ID NO: 665124 - protein, 16 aa, Homo sapiens
  CDR3 for beta chain variable domain of TCR clone 332562 (TRBV15, TRBJ2-1)
CATSREGLAGAYEQFF

SEQ ID NO: 665125 - protein, 12 aa, Homo sapiens
  CDR3 for alpha chain variable domain of TCR clone 332563 (TRAV13-1, TRAJ21)
CAAKEGFNKFYF

SEQ ID NO: 665126 - protein, 13 aa, Homo sapiens
  CDR3 for beta chain variable domain of TCR clone 332563 (TRBV7-9, TRBJ2-1)
CGSSLGTVNEQFF

SEQ ID NO: 665127 - protein, 10 aa, Homo sapiens
  CDR3 for alpha chain variable domain of TCR clone 332564 (TRAV12-3, TRAJ34)
CAMSADKLIF

SEQ ID NO: 665128 - protein, 12 aa, Homo sapiens
  CDR3 for beta chain variable domain of TCR clone 332564 (TRBV7-2, TRBJ2-5)
CASSQYQETQYF

SEQ ID NO: 665129 - protein, 12 aa, Homo sapiens
  CDR3 for alpha chain variable domain of TCR clone 332565 (TRAV12-1, TRAJ31)
CVVSLLRARLMF

SEQ ID NO: 665130 - protein, 15 aa, Homo sapiens
  CDR3 for beta chain variable domain of TCR clone 332565 (TRBV3-1, TRBJ1-2)
CASSHAGQGGYGYTF

SEQ ID NO: 665131 - protein, 15 aa, Homo sapiens
  CDR3 for alpha chain variable domain of TCR clone 332566 (TRAV3, TRAJ40)
CAVRDVTSGTYKYIF

SEQ ID NO: 665132 - protein, 14 aa, Homo sapiens
  CDR3 for beta chain variable domain of TCR clone 332566 (TRBV28, TRBJ2-5)
CASSLGDRAETQYL

SEQ ID NO: 665133 - protein, 10 aa, Homo sapiens
  CDR3 for alpha chain variable domain of TCR clone 332567 (TRAV8-3, TRAJ43)
CAVALAGMRF

SEQ ID NO: 665134 - protein, 15 aa, Homo sapiens
  CDR3 for beta chain variable domain of TCR clone 332567 (TRBV7-9, TRBJ1-6)
CAGSSPGRGNSPLHF

SEQ ID NO: 665135 - protein, 14 aa, Homo sapiens
  CDR3 for alpha chain variable domain of TCR clone 332568 (TRAV1-2, TRAJ16)
CAVNRFSDVQKLLF

SEQ ID NO: 665136 - protein, 18 aa, Homo sapiens
  CDR3 for beta chain variable domain of TCR clone 332568 (TRBV20-1, TRBJ2-6)
CSAETTATHGSGANVLTF

SEQ ID NO: 665137 - protein, 14 aa, Homo sapiens
  CDR3 for alpha chain variable domain of TCR clone 332569 (TRAV4, TRAJ6)
CLVGEAGGSDIPTF

SEQ ID NO: 665138 - protein, 17 aa, Homo sapiens
  CDR3 for beta chain variable domain of TCR clone 332569 (TRBV20-1, TRBJ2-1)
CSAPPRLAGTRYNEQFF

SEQ ID NO: 665139 - protein, 11 aa, Homo sapiens
  CDR3 for alpha chain variable domain of TCR clone 332570 (TRAV23/DV6, TRAJ58)
CAARLLRGENS

SEQ ID NO: 665140 - protein, 15 aa, Homo sapiens
  CDR3 for beta chain variable domain of TCR clone 332570 (TRBV9, TRBJ1-6)
CASSVAGTGDSPLHF

SEQ ID NO: 665141 - protein, 16 aa, Homo sapiens
  CDR3 for alpha chain variable domain of TCR clone 332571 (TRAV8-3, TRAJ8)
CAVPGDGNTGFQKLVF

SEQ ID NO: 665142 - protein, 14 aa, Homo sapiens
  CDR3 for beta chain variable domain of TCR clone 332571 (TRBV28, TRBJ1-1)
CASSESGRGTEAFF

SEQ ID NO: 665143 - protein, 15 aa, Homo sapiens
  CDR3 for alpha chain variable domain of TCR clone 332572 (TRAV21, TRAJ52)
CAVRGGGTSYGKLTF

SEQ ID NO: 665144 - protein, 16 aa, Homo sapiens
  CDR3 for beta chain variable domain of TCR clone 332572 (TRBV11-2, TRBJ2-7)
CASSTVTAPKTYEQYF

SEQ ID NO: 665145 - protein, 13 aa, Homo sapiens
  CDR3 for alpha chain variable domain of TCR clone 332573 (TRAV22, TRAJ29)
CAVGGSGKTPLVF

SEQ ID NO: 665146 - protein, 15 aa, Homo sapiens
  CDR3 for beta chain variable domain of TCR clone 332573 (TRBV20-1, TRBJ2-7)
CSARDRVSGMDEQYF

SEQ ID NO: 665147 - protein, 16 aa, Homo sapiens
  CDR3 for alpha chain variable domain of TCR clone 332574 (TRAV8-3, TRAJ10)
CAVGPILTGGGNKLTF

SEQ ID NO: 665148 - protein, 15 aa, Homo sapiens
  CDR3 for beta chain variable domain of TCR clone 332574 (TRBV6-3, TRBJ2-7)
CASSSPGTVFYEQYF

SEQ ID NO: 665149 - protein, 14 aa, Homo sapiens
  CDR3 for alpha chain variable domain of TCR clone 332575 (TRAV17, TRAJ45)
CATASGGGADGLTF

SEQ ID NO: 665150 - protein, 13 aa, Homo sapiens
  CDR3 for beta chain variable domain of TCR clone 332575 (TRBV19, TRBJ1-2)
CASSVPGQDGYTF

SEQ ID NO: 665151 - protein, 15 aa, Homo sapiens
  CDR3 for alpha chain variable domain of TCR clone 332576 (TRAV17, TRAJ54)
CATTRSEQGAQKLVF

SEQ ID NO: 665152 - protein, 16 aa, Homo sapiens
  CDR3 for beta chain variable domain of TCR clone 332576 (TRBV12-4, TRBJ2-3)
CASSLRLAETTDTLYF

SEQ ID NO: 665153 - protein, 15 aa, Homo sapiens
  CDR3 for alpha chain variable domain of TCR clone 332577 (TRAV27, TRAJ28)
CAGAYSGAGSYQLTF

SEQ ID NO: 665154 - protein, 15 aa, Homo sapiens
  CDR3 for beta chain variable domain of TCR clone 332577 (TRBV5-1, TRBJ2-7)
CASSLNGGPAREQYF

SEQ ID NO: 665155 - protein, 12 aa, Homo sapiens
  CDR3 for alpha chain variable domain of TCR clone 332578 (TRAV12-1, TRAJ31)
CVVNRNNARLMF

SEQ ID NO: 665156 - protein, 15 aa, Homo sapiens
  CDR3 for beta chain variable domain of TCR clone 332578 (TRBV10-3, TRBJ2-3)
CAIIEALSSTDTQYF

SEQ ID NO: 665157 - protein, 12 aa, Homo sapiens
  CDR3 for alpha chain variable domain of TCR clone 332579 (TRAV12-2, TRAJ3)
CAGWSSASKIIF

SEQ ID NO: 665158 - protein, 12 aa, Homo sapiens
  CDR3 for beta chain variable domain of TCR clone 332579 (TRBV11-2, TRBJ2-1)
CASSPGSNEQFF

SEQ ID NO: 665159 - protein, 16 aa, Homo sapiens
  CDR3 for alpha chain variable domain of TCR clone 332580 (TRAV30, TRAJ24)
CGTEIVDADSWGNFQF

SEQ ID NO: 665160 - protein, 16 aa, Homo sapiens
  CDR3 for beta chain variable domain of TCR clone 332580 (TRBV2, TRBJ1-3)
CASSGGAGRSGNTIYF

SEQ ID NO: 665161 - protein, 11 aa, Homo sapiens
  CDR3 for alpha chain variable domain of TCR clone 332581 (TRAV8-3, TRAJ31)
CAVDNNARLMF

SEQ ID NO: 665162 - protein, 17 aa, Homo sapiens
  CDR3 for beta chain variable domain of TCR clone 332581 (TRBV24-1, TRBJ2-1)
RATSDVSTGGTYNEQFF

SEQ ID NO: 665163 - protein, 11 aa, Homo sapiens
  CDR3 for alpha chain variable domain of TCR clone 332582 (TRAV3, TRAJ21)
SAVCNFNKFYF

SEQ ID NO: 665164 - protein, 16 aa, Homo sapiens
  CDR3 for beta chain variable domain of TCR clone 332582 (TRBV19, TRBJ2-1)
CASSKAGPSSYNEQFF

SEQ ID NO: 665165 - protein, 12 aa, Homo sapiens
  CDR3 for alpha chain variable domain of TCR clone 332583 (TRAV16, TRAJ27)
CALNTNAGKSTF

SEQ ID NO: 665166 - protein, 12 aa, Homo sapiens
  CDR3 for beta chain variable domain of TCR clone 332583 (TRBV11-2, TRBJ2-2)
CASSLGGGELFF

SEQ ID NO: 665167 - protein, 23 aa, Homo sapiens
  CDR3 for alpha chain variable domain of TCR clone 332584 (TRAV26-2, TRAJ39)
ERCCCGLLHPESAFYNAGNMLTF

SEQ ID NO: 665168 - protein, 14 aa, Homo sapiens
  CDR3 for beta chain variable domain of TCR clone 332584 (TRBV12-4, TRBJ1-4)
CASRMTGRSEKLFF

SEQ ID NO: 665169 - protein, 12 aa, Homo sapiens
  CDR3 for alpha chain variable domain of TCR clone 332585 (TRAV17, TRAJ57)
CATDGGSEKLVF

SEQ ID NO: 665170 - protein, 18 aa, Homo sapiens
  CDR3 for beta chain variable domain of TCR clone 332585 (TRBV4-2, TRBJ2-7)
CASSPGLAGRSLSYEQYF

SEQ ID NO: 665171 - protein, 16 aa, Homo sapiens
  CDR3 for alpha chain variable domain of TCR clone 332586 (TRAV30, TRAJ24)
CGAEIVDADSWGKFKF

SEQ ID NO: 665172 - protein, 14 aa, Homo sapiens
  CDR3 for beta chain variable domain of TCR clone 332586 (TRBV12-5, TRBJ2-5)
CASGSRTHQETQYF

SEQ ID NO: 665173 - protein, 15 aa, Homo sapiens
  CDR3 for alpha chain variable domain of TCR clone 332587 (TRAV26-1, TRAJ23)
CIVRVLNNQGGKLIF

SEQ ID NO: 665174 - protein, 15 aa, Homo sapiens
  CDR3 for beta chain variable domain of TCR clone 332587 (TRBV7-3, TRBJ2-1)
CAGSFGQSNYNEQFF

SEQ ID NO: 665175 - protein, 11 aa, Homo sapiens
  CDR3 for alpha chain variable domain of TCR clone 332588 (TRAV1-1, TRAJ23)
CAVRQGGKLIF

SEQ ID NO: 665176 - protein, 20 aa, Homo sapiens
  CDR3 for beta chain variable domain of TCR clone 332588 (TRBV7-8, TRBJ2-2)
CASSHLFPGPTIHITGELFY

SEQ ID NO: 665177 - protein, 17 aa, Homo sapiens
  CDR3 for alpha chain variable domain of TCR clone 332589 (TRAV4, TRAJ42)
CLVGVLNYGGSQGNLIF

SEQ ID NO: 665178 - protein, 15 aa, Homo sapiens
  CDR3 for beta chain variable domain of TCR clone 332589 (TRBV27, TRBJ2-1)
CASSNGGGSSNEQFF

SEQ ID NO: 665179 - protein, 16 aa, Homo sapiens
  CDR3 for alpha chain variable domain of TCR clone 332590 (TRAV12-2, TRAJ40)
CAVIRGGTSGTYKYIF

SEQ ID NO: 665180 - protein, 13 aa, Homo sapiens
  CDR3 for beta chain variable domain of TCR clone 332590 (TRBV12-4, TRBJ1-2)
CASSSGPNYGYAF

SEQ ID NO: 665181 - protein, 16 aa, Homo sapiens
  CDR3 for alpha chain variable domain of TCR clone 332591 (TRAV3, TRAJ37)
WAVRPHGSGNTGKLIF

SEQ ID NO: 665182 - protein, 16 aa, Homo sapiens
  CDR3 for beta chain variable domain of TCR clone 332591 (TRBV9, TRBJ1-2)
CASSVEEKVSPYGDTF

SEQ ID NO: 665183 - protein, 16 aa, Homo sapiens
  CDR3 for alpha chain variable domain of TCR clone 332592 (TRAV8-3, TRAJ8)
CAVPRDGNTGLQTLVF

SEQ ID NO: 665184 - protein, 14 aa, Homo sapiens
  CDR3 for beta chain variable domain of TCR clone 332592 (TRBV12-4, TRBJ1-1)
CASSLGTGGTEAFF

SEQ ID NO: 665185 - protein, 17 aa, Homo sapiens
  CDR3 for alpha chain variable domain of TCR clone 332593 (TRAV3, TRAJ6)
CAVRDGPRAGGRNIPTF

SEQ ID NO: 665186 - protein, 14 aa, Homo sapiens
  CDR3 for beta chain variable domain of TCR clone 332593 (TRBV7-2, TRBJ2-7)
CASSPKTSFYEQYF

SEQ ID NO: 665187 - protein, 16 aa, Homo sapiens
  CDR3 for alpha chain variable domain of TCR clone 332594 (TRAV26-1, TRAJ52)
CNVSNAGGTSYGKLTF

SEQ ID NO: 665188 - protein, 15 aa, Homo sapiens
  CDR3 for beta chain variable domain of TCR clone 332594 (TRBV7-3, TRBJ2-1)
CASSPTGGGEVEQFF

SEQ ID NO: 665189 - protein, 16 aa, Homo sapiens
  CDR3 for alpha chain variable domain of TCR clone 332595 (TRAV3, TRAJ10)
CAVRDMRAGGGNKLTF

SEQ ID NO: 665190 - protein, 16 aa, Homo sapiens
  CDR3 for beta chain variable domain of TCR clone 332595 (TRBV28, TRBJ2-1)
CASFTSGTGKKGEQFF

SEQ ID NO: 665191 - protein, 13 aa, Homo sapiens
  CDR3 for alpha chain variable domain of TCR clone 332596 (TRAV21, TRAJ20)
CAVGLRVDYKLSF

SEQ ID NO: 665192 - protein, 17 aa, Homo sapiens
  CDR3 for beta chain variable domain of TCR clone 332596 (TRBV6-6, TRBJ1-1)
CTSVSSPRGDVETEAFF

SEQ ID NO: 665193 - protein, 14 aa, Homo sapiens
  CDR3 for alpha chain variable domain of TCR clone 332597 (TRAV13-2, TRAJ16)
CAENNWEDGQKLLF

SEQ ID NO: 665194 - protein, 14 aa, Homo sapiens
  CDR3 for beta chain variable domain of TCR clone 332597 (TRBV7-9, TRBJ1-1)
CSSSLGGLKTEAFF

SEQ ID NO: 665195 - protein, 14 aa, Homo sapiens
  CDR3 for alpha chain variable domain of TCR clone 332598 (TRAV1-2, TRAJ8)
CAVREDTGFQKLVF

SEQ ID NO: 665196 - protein, 16 aa, Homo sapiens
  CDR3 for beta chain variable domain of TCR clone 332598 (TRBV12-5, TRBJ2-5)
CASGPRTSGNQETQFF

SEQ ID NO: 665197 - protein, 16 aa, Homo sapiens
  CDR3 for alpha chain variable domain of TCR clone 332599 (TRAV26-1, TRAJ23)
CIVRVERYNQGGKLIF

SEQ ID NO: 665198 - protein, 14 aa, Homo sapiens
  CDR3 for beta chain variable domain of TCR clone 332599 (TRBV19, TRBJ2-1)
CASPTFVLSGEQFF

SEQ ID NO: 665199 - protein, 15 aa, Homo sapiens
  CDR3 for alpha chain variable domain of TCR clone 332600 (TRAV12-1, TRAJ44)
CVADLPTGTASKLTF

SEQ ID NO: 665200 - protein, 16 aa, Homo sapiens
  CDR3 for beta chain variable domain of TCR clone 332600 (TRBV11-3, TRBJ2-2)
CASSSRTSPGTGELFF

SEQ ID NO: 665201 - protein, 14 aa, Homo sapiens
  CDR3 for alpha chain variable domain of TCR clone 332601 (TRAV1-1, TRAJ28)
CAAPSGAGSYQLTF

SEQ ID NO: 665202 - protein, 15 aa, Homo sapiens
  CDR3 for beta chain variable domain of TCR clone 332601 (TRBV28, TRBJ2-1)
CASSIIAGGRSEQFF

SEQ ID NO: 665203 - protein, 14 aa, Homo sapiens
  CDR3 for alpha chain variable domain of TCR clone 332602 (TRAV12-3, TRAJ9)
CAMSPNTGGFKTIF

SEQ ID NO: 665204 - protein, 11 aa, Homo sapiens
  CDR3 for beta chain variable domain of TCR clone 332602 (TRBV11-3, TRBJ2-1)
CASSLGNEQFV

SEQ ID NO: 665205 - protein, 12 aa, Homo sapiens
  CDR3 for alpha chain variable domain of TCR clone 332603 (TRAV12-2, TRAJ16)
CAVNLDGQKLPF

SEQ ID NO: 665206 - protein, 16 aa, Homo sapiens
  CDR3 for beta chain variable domain of TCR clone 332603 (TRBV7-9, TRBJ2-1)
CASSLVLTGQGNEQFF

SEQ ID NO: 665207 - protein, 13 aa, Homo sapiens
  CDR3 for alpha chain variable domain of TCR clone 332604 (TRAV16, TRAJ37)
CALRGGNTGKLIF

SEQ ID NO: 665208 - protein, 15 aa, Homo sapiens
  CDR3 for beta chain variable domain of TCR clone 332604 (TRBV20-1, TRBJ2-1)
CSARGRGLSYNEQFF

SEQ ID NO: 665209 - protein, 14 aa, Homo sapiens
  CDR3 for alpha chain variable domain of TCR clone 332605 (TRAV13-1, TRAJ35)
CAACKGGFGNVLHC

SEQ ID NO: 665210 - protein, 13 aa, Homo sapiens
  CDR3 for beta chain variable domain of TCR clone 332605 (TRBV7-3, TRBJ2-5)
CASSSDREETQYF

SEQ ID NO: 665211 - protein, 16 aa, Homo sapiens
  CDR3 for alpha chain variable domain of TCR clone 332606 (TRAV26-1, TRAJ23)
CIVRVHPYNQGGKLIF

SEQ ID NO: 665212 - protein, 15 aa, Homo sapiens
  CDR3 for beta chain variable domain of TCR clone 332606 (TRBV5-7, TRBJ2-7)
CASSPHFEGSYEQYF

SEQ ID NO: 665213 - protein, 13 aa, Homo sapiens
  CDR3 for alpha chain variable domain of TCR clone 332607 (TRAV13-1, TRAJ40)
CAASKGGTYKYIF

SEQ ID NO: 665214 - protein, 13 aa, Homo sapiens
  CDR3 for beta chain variable domain of TCR clone 332607 (TRBV7-6, TRBJ1-2)
CASSLVADYGCTF

SEQ ID NO: 665215 - protein, 17 aa, Homo sapiens
  CDR3 for alpha chain variable domain of TCR clone 332608 (TRAV3, TRAJ6)
CAVRDGPRAGGSYIPTL

SEQ ID NO: 665216 - protein, 14 aa, Homo sapiens
  CDR3 for beta chain variable domain of TCR clone 332608 (TRBV7-6, TRBJ2-3)
CASSLGTVTDTQYF

SEQ ID NO: 665217 - protein, 13 aa, Homo sapiens
  CDR3 for alpha chain variable domain of TCR clone 332609 (TRAV27, TRAJ42)
CAGARGSQGNLIF

SEQ ID NO: 665218 - protein, 15 aa, Homo sapiens
  CDR3 for beta chain variable domain of TCR clone 332609 (TRBV10-3, TRBJ2-2)
CASRTDREDTGELFF

SEQ ID NO: 665219 - protein, 13 aa, Homo sapiens
  CDR3 for alpha chain variable domain of TCR clone 332610 (TRAV12-3, TRAJ54)
CAMTLQGAQKLVF

SEQ ID NO: 665220 - protein, 15 aa, Homo sapiens
  CDR3 for beta chain variable domain of TCR clone 332610 (TRBV7-3, TRBJ2-2)
CASSETGQGTGELFF

SEQ ID NO: 665221 - protein, 13 aa, Homo sapiens
  CDR3 for alpha chain variable domain of TCR clone 332611 (TRAV27, TRAJ3)
ASLRGSSASKLIF

SEQ ID NO: 665222 - protein, 15 aa, Homo sapiens
  CDR3 for beta chain variable domain of TCR clone 332611 (TRBV28, TRBJ1-3)
RASSMGWASGNTIYF

SEQ ID NO: 665223 - protein, 15 aa, Homo sapiens
  CDR3 for alpha chain variable domain of TCR clone 332612 (TRAV21, TRAJ57)
CAVRPTQGGSEKLVF

SEQ ID NO: 665224 - protein, 15 aa, Homo sapiens
  CDR3 for beta chain variable domain of TCR clone 332612 (TRBV10-2, TRBJ2-6)
CASSEQGTGANVLTF

SEQ ID NO: 665225 - protein, 12 aa, Homo sapiens
  CDR3 for alpha chain variable domain of TCR clone 332613 (TRAV1-1, TRAJ9)
CAVDTGGFKTIL

SEQ ID NO: 665226 - protein, 14 aa, Homo sapiens
  CDR3 for beta chain variable domain of TCR clone 332613 (TRBV7-8, TRBJ2-5)
CASSATGGQETQYF

SEQ ID NO: 665227 - protein, 13 aa, Homo sapiens
  CDR3 for alpha chain variable domain of TCR clone 332614 (TRAV20, TRAJ37)
CAGCSSNTGKLIF

SEQ ID NO: 665228 - protein, 12 aa, Homo sapiens
  CDR3 for beta chain variable domain of TCR clone 332614 (TRBV7-9, TRBJ1-5)
CASSPQGQPQHF

SEQ ID NO: 665229 - protein, 15 aa, Homo sapiens
  CDR3 for alpha chain variable domain of TCR clone 332615 (TRAV26-2, TRAJ50)
CILRDEETSYDKVIF

SEQ ID NO: 665230 - protein, 14 aa, Homo sapiens
  CDR3 for beta chain variable domain of TCR clone 332615 (TRBV7-9, TRBJ2-5)
CASSLDTAQETQYF

SEQ ID NO: 665231 - protein, 20 aa, Homo sapiens
  CDR3 for alpha chain variable domain of TCR clone 332616 (TRAV12-3, TRAJ41)
SLFIRDSQPSDSATPEALNF

SEQ ID NO: 665232 - protein, 11 aa, Homo sapiens
  CDR3 for beta chain variable domain of TCR clone 332616 (TRBV11-2, TRBJ2-2)
CASSLPGELFF

SEQ ID NO: 665233 - protein, 14 aa, Homo sapiens
  CDR3 for alpha chain variable domain of TCR clone 332617 (TRAV17, TRAJ29)
CATDSNSGSTPLVF

SEQ ID NO: 665234 - protein, 14 aa, Homo sapiens
  CDR3 for beta chain variable domain of TCR clone 332617 (TRBV7-6, TRBJ2-3)
CASNSGGDANTQHF

SEQ ID NO: 665235 - protein, 10 aa, Homo sapiens
  CDR3 for alpha chain variable domain of TCR clone 332618 (TRAV8-4, TRAJ43)
CAVSADDMRF

SEQ ID NO: 665236 - protein, 18 aa, Homo sapiens
  CDR3 for beta chain variable domain of TCR clone 332618 (TRBV7-3, TRBJ2-1)
CASSLTDPRVAAYNEQFF

SEQ ID NO: 665237 - protein, 12 aa, Homo sapiens
  CDR3 for alpha chain variable domain of TCR clone 332619 (TRAV20, TRAJ39)
CAVGNAGNMLTF

SEQ ID NO: 665238 - protein, 12 aa, Homo sapiens
  CDR3 for beta chain variable domain of TCR clone 332619 (TRBV7-9, TRBJ2-7)
CASSFGSYEQYF

SEQ ID NO: 665239 - protein, 12 aa, Homo sapiens
  CDR3 for alpha chain variable domain of TCR clone 332620 (TRAV1-2, TRAJ24)
CAVGGSWGKFQF

SEQ ID NO: 665240 - protein, 17 aa, Homo sapiens
  CDR3 for beta chain variable domain of TCR clone 332620 (TRBV6-1, TRBJ2-7)
CASSEGVGNTTSSTSGR

SEQ ID NO: 665241 - protein, 15 aa, Homo sapiens
  CDR3 for alpha chain variable domain of TCR clone 332621 (TRAV17, TRAJ57)
CATGPSQGGSEKLVF

SEQ ID NO: 665242 - protein, 13 aa, Homo sapiens
  CDR3 for beta chain variable domain of TCR clone 332621 (TRBV5-4, TRBJ1-1)
CASSVDLGTEAFF

SEQ ID NO: 665243 - protein, 15 aa, Homo sapiens
  CDR3 for alpha chain variable domain of TCR clone 332622 (TRAV26-1, TRAJ15)
CIVRAAKQAGTALIF

SEQ ID NO: 665244 - protein, 16 aa, Homo sapiens
  CDR3 for beta chain variable domain of TCR clone 332622 (TRBV7-3, TRBJ2-2)
CASSLKRGTLSGELFF

SEQ ID NO: 665245 - protein, 13 aa, Homo sapiens
  CDR3 for alpha chain variable domain of TCR clone 332623 (TRAV3, TRAJ41)
CAVSSNSGYVLNF

SEQ ID NO: 665246 - protein, 13 aa, Homo sapiens
  CDR3 for beta chain variable domain of TCR clone 332623 (TRBV20-1, TRBJ2-2)
CSALSGGAGELFF

SEQ ID NO: 665247 - protein, 13 aa, Homo sapiens
  CDR3 for alpha chain variable domain of TCR clone 332624 (TRAV26-2, TRAJ37)
CIRGSSNTGKLIF

SEQ ID NO: 665248 - protein, 12 aa, Homo sapiens
  CDR3 for beta chain variable domain of TCR clone 332624 (TRBV7-2, TRBJ2-7)
CASSLGDREQYF

SEQ ID NO: 665249 - protein, 13 aa, Homo sapiens
  CDR3 for alpha chain variable domain of TCR clone 332625 (TRAV27, TRAJ49)
CAPRPYTGNQFYF

SEQ ID NO: 665250 - protein, 20 aa, Homo sapiens
  CDR3 for beta chain variable domain of TCR clone 332625 (TRBV11-2, TRBJ2-2)
LRTRPCISVPAALEAGSCFF

SEQ ID NO: 665251 - protein, 11 aa, Homo sapiens
  CDR3 for alpha chain variable domain of TCR clone 332626 (TRAV29/DV5, TRAJ31)
CAASYRDRPMF

SEQ ID NO: 665252 - protein, 19 aa, Homo sapiens
  CDR3 for beta chain variable domain of TCR clone 332626 (TRBV19, TRBJ2-5)
CASSIGQVTDFFLGETQYF

SEQ ID NO: 665253 - protein, 13 aa, Homo sapiens
  CDR3 for alpha chain variable domain of TCR clone 332627 (TRAV38-1, TRAJ42)
CARSGGSQGNHIF

SEQ ID NO: 665254 - protein, 17 aa, Homo sapiens
  CDR3 for beta chain variable domain of TCR clone 332627 (TRBV20-1, TRBJ2-1)
CSARDPLAGVWDNEQFF

SEQ ID NO: 665255 - protein, 16 aa, Homo sapiens
  CDR3 for alpha chain variable domain of TCR clone 332628 (TRAV2, TRAJ4)
CAVEDRFSGGYNKLIF

SEQ ID NO: 665256 - protein, 15 aa, Homo sapiens
  CDR3 for beta chain variable domain of TCR clone 332628 (TRBV7-9, TRBJ1-6)
CASSSPGRGNSPLHF

SEQ ID NO: 665257 - protein, 13 aa, Homo sapiens
  CDR3 for alpha chain variable domain of TCR clone 332629 (TRAV39, TRAJ33)
CAANPDSNYQLIW

SEQ ID NO: 665258 - protein, 15 aa, Homo sapiens
  CDR3 for beta chain variable domain of TCR clone 332629 (TRBV7-3, TRBJ2-2)
CASKANGANTGELFF

SEQ ID NO: 665259 - protein, 14 aa, Homo sapiens
  CDR3 for alpha chain variable domain of TCR clone 332630 (TRAV1-2, TRAJ16)
CSVNRFSDGQKLLF

SEQ ID NO: 665260 - protein, 14 aa, Homo sapiens
  CDR3 for beta chain variable domain of TCR clone 332630 (TRBV7-9, TRBJ2-3)
CASSLEDGTDTQYF

SEQ ID NO: 665261 - protein, 13 aa, Homo sapiens
  CDR3 for alpha chain variable domain of TCR clone 332631 (TRAV12-3, TRAJ47)
CAMKKEYGNKLVF

SEQ ID NO: 665262 - protein, 16 aa, Homo sapiens
  CDR3 for beta chain variable domain of TCR clone 332631 (TRBV5-4, TRBJ2-3)
CASSFGAGDGTDTQYF

SEQ ID NO: 665263 - protein, 14 aa, Homo sapiens
  CDR3 for alpha chain variable domain of TCR clone 332632 (TRAV6, TRAJ8)
CALERGTGFQKLVC

SEQ ID NO: 665264 - protein, 15 aa, Homo sapiens
  CDR3 for beta chain variable domain of TCR clone 332632 (TRBV7-9, TRBJ2-7)
CASSLALAEAYEQYF

SEQ ID NO: 665265 - protein, 16 aa, Homo sapiens
  CDR3 for alpha chain variable domain of TCR clone 332633 (TRAV38-1, TRAJ56)
CAFMKRQTGANSKLTF

SEQ ID NO: 665266 - protein, 12 aa, Homo sapiens
  CDR3 for beta chain variable domain of TCR clone 332633 (TRBV20-1, TRBJ2-1)
CSAQYAYNEQFF

SEQ ID NO: 665267 - protein, 15 aa, Homo sapiens
  CDR3 for alpha chain variable domain of TCR clone 332634 (TRAV21, TRAJ53)
CATLNSGGSNYKLTF

SEQ ID NO: 665268 - protein, 13 aa, Homo sapiens
  CDR3 for beta chain variable domain of TCR clone 332634 (TRBV10-2, TRBJ2-5)
CASGRLARETQYF

SEQ ID NO: 665269 - protein, 13 aa, Homo sapiens
  CDR3 for alpha chain variable domain of TCR clone 332635 (TRAV22, TRAJ29)
CAVGGSGNTPLVF

SEQ ID NO: 665270 - protein, 13 aa, Homo sapiens
  CDR3 for beta chain variable domain of TCR clone 332635 (TRBV4-2, TRBJ1-1)
CASSQAGNTEAYF

SEQ ID NO: 665271 - protein, 13 aa, Homo sapiens
  CDR3 for alpha chain variable domain of TCR clone 332636 (TRAV12-2, TRAJ42)
CAVKRGSQGNLIF

SEQ ID NO: 665272 - protein, 15 aa, Homo sapiens
  CDR3 for beta chain variable domain of TCR clone 332636 (TRBV27, TRBJ2-5)
CASSLYPRGGETQYF

SEQ ID NO: 665273 - protein, 11 aa, Homo sapiens
  CDR3 for alpha chain variable domain of TCR clone 332637 (TRAV13-1, TRAJ15)
CAATPGTALIF

SEQ ID NO: 665274 - protein, 11 aa, Homo sapiens
  CDR3 for beta chain variable domain of TCR clone 332637 (TRBV6-1, TRBJ2-1)
CASISSNEQLF

SEQ ID NO: 665275 - protein, 11 aa, Homo sapiens
  CDR3 for alpha chain variable domain of TCR clone 332638 (TRAV2, TRAJ13)
CASGGYQKVTF

SEQ ID NO: 665276 - protein, 16 aa, Homo sapiens
  CDR3 for beta chain variable domain of TCR clone 332638 (TRBV11-2, TRBJ2-7)
CASSPLAGGPRYEQYF

SEQ ID NO: 665277 - protein, 15 aa, Homo sapiens
  CDR3 for alpha chain variable domain of TCR clone 332639 (TRAV29/DV5, TRAJ40)
CAASEGTSGTYKYIF

SEQ ID NO: 665278 - protein, 15 aa, Homo sapiens
  CDR3 for beta chain variable domain of TCR clone 332639 (TRBV27, TRBJ1-5)
CASKIQGAGNQTQHF

SEQ ID NO: 665279 - protein, 14 aa, Homo sapiens
  CDR3 for alpha chain variable domain of TCR clone 332640 (TRAV12-1, TRAJ23)
CVVVVDNQGGKLIF

SEQ ID NO: 665280 - protein, 15 aa, Homo sapiens
  CDR3 for beta chain variable domain of TCR clone 332640 (TRBV20-1, TRBJ1-5)
CSAKPPGQGPQPQHF

SEQ ID NO: 665281 - protein, 12 aa, Homo sapiens
  CDR3 for alpha chain variable domain of TCR clone 332641 (TRAV12-3, TRAJ17)
CAMTLTGNKLTF

SEQ ID NO: 665282 - protein, 16 aa, Homo sapiens
  CDR3 for beta chain variable domain of TCR clone 332641 (TRBV7-2, TRBJ1-4)
CASSLAPERRDEKLFF

SEQ ID NO: 665283 - protein, 12 aa, Homo sapiens
  CDR3 for alpha chain variable domain of TCR clone 332642 (TRAV21, TRAJ13)
PGPSGGYQNVTF

SEQ ID NO: 665284 - protein, 14 aa, Homo sapiens
  CDR3 for beta chain variable domain of TCR clone 332642 (TRBV20-1, TRBJ2-7)
CSAKDRKGAYEQYF

SEQ ID NO: 665285 - protein, 13 aa, Homo sapiens
  CDR3 for alpha chain variable domain of TCR clone 332643 (TRAV13-1, TRAJ11)
CAEVLAGYSTLTF

SEQ ID NO: 665286 - protein, 17 aa, Homo sapiens
  CDR3 for beta chain variable domain of TCR clone 332643 (TRBV25-1, TRBJ2-7)
CASSDARVVFSSYEQYF

SEQ ID NO: 665287 - protein, 12 aa, Homo sapiens
  CDR3 for alpha chain variable domain of TCR clone 332644 (TRAV23/DV6, TRAJ30)
CAASKGDDKIIV

SEQ ID NO: 665288 - protein, 15 aa, Homo sapiens
  CDR3 for beta chain variable domain of TCR clone 332644 (TRBV29-1, TRBJ2-1)
CSGRDRKSSYNEQFF

SEQ ID NO: 665289 - protein, 17 aa, Homo sapiens
  CDR3 for alpha chain variable domain of TCR clone 332645 (TRAV21, TRAJ52)
AASQPGDSAPYLFAVTN

SEQ ID NO: 665290 - protein, 13 aa, Homo sapiens
  CDR3 for beta chain variable domain of TCR clone 332645 (TRBV20-1, TRBJ2-3)
CSARLAGTDTQYF

SEQ ID NO: 665291 - protein, 14 aa, Homo sapiens
  CDR3 for alpha chain variable domain of TCR clone 332646 (TRAV12-2, TRAJ13)
CAVKKTGGHQKVTF

SEQ ID NO: 665292 - protein, 15 aa, Homo sapiens
  CDR3 for beta chain variable domain of TCR clone 332646 (TRBV5-1, TRBJ2-3)
CASSVTSGSTDTQYF

SEQ ID NO: 665293 - protein, 19 aa, Homo sapiens
  CDR3 for alpha chain variable domain of TCR clone 332647 (TRAV4, TRAJ5)
CTTASWGRTMDTGRRALTF

SEQ ID NO: 665294 - protein, 17 aa, Homo sapiens
  CDR3 for beta chain variable domain of TCR clone 332647 (TRBV11-2, TRBJ2-1)
CASSLYPPGVEYNEQFF

SEQ ID NO: 665295 - protein, 12 aa, Homo sapiens
  CDR3 for alpha chain variable domain of TCR clone 332648 (TRAV21, TRAJ11)
CAATSGYSTLTF

SEQ ID NO: 665296 - protein, 14 aa, Homo sapiens
  CDR3 for beta chain variable domain of TCR clone 332648 (TRBV20-1, TRBJ2-7)
CSAPELAGAGEQFF

SEQ ID NO: 665297 - protein, 18 aa, Homo sapiens
  CDR3 for alpha chain variable domain of TCR clone 332649 (TRAV29/DV5, TRAJ52)
CAAGFRGAGGTSYGQLTF

SEQ ID NO: 665298 - protein, 16 aa, Homo sapiens
  CDR3 for beta chain variable domain of TCR clone 332649 (TRBV7-3, TRBJ2-2)
CASRLKRGTLSGELFF

SEQ ID NO: 665299 - protein, 15 aa, Homo sapiens
  CDR3 for alpha chain variable domain of TCR clone 332650 (TRAV12-3, TRAJ11)
CAMSEENSGYSTLTF

SEQ ID NO: 665300 - protein, 13 aa, Homo sapiens
  CDR3 for beta chain variable domain of TCR clone 332650 (TRBV4-1, TRBJ2-2)
CASSQENTGELFF

SEQ ID NO: 665301 - protein, 15 aa, Homo sapiens
  CDR3 for alpha chain variable domain of TCR clone 332651 (TRAV8-6, TRAJ10)
CAVSDQAGGGNTLTF

SEQ ID NO: 665302 - protein, 13 aa, Homo sapiens
  CDR3 for beta chain variable domain of TCR clone 332651 (TRBV10-2, TRBJ2-3)
CASSESGDHTQYF

SEQ ID NO: 665303 - protein, 15 aa, Homo sapiens
  CDR3 for alpha chain variable domain of TCR clone 332652 (TRAV3, TRAJ40)
CAVRDVTSGTYKYIF

SEQ ID NO: 665304 - protein, 14 aa, Homo sapiens
  CDR3 for beta chain variable domain of TCR clone 332652 (TRBV7-2, TRBJ2-7)
CASSPKTSFYEQYF

SEQ ID NO: 665305 - protein, 14 aa, Homo sapiens
  CDR3 for alpha chain variable domain of TCR clone 332653 (TRAV9-2, TRAJ39)
CALYIYSAGNMLTF

SEQ ID NO: 665306 - protein, 15 aa, Homo sapiens
  CDR3 for beta chain variable domain of TCR clone 332653 (TRBV28, TRBJ2-1)
CASSIIAGGRSEQFF

SEQ ID NO: 665307 - protein, 12 aa, Homo sapiens
  CDR3 for alpha chain variable domain of TCR clone 332654 (TRAV21, TRAJ36)
CAVNTGANNLFF

SEQ ID NO: 665308 - protein, 14 aa, Homo sapiens
  CDR3 for beta chain variable domain of TCR clone 332654 (TRBV28, TRBJ2-1)
FASSRPGLRDEQFF

SEQ ID NO: 665309 - protein, 12 aa, Homo sapiens
  CDR3 for alpha chain variable domain of TCR clone 332655 (TRAV17, TRAJ10)
CANTGGGNKLTF

SEQ ID NO: 665310 - protein, 13 aa, Homo sapiens
  CDR3 for beta chain variable domain of TCR clone 332655 (TRBV5-7, TRBJ2-3)
CASSLGRTDTQYF

SEQ ID NO: 665311 - protein, 11 aa, Homo sapiens
  CDR3 for alpha chain variable domain of TCR clone 332656 (TRAV12-3, TRAJ6)
CAMSGSYIPTF

SEQ ID NO: 665312 - protein, 15 aa, Homo sapiens
  CDR3 for beta chain variable domain of TCR clone 332656 (TRBV19, TRBJ1-5)
CASSIVWADNQPQHF

SEQ ID NO: 665313 - protein, 14 aa, Homo sapiens
  CDR3 for alpha chain variable domain of TCR clone 332657 (TRAV12-3, TRAJ42)
CAMNYGGSQGNLIF

SEQ ID NO: 665314 - protein, 14 aa, Homo sapiens
  CDR3 for beta chain variable domain of TCR clone 332657 (TRBV7-2, TRBJ2-5)
CASSFTQGQENQYF

SEQ ID NO: 665315 - protein, 14 aa, Homo sapiens
  CDR3 for alpha chain variable domain of TCR clone 332658 (TRAV12-1, TRAJ23)
CVVIVYNQGGKLIF

SEQ ID NO: 665316 - protein, 15 aa, Homo sapiens
  CDR3 for beta chain variable domain of TCR clone 332658 (TRBV20-1, TRBJ1-5)
WSAKPPGQGPQPQHF

SEQ ID NO: 665317 - protein, 10 aa, Homo sapiens
  CDR3 for alpha chain variable domain of TCR clone 332659 (TRAV30, TRAJ16)
CGPGGQKLLF

SEQ ID NO: 665318 - protein, 14 aa, Homo sapiens
  CDR3 for beta chain variable domain of TCR clone 332659 (TRBV6-1, TRBJ1-2)
CASSTGWPPTGYTF

SEQ ID NO: 665319 - protein, 14 aa, Homo sapiens
  CDR3 for alpha chain variable domain of TCR clone 332660 (TRAV12-2, TRAJ9)
CAVNALEGGFKTIF

SEQ ID NO: 665320 - protein, 15 aa, Homo sapiens
  CDR3 for beta chain variable domain of TCR clone 332660 (TRBV27, TRBJ2-1)
CASSNGGGSSNEQFF

SEQ ID NO: 665321 - protein, 11 aa, Homo sapiens
  CDR3 for alpha chain variable domain of TCR clone 332661 (TRAV1-1, TRAJ23)
CAVRQGGKLIF

SEQ ID NO: 665322 - protein, 13 aa, Homo sapiens
  CDR3 for beta chain variable domain of TCR clone 332661 (TRBV3-1, TRBJ2-2)
CASLARGSGELFF

SEQ ID NO: 665323 - protein, 14 aa, Homo sapiens
  CDR3 for alpha chain variable domain of TCR clone 332662 (TRAV8-3, TRAJ7)
WAAIELYGNNRLAF

SEQ ID NO: 665324 - protein, 15 aa, Homo sapiens
  CDR3 for beta chain variable domain of TCR clone 332662 (TRBV3-1, TRBJ2-1)
CASSTGDTNYNEQFF

SEQ ID NO: 665325 - protein, 16 aa, Homo sapiens
  CDR3 for alpha chain variable domain of TCR clone 332663 (TRAV12-1, TRAJ48)
CVVNMVSNFGIEKLTF

SEQ ID NO: 665326 - protein, 18 aa, Homo sapiens
  CDR3 for beta chain variable domain of TCR clone 332663 (TRBV11-2, TRBJ2-6)
CASSLNPFLGTGANVLTF

SEQ ID NO: 665327 - protein, 12 aa, Homo sapiens
  CDR3 for alpha chain variable domain of TCR clone 332664 (TRAV1-2, TRAJ20)
CAVISNDYKLSF

SEQ ID NO: 665328 - protein, 14 aa, Homo sapiens
  CDR3 for beta chain variable domain of TCR clone 332664 (TRBV2, TRBJ2-3)
CASSEGQNTDTQYF

SEQ ID NO: 665329 - protein, 13 aa, Homo sapiens
  CDR3 for alpha chain variable domain of TCR clone 332665 (TRAV27, TRAJ40)
CAGPPSGTYKYIF

SEQ ID NO: 665330 - protein, 14 aa, Homo sapiens
  CDR3 for beta chain variable domain of TCR clone 332665 (TRBV23-1, TRBJ2-5)
CASSFLRSQETQYC

SEQ ID NO: 665331 - protein, 14 aa, Homo sapiens
  CDR3 for alpha chain variable domain of TCR clone 332666 (TRAV8-3, TRAJ4)
CAVGAAGGYNKLIF

SEQ ID NO: 665332 - protein, 14 aa, Homo sapiens
  CDR3 for beta chain variable domain of TCR clone 332666 (TRBV12-5, TRBJ2-5)
CASGSRTHQETQCF

SEQ ID NO: 665333 - protein, 12 aa, Homo sapiens
  CDR3 for alpha chain variable domain of TCR clone 332667 (TRAV20, TRAJ39)
CAVGNAGNMLTF

SEQ ID NO: 665334 - protein, 12 aa, Homo sapiens
  CDR3 for beta chain variable domain of TCR clone 332667 (TRBV7-2, TRBJ2-2)
CASSLPPGMLFF

SEQ ID NO: 665335 - protein, 14 aa, Homo sapiens
  CDR3 for alpha chain variable domain of TCR clone 332668 (TRAV17, TRAJ57)
CATDPQGGSEKLVF

SEQ ID NO: 665336 - protein, 15 aa, Homo sapiens
  CDR3 for beta chain variable domain of TCR clone 332668 (TRBV20-1, TRBJ1-5)
CSATSDRGLGQPQHF

SEQ ID NO: 665337 - protein, 14 aa, Homo sapiens
  CDR3 for alpha chain variable domain of TCR clone 332669 (TRAV1-1, TRAJ27)
CAVIYNTNAGKSTF

SEQ ID NO: 665338 - protein, 14 aa, Homo sapiens
  CDR3 for beta chain variable domain of TCR clone 332669 (TRBV2, TRBJ2-2)
CASSWQGATGELFF

SEQ ID NO: 665339 - protein, 11 aa, Homo sapiens
  CDR3 for alpha chain variable domain of TCR clone 332670 (TRAV12-1, TRAJ30)
CVVNGQDKIIF

SEQ ID NO: 665340 - protein, 15 aa, Homo sapiens
  CDR3 for beta chain variable domain of TCR clone 332670 (TRBV27, TRBJ2-2)
CTSVPANASPGSCFF

SEQ ID NO: 665341 - protein, 12 aa, Homo sapiens
  CDR3 for alpha chain variable domain of TCR clone 332671 (TRAV30, TRAJ43)
CGTDEMGNDMRF

SEQ ID NO: 665342 - protein, 13 aa, Homo sapiens
  CDR3 for beta chain variable domain of TCR clone 332671 (TRBV27, TRBJ2-7)
CASSFSQGYEQYF

SEQ ID NO: 665343 - protein, 14 aa, Homo sapiens
  CDR3 for alpha chain variable domain of TCR clone 332672 (TRAV1-2, TRAJ8)
CAVREDTGFQELVF

SEQ ID NO: 665344 - protein, 15 aa, Homo sapiens
  CDR3 for beta chain variable domain of TCR clone 332672 (TRBV18, TRBJ2-1)
CASSPPSASYNEQFF

SEQ ID NO: 665345 - protein, 11 aa, Homo sapiens
  CDR3 for alpha chain variable domain of TCR clone 332673 (TRAV12-2, TRAJ54)
CAVDGAQKLVF

SEQ ID NO: 665346 - protein, 17 aa, Homo sapiens
  CDR3 for beta chain variable domain of TCR clone 332673 (TRBV18, TRBJ1-3)
CASSPYPTGPSGNAIYF

SEQ ID NO: 665347 - protein, 17 aa, Homo sapiens
  CDR3 for alpha chain variable domain of TCR clone 332674 (TRAV3, TRAJ6)
CAVRDGPRAGGSYIPTF

SEQ ID NO: 665348 - protein, 15 aa, Homo sapiens
  CDR3 for beta chain variable domain of TCR clone 332674 (TRBV2, TRBJ2-4)
CASSGTNLAKNSQYF

SEQ ID NO: 665349 - protein, 12 aa, Homo sapiens
  CDR3 for alpha chain variable domain of TCR clone 332675 (TRAV1-2, TRAJ26)
CAVRYYGQNFVF

SEQ ID NO: 665350 - protein, 16 aa, Homo sapiens
  CDR3 for beta chain variable domain of TCR clone 332675 (TRBV7-3, TRBJ2-2)
CASSLKRGTLSGELFF

SEQ ID NO: 665351 - protein, 12 aa, Homo sapiens
  CDR3 for alpha chain variable domain of TCR clone 332676 (TRAV3, TRAJ26)
CAVRDYGQNFVF

SEQ ID NO: 665352 - protein, 13 aa, Homo sapiens
  CDR3 for beta chain variable domain of TCR clone 332676 (TRBV12-5, TRBJ2-3)
CASGDRQSDTQYF

SEQ ID NO: 665353 - protein, 12 aa, Homo sapiens
  CDR3 for alpha chain variable domain of TCR clone 332677 (TRAV21, TRAJ23)
CAVMLQGRKLIF

SEQ ID NO: 665354 - protein, 14 aa, Homo sapiens
  CDR3 for beta chain variable domain of TCR clone 332677 (TRBV7-9, TRBJ1-4)
CAITEGEANEKLFF

SEQ ID NO: 665355 - protein, 15 aa, Homo sapiens
  CDR3 for alpha chain variable domain of TCR clone 332678 (TRAV12-2, TRAJ52)
CAVTSGGTSDGKLTF

SEQ ID NO: 665356 - protein, 15 aa, Homo sapiens
  CDR3 for beta chain variable domain of TCR clone 332678 (TRBV7-2, TRBJ2-1)
CASSPGFISGNEQFF

SEQ ID NO: 665357 - protein, 13 aa, Homo sapiens
  CDR3 for alpha chain variable domain of TCR clone 332679 (TRAV8-3, TRAJ36)
CAVGATGANNLSF

SEQ ID NO: 665358 - protein, 13 aa, Homo sapiens
  CDR3 for beta chain variable domain of TCR clone 332679 (TRBV10-3, TRBJ2-7)
CASKLAVNYEQYF

SEQ ID NO: 665359 - protein, 15 aa, Homo sapiens
  CDR3 for alpha chain variable domain of TCR clone 332680 (TRAV12-1, TRAJ42)
CVVTRDGGSQGNLIF

SEQ ID NO: 665360 - protein, 18 aa, Homo sapiens
  CDR3 for beta chain variable domain of TCR clone 332680 (TRBV11-2, TRBJ2-3)
CASSLGGASRGAPNTQYF

SEQ ID NO: 665361 - protein, 13 aa, Homo sapiens
  CDR3 for alpha chain variable domain of TCR clone 332681 (TRAV27, TRAJ29)
CGGAHSGNTPLVF

SEQ ID NO: 665362 - protein, 14 aa, Homo sapiens
  CDR3 for beta chain variable domain of TCR clone 332681 (TRBV7-9, TRBJ2-7)
CASSIGQGAGEQYF

SEQ ID NO: 665363 - protein, 14 aa, Homo sapiens
  CDR3 for alpha chain variable domain of TCR clone 332682 (TRAV4, TRAJ26)
CLVGPHNYGQNFVF

SEQ ID NO: 665364 - protein, 14 aa, Homo sapiens
  CDR3 for beta chain variable domain of TCR clone 332682 (TRBV5-5, TRBJ1-2)
CASSLDPYNYGYTF

SEQ ID NO: 665365 - protein, 15 aa, Homo sapiens
  CDR3 for alpha chain variable domain of TCR clone 332683 (TRAV8-6, TRAJ6)
CAVSGESGGSYIPTF

SEQ ID NO: 665366 - protein, 14 aa, Homo sapiens
  CDR3 for beta chain variable domain of TCR clone 332683 (TRBV6-1, TRBJ1-3)
CASVQGGGGNTIYF

SEQ ID NO: 665367 - protein, 13 aa, Homo sapiens
  CDR3 for alpha chain variable domain of TCR clone 332684 (TRAV2, TRAJ40)
CDVVTSGTYKYIF

SEQ ID NO: 665368 - protein, 14 aa, Homo sapiens
  CDR3 for beta chain variable domain of TCR clone 332684 (TRBV19, TRBJ2-1)
CASPTVVLSGEQFF

SEQ ID NO: 665369 - protein, 15 aa, Homo sapiens
  CDR3 for alpha chain variable domain of TCR clone 332685 (TRAV26-1, TRAJ22)
CIVRVSIWFCKATDL

SEQ ID NO: 665370 - protein, 13 aa, Homo sapiens
  CDR3 for beta chain variable domain of TCR clone 332685 (TRBV7-9, TRBJ1-2)
CASSLKQNYGYTF

SEQ ID NO: 665371 - protein, 13 aa, Homo sapiens
  CDR3 for alpha chain variable domain of TCR clone 332686 (TRAV17, TRAJ13)
CATDSGGYQKVTF

SEQ ID NO: 665372 - protein, 13 aa, Homo sapiens
  CDR3 for beta chain variable domain of TCR clone 332686 (TRBV12-4, TRBJ1-2)
CASSLDSNYGYTF

SEQ ID NO: 665373 - protein, 17 aa, Homo sapiens
  CDR3 for alpha chain variable domain of TCR clone 332687 (TRAV29/DV5, TRAJ52)
CAASARAGGTSYGKLTF

SEQ ID NO: 665374 - protein, 18 aa, Homo sapiens
  CDR3 for beta chain variable domain of TCR clone 332687 (TRBV6-6, TRBJ1-3)
CASSYSKWDSISGNTIYF

SEQ ID NO: 665375 - protein, 17 aa, Homo sapiens
  CDR3 for alpha chain variable domain of TCR clone 332688 (TRAV8-1, TRAJ42)
CAVKWGYYGGSQGNLIF

SEQ ID NO: 665376 - protein, 15 aa, Homo sapiens
  CDR3 for beta chain variable domain of TCR clone 332688 (TRBV9, TRBJ1-6)
CASSVAGTGDSPLHF

SEQ ID NO: 665377 - protein, 17 aa, Homo sapiens
  CDR3 for alpha chain variable domain of TCR clone 332689 (TRAV3, TRAJ42)
CAARDRDYGGSKGNLIF

SEQ ID NO: 665378 - protein, 15 aa, Homo sapiens
  CDR3 for beta chain variable domain of TCR clone 332689 (TRBV6-6, TRBJ2-7)
CASSYSYGGSYEQYF

SEQ ID NO: 665379 - protein, 11 aa, Homo sapiens
  CDR3 for alpha chain variable domain of TCR clone 332690 (TRAV17, TRAJ9)
CATTGGFKTIF

SEQ ID NO: 665380 - protein, 12 aa, Homo sapiens
  CDR3 for beta chain variable domain of TCR clone 332690 (TRBV11-2, TRBJ2-7)
CASSLPTYEQYF

SEQ ID NO: 665381 - protein, 14 aa, Homo sapiens
  CDR3 for alpha chain variable domain of TCR clone 332691 (TRAV12-3, TRAJ42)
CAMNYGGSQGNLIF

SEQ ID NO: 665382 - protein, 13 aa, Homo sapiens
  CDR3 for beta chain variable domain of TCR clone 332691 (TRBV20-1, TRBJ2-5)
CSAREAFQETQYF

SEQ ID NO: 665383 - protein, 14 aa, Homo sapiens
  CDR3 for alpha chain variable domain of TCR clone 332692 (TRAV13-2, TRAJ16)
CAENNWKDGQKLLF

SEQ ID NO: 665384 - protein, 17 aa, Homo sapiens
  CDR3 for beta chain variable domain of TCR clone 332692 (TRBV20-1, TRBJ1-6)
CSAQGGYTFSYNSPLHF

SEQ ID NO: 665385 - protein, 13 aa, Homo sapiens
  CDR3 for alpha chain variable domain of TCR clone 332693 (TRAV20, TRAJ37)
CPGCSSNTGKLIF

SEQ ID NO: 665386 - protein, 11 aa, Homo sapiens
  CDR3 for beta chain variable domain of TCR clone 332693 (TRBV12-4, TRBJ2-3)
CASTATDTQYF

SEQ ID NO: 665387 - protein, 14 aa, Homo sapiens
  CDR3 for alpha chain variable domain of TCR clone 332694 (TRAV23/DV6, TRAJ4)
CAANLSGGHNKLIF

SEQ ID NO: 665388 - protein, 17 aa, Homo sapiens
  CDR3 for beta chain variable domain of TCR clone 332694 (TRBV4-1, TRBJ1-3)
CASSPQRGIRFGNTMYF

SEQ ID NO: 665389 - protein, 13 aa, Homo sapiens
  CDR3 for alpha chain variable domain of TCR clone 332695 (TRAV20, TRAJ20)
CAVRWIRDYKLSF

SEQ ID NO: 665390 - protein, 14 aa, Homo sapiens
  CDR3 for beta chain variable domain of TCR clone 332695 (TRBV19, TRBJ2-2)
CASTVTANTGELFF

SEQ ID NO: 665391 - protein, 14 aa, Homo sapiens
  CDR3 for alpha chain variable domain of TCR clone 332696 (TRAV17, TRAJ31)
CATAAEDNNSRLMF

SEQ ID NO: 665392 - protein, 13 aa, Homo sapiens
  CDR3 for beta chain variable domain of TCR clone 332696 (TRBV20-1, TRBJ2-3)
CSARLAGTDTQYF

SEQ ID NO: 665393 - protein, 13 aa, Homo sapiens
  CDR3 for alpha chain variable domain of TCR clone 332697 (TRAV2, TRAJ39)
CDVLNNAGNMLTF

SEQ ID NO: 665394 - protein, 16 aa, Homo sapiens
  CDR3 for beta chain variable domain of TCR clone 332697 (TRBV19, TRBJ2-1)
CASRTSSGSIINEQFF

SEQ ID NO: 665395 - protein, 17 aa, Homo sapiens
  CDR3 for alpha chain variable domain of TCR clone 332698 (TRAV12-2, TRAJ48)
CASNEKLTFGTGTRLTI

SEQ ID NO: 665396 - protein, 13 aa, Homo sapiens
  CDR3 for beta chain variable domain of TCR clone 332698 (TRBV20-1, TRBJ1-1)
CSARGGGNTEAFF

SEQ ID NO: 665397 - protein, 12 aa, Homo sapiens
  CDR3 for alpha chain variable domain of TCR clone 332699 (TRAV12-3, TRAJ34)
CAMGYDTDKLIF

SEQ ID NO: 665398 - protein, 14 aa, Homo sapiens
  CDR3 for beta chain variable domain of TCR clone 332699 (TRBV5-7, TRBJ1-5)
CASSRTGGGQPQHV

SEQ ID NO: 665399 - protein, 13 aa, Homo sapiens
  CDR3 for alpha chain variable domain of TCR clone 332700 (TRAV8-2, TRAJ43)
CVVSEQGENDMRF

SEQ ID NO: 665400 - protein, 12 aa, Homo sapiens
  CDR3 for beta chain variable domain of TCR clone 332700 (TRBV7-9, TRBJ2-7)
CASRTGFDEQYF

SEQ ID NO: 665401 - protein, 15 aa, Homo sapiens
  CDR3 for alpha chain variable domain of TCR clone 332701 (TRAV12-3, TRAJ42)
CAMSGHGGSQGNLIF

SEQ ID NO: 665402 - protein, 16 aa, Homo sapiens
  CDR3 for beta chain variable domain of TCR clone 332701 (TRBV7-7, TRBJ2-1)
CASSLASGASYNEQFF

SEQ ID NO: 665403 - protein, 15 aa, Homo sapiens
  CDR3 for alpha chain variable domain of TCR clone 332702 (TRAV38-1, TRAJ58)
CAFMKQETSGSRLTF

SEQ ID NO: 665404 - protein, 14 aa, Homo sapiens
  CDR3 for beta chain variable domain of TCR clone 332702 (TRBV7-6, TRBJ2-3)
CASSLGTVTDTQYF

SEQ ID NO: 665405 - protein, 13 aa, Homo sapiens
  CDR3 for alpha chain variable domain of TCR clone 332703 (TRAV38-1, TRAJ52)
CAFRGTSHGKLTF

SEQ ID NO: 665406 - protein, 15 aa, Homo sapiens
  CDR3 for beta chain variable domain of TCR clone 332703 (TRBV6-3, TRBJ2-7)
CASSSPGTVFYEQYF

SEQ ID NO: 665407 - protein, 11 aa, Homo sapiens
  CDR3 for alpha chain variable domain of TCR clone 332704 (TRAV8-3, TRAJ49)
CAVNTGNQFYF

SEQ ID NO: 665408 - protein, 15 aa, Homo sapiens
  CDR3 for beta chain variable domain of TCR clone 332704 (TRBV5-1, TRBJ2-7)
CASSLNGGPAREQYF

SEQ ID NO: 665409 - protein, 16 aa, Homo sapiens
  CDR3 for alpha chain variable domain of TCR clone 332705 (TRAV26-1, TRAJ53)
CIVRVATGGSNYKLTF

SEQ ID NO: 665410 - protein, 12 aa, Homo sapiens
  CDR3 for beta chain variable domain of TCR clone 332705 (TRBV7-9, TRBJ1-5)
CASSPQGQPQHF

SEQ ID NO: 665411 - protein, 14 aa, Homo sapiens
  CDR3 for alpha chain variable domain of TCR clone 332706 (TRAV35, TRAJ42)
CAGRYGGSQGNLIF

SEQ ID NO: 665412 - protein, 15 aa, Homo sapiens
  CDR3 for beta chain variable domain of TCR clone 332706 (TRBV11-2, TRBJ1-6)
CASTGFGTAVSPLHF

SEQ ID NO: 665413 - protein, 13 aa, Homo sapiens
  CDR3 for alpha chain variable domain of TCR clone 332707 (TRAV20, TRAJ48)
CAVQGVGNEKLTF

SEQ ID NO: 665414 - protein, 14 aa, Homo sapiens
  CDR3 for beta chain variable domain of TCR clone 332707 (TRBV27, TRBJ2-7)
CASSFRDRPYEQHF

SEQ ID NO: 665415 - protein, 21 aa, Homo sapiens
  CDR3 for alpha chain variable domain of TCR clone 332708 (TRAV21, )
CAVMGAGNNHIQNPDPAVYQL

SEQ ID NO: 665416 - protein, 13 aa, Homo sapiens
  CDR3 for beta chain variable domain of TCR clone 332708 (TRBV7-3, TRBJ2-5)
CASSIGFFETQYF

SEQ ID NO: 665417 - protein, 14 aa, Homo sapiens
  CDR3 for alpha chain variable domain of TCR clone 332709 (TRAV13-1, TRAJ44)
CAAKATGTASKLTF

SEQ ID NO: 665418 - protein, 13 aa, Homo sapiens
  CDR3 for beta chain variable domain of TCR clone 332709 (TRBV11-2, TRBJ2-7)
CASSPLGSYEQYF

SEQ ID NO: 665419 - protein, 13 aa, Homo sapiens
  CDR3 for alpha chain variable domain of TCR clone 332710 (TRAV16, TRAJ26)
CITVLCLGQNFVF

SEQ ID NO: 665420 - protein, 12 aa, Homo sapiens
  CDR3 for beta chain variable domain of TCR clone 332710 (TRBV11-2, TRBJ2-1)
CARSPGHNEQFF

SEQ ID NO: 665421 - protein, 19 aa, Homo sapiens
  CDR3 for alpha chain variable domain of TCR clone 332711 (TRAV17, TRAJ17)
CATDGRPGVIKAAGNKLTF

SEQ ID NO: 665422 - protein, 17 aa, Homo sapiens
  CDR3 for beta chain variable domain of TCR clone 332711 (TRBV12-4, TRBJ1-1)
CASSFSGFRTMNTEAFF

SEQ ID NO: 665423 - protein, 13 aa, Homo sapiens
  CDR3 for alpha chain variable domain of TCR clone 332712 (TRAV27, TRAJ29)
CSGAHSGNTPLVF

SEQ ID NO: 665424 - protein, 15 aa, Homo sapiens
  CDR3 for beta chain variable domain of TCR clone 332712 (TRBV15, TRBJ1-4)
CATSRDMGSYEKLFF

SEQ ID NO: 665425 - protein, 15 aa, Homo sapiens
  CDR3 for alpha chain variable domain of TCR clone 332713 (TRAV3, TRAJ5)
CAVRDRKTGRRALTF

SEQ ID NO: 665426 - protein, 15 aa, Homo sapiens
  CDR3 for beta chain variable domain of TCR clone 332713 (TRBV7-9, TRBJ2-2)
CDSGPLDTFPGELFF

SEQ ID NO: 665427 - protein, 15 aa, Homo sapiens
  CDR3 for alpha chain variable domain of TCR clone 332714 (TRAV17, TRAJ52)
CATEAGGTSYGKLTF

SEQ ID NO: 665428 - protein, 14 aa, Homo sapiens
  CDR3 for beta chain variable domain of TCR clone 332714 (TRBV28, TRBJ1-5)
CASSWGVLVKHQHF

SEQ ID NO: 665429 - protein, 14 aa, Homo sapiens
  CDR3 for alpha chain variable domain of TCR clone 332715 (TRAV17, TRAJ57)
CATDPQGGAEKLVF

SEQ ID NO: 665430 - protein, 14 aa, Homo sapiens
  CDR3 for beta chain variable domain of TCR clone 332715 (TRBV11-2, TRBJ2-3)
CASSLGGGANTQYF

SEQ ID NO: 665431 - protein, 10 aa, Homo sapiens
  CDR3 for alpha chain variable domain of TCR clone 332716 (TRAV12-2, TRAJ52)
RSTSYGKLTF

SEQ ID NO: 665432 - protein, 10 aa, Homo sapiens
  CDR3 for beta chain variable domain of TCR clone 332716 (TRBV11-2, TRBJ2-2)
CQQLTRELFF

SEQ ID NO: 665433 - protein, 11 aa, Homo sapiens
  CDR3 for alpha chain variable domain of TCR clone 332717 (TRAV4, TRAJ23)
CLVAPGGKLIF

SEQ ID NO: 665434 - protein, 15 aa, Homo sapiens
  CDR3 for beta chain variable domain of TCR clone 332717 (TRBV7-2, TRBJ2-1)
CACSFQADEYNEQFF

SEQ ID NO: 665435 - protein, 13 aa, Homo sapiens
  CDR3 for alpha chain variable domain of TCR clone 332718 (TRAV3, TRAJ29)
CAVRDIIDTPLVF

SEQ ID NO: 665436 - protein, 16 aa, Homo sapiens
  CDR3 for beta chain variable domain of TCR clone 332718 (TRBV27, TRBJ2-1)
CTSVPSATGGYNEQFF

SEQ ID NO: 665437 - protein, 12 aa, Homo sapiens
  CDR3 for alpha chain variable domain of TCR clone 332719 (TRAV27, TRAJ13)
CAGAGGYQKVTF

SEQ ID NO: 665438 - protein, 15 aa, Homo sapiens
  CDR3 for beta chain variable domain of TCR clone 332719 (TRBV20-1, TRBJ2-6)
CSARDRGPGANVLTV

SEQ ID NO: 665439 - protein, 14 aa, Homo sapiens
  CDR3 for alpha chain variable domain of TCR clone 332720 (TRAV13-1, TRAJ28)
CSASKGAGSYQLTF

SEQ ID NO: 665440 - protein, 16 aa, Homo sapiens
  CDR3 for beta chain variable domain of TCR clone 332720 (TRBV4-2, TRBJ2-3)
CASSQDGARGGVKQYF

SEQ ID NO: 665441 - protein, 14 aa, Homo sapiens
  CDR3 for alpha chain variable domain of TCR clone 332721 (TRAV3, TRAJ8)
CAVSLNTGFQKLVF

SEQ ID NO: 665442 - protein, 16 aa, Homo sapiens
  CDR3 for beta chain variable domain of TCR clone 332721 (TRBV12-5, TRBJ2-5)
CASGPRTSGNQETQYF

SEQ ID NO: 665443 - protein, 14 aa, Homo sapiens
  CDR3 for alpha chain variable domain of TCR clone 332722 (TRAV26-1, TRAJ39)
CIVRGSGAGNMLTL

SEQ ID NO: 665444 - protein, 12 aa, Homo sapiens
  CDR3 for beta chain variable domain of TCR clone 332722 (TRBV11-2, TRBJ1-3)
CSSLEPVNTIYF

SEQ ID NO: 665445 - protein, 15 aa, Homo sapiens
  CDR3 for alpha chain variable domain of TCR clone 332723 (TRAV8-3, TRAJ11)
CAVGLLNSGYSTLTF

SEQ ID NO: 665446 - protein, 11 aa, Homo sapiens
  CDR3 for beta chain variable domain of TCR clone 332723 (TRBV6-3, TRBJ2-3)
CATGQADTQYF

SEQ ID NO: 665447 - protein, 16 aa, Homo sapiens
  CDR3 for alpha chain variable domain of TCR clone 332724 (TRAV38-1, TRAJ37)
CAFKADGSSNTGKLIF

SEQ ID NO: 665448 - protein, 13 aa, Homo sapiens
  CDR3 for beta chain variable domain of TCR clone 332724 (TRBV12-4, TRBJ2-5)
CASSLFRRETQYF

SEQ ID NO: 665449 - protein, 15 aa, Homo sapiens
  CDR3 for alpha chain variable domain of TCR clone 332725 (TRAV12-2, TRAJ53)
CAVNGGGGSNYKLTF

SEQ ID NO: 665450 - protein, 17 aa, Homo sapiens
  CDR3 for beta chain variable domain of TCR clone 332725 (TRBV7-3, TRBJ2-3)
CASSLIKRMRGADTQYF

SEQ ID NO: 665451 - protein, 14 aa, Homo sapiens
  CDR3 for alpha chain variable domain of TCR clone 332726 (TRAV1-1, TRAJ11)
CDRIMNSGYGTLTF

SEQ ID NO: 665452 - protein, 15 aa, Homo sapiens
  CDR3 for beta chain variable domain of TCR clone 332726 (TRBV11-1, TRBJ2-7)
CASSLNYGASYEQYF

SEQ ID NO: 665453 - protein, 14 aa, Homo sapiens
  CDR3 for alpha chain variable domain of TCR clone 332727 (TRAV29/DV5, TRAJ44)
CAAFLVGTASKLTF

SEQ ID NO: 665454 - protein, 14 aa, Homo sapiens
  CDR3 for beta chain variable domain of TCR clone 332727 (TRBV19, TRBJ2-5)
CASSMTGQQETQYF

SEQ ID NO: 665455 - protein, 12 aa, Homo sapiens
  CDR3 for alpha chain variable domain of TCR clone 332728 (TRAV2, TRAJ9)
WAVGAGGFKTIF

SEQ ID NO: 665456 - protein, 16 aa, Homo sapiens
  CDR3 for beta chain variable domain of TCR clone 332728 (TRBV13, TRBJ2-2)
CASSPRTGEHTGELFF

SEQ ID NO: 665457 - protein, 12 aa, Homo sapiens
  CDR3 for alpha chain variable domain of TCR clone 332729 (TRAV36/DV7, TRAJ50)
CAVEPENLLRQG

SEQ ID NO: 665458 - protein, 12 aa, Homo sapiens
  CDR3 for beta chain variable domain of TCR clone 332729 (TRBV19, TRBJ2-1)
CASSRQGAEQFF

SEQ ID NO: 665459 - protein, 17 aa, Homo sapiens
  CDR3 for alpha chain variable domain of TCR clone 332730 (TRAV8-3, TRAJ10)
EASNTVILTGGGNKLTF

SEQ ID NO: 665460 - protein, 16 aa, Homo sapiens
  CDR3 for beta chain variable domain of TCR clone 332730 (TRBV7-9, TRBJ1-2)
CASSLGFSSGGDGYTF

SEQ ID NO: 665461 - protein, 14 aa, Homo sapiens
  CDR3 for alpha chain variable domain of TCR clone 332731 (TRAV17, TRAJ53)
CATDAGGSNYKLTF

SEQ ID NO: 665462 - protein, 16 aa, Homo sapiens
  CDR3 for beta chain variable domain of TCR clone 332731 (TRBV4-1, TRBJ1-1)
CASSQDAGMGNTEAFL

SEQ ID NO: 665463 - protein, 14 aa, Homo sapiens
  CDR3 for alpha chain variable domain of TCR clone 332732 (TRAV12-3, TRAJ42)
CAMNYGGSQGNLIF

SEQ ID NO: 665464 - protein, 13 aa, Homo sapiens
  CDR3 for beta chain variable domain of TCR clone 332732 (TRBV20-1, TRBJ1-6)
CSAPLGVGSPFHF

SEQ ID NO: 665465 - protein, 17 aa, Homo sapiens
  CDR3 for alpha chain variable domain of TCR clone 332733 (TRAV3, TRAJ6)
RAVRDGPRAGGSYITTF

SEQ ID NO: 665466 - protein, 15 aa, Homo sapiens
  CDR3 for beta chain variable domain of TCR clone 332733 (TRBV20-1, TRBJ1-1)
CSASWDRFLNTEAFF

SEQ ID NO: 665467 - protein, 13 aa, Homo sapiens
  CDR3 for alpha chain variable domain of TCR clone 332734 (TRAV13-1, TRAJ6)
CARGSGGSYIPTF

SEQ ID NO: 665468 - protein, 17 aa, Homo sapiens
  CDR3 for beta chain variable domain of TCR clone 332734 (TRBV7-8, TRBJ2-1)
WASSPPTGTLAYNEQFF

SEQ ID NO: 665469 - protein, 11 aa, Homo sapiens
  CDR3 for alpha chain variable domain of TCR clone 332735 (TRAV35, TRAJ39)
ASTNAGNMLTF

SEQ ID NO: 665470 - protein, 16 aa, Homo sapiens
  CDR3 for beta chain variable domain of TCR clone 332735 (TRBV2, TRBJ2-3)
CASSTSVEGVTDTQYF

SEQ ID NO: 665471 - protein, 19 aa, Homo sapiens
  CDR3 for alpha chain variable domain of TCR clone 332736 (TRAV26-1, TRAJ52)
CIVRAHRNAGGTSYGKLTF

SEQ ID NO: 665472 - protein, 13 aa, Homo sapiens
  CDR3 for beta chain variable domain of TCR clone 332736 (TRBV19, TRBJ2-2)
CASQEGIHGELFF

SEQ ID NO: 665473 - protein, 15 aa, Homo sapiens
  CDR3 for alpha chain variable domain of TCR clone 332737 (TRAV8-3, TRAJ27)
CAVGPSKTNAGKSTF

SEQ ID NO: 665474 - protein, 15 aa, Homo sapiens
  CDR3 for beta chain variable domain of TCR clone 332737 (TRBV2, TRBJ2-4)
CASSGTNLAKNIQYF

SEQ ID NO: 665475 - protein, 16 aa, Homo sapiens
  CDR3 for alpha chain variable domain of TCR clone 332738 (TRAV23/DV6, TRAJ9)
CAASIGGNTGGFKTIL

SEQ ID NO: 665476 - protein, 13 aa, Homo sapiens
  CDR3 for beta chain variable domain of TCR clone 332738 (TRBV7-2, TRBJ1-1)
CASSQDWGAEAFF

SEQ ID NO: 665477 - protein, 14 aa, Homo sapiens
  CDR3 for alpha chain variable domain of TCR clone 332739 (TRAV12-2, TRAJ13)
CAVKKTGGYQNVTF

SEQ ID NO: 665478 - protein, 17 aa, Homo sapiens
  CDR3 for beta chain variable domain of TCR clone 332739 (TRBV13, TRBJ2-3)
CASSLSRVAGGRNTQYF

SEQ ID NO: 665479 - protein, 13 aa, Homo sapiens
  CDR3 for alpha chain variable domain of TCR clone 332740 (TRAV27, TRAJ16)
CAGACSDGPKLLF

SEQ ID NO: 665480 - protein, 14 aa, Homo sapiens
  CDR3 for beta chain variable domain of TCR clone 332740 (TRBV11-2, TRBJ1-3)
CASSLAVPGNAIYF

SEQ ID NO: 665481 - protein, 13 aa, Homo sapiens
  CDR3 for alpha chain variable domain of TCR clone 332741 (TRAV14/DV4, TRAJ23)
CAMREVKGGKLIF

SEQ ID NO: 665482 - protein, 17 aa, Homo sapiens
  CDR3 for beta chain variable domain of TCR clone 332741 (TRBV20-1, TRBJ2-1)
CSASSSGLAGSYNEQFF

SEQ ID NO: 665483 - protein, 15 aa, Homo sapiens
  CDR3 for alpha chain variable domain of TCR clone 332742 (TRAV4, TRAJ36)
CLVGDRQTGTNNLFF

SEQ ID NO: 665484 - protein, 13 aa, Homo sapiens
  CDR3 for beta chain variable domain of TCR clone 332742 (TRBV20-1, TRBJ2-5)
CSAREGGKETQYF

SEQ ID NO: 665485 - protein, 13 aa, Homo sapiens
  CDR3 for alpha chain variable domain of TCR clone 332743 (TRAV21, TRAJ20)
CAVGLRVDYKLSF

SEQ ID NO: 665486 - protein, 15 aa, Homo sapiens
  CDR3 for beta chain variable domain of TCR clone 332743 (TRBV24-1, TRBJ2-1)
CATSGPGTLSAEQFF

SEQ ID NO: 665487 - protein, 19 aa, Homo sapiens
  CDR3 for alpha chain variable domain of TCR clone 332744 (TRAV29/DV5, TRAJ49)
CSVLVCSKLTVDTGNQFYF

SEQ ID NO: 665488 - protein, 17 aa, Homo sapiens
  CDR3 for beta chain variable domain of TCR clone 332744 (TRBV13, TRBJ2-3)
CASSLSRVAGGRNTQYF

SEQ ID NO: 665489 - protein, 13 aa, Homo sapiens
  CDR3 for alpha chain variable domain of TCR clone 332745 (TRAV8-4, TRAJ5)
CAVLDTGRRALTF

SEQ ID NO: 665490 - protein, 12 aa, Homo sapiens
  CDR3 for beta chain variable domain of TCR clone 332745 (TRBV7-9, TRBJ1-6)
CANSASESPLHF

SEQ ID NO: 665491 - protein, 15 aa, Homo sapiens
  CDR3 for alpha chain variable domain of TCR clone 332746 (TRAV16, TRAJ16)
CALQGGGPDGQKLLF

SEQ ID NO: 665492 - protein, 13 aa, Homo sapiens
  CDR3 for beta chain variable domain of TCR clone 332746 (TRBV12-5, TRBJ2-3)
CASGDRQSYTQYF

SEQ ID NO: 665493 - protein, 13 aa, Homo sapiens
  CDR3 for alpha chain variable domain of TCR clone 332747 (TRAV21, TRAJ20)
CAVGLRVDYKPSF

SEQ ID NO: 665494 - protein, 13 aa, Homo sapiens
  CDR3 for beta chain variable domain of TCR clone 332747 (TRBV19, TRBJ2-1)
CASSRAPYNEQFF

SEQ ID NO: 665495 - protein, 15 aa, Homo sapiens
  CDR3 for alpha chain variable domain of TCR clone 332748 (TRAV4, TRAJ28)
CLPSYSGAGSYQLTF

SEQ ID NO: 665496 - protein, 17 aa, Homo sapiens
  CDR3 for beta chain variable domain of TCR clone 332748 (TRBV7-6, TRBJ2-1)
CASSFGLAGGTYNEQFF

SEQ ID NO: 665497 - protein, 14 aa, Homo sapiens
  CDR3 for alpha chain variable domain of TCR clone 332749 (TRAV12-2, TRAJ13)
CAVKKAGGYQKVTF

SEQ ID NO: 665498 - protein, 15 aa, Homo sapiens
  CDR3 for beta chain variable domain of TCR clone 332749 (TRBV19, TRBJ1-6)
CASSTQGAVGSPLHF

SEQ ID NO: 665499 - protein, 15 aa, Homo sapiens
  CDR3 for alpha chain variable domain of TCR clone 332750 (TRAV3, TRAJ5)
FAVRDLDTGRRALTF

SEQ ID NO: 665500 - protein, 14 aa, Homo sapiens
  CDR3 for beta chain variable domain of TCR clone 332750 (TRBV9, TRBJ2-4)
CASSPSGTSGFQYF

SEQ ID NO: 665501 - protein, 14 aa, Homo sapiens
  CDR3 for alpha chain variable domain of TCR clone 332751 (TRAV21, TRAJ35)
CAVMPIGFGNVLHC

SEQ ID NO: 665502 - protein, 13 aa, Homo sapiens
  CDR3 for beta chain variable domain of TCR clone 332751 (TRBV7-9, TRBJ2-3)
CASSPGSTDTQYF

SEQ ID NO: 665503 - protein, 16 aa, Homo sapiens
  CDR3 for alpha chain variable domain of TCR clone 332752 (TRAV8-3, TRAJ42)
CAVAGDYGGGQGNLIF

SEQ ID NO: 665504 - protein, 15 aa, Homo sapiens
  CDR3 for beta chain variable domain of TCR clone 332752 (TRBV28, TRBJ2-7)
CASSPGGRGFYEQYF

SEQ ID NO: 665505 - protein, 13 aa, Homo sapiens
  CDR3 for alpha chain variable domain of TCR clone 332753 (TRAV2, TRAJ40)
CAVVTSGTYKYIF

SEQ ID NO: 665506 - protein, 15 aa, Homo sapiens
  CDR3 for beta chain variable domain of TCR clone 332753 (TRBV27, TRBJ1-5)
CASSIGTGFDQPQHF

SEQ ID NO: 665507 - protein, 14 aa, Homo sapiens
  CDR3 for alpha chain variable domain of TCR clone 332754 (TRAV12-2, TRAJ40)
CAVKIPSGTSKYIF

SEQ ID NO: 665508 - protein, 13 aa, Homo sapiens
  CDR3 for beta chain variable domain of TCR clone 332754 (TRBV20-1, TRBJ1-3)
CSARVQGRDTIYF

SEQ ID NO: 665509 - protein, 14 aa, Homo sapiens
  CDR3 for alpha chain variable domain of TCR clone 332755 (TRAV3, TRAJ37)
CAVKESGNTGKLIF

SEQ ID NO: 665510 - protein, 13 aa, Homo sapiens
  CDR3 for beta chain variable domain of TCR clone 332755 (TRBV12-4, TRBJ1-2)
CASSLRQGKGYTF

SEQ ID NO: 665511 - protein, 13 aa, Homo sapiens
  CDR3 for alpha chain variable domain of TCR clone 332756 (TRAV26-2, TRAJ43)
CILRAVNNNDMRF

SEQ ID NO: 665512 - protein, 15 aa, Homo sapiens
  CDR3 for beta chain variable domain of TCR clone 332756 (TRBV7-2, TRBJ2-1)
CASTHGTGIYDEQFF

SEQ ID NO: 665513 - protein, 14 aa, Homo sapiens
  CDR3 for alpha chain variable domain of TCR clone 332757 (TRAV12-2, TRAJ13)
CAVKRTGGYQKVTF

SEQ ID NO: 665514 - protein, 19 aa, Homo sapiens
  CDR3 for beta chain variable domain of TCR clone 332757 (TRBV28, TRBJ2-7)
CASSYSGTSRLGWVYEQYF

SEQ ID NO: 665515 - protein, 11 aa, Homo sapiens
  CDR3 for alpha chain variable domain of TCR clone 332758 (TRAV3, TRAJ21)
CAVGNFNKFYF

SEQ ID NO: 665516 - protein, 15 aa, Homo sapiens
  CDR3 for beta chain variable domain of TCR clone 332758 (TRBV2, TRBJ2-1)
CASSEEREGDNEQFF

SEQ ID NO: 665517 - protein, 17 aa, Homo sapiens
  CDR3 for alpha chain variable domain of TCR clone 332759 (TRAV3, TRAJ6)
CAVRDGPRAGGSYIPTF

SEQ ID NO: 665518 - protein, 15 aa, Homo sapiens
  CDR3 for beta chain variable domain of TCR clone 332759 (TRBV29-1, TRBJ2-5)
CSVEGLEVNQETQYF

SEQ ID NO: 665519 - protein, 15 aa, Homo sapiens
  CDR3 for alpha chain variable domain of TCR clone 332760 (TRAV20, TRAJ53)
CAVQASGGSNYKLTF

SEQ ID NO: 665520 - protein, 14 aa, Homo sapiens
  CDR3 for beta chain variable domain of TCR clone 332760 (TRBV7-2, TRBJ1-2)
CASSQTGSTYGYTL

SEQ ID NO: 665521 - protein, 12 aa, Homo sapiens
  CDR3 for alpha chain variable domain of TCR clone 332761 (TRAV12-2, TRAJ10)
WGVTGGGNKLTF

SEQ ID NO: 665522 - protein, 15 aa, Homo sapiens
  CDR3 for beta chain variable domain of TCR clone 332761 (TRBV10-3, TRBJ1-2)
CAISESTSRGYGYTF

SEQ ID NO: 665523 - protein, 13 aa, Homo sapiens
  CDR3 for alpha chain variable domain of TCR clone 332762 (TRAV30, TRAJ29)
CGTELFQETHLLS

SEQ ID NO: 665524 - protein, 15 aa, Homo sapiens
  CDR3 for beta chain variable domain of TCR clone 332762 (TRBV5-1, TRBJ2-2)
CASSLFGQNTGELFF

SEQ ID NO: 665525 - protein, 14 aa, Homo sapiens
  CDR3 for alpha chain variable domain of TCR clone 332763 (TRAV12-1, TRAJ23)
CVVIVYNQGGKLIF

SEQ ID NO: 665526 - protein, 15 aa, Homo sapiens
  CDR3 for beta chain variable domain of TCR clone 332763 (TRBV20-1, TRBJ1-5)
CSATPPGHGPQPQHF

SEQ ID NO: 665527 - protein, 13 aa, Homo sapiens
  CDR3 for alpha chain variable domain of TCR clone 332764 (TRAV2, TRAJ29)
CAEPNSGNTSLVF

SEQ ID NO: 665528 - protein, 13 aa, Homo sapiens
  CDR3 for beta chain variable domain of TCR clone 332764 (TRBV28, TRBJ1-2)
CASSPGNRNGYTF

SEQ ID NO: 665529 - protein, 13 aa, Homo sapiens
  CDR3 for alpha chain variable domain of TCR clone 332765 (TRAV12-2, TRAJ11)
CAVPNSGYSTLTF

SEQ ID NO: 665530 - protein, 15 aa, Homo sapiens
  CDR3 for beta chain variable domain of TCR clone 332765 (TRBV7-2, TRBJ2-7)
CASSLSSGRTYEQYF

SEQ ID NO: 665531 - protein, 13 aa, Homo sapiens
  CDR3 for alpha chain variable domain of TCR clone 332766 (TRAV2, TRAJ40)
CAVVTSGTYKYIF

SEQ ID NO: 665532 - protein, 18 aa, Homo sapiens
  CDR3 for beta chain variable domain of TCR clone 332766 (TRBV7-6, TRBJ2-1)
CASSPRTSGMSSYNEQFF

SEQ ID NO: 665533 - protein, 14 aa, Homo sapiens
  CDR3 for alpha chain variable domain of TCR clone 332767 (TRAV16, TRAJ26)
CALSSANYGQNFVF

SEQ ID NO: 665534 - protein, 16 aa, Homo sapiens
  CDR3 for beta chain variable domain of TCR clone 332767 (TRBV12-4, TRBJ1-5)
CASSRPVGGSNQPQHF

SEQ ID NO: 665535 - protein, 15 aa, Homo sapiens
  CDR3 for alpha chain variable domain of TCR clone 332768 (TRAV2, TRAJ13)
CATPSYSGGYQKVTL

SEQ ID NO: 665536 - protein, 16 aa, Homo sapiens
  CDR3 for beta chain variable domain of TCR clone 332768 (TRBV19, TRBJ2-1)
CASSMGGGSSYNEQFF

SEQ ID NO: 665537 - protein, 14 aa, Homo sapiens
  CDR3 for alpha chain variable domain of TCR clone 332769 (TRAV12-2, TRAJ9)
CAMSPNTGGFKTTF

SEQ ID NO: 665538 - protein, 12 aa, Homo sapiens
  CDR3 for beta chain variable domain of TCR clone 332769 (TRBV19, TRBJ1-5)
CASSIAQQPQHF

SEQ ID NO: 665539 - protein, 16 aa, Homo sapiens
  CDR3 for alpha chain variable domain of TCR clone 332770 (TRAV13-1, TRAJ17)
CAASKGVKAAGNQLTF

SEQ ID NO: 665540 - protein, 15 aa, Homo sapiens
  CDR3 for beta chain variable domain of TCR clone 332770 (TRBV20-1, TRBJ1-5)
CSAREGGYSNQPQHS

SEQ ID NO: 665541 - protein, 13 aa, Homo sapiens
  CDR3 for alpha chain variable domain of TCR clone 332771 (TRAV4, TRAJ33)
CLVGDMNNSQLIW

SEQ ID NO: 665542 - protein, 14 aa, Homo sapiens
  CDR3 for beta chain variable domain of TCR clone 332771 (TRBV7-9, TRBJ1-1)
CASSLGGANTEAFF

SEQ ID NO: 665543 - protein, 16 aa, Homo sapiens
  CDR3 for alpha chain variable domain of TCR clone 332772 (TRAV12-3, TRAJ53)
CAMSPGSGGSNYKLTF

SEQ ID NO: 665544 - protein, 22 aa, Homo sapiens
  CDR3 for beta chain variable domain of TCR clone 332772 (TRBV11-2, TRBJ1-4)
CASSLGITRRGIPRKDNEKLFF

SEQ ID NO: 665545 - protein, 13 aa, Homo sapiens
  CDR3 for alpha chain variable domain of TCR clone 332773 (TRAV1-1, TRAJ29)
CAVRDRGNTPLVF

SEQ ID NO: 665546 - protein, 13 aa, Homo sapiens
  CDR3 for beta chain variable domain of TCR clone 332773 (TRBV7-3, TRBJ1-1)
CASSQDWGAEAFF

SEQ ID NO: 665547 - protein, 11 aa, Homo sapiens
  CDR3 for alpha chain variable domain of TCR clone 332774 (TRAV13-1, TRAJ39)
CASHAGNMFTF

SEQ ID NO: 665548 - protein, 15 aa, Homo sapiens
  CDR3 for beta chain variable domain of TCR clone 332774 (TRBV20-1, TRBJ2-7)
CSARDRVSGMDEQYF

SEQ ID NO: 665549 - protein, 14 aa, Homo sapiens
  CDR3 for alpha chain variable domain of TCR clone 332775 (TRAV20, TRAJ22)
CAVALGGSARELTF

SEQ ID NO: 665550 - protein, 15 aa, Homo sapiens
  CDR3 for beta chain variable domain of TCR clone 332775 (TRBV7-2, TRBJ1-1)
CASSFAGDRDTEAFF

SEQ ID NO: 665551 - protein, 12 aa, Homo sapiens
  CDR3 for alpha chain variable domain of TCR clone 332776 (TRAV27, TRAJ36)
CAGMTGANNLFL

SEQ ID NO: 665552 - protein, 14 aa, Homo sapiens
  CDR3 for beta chain variable domain of TCR clone 332776 (TRBV12-4, TRBJ2-3)
CASSLVPSTDTQYF

SEQ ID NO: 665553 - protein, 16 aa, Homo sapiens
  CDR3 for alpha chain variable domain of TCR clone 332777 (TRAV14/DV4, TRAJ20)
CAMREGRSRDDYKRSL

SEQ ID NO: 665554 - protein, 17 aa, Homo sapiens
  CDR3 for beta chain variable domain of TCR clone 332777 (TRBV7-9, TRBJ2-5)
CASSPGLAGGGREPQYF

SEQ ID NO: 665555 - protein, 11 aa, Homo sapiens
  CDR3 for alpha chain variable domain of TCR clone 332778 (TRAV1-2, TRAJ20)
CAVANDYKLSF

SEQ ID NO: 665556 - protein, 19 aa, Homo sapiens
  CDR3 for beta chain variable domain of TCR clone 332778 (TRBV25-1, TRBJ2-2)
CAILVYRVDRGRKTGELFF

SEQ ID NO: 665557 - protein, 14 aa, Homo sapiens
  CDR3 for alpha chain variable domain of TCR clone 332779 (TRAV35, TRAJ24)
CAGPRRDSWGKLQF

SEQ ID NO: 665558 - protein, 14 aa, Homo sapiens
  CDR3 for beta chain variable domain of TCR clone 332779 (TRBV19, TRBJ2-1)
CASSMGSGRRSSSS

SEQ ID NO: 665559 - protein, 11 aa, Homo sapiens
  CDR3 for alpha chain variable domain of TCR clone 332780 (TRAV12-3, TRAJ43)
CAMSVSNDMRF

SEQ ID NO: 665560 - protein, 14 aa, Homo sapiens
  CDR3 for beta chain variable domain of TCR clone 332780 (TRBV4-2, TRBJ2-7)
CASSQGQTAYEQYF

SEQ ID NO: 665561 - protein, 16 aa, Homo sapiens
  CDR3 for alpha chain variable domain of TCR clone 332781 (TRAV3, TRAJ10)
CAVREMNAGGGNKLTF

SEQ ID NO: 665562 - protein, 16 aa, Homo sapiens
  CDR3 for beta chain variable domain of TCR clone 332781 (TRBV6-3, TRBJ1-2)
CASSYSRRASNYGYTF

SEQ ID NO: 665563 - protein, 16 aa, Homo sapiens
  CDR3 for alpha chain variable domain of TCR clone 332782 (TRAV4, TRAJ22)
CLVGDPYSGSARQLTF

SEQ ID NO: 665564 - protein, 14 aa, Homo sapiens
  CDR3 for beta chain variable domain of TCR clone 332782 (TRBV19, TRBJ2-1)
CASPTFVLSGEQFF

SEQ ID NO: 665565 - protein, 13 aa, Homo sapiens
  CDR3 for alpha chain variable domain of TCR clone 332783 (TRAV36/DV7, TRAJ49)
CAGDSNTGNQFYF

SEQ ID NO: 665566 - protein, 16 aa, Homo sapiens
  CDR3 for beta chain variable domain of TCR clone 332783 (TRBV19, TRBJ2-2)
CASRSPGTGATGELFF

SEQ ID NO: 665567 - protein, 10 aa, Homo sapiens
  CDR3 for alpha chain variable domain of TCR clone 332784 (TRAV1-2, TRAJ20)
CALNDYKLSF

SEQ ID NO: 665568 - protein, 15 aa, Homo sapiens
  CDR3 for beta chain variable domain of TCR clone 332784 (TRBV7-6, TRBJ2-5)
CASSKPTGPQETQYF

SEQ ID NO: 665569 - protein, 11 aa, Homo sapiens
  CDR3 for alpha chain variable domain of TCR clone 332785 (TRAV12-1, TRAJ30)
CVVNGQDKIIF

SEQ ID NO: 665570 - protein, 12 aa, Homo sapiens
  CDR3 for beta chain variable domain of TCR clone 332785 (TRBV7-9, TRBJ1-5)
CASSPQGQPQHF

SEQ ID NO: 665571 - protein, 13 aa, Homo sapiens
  CDR3 for alpha chain variable domain of TCR clone 332786 (TRAV8-3, TRAJ48)
CAVVPFGNEQLTF

SEQ ID NO: 665572 - protein, 15 aa, Homo sapiens
  CDR3 for beta chain variable domain of TCR clone 332786 (TRBV11-2, TRBJ2-1)
CASSSPATRYNEQFF

SEQ ID NO: 665573 - protein, 13 aa, Homo sapiens
  CDR3 for alpha chain variable domain of TCR clone 332787 (TRAV13-2, TRAJ13)
CAERPGGYQKVTF

SEQ ID NO: 665574 - protein, 16 aa, Homo sapiens
  CDR3 for beta chain variable domain of TCR clone 332787 (TRBV18, TRBJ2-5)
CASSPPSSGGAKTRYF

SEQ ID NO: 665575 - protein, 13 aa, Homo sapiens
  CDR3 for alpha chain variable domain of TCR clone 332788 (TRAV17, TRAJ9)
CATDYTGGFKTIF

SEQ ID NO: 665576 - protein, 13 aa, Homo sapiens
  CDR3 for beta chain variable domain of TCR clone 332788 (TRBV7-9, TRBJ1-1)
CASSLAGVTEAFF

SEQ ID NO: 665577 - protein, 13 aa, Homo sapiens
  CDR3 for alpha chain variable domain of TCR clone 332789 (TRAV21, TRAJ57)
CAVTQGGSEKLVF

SEQ ID NO: 665578 - protein, 16 aa, Homo sapiens
  CDR3 for beta chain variable domain of TCR clone 332789 (TRBV5-1, TRBJ2-1)
CASSSRSGGSYNEQYF

SEQ ID NO: 665579 - protein, 12 aa, Homo sapiens
  CDR3 for alpha chain variable domain of TCR clone 332790 (TRAV1-1, TRAJ39)
CAVPVVGNMLTV

SEQ ID NO: 665580 - protein, 17 aa, Homo sapiens
  CDR3 for beta chain variable domain of TCR clone 332790 (TRBV28, TRBJ2-5)
CASSTPEGDALQETQYF

SEQ ID NO: 665581 - protein, 14 aa, Homo sapiens
  CDR3 for alpha chain variable domain of TCR clone 332791 (TRAV12-2, TRAJ44)
CAVNKAGTASKLTF

SEQ ID NO: 665582 - protein, 14 aa, Homo sapiens
  CDR3 for beta chain variable domain of TCR clone 332791 (TRBV7-2, TRBJ1-1)
CASSFLTGTTEAFF

SEQ ID NO: 665583 - protein, 17 aa, Homo sapiens
  CDR3 for alpha chain variable domain of TCR clone 332792 (TRAV3, TRAJ6)
CAVRDGPRAGGSYIPIF

SEQ ID NO: 665584 - protein, 14 aa, Homo sapiens
  CDR3 for beta chain variable domain of TCR clone 332792 (TRBV19, TRBJ2-7)
CASSMGQGAIEQYF

SEQ ID NO: 665585 - protein, 17 aa, Homo sapiens
  CDR3 for alpha chain variable domain of TCR clone 332793 (TRAV8-6, TRAJ4)
CAVSEKLVFGAGTRLAV

SEQ ID NO: 665586 - protein, 14 aa, Homo sapiens
  CDR3 for beta chain variable domain of TCR clone 332793 (TRBV20-1, TRBJ1-1)
CSAQTRIGGTEAFF

SEQ ID NO: 665587 - protein, 14 aa, Homo sapiens
  CDR3 for alpha chain variable domain of TCR clone 332794 (TRAV12-1, TRAJ54)
CVVNIYQGAQKLVF

SEQ ID NO: 665588 - protein, 17 aa, Homo sapiens
  CDR3 for beta chain variable domain of TCR clone 332794 (TRBV13, TRBJ2-3)
CASSLSRVAGGRNTQYF

SEQ ID NO: 665589 - protein, 14 aa, Homo sapiens
  CDR3 for alpha chain variable domain of TCR clone 332795 (TRAV30, TRAJ26)
CGTEIVSYGQNFVF

SEQ ID NO: 665590 - protein, 13 aa, Homo sapiens
  CDR3 for beta chain variable domain of TCR clone 332795 (TRBV19, TRBJ1-3)
CASRLYLGNTIYF

SEQ ID NO: 665591 - protein, 11 aa, Homo sapiens
  CDR3 for alpha chain variable domain of TCR clone 332796 (TRAV17, TRAJ9)
CATTGGFKTIF

SEQ ID NO: 665592 - protein, 15 aa, Homo sapiens
  CDR3 for beta chain variable domain of TCR clone 332796 (TRBV9, TRBJ1-6)
CASSVGGTGGSPLHF

SEQ ID NO: 665593 - protein, 13 aa, Homo sapiens
  CDR3 for alpha chain variable domain of TCR clone 332797 (TRAV21, TRAJ45)
CAVMGGGADGLTF

SEQ ID NO: 665594 - protein, 16 aa, Homo sapiens
  CDR3 for beta chain variable domain of TCR clone 332797 (TRBV20-1, TRBJ2-1)
CSARDHLAGGRWEQFF

SEQ ID NO: 665595 - protein, 13 aa, Homo sapiens
  CDR3 for alpha chain variable domain of TCR clone 332798 (TRAV12-2, TRAJ10)
CAVPTGGGNKLTF

SEQ ID NO: 665596 - protein, 14 aa, Homo sapiens
  CDR3 for beta chain variable domain of TCR clone 332798 (TRBV25-1, TRBJ1-1)
CASTHLGGNAEAFF

SEQ ID NO: 665597 - protein, 12 aa, Homo sapiens
  CDR3 for alpha chain variable domain of TCR clone 332799 (TRAV38-2/DV8, TRAJ47)
CFLMEYGNKLVF

SEQ ID NO: 665598 - protein, 14 aa, Homo sapiens
  CDR3 for beta chain variable domain of TCR clone 332799 (TRBV20-1, TRBJ1-5)
CSATDRGSNQPQHF

SEQ ID NO: 665599 - protein, 18 aa, Homo sapiens
  CDR3 for alpha chain variable domain of TCR clone 332800 (TRAV26-2, TRAJ54)
CILRDVEVGMQGAQKLVF

SEQ ID NO: 665600 - protein, 16 aa, Homo sapiens
  CDR3 for beta chain variable domain of TCR clone 332800 (TRBV6-1, TRBJ2-5)
CASSETLDRGAETQYF

SEQ ID NO: 665601 - protein, 13 aa, Homo sapiens
  CDR3 for alpha chain variable domain of TCR clone 332801 (TRAV12-1, TRAJ11)
CVVTRGGYSTLTF

SEQ ID NO: 665602 - protein, 14 aa, Homo sapiens
  CDR3 for beta chain variable domain of TCR clone 332801 (TRBV20-1, TRBJ2-3)
CSAGGRRGTDTQYF

SEQ ID NO: 665603 - protein, 13 aa, Homo sapiens
  CDR3 for alpha chain variable domain of TCR clone 332802 (TRAV1-1, TRAJ23)
CAVVANQGGKLIF

SEQ ID NO: 665604 - protein, 15 aa, Homo sapiens
  CDR3 for beta chain variable domain of TCR clone 332802 (TRBV12-4, TRBJ1-2)
CASSLAHRDGQAYTF

SEQ ID NO: 665605 - protein, 16 aa, Homo sapiens
  CDR3 for alpha chain variable domain of TCR clone 332803 (TRAV3, TRAJ10)
CAVRDMRAGGGNKLTF

SEQ ID NO: 665606 - protein, 15 aa, Homo sapiens
  CDR3 for beta chain variable domain of TCR clone 332803 (TRBV6-3, TRBJ2-7)
CASSSPGTVFHEQYF

SEQ ID NO: 665607 - protein, 12 aa, Homo sapiens
  CDR3 for alpha chain variable domain of TCR clone 332804 (TRAV27, TRAJ35)
CAGADFGNVLHC

SEQ ID NO: 665608 - protein, 15 aa, Homo sapiens
  CDR3 for beta chain variable domain of TCR clone 332804 (TRBV5-1, TRBJ2-7)
CASSLNGGPAREQYF

SEQ ID NO: 665609 - protein, 12 aa, Homo sapiens
  CDR3 for alpha chain variable domain of TCR clone 332805 (TRAV13-1, TRAJ21)
CAAKEGFNKFYF

SEQ ID NO: 665610 - protein, 17 aa, Homo sapiens
  CDR3 for beta chain variable domain of TCR clone 332805 (TRBV20-1, TRBJ2-1)
CSASSSGLAGCYNEQFF

SEQ ID NO: 665611 - protein, 11 aa, Homo sapiens
  CDR3 for alpha chain variable domain of TCR clone 332806 (TRAV12-1, TRAJ30)
CVENGQDKIIF

SEQ ID NO: 665612 - protein, 15 aa, Homo sapiens
  CDR3 for beta chain variable domain of TCR clone 332806 (TRBV28, TRBJ2-5)
CASSSGRTIQETQYF

SEQ ID NO: 665613 - protein, 13 aa, Homo sapiens
  CDR3 for alpha chain variable domain of TCR clone 332807 (TRAV8-4, TRAJ9)
CAVSGVGGFKTIF

SEQ ID NO: 665614 - protein, 16 aa, Homo sapiens
  CDR3 for beta chain variable domain of TCR clone 332807 (TRBV5-1, TRBJ2-7)
CASSVTSGSSTYEQYF

SEQ ID NO: 665615 - protein, 13 aa, Homo sapiens
  CDR3 for alpha chain variable domain of TCR clone 332808 (TRAV38-2/DV8, TRAJ34)
CAYRTWNTDKLIF

SEQ ID NO: 665616 - protein, 14 aa, Homo sapiens
  CDR3 for beta chain variable domain of TCR clone 332808 (TRBV18, TRBJ2-5)
CASSPGVSQETQYF

SEQ ID NO: 665617 - protein, 17 aa, Homo sapiens
  CDR3 for alpha chain variable domain of TCR clone 332809 (TRAV12-3, TRAJ6)
CTMSARGGAGASYIPTF

SEQ ID NO: 665618 - protein, 16 aa, Homo sapiens
  CDR3 for beta chain variable domain of TCR clone 332809 (TRBV9, TRBJ1-2)
CASSVEEKVAPYGYTF

SEQ ID NO: 665619 - protein, 14 aa, Homo sapiens
  CDR3 for alpha chain variable domain of TCR clone 332810 (TRAV16, TRAJ17)
CALSGRAAGNKLTS

SEQ ID NO: 665620 - protein, 15 aa, Homo sapiens
  CDR3 for beta chain variable domain of TCR clone 332810 (TRBV3-1, TRBJ1-2)
CASSPTRVPEGGYTF

SEQ ID NO: 665621 - protein, 14 aa, Homo sapiens
  CDR3 for alpha chain variable domain of TCR clone 332811 (TRAV8-4, TRAJ54)
CAVSEVLGAQELVF

SEQ ID NO: 665622 - protein, 15 aa, Homo sapiens
  CDR3 for beta chain variable domain of TCR clone 332811 (TRBV6-1, TRBJ2-6)
CASSSRPSGANVLTF

SEQ ID NO: 665623 - protein, 17 aa, Homo sapiens
  CDR3 for alpha chain variable domain of TCR clone 332812 (TRAV27, TRAJ26)
CAGARAPLDNYGQNFVF

SEQ ID NO: 665624 - protein, 15 aa, Homo sapiens
  CDR3 for beta chain variable domain of TCR clone 332812 (TRBV11-2, TRBJ2-5)
CAISPRSGGLETQYF

SEQ ID NO: 665625 - protein, 11 aa, Homo sapiens
  CDR3 for alpha chain variable domain of TCR clone 332813 (TRAV21, TRAJ34)
CAHYNTDKLIF

SEQ ID NO: 665626 - protein, 17 aa, Homo sapiens
  CDR3 for beta chain variable domain of TCR clone 332813 (TRBV7-3, TRBJ2-2)
CASSLSGTSGGTGELFF

SEQ ID NO: 665627 - protein, 12 aa, Homo sapiens
  CDR3 for alpha chain variable domain of TCR clone 332814 (TRAV21, TRAJ33)
CAKMDSNYQLIW

SEQ ID NO: 665628 - protein, 15 aa, Homo sapiens
  CDR3 for beta chain variable domain of TCR clone 332814 (TRBV12-4, TRBJ2-5)
CASSPPTGPQETQYF

SEQ ID NO: 665629 - protein, 14 aa, Homo sapiens
  CDR3 for alpha chain variable domain of TCR clone 332815 (TRAV26-1, TRAJ45)
CIEVTGGGAAGLTF

SEQ ID NO: 665630 - protein, 13 aa, Homo sapiens
  CDR3 for beta chain variable domain of TCR clone 332815 (TRBV7-6, TRBJ1-2)
CASSLVADYGYAF

SEQ ID NO: 665631 - protein, 11 aa, Homo sapiens
  CDR3 for alpha chain variable domain of TCR clone 332816 (TRAV3, TRAJ21)
CAVGNFNKFYF

SEQ ID NO: 665632 - protein, 13 aa, Homo sapiens
  CDR3 for beta chain variable domain of TCR clone 332816 (TRBV28, TRBJ2-7)
CASKAGGVYEQYF

SEQ ID NO: 665633 - protein, 13 aa, Homo sapiens
  CDR3 for alpha chain variable domain of TCR clone 332817 (TRAV21, TRAJ27)
CAARPGKAGKSTF

SEQ ID NO: 665634 - protein, 15 aa, Homo sapiens
  CDR3 for beta chain variable domain of TCR clone 332817 (TRBV20-1, TRBJ2-7)
CSARDRVSGMDEQYF

SEQ ID NO: 665635 - protein, 13 aa, Homo sapiens
  CDR3 for alpha chain variable domain of TCR clone 332818 (TRAV8-3, TRAJ36)
CAVGATGANNLFF

SEQ ID NO: 665636 - protein, 15 aa, Homo sapiens
  CDR3 for beta chain variable domain of TCR clone 332818 (TRBV7-2, TRBJ1-2)
CASSPRASWNYGYIF

SEQ ID NO: 665637 - protein, 15 aa, Homo sapiens
  CDR3 for alpha chain variable domain of TCR clone 332819 (TRAV35, TRAJ40)
CAGQLGTSGTYRYIF

SEQ ID NO: 665638 - protein, 14 aa, Homo sapiens
  CDR3 for beta chain variable domain of TCR clone 332819 (TRBV7-3, TRBJ2-1)
CASSLAGVTNEQFF

SEQ ID NO: 665639 - protein, 14 aa, Homo sapiens
  CDR3 for alpha chain variable domain of TCR clone 332820 (TRAV3, TRAJ21)
CAVRDAYNFNNFYF

SEQ ID NO: 665640 - protein, 15 aa, Homo sapiens
  CDR3 for beta chain variable domain of TCR clone 332820 (TRBV6-5, TRBJ1-5)
CASSYSWDSNQPQHF

SEQ ID NO: 665641 - protein, 23 aa, Homo sapiens
  CDR3 for alpha chain variable domain of TCR clone 332821 (TRAV26-1, TRAJ22)
CIVRVSFWFCKATDLWICDTIDF

SEQ ID NO: 665642 - protein, 13 aa, Homo sapiens
  CDR3 for beta chain variable domain of TCR clone 332821 (TRBV7-9, TRBJ1-2)
CASSLKQNYGYTF

SEQ ID NO: 665643 - protein, 13 aa, Homo sapiens
  CDR3 for alpha chain variable domain of TCR clone 332822 (TRAV17, TRAJ54)
CAMKIQGAQKLVF

SEQ ID NO: 665644 - protein, 15 aa, Homo sapiens
  CDR3 for beta chain variable domain of TCR clone 332822 (TRBV5-1, TRBJ2-1)
CASSPPRAPYNEQFF

SEQ ID NO: 665645 - protein, 15 aa, Homo sapiens
  CDR3 for alpha chain variable domain of TCR clone 332823 (TRAV25, TRAJ53)
CPTSNSGGSNYKLTF

SEQ ID NO: 665646 - protein, 15 aa, Homo sapiens
  CDR3 for beta chain variable domain of TCR clone 332823 (TRBV12-4, TRBJ2-1)
CASSLLATGNNEQFF

SEQ ID NO: 665647 - protein, 13 aa, Homo sapiens
  CDR3 for alpha chain variable domain of TCR clone 332824 (TRAV2, TRAJ15)
CAVASQAGTALIF

SEQ ID NO: 665648 - protein, 15 aa, Homo sapiens
  CDR3 for beta chain variable domain of TCR clone 332824 (TRBV11-2, TRBJ1-6)
CASSLDPWAVSPLHF

SEQ ID NO: 665649 - protein, 11 aa, Homo sapiens
  CDR3 for alpha chain variable domain of TCR clone 332825 (TRAV26-1, )
CIADHAATTIS

SEQ ID NO: 665650 - protein, 17 aa, Homo sapiens
  CDR3 for beta chain variable domain of TCR clone 332825 (TRBV11-2, TRBJ2-6)
CASSQRDIFSGANVLTF

SEQ ID NO: 665651 - protein, 14 aa, Homo sapiens
  CDR3 for alpha chain variable domain of TCR clone 332826 (TRAV12-1, TRAJ13)
CVVIDSGGYQKVTF

SEQ ID NO: 665652 - protein, 11 aa, Homo sapiens
  CDR3 for beta chain variable domain of TCR clone 332826 (TRBV20-1, TRBJ2-7)
CSARTSYEQYF

SEQ ID NO: 665653 - protein, 13 aa, Homo sapiens
  CDR3 for alpha chain variable domain of TCR clone 332827 (TRAV12-1, TRAJ47)
CVVNMEYGNKLVF

SEQ ID NO: 665654 - protein, 17 aa, Homo sapiens
  CDR3 for beta chain variable domain of TCR clone 332827 (TRBV28, TRBJ2-5)
CASSTPEGDALQETQYF

SEQ ID NO: 665655 - protein, 18 aa, Homo sapiens
  CDR3 for alpha chain variable domain of TCR clone 332828 (TRAV26-1, TRAJ48)
CCVLLHRQSGFGNEKLTF

SEQ ID NO: 665656 - protein, 13 aa, Homo sapiens
  CDR3 for beta chain variable domain of TCR clone 332828 (TRBV11-3, TRBJ2-3)
CASSHDTKDTQYF

SEQ ID NO: 665657 - protein, 14 aa, Homo sapiens
  CDR3 for alpha chain variable domain of TCR clone 332829 (TRAV1-2, TRAJ16)
CAVNRFSEGQKLLF

SEQ ID NO: 665658 - protein, 15 aa, Homo sapiens
  CDR3 for beta chain variable domain of TCR clone 332829 (TRBV27, TRBJ2-3)
CASSSLAGVIDTQYF

SEQ ID NO: 665659 - protein, 14 aa, Homo sapiens
  CDR3 for alpha chain variable domain of TCR clone 332830 (TRAV2, TRAJ9)
CAVEDRSGGFKTIF

SEQ ID NO: 665660 - protein, 17 aa, Homo sapiens
  CDR3 for beta chain variable domain of TCR clone 332830 (TRBV15, TRBJ2-3)
CATSGTTSEEGTDTQYF

SEQ ID NO: 665661 - protein, 14 aa, Homo sapiens
  CDR3 for alpha chain variable domain of TCR clone 332831 (TRAV8-6, TRAJ52)
CAVIGGTSYGKLTF

SEQ ID NO: 665662 - protein, 15 aa, Homo sapiens
  CDR3 for beta chain variable domain of TCR clone 332831 (TRBV11-2, TRBJ2-5)
CASSWGAGGVETQYF

SEQ ID NO: 665663 - protein, 15 aa, Homo sapiens
  CDR3 for alpha chain variable domain of TCR clone 332832 (TRAV2, TRAJ9)
CAVEDRGTGGFKTIF

SEQ ID NO: 665664 - protein, 16 aa, Homo sapiens
  CDR3 for beta chain variable domain of TCR clone 332832 (TRBV24-1, TRBJ2-3)
CATSDPGTGATDTEYF

SEQ ID NO: 665665 - protein, 12 aa, Homo sapiens
  CDR3 for alpha chain variable domain of TCR clone 332833 (TRAV21, TRAJ33)
CAVQDSDYQLIW

SEQ ID NO: 665666 - protein, 14 aa, Homo sapiens
  CDR3 for beta chain variable domain of TCR clone 332833 (TRBV28, TRBJ2-1)
CASSPGEGGNVQFF

SEQ ID NO: 665667 - protein, 13 aa, Homo sapiens
  CDR3 for alpha chain variable domain of TCR clone 332834 (TRAV12-1, TRAJ29)
CVVNGPGNTPLVF

SEQ ID NO: 665668 - protein, 13 aa, Homo sapiens
  CDR3 for beta chain variable domain of TCR clone 332834 (TRBV7-2, TRBJ2-5)
CASSRGGLENQYF

SEQ ID NO: 665669 - protein, 19 aa, Homo sapiens
  CDR3 for alpha chain variable domain of TCR clone 332835 (TRAV17, TRAJ54)
CFLLLCYGRGVQGAQKLVF

SEQ ID NO: 665670 - protein, 14 aa, Homo sapiens
  CDR3 for beta chain variable domain of TCR clone 332835 (TRBV4-1, TRBJ2-5)
CASSRSGSGETQCF

SEQ ID NO: 665671 - protein, 14 aa, Homo sapiens
  CDR3 for alpha chain variable domain of TCR clone 332836 (TRAV8-2, TRAJ23)
CVVSDDNQGGKLIF

SEQ ID NO: 665672 - protein, 14 aa, Homo sapiens
  CDR3 for beta chain variable domain of TCR clone 332836 (TRBV25-1, TRBJ1-1)
CASTHLGGNTEAFF

SEQ ID NO: 665673 - protein, 15 aa, Homo sapiens
  CDR3 for alpha chain variable domain of TCR clone 332837 (TRAV1-2, TRAJ32)
CAVSGYGGATNKLIF

SEQ ID NO: 665674 - protein, 15 aa, Homo sapiens
  CDR3 for beta chain variable domain of TCR clone 332837 (TRBV25-1, TRBJ2-5)
CASSDTGTHQETQYF

SEQ ID NO: 665675 - protein, 13 aa, Homo sapiens
  CDR3 for alpha chain variable domain of TCR clone 332838 (TRAV8-3, TRAJ28)
CAVGPVGSYQLTF

SEQ ID NO: 665676 - protein, 15 aa, Homo sapiens
  CDR3 for beta chain variable domain of TCR clone 332838 (TRBV28, TRBJ2-5)
CASSPGQGSIETQYF

SEQ ID NO: 665677 - protein, 17 aa, Homo sapiens
  CDR3 for alpha chain variable domain of TCR clone 332839 (TRAV12-2, TRAJ22)
CAVNRIPFSGSARQLTF

SEQ ID NO: 665678 - protein, 15 aa, Homo sapiens
  CDR3 for beta chain variable domain of TCR clone 332839 (TRBV6-1, TRBJ2-3)
CASSERGGITDTQYF

SEQ ID NO: 665679 - protein, 13 aa, Homo sapiens
  CDR3 for alpha chain variable domain of TCR clone 332840 (TRAV23/DV6, TRAJ15)
CAALPAGTNCSDL

SEQ ID NO: 665680 - protein, 14 aa, Homo sapiens
  CDR3 for beta chain variable domain of TCR clone 332840 (TRBV7-9, TRBJ1-2)
CASRRQGANYGYTF

SEQ ID NO: 665681 - protein, 14 aa, Homo sapiens
  CDR3 for alpha chain variable domain of TCR clone 332841 (TRAV26-1, TRAJ38)
CIADNAGNNRKLIW

SEQ ID NO: 665682 - protein, 15 aa, Homo sapiens
  CDR3 for beta chain variable domain of TCR clone 332841 (TRBV9, TRBJ1-6)
CASSVAGTGDSPLHF

SEQ ID NO: 665683 - protein, 14 aa, Homo sapiens
  CDR3 for alpha chain variable domain of TCR clone 332842 (TRAV13-1, TRAJ4)
CAASFSGGYNKLIF

SEQ ID NO: 665684 - protein, 13 aa, Homo sapiens
  CDR3 for beta chain variable domain of TCR clone 332842 (TRBV20-1, TRBJ1-1)
CSAPLGGGTEAFF

SEQ ID NO: 665685 - protein, 13 aa, Homo sapiens
  CDR3 for alpha chain variable domain of TCR clone 332843 (TRAV12-2, TRAJ37)
CAGGSGNTGKLIF

SEQ ID NO: 665686 - protein, 15 aa, Homo sapiens
  CDR3 for beta chain variable domain of TCR clone 332843 (TRBV2, TRBJ2-1)
CASSELAGSYNEQFF

SEQ ID NO: 665687 - protein, 12 aa, Homo sapiens
  CDR3 for alpha chain variable domain of TCR clone 332844 (TRAV12-3, TRAJ17)
CAMTLTGNKLTF

SEQ ID NO: 665688 - protein, 13 aa, Homo sapiens
  CDR3 for beta chain variable domain of TCR clone 332844 (TRBV7-3, TRBJ2-1)
CASSLIDRGEQFF

SEQ ID NO: 665689 - protein, 11 aa, Homo sapiens
  CDR3 for alpha chain variable domain of TCR clone 332845 (TRAV35, TRAJ57)
GPQGGSAKLVF

SEQ ID NO: 665690 - protein, 16 aa, Homo sapiens
  CDR3 for beta chain variable domain of TCR clone 332845 (TRBV7-2, TRBJ1-5)
CASSWTGGPGNQPQHF

SEQ ID NO: 665691 - protein, 16 aa, Homo sapiens
  CDR3 for alpha chain variable domain of TCR clone 332846 (TRAV3, TRAJ37)
CAVSGKGSGNTGKLIF

SEQ ID NO: 665692 - protein, 18 aa, Homo sapiens
  CDR3 for beta chain variable domain of TCR clone 332846 (TRBV12-4, TRBJ2-2)
CASNLVAGTRGRTGELFF

SEQ ID NO: 665693 - protein, 13 aa, Homo sapiens
  CDR3 for alpha chain variable domain of TCR clone 332847 (TRAV20, TRAJ49)
CAVQARTGNQFYF

SEQ ID NO: 665694 - protein, 12 aa, Homo sapiens
  CDR3 for beta chain variable domain of TCR clone 332847 (TRBV28, TRBJ1-3)
CASVSSGNTIYF

SEQ ID NO: 665695 - protein, 13 aa, Homo sapiens
  CDR3 for alpha chain variable domain of TCR clone 332848 (TRAV13-2, TRAJ40)
CAEFTSGTYKYIF

SEQ ID NO: 665696 - protein, 14 aa, Homo sapiens
  CDR3 for beta chain variable domain of TCR clone 332848 (TRBV10-2, TRBJ1-5)
CAGSSTGRNQPQHF

SEQ ID NO: 665697 - protein, 12 aa, Homo sapiens
  CDR3 for alpha chain variable domain of TCR clone 332849 (TRAV3, TRAJ20)
CALRDPDYKLSF

SEQ ID NO: 665698 - protein, 14 aa, Homo sapiens
  CDR3 for beta chain variable domain of TCR clone 332849 (TRBV4-2, TRBJ2-1)
CASGLDRAYNEQSF

SEQ ID NO: 665699 - protein, 14 aa, Homo sapiens
  CDR3 for alpha chain variable domain of TCR clone 332850 (TRAV2, TRAJ9)
CAVEDRSGGFKTIF

SEQ ID NO: 665700 - protein, 14 aa, Homo sapiens
  CDR3 for beta chain variable domain of TCR clone 332850 (TRBV15, TRBJ2-3)
CATRSGTSTDTQYF

SEQ ID NO: 665701 - protein, 14 aa, Homo sapiens
  CDR3 for alpha chain variable domain of TCR clone 332851 (TRAV12-2, TRAJ40)
CAVKIPSGTYKYIF

SEQ ID NO: 665702 - protein, 17 aa, Homo sapiens
  CDR3 for beta chain variable domain of TCR clone 332851 (TRBV7-9, TRBJ1-1)
CASSSIPGQGQNTEAFF

SEQ ID NO: 665703 - protein, 16 aa, Homo sapiens
  CDR3 for alpha chain variable domain of TCR clone 332852 (TRAV3, TRAJ37)
CAVRPHFSGNTGKLIF

SEQ ID NO: 665704 - protein, 16 aa, Homo sapiens
  CDR3 for beta chain variable domain of TCR clone 332852 (TRBV20-1, TRBJ1-4)
CSAPGQGLLTNEKLFF

SEQ ID NO: 665705 - protein, 15 aa, Homo sapiens
  CDR3 for alpha chain variable domain of TCR clone 332853 (TRAV8-2, TRAJ16)
CVVSDGFSDGQKLLF

SEQ ID NO: 665706 - protein, 15 aa, Homo sapiens
  CDR3 for beta chain variable domain of TCR clone 332853 (TRBV7-2, TRBJ2-1)
CASSSGLAGGNEQFL

SEQ ID NO: 665707 - protein, 14 aa, Homo sapiens
  CDR3 for alpha chain variable domain of TCR clone 332854 (TRAV12-2, TRAJ33)
CAVDYPDSKYQLIW

SEQ ID NO: 665708 - protein, 17 aa, Homo sapiens
  CDR3 for beta chain variable domain of TCR clone 332854 (TRBV11-2, TRBJ2-1)
CASSLYPPGVEYNEQFF

SEQ ID NO: 665709 - protein, 13 aa, Homo sapiens
  CDR3 for alpha chain variable domain of TCR clone 332855 (TRAV13-1, TRAJ6)
CAARRGGSYIPTL

SEQ ID NO: 665710 - protein, 16 aa, Homo sapiens
  CDR3 for beta chain variable domain of TCR clone 332855 (TRBV7-9, TRBJ2-2)
CASSLATGVGTGELFF

SEQ ID NO: 665711 - protein, 23 aa, Homo sapiens
  CDR3 for alpha chain variable domain of TCR clone 332856 (TRAV12-2, TRAJ36)
SLLIRDSQPSDSATLERANNLFF

SEQ ID NO: 665712 - protein, 15 aa, Homo sapiens
  CDR3 for beta chain variable domain of TCR clone 332856 (TRBV29-1, TRBJ2-7)
CSVELFDRGSYEQYF

SEQ ID NO: 665713 - protein, 15 aa, Homo sapiens
  CDR3 for alpha chain variable domain of TCR clone 332857 (TRAV26-2, TRAJ50)
CILRDEETSHDKVIF

SEQ ID NO: 665714 - protein, 16 aa, Homo sapiens
  CDR3 for beta chain variable domain of TCR clone 332857 (TRBV9, TRBJ2-1)
CASSVGGGGNYNEQFF

SEQ ID NO: 665715 - protein, 15 aa, Homo sapiens
  CDR3 for alpha chain variable domain of TCR clone 332858 (TRAV16, TRAJ48)
CALFISNFGNEKLTF

SEQ ID NO: 665716 - protein, 16 aa, Homo sapiens
  CDR3 for beta chain variable domain of TCR clone 332858 (TRBV19, TRBJ2-1)
CASSKAGPSSYNEQFF

SEQ ID NO: 665717 - protein, 16 aa, Homo sapiens
  CDR3 for alpha chain variable domain of TCR clone 332859 (TRAV17, TRAJ53)
CATDGGSGGSSYKLTF

SEQ ID NO: 665718 - protein, 14 aa, Homo sapiens
  CDR3 for beta chain variable domain of TCR clone 332859 (TRBV6-1, TRBJ2-2)
CASRELAYTGELFF

SEQ ID NO: 665719 - protein, 14 aa, Homo sapiens
  CDR3 for alpha chain variable domain of TCR clone 332860 (TRAV20, TRAJ29)
CAVQAWVGNTALVF

SEQ ID NO: 665720 - protein, 15 aa, Homo sapiens
  CDR3 for beta chain variable domain of TCR clone 332860 (TRBV29-1, TRBJ2-7)
CSVEFFDRGSYEQYF

SEQ ID NO: 665721 - protein, 13 aa, Homo sapiens
  CDR3 for alpha chain variable domain of TCR clone 332861 (TRAV12-2, TRAJ20)
CDVYPSNDYKLSF

SEQ ID NO: 665722 - protein, 13 aa, Homo sapiens
  CDR3 for beta chain variable domain of TCR clone 332861 (TRBV7-3, TRBJ2-1)
CASSPVAYNEQFF

SEQ ID NO: 665723 - protein, 14 aa, Homo sapiens
  CDR3 for alpha chain variable domain of TCR clone 332862 (TRAV21, TRAJ35)
CAVMPIGFGNVLHC

SEQ ID NO: 665724 - protein, 12 aa, Homo sapiens
  CDR3 for beta chain variable domain of TCR clone 332862 (TRBV5-4, TRBJ2-5)
CASSSTRETQYL

SEQ ID NO: 665725 - protein, 14 aa, Homo sapiens
  CDR3 for alpha chain variable domain of TCR clone 332863 (TRAV1-1, TRAJ35)
CAVRSIGFGNVLHC

SEQ ID NO: 665726 - protein, 17 aa, Homo sapiens
  CDR3 for beta chain variable domain of TCR clone 332863 (TRBV11-2, TRBJ2-1)
CASSLYPPGVEYNEQFF

SEQ ID NO: 665727 - protein, 17 aa, Homo sapiens
  CDR3 for alpha chain variable domain of TCR clone 332864 (TRAV27, TRAJ42)
CAERVIYYEGSQGNLIF

SEQ ID NO: 665728 - protein, 14 aa, Homo sapiens
  CDR3 for beta chain variable domain of TCR clone 332864 (TRBV20-1, TRBJ2-1)
CSAQIGGSANEQFF

SEQ ID NO: 665729 - protein, 13 aa, Homo sapiens
  CDR3 for alpha chain variable domain of TCR clone 332865 (TRAV8-3, TRAJ44)
CAVVPGTASKLTF

SEQ ID NO: 665730 - protein, 14 aa, Homo sapiens
  CDR3 for beta chain variable domain of TCR clone 332865 (TRBV11-2, TRBJ2-3)
CDSSRLARTDTQHF

SEQ ID NO: 665731 - protein, 12 aa, Homo sapiens
  CDR3 for alpha chain variable domain of TCR clone 332866 (TRAV12-3, TRAJ17)
CAMTLTGNKLTF

SEQ ID NO: 665732 - protein, 17 aa, Homo sapiens
  CDR3 for beta chain variable domain of TCR clone 332866 (TRBV7-3, TRBJ2-3)
CASSLRKRMRGADTQYF

SEQ ID NO: 665733 - protein, 16 aa, Homo sapiens
  CDR3 for alpha chain variable domain of TCR clone 332867 (TRAV4, TRAJ22)
CLVGDLYSGSARQLTF

SEQ ID NO: 665734 - protein, 14 aa, Homo sapiens
  CDR3 for beta chain variable domain of TCR clone 332867 (TRBV28, TRBJ2-3)
CASSWRGRADTQYF

SEQ ID NO: 665735 - protein, 14 aa, Homo sapiens
  CDR3 for alpha chain variable domain of TCR clone 332868 (TRAV2, TRAJ9)
CAVEDRSGGFKTIF

SEQ ID NO: 665736 - protein, 14 aa, Homo sapiens
  CDR3 for beta chain variable domain of TCR clone 332868 (TRBV19, TRBJ2-3)
CASSMAGITDTQYF

SEQ ID NO: 665737 - protein, 15 aa, Homo sapiens
  CDR3 for alpha chain variable domain of TCR clone 332869 (TRAV3, TRAJ22)
CAVRDRCGSARQLTF

SEQ ID NO: 665738 - protein, 10 aa, Homo sapiens
  CDR3 for beta chain variable domain of TCR clone 332869 (TRBV12-4, TRBJ1-2)
CASSFIWHTF

SEQ ID NO: 665739 - protein, 14 aa, Homo sapiens
  CDR3 for alpha chain variable domain of TCR clone 332870 (TRAV2, TRAJ20)
CAVEDVVNDYKLSF

SEQ ID NO: 665740 - protein, 15 aa, Homo sapiens
  CDR3 for beta chain variable domain of TCR clone 332870 (TRBV5-1, TRBJ2-5)
CASSLGLAEQETQYF

SEQ ID NO: 665741 - protein, 12 aa, Homo sapiens
  CDR3 for alpha chain variable domain of TCR clone 332871 (TRAV12-2, TRAJ3)
CAVWSSAYKIIF

SEQ ID NO: 665742 - protein, 12 aa, Homo sapiens
  CDR3 for beta chain variable domain of TCR clone 332871 (TRBV11-2, TRBJ2-1)
CASSPGNNEQFF

SEQ ID NO: 665743 - protein, 12 aa, Homo sapiens
  CDR3 for alpha chain variable domain of TCR clone 332872 (TRAV13-1, TRAJ21)
CAAFFNFNKFYF

SEQ ID NO: 665744 - protein, 16 aa, Homo sapiens
  CDR3 for beta chain variable domain of TCR clone 332872 (TRBV5-1, TRBJ2-3)
CASSLYTGQGTDTQYF

SEQ ID NO: 665745 - protein, 13 aa, Homo sapiens
  CDR3 for alpha chain variable domain of TCR clone 332873 (TRAV3, TRAJ31)
CAVREGNNARLMF

SEQ ID NO: 665746 - protein, 15 aa, Homo sapiens
  CDR3 for beta chain variable domain of TCR clone 332873 (TRBV5-1, TRBJ2-7)
CASSLNGGPAREQYF

SEQ ID NO: 665747 - protein, 14 aa, Homo sapiens
  CDR3 for alpha chain variable domain of TCR clone 332874 (TRAV16, TRAJ37)
CALDISGNTGKLIF

SEQ ID NO: 665748 - protein, 13 aa, Homo sapiens
  CDR3 for beta chain variable domain of TCR clone 332874 (TRBV7-6, TRBJ2-1)
CQQLGGGADEQFF

SEQ ID NO: 665749 - protein, 14 aa, Homo sapiens
  CDR3 for alpha chain variable domain of TCR clone 332875 (TRAV1-2, TRAJ8)
CAVREDTSFQKLVF

SEQ ID NO: 665750 - protein, 14 aa, Homo sapiens
  CDR3 for beta chain variable domain of TCR clone 332875 (TRBV7-8, TRBJ2-3)
CASSLEAGTDTQYF

SEQ ID NO: 665751 - protein, 13 aa, Homo sapiens
  CDR3 for alpha chain variable domain of TCR clone 332876 (TRAV12-3, TRAJ6)
YANPSGGSYIPTF

SEQ ID NO: 665752 - protein, 14 aa, Homo sapiens
  CDR3 for beta chain variable domain of TCR clone 332876 (TRBV19, TRBJ1-1)
CASSRDRDATEAFF

SEQ ID NO: 665753 - protein, 16 aa, Homo sapiens
  CDR3 for alpha chain variable domain of TCR clone 332877 (TRAV30, TRAJ24)
CGTEIVDADSWGKLQF

SEQ ID NO: 665754 - protein, 15 aa, Homo sapiens
  CDR3 for beta chain variable domain of TCR clone 332877 (TRBV5-1, TRBJ1-1)
CASSSTTGTNTEAFF

SEQ ID NO: 665755 - protein, 14 aa, Homo sapiens
  CDR3 for alpha chain variable domain of TCR clone 332878 (TRAV9-2, TRAJ39)
CALYIYNAGNMLAF

SEQ ID NO: 665756 - protein, 15 aa, Homo sapiens
  CDR3 for beta chain variable domain of TCR clone 332878 (TRBV3-1, TRBJ2-7)
CASSQVRQGAYEQYF

SEQ ID NO: 665757 - protein, 13 aa, Homo sapiens
  CDR3 for alpha chain variable domain of TCR clone 332879 (TRAV38-1, TRAJ42)
CARWGGSQGNLIF

SEQ ID NO: 665758 - protein, 17 aa, Homo sapiens
  CDR3 for beta chain variable domain of TCR clone 332879 (TRBV20-1, TRBJ2-1)
CSARDLLAGVWDNEQFF

SEQ ID NO: 665759 - protein, 10 aa, Homo sapiens
  CDR3 for alpha chain variable domain of TCR clone 332880 (TRAV13-2, TRAJ49)
CADTGNQFYF

SEQ ID NO: 665760 - protein, 19 aa, Homo sapiens
  CDR3 for beta chain variable domain of TCR clone 332880 (TRBV11-3, TRBJ2-2)
CASSTRPGAKTTNTGELFF

SEQ ID NO: 665761 - protein, 14 aa, Homo sapiens
  CDR3 for alpha chain variable domain of TCR clone 332881 (TRAV12-3, TRAJ29)
CAMSPYSGNTPLVF

SEQ ID NO: 665762 - protein, 14 aa, Homo sapiens
  CDR3 for beta chain variable domain of TCR clone 332881 (TRBV7-9, TRBJ2-2)
CASSGLADTGELFF

SEQ ID NO: 665763 - protein, 20 aa, Homo sapiens
  CDR3 for alpha chain variable domain of TCR clone 332882 (TRAV1-2, TRAJ10)
CLLPLCCERVLTGGGNKLTF

SEQ ID NO: 665764 - protein, 14 aa, Homo sapiens
  CDR3 for beta chain variable domain of TCR clone 332882 (TRBV11-2, TRBJ1-1)
CASSLDRYGTEAFF

SEQ ID NO: 665765 - protein, 16 aa, Homo sapiens
  CDR3 for alpha chain variable domain of TCR clone 332883 (TRAV3, TRAJ21)
CAVRDIERGNFNKFYF

SEQ ID NO: 665766 - protein, 13 aa, Homo sapiens
  CDR3 for beta chain variable domain of TCR clone 332883 (TRBV4-2, TRBJ1-1)
CAGSQAGNTEAFF

SEQ ID NO: 665767 - protein, 13 aa, Homo sapiens
  CDR3 for alpha chain variable domain of TCR clone 332884 (TRAV29/DV5, TRAJ31)
CAASRNNNARLMF

SEQ ID NO: 665768 - protein, 20 aa, Homo sapiens
  CDR3 for beta chain variable domain of TCR clone 332884 (TRBV7-8, TRBJ2-2)
CASSHLFPGPTIHITGELFF

SEQ ID NO: 665769 - protein, 18 aa, Homo sapiens
  CDR3 for alpha chain variable domain of TCR clone 332885 (TRAV1-2, TRAJ18)
CALRDMGDRGSTLGRLYF

SEQ ID NO: 665770 - protein, 16 aa, Homo sapiens
  CDR3 for beta chain variable domain of TCR clone 332885 (TRBV29-1, TRBJ1-2)
CSVEANRDIANYGYTF

SEQ ID NO: 665771 - protein, 12 aa, Homo sapiens
  CDR3 for alpha chain variable domain of TCR clone 332886 (TRAV13-1, TRAJ49)
CAASPMGTQFYF

SEQ ID NO: 665772 - protein, 13 aa, Homo sapiens
  CDR3 for beta chain variable domain of TCR clone 332886 (TRBV20-1, TRBJ2-2)
CSASAPGTGELFF

SEQ ID NO: 665773 - protein, 17 aa, Homo sapiens
  CDR3 for alpha chain variable domain of TCR clone 332887 (TRAV3, TRAJ12)
CAVRDGGRMDSSYKLIF

SEQ ID NO: 665774 - protein, 16 aa, Homo sapiens
  CDR3 for beta chain variable domain of TCR clone 332887 (TRBV27, TRBJ2-2)
CASSFRVLVRTGELFF

SEQ ID NO: 665775 - protein, 12 aa, Homo sapiens
  CDR3 for alpha chain variable domain of TCR clone 332888 (TRAV3, TRAJ20)
CAVRDGDYKLSF

SEQ ID NO: 665776 - protein, 13 aa, Homo sapiens
  CDR3 for beta chain variable domain of TCR clone 332888 (TRBV18, TRBJ1-1)
CASSGGRNTEAFF

SEQ ID NO: 665777 - protein, 13 aa, Homo sapiens
  CDR3 for alpha chain variable domain of TCR clone 332889 (TRAV26-2, TRAJ57)
CILRPSGSEKLVF

SEQ ID NO: 665778 - protein, 12 aa, Homo sapiens
  CDR3 for beta chain variable domain of TCR clone 332889 (TRBV12-4, TRBJ2-3)
CASSSTTDTQYF

SEQ ID NO: 665779 - protein, 16 aa, Homo sapiens
  CDR3 for alpha chain variable domain of TCR clone 332890 (TRAV30, TRAJ24)
CGTEIVDADSWGKFQF

SEQ ID NO: 665780 - protein, 14 aa, Homo sapiens
  CDR3 for beta chain variable domain of TCR clone 332890 (TRBV9, TRBJ2-1)
CASSVDPRGKEQFF

SEQ ID NO: 665781 - protein, 14 aa, Homo sapiens
  CDR3 for alpha chain variable domain of TCR clone 332891 (TRAV1-2, TRAJ16)
CAVNRFSDCQKLLY

SEQ ID NO: 665782 - protein, 12 aa, Homo sapiens
  CDR3 for beta chain variable domain of TCR clone 332891 (TRBV11-2, TRBJ1-1)
CQQLSLQPAAFF

SEQ ID NO: 665783 - protein, 17 aa, Homo sapiens
  CDR3 for alpha chain variable domain of TCR clone 332892 (TRAV13-1, TRAJ5)
CSNPSLSRDTGRRALTF

SEQ ID NO: 665784 - protein, 17 aa, Homo sapiens
  CDR3 for beta chain variable domain of TCR clone 332892 (TRBV24-1, TRBJ2-1)
CATSDVSTSGTYNEQFC

SEQ ID NO: 665785 - protein, 13 aa, Homo sapiens
  CDR3 for alpha chain variable domain of TCR clone 332893 (TRAV8-4, TRAJ30)
CAVSVDRDDKIIF

SEQ ID NO: 665786 - protein, 13 aa, Homo sapiens
  CDR3 for beta chain variable domain of TCR clone 332893 (TRBV3-1, TRBJ2-2)
CASLARGSGELFF

SEQ ID NO: 665787 - protein, 11 aa, Homo sapiens
  CDR3 for alpha chain variable domain of TCR clone 332894 (TRAV21, TRAJ33)
CAILSNYQLIW

SEQ ID NO: 665788 - protein, 15 aa, Homo sapiens
  CDR3 for beta chain variable domain of TCR clone 332894 (TRBV11-2, TRBJ2-7)
CASSLMVGGSYEQYF

SEQ ID NO: 665789 - protein, 15 aa, Homo sapiens
  CDR3 for alpha chain variable domain of TCR clone 332895 (TRAV3, TRAJ4)
CAVRDGTGGYNKLIF

SEQ ID NO: 665790 - protein, 13 aa, Homo sapiens
  CDR3 for beta chain variable domain of TCR clone 332895 (TRBV7-6, TRBJ2-3)
CASSLRSDNTQYF

SEQ ID NO: 665791 - protein, 16 aa, Homo sapiens
  CDR3 for alpha chain variable domain of TCR clone 332896 (TRAV3, TRAJ21)
CAVRDIERGNFNKFYF

SEQ ID NO: 665792 - protein, 13 aa, Homo sapiens
  CDR3 for beta chain variable domain of TCR clone 332896 (TRBV27, TRBJ2-7)
CASSFTTGYEQYF

SEQ ID NO: 665793 - protein, 12 aa, Homo sapiens
  CDR3 for alpha chain variable domain of TCR clone 332897 (TRAV13-2, TRAJ39)
CAENNAGDMLTF

SEQ ID NO: 665794 - protein, 13 aa, Homo sapiens
  CDR3 for beta chain variable domain of TCR clone 332897 (TRBV19, TRBJ1-1)
CASSPSNGGEAFF

SEQ ID NO: 665795 - protein, 14 aa, Homo sapiens
  CDR3 for alpha chain variable domain of TCR clone 332898 (TRAV21, TRAJ45)
LAVVSGGGADGLTF

SEQ ID NO: 665796 - protein, 14 aa, Homo sapiens
  CDR3 for beta chain variable domain of TCR clone 332898 (TRBV20-1, TRBJ2-3)
CSALGLEGADTQYF

SEQ ID NO: 665797 - protein, 14 aa, Homo sapiens
  CDR3 for alpha chain variable domain of TCR clone 332899 (TRAV16, TRAJ33)
CALSAMDSNYQLSW

SEQ ID NO: 665798 - protein, 16 aa, Homo sapiens
  CDR3 for beta chain variable domain of TCR clone 332899 (TRBV12-4, TRBJ2-3)
CASSFPSNTNTDTQYF

SEQ ID NO: 665799 - protein, 13 aa, Homo sapiens
  CDR3 for alpha chain variable domain of TCR clone 332900 (TRAV13-1, TRAJ40)
CAAISPGTYKYIF

SEQ ID NO: 665800 - protein, 15 aa, Homo sapiens
  CDR3 for beta chain variable domain of TCR clone 332900 (TRBV5-1, TRBJ2-2)
CASSSQGGNTGELFF

SEQ ID NO: 665801 - protein, 10 aa, Homo sapiens
  CDR3 for alpha chain variable domain of TCR clone 332901 (TRAV13-1, TRAJ8)
CAAPFQKLVF

SEQ ID NO: 665802 - protein, 20 aa, Homo sapiens
  CDR3 for beta chain variable domain of TCR clone 332901 (TRBV3-1, TRBJ2-6)
CASSPRPGLEGGAGANDLTF

SEQ ID NO: 665803 - protein, 13 aa, Homo sapiens
  CDR3 for alpha chain variable domain of TCR clone 332902 (TRAV2, TRAJ29)
CAAQNSGNTPLVF

SEQ ID NO: 665804 - protein, 15 aa, Homo sapiens
  CDR3 for beta chain variable domain of TCR clone 332902 (TRBV11-3, TRBJ2-3)
CASLKDGREGDTQYF

SEQ ID NO: 665805 - protein, 13 aa, Homo sapiens
  CDR3 for alpha chain variable domain of TCR clone 332903 (TRAV35, TRAJ57)
CWSPQGGSEKLAF

SEQ ID NO: 665806 - protein, 18 aa, Homo sapiens
  CDR3 for beta chain variable domain of TCR clone 332903 (TRBV6-6, TRBJ1-3)
CASSYSKWDSISGNTIYF

SEQ ID NO: 665807 - protein, 13 aa, Homo sapiens
  CDR3 for alpha chain variable domain of TCR clone 332904 (TRAV1-2, TRAJ9)
CAVLNTGGFETIF

SEQ ID NO: 665808 - protein, 17 aa, Homo sapiens
  CDR3 for beta chain variable domain of TCR clone 332904 (TRBV7-2, TRBJ2-3)
CASSLAGGLAGTAGQYF

SEQ ID NO: 665809 - protein, 16 aa, Homo sapiens
  CDR3 for alpha chain variable domain of TCR clone 332905 (TRAV38-1, TRAJ37)
CAFKGDGSSNTGKLIF

SEQ ID NO: 665810 - protein, 13 aa, Homo sapiens
  CDR3 for beta chain variable domain of TCR clone 332905 (TRBV12-4, TRBJ2-5)
CVSSLFRRETQYF

SEQ ID NO: 665811 - protein, 11 aa, Homo sapiens
  CDR3 for alpha chain variable domain of TCR clone 332906 (TRAV1-1, TRAJ20)
CAVFNDYKLSF

SEQ ID NO: 665812 - protein, 14 aa, Homo sapiens
  CDR3 for beta chain variable domain of TCR clone 332906 (TRBV19, TRBJ2-1)
CASSKDRAQDEQFF

SEQ ID NO: 665813 - protein, 15 aa, Homo sapiens
  CDR3 for alpha chain variable domain of TCR clone 332907 (TRAV13-1, TRAJ5)
CAVSPIDTGRRARTF

SEQ ID NO: 665814 - protein, 18 aa, Homo sapiens
  CDR3 for beta chain variable domain of TCR clone 332907 (TRBV4-1, TRBJ2-2)
CASSFRTSGGEGPGELFF

SEQ ID NO: 665815 - protein, 11 aa, Homo sapiens
  CDR3 for alpha chain variable domain of TCR clone 332908 (TRAV26-1, TRAJ37)
CIARVGRKLIF

SEQ ID NO: 665816 - protein, 14 aa, Homo sapiens
  CDR3 for beta chain variable domain of TCR clone 332908 (TRBV7-2, TRBJ2-7)
CASSLPPGQGPQYF

SEQ ID NO: 665817 - protein, 13 aa, Homo sapiens
  CDR3 for alpha chain variable domain of TCR clone 332909 (TRAV12-1, TRAJ40)
CVVNSSRTYKYIL

SEQ ID NO: 665818 - protein, 14 aa, Homo sapiens
  CDR3 for beta chain variable domain of TCR clone 332909 (TRBV2, TRBJ1-6)
CASEVSSYNSPQHF

SEQ ID NO: 665819 - protein, 15 aa, Homo sapiens
  CDR3 for alpha chain variable domain of TCR clone 332910 (TRAV8-3, TRAJ32)
CAVGPYGGATNKLIF

SEQ ID NO: 665820 - protein, 15 aa, Homo sapiens
  CDR3 for beta chain variable domain of TCR clone 332910 (TRBV11-3, TRBJ2-3)
CASLKDGREGDTQYF

SEQ ID NO: 665821 - protein, 15 aa, Homo sapiens
  CDR3 for alpha chain variable domain of TCR clone 332911 (TRAV3, TRAJ11)
CAVRDRGAGYSTLTF

SEQ ID NO: 665822 - protein, 13 aa, Homo sapiens
  CDR3 for beta chain variable domain of TCR clone 332911 (TRBV7-9, TRBJ1-2)
CASSLKQNYGYTF

SEQ ID NO: 665823 - protein, 20 aa, Homo sapiens
  CDR3 for alpha chain variable domain of TCR clone 332912 (TRAV12-3, TRAJ41)
SLFIRDSQPSDSATPEALNF

SEQ ID NO: 665824 - protein, 15 aa, Homo sapiens
  CDR3 for beta chain variable domain of TCR clone 332912 (TRBV28, TRBJ2-1)
CASSGLAEVDNEQFF

SEQ ID NO: 665825 - protein, 12 aa, Homo sapiens
  CDR3 for alpha chain variable domain of TCR clone 332913 (TRAV12-3, TRAJ17)
CAMTLTGNKLTF

SEQ ID NO: 665826 - protein, 15 aa, Homo sapiens
  CDR3 for beta chain variable domain of TCR clone 332913 (TRBV7-2, TRBJ1-2)
CASSLVSGGDYGYTF

SEQ ID NO: 665827 - protein, 14 aa, Homo sapiens
  CDR3 for alpha chain variable domain of TCR clone 332914 (TRAV17, TRAJ11)
CATDTSRGYSTLTF

SEQ ID NO: 665828 - protein, 13 aa, Homo sapiens
  CDR3 for beta chain variable domain of TCR clone 332914 (TRBV19, TRBJ2-5)
CDSRDSRRETQYF

SEQ ID NO: 665829 - protein, 14 aa, Homo sapiens
  CDR3 for alpha chain variable domain of TCR clone 332915 (TRAV1-2, TRAJ16)
CAVNRFSDGEKPLF

SEQ ID NO: 665830 - protein, 15 aa, Homo sapiens
  CDR3 for beta chain variable domain of TCR clone 332915 (TRBV9, TRBJ1-6)
CASSVAGTGDSPLHF

SEQ ID NO: 665831 - protein, 15 aa, Homo sapiens
  CDR3 for alpha chain variable domain of TCR clone 332916 (TRAV2, TRAJ24)
CAVVRLKNSWGKLQF

SEQ ID NO: 665832 - protein, 12 aa, Homo sapiens
  CDR3 for beta chain variable domain of TCR clone 332916 (TRBV19, TRBJ2-3)
CASSLGGDTQYF

SEQ ID NO: 665833 - protein, 11 aa, Homo sapiens
  CDR3 for alpha chain variable domain of TCR clone 332917 (TRAV1-2, TRAJ40)
CAVPGTYKYTV

SEQ ID NO: 665834 - protein, 16 aa, Homo sapiens
  CDR3 for beta chain variable domain of TCR clone 332917 (TRBV29-1, TRBJ2-7)
CSVEVVGTSGSYEQYF

SEQ ID NO: 665835 - protein, 11 aa, Homo sapiens
  CDR3 for alpha chain variable domain of TCR clone 332918 (TRAV13-1, TRAJ8)
CAARGFQKLVF

SEQ ID NO: 665836 - protein, 16 aa, Homo sapiens
  CDR3 for beta chain variable domain of TCR clone 332918 (TRBV19, TRBJ1-5)
CASSTRGTRSNQPQHF

SEQ ID NO: 665837 - protein, 14 aa, Homo sapiens
  CDR3 for alpha chain variable domain of TCR clone 332919 (TRAV8-2, TRAJ37)
CVVSISGNTGKLIV

SEQ ID NO: 665838 - protein, 17 aa, Homo sapiens
  CDR3 for beta chain variable domain of TCR clone 332919 (TRBV7-9, TRBJ2-3)
CASSPTVAGDLTDTQYF

SEQ ID NO: 665839 - protein, 11 aa, Homo sapiens
  CDR3 for alpha chain variable domain of TCR clone 332920 (TRAV21, TRAJ34)
CAVTNTDKLIF

SEQ ID NO: 665840 - protein, 16 aa, Homo sapiens
  CDR3 for beta chain variable domain of TCR clone 332920 (TRBV20-1, TRBJ1-4)
CSAPGQGLLTNEKLIF

SEQ ID NO: 665841 - protein, 13 aa, Homo sapiens
  CDR3 for alpha chain variable domain of TCR clone 332921 (TRAV17, TRAJ5)
CALRGTGRRALTF

SEQ ID NO: 665842 - protein, 17 aa, Homo sapiens
  CDR3 for beta chain variable domain of TCR clone 332921 (TRBV28, TRBJ1-1)
CASSLSGTGYENTEAFF

SEQ ID NO: 665843 - protein, 14 aa, Homo sapiens
  CDR3 for alpha chain variable domain of TCR clone 332922 (TRAV23/DV6, TRAJ37)
CAASTSSNTGKLIF

SEQ ID NO: 665844 - protein, 20 aa, Homo sapiens
  CDR3 for beta chain variable domain of TCR clone 332922 (TRBV7-8, TRBJ2-2)
CASSHLFPGPTIHITGELFF

SEQ ID NO: 665845 - protein, 11 aa, Homo sapiens
  CDR3 for alpha chain variable domain of TCR clone 332923 (TRAV21, TRAJ41)
CAVRSGYALNF

SEQ ID NO: 665846 - protein, 13 aa, Homo sapiens
  CDR3 for beta chain variable domain of TCR clone 332923 (TRBV2, TRBJ1-1)
CARNPTGGFHAFF

SEQ ID NO: 665847 - protein, 11 aa, Homo sapiens
  CDR3 for alpha chain variable domain of TCR clone 332924 (TRAV1-2, TRAJ20)
CAVSNDYKLSF

SEQ ID NO: 665848 - protein, 15 aa, Homo sapiens
  CDR3 for beta chain variable domain of TCR clone 332924 (TRBV2, TRBJ2-3)
CASSDAGGPPDTQYF

SEQ ID NO: 665849 - protein, 14 aa, Homo sapiens
  CDR3 for alpha chain variable domain of TCR clone 332925 (TRAV12-1, TRAJ17)
CVVYYKSAGNKLTF

SEQ ID NO: 665850 - protein, 17 aa, Homo sapiens
  CDR3 for beta chain variable domain of TCR clone 332925 (TRBV20-1, TRBJ2-1)
CSASSSGLAGSYNEQFF

SEQ ID NO: 665851 - protein, 11 aa, Homo sapiens
  CDR3 for alpha chain variable domain of TCR clone 332926 (TRAV4, TRAJ23)
CLVAPGGKLIF

SEQ ID NO: 665852 - protein, 15 aa, Homo sapiens
  CDR3 for beta chain variable domain of TCR clone 332926 (TRBV7-2, TRBJ2-1)
CASSVQADEYNEQFF

SEQ ID NO: 665853 - protein, 17 aa, Homo sapiens
  CDR3 for alpha chain variable domain of TCR clone 332927 (TRAV3, TRAJ6)
CAVRDGPRAGGGYIPTF

SEQ ID NO: 665854 - protein, 15 aa, Homo sapiens
  CDR3 for beta chain variable domain of TCR clone 332927 (TRBV19, TRBJ1-1)
CASSIGGGRNTEAFF

SEQ ID NO: 665855 - protein, 13 aa, Homo sapiens
  CDR3 for alpha chain variable domain of TCR clone 332928 (TRAV20, TRAJ49)
CAVRREPVTSSIL

SEQ ID NO: 665856 - protein, 14 aa, Homo sapiens
  CDR3 for beta chain variable domain of TCR clone 332928 (TRBV7-2, TRBJ2-7)
CASSPKTSFYEQYF

SEQ ID NO: 665857 - protein, 14 aa, Homo sapiens
  CDR3 for alpha chain variable domain of TCR clone 332929 (TRAV1-2, TRAJ16)
CAVNRFSDGQKLLF

SEQ ID NO: 665858 - protein, 17 aa, Homo sapiens
  CDR3 for beta chain variable domain of TCR clone 332929 (TRBV11-2, TRBJ2-1)
CASSLYPPGVEYNGQFF

SEQ ID NO: 665859 - protein, 14 aa, Homo sapiens
  CDR3 for alpha chain variable domain of TCR clone 332930 (TRAV1-2, TRAJ16)
CAVSRFSDGQKLLF

SEQ ID NO: 665860 - protein, 14 aa, Homo sapiens
  CDR3 for beta chain variable domain of TCR clone 332930 (TRBV7-9, TRBJ2-1)
CASSPRDSLYEQFF

SEQ ID NO: 665861 - protein, 13 aa, Homo sapiens
  CDR3 for alpha chain variable domain of TCR clone 332931 (TRAV13-1, TRAJ21)
CAASIYNFNKFYF

SEQ ID NO: 665862 - protein, 11 aa, Homo sapiens
  CDR3 for beta chain variable domain of TCR clone 332931 (TRBV7-2, TRBJ2-7)
CASSLTYEQYF

SEQ ID NO: 665863 - protein, 14 aa, Homo sapiens
  CDR3 for alpha chain variable domain of TCR clone 332932 (TRAV12-3, TRAJ9)
CAMSVETGGFKNIF

SEQ ID NO: 665864 - protein, 14 aa, Homo sapiens
  CDR3 for beta chain variable domain of TCR clone 332932 (TRBV7-2, TRBJ2-7)
CASRSQGAAYEQYF

SEQ ID NO: 665865 - protein, 15 aa, Homo sapiens
  CDR3 for alpha chain variable domain of TCR clone 332933 (TRAV13-1, TRAJ57)
CAARNTQGGSEKLVF

SEQ ID NO: 665866 - protein, 16 aa, Homo sapiens
  CDR3 for beta chain variable domain of TCR clone 332933 (TRBV19, TRBJ2-1)
CASSKAGPSSYNEQFF

SEQ ID NO: 665867 - protein, 17 aa, Homo sapiens
  CDR3 for alpha chain variable domain of TCR clone 332934 (TRAV17, TRAJ7)
CATLGRLAFGKGNQVVV

SEQ ID NO: 665868 - protein, 15 aa, Homo sapiens
  CDR3 for beta chain variable domain of TCR clone 332934 (TRBV6-3, TRBJ2-7)
CASSSPGTVFYEQYF

SEQ ID NO: 665869 - protein, 14 aa, Homo sapiens
  CDR3 for alpha chain variable domain of TCR clone 332935 (TRAV26-1, TRAJ39)
CIVRGSRAGNMLTF

SEQ ID NO: 665870 - protein, 15 aa, Homo sapiens
  CDR3 for beta chain variable domain of TCR clone 332935 (TRBV7-9, TRBJ1-5)
CASSQGHPPNQPQHF

SEQ ID NO: 665871 - protein, 11 aa, Homo sapiens
  CDR3 for alpha chain variable domain of TCR clone 332936 (TRAV1-2, TRAJ20)
CAVSNDYKLSF

SEQ ID NO: 665872 - protein, 13 aa, Homo sapiens
  CDR3 for beta chain variable domain of TCR clone 332936 (TRBV10-3, TRBJ1-2)
CAISERDSYGYTF

SEQ ID NO: 665873 - protein, 12 aa, Homo sapiens
  CDR3 for alpha chain variable domain of TCR clone 332937 (TRAV30, TRAJ20)
CGTESNDYKLSF

SEQ ID NO: 665874 - protein, 14 aa, Homo sapiens
  CDR3 for beta chain variable domain of TCR clone 332937 (TRBV12-5, TRBJ2-5)
CASGSRTHQETQYF

SEQ ID NO: 665875 - protein, 13 aa, Homo sapiens
  CDR3 for alpha chain variable domain of TCR clone 332938 (TRAV13-1, TRAJ34)
CAASKGNTDKLIF

SEQ ID NO: 665876 - protein, 16 aa, Homo sapiens
  CDR3 for beta chain variable domain of TCR clone 332938 (TRBV12-4, TRBJ2-5)
CASSCFVRGRQETQYF

SEQ ID NO: 665877 - protein, 14 aa, Homo sapiens
  CDR3 for alpha chain variable domain of TCR clone 332939 (TRAV2, TRAJ9)
CAVEDRSGGFKTIF

SEQ ID NO: 665878 - protein, 16 aa, Homo sapiens
  CDR3 for beta chain variable domain of TCR clone 332939 (TRBV29-1, TRBJ2-7)
CSVEDAEDGTAYEQYF

SEQ ID NO: 665879 - protein, 14 aa, Homo sapiens
  CDR3 for alpha chain variable domain of TCR clone 332940 (TRAV1-2, TRAJ16)
CAVNRVSDGQKLLF

SEQ ID NO: 665880 - protein, 14 aa, Homo sapiens
  CDR3 for beta chain variable domain of TCR clone 332940 (TRBV7-3, TRBJ1-1)
CASSLGTGYTEAFS

SEQ ID NO: 665881 - protein, 14 aa, Homo sapiens
  CDR3 for alpha chain variable domain of TCR clone 332941 (TRAV1-2, TRAJ8)
CAVREDTGFQKLVF

SEQ ID NO: 665882 - protein, 14 aa, Homo sapiens
  CDR3 for beta chain variable domain of TCR clone 332941 (TRBV7-2, TRBJ2-7)
CASSFLGRVYEQYF

SEQ ID NO: 665883 - protein, 11 aa, Homo sapiens
  CDR3 for alpha chain variable domain of TCR clone 332942 (TRAV17, TRAJ43)
CATPRSNDMRF

SEQ ID NO: 665884 - protein, 14 aa, Homo sapiens
  CDR3 for beta chain variable domain of TCR clone 332942 (TRBV7-7, TRBJ2-2)
CATRQDSDTGELFF

SEQ ID NO: 665885 - protein, 12 aa, Homo sapiens
  CDR3 for alpha chain variable domain of TCR clone 332943 (TRAV12-3, TRAJ17)
CAMTLTGNKLTF

SEQ ID NO: 665886 - protein, 13 aa, Homo sapiens
  CDR3 for beta chain variable domain of TCR clone 332943 (TRBV4-2, TRBJ2-1)
CASSPGTYNEQFF

SEQ ID NO: 665887 - protein, 13 aa, Homo sapiens
  CDR3 for alpha chain variable domain of TCR clone 332944 (TRAV23/DV6, TRAJ27)
CAASKPKQANQPL

SEQ ID NO: 665888 - protein, 14 aa, Homo sapiens
  CDR3 for beta chain variable domain of TCR clone 332944 (TRBV5-4, TRBJ1-1)
CASSLDSRRDEAFF

SEQ ID NO: 665889 - protein, 15 aa, Homo sapiens
  CDR3 for alpha chain variable domain of TCR clone 332945 (TRAV26-1, TRAJ52)
CIVSDLGTSYGKLPF

SEQ ID NO: 665890 - protein, 13 aa, Homo sapiens
  CDR3 for beta chain variable domain of TCR clone 332945 (TRBV11-2, TRBJ2-5)
CASSFSSQETQYF

SEQ ID NO: 665891 - protein, 15 aa, Homo sapiens
  CDR3 for alpha chain variable domain of TCR clone 332946 (TRAV8-3, TRAJ11)
CAVGLLNSGYSTLTF

SEQ ID NO: 665892 - protein, 13 aa, Homo sapiens
  CDR3 for beta chain variable domain of TCR clone 332946 (TRBV25-1, TRBJ2-5)
CASSESGRETQYF

SEQ ID NO: 665893 - protein, 13 aa, Homo sapiens
  CDR3 for alpha chain variable domain of TCR clone 332947 (TRAV20, TRAJ15)
CATINQAGTALIF

SEQ ID NO: 665894 - protein, 16 aa, Homo sapiens
  CDR3 for beta chain variable domain of TCR clone 332947 (TRBV19, TRBJ1-1)
CASRFGGPVTGTEAFF

SEQ ID NO: 665895 - protein, 14 aa, Homo sapiens
  CDR3 for alpha chain variable domain of TCR clone 332948 (TRAV13-1, TRAJ35)
CAASKGGFGNLLHC

SEQ ID NO: 665896 - protein, 13 aa, Homo sapiens
  CDR3 for beta chain variable domain of TCR clone 332948 (TRBV7-3, TRBJ1-1)
CAGSQDWGAEAFF

SEQ ID NO: 665897 - protein, 14 aa, Homo sapiens
  CDR3 for alpha chain variable domain of TCR clone 332949 (TRAV16, TRAJ42)
CALLAGGSQGNLIF

SEQ ID NO: 665898 - protein, 15 aa, Homo sapiens
  CDR3 for beta chain variable domain of TCR clone 332949 (TRBV27, TRBJ2-1)
CASSNGGGSSNEQFF

SEQ ID NO: 665899 - protein, 14 aa, Homo sapiens
  CDR3 for alpha chain variable domain of TCR clone 332950 (TRAV8-6, TRAJ6)
CAVSEGGGSYIPTF

SEQ ID NO: 665900 - protein, 14 aa, Homo sapiens
  CDR3 for beta chain variable domain of TCR clone 332950 (TRBV12-5, TRBJ2-5)
CASGSRTHQETQYF

SEQ ID NO: 665901 - protein, 12 aa, Homo sapiens
  CDR3 for alpha chain variable domain of TCR clone 332951 (TRAV27, TRAJ35)
CAGADFGNVLHC

SEQ ID NO: 665902 - protein, 13 aa, Homo sapiens
  CDR3 for beta chain variable domain of TCR clone 332951 (TRBV7-3, TRBJ1-1)
CTSSQDWGAEAFF

SEQ ID NO: 665903 - protein, 14 aa, Homo sapiens
  CDR3 for alpha chain variable domain of TCR clone 332952 (TRAV13-1, TRAJ40)
CAASMTSGTYIYIF

SEQ ID NO: 665904 - protein, 15 aa, Homo sapiens
  CDR3 for beta chain variable domain of TCR clone 332952 (TRBV7-3, TRBJ2-1)
CASSPTGGGEVEQFF

SEQ ID NO: 665905 - protein, 12 aa, Homo sapiens
  CDR3 for alpha chain variable domain of TCR clone 332953 (TRAV1-1, TRAJ39)
CAVPVVGNMLTF

SEQ ID NO: 665906 - protein, 18 aa, Homo sapiens
  CDR3 for beta chain variable domain of TCR clone 332953 (TRBV7-9, TRBJ2-7)
CASSPTTSGSRTWYEQYF

SEQ ID NO: 665907 - protein, 13 aa, Homo sapiens
  CDR3 for alpha chain variable domain of TCR clone 332954 (TRAV4, TRAJ42)
CLVGGGSQGNLIF

SEQ ID NO: 665908 - protein, 16 aa, Homo sapiens
  CDR3 for beta chain variable domain of TCR clone 332954 (TRBV5-1, TRBJ2-3)
CASGLQGRVGADTQYF

SEQ ID NO: 665909 - protein, 13 aa, Homo sapiens
  CDR3 for alpha chain variable domain of TCR clone 332955 (TRAV8-3, TRAJ4)
CCGASGGYNKLIF

SEQ ID NO: 665910 - protein, 16 aa, Homo sapiens
  CDR3 for beta chain variable domain of TCR clone 332955 (TRBV19, TRBJ2-2)
CASSPSGGLNTGELFF

SEQ ID NO: 665911 - protein, 14 aa, Homo sapiens
  CDR3 for alpha chain variable domain of TCR clone 332956 (TRAV1-2, TRAJ8)
CAVREDTGFQKLVF

SEQ ID NO: 665912 - protein, 15 aa, Homo sapiens
  CDR3 for beta chain variable domain of TCR clone 332956 (TRBV2, TRBJ2-1)
CASSELAGGHNEQFF

SEQ ID NO: 665913 - protein, 16 aa, Homo sapiens
  CDR3 for alpha chain variable domain of TCR clone 332957 (TRAV12-1, TRAJ45)
CVVIRYSGGGADGLTF

SEQ ID NO: 665914 - protein, 15 aa, Homo sapiens
  CDR3 for beta chain variable domain of TCR clone 332957 (TRBV19, TRBJ1-2)
CASSVGQVLNYGYTF

SEQ ID NO: 665915 - protein, 12 aa, Homo sapiens
  CDR3 for alpha chain variable domain of TCR clone 332958 (TRAV12-3, TRAJ53)
CAMKGSNYKLTF

SEQ ID NO: 665916 - protein, 11 aa, Homo sapiens
  CDR3 for beta chain variable domain of TCR clone 332958 (TRBV7-6, TRBJ2-7)
CASSLGYEQYF

SEQ ID NO: 665917 - protein, 12 aa, Homo sapiens
  CDR3 for alpha chain variable domain of TCR clone 332959 (TRAV13-2, TRAJ23)
CAERHRGGKLIF

SEQ ID NO: 665918 - protein, 16 aa, Homo sapiens
  CDR3 for beta chain variable domain of TCR clone 332959 (TRBV20-1, TRBJ1-4)
CSAPGQGLLTNEKRFF

SEQ ID NO: 665919 - protein, 14 aa, Homo sapiens
  CDR3 for alpha chain variable domain of TCR clone 332960 (TRAV5, TRAJ21)
CAESILDNFNKFYF

SEQ ID NO: 665920 - protein, 15 aa, Homo sapiens
  CDR3 for beta chain variable domain of TCR clone 332960 (TRBV25-1, TRBJ1-4)
CASSKRMATNEKLFF

SEQ ID NO: 665921 - protein, 12 aa, Homo sapiens
  CDR3 for alpha chain variable domain of TCR clone 332961 (TRAV13-1, TRAJ42)
LPTGGSQGNLIF

SEQ ID NO: 665922 - protein, 15 aa, Homo sapiens
  CDR3 for beta chain variable domain of TCR clone 332961 (TRBV20-1, TRBJ1-1)
CSASRGVTGNTEAFF

SEQ ID NO: 665923 - protein, 12 aa, Homo sapiens
  CDR3 for alpha chain variable domain of TCR clone 332962 (TRAV13-1, TRAJ21)
CAAKEGFNKFYF

SEQ ID NO: 665924 - protein, 17 aa, Homo sapiens
  CDR3 for beta chain variable domain of TCR clone 332962 (TRBV7-9, TRBJ1-6)
FASSSPGREIHPSTLGT

SEQ ID NO: 665925 - protein, 14 aa, Homo sapiens
  CDR3 for alpha chain variable domain of TCR clone 332963 (TRAV1-2, TRAJ8)
CAVREGTGFQKLVF

SEQ ID NO: 665926 - protein, 14 aa, Homo sapiens
  CDR3 for beta chain variable domain of TCR clone 332963 (TRBV5-5, TRBJ1-5)
CASSGQGVDQPQHF

SEQ ID NO: 665927 - protein, 13 aa, Homo sapiens
  CDR3 for alpha chain variable domain of TCR clone 332964 (TRAV20, TRAJ34)
CAVSSYNTDKLIF

SEQ ID NO: 665928 - protein, 12 aa, Homo sapiens
  CDR3 for beta chain variable domain of TCR clone 332964 (TRBV20-1, TRBJ1-2)
CSAAGEGARYMA

SEQ ID NO: 665929 - protein, 13 aa, Homo sapiens
  CDR3 for alpha chain variable domain of TCR clone 332965 (TRAV21, TRAJ27)
CAARPANAGKSTF

SEQ ID NO: 665930 - protein, 15 aa, Homo sapiens
  CDR3 for beta chain variable domain of TCR clone 332965 (TRBV11-3, TRBJ2-7)
CASSPGPASSYEQYF

SEQ ID NO: 665931 - protein, 13 aa, Homo sapiens
  CDR3 for alpha chain variable domain of TCR clone 332966 (TRAV8-4, TRAJ47)
CAVTELYGNKLVF

SEQ ID NO: 665932 - protein, 14 aa, Homo sapiens
  CDR3 for beta chain variable domain of TCR clone 332966 (TRBV19, TRBJ2-7)
CASSIGGAVAEQYF

SEQ ID NO: 665933 - protein, 15 aa, Homo sapiens
  CDR3 for alpha chain variable domain of TCR clone 332967 (TRAV8-6, TRAJ5)
CAVSDTRTGRRALTF

SEQ ID NO: 665934 - protein, 17 aa, Homo sapiens
  CDR3 for beta chain variable domain of TCR clone 332967 (TRBV5-5, TRBJ1-2)
CASSLGSLDGQSEGYTF

SEQ ID NO: 665935 - protein, 13 aa, Homo sapiens
  CDR3 for alpha chain variable domain of TCR clone 332968 (TRAV12-3, TRAJ50)
CARGGTSYDKVIF

SEQ ID NO: 665936 - protein, 18 aa, Homo sapiens
  CDR3 for beta chain variable domain of TCR clone 332968 (TRBV5-4, TRBJ2-3)
CASSPTAGFLPSTDTQYF

SEQ ID NO: 665937 - protein, 15 aa, Homo sapiens
  CDR3 for alpha chain variable domain of TCR clone 332969 (TRAV3, TRAJ12)
CAVRDIRDSSYKLIF

SEQ ID NO: 665938 - protein, 13 aa, Homo sapiens
  CDR3 for beta chain variable domain of TCR clone 332969 (TRBV12-4, TRBJ2-7)
CASSPTETYEQYF

SEQ ID NO: 665939 - protein, 14 aa, Homo sapiens
  CDR3 for alpha chain variable domain of TCR clone 332970 (TRAV9-2, TRAJ39)
CALYIYNAGNMLTF

SEQ ID NO: 665940 - protein, 12 aa, Homo sapiens
  CDR3 for beta chain variable domain of TCR clone 332970 (TRBV20-1, TRBJ2-1)
CSARLGTDEQFF

SEQ ID NO: 665941 - protein, 13 aa, Homo sapiens
  CDR3 for alpha chain variable domain of TCR clone 332971 (TRAV30, TRAJ24)
CGTVTDSWGKLQF

SEQ ID NO: 665942 - protein, 14 aa, Homo sapiens
  CDR3 for beta chain variable domain of TCR clone 332971 (TRBV6-3, TRBJ2-2)
CASTYTPDTGEMFF

SEQ ID NO: 665943 - protein, 16 aa, Homo sapiens
  CDR3 for alpha chain variable domain of TCR clone 332972 (TRAV26-1, TRAJ56)
CIVRVAETGANSKLTF

SEQ ID NO: 665944 - protein, 14 aa, Homo sapiens
  CDR3 for beta chain variable domain of TCR clone 332972 (TRBV4-1, TRBJ2-2)
CASSQAVNTGELFF

SEQ ID NO: 665945 - protein, 14 aa, Homo sapiens
  CDR3 for alpha chain variable domain of TCR clone 332973 (TRAV13-1, TRAJ10)
CAAKEPGGGNKLTF

SEQ ID NO: 665946 - protein, 15 aa, Homo sapiens
  CDR3 for beta chain variable domain of TCR clone 332973 (TRBV29-1, TRBJ2-1)
CSVPTGLALYNEQFF

SEQ ID NO: 665947 - protein, 14 aa, Homo sapiens
  CDR3 for alpha chain variable domain of TCR clone 332974 (TRAV16, TRAJ33)
CALSAMDSNYQLIW

SEQ ID NO: 665948 - protein, 16 aa, Homo sapiens
  CDR3 for beta chain variable domain of TCR clone 332974 (TRBV18, TRBJ1-5)
CASSPTFGAGNQPQHF

SEQ ID NO: 665949 - protein, 12 aa, Homo sapiens
  CDR3 for alpha chain variable domain of TCR clone 332975 (TRAV6, TRAJ9)
CALVTGGFKTIF

SEQ ID NO: 665950 - protein, 16 aa, Homo sapiens
  CDR3 for beta chain variable domain of TCR clone 332975 (TRBV7-3, TRBJ2-2)
GGTQPCIHWNTGELFF

SEQ ID NO: 665951 - protein, 14 aa, Homo sapiens
  CDR3 for alpha chain variable domain of TCR clone 332976 (TRAV16, TRAJ26)
CALCSANYGQNFVF

SEQ ID NO: 665952 - protein, 12 aa, Homo sapiens
  CDR3 for beta chain variable domain of TCR clone 332976 (TRBV6-5, TRBJ2-2)
CASRTGTGELFF

SEQ ID NO: 665953 - protein, 14 aa, Homo sapiens
  CDR3 for alpha chain variable domain of TCR clone 332977 (TRAV8-3, TRAJ15)
CAVGSPLAGTALIF

SEQ ID NO: 665954 - protein, 14 aa, Homo sapiens
  CDR3 for beta chain variable domain of TCR clone 332977 (TRBV7-8, TRBJ2-7)
CASSPRDSSYEQYF

SEQ ID NO: 665955 - protein, 13 aa, Homo sapiens
  CDR3 for alpha chain variable domain of TCR clone 332978 (TRAV38-2/DV8, TRAJ53)
CASVGGSNYKLTF

SEQ ID NO: 665956 - protein, 16 aa, Homo sapiens
  CDR3 for beta chain variable domain of TCR clone 332978 (TRBV28, TRBJ1-5)
CASRFRGAVQNQPQHF

SEQ ID NO: 665957 - protein, 11 aa, Homo sapiens
  CDR3 for alpha chain variable domain of TCR clone 332979 (TRAV29/DV5, TRAJ31)
CAAMNNARLMF

SEQ ID NO: 665958 - protein, 16 aa, Homo sapiens
  CDR3 for beta chain variable domain of TCR clone 332979 (TRBV13, TRBJ2-2)
CASSPRTGEHTGELFF

SEQ ID NO: 665959 - protein, 13 aa, Homo sapiens
  CDR3 for alpha chain variable domain of TCR clone 332980 (TRAV21, TRAJ57)
CAVTQGGSEKLVF

SEQ ID NO: 665960 - protein, 17 aa, Homo sapiens
  CDR3 for beta chain variable domain of TCR clone 332980 (TRBV24-1, TRBJ2-4)
CATSDAEARGVRNIQYF

SEQ ID NO: 665961 - protein, 13 aa, Homo sapiens
  CDR3 for alpha chain variable domain of TCR clone 332981 (TRAV29/DV5, TRAJ31)
CAASRNNNARLMF

SEQ ID NO: 665962 - protein, 14 aa, Homo sapiens
  CDR3 for beta chain variable domain of TCR clone 332981 (TRBV7-2, TRBJ2-7)
CASSPKASFYEQYF

SEQ ID NO: 665963 - protein, 11 aa, Homo sapiens
  CDR3 for alpha chain variable domain of TCR clone 332982 (TRAV3, TRAJ21)
CAVGNFNKFYF

SEQ ID NO: 665964 - protein, 13 aa, Homo sapiens
  CDR3 for beta chain variable domain of TCR clone 332982 (TRBV7-9, TRBJ1-2)
CASSLQQNYGYTF

SEQ ID NO: 665965 - protein, 16 aa, Homo sapiens
  CDR3 for alpha chain variable domain of TCR clone 332983 (TRAV38-1, TRAJ37)
CAFKGDRSSNTGKLIF

SEQ ID NO: 665966 - protein, 13 aa, Homo sapiens
  CDR3 for beta chain variable domain of TCR clone 332983 (TRBV12-4, TRBJ2-5)
CASSLFRRETQYF

SEQ ID NO: 665967 - protein, 13 aa, Homo sapiens
  CDR3 for alpha chain variable domain of TCR clone 332984 (TRAV12-2, TRAJ42)
CAVKRGSQGNLIF

SEQ ID NO: 665968 - protein, 14 aa, Homo sapiens
  CDR3 for beta chain variable domain of TCR clone 332984 (TRBV7-8, TRBJ2-7)
CASSLGRASYEQYF

SEQ ID NO: 665969 - protein, 16 aa, Homo sapiens
  CDR3 for alpha chain variable domain of TCR clone 332985 (TRAV3, TRAJ10)
CAVRDMRAGGGNKITF

SEQ ID NO: 665970 - protein, 15 aa, Homo sapiens
  CDR3 for beta chain variable domain of TCR clone 332985 (TRBV11-2, TRBJ1-2)
CASSLEGVQRNGYTF

SEQ ID NO: 665971 - protein, 11 aa, Homo sapiens
  CDR3 for alpha chain variable domain of TCR clone 332986 (TRAV29/DV5, TRAJ49)
CAAVPGNQFYF

SEQ ID NO: 665972 - protein, 13 aa, Homo sapiens
  CDR3 for beta chain variable domain of TCR clone 332986 (TRBV7-2, TRBJ2-2)
CASSLAVTGELFF

SEQ ID NO: 665973 - protein, 12 aa, Homo sapiens
  CDR3 for alpha chain variable domain of TCR clone 332987 (TRAV26-2, TRAJ21)
CILKGNFNKFYF

SEQ ID NO: 665974 - protein, 14 aa, Homo sapiens
  CDR3 for beta chain variable domain of TCR clone 332987 (TRBV7-9, TRBJ1-1)
GASTPLQSYTEAFF

SEQ ID NO: 665975 - protein, 13 aa, Homo sapiens
  CDR3 for alpha chain variable domain of TCR clone 332988 (TRAV13-1, TRAJ33)
CAASRAGNYQLIR

SEQ ID NO: 665976 - protein, 12 aa, Homo sapiens
  CDR3 for beta chain variable domain of TCR clone 332988 (TRBV11-2, TRBJ1-2)
CASSREGDGYTF

SEQ ID NO: 665977 - protein, 13 aa, Homo sapiens
  CDR3 for alpha chain variable domain of TCR clone 332989 (TRAV20, TRAJ34)
CAGGSYNTDKLIF

SEQ ID NO: 665978 - protein, 13 aa, Homo sapiens
  CDR3 for beta chain variable domain of TCR clone 332989 (TRBV7-3, TRBJ2-5)
CASSIGFFETQYF

SEQ ID NO: 665979 - protein, 12 aa, Homo sapiens
  CDR3 for alpha chain variable domain of TCR clone 332990 (TRAV13-1, TRAJ21)
CAAKEGFNKFYF

SEQ ID NO: 665980 - protein, 17 aa, Homo sapiens
  CDR3 for beta chain variable domain of TCR clone 332990 (TRBV20-1, TRBJ2-1)
RSASSSGLAGSYNEQFF

SEQ ID NO: 665981 - protein, 14 aa, Homo sapiens
  CDR3 for alpha chain variable domain of TCR clone 332991 (TRAV12-2, TRAJ13)
CAVKKAGGYQKVTF

SEQ ID NO: 665982 - protein, 12 aa, Homo sapiens
  CDR3 for beta chain variable domain of TCR clone 332991 (TRBV11-2, TRBJ2-2)
CASSLGGGELFF

SEQ ID NO: 665983 - protein, 14 aa, Homo sapiens
  CDR3 for alpha chain variable domain of TCR clone 332992 (TRAV4, TRAJ26)
CLVGPHNYGQNFVF

SEQ ID NO: 665984 - protein, 17 aa, Homo sapiens
  CDR3 for beta chain variable domain of TCR clone 332992 (TRBV24-1, TRBJ2-1)
CATSDVSTSGTYYEQFF

SEQ ID NO: 665985 - protein, 11 aa, Homo sapiens
  CDR3 for alpha chain variable domain of TCR clone 332993 (TRAV2, TRAJ13)
CASGGYQKVTF

SEQ ID NO: 665986 - protein, 13 aa, Homo sapiens
  CDR3 for beta chain variable domain of TCR clone 332993 (TRBV10-3, TRBJ2-7)
CASKLAANYEQYF

SEQ ID NO: 665987 - protein, 17 aa, Homo sapiens
  CDR3 for alpha chain variable domain of TCR clone 332994 (TRAV13-2, TRAJ42)
CAERGKNYGGSQGNLIF

SEQ ID NO: 665988 - protein, 16 aa, Homo sapiens
  CDR3 for beta chain variable domain of TCR clone 332994 (TRBV7-9, TRBJ2-1)
CASSLGTGWDYNEQFF

SEQ ID NO: 665989 - protein, 16 aa, Homo sapiens
  CDR3 for alpha chain variable domain of TCR clone 332995 (TRAV29/DV5, TRAJ36)
CAESAGVETGANNLFF

SEQ ID NO: 665990 - protein, 16 aa, Homo sapiens
  CDR3 for beta chain variable domain of TCR clone 332995 (TRBV5-1, TRBJ2-3)
CASSLGLAVYTDTQYF

SEQ ID NO: 665991 - protein, 11 aa, Homo sapiens
  CDR3 for alpha chain variable domain of TCR clone 332996 (TRAV12-1, TRAJ37)
WVVNTPGKLIF

SEQ ID NO: 665992 - protein, 13 aa, Homo sapiens
  CDR3 for beta chain variable domain of TCR clone 332996 (TRBV12-4, TRBJ1-5)
CASSPDRAQPQHF

SEQ ID NO: 665993 - protein, 14 aa, Homo sapiens
  CDR3 for alpha chain variable domain of TCR clone 332997 (TRAV2, TRAJ3)
CAVRPYSSASKIIF

SEQ ID NO: 665994 - protein, 17 aa, Homo sapiens
  CDR3 for beta chain variable domain of TCR clone 332997 (TRBV15, TRBJ1-4)
CAASRYGTGDPNEKLFF

SEQ ID NO: 665995 - protein, 14 aa, Homo sapiens
  CDR3 for alpha chain variable domain of TCR clone 332998 (TRAV34, TRAJ44)
CGADGTGTASKLTF

SEQ ID NO: 665996 - protein, 15 aa, Homo sapiens
  CDR3 for beta chain variable domain of TCR clone 332998 (TRBV5-1, TRBJ2-1)
SASSPPRAPYNEQFF

SEQ ID NO: 665997 - protein, 14 aa, Homo sapiens
  CDR3 for alpha chain variable domain of TCR clone 332999 (TRAV16, TRAJ26)
CITVLSAYGQNFVF

SEQ ID NO: 665998 - protein, 14 aa, Homo sapiens
  CDR3 for beta chain variable domain of TCR clone 332999 (TRBV7-2, TRBJ2-7)
CASRSRGAAYEQYF

SEQ ID NO: 665999 - protein, 15 aa, Homo sapiens
  CDR3 for alpha chain variable domain of TCR clone 333000 (TRAV8-6, TRAJ11)
CAVNFMNSGYSTLTF

SEQ ID NO: 666000 - protein, 18 aa, Homo sapiens
  CDR3 for beta chain variable domain of TCR clone 333000 (TRBV11-2, TRBJ2-3)
CASSLGGASRGAPNTQYF

SEQ ID NO: 666001 - protein, 14 aa, Homo sapiens
  CDR3 for alpha chain variable domain of TCR clone 333001 (TRAV22, TRAJ6)
CAGVGPGGSYIPTF

SEQ ID NO: 666002 - protein, 13 aa, Homo sapiens
  CDR3 for beta chain variable domain of TCR clone 333001 (TRBV10-3, TRBJ1-2)
CAISERDSYGYTF

SEQ ID NO: 666003 - protein, 15 aa, Homo sapiens
  CDR3 for alpha chain variable domain of TCR clone 333002 (TRAV12-3, TRAJ10)
CASYILTGGGNKRTF

SEQ ID NO: 666004 - protein, 14 aa, Homo sapiens
  CDR3 for beta chain variable domain of TCR clone 333002 (TRBV4-1, TRBJ2-2)
CASSQAVNTGELFY

SEQ ID NO: 666005 - protein, 14 aa, Homo sapiens
  CDR3 for alpha chain variable domain of TCR clone 333003 (TRAV38-1, TRAJ45)
CASHPGGGADGLTF

SEQ ID NO: 666006 - protein, 13 aa, Homo sapiens
  CDR3 for beta chain variable domain of TCR clone 333003 (TRBV10-3, TRBJ1-2)
CAIGERDSYGYTF

SEQ ID NO: 666007 - protein, 12 aa, Homo sapiens
  CDR3 for alpha chain variable domain of TCR clone 333004 (TRAV12-2, TRAJ21)
CAVRYNFNKFYF

SEQ ID NO: 666008 - protein, 13 aa, Homo sapiens
  CDR3 for beta chain variable domain of TCR clone 333004 (TRBV4-1, TRBJ2-2)
CASSQENTGELFF

SEQ ID NO: 666009 - protein, 11 aa, Homo sapiens
  CDR3 for alpha chain variable domain of TCR clone 333005 (TRAV3, TRAJ30)
CCEATDDKIIF

SEQ ID NO: 666010 - protein, 15 aa, Homo sapiens
  CDR3 for beta chain variable domain of TCR clone 333005 (TRBV18, TRBJ2-3)
CASSPLAGETDTQYF

SEQ ID NO: 666011 - protein, 13 aa, Homo sapiens
  CDR3 for alpha chain variable domain of TCR clone 333006 (TRAV1-1, TRAJ9)
CAAKTTGGFTTIF

SEQ ID NO: 666012 - protein, 14 aa, Homo sapiens
  CDR3 for beta chain variable domain of TCR clone 333006 (TRBV20-1, TRBJ2-1)
CSAQIGGSANEQFF

SEQ ID NO: 666013 - protein, 13 aa, Homo sapiens
  CDR3 for alpha chain variable domain of TCR clone 333007 (TRAV36/DV7, TRAJ54)
CAVEVHGAQKLVF

SEQ ID NO: 666014 - protein, 16 aa, Homo sapiens
  CDR3 for beta chain variable domain of TCR clone 333007 (TRBV19, TRBJ2-1)
CASSKAGPSSYNEQFF

SEQ ID NO: 666015 - protein, 14 aa, Homo sapiens
  CDR3 for alpha chain variable domain of TCR clone 333008 (TRAV12-2, TRAJ13)
CAVKKTGGYQKVTF

SEQ ID NO: 666016 - protein, 15 aa, Homo sapiens
  CDR3 for beta chain variable domain of TCR clone 333008 (TRBV20-1, TRBJ2-7)
CSARVPAAYFYEQYF

SEQ ID NO: 666017 - protein, 15 aa, Homo sapiens
  CDR3 for alpha chain variable domain of TCR clone 333009 (TRAV12-1, TRAJ10)
CVVNKLTGGGNKLTF

SEQ ID NO: 666018 - protein, 17 aa, Homo sapiens
  CDR3 for beta chain variable domain of TCR clone 333009 (TRBV5-1, TRBJ1-6)
CVSSPSLQGSDNSPLHF

SEQ ID NO: 666019 - protein, 12 aa, Homo sapiens
  CDR3 for alpha chain variable domain of TCR clone 333010 (TRAV35, TRAJ40)
RAGRAGTYKYIF

SEQ ID NO: 666020 - protein, 14 aa, Homo sapiens
  CDR3 for beta chain variable domain of TCR clone 333010 (TRBV7-2, TRBJ1-3)
CTSSRGGTGNTIYF

SEQ ID NO: 666021 - protein, 12 aa, Homo sapiens
  CDR3 for alpha chain variable domain of TCR clone 333011 (TRAV27, TRAJ9)
CAGESGGFKTIF

SEQ ID NO: 666022 - protein, 12 aa, Homo sapiens
  CDR3 for beta chain variable domain of TCR clone 333011 (TRBV7-9, TRBJ1-4)
CASSTDREKLFF

SEQ ID NO: 666023 - protein, 13 aa, Homo sapiens
  CDR3 for alpha chain variable domain of TCR clone 333012 (TRAV8-2, TRAJ13)
CVVSDLRYQKVTF

SEQ ID NO: 666024 - protein, 16 aa, Homo sapiens
  CDR3 for beta chain variable domain of TCR clone 333012 (TRBV28, TRBJ2-5)
CASSFSPAGGWETQYF

SEQ ID NO: 666025 - protein, 14 aa, Homo sapiens
  CDR3 for alpha chain variable domain of TCR clone 333013 (TRAV2, TRAJ37)
CAVYFTSNTGKLIF

SEQ ID NO: 666026 - protein, 14 aa, Homo sapiens
  CDR3 for beta chain variable domain of TCR clone 333013 (TRBV7-2, TRBJ2-7)
CASSPKTSFYEQYF

SEQ ID NO: 666027 - protein, 17 aa, Homo sapiens
  CDR3 for alpha chain variable domain of TCR clone 333014 (TRAV35, TRAJ52)
CAVQLAAGGTSYGKLTF

SEQ ID NO: 666028 - protein, 12 aa, Homo sapiens
  CDR3 for beta chain variable domain of TCR clone 333014 (TRBV20-1, TRBJ2-7)
CSAGRRQSEQYF

SEQ ID NO: 666029 - protein, 12 aa, Homo sapiens
  CDR3 for alpha chain variable domain of TCR clone 333015 (TRAV2, TRAJ15)
CCGLQAGTALIF

SEQ ID NO: 666030 - protein, 14 aa, Homo sapiens
  CDR3 for beta chain variable domain of TCR clone 333015 (TRBV25-1, TRBJ1-1)
CASTHLGGNTEAFF

SEQ ID NO: 666031 - protein, 12 aa, Homo sapiens
  CDR3 for alpha chain variable domain of TCR clone 333016 (TRAV38-1, TRAJ47)
CAFETYGKKLVF

SEQ ID NO: 666032 - protein, 15 aa, Homo sapiens
  CDR3 for beta chain variable domain of TCR clone 333016 (TRBV20-1, TRBJ2-7)
CSARKGLAESYEQYF

SEQ ID NO: 666033 - protein, 13 aa, Homo sapiens
  CDR3 for alpha chain variable domain of TCR clone 333017 (TRAV12-3, TRAJ57)
CAMVGAGSEKLVF

SEQ ID NO: 666034 - protein, 15 aa, Homo sapiens
  CDR3 for beta chain variable domain of TCR clone 333017 (TRBV7-2, TRBJ1-3)
CASSWGGITGNTMYF

SEQ ID NO: 666035 - protein, 11 aa, Homo sapiens
  CDR3 for alpha chain variable domain of TCR clone 333018 (TRAV13-1, TRAJ15)
CAATPGTALIF

SEQ ID NO: 666036 - protein, 11 aa, Homo sapiens
  CDR3 for beta chain variable domain of TCR clone 333018 (TRBV29-1, TRBJ2-5)
CSEDRTGTQYF

SEQ ID NO: 666037 - protein, 12 aa, Homo sapiens
  CDR3 for alpha chain variable domain of TCR clone 333019 (TRAV12-2, TRAJ29)
CAVDSANTPLVF

SEQ ID NO: 666038 - protein, 13 aa, Homo sapiens
  CDR3 for beta chain variable domain of TCR clone 333019 (TRBV19, TRBJ1-2)
CASSQGQVYGYTF

SEQ ID NO: 666039 - protein, 15 aa, Homo sapiens
  CDR3 for alpha chain variable domain of TCR clone 333020 (TRAV8-2, TRAJ15)
CVVTMGNQAGTALIF

SEQ ID NO: 666040 - protein, 14 aa, Homo sapiens
  CDR3 for beta chain variable domain of TCR clone 333020 (TRBV7-2, TRBJ2-7)
CASRSQGAAYEQYF

SEQ ID NO: 666041 - protein, 17 aa, Homo sapiens
  CDR3 for alpha chain variable domain of TCR clone 333021 (TRAV35, TRAJ28)
CAGLQVYSWAGSYQLTF

SEQ ID NO: 666042 - protein, 15 aa, Homo sapiens
  CDR3 for beta chain variable domain of TCR clone 333021 (TRBV2, TRBJ1-2)
CASSEIGGANYGYTF

SEQ ID NO: 666043 - protein, 15 aa, Homo sapiens
  CDR3 for alpha chain variable domain of TCR clone 333022 (TRAV26-1, TRAJ44)
CIVRANTGTASKLTF

SEQ ID NO: 666044 - protein, 15 aa, Homo sapiens
  CDR3 for beta chain variable domain of TCR clone 333022 (TRBV6-1, TRBJ2-4)
CASSEAVWTINMQYF

SEQ ID NO: 666045 - protein, 13 aa, Homo sapiens
  CDR3 for alpha chain variable domain of TCR clone 333023 (TRAV12-2, TRAJ20)
CAVYPSNDYKLSF

SEQ ID NO: 666046 - protein, 17 aa, Homo sapiens
  CDR3 for beta chain variable domain of TCR clone 333023 (TRBV11-2, TRBJ2-6)
CASSQRDIFSGANVLTF

SEQ ID NO: 666047 - protein, 17 aa, Homo sapiens
  CDR3 for alpha chain variable domain of TCR clone 333024 (TRAV13-1, TRAJ52)
CAAGRNAGGTSYGKLTF

SEQ ID NO: 666048 - protein, 12 aa, Homo sapiens
  CDR3 for beta chain variable domain of TCR clone 333024 (TRBV7-8, TRBJ2-1)
CASSLGHNEQFF

SEQ ID NO: 666049 - protein, 13 aa, Homo sapiens
  CDR3 for alpha chain variable domain of TCR clone 333025 (TRAV27, TRAJ16)
CAGACSDGEKLLF

SEQ ID NO: 666050 - protein, 14 aa, Homo sapiens
  CDR3 for beta chain variable domain of TCR clone 333025 (TRBV27, TRBJ1-1)
CASSLAGLNTEAFF

SEQ ID NO: 666051 - protein, 14 aa, Homo sapiens
  CDR3 for alpha chain variable domain of TCR clone 333026 (TRAV26-1, TRAJ38)
CIADNAGNNRKRIG

SEQ ID NO: 666052 - protein, 16 aa, Homo sapiens
  CDR3 for beta chain variable domain of TCR clone 333026 (TRBV20-1, TRBJ2-7)
CSASTSGRLSSYEQYF

SEQ ID NO: 666053 - protein, 14 aa, Homo sapiens
  CDR3 for alpha chain variable domain of TCR clone 333027 (TRAV3, TRAJ34)
CAVRDINNTDKLIF

SEQ ID NO: 666054 - protein, 13 aa, Homo sapiens
  CDR3 for beta chain variable domain of TCR clone 333027 (TRBV7-6, TRBJ1-2)
CASSLVANYGYTF

SEQ ID NO: 666055 - protein, 15 aa, Homo sapiens
  CDR3 for alpha chain variable domain of TCR clone 333028 (TRAV2, TRAJ22)
CAVPSRGGSARQLTF

SEQ ID NO: 666056 - protein, 16 aa, Homo sapiens
  CDR3 for beta chain variable domain of TCR clone 333028 (TRBV4-2, TRBJ2-5)
CASSQELVGSQETQYF

SEQ ID NO: 666057 - protein, 14 aa, Homo sapiens
  CDR3 for alpha chain variable domain of TCR clone 333029 (TRAV16, TRAJ33)
CALSAMDSNYQLIW

SEQ ID NO: 666058 - protein, 11 aa, Homo sapiens
  CDR3 for beta chain variable domain of TCR clone 333029 (TRBV7-9, TRBJ2-5)
CASSLGETQYF

SEQ ID NO: 666059 - protein, 16 aa, Homo sapiens
  CDR3 for alpha chain variable domain of TCR clone 333030 (TRAV3, TRAJ37)
CAVRPHGSGNTGRLIF

SEQ ID NO: 666060 - protein, 15 aa, Homo sapiens
  CDR3 for beta chain variable domain of TCR clone 333030 (TRBV5-5, TRBJ2-7)
CASSLAAPLSYEQYF

SEQ ID NO: 666061 - protein, 13 aa, Homo sapiens
  CDR3 for alpha chain variable domain of TCR clone 333031 (TRAV12-1, TRAJ15)
CVAQNQAGTALIF

SEQ ID NO: 666062 - protein, 12 aa, Homo sapiens
  CDR3 for beta chain variable domain of TCR clone 333031 (TRBV29-1, TRBJ2-3)
CSVTGGADTQYF

SEQ ID NO: 666063 - protein, 14 aa, Homo sapiens
  CDR3 for alpha chain variable domain of TCR clone 333032 (TRAV12-2, TRAJ13)
CAVKKTGGYQKVTF

SEQ ID NO: 666064 - protein, 12 aa, Homo sapiens
  CDR3 for beta chain variable domain of TCR clone 333032 (TRBV3-1, TRBJ2-1)
CAISQGSSEQFF

SEQ ID NO: 666065 - protein, 10 aa, Homo sapiens
  CDR3 for alpha chain variable domain of TCR clone 333033 (TRAV36/DV7, TRAJ48)
CAVGNEKLTF

SEQ ID NO: 666066 - protein, 16 aa, Homo sapiens
  CDR3 for beta chain variable domain of TCR clone 333033 (TRBV15, TRBJ2-3)
CATRRSGGRAPDTQYF

SEQ ID NO: 666067 - protein, 12 aa, Homo sapiens
  CDR3 for alpha chain variable domain of TCR clone 333034 (TRAV12-3, TRAJ17)
CAMTLTGNKLTF

SEQ ID NO: 666068 - protein, 13 aa, Homo sapiens
  CDR3 for beta chain variable domain of TCR clone 333034 (TRBV7-3, TRBJ2-1)
CASSLWPYNEQFF

SEQ ID NO: 666069 - protein, 13 aa, Homo sapiens
  CDR3 for alpha chain variable domain of TCR clone 333035 (TRAV20, TRAJ15)
CATINQAGTALIF

SEQ ID NO: 666070 - protein, 14 aa, Homo sapiens
  CDR3 for beta chain variable domain of TCR clone 333035 (TRBV2, TRBJ1-1)
CASRALLMNTEAFF

SEQ ID NO: 666071 - protein, 12 aa, Homo sapiens
  CDR3 for alpha chain variable domain of TCR clone 333036 (TRAV13-1, TRAJ53)
CAAGGSNYKMTF

SEQ ID NO: 666072 - protein, 15 aa, Homo sapiens
  CDR3 for beta chain variable domain of TCR clone 333036 (TRBV7-2, TRBJ2-1)
CASSSGLAGGNEQFF

SEQ ID NO: 666073 - protein, 18 aa, Homo sapiens
  CDR3 for alpha chain variable domain of TCR clone 333037 (TRAV13-1, TRAJ28)
CAASPVPILWGLELPTHF

SEQ ID NO: 666074 - protein, 13 aa, Homo sapiens
  CDR3 for beta chain variable domain of TCR clone 333037 (TRBV15, TRBJ2-7)
CATSTTGHYEQYF

SEQ ID NO: 666075 - protein, 14 aa, Homo sapiens
  CDR3 for alpha chain variable domain of TCR clone 333038 (TRAV8-4, TRAJ9)
CAVRINTGGFKTIF

SEQ ID NO: 666076 - protein, 14 aa, Homo sapiens
  CDR3 for beta chain variable domain of TCR clone 333038 (TRBV5-1, TRBJ1-1)
CASSLQGASNEAFF

SEQ ID NO: 666077 - protein, 13 aa, Homo sapiens
  CDR3 for alpha chain variable domain of TCR clone 333039 (TRAV30, TRAJ24)
CGTVTDSWGKLQF

SEQ ID NO: 666078 - protein, 15 aa, Homo sapiens
  CDR3 for beta chain variable domain of TCR clone 333039 (TRBV4-1, TRBJ2-1)
CACSQDPGNYNEQFF

SEQ ID NO: 666079 - protein, 14 aa, Homo sapiens
  CDR3 for alpha chain variable domain of TCR clone 333040 (TRAV17, TRAJ15)
CATDRGQAGTALIF

SEQ ID NO: 666080 - protein, 14 aa, Homo sapiens
  CDR3 for beta chain variable domain of TCR clone 333040 (TRBV7-3, TRBJ2-2)
CASSSGGYTGELFF

SEQ ID NO: 666081 - protein, 13 aa, Homo sapiens
  CDR3 for alpha chain variable domain of TCR clone 333041 (TRAV23/DV6, TRAJ16)
CAASISDGQELLF

SEQ ID NO: 666082 - protein, 14 aa, Homo sapiens
  CDR3 for beta chain variable domain of TCR clone 333041 (TRBV7-8, TRBJ2-5)
CASSATGGQETQYF

SEQ ID NO: 666083 - protein, 15 aa, Homo sapiens
  CDR3 for alpha chain variable domain of TCR clone 333042 (TRAV8-3, TRAJ15)
CAVGAPNQAGTALIF

SEQ ID NO: 666084 - protein, 14 aa, Homo sapiens
  CDR3 for beta chain variable domain of TCR clone 333042 (TRBV20-1, TRBJ2-1)
CSPNDEASYNEQYF

SEQ ID NO: 666085 - protein, 14 aa, Homo sapiens
  CDR3 for alpha chain variable domain of TCR clone 333043 (TRAV3, TRAJ36)
CAVRDGTGANNLFF

SEQ ID NO: 666086 - protein, 16 aa, Homo sapiens
  CDR3 for beta chain variable domain of TCR clone 333043 (TRBV7-3, TRBJ2-5)
FASIQPGGSVQETQYF

SEQ ID NO: 666087 - protein, 17 aa, Homo sapiens
  CDR3 for alpha chain variable domain of TCR clone 333044 (TRAV3, TRAJ12)
CAGRDGGRMDSSYKLIF

SEQ ID NO: 666088 - protein, 13 aa, Homo sapiens
  CDR3 for beta chain variable domain of TCR clone 333044 (TRBV15, TRBJ1-6)
CATSGGLNSPLHF

SEQ ID NO: 666089 - protein, 15 aa, Homo sapiens
  CDR3 for alpha chain variable domain of TCR clone 333045 (TRAV12-3, TRAJ42)
CAMSGHGGSQGNPIF

SEQ ID NO: 666090 - protein, 14 aa, Homo sapiens
  CDR3 for beta chain variable domain of TCR clone 333045 (TRBV19, TRBJ2-7)
CASSIGGAVAEQYF

SEQ ID NO: 666091 - protein, 14 aa, Homo sapiens
  CDR3 for alpha chain variable domain of TCR clone 333046 (TRAV12-2, TRAJ13)
CAVKKTGGYQKVTF

SEQ ID NO: 666092 - protein, 15 aa, Homo sapiens
  CDR3 for beta chain variable domain of TCR clone 333046 (TRBV19, TRBJ1-6)
CASSTQGAEGSPLHF

SEQ ID NO: 666093 - protein, 13 aa, Homo sapiens
  CDR3 for alpha chain variable domain of TCR clone 333047 (TRAV26-1, TRAJ39)
CIVRVVAGTMLTF

SEQ ID NO: 666094 - protein, 14 aa, Homo sapiens
  CDR3 for beta chain variable domain of TCR clone 333047 (TRBV20-1, TRBJ2-5)
CSARRQGIRETQYF

SEQ ID NO: 666095 - protein, 13 aa, Homo sapiens
  CDR3 for alpha chain variable domain of TCR clone 333048 (TRAV13-2, TRAJ48)
CAEMDFGNEKLTF

SEQ ID NO: 666096 - protein, 15 aa, Homo sapiens
  CDR3 for beta chain variable domain of TCR clone 333048 (TRBV28, TRBJ2-4)
CAAGSGTLLMGIQYF

SEQ ID NO: 666097 - protein, 12 aa, Homo sapiens
  CDR3 for alpha chain variable domain of TCR clone 333049 (TRAV12-2, TRAJ31)
CAVNTPDARLMF

SEQ ID NO: 666098 - protein, 17 aa, Homo sapiens
  CDR3 for beta chain variable domain of TCR clone 333049 (TRBV20-1, TRBJ1-6)
CSARGGYTFSYTSPLHF

SEQ ID NO: 666099 - protein, 11 aa, Homo sapiens
  CDR3 for alpha chain variable domain of TCR clone 333050 (TRAV1-2, TRAJ40)
CAVPGTYKYIF

SEQ ID NO: 666100 - protein, 14 aa, Homo sapiens
  CDR3 for beta chain variable domain of TCR clone 333050 (TRBV5-1, TRBJ2-7)
CASSRGESLNEQYF

SEQ ID NO: 666101 - protein, 15 aa, Homo sapiens
  CDR3 for alpha chain variable domain of TCR clone 333051 (TRAV4, TRAJ39)
CLVGPNNNAGNMLTF

SEQ ID NO: 666102 - protein, 13 aa, Homo sapiens
  CDR3 for beta chain variable domain of TCR clone 333051 (TRBV11-2, TRBJ2-5)
CASSSTGEETQYL

SEQ ID NO: 666103 - protein, 17 aa, Homo sapiens
  CDR3 for alpha chain variable domain of TCR clone 333052 (TRAV13-1, TRAJ52)
CAASSGADGTSYGKLTF

SEQ ID NO: 666104 - protein, 15 aa, Homo sapiens
  CDR3 for beta chain variable domain of TCR clone 333052 (TRBV2, TRBJ2-1)
CASSELAGSYNEQFF

SEQ ID NO: 666105 - protein, 13 aa, Homo sapiens
  CDR3 for alpha chain variable domain of TCR clone 333053 (TRAV25, TRAJ10)
CAGRTGGGNKLTF

SEQ ID NO: 666106 - protein, 15 aa, Homo sapiens
  CDR3 for beta chain variable domain of TCR clone 333053 (TRBV19, TRBJ2-1)
CASSSQRVPLDEQFF

SEQ ID NO: 666107 - protein, 19 aa, Homo sapiens
  CDR3 for alpha chain variable domain of TCR clone 333054 (TRAV26-1, TRAJ52)
CIVRVANNAGGTSYGKLTF

SEQ ID NO: 666108 - protein, 14 aa, Homo sapiens
  CDR3 for beta chain variable domain of TCR clone 333054 (TRBV19, TRBJ1-2)
CASSIGAGSYGYSF

SEQ ID NO: 666109 - protein, 18 aa, Homo sapiens
  CDR3 for alpha chain variable domain of TCR clone 333055 (TRAV16, TRAJ52)
CALSGVDAGGTSYGKLTF

SEQ ID NO: 666110 - protein, 14 aa, Homo sapiens
  CDR3 for beta chain variable domain of TCR clone 333055 (TRBV20-1, TRBJ1-1)
CSAQTRIGGTEAFF

SEQ ID NO: 666111 - protein, 14 aa, Homo sapiens
  CDR3 for alpha chain variable domain of TCR clone 333056 (TRAV2, TRAJ9)
CAVEDRSGGFKTIF

SEQ ID NO: 666112 - protein, 15 aa, Homo sapiens
  CDR3 for beta chain variable domain of TCR clone 333056 (TRBV24-1, TRBJ2-4)
CATSDPRDRANIQYF

SEQ ID NO: 666113 - protein, 15 aa, Homo sapiens
  CDR3 for alpha chain variable domain of TCR clone 333057 (TRAV3, TRAJ4)
CAVRDGTGGYIKLIF

SEQ ID NO: 666114 - protein, 15 aa, Homo sapiens
  CDR3 for beta chain variable domain of TCR clone 333057 (TRBV27, TRBJ2-7)
CASSPDQGRLYEQYF

SEQ ID NO: 666115 - protein, 14 aa, Homo sapiens
  CDR3 for alpha chain variable domain of TCR clone 333058 (TRAV17, TRAJ56)
CATVPAGANIKLTF

SEQ ID NO: 666116 - protein, 13 aa, Homo sapiens
  CDR3 for beta chain variable domain of TCR clone 333058 (TRBV12-4, TRBJ2-2)
CASSITGSGELFF

SEQ ID NO: 666117 - protein, 15 aa, Homo sapiens
  CDR3 for alpha chain variable domain of TCR clone 333059 (TRAV1-2, TRAJ30)
CAVRPHGTRDDKFIF

SEQ ID NO: 666118 - protein, 13 aa, Homo sapiens
  CDR3 for beta chain variable domain of TCR clone 333059 (TRBV4-1, TRBJ2-7)
CASSQGQAYEQYF

SEQ ID NO: 666119 - protein, 10 aa, Homo sapiens
  CDR3 for alpha chain variable domain of TCR clone 333060 (TRAV13-2, TRAJ20)
CAENICRLQA

SEQ ID NO: 666120 - protein, 14 aa, Homo sapiens
  CDR3 for beta chain variable domain of TCR clone 333060 (TRBV6-1, TRBJ2-1)
CASAGGAIKNEQLF

SEQ ID NO: 666121 - protein, 12 aa, Homo sapiens
  CDR3 for alpha chain variable domain of TCR clone 333061 (TRAV1-1, TRAJ9)
CAVDTGGFKTIF

SEQ ID NO: 666122 - protein, 14 aa, Homo sapiens
  CDR3 for beta chain variable domain of TCR clone 333061 (TRBV7-8, TRBJ2-5)
CASSATGGQETEYF

SEQ ID NO: 666123 - protein, 16 aa, Homo sapiens
  CDR3 for alpha chain variable domain of TCR clone 333062 (TRAV1-2, TRAJ10)
CAVRGVLTGGGNKLTF

SEQ ID NO: 666124 - protein, 16 aa, Homo sapiens
  CDR3 for beta chain variable domain of TCR clone 333062 (TRBV25-1, TRBJ1-1)
CASSGDRDRGRIEAFF

SEQ ID NO: 666125 - protein, 15 aa, Homo sapiens
  CDR3 for alpha chain variable domain of TCR clone 333063 (TRAV17, TRAJ54)
CATEKLGQGAQKLVS

SEQ ID NO: 666126 - protein, 14 aa, Homo sapiens
  CDR3 for beta chain variable domain of TCR clone 333063 (TRBV7-3, TRBJ1-1)
CQQLRGQMNTEAFF

SEQ ID NO: 666127 - protein, 11 aa, Homo sapiens
  CDR3 for alpha chain variable domain of TCR clone 333064 (TRAV1-1, TRAJ23)
RAVRQGGKLIF

SEQ ID NO: 666128 - protein, 15 aa, Homo sapiens
  CDR3 for beta chain variable domain of TCR clone 333064 (TRBV11-3, TRBJ2-2)
CASSPRRGNTGELFF

SEQ ID NO: 666129 - protein, 14 aa, Homo sapiens
  CDR3 for alpha chain variable domain of TCR clone 333065 (TRAV1-2, TRAJ16)
CAVDRFSDGQKLLF

SEQ ID NO: 666130 - protein, 16 aa, Homo sapiens
  CDR3 for beta chain variable domain of TCR clone 333065 (TRBV20-1, TRBJ1-4)
CSAPGQGLLTNEKLFF

SEQ ID NO: 666131 - protein, 16 aa, Homo sapiens
  CDR3 for alpha chain variable domain of TCR clone 333066 (TRAV3, TRAJ10)
CAVRDMRAGGGNTLTF

SEQ ID NO: 666132 - protein, 16 aa, Homo sapiens
  CDR3 for beta chain variable domain of TCR clone 333066 (TRBV19, TRBJ2-2)
CASSFPGQGLAGELFF

SEQ ID NO: 666133 - protein, 17 aa, Homo sapiens
  CDR3 for alpha chain variable domain of TCR clone 333067 (TRAV3, TRAJ6)
CAVRDGPRAGGSYIPTF

SEQ ID NO: 666134 - protein, 15 aa, Homo sapiens
  CDR3 for beta chain variable domain of TCR clone 333067 (TRBV18, TRBJ2-7)
CASSPLQGRTYEQYF

SEQ ID NO: 666135 - protein, 14 aa, Homo sapiens
  CDR3 for alpha chain variable domain of TCR clone 333068 (TRAV26-1, TRAJ21)
CIAHTTSKNFTLDL

SEQ ID NO: 666136 - protein, 15 aa, Homo sapiens
  CDR3 for beta chain variable domain of TCR clone 333068 (TRBV20-1, TRBJ2-7)
CSARDRVSGMDEQYF

SEQ ID NO: 666137 - protein, 11 aa, Homo sapiens
  CDR3 for alpha chain variable domain of TCR clone 333069 (TRAV21, TRAJ49)
CAVSFGNQFYF

SEQ ID NO: 666138 - protein, 15 aa, Homo sapiens
  CDR3 for beta chain variable domain of TCR clone 333069 (TRBV7-3, TRBJ2-1)
CQQLQTSGRYNEQFF

SEQ ID NO: 666139 - protein, 15 aa, Homo sapiens
  CDR3 for alpha chain variable domain of TCR clone 333070 (TRAV12-2, TRAJ43)
CAFDMRFGAGTRLTV

SEQ ID NO: 666140 - protein, 15 aa, Homo sapiens
  CDR3 for beta chain variable domain of TCR clone 333070 (TRBV7-9, TRBJ2-2)
CASGPLDTFPGELFF

SEQ ID NO: 666141 - protein, 14 aa, Homo sapiens
  CDR3 for alpha chain variable domain of TCR clone 333071 (TRAV26-1, TRAJ38)
CIADNAGNNRKLIW

SEQ ID NO: 666142 - protein, 17 aa, Homo sapiens
  CDR3 for beta chain variable domain of TCR clone 333071 (TRBV7-9, TRBJ2-3)
CASSPTVEGDLTDTQYF

SEQ ID NO: 666143 - protein, 13 aa, Homo sapiens
  CDR3 for alpha chain variable domain of TCR clone 333072 (TRAV21, TRAJ57)
CAVTEGGPEKLVF

SEQ ID NO: 666144 - protein, 15 aa, Homo sapiens
  CDR3 for beta chain variable domain of TCR clone 333072 (TRBV10-3, TRBJ2-5)
CAISEFGRGQETQYF

SEQ ID NO: 666145 - protein, 17 aa, Homo sapiens
  CDR3 for alpha chain variable domain of TCR clone 333073 (TRAV12-3, TRAJ6)
CAMSARGGAGGSAIPTF

SEQ ID NO: 666146 - protein, 12 aa, Homo sapiens
  CDR3 for beta chain variable domain of TCR clone 333073 (TRBV12-4, TRBJ2-3)
CASSTLPDTQYF

SEQ ID NO: 666147 - protein, 16 aa, Homo sapiens
  CDR3 for alpha chain variable domain of TCR clone 333074 (TRAV30, TRAJ24)
CGTEIVDAHSWGKFQF

SEQ ID NO: 666148 - protein, 14 aa, Homo sapiens
  CDR3 for beta chain variable domain of TCR clone 333074 (TRBV12-5, TRBJ2-5)
CASGSRTQQETQYF

SEQ ID NO: 666149 - protein, 13 aa, Homo sapiens
  CDR3 for alpha chain variable domain of TCR clone 333075 (TRAV12-2, TRAJ9)
CAVGNTGGFKTIF

SEQ ID NO: 666150 - protein, 14 aa, Homo sapiens
  CDR3 for beta chain variable domain of TCR clone 333075 (TRBV7-2, TRBJ2-7)
CASRLQGAAYEQYF

SEQ ID NO: 666151 - protein, 14 aa, Homo sapiens
  CDR3 for alpha chain variable domain of TCR clone 333076 (TRAV34, TRAJ44)
CGADGTGTASKLTF

SEQ ID NO: 666152 - protein, 13 aa, Homo sapiens
  CDR3 for beta chain variable domain of TCR clone 333076 (TRBV24-1, TRBJ2-1)
CATSAGPYNEQFF

SEQ ID NO: 666153 - protein, 17 aa, Homo sapiens
  CDR3 for alpha chain variable domain of TCR clone 333077 (TRAV36/DV7, TRAJ52)
CAVAQRAGGTSYGKLTF

SEQ ID NO: 666154 - protein, 14 aa, Homo sapiens
  CDR3 for beta chain variable domain of TCR clone 333077 (TRBV20-1, TRBJ1-1)
CSAQTRIGGTKAFF

SEQ ID NO: 666155 - protein, 15 aa, Homo sapiens
  CDR3 for alpha chain variable domain of TCR clone 333078 (TRAV17, TRAJ22)
CATVAPSGSARQLTF

SEQ ID NO: 666156 - protein, 14 aa, Homo sapiens
  CDR3 for beta chain variable domain of TCR clone 333078 (TRBV20-1, TRBJ1-5)
CSARDGASGQPQHF

SEQ ID NO: 666157 - protein, 15 aa, Homo sapiens
  CDR3 for alpha chain variable domain of TCR clone 333079 (TRAV21, TRAJ40)
CAVRHQTSGTYKYIF

SEQ ID NO: 666158 - protein, 13 aa, Homo sapiens
  CDR3 for beta chain variable domain of TCR clone 333079 (TRBV7-2, TRBJ2-2)
CASSSVRAGELFF

SEQ ID NO: 666159 - protein, 13 aa, Homo sapiens
  CDR3 for alpha chain variable domain of TCR clone 333080 (TRAV2, TRAJ9)
CCVDRSGGFKTIF

SEQ ID NO: 666160 - protein, 15 aa, Homo sapiens
  CDR3 for beta chain variable domain of TCR clone 333080 (TRBV19, TRBJ2-1)
CASSSPGVPLDEQFF

SEQ ID NO: 666161 - protein, 10 aa, Homo sapiens
  CDR3 for alpha chain variable domain of TCR clone 333081 (TRAV12-2, TRAJ49)
CAVRRNQFYF

SEQ ID NO: 666162 - protein, 14 aa, Homo sapiens
  CDR3 for beta chain variable domain of TCR clone 333081 (TRBV19, TRBJ2-1)
CASPTFVLSSEQFF

SEQ ID NO: 666163 - protein, 18 aa, Homo sapiens
  CDR3 for alpha chain variable domain of TCR clone 333082 (TRAV26-2, TRAJ45)
CILRFWGYSGGGADGLTF

SEQ ID NO: 666164 - protein, 17 aa, Homo sapiens
  CDR3 for beta chain variable domain of TCR clone 333082 (TRBV28, TRBJ2-3)
CASSPTPAGGRVDTQYF

SEQ ID NO: 666165 - protein, 14 aa, Homo sapiens
  CDR3 for alpha chain variable domain of TCR clone 333083 (TRAV8-6, TRAJ39)
CAVSERDAGNMLTF

SEQ ID NO: 666166 - protein, 15 aa, Homo sapiens
  CDR3 for beta chain variable domain of TCR clone 333083 (TRBV11-3, TRBJ2-3)
CASLKDGREGDTQYF

SEQ ID NO: 666167 - protein, 14 aa, Homo sapiens
  CDR3 for alpha chain variable domain of TCR clone 333084 (TRAV1-2, TRAJ8)
CAVREDPGFQKLVF

SEQ ID NO: 666168 - protein, 13 aa, Homo sapiens
  CDR3 for beta chain variable domain of TCR clone 333084 (TRBV6-4, TRBJ2-3)
CASSVSWADTQYF

SEQ ID NO: 666169 - protein, 20 aa, Homo sapiens
  CDR3 for alpha chain variable domain of TCR clone 333085 (TRAV12-1, TRAJ42)
SSVIQPPTSVKGGSQGNLIF

SEQ ID NO: 666170 - protein, 18 aa, Homo sapiens
  CDR3 for beta chain variable domain of TCR clone 333085 (TRBV11-2, TRBJ2-3)
CASSLGGASRGAANTQYF

SEQ ID NO: 666171 - protein, 15 aa, Homo sapiens
  CDR3 for alpha chain variable domain of TCR clone 333086 (TRAV13-1, TRAJ50)
CAAKGSETSSDKVMF

SEQ ID NO: 666172 - protein, 13 aa, Homo sapiens
  CDR3 for beta chain variable domain of TCR clone 333086 (TRBV20-1, TRBJ2-3)
CSARAGGRDTQYF

SEQ ID NO: 666173 - protein, 17 aa, Homo sapiens
  CDR3 for alpha chain variable domain of TCR clone 333087 (TRAV29/DV5, TRAJ42)
CAASAGNYGGSQGNLIF

SEQ ID NO: 666174 - protein, 15 aa, Homo sapiens
  CDR3 for beta chain variable domain of TCR clone 333087 (TRBV7-9, TRBJ2-5)
CASSFKAGREETQYF

SEQ ID NO: 666175 - protein, 14 aa, Homo sapiens
  CDR3 for alpha chain variable domain of TCR clone 333088 (TRAV1-2, TRAJ8)
CAVREDTGFQKLVF

SEQ ID NO: 666176 - protein, 14 aa, Homo sapiens
  CDR3 for beta chain variable domain of TCR clone 333088 (TRBV19, TRBJ2-1)
CASPTFALSGEQFF

SEQ ID NO: 666177 - protein, 15 aa, Homo sapiens
  CDR3 for alpha chain variable domain of TCR clone 333089 (TRAV2, TRAJ15)
CAVEDRGQAGTALIF

SEQ ID NO: 666178 - protein, 13 aa, Homo sapiens
  CDR3 for beta chain variable domain of TCR clone 333089 (TRBV10-2, TRBJ2-7)
CASGASGGYEQHF

SEQ ID NO: 666179 - protein, 11 aa, Homo sapiens
  CDR3 for alpha chain variable domain of TCR clone 333090 (TRAV12-3, TRAJ27)
CAMASTGKSTF

SEQ ID NO: 666180 - protein, 13 aa, Homo sapiens
  CDR3 for beta chain variable domain of TCR clone 333090 (TRBV20-1, TRBJ1-1)
CSSRVGGNTEAFF

SEQ ID NO: 666181 - protein, 13 aa, Homo sapiens
  CDR3 for alpha chain variable domain of TCR clone 333091 (TRAV26-1, TRAJ30)
CVVNMNRDDKIIF

SEQ ID NO: 666182 - protein, 16 aa, Homo sapiens
  CDR3 for beta chain variable domain of TCR clone 333091 (TRBV16, TRBJ2-7)
CASSRPAGGSSYEQYF

SEQ ID NO: 666183 - protein, 14 aa, Homo sapiens
  CDR3 for alpha chain variable domain of TCR clone 333092 (TRAV23/DV6, TRAJ8)
CAASKATGFQRLVF

SEQ ID NO: 666184 - protein, 15 aa, Homo sapiens
  CDR3 for beta chain variable domain of TCR clone 333092 (TRBV28, TRBJ2-3)
CASSPDRQGANTQYF

SEQ ID NO: 666185 - protein, 14 aa, Homo sapiens
  CDR3 for alpha chain variable domain of TCR clone 333093 (TRAV26-1, TRAJ8)
CIVRVDTGFQRLLF

SEQ ID NO: 666186 - protein, 15 aa, Homo sapiens
  CDR3 for beta chain variable domain of TCR clone 333093 (TRBV10-2, TRBJ2-7)
CASWNRGQATYEQYF

SEQ ID NO: 666187 - protein, 23 aa, Homo sapiens
  CDR3 for alpha chain variable domain of TCR clone 333094 (TRAV26-1, TRAJ38)
CIADNAGNNHIQNPDPAVYQLRD

SEQ ID NO: 666188 - protein, 17 aa, Homo sapiens
  CDR3 for beta chain variable domain of TCR clone 333094 (TRBV11-2, TRBJ2-1)
CASSLYPPGVEYNKQFF

SEQ ID NO: 666189 - protein, 15 aa, Homo sapiens
  CDR3 for alpha chain variable domain of TCR clone 333095 (TRAV2, TRAJ9)
CAVEDRGTRGFKTIF

SEQ ID NO: 666190 - protein, 16 aa, Homo sapiens
  CDR3 for beta chain variable domain of TCR clone 333095 (TRBV24-1, TRBJ2-3)
CATSDPGTGATGTQYF

SEQ ID NO: 666191 - protein, 17 aa, Homo sapiens
  CDR3 for alpha chain variable domain of TCR clone 333096 (TRAV3, TRAJ7)
CAVRDMSPLEGTTASLL

SEQ ID NO: 666192 - protein, 17 aa, Homo sapiens
  CDR3 for beta chain variable domain of TCR clone 333096 (TRBV15, TRBJ1-2)
CATSGREIDVVNYGYTF

SEQ ID NO: 666193 - protein, 15 aa, Homo sapiens
  CDR3 for alpha chain variable domain of TCR clone 333097 (TRAV8-2, TRAJ24)
CVVSDRTDSWGKLQF

SEQ ID NO: 666194 - protein, 14 aa, Homo sapiens
  CDR3 for beta chain variable domain of TCR clone 333097 (TRBV7-9, TRBJ2-7)
CASSLVPGRGEQYF

SEQ ID NO: 666195 - protein, 14 aa, Homo sapiens
  CDR3 for alpha chain variable domain of TCR clone 333098 (TRAV13-1, TRAJ44)
CAAKAAGTASTLTF

SEQ ID NO: 666196 - protein, 13 aa, Homo sapiens
  CDR3 for beta chain variable domain of TCR clone 333098 (TRBV5-5, TRBJ1-2)
CASSFWRGEDYTF

SEQ ID NO: 666197 - protein, 15 aa, Homo sapiens
  CDR3 for alpha chain variable domain of TCR clone 333099 (TRAV26-1, TRAJ29)
CIVRVEGSGNTPIVF

SEQ ID NO: 666198 - protein, 15 aa, Homo sapiens
  CDR3 for beta chain variable domain of TCR clone 333099 (TRBV7-9, TRBJ1-5)
CASSQGHQPSQPQHF

SEQ ID NO: 666199 - protein, 18 aa, Homo sapiens
  CDR3 for alpha chain variable domain of TCR clone 333100 (TRAV21, TRAJ52)
CAVRPSPAGGTSYGKLTL

SEQ ID NO: 666200 - protein, 13 aa, Homo sapiens
  CDR3 for beta chain variable domain of TCR clone 333100 (TRBV2, TRBJ1-5)
CATAGPGNQPQHL

SEQ ID NO: 666201 - protein, 15 aa, Homo sapiens
  CDR3 for alpha chain variable domain of TCR clone 333101 (TRAV17, TRAJ57)
CATGPSHGGSEKLVF

SEQ ID NO: 666202 - protein, 16 aa, Homo sapiens
  CDR3 for beta chain variable domain of TCR clone 333101 (TRBV12-4, TRBJ1-5)
CASSRPVGGSNQHQHF

SEQ ID NO: 666203 - protein, 15 aa, Homo sapiens
  CDR3 for alpha chain variable domain of TCR clone 333102 (TRAV27, TRAJ38)
CAARRNAGNNRKLIW

SEQ ID NO: 666204 - protein, 13 aa, Homo sapiens
  CDR3 for beta chain variable domain of TCR clone 333102 (TRBV2, TRBJ1-1)
CARNPTGGFHAFF

SEQ ID NO: 666205 - protein, 14 aa, Homo sapiens
  CDR3 for alpha chain variable domain of TCR clone 333103 (TRAV12-3, TRAJ47)
CAMSVREYGNKLGF

SEQ ID NO: 666206 - protein, 15 aa, Homo sapiens
  CDR3 for beta chain variable domain of TCR clone 333103 (TRBV20-1, TRBJ2-2)
CSARDTRLNTGELFF

SEQ ID NO: 666207 - protein, 11 aa, Homo sapiens
  CDR3 for alpha chain variable domain of TCR clone 333104 (TRAV21, TRAJ34)
CAVTNTDKPIF

SEQ ID NO: 666208 - protein, 17 aa, Homo sapiens
  CDR3 for beta chain variable domain of TCR clone 333104 (TRBV5-1, TRBJ1-6)
CASSFGEVSSYNSPLHF

SEQ ID NO: 666209 - protein, 14 aa, Homo sapiens
  CDR3 for alpha chain variable domain of TCR clone 333105 (TRAV3, TRAJ40)
CAVRDRRGTYKYIF

SEQ ID NO: 666210 - protein, 14 aa, Homo sapiens
  CDR3 for beta chain variable domain of TCR clone 333105 (TRBV6-1, TRBJ1-3)
CASVQGGGGNTIYV

SEQ ID NO: 666211 - protein, 12 aa, Homo sapiens
  CDR3 for alpha chain variable domain of TCR clone 333106 (TRAV16, TRAJ10)
CSRTGGGNKLTF

SEQ ID NO: 666212 - protein, 14 aa, Homo sapiens
  CDR3 for beta chain variable domain of TCR clone 333106 (TRBV10-3, TRBJ2-5)
CAISVGGVYETQYF

SEQ ID NO: 666213 - protein, 15 aa, Homo sapiens
  CDR3 for alpha chain variable domain of TCR clone 333107 (TRAV26-1, TRAJ40)
CIVRVTTSGTCKYIF

SEQ ID NO: 666214 - protein, 12 aa, Homo sapiens
  CDR3 for beta chain variable domain of TCR clone 333107 (TRBV7-9, TRBJ1-4)
CASGTDREKLFF

SEQ ID NO: 666215 - protein, 15 aa, Homo sapiens
  CDR3 for alpha chain variable domain of TCR clone 333108 (TRAV17, TRAJ36)
CFLLLCPNWANNLFF

SEQ ID NO: 666216 - protein, 12 aa, Homo sapiens
  CDR3 for beta chain variable domain of TCR clone 333108 (TRBV29-1, TRBJ2-3)
CSVTGGADTQYF

SEQ ID NO: 666217 - protein, 15 aa, Homo sapiens
  CDR3 for alpha chain variable domain of TCR clone 333109 (TRAV13-1, TRAJ5)
CAVSPIDTGRRELTF

SEQ ID NO: 666218 - protein, 18 aa, Homo sapiens
  CDR3 for beta chain variable domain of TCR clone 333109 (TRBV4-1, TRBJ2-2)
CASSFRTSGGEGPGELFF

SEQ ID NO: 666219 - protein, 15 aa, Homo sapiens
  CDR3 for alpha chain variable domain of TCR clone 333110 (TRAV27, TRAJ10)
CAGARLTGGGNKLTF

SEQ ID NO: 666220 - protein, 16 aa, Homo sapiens
  CDR3 for beta chain variable domain of TCR clone 333110 (TRBV12-5, TRBJ2-5)
CASGPRTSGNQETQYF

SEQ ID NO: 666221 - protein, 14 aa, Homo sapiens
  CDR3 for alpha chain variable domain of TCR clone 333111 (TRAV17, TRAJ39)
CATDPVRAGNMPTF

SEQ ID NO: 666222 - protein, 15 aa, Homo sapiens
  CDR3 for beta chain variable domain of TCR clone 333111 (TRBV13, TRBJ1-5)
CASSFGQGGVQTQHF

SEQ ID NO: 666223 - protein, 12 aa, Homo sapiens
  CDR3 for alpha chain variable domain of TCR clone 333112 (TRAV14/DV4, TRAJ9)
CAMNPGGFKTIF

SEQ ID NO: 666224 - protein, 16 aa, Homo sapiens
  CDR3 for beta chain variable domain of TCR clone 333112 (TRBV28, TRBJ2-5)
CASSCSPAGGWETQYL

SEQ ID NO: 666225 - protein, 16 aa, Homo sapiens
  CDR3 for alpha chain variable domain of TCR clone 333113 (TRAV25, TRAJ53)
CAGPKGSGGSNYKLKF

SEQ ID NO: 666226 - protein, 17 aa, Homo sapiens
  CDR3 for beta chain variable domain of TCR clone 333113 (TRBV11-3, TRBJ2-6)
CASKWGQGLSGANVLTF

SEQ ID NO: 666227 - protein, 14 aa, Homo sapiens
  CDR3 for alpha chain variable domain of TCR clone 333114 (TRAV21, TRAJ35)
CAVMPIGFGNVLHC

SEQ ID NO: 666228 - protein, 13 aa, Homo sapiens
  CDR3 for beta chain variable domain of TCR clone 333114 (TRBV6-1, TRBJ1-1)
CASSRQGNTEAFF

SEQ ID NO: 666229 - protein, 14 aa, Homo sapiens
  CDR3 for alpha chain variable domain of TCR clone 333115 (TRAV8-6, TRAJ37)
CAVRSRSKTGKLIF

SEQ ID NO: 666230 - protein, 14 aa, Homo sapiens
  CDR3 for beta chain variable domain of TCR clone 333115 (TRBV6-5, TRBJ1-1)
CASRKPDRDTEAFF

SEQ ID NO: 666231 - protein, 14 aa, Homo sapiens
  CDR3 for alpha chain variable domain of TCR clone 333116 (TRAV12-1, TRAJ17)
CVVNYKAAGNKLTF

SEQ ID NO: 666232 - protein, 15 aa, Homo sapiens
  CDR3 for beta chain variable domain of TCR clone 333116 (TRBV7-2, TRBJ2-3)
CASSLRGGSTDTQYF

SEQ ID NO: 666233 - protein, 14 aa, Homo sapiens
  CDR3 for alpha chain variable domain of TCR clone 333117 (TRAV38-1, TRAJ40)
CALRPTPGTYKYIF

SEQ ID NO: 666234 - protein, 14 aa, Homo sapiens
  CDR3 for beta chain variable domain of TCR clone 333117 (TRBV25-1, TRBJ1-1)
CASTHRGGKTEAFF

SEQ ID NO: 666235 - protein, 15 aa, Homo sapiens
  CDR3 for alpha chain variable domain of TCR clone 333118 (TRAV29/DV5, TRAJ29)
CAASERSSGTTPLVF

SEQ ID NO: 666236 - protein, 17 aa, Homo sapiens
  CDR3 for beta chain variable domain of TCR clone 333118 (TRBV4-1, TRBJ1-4)
CASSQEGPRGVEEKLFL

SEQ ID NO: 666237 - protein, 17 aa, Homo sapiens
  CDR3 for alpha chain variable domain of TCR clone 333119 (TRAV3, TRAJ6)
CAVRDGPRAGGSCIPTF

SEQ ID NO: 666238 - protein, 15 aa, Homo sapiens
  CDR3 for beta chain variable domain of TCR clone 333119 (TRBV12-4, TRBJ2-5)
CASSPPTGLQETQYF

SEQ ID NO: 666239 - protein, 14 aa, Homo sapiens
  CDR3 for alpha chain variable domain of TCR clone 333120 (TRAV12-3, TRAJ29)
CAMILLSGNTPLVF

SEQ ID NO: 666240 - protein, 16 aa, Homo sapiens
  CDR3 for beta chain variable domain of TCR clone 333120 (TRBV28, TRBJ2-7)
CASSSGTSGRGCEQYF

SEQ ID NO: 666241 - protein, 16 aa, Homo sapiens
  CDR3 for alpha chain variable domain of TCR clone 333121 (TRAV12-1, TRAJ42)
CVVTPYYGGSQGNLIF

SEQ ID NO: 666242 - protein, 15 aa, Homo sapiens
  CDR3 for beta chain variable domain of TCR clone 333121 (TRBV5-7, TRBJ1-5)
CASSYGKLWDQPQHF

SEQ ID NO: 666243 - protein, 13 aa, Homo sapiens
  CDR3 for alpha chain variable domain of TCR clone 333122 (TRAV20, TRAJ37)
CAGCSSNTAKLIF

SEQ ID NO: 666244 - protein, 11 aa, Homo sapiens
  CDR3 for beta chain variable domain of TCR clone 333122 (TRBV12-4, TRBJ2-3)
CASTATGTQYF

SEQ ID NO: 666245 - protein, 15 aa, Homo sapiens
  CDR3 for alpha chain variable domain of TCR clone 333123 (TRAV4, TRAJ39)
CLVGPNNNAGNMLTF

SEQ ID NO: 666246 - protein, 19 aa, Homo sapiens
  CDR3 for beta chain variable domain of TCR clone 333123 (TRBV28, TRBJ2-1)
CASSFSIRGSGRTRYEQFF

SEQ ID NO: 666247 - protein, 15 aa, Homo sapiens
  CDR3 for alpha chain variable domain of TCR clone 333124 (TRAV13-2, TRAJ8)
CAENKRDTGFQKLVF

SEQ ID NO: 666248 - protein, 15 aa, Homo sapiens
  CDR3 for beta chain variable domain of TCR clone 333124 (TRBV9, TRBJ1-6)
CASSVAGTGDSPLHF

SEQ ID NO: 666249 - protein, 12 aa, Homo sapiens
  CDR3 for alpha chain variable domain of TCR clone 333125 (TRAV12-3, TRAJ17)
CAMTLTGNKLTF

SEQ ID NO: 666250 - protein, 15 aa, Homo sapiens
  CDR3 for beta chain variable domain of TCR clone 333125 (TRBV10-2, TRBJ2-6)
CASSVQGTGANVLTF

SEQ ID NO: 666251 - protein, 23 aa, Homo sapiens
  CDR3 for alpha chain variable domain of TCR clone 333126 (TRAV8-6, TRAJ38)
CAVRNAGNNHIQNPDPAVYQLRD

SEQ ID NO: 666252 - protein, 20 aa, Homo sapiens
  CDR3 for beta chain variable domain of TCR clone 333126 (TRBV4-1, TRBJ2-5)
CASPPGGAETRDPVLRARHA

SEQ ID NO: 666253 - protein, 16 aa, Homo sapiens
  CDR3 for alpha chain variable domain of TCR clone 333127 (TRAV12-3, TRAJ53)
CAMSPGRGGSNDKLTF

SEQ ID NO: 666254 - protein, 16 aa, Homo sapiens
  CDR3 for beta chain variable domain of TCR clone 333127 (TRBV4-2, TRBJ1-1)
CASSQAGFGMNTEAFF

SEQ ID NO: 666255 - protein, 13 aa, Homo sapiens
  CDR3 for alpha chain variable domain of TCR clone 333128 (TRAV27, TRAJ41)
CAGEGNSGYALNF

SEQ ID NO: 666256 - protein, 15 aa, Homo sapiens
  CDR3 for beta chain variable domain of TCR clone 333128 (TRBV7-8, TRBJ1-5)
CASSRGGGADQPQHF

SEQ ID NO: 666257 - protein, 14 aa, Homo sapiens
  CDR3 for alpha chain variable domain of TCR clone 333129 (TRAV29/DV5, TRAJ36)
YAARRKTGANNLFF

SEQ ID NO: 666258 - protein, 16 aa, Homo sapiens
  CDR3 for beta chain variable domain of TCR clone 333129 (TRBV12-4, TRBJ1-5)
CASSRPVGGSNQPQHF

SEQ ID NO: 666259 - protein, 14 aa, Homo sapiens
  CDR3 for alpha chain variable domain of TCR clone 333130 (TRAV26-1, TRAJ38)
CIADNAGNNRKLIW

SEQ ID NO: 666260 - protein, 16 aa, Homo sapiens
  CDR3 for beta chain variable domain of TCR clone 333130 (TRBV29-1, TRBJ2-7)
RSVEDAEDGTAYEQYF

SEQ ID NO: 666261 - protein, 15 aa, Homo sapiens
  CDR3 for alpha chain variable domain of TCR clone 333131 (TRAV27, TRAJ38)
CAGRFNAGNNRKLIG

SEQ ID NO: 666262 - protein, 13 aa, Homo sapiens
  CDR3 for beta chain variable domain of TCR clone 333131 (TRBV20-1, TRBJ2-1)
TSGALPPGNEQFF

SEQ ID NO: 666263 - protein, 14 aa, Homo sapiens
  CDR3 for alpha chain variable domain of TCR clone 333132 (TRAV26-1, TRAJ8)
CIVRVDTGFQKLVF

SEQ ID NO: 666264 - protein, 16 aa, Homo sapiens
  CDR3 for beta chain variable domain of TCR clone 333132 (TRBV11-2, TRBJ2-2)
CASSTHRGSDTGELFF

SEQ ID NO: 666265 - protein, 14 aa, Homo sapiens
  CDR3 for alpha chain variable domain of TCR clone 333133 (TRAV26-1, TRAJ58)
CIRMIKAAGNKLTF

SEQ ID NO: 666266 - protein, 12 aa, Homo sapiens
  CDR3 for beta chain variable domain of TCR clone 333133 (TRBV9, TRBJ2-2)
CASSARTGELFF

SEQ ID NO: 666267 - protein, 13 aa, Homo sapiens
  CDR3 for alpha chain variable domain of TCR clone 333134 (TRAV12-3, TRAJ33)
CAMSVNSNYQLIW

SEQ ID NO: 666268 - protein, 13 aa, Homo sapiens
  CDR3 for beta chain variable domain of TCR clone 333134 (TRBV20-1, TRBJ1-6)
CSAPLGVGSPLHF

SEQ ID NO: 666269 - protein, 13 aa, Homo sapiens
  CDR3 for alpha chain variable domain of TCR clone 333135 (TRAV2, TRAJ40)
CAVVTSGTYKYIF

SEQ ID NO: 666270 - protein, 13 aa, Homo sapiens
  CDR3 for beta chain variable domain of TCR clone 333135 (TRBV7-2, TRBJ2-4)
CASSREHANIQYF

SEQ ID NO: 666271 - protein, 10 aa, Homo sapiens
  CDR3 for alpha chain variable domain of TCR clone 333136 (TRAV8-3, TRAJ43)
CAVTLADMRF

SEQ ID NO: 666272 - protein, 17 aa, Homo sapiens
  CDR3 for beta chain variable domain of TCR clone 333136 (TRBV10-1, TRBJ2-1)
CASSPQRAGGPFNEQFF

SEQ ID NO: 666273 - protein, 12 aa, Homo sapiens
  CDR3 for alpha chain variable domain of TCR clone 333137 (TRAV10, TRAJ43)
CVVVRVGNDMRF

SEQ ID NO: 666274 - protein, 15 aa, Homo sapiens
  CDR3 for beta chain variable domain of TCR clone 333137 (TRBV2, TRBJ1-2)
CASSEIGGANYGYTF

SEQ ID NO: 666275 - protein, 11 aa, Homo sapiens
  CDR3 for alpha chain variable domain of TCR clone 333138 (TRAV17, TRAJ43)
CATPRSNDMRF

SEQ ID NO: 666276 - protein, 15 aa, Homo sapiens
  CDR3 for beta chain variable domain of TCR clone 333138 (TRBV11-2, TRBJ2-1)
CASSWGTSGLKEQFF

SEQ ID NO: 666277 - protein, 14 aa, Homo sapiens
  CDR3 for alpha chain variable domain of TCR clone 333139 (TRAV12-2, TRAJ24)
CAVTPADSWGKFPF

SEQ ID NO: 666278 - protein, 12 aa, Homo sapiens
  CDR3 for beta chain variable domain of TCR clone 333139 (TRBV3-1, TRBJ2-1)
CASSQGSSGQFF

SEQ ID NO: 666279 - protein, 14 aa, Homo sapiens
  CDR3 for alpha chain variable domain of TCR clone 333140 (TRAV12-1, TRAJ37)
CVVTGSSNTGKLIF

SEQ ID NO: 666280 - protein, 12 aa, Homo sapiens
  CDR3 for beta chain variable domain of TCR clone 333140 (TRBV11-2, TRBJ2-2)
CASSLGGGELFF

SEQ ID NO: 666281 - protein, 14 aa, Homo sapiens
  CDR3 for alpha chain variable domain of TCR clone 333141 (TRAV17, TRAJ17)
CDTDDAAAGNKLTF

SEQ ID NO: 666282 - protein, 16 aa, Homo sapiens
  CDR3 for beta chain variable domain of TCR clone 333141 (TRBV19, TRBJ2-1)
CASSIETGSPYNEQFF

SEQ ID NO: 666283 - protein, 14 aa, Homo sapiens
  CDR3 for alpha chain variable domain of TCR clone 333142 (TRAV12-2, TRAJ13)
CAVKKTGGYQKVTF

SEQ ID NO: 666284 - protein, 13 aa, Homo sapiens
  CDR3 for beta chain variable domain of TCR clone 333142 (TRBV12-4, TRBJ1-2)
CASSSGLTVISTF

SEQ ID NO: 666285 - protein, 18 aa, Homo sapiens
  CDR3 for alpha chain variable domain of TCR clone 333143 (TRAV13-1, TRAJ52)
CAAKNPNAGGTGYGKLTF

SEQ ID NO: 666286 - protein, 15 aa, Homo sapiens
  CDR3 for beta chain variable domain of TCR clone 333143 (TRBV6-1, TRBJ2-3)
CASSERGGITDTQYF

SEQ ID NO: 666287 - protein, 12 aa, Homo sapiens
  CDR3 for alpha chain variable domain of TCR clone 333144 (TRAV23/DV6, TRAJ30)
CAASKGDDKIIV

SEQ ID NO: 666288 - protein, 17 aa, Homo sapiens
  CDR3 for beta chain variable domain of TCR clone 333144 (TRBV13, TRBJ2-3)
CASSLSRVAGGRNTQYF

SEQ ID NO: 666289 - protein, 15 aa, Homo sapiens
  CDR3 for alpha chain variable domain of TCR clone 333145 (TRAV2, TRAJ9)
CAVAVLNTGGFKTIF

SEQ ID NO: 666290 - protein, 14 aa, Homo sapiens
  CDR3 for beta chain variable domain of TCR clone 333145 (TRBV7-8, TRBJ2-5)
CASSATGGQETQYF

SEQ ID NO: 666291 - protein, 11 aa, Homo sapiens
  CDR3 for alpha chain variable domain of TCR clone 333146 (TRAV2, TRAJ33)
CAVASNYQLIW

SEQ ID NO: 666292 - protein, 15 aa, Homo sapiens
  CDR3 for beta chain variable domain of TCR clone 333146 (TRBV19, TRBJ1-1)
CASTSGQIQNTEAFL

SEQ ID NO: 666293 - protein, 14 aa, Homo sapiens
  CDR3 for alpha chain variable domain of TCR clone 333147 (TRAV4, TRAJ9)
CLVGSGPGGFKTIF

SEQ ID NO: 666294 - protein, 15 aa, Homo sapiens
  CDR3 for beta chain variable domain of TCR clone 333147 (TRBV11-3, TRBJ2-3)
CASLKDGREGDTQYF

SEQ ID NO: 666295 - protein, 16 aa, Homo sapiens
  CDR3 for alpha chain variable domain of TCR clone 333148 (TRAV21, TRAJ52)
CAVTNAGGTSCGKLTF

SEQ ID NO: 666296 - protein, 16 aa, Homo sapiens
  CDR3 for beta chain variable domain of TCR clone 333148 (TRBV2, TRBJ2-1)
CASSVGGSLSYNEQFF

SEQ ID NO: 666297 - protein, 14 aa, Homo sapiens
  CDR3 for alpha chain variable domain of TCR clone 333149 (TRAV1-2, TRAJ16)
CAVRSASDGQKLLF

SEQ ID NO: 666298 - protein, 12 aa, Homo sapiens
  CDR3 for beta chain variable domain of TCR clone 333149 (TRBV2, TRBJ2-1)
CAYGPPGNEQFF

SEQ ID NO: 666299 - protein, 12 aa, Homo sapiens
  CDR3 for alpha chain variable domain of TCR clone 333150 (TRAV21, TRAJ31)
CAVWGNNARLMF

SEQ ID NO: 666300 - protein, 17 aa, Homo sapiens
  CDR3 for beta chain variable domain of TCR clone 333150 (TRBV7-9, TRBJ2-3)
CASGPTVAGDLTDTQYF

SEQ ID NO: 666301 - protein, 15 aa, Homo sapiens
  CDR3 for alpha chain variable domain of TCR clone 333151 (TRAV26-1, TRAJ15)
CIVRAANQAGTALIF

SEQ ID NO: 666302 - protein, 16 aa, Homo sapiens
  CDR3 for beta chain variable domain of TCR clone 333151 (TRBV7-3, TRBJ2-1)
CASSLEGYRSYNEQFF

SEQ ID NO: 666303 - protein, 17 aa, Homo sapiens
  CDR3 for alpha chain variable domain of TCR clone 333152 (TRAV4, TRAJ18)
CLVGESSVGSTLGRLYF

SEQ ID NO: 666304 - protein, 14 aa, Homo sapiens
  CDR3 for beta chain variable domain of TCR clone 333152 (TRBV6-5, TRBJ1-2)
CASSYDGTGGGYTF

SEQ ID NO: 666305 - protein, 18 aa, Homo sapiens
  CDR3 for alpha chain variable domain of TCR clone 333153 (TRAV21, TRAJ52)
CAVRPSPAGGTSYGKLTF

SEQ ID NO: 666306 - protein, 16 aa, Homo sapiens
  CDR3 for beta chain variable domain of TCR clone 333153 (TRBV28, TRBJ2-1)
CASSSPEYPRGNEQFF

SEQ ID NO: 666307 - protein, 13 aa, Homo sapiens
  CDR3 for alpha chain variable domain of TCR clone 333154 (TRAV8-3, TRAJ37)
CAVPSSNTGQLIF

SEQ ID NO: 666308 - protein, 12 aa, Homo sapiens
  CDR3 for beta chain variable domain of TCR clone 333154 (TRBV11-2, TRBJ2-1)
CASSPGNNEQFF

SEQ ID NO: 666309 - protein, 12 aa, Homo sapiens
  CDR3 for alpha chain variable domain of TCR clone 333155 (TRAV2, TRAJ9)
CAVGAGGFKTIF

SEQ ID NO: 666310 - protein, 14 aa, Homo sapiens
  CDR3 for beta chain variable domain of TCR clone 333155 (TRBV19, TRBJ2-1)
CASPAFVLSGEQFF

SEQ ID NO: 666311 - protein, 18 aa, Homo sapiens
  CDR3 for alpha chain variable domain of TCR clone 333156 (TRAV21, TRAJ52)
CAVRPSPAGGTSYGKLTF

SEQ ID NO: 666312 - protein, 15 aa, Homo sapiens
  CDR3 for beta chain variable domain of TCR clone 333156 (TRBV11-2, TRBJ1-6)
CASSLDPWAVSPLHF

SEQ ID NO: 666313 - protein, 14 aa, Homo sapiens
  CDR3 for alpha chain variable domain of TCR clone 333157 (TRAV17, TRAJ6)
CATDASGGSYIPTF

SEQ ID NO: 666314 - protein, 16 aa, Homo sapiens
  CDR3 for beta chain variable domain of TCR clone 333157 (TRBV7-3, TRBJ2-1)
CASSKPLAGGYNEQFF

SEQ ID NO: 666315 - protein, 12 aa, Homo sapiens
  CDR3 for alpha chain variable domain of TCR clone 333158 (TRAV17, TRAJ4)
CATDGGYNKLIF

SEQ ID NO: 666316 - protein, 13 aa, Homo sapiens
  CDR3 for beta chain variable domain of TCR clone 333158 (TRBV29-1, TRBJ2-2)
CSTTGVNTGELFF

SEQ ID NO: 666317 - protein, 15 aa, Homo sapiens
  CDR3 for alpha chain variable domain of TCR clone 333159 (TRAV23/DV6, TRAJ18)
CAARYRGSTLGRLYF

SEQ ID NO: 666318 - protein, 14 aa, Homo sapiens
  CDR3 for beta chain variable domain of TCR clone 333159 (TRBV11-2, TRBJ2-3)
CASSLGGGANTQYF

SEQ ID NO: 666319 - protein, 16 aa, Homo sapiens
  CDR3 for alpha chain variable domain of TCR clone 333160 (TRAV30, TRAJ24)
CGTEIVDADSWGKFQF

SEQ ID NO: 666320 - protein, 14 aa, Homo sapiens
  CDR3 for beta chain variable domain of TCR clone 333160 (TRBV7-2, TRBJ2-7)
CASRSQGAAYEHHF

SEQ ID NO: 666321 - protein, 13 aa, Homo sapiens
  CDR3 for alpha chain variable domain of TCR clone 333161 (TRAV29/DV5, TRAJ31)
CAASRNKNARLMF

SEQ ID NO: 666322 - protein, 12 aa, Homo sapiens
  CDR3 for beta chain variable domain of TCR clone 333161 (TRBV11-2, TRBJ2-2)
CASSLGGGELFF

SEQ ID NO: 666323 - protein, 17 aa, Homo sapiens
  CDR3 for alpha chain variable domain of TCR clone 333162 (TRAV13-1, TRAJ28)
CAASPPYSGAGSYQLTF

SEQ ID NO: 666324 - protein, 15 aa, Homo sapiens
  CDR3 for beta chain variable domain of TCR clone 333162 (TRBV4-2, TRBJ1-1)
CASSQEDLPRTEAFF

SEQ ID NO: 666325 - protein, 12 aa, Homo sapiens
  CDR3 for alpha chain variable domain of TCR clone 333163 (TRAV16, TRAJ10)
CYRTGGGNKLTF

SEQ ID NO: 666326 - protein, 16 aa, Homo sapiens
  CDR3 for beta chain variable domain of TCR clone 333163 (TRBV12-5, TRBJ2-5)
CASGPRTSGNQETQYF

SEQ ID NO: 666327 - protein, 13 aa, Homo sapiens
  CDR3 for alpha chain variable domain of TCR clone 333164 (TRAV12-2, TRAJ10)
CAVLTGGGNKLTF

SEQ ID NO: 666328 - protein, 14 aa, Homo sapiens
  CDR3 for beta chain variable domain of TCR clone 333164 (TRBV25-1, TRBJ1-1)
CASTHLGGNTEAFF

SEQ ID NO: 666329 - protein, 13 aa, Homo sapiens
  CDR3 for alpha chain variable domain of TCR clone 333165 (TRAV2, TRAJ29)
CAAQNSGNTPLVL

SEQ ID NO: 666330 - protein, 14 aa, Homo sapiens
  CDR3 for beta chain variable domain of TCR clone 333165 (TRBV7-9, TRBJ2-4)
CASSLAMGGNIQYF

SEQ ID NO: 666331 - protein, 14 aa, Homo sapiens
  CDR3 for alpha chain variable domain of TCR clone 333166 (TRAV17, TRAJ57)
CATDPQGGSEKLFF

SEQ ID NO: 666332 - protein, 14 aa, Homo sapiens
  CDR3 for beta chain variable domain of TCR clone 333166 (TRBV5-8, TRBJ2-3)
CASSLGQGTDTQYF

SEQ ID NO: 666333 - protein, 12 aa, Homo sapiens
  CDR3 for alpha chain variable domain of TCR clone 333167 (TRAV13-2, TRAJ39)
CAESRPGNMLTF

SEQ ID NO: 666334 - protein, 12 aa, Homo sapiens
  CDR3 for beta chain variable domain of TCR clone 333167 (TRBV7-9, TRBJ2-7)
CASSIKREEQYF

SEQ ID NO: 666335 - protein, 18 aa, Homo sapiens
  CDR3 for alpha chain variable domain of TCR clone 333168 (TRAV21, TRAJ52)
CAVRPSPAGGTSYGKRTF

SEQ ID NO: 666336 - protein, 17 aa, Homo sapiens
  CDR3 for beta chain variable domain of TCR clone 333168 (TRBV13, TRBJ2-3)
CASSLSRVAGGRNTQYF

SEQ ID NO: 666337 - protein, 17 aa, Homo sapiens
  CDR3 for alpha chain variable domain of TCR clone 333169 (TRAV8-6, TRAJ8)
CAVKEGIENTGFQTLVF

SEQ ID NO: 666338 - protein, 12 aa, Homo sapiens
  CDR3 for beta chain variable domain of TCR clone 333169 (TRBV19, TRBJ1-4)
CASKDWPGGLFF

SEQ ID NO: 666339 - protein, 17 aa, Homo sapiens
  CDR3 for alpha chain variable domain of TCR clone 333170 (TRAV36/DV7, TRAJ52)
CAVAQRAGGTSYGKLTF

SEQ ID NO: 666340 - protein, 15 aa, Homo sapiens
  CDR3 for beta chain variable domain of TCR clone 333170 (TRBV7-2, TRBJ2-3)
CASSLGGVGRDTQYF

SEQ ID NO: 666341 - protein, 17 aa, Homo sapiens
  CDR3 for alpha chain variable domain of TCR clone 333171 (TRAV3, TRAJ12)
CAVRDGGRMDSSYKLIF

SEQ ID NO: 666342 - protein, 12 aa, Homo sapiens
  CDR3 for beta chain variable domain of TCR clone 333171 (TRBV5-1, TRBJ2-7)
CASSLDSYEQYF

SEQ ID NO: 666343 - protein, 10 aa, Homo sapiens
  CDR3 for alpha chain variable domain of TCR clone 333172 (TRAV23/DV6, TRAJ31)
CARGGARLIF

SEQ ID NO: 666344 - protein, 14 aa, Homo sapiens
  CDR3 for beta chain variable domain of TCR clone 333172 (TRBV7-8, TRBJ1-2)
CASSPDSLSYGYTF

SEQ ID NO: 666345 - protein, 15 aa, Homo sapiens
  CDR3 for alpha chain variable domain of TCR clone 333173 (TRAV21, TRAJ45)
CAVSYSGGGADGLTF

SEQ ID NO: 666346 - protein, 14 aa, Homo sapiens
  CDR3 for beta chain variable domain of TCR clone 333173 (TRBV11-1, TRBJ2-7)
CASTFAVPSYEQYF

SEQ ID NO: 666347 - protein, 14 aa, Homo sapiens
  CDR3 for alpha chain variable domain of TCR clone 333174 (TRAV23/DV6, TRAJ13)
CAAMYSGGYQKVTF

SEQ ID NO: 666348 - protein, 16 aa, Homo sapiens
  CDR3 for beta chain variable domain of TCR clone 333174 (TRBV4-3, TRBJ2-2)
CASSHLQGSGTGELFF

SEQ ID NO: 666349 - protein, 14 aa, Homo sapiens
  CDR3 for alpha chain variable domain of TCR clone 333175 (TRAV12-1, TRAJ17)
CGVNYKAAGNKLTF

SEQ ID NO: 666350 - protein, 14 aa, Homo sapiens
  CDR3 for beta chain variable domain of TCR clone 333175 (TRBV7-2, TRBJ2-7)
CASRSQGAAYEQYF

SEQ ID NO: 666351 - protein, 14 aa, Homo sapiens
  CDR3 for alpha chain variable domain of TCR clone 333176 (TRAV3, TRAJ9)
CAVRGNTGGCKTIF

SEQ ID NO: 666352 - protein, 14 aa, Homo sapiens
  CDR3 for beta chain variable domain of TCR clone 333176 (TRBV15, TRBJ2-1)
CATSGVEDYNEQFF

SEQ ID NO: 666353 - protein, 16 aa, Homo sapiens
  CDR3 for alpha chain variable domain of TCR clone 333177 (TRAV16, TRAJ52)
CALSGVGGTSYGKLTF

SEQ ID NO: 666354 - protein, 14 aa, Homo sapiens
  CDR3 for beta chain variable domain of TCR clone 333177 (TRBV19, TRBJ1-2)
CTSSLQGQAYGYTF

SEQ ID NO: 666355 - protein, 14 aa, Homo sapiens
  CDR3 for alpha chain variable domain of TCR clone 333178 (TRAV13-1, TRAJ35)
CAASKGGFGNVLHC

SEQ ID NO: 666356 - protein, 18 aa, Homo sapiens
  CDR3 for beta chain variable domain of TCR clone 333178 (TRBV20-1, TRBJ2-6)
CSARTLAGGPSGANVLTF

SEQ ID NO: 666357 - protein, 14 aa, Homo sapiens
  CDR3 for alpha chain variable domain of TCR clone 333179 (TRAV26-1, TRAJ45)
CIVREGGGADGITF

SEQ ID NO: 666358 - protein, 14 aa, Homo sapiens
  CDR3 for beta chain variable domain of TCR clone 333179 (TRBV2, TRBJ1-2)
CASNEGTGPYGYTF

SEQ ID NO: 666359 - protein, 11 aa, Homo sapiens
  CDR3 for alpha chain variable domain of TCR clone 333180 (TRAV21, TRAJ20)
CAVRDDYKPSF

SEQ ID NO: 666360 - protein, 14 aa, Homo sapiens
  CDR3 for beta chain variable domain of TCR clone 333180 (TRBV7-2, TRBJ2-7)
CASGPKTSFYEQYF

SEQ ID NO: 666361 - protein, 14 aa, Homo sapiens
  CDR3 for alpha chain variable domain of TCR clone 333181 (TRAV12-3, TRAJ33)
CAMSAGDSNYQLIW

SEQ ID NO: 666362 - protein, 12 aa, Homo sapiens
  CDR3 for beta chain variable domain of TCR clone 333181 (TRBV5-4, TRBJ2-7)
CASSLEAYEQYF

SEQ ID NO: 666363 - protein, 16 aa, Homo sapiens
  CDR3 for alpha chain variable domain of TCR clone 333182 (TRAV12-3, TRAJ53)
CAMSSGSGGSNYKLTF

SEQ ID NO: 666364 - protein, 13 aa, Homo sapiens
  CDR3 for beta chain variable domain of TCR clone 333182 (TRBV10-3, TRBJ2-7)
CASKLAVNYEQYF

SEQ ID NO: 666365 - protein, 12 aa, Homo sapiens
  CDR3 for alpha chain variable domain of TCR clone 333183 (TRAV36/DV7, TRAJ54)
CAVVRGAQKLVF

SEQ ID NO: 666366 - protein, 14 aa, Homo sapiens
  CDR3 for beta chain variable domain of TCR clone 333183 (TRBV4-1, TRBJ2-2)
CASSQAVNTGELFF

SEQ ID NO: 666367 - protein, 14 aa, Homo sapiens
  CDR3 for alpha chain variable domain of TCR clone 333184 (TRAV35, TRAJ24)
CAGPRRDSLGKLQF

SEQ ID NO: 666368 - protein, 12 aa, Homo sapiens
  CDR3 for beta chain variable domain of TCR clone 333184 (TRBV12-4, TRBJ2-3)
CASSLGQDTQYF

SEQ ID NO: 666369 - protein, 14 aa, Homo sapiens
  CDR3 for alpha chain variable domain of TCR clone 333185 (TRAV8-3, TRAJ7)
CAAIELSGNNRLAF

SEQ ID NO: 666370 - protein, 15 aa, Homo sapiens
  CDR3 for beta chain variable domain of TCR clone 333185 (TRBV3-1, TRBJ2-1)
CASSTGDTNYNEQFF

SEQ ID NO: 666371 - protein, 13 aa, Homo sapiens
  CDR3 for alpha chain variable domain of TCR clone 333186 (TRAV13-1, TRAJ9)
CAASGTGGFKTIF

SEQ ID NO: 666372 - protein, 13 aa, Homo sapiens
  CDR3 for beta chain variable domain of TCR clone 333186 (TRBV12-4, TRBJ2-7)
CASSLERVREQSF

SEQ ID NO: 666373 - protein, 11 aa, Homo sapiens
  CDR3 for alpha chain variable domain of TCR clone 333187 (TRAV1-2, TRAJ20)
RAVANDYKLSF

SEQ ID NO: 666374 - protein, 15 aa, Homo sapiens
  CDR3 for beta chain variable domain of TCR clone 333187 (TRBV20-1, TRBJ2-7)
CSARDPVKGEGEQYF

SEQ ID NO: 666375 - protein, 18 aa, Homo sapiens
  CDR3 for alpha chain variable domain of TCR clone 333188 (TRAV21, TRAJ52)
CAVRPSPAGGTSYRKLTF

SEQ ID NO: 666376 - protein, 13 aa, Homo sapiens
  CDR3 for beta chain variable domain of TCR clone 333188 (TRBV19, TRBJ1-2)
CASSVPGQDGYTS

SEQ ID NO: 666377 - protein, 16 aa, Homo sapiens
  CDR3 for alpha chain variable domain of TCR clone 333189 (TRAV3, TRAJ18)
CAVRDGRGSTLGRLYF

SEQ ID NO: 666378 - protein, 14 aa, Homo sapiens
  CDR3 for beta chain variable domain of TCR clone 333189 (TRBV12-5, TRBJ2-5)
CASGSRTHQETQYF

SEQ ID NO: 666379 - protein, 16 aa, Homo sapiens
  CDR3 for alpha chain variable domain of TCR clone 333190 (TRAV17, TRAJ53)
CATDALSGGSNYKLTF

SEQ ID NO: 666380 - protein, 15 aa, Homo sapiens
  CDR3 for beta chain variable domain of TCR clone 333190 (TRBV20-1, TRBJ2-7)
GSARDRVSGMDEQYF

SEQ ID NO: 666381 - protein, 17 aa, Homo sapiens
  CDR3 for alpha chain variable domain of TCR clone 333191 (TRAV26-1, TRAJ37)
CIVRVITVSSNTGKLIF

SEQ ID NO: 666382 - protein, 17 aa, Homo sapiens
  CDR3 for beta chain variable domain of TCR clone 333191 (TRBV7-8, TRBJ2-6)
CASSAGTGGAGANVLTF

SEQ ID NO: 666383 - protein, 15 aa, Homo sapiens
  CDR3 for alpha chain variable domain of TCR clone 333192 (TRAV26-1, TRAJ22)
CIVRVSFWFCKATDL

SEQ ID NO: 666384 - protein, 10 aa, Homo sapiens
  CDR3 for beta chain variable domain of TCR clone 333192 (TRBV7-9, TRBJ1-2)
CASSLKQNYA

SEQ ID NO: 666385 - protein, 14 aa, Homo sapiens
  CDR3 for alpha chain variable domain of TCR clone 333193 (TRAV12-2, TRAJ29)
CAVRRNSGNTPLVF

SEQ ID NO: 666386 - protein, 13 aa, Homo sapiens
  CDR3 for beta chain variable domain of TCR clone 333193 (TRBV12-4, TRBJ2-1)
CASSDYTGNEQFF

SEQ ID NO: 666387 - protein, 13 aa, Homo sapiens
  CDR3 for alpha chain variable domain of TCR clone 333194 (TRAV3, TRAJ27)
CAVRPLSAGKSTV

SEQ ID NO: 666388 - protein, 13 aa, Homo sapiens
  CDR3 for beta chain variable domain of TCR clone 333194 (TRBV7-9, TRBJ2-3)
CASSPGSTDTQYF

SEQ ID NO: 666389 - protein, 15 aa, Homo sapiens
  CDR3 for alpha chain variable domain of TCR clone 333195 (TRAV17, TRAJ16)
CATALRFSDGQTLPF

SEQ ID NO: 666390 - protein, 12 aa, Homo sapiens
  CDR3 for beta chain variable domain of TCR clone 333195 (TRBV2, TRBJ2-7)
CASSDPDYEQYF

SEQ ID NO: 666391 - protein, 14 aa, Homo sapiens
  CDR3 for alpha chain variable domain of TCR clone 333196 (TRAV1-2, TRAJ16)
CAVNRFSDGQKLLF

SEQ ID NO: 666392 - protein, 16 aa, Homo sapiens
  CDR3 for beta chain variable domain of TCR clone 333196 (TRBV20-1, TRBJ1-4)
CSAPGQDLLTNEKLFF

SEQ ID NO: 666393 - protein, 15 aa, Homo sapiens
  CDR3 for alpha chain variable domain of TCR clone 333197 (TRAV26-1, TRAJ44)
CIVRANTGTASKLTF

SEQ ID NO: 666394 - protein, 14 aa, Homo sapiens
  CDR3 for beta chain variable domain of TCR clone 333197 (TRBV5-1, TRBJ2-2)
CASSLGGGSGELFF

SEQ ID NO: 666395 - protein, 13 aa, Homo sapiens
  CDR3 for alpha chain variable domain of TCR clone 333198 (TRAV8-3, TRAJ44)
CAVVPGTASKLTF

SEQ ID NO: 666396 - protein, 16 aa, Homo sapiens
  CDR3 for beta chain variable domain of TCR clone 333198 (TRBV5-1, TRBJ2-5)
CASSFQGLADQETQYF

SEQ ID NO: 666397 - protein, 14 aa, Homo sapiens
  CDR3 for alpha chain variable domain of TCR clone 333199 (TRAV17, TRAJ12)
CATDEKDSSYKLIF

SEQ ID NO: 666398 - protein, 14 aa, Homo sapiens
  CDR3 for beta chain variable domain of TCR clone 333199 (TRBV20-1, TRBJ2-4)
CSARDRGQGGIQYF

SEQ ID NO: 666399 - protein, 17 aa, Homo sapiens
  CDR3 for alpha chain variable domain of TCR clone 333200 (TRAV17, TRAJ52)
CATVPIGGGTSYGKLTF

SEQ ID NO: 666400 - protein, 16 aa, Homo sapiens
  CDR3 for beta chain variable domain of TCR clone 333200 (TRBV2, TRBJ2-3)
CASSTSVEGVTDTQYF

SEQ ID NO: 666401 - protein, 16 aa, Homo sapiens
  CDR3 for alpha chain variable domain of TCR clone 333201 (TRAV30, TRAJ24)
CGTEIVDADSWGKFQF

SEQ ID NO: 666402 - protein, 17 aa, Homo sapiens
  CDR3 for beta chain variable domain of TCR clone 333201 (TRBV20-1, TRBJ2-1)
CSASSSGLAGAYNEQFF

SEQ ID NO: 666403 - protein, 18 aa, Homo sapiens
  CDR3 for alpha chain variable domain of TCR clone 333202 (TRAV12-3, TRAJ52)
CAMSVGGAGGTSYGKLTF

SEQ ID NO: 666404 - protein, 12 aa, Homo sapiens
  CDR3 for beta chain variable domain of TCR clone 333202 (TRBV7-8, TRBJ2-4)
CASSLGGNIQYF

SEQ ID NO: 666405 - protein, 14 aa, Homo sapiens
  CDR3 for alpha chain variable domain of TCR clone 333203 (TRAV35, TRAJ33)
CAGSSQDSNYELIW

SEQ ID NO: 666406 - protein, 15 aa, Homo sapiens
  CDR3 for beta chain variable domain of TCR clone 333203 (TRBV20-1, TRBJ2-7)
CSAESGTSGAYEQYF

SEQ ID NO: 666407 - protein, 12 aa, Homo sapiens
  CDR3 for alpha chain variable domain of TCR clone 333204 (TRAV12-3, TRAJ20)
CAMVRGNYKLSF

SEQ ID NO: 666408 - protein, 13 aa, Homo sapiens
  CDR3 for beta chain variable domain of TCR clone 333204 (TRBV23-1, TRBJ1-4)
CASRGKFNEKLFF

SEQ ID NO: 666409 - protein, 15 aa, Homo sapiens
  CDR3 for alpha chain variable domain of TCR clone 333205 (TRAV17, TRAJ22)
CATVAPSGSARQLTF

SEQ ID NO: 666410 - protein, 16 aa, Homo sapiens
  CDR3 for beta chain variable domain of TCR clone 333205 (TRBV10-3, TRBJ2-7)
CAIGADFADRPYEQYF

SEQ ID NO: 666411 - protein, 15 aa, Homo sapiens
  CDR3 for alpha chain variable domain of TCR clone 333206 (TRAV27, TRAJ38)
RAARRNAGNNRQLIW

SEQ ID NO: 666412 - protein, 13 aa, Homo sapiens
  CDR3 for beta chain variable domain of TCR clone 333206 (TRBV12-5, TRBJ2-3)
CASGDRQSDTQYF

SEQ ID NO: 666413 - protein, 14 aa, Homo sapiens
  CDR3 for alpha chain variable domain of TCR clone 333207 (TRAV1-2, TRAJ16)
CAVNRFSDGQTLLF

SEQ ID NO: 666414 - protein, 16 aa, Homo sapiens
  CDR3 for beta chain variable domain of TCR clone 333207 (TRBV29-1, TRBJ2-7)
CSVEVVGTSGSYEQYF

SEQ ID NO: 666415 - protein, 13 aa, Homo sapiens
  CDR3 for alpha chain variable domain of TCR clone 333208 (TRAV21, TRAJ57)
CAVTQGGSEKLVF

SEQ ID NO: 666416 - protein, 14 aa, Homo sapiens
  CDR3 for beta chain variable domain of TCR clone 333208 (TRBV5-1, TRBJ2-1)
CASSACGRVMSSSS

SEQ ID NO: 666417 - protein, 13 aa, Homo sapiens
  CDR3 for alpha chain variable domain of TCR clone 333209 (TRAV3, TRAJ20)
CAVRSLNDYKLSF

SEQ ID NO: 666418 - protein, 11 aa, Homo sapiens
  CDR3 for beta chain variable domain of TCR clone 333209 (TRBV7-8, TRBJ2-7)
CARSLSLEQYF

SEQ ID NO: 666419 - protein, 14 aa, Homo sapiens
  CDR3 for alpha chain variable domain of TCR clone 333210 (TRAV9-2, TRAJ39)
CALYIYNAGNMLTF

SEQ ID NO: 666420 - protein, 12 aa, Homo sapiens
  CDR3 for beta chain variable domain of TCR clone 333210 (TRBV6-3, TRBJ2-3)
CASSYSTDTQYF

SEQ ID NO: 666421 - protein, 13 aa, Homo sapiens
  CDR3 for alpha chain variable domain of TCR clone 333211 (TRAV35, TRAJ48)
CAGHEFGNEELTF

SEQ ID NO: 666422 - protein, 14 aa, Homo sapiens
  CDR3 for beta chain variable domain of TCR clone 333211 (TRBV19, TRBJ2-1)
CASPTFVLSGEQFF

SEQ ID NO: 666423 - protein, 15 aa, Homo sapiens
  CDR3 for alpha chain variable domain of TCR clone 333212 (TRAV3, TRAJ17)
CAVRDTGAAGNKLTF

SEQ ID NO: 666424 - protein, 14 aa, Homo sapiens
  CDR3 for beta chain variable domain of TCR clone 333212 (TRBV6-3, TRBJ1-1)
CAGSNLLPGAEAFF

SEQ ID NO: 666425 - protein, 12 aa, Homo sapiens
  CDR3 for alpha chain variable domain of TCR clone 333213 (TRAV29/DV5, TRAJ41)
CAAISSGYALNF

SEQ ID NO: 666426 - protein, 18 aa, Homo sapiens
  CDR3 for beta chain variable domain of TCR clone 333213 (TRBV15, TRBJ2-3)
CATSRDGARSWDTDTQYF

SEQ ID NO: 666427 - protein, 11 aa, Homo sapiens
  CDR3 for alpha chain variable domain of TCR clone 333214 (TRAV2, TRAJ13)
CASGGYQKVTF

SEQ ID NO: 666428 - protein, 16 aa, Homo sapiens
  CDR3 for beta chain variable domain of TCR clone 333214 (TRBV6-1, TRBJ2-5)
CASSETLDRGAETQYI

SEQ ID NO: 666429 - protein, 13 aa, Homo sapiens
  CDR3 for alpha chain variable domain of TCR clone 333215 (TRAV12-1, TRAJ6)
CVVYTGGSYIPTF

SEQ ID NO: 666430 - protein, 13 aa, Homo sapiens
  CDR3 for beta chain variable domain of TCR clone 333215 (TRBV4-2, TRBJ1-1)
CASSQAGNTEAFF

SEQ ID NO: 666431 - protein, 14 aa, Homo sapiens
  CDR3 for alpha chain variable domain of TCR clone 333216 (TRAV1-2, TRAJ16)
CAVNRFSDGPKLLF

SEQ ID NO: 666432 - protein, 14 aa, Homo sapiens
  CDR3 for beta chain variable domain of TCR clone 333216 (TRBV7-9, TRBJ2-3)
CASSLEHGTDTHYF

SEQ ID NO: 666433 - protein, 14 aa, Homo sapiens
  CDR3 for alpha chain variable domain of TCR clone 333217 (TRAV8-6, TRAJ13)
CAVFSSGGYQKVTF

SEQ ID NO: 666434 - protein, 13 aa, Homo sapiens
  CDR3 for beta chain variable domain of TCR clone 333217 (TRBV20-1, TRBJ1-1)
CSAPLGGGTEAFF

SEQ ID NO: 666435 - protein, 13 aa, Homo sapiens
  CDR3 for alpha chain variable domain of TCR clone 333218 (TRAV13-1, TRAJ6)
CAASRGGSYIPTF

SEQ ID NO: 666436 - protein, 13 aa, Homo sapiens
  CDR3 for beta chain variable domain of TCR clone 333218 (TRBV12-4, TRBJ2-3)
CASSSPLGGTQYF

SEQ ID NO: 666437 - protein, 15 aa, Homo sapiens
  CDR3 for alpha chain variable domain of TCR clone 333219 (TRAV3, TRAJ3)
CCERPRYSSASKIIF

SEQ ID NO: 666438 - protein, 16 aa, Homo sapiens
  CDR3 for beta chain variable domain of TCR clone 333219 (TRBV19, TRBJ1-5)
CASSIDRGCPRQPQHF

SEQ ID NO: 666439 - protein, 13 aa, Homo sapiens
  CDR3 for alpha chain variable domain of TCR clone 333220 (TRAV12-1, TRAJ6)
CVVYPGESYIPTF

SEQ ID NO: 666440 - protein, 12 aa, Homo sapiens
  CDR3 for beta chain variable domain of TCR clone 333220 (TRBV7-8, TRBJ2-7)
CASSLGDREQYF

SEQ ID NO: 666441 - protein, 18 aa, Homo sapiens
  CDR3 for alpha chain variable domain of TCR clone 333221 (TRAV21, TRAJ52)
CAVRPSPAGGTSYGKLTF

SEQ ID NO: 666442 - protein, 17 aa, Homo sapiens
  CDR3 for beta chain variable domain of TCR clone 333221 (TRBV13, TRBJ2-3)
CASSVSRVAGGKNTQYF

SEQ ID NO: 666443 - protein, 22 aa, Homo sapiens
  CDR3 for alpha chain variable domain of TCR clone 333222 (TRAV3, TRAJ38)
CAVRDCLNAGNNHIQNPDPAVY

SEQ ID NO: 666444 - protein, 14 aa, Homo sapiens
  CDR3 for beta chain variable domain of TCR clone 333222 (TRBV4-2, TRBJ1-5)
CASSQDSINQPQHF

SEQ ID NO: 666445 - protein, 13 aa, Homo sapiens
  CDR3 for alpha chain variable domain of TCR clone 333223 (TRAV3, TRAJ21)
CALREPDFNKFYF

SEQ ID NO: 666446 - protein, 15 aa, Homo sapiens
  CDR3 for beta chain variable domain of TCR clone 333223 (TRBV3-1, TRBJ2-7)
CASSQAPSGSYEQYF

SEQ ID NO: 666447 - protein, 14 aa, Homo sapiens
  CDR3 for alpha chain variable domain of TCR clone 333224 (TRAV1-2, TRAJ8)
CAVREDTGFQKLVF

SEQ ID NO: 666448 - protein, 15 aa, Homo sapiens
  CDR3 for beta chain variable domain of TCR clone 333224 (TRBV9, TRBJ1-6)
CSSSVAGTGDSPLHF

SEQ ID NO: 666449 - protein, 11 aa, Homo sapiens
  CDR3 for alpha chain variable domain of TCR clone 333225 (TRAV21, TRAJ11)
CAVNGCRTLTF

SEQ ID NO: 666450 - protein, 11 aa, Homo sapiens
  CDR3 for beta chain variable domain of TCR clone 333225 (TRBV19, TRBJ1-1)
CASSIGSEAFF

SEQ ID NO: 666451 - protein, 12 aa, Homo sapiens
  CDR3 for alpha chain variable domain of TCR clone 333226 (TRAV27, TRAJ36)
ASTPAGANNLFF

SEQ ID NO: 666452 - protein, 13 aa, Homo sapiens
  CDR3 for beta chain variable domain of TCR clone 333226 (TRBV7-9, TRBJ2-3)
CASSPGYTDTQYF

SEQ ID NO: 666453 - protein, 14 aa, Homo sapiens
  CDR3 for alpha chain variable domain of TCR clone 333227 (TRAV3, TRAJ48)
WAVRLSFGNEKLTF

SEQ ID NO: 666454 - protein, 13 aa, Homo sapiens
  CDR3 for beta chain variable domain of TCR clone 333227 (TRBV10-3, TRBJ2-7)
CASQLAVNYEQYF

SEQ ID NO: 666455 - protein, 17 aa, Homo sapiens
  CDR3 for alpha chain variable domain of TCR clone 333228 (TRAV26-2, TRAJ32)
ERCCCLGYGGATNKLIF

SEQ ID NO: 666456 - protein, 14 aa, Homo sapiens
  CDR3 for beta chain variable domain of TCR clone 333228 (TRBV7-6, TRBJ2-3)
CASSLGTVTDTQYF

SEQ ID NO: 666457 - protein, 12 aa, Homo sapiens
  CDR3 for alpha chain variable domain of TCR clone 333229 (TRAV21, TRAJ29)
CAVTSGNTPLVF

SEQ ID NO: 666458 - protein, 15 aa, Homo sapiens
  CDR3 for beta chain variable domain of TCR clone 333229 (TRBV12-4, TRBJ1-2)
CASSLGVAGNYGYTF

SEQ ID NO: 666459 - protein, 14 aa, Homo sapiens
  CDR3 for alpha chain variable domain of TCR clone 333230 (TRAV12-2, TRAJ13)
CAVKKTGGYQKVTF

SEQ ID NO: 666460 - protein, 16 aa, Homo sapiens
  CDR3 for beta chain variable domain of TCR clone 333230 (TRBV27, TRBJ2-1)
CASSNGGGGPPMSSSS

SEQ ID NO: 666461 - protein, 11 aa, Homo sapiens
  CDR3 for alpha chain variable domain of TCR clone 333231 (TRAV27, TRAJ47)
CAGASGNKLVF

SEQ ID NO: 666462 - protein, 20 aa, Homo sapiens
  CDR3 for beta chain variable domain of TCR clone 333231 (TRBV7-8, TRBJ2-1)
CASSLAHRLAGVRSYNEQFF

SEQ ID NO: 666463 - protein, 17 aa, Homo sapiens
  CDR3 for alpha chain variable domain of TCR clone 333232 (TRAV8-6, TRAJ58)
CAVSSWVGETSGSGFTF

SEQ ID NO: 666464 - protein, 14 aa, Homo sapiens
  CDR3 for beta chain variable domain of TCR clone 333232 (TRBV4-2, TRBJ2-1)
CASGLDRAYNEQFF

SEQ ID NO: 666465 - protein, 12 aa, Homo sapiens
  CDR3 for alpha chain variable domain of TCR clone 333233 (TRAV13-2, TRAJ8)
CAPWLGFQKLVF

SEQ ID NO: 666466 - protein, 13 aa, Homo sapiens
  CDR3 for beta chain variable domain of TCR clone 333233 (TRBV2, TRBJ1-1)
CARNPTGGFHAFF

SEQ ID NO: 666467 - protein, 15 aa, Homo sapiens
  CDR3 for alpha chain variable domain of TCR clone 333234 (TRAV26-1, TRAJ29)
CIVRVEGSGNTPLVF

SEQ ID NO: 666468 - protein, 14 aa, Homo sapiens
  CDR3 for beta chain variable domain of TCR clone 333234 (TRBV18, TRBJ2-5)
CASSRGVSKETQYF

SEQ ID NO: 666469 - protein, 14 aa, Homo sapiens
  CDR3 for alpha chain variable domain of TCR clone 333235 (TRAV1-1, TRAJ27)
CAVIYKTNAGKSTF

SEQ ID NO: 666470 - protein, 14 aa, Homo sapiens
  CDR3 for beta chain variable domain of TCR clone 333235 (TRBV6-5, TRBJ1-2)
CASSYDGTGGGYTF

SEQ ID NO: 666471 - protein, 17 aa, Homo sapiens
  CDR3 for alpha chain variable domain of TCR clone 333236 (TRAV12-1, TRAJ32)
CVVNMQGYGGATNKLIF

SEQ ID NO: 666472 - protein, 13 aa, Homo sapiens
  CDR3 for beta chain variable domain of TCR clone 333236 (TRBV19, TRBJ2-2)
CASSQRSTGELFF

SEQ ID NO: 666473 - protein, 15 aa, Homo sapiens
  CDR3 for alpha chain variable domain of TCR clone 333237 (TRAV2, TRAJ9)
CAVEDRGTGGFKTIF

SEQ ID NO: 666474 - protein, 14 aa, Homo sapiens
  CDR3 for beta chain variable domain of TCR clone 333237 (TRBV4-2, TRBJ1-2)
CASSPGGSNYGYTL

SEQ ID NO: 666475 - protein, 14 aa, Homo sapiens
  CDR3 for alpha chain variable domain of TCR clone 333238 (TRAV12-2, TRAJ17)
CAVLFKAAGNRLTF

SEQ ID NO: 666476 - protein, 14 aa, Homo sapiens
  CDR3 for beta chain variable domain of TCR clone 333238 (TRBV12-5, TRBJ2-5)
CASGSRTHQETQYF

SEQ ID NO: 666477 - protein, 13 aa, Homo sapiens
  CDR3 for alpha chain variable domain of TCR clone 333239 (TRAV21, TRAJ11)
CAVPNSGYSPLTF

SEQ ID NO: 666478 - protein, 15 aa, Homo sapiens
  CDR3 for beta chain variable domain of TCR clone 333239 (TRBV20-1, TRBJ1-1)
CSARSAATSNTEAFF

SEQ ID NO: 666479 - protein, 15 aa, Homo sapiens
  CDR3 for alpha chain variable domain of TCR clone 333240 (TRAV2, TRAJ15)
CAVEDRNQAGTALIF

SEQ ID NO: 666480 - protein, 13 aa, Homo sapiens
  CDR3 for beta chain variable domain of TCR clone 333240 (TRBV10-2, TRBJ2-1)
CASGASGDGKQFF

SEQ ID NO: 666481 - protein, 17 aa, Homo sapiens
  CDR3 for alpha chain variable domain of TCR clone 333241 (TRAV4, TRAJ13)
CIVGVQGSSGGYKKVTF

SEQ ID NO: 666482 - protein, 18 aa, Homo sapiens
  CDR3 for beta chain variable domain of TCR clone 333241 (TRBV15, TRBJ2-3)
CATSRDGARSWDTDTQYF

SEQ ID NO: 666483 - protein, 15 aa, Homo sapiens
  CDR3 for alpha chain variable domain of TCR clone 333242 (TRAV23/DV6, TRAJ18)
CAARYRGSTLGRLYF

SEQ ID NO: 666484 - protein, 14 aa, Homo sapiens
  CDR3 for beta chain variable domain of TCR clone 333242 (TRBV7-9, TRBJ2-1)
CASSLASGSNEQFL

SEQ ID NO: 666485 - protein, 14 aa, Homo sapiens
  CDR3 for alpha chain variable domain of TCR clone 333243 (TRAV23/DV6, TRAJ58)
CAGMRETSGSGLTF

SEQ ID NO: 666486 - protein, 13 aa, Homo sapiens
  CDR3 for beta chain variable domain of TCR clone 333243 (TRBV28, TRBJ2-7)
CASRSSGVYEQYF

SEQ ID NO: 666487 - protein, 16 aa, Homo sapiens
  CDR3 for alpha chain variable domain of TCR clone 333244 (TRAV8-3, TRAJ13)
CAVGAYPSGGYQTVTF

SEQ ID NO: 666488 - protein, 11 aa, Homo sapiens
  CDR3 for beta chain variable domain of TCR clone 333244 (TRBV20-1, TRBJ2-7)
CSARTSYEQYF

SEQ ID NO: 666489 - protein, 16 aa, Homo sapiens
  CDR3 for alpha chain variable domain of TCR clone 333245 (TRAV30, TRAJ24)
RGTEIVDADSWGKFQF

SEQ ID NO: 666490 - protein, 14 aa, Homo sapiens
  CDR3 for beta chain variable domain of TCR clone 333245 (TRBV12-5, TRBJ2-5)
CTSGSRTHQETQYF

SEQ ID NO: 666491 - protein, 13 aa, Homo sapiens
  CDR3 for alpha chain variable domain of TCR clone 333246 (TRAV13-1, TRAJ23)
CAASTILGGKLIL

SEQ ID NO: 666492 - protein, 14 aa, Homo sapiens
  CDR3 for beta chain variable domain of TCR clone 333246 (TRBV19, TRBJ2-7)
CATSGLAGVYEQYF

SEQ ID NO: 666493 - protein, 14 aa, Homo sapiens
  CDR3 for alpha chain variable domain of TCR clone 333247 (TRAV4, TRAJ17)
CLVGDMAEGNKLTF

SEQ ID NO: 666494 - protein, 14 aa, Homo sapiens
  CDR3 for beta chain variable domain of TCR clone 333247 (TRBV7-6, TRBJ2-3)
CASSLGTVTDTQYF

SEQ ID NO: 666495 - protein, 14 aa, Homo sapiens
  CDR3 for alpha chain variable domain of TCR clone 333248 (TRAV14/DV4, TRAJ54)
FAMREAPGAQKLVF

SEQ ID NO: 666496 - protein, 13 aa, Homo sapiens
  CDR3 for beta chain variable domain of TCR clone 333248 (TRBV24-1, TRBJ2-1)
CATSAGPYNEQFF

SEQ ID NO: 666497 - protein, 16 aa, Homo sapiens
  CDR3 for alpha chain variable domain of TCR clone 333249 (TRAV8-6, TRAJ4)
CAVTKILSGGYNKLIF

SEQ ID NO: 666498 - protein, 17 aa, Homo sapiens
  CDR3 for beta chain variable domain of TCR clone 333249 (TRBV20-1, TRBJ2-1)
CSASSSVLAGSYNEQFF

SEQ ID NO: 666499 - protein, 17 aa, Homo sapiens
  CDR3 for alpha chain variable domain of TCR clone 333250 (TRAV3, TRAJ6)
CAVRDGPRAGGSYIPTF

SEQ ID NO: 666500 - protein, 15 aa, Homo sapiens
  CDR3 for beta chain variable domain of TCR clone 333250 (TRBV29-1, TRBJ2-6)
CSVGDRGSGANVLTF

SEQ ID NO: 666501 - protein, 10 aa, Homo sapiens
  CDR3 for alpha chain variable domain of TCR clone 333251 (TRAV36/DV7, TRAJ49)
CALTGNQFYF

SEQ ID NO: 666502 - protein, 15 aa, Homo sapiens
  CDR3 for beta chain variable domain of TCR clone 333251 (TRBV9, TRBJ1-6)
CASSVAGTGDSPLHF

SEQ ID NO: 666503 - protein, 11 aa, Homo sapiens
  CDR3 for alpha chain variable domain of TCR clone 333252 (TRAV3, TRAJ21)
CAVGNFNKFYF

SEQ ID NO: 666504 - protein, 16 aa, Homo sapiens
  CDR3 for beta chain variable domain of TCR clone 333252 (TRBV19, TRBJ2-1)
CASSKAGLSSYNEQFF

SEQ ID NO: 666505 - protein, 16 aa, Homo sapiens
  CDR3 for alpha chain variable domain of TCR clone 333253 (TRAV14/DV4, TRAJ12)
CAMREVLMDSSYKLIF

SEQ ID NO: 666506 - protein, 14 aa, Homo sapiens
  CDR3 for beta chain variable domain of TCR clone 333253 (TRBV25-1, TRBJ1-1)
CASTHLGGNTEAFF

SEQ ID NO: 666507 - protein, 13 aa, Homo sapiens
  CDR3 for alpha chain variable domain of TCR clone 333254 (TRAV21, TRAJ57)
CAVNQGGSETLVF

SEQ ID NO: 666508 - protein, 16 aa, Homo sapiens
  CDR3 for beta chain variable domain of TCR clone 333254 (TRBV29-1, TRBJ2-7)
CSVEDAEDGTAYEQYF

SEQ ID NO: 666509 - protein, 19 aa, Homo sapiens
  CDR3 for alpha chain variable domain of TCR clone 333255 (TRAV26-1, TRAJ28)
CIVRVAHAYSGAGSYQPTF

SEQ ID NO: 666510 - protein, 17 aa, Homo sapiens
  CDR3 for beta chain variable domain of TCR clone 333255 (TRBV9, TRBJ2-2)
CASSVGGQGTDTGELFF

SEQ ID NO: 666511 - protein, 14 aa, Homo sapiens
  CDR3 for alpha chain variable domain of TCR clone 333256 (TRAV29/DV5, TRAJ36)
CAARRKTGANNLFF

SEQ ID NO: 666512 - protein, 16 aa, Homo sapiens
  CDR3 for beta chain variable domain of TCR clone 333256 (TRBV7-2, TRBJ2-1)
CASSLVGGPELNEQFF

SEQ ID NO: 666513 - protein, 16 aa, Homo sapiens
  CDR3 for alpha chain variable domain of TCR clone 333257 (TRAV30, TRAJ24)
CGTEIVDADSWGNFQF

SEQ ID NO: 666514 - protein, 16 aa, Homo sapiens
  CDR3 for beta chain variable domain of TCR clone 333257 (TRBV6-1, TRBJ2-1)
CASILRQGSSYNEQFF

SEQ ID NO: 666515 - protein, 13 aa, Homo sapiens
  CDR3 for alpha chain variable domain of TCR clone 333258 (TRAV2, TRAJ36)
CAVDQTGANNLFF

SEQ ID NO: 666516 - protein, 13 aa, Homo sapiens
  CDR3 for beta chain variable domain of TCR clone 333258 (TRBV20-1, TRBJ1-1)
CSARGGGNTEAFF

SEQ ID NO: 666517 - protein, 12 aa, Homo sapiens
  CDR3 for alpha chain variable domain of TCR clone 333259 (TRAV12-3, TRAJ17)
CAMTLKGNKLTF

SEQ ID NO: 666518 - protein, 15 aa, Homo sapiens
  CDR3 for beta chain variable domain of TCR clone 333259 (TRBV20-1, TRBJ2-7)
CSARDWVSGMDEQYF

SEQ ID NO: 666519 - protein, 15 aa, Homo sapiens
  CDR3 for alpha chain variable domain of TCR clone 333260 (TRAV20, TRAJ53)
CAVQARGGSNYKLKF

SEQ ID NO: 666520 - protein, 12 aa, Homo sapiens
  CDR3 for beta chain variable domain of TCR clone 333260 (TRBV7-6, TRBJ2-5)
CASSLSQETQYF

SEQ ID NO: 666521 - protein, 13 aa, Homo sapiens
  CDR3 for alpha chain variable domain of TCR clone 333261 (TRAV12-2, TRAJ47)
CAVFMEFGNKLVF

SEQ ID NO: 666522 - protein, 14 aa, Homo sapiens
  CDR3 for beta chain variable domain of TCR clone 333261 (TRBV4-1, TRBJ1-5)
CASSQGPTNQPQHF

SEQ ID NO: 666523 - protein, 14 aa, Homo sapiens
  CDR3 for alpha chain variable domain of TCR clone 333262 (TRAV2, TRAJ9)
CAVEDRSGGFKTIF

SEQ ID NO: 666524 - protein, 14 aa, Homo sapiens
  CDR3 for beta chain variable domain of TCR clone 333262 (TRBV13, TRBJ2-7)
CASSLKGASYEQYF

SEQ ID NO: 666525 - protein, 12 aa, Homo sapiens
  CDR3 for alpha chain variable domain of TCR clone 333263 (TRAV17, TRAJ39)
CATGAAGNMLTF

SEQ ID NO: 666526 - protein, 15 aa, Homo sapiens
  CDR3 for beta chain variable domain of TCR clone 333263 (TRBV28, TRBJ2-5)
CASSPPWSYQETQYF

SEQ ID NO: 666527 - protein, 18 aa, Homo sapiens
  CDR3 for alpha chain variable domain of TCR clone 333264 (TRAV26-2, TRAJ45)
CILRDRVDQEEGLTDSPF

SEQ ID NO: 666528 - protein, 15 aa, Homo sapiens
  CDR3 for beta chain variable domain of TCR clone 333264 (TRBV7-6, TRBJ2-5)
CASSKPTGPQETQYF

SEQ ID NO: 666529 - protein, 11 aa, Homo sapiens
  CDR3 for alpha chain variable domain of TCR clone 333265 (TRAV12-3, TRAJ43)
CAMSVSNDMRF

SEQ ID NO: 666530 - protein, 12 aa, Homo sapiens
  CDR3 for beta chain variable domain of TCR clone 333265 (TRBV20-1, TRBJ1-1)
QCPTWGGTEAFF

SEQ ID NO: 666531 - protein, 14 aa, Homo sapiens
  CDR3 for alpha chain variable domain of TCR clone 333266 (TRAV13-1, TRAJ26)
CAAPKGPDSQNFVF

SEQ ID NO: 666532 - protein, 15 aa, Homo sapiens
  CDR3 for beta chain variable domain of TCR clone 333266 (TRBV28, TRBJ2-5)
CASSFRQGALETQYF

SEQ ID NO: 666533 - protein, 14 aa, Homo sapiens
  CDR3 for alpha chain variable domain of TCR clone 333267 (TRAV3, TRAJ27)
CAVRDDTNAGKSTF

SEQ ID NO: 666534 - protein, 14 aa, Homo sapiens
  CDR3 for beta chain variable domain of TCR clone 333267 (TRBV12-4, TRBJ2-3)
CASSGQGSTDTQYF

SEQ ID NO: 666535 - protein, 11 aa, Homo sapiens
  CDR3 for alpha chain variable domain of TCR clone 333268 (TRAV13-1, TRAJ20)
CSPHGLYKLSF

SEQ ID NO: 666536 - protein, 19 aa, Homo sapiens
  CDR3 for beta chain variable domain of TCR clone 333268 (TRBV28, TRBJ2-5)
CASTGAGGRRDPVLRARHA

SEQ ID NO: 666537 - protein, 18 aa, Homo sapiens
  CDR3 for alpha chain variable domain of TCR clone 333269 (TRAV12-3, TRAJ28)
CAMSARGYSGAGSHQLTF

SEQ ID NO: 666538 - protein, 20 aa, Homo sapiens
  CDR3 for beta chain variable domain of TCR clone 333269 (TRBV11-1, TRBJ2-6)
CASSAEFQPGMSSGANVLTF

SEQ ID NO: 666539 - protein, 15 aa, Homo sapiens
  CDR3 for alpha chain variable domain of TCR clone 333270 (TRAV25, TRAJ53)
CAATGGGGSNYKLTF

SEQ ID NO: 666540 - protein, 12 aa, Homo sapiens
  CDR3 for beta chain variable domain of TCR clone 333270 (TRBV7-2, TRBJ2-3)
RNWGGGTDTQYF

SEQ ID NO: 666541 - protein, 15 aa, Homo sapiens
  CDR3 for alpha chain variable domain of TCR clone 333271 (TRAV2, TRAJ24)
CAVVRLKNSWGKLQF

SEQ ID NO: 666542 - protein, 15 aa, Homo sapiens
  CDR3 for beta chain variable domain of TCR clone 333271 (TRBV13, TRBJ1-6)
CASSSPGRGNSPLHF

SEQ ID NO: 666543 - protein, 13 aa, Homo sapiens
  CDR3 for alpha chain variable domain of TCR clone 333272 (TRAV12-1, TRAJ26)
CVVRRNYGQNFVF

SEQ ID NO: 666544 - protein, 11 aa, Homo sapiens
  CDR3 for beta chain variable domain of TCR clone 333272 (TRBV11-2, TRBJ2-1)
CASSLINEQFF

SEQ ID NO: 666545 - protein, 14 aa, Homo sapiens
  CDR3 for alpha chain variable domain of TCR clone 333273 (TRAV13-2, TRAJ57)
CAESTQGGSEKLFF

SEQ ID NO: 666546 - protein, 14 aa, Homo sapiens
  CDR3 for beta chain variable domain of TCR clone 333273 (TRBV10-3, TRBJ2-2)
CAISEVSHSGELFF

SEQ ID NO: 666547 - protein, 16 aa, Homo sapiens
  CDR3 for alpha chain variable domain of TCR clone 333274 (TRAV12-3, TRAJ53)
CATSPGSGGSNYKLTF

SEQ ID NO: 666548 - protein, 13 aa, Homo sapiens
  CDR3 for beta chain variable domain of TCR clone 333274 (TRBV10-3, TRBJ2-7)
CASKLAVNYEQYF

SEQ ID NO: 666549 - protein, 15 aa, Homo sapiens
  CDR3 for alpha chain variable domain of TCR clone 333275 (TRAV17, TRAJ57)
CATGPSQGGTEKLVF

SEQ ID NO: 666550 - protein, 14 aa, Homo sapiens
  CDR3 for beta chain variable domain of TCR clone 333275 (TRBV12-5, TRBJ2-5)
CASGPRTHQETQYF

SEQ ID NO: 666551 - protein, 14 aa, Homo sapiens
  CDR3 for alpha chain variable domain of TCR clone 333276 (TRAV12-2, TRAJ40)
SAVKIPSGTYKYIF

SEQ ID NO: 666552 - protein, 14 aa, Homo sapiens
  CDR3 for beta chain variable domain of TCR clone 333276 (TRBV20-1, TRBJ1-1)
CSAQTRIGGTEAFF

SEQ ID NO: 666553 - protein, 13 aa, Homo sapiens
  CDR3 for alpha chain variable domain of TCR clone 333277 (TRAV1-2, TRAJ31)
CAVRPNNNARLMF

SEQ ID NO: 666554 - protein, 16 aa, Homo sapiens
  CDR3 for beta chain variable domain of TCR clone 333277 (TRBV7-3, TRBJ2-2)
CASSLKRGTLSGELFF

SEQ ID NO: 666555 - protein, 14 aa, Homo sapiens
  CDR3 for alpha chain variable domain of TCR clone 333278 (TRAV8-4, TRAJ17)
CAVSDRAAGNKLTF

SEQ ID NO: 666556 - protein, 15 aa, Homo sapiens
  CDR3 for beta chain variable domain of TCR clone 333278 (TRBV7-2, TRBJ1-2)
CASSLAPDRGLGYTF

SEQ ID NO: 666557 - protein, 14 aa, Homo sapiens
  CDR3 for alpha chain variable domain of TCR clone 333279 (TRAV3, TRAJ9)
CAVRLNTGGFKTIF

SEQ ID NO: 666558 - protein, 13 aa, Homo sapiens
  CDR3 for beta chain variable domain of TCR clone 333279 (TRBV12-5, TRBJ2-3)
CASGDRQSDTQYF

SEQ ID NO: 666559 - protein, 14 aa, Homo sapiens
  CDR3 for alpha chain variable domain of TCR clone 333280 (TRAV12-2, TRAJ40)
CAVKIPSGTYKYIF

SEQ ID NO: 666560 - protein, 13 aa, Homo sapiens
  CDR3 for beta chain variable domain of TCR clone 333280 (TRBV7-9, TRBJ1-2)
CASSFKQNYGYTF

SEQ ID NO: 666561 - protein, 15 aa, Homo sapiens
  CDR3 for alpha chain variable domain of TCR clone 333281 (TRAV14/DV4, TRAJ33)
CALREGRDSNYRLIW

SEQ ID NO: 666562 - protein, 15 aa, Homo sapiens
  CDR3 for beta chain variable domain of TCR clone 333281 (TRBV5-5, TRBJ1-5)
CASSSTPGSNQPQHF

SEQ ID NO: 666563 - protein, 13 aa, Homo sapiens
  CDR3 for alpha chain variable domain of TCR clone 333282 (TRAV20, TRAJ34)
CAVGTYNTDKLIF

SEQ ID NO: 666564 - protein, 17 aa, Homo sapiens
  CDR3 for beta chain variable domain of TCR clone 333282 (TRBV13, TRBJ2-3)
CASSLSRVAGGRNTQYF

SEQ ID NO: 666565 - protein, 15 aa, Homo sapiens
  CDR3 for alpha chain variable domain of TCR clone 333283 (TRAV17, TRAJ16)
CATALQFSDGQKLFF

SEQ ID NO: 666566 - protein, 14 aa, Homo sapiens
  CDR3 for beta chain variable domain of TCR clone 333283 (TRBV18, TRBJ2-5)
CASSPGVSQETQYF

SEQ ID NO: 666567 - protein, 16 aa, Homo sapiens
  CDR3 for alpha chain variable domain of TCR clone 333284 (TRAV12-2, TRAJ10)
CAVHRVLTGGGNKLTF

SEQ ID NO: 666568 - protein, 12 aa, Homo sapiens
  CDR3 for beta chain variable domain of TCR clone 333284 (TRBV28, TRBJ2-7)
CASSFSSYEQYF

SEQ ID NO: 666569 - protein, 18 aa, Homo sapiens
  CDR3 for alpha chain variable domain of TCR clone 333285 (TRAV21, TRAJ52)
CAVRPSPAGGTSYGKLTF

SEQ ID NO: 666570 - protein, 15 aa, Homo sapiens
  CDR3 for beta chain variable domain of TCR clone 333285 (TRBV3-1, TRBJ2-7)
CASSQEWTGSYEQYF

SEQ ID NO: 666571 - protein, 14 aa, Homo sapiens
  CDR3 for alpha chain variable domain of TCR clone 333286 (TRAV1-2, TRAJ8)
CAVREDTGFQKLVF

SEQ ID NO: 666572 - protein, 14 aa, Homo sapiens
  CDR3 for beta chain variable domain of TCR clone 333286 (TRBV7-6, TRBJ2-3)
CASSLGTGLDTQYF

SEQ ID NO: 666573 - protein, 13 aa, Homo sapiens
  CDR3 for alpha chain variable domain of TCR clone 333287 (TRAV27, TRAJ29)
CAGAHSGNTPLAF

SEQ ID NO: 666574 - protein, 18 aa, Homo sapiens
  CDR3 for beta chain variable domain of TCR clone 333287 (TRBV6-6, TRBJ1-3)
CASSYSRWDSISGNTIYF

SEQ ID NO: 666575 - protein, 16 aa, Homo sapiens
  CDR3 for alpha chain variable domain of TCR clone 333288 (TRAV12-3, TRAJ53)
CAMSPGSGGGNYKLTF

SEQ ID NO: 666576 - protein, 11 aa, Homo sapiens
  CDR3 for beta chain variable domain of TCR clone 333288 (TRBV29-1, TRBJ2-5)
CSEGRTGTQYF

SEQ ID NO: 666577 - protein, 23 aa, Homo sapiens
  CDR3 for alpha chain variable domain of TCR clone 333289 (TRAV1-1, TRAJ4)
LLQELQMKDSASYFCALYNKLIF

SEQ ID NO: 666578 - protein, 12 aa, Homo sapiens
  CDR3 for beta chain variable domain of TCR clone 333289 (TRBV11-2, TRBJ2-2)
CASSLGGGELFF

SEQ ID NO: 666579 - protein, 12 aa, Homo sapiens
  CDR3 for alpha chain variable domain of TCR clone 333290 (TRAV21, TRAJ49)
CAVNDGGNQFYF

SEQ ID NO: 666580 - protein, 15 aa, Homo sapiens
  CDR3 for beta chain variable domain of TCR clone 333290 (TRBV7-9, TRBJ1-6)
CASSSPGRGNSPLHF

SEQ ID NO: 666581 - protein, 15 aa, Homo sapiens
  CDR3 for alpha chain variable domain of TCR clone 333291 (TRAV17, TRAJ16)
CATALRFSNGQKLLF

SEQ ID NO: 666582 - protein, 15 aa, Homo sapiens
  CDR3 for beta chain variable domain of TCR clone 333291 (TRBV20-1, TRBJ1-1)
CSASRGVTGNTEAFF

SEQ ID NO: 666583 - protein, 13 aa, Homo sapiens
  CDR3 for alpha chain variable domain of TCR clone 333292 (TRAV27, TRAJ6)
CAGGTRGSYIPTF

SEQ ID NO: 666584 - protein, 14 aa, Homo sapiens
  CDR3 for beta chain variable domain of TCR clone 333292 (TRBV6-3, TRBJ1-1)
CASSHQRRDTEAFF

SEQ ID NO: 666585 - protein, 10 aa, Homo sapiens
  CDR3 for alpha chain variable domain of TCR clone 333293 (TRAV38-2/DV8, TRAJ40)
CASGTYKYIF

SEQ ID NO: 666586 - protein, 14 aa, Homo sapiens
  CDR3 for beta chain variable domain of TCR clone 333293 (TRBV25-1, TRBJ2-5)
CASSKTGGYNEQYF

SEQ ID NO: 666587 - protein, 12 aa, Homo sapiens
  CDR3 for alpha chain variable domain of TCR clone 333294 (TRAV23/DV6, TRAJ17)
CAAKAAGNKLTF

SEQ ID NO: 666588 - protein, 17 aa, Homo sapiens
  CDR3 for beta chain variable domain of TCR clone 333294 (TRBV7-8, TRBJ2-6)
CASSAGTGGAGANVLTF

SEQ ID NO: 666589 - protein, 15 aa, Homo sapiens
  CDR3 for alpha chain variable domain of TCR clone 333295 (TRAV17, TRAJ6)
CATYLPSGGSYIPTF

SEQ ID NO: 666590 - protein, 16 aa, Homo sapiens
  CDR3 for beta chain variable domain of TCR clone 333295 (TRBV4-1, TRBJ2-7)
CASSQDPTGYSYEQYF

SEQ ID NO: 666591 - protein, 11 aa, Homo sapiens
  CDR3 for alpha chain variable domain of TCR clone 333296 (TRAV12-1, TRAJ15)
CVVNAGTALIF

SEQ ID NO: 666592 - protein, 16 aa, Homo sapiens
  CDR3 for beta chain variable domain of TCR clone 333296 (TRBV28, TRBJ2-1)
CASSARVRDSYNEQFF

SEQ ID NO: 666593 - protein, 13 aa, Homo sapiens
  CDR3 for alpha chain variable domain of TCR clone 333297 (TRAV2, TRAJ40)
CAVVTSVTYKYIF

SEQ ID NO: 666594 - protein, 14 aa, Homo sapiens
  CDR3 for beta chain variable domain of TCR clone 333297 (TRBV19, TRBJ2-1)
CASPAFVLSGEQFF

SEQ ID NO: 666595 - protein, 14 aa, Homo sapiens
  CDR3 for alpha chain variable domain of TCR clone 333298 (TRAV13-2, TRAJ6)
CAERGSGGSYIPTF

SEQ ID NO: 666596 - protein, 12 aa, Homo sapiens
  CDR3 for beta chain variable domain of TCR clone 333298 (TRBV7-8, TRBJ2-7)
CASSLGDREQYF

SEQ ID NO: 666597 - protein, 13 aa, Homo sapiens
  CDR3 for alpha chain variable domain of TCR clone 333299 (TRAV1-1, TRAJ13)
CAVNSGGCQKVTF

SEQ ID NO: 666598 - protein, 12 aa, Homo sapiens
  CDR3 for beta chain variable domain of TCR clone 333299 (TRBV28, TRBJ2-1)
CASSVQINEQFF

SEQ ID NO: 666599 - protein, 15 aa, Homo sapiens
  CDR3 for alpha chain variable domain of TCR clone 333300 (TRAV25, TRAJ53)
CAATGGGGSNYKLTF

SEQ ID NO: 666600 - protein, 19 aa, Homo sapiens
  CDR3 for beta chain variable domain of TCR clone 333300 (TRBV7-2, TRBJ2-3)
CASSFLSRNWGGCTDTQYF

SEQ ID NO: 666601 - protein, 19 aa, Homo sapiens
  CDR3 for alpha chain variable domain of TCR clone 333301 (TRAV26-1, TRAJ52)
CIVRAHRNAGGTSYGKLTF

SEQ ID NO: 666602 - protein, 14 aa, Homo sapiens
  CDR3 for beta chain variable domain of TCR clone 333301 (TRBV7-8, TRBJ2-1)
CATERERSYNEQFF

SEQ ID NO: 666603 - protein, 18 aa, Homo sapiens
  CDR3 for alpha chain variable domain of TCR clone 333302 (TRAV12-2, )
CAVEDIQNPDPAVYQLRD

SEQ ID NO: 666604 - protein, 18 aa, Homo sapiens
  CDR3 for beta chain variable domain of TCR clone 333302 (TRBV11-2, TRBJ2-3)
CASSVGGASRGAPNTQYF

SEQ ID NO: 666605 - protein, 12 aa, Homo sapiens
  CDR3 for alpha chain variable domain of TCR clone 333303 (TRAV12-1, TRAJ40)
CVFYSGTYKYIF

SEQ ID NO: 666606 - protein, 14 aa, Homo sapiens
  CDR3 for beta chain variable domain of TCR clone 333303 (TRBV7-9, TRBJ1-2)
CASSFPLREYGYTF

SEQ ID NO: 666607 - protein, 17 aa, Homo sapiens
  CDR3 for alpha chain variable domain of TCR clone 333304 (TRAV3, TRAJ6)
CAVRDGPRSGGSYIPTS

SEQ ID NO: 666608 - protein, 14 aa, Homo sapiens
  CDR3 for beta chain variable domain of TCR clone 333304 (TRBV7-2, TRBJ2-7)
CASSPKTSFYEQYF

SEQ ID NO: 666609 - protein, 14 aa, Homo sapiens
  CDR3 for alpha chain variable domain of TCR clone 333305 (TRAV26-1, TRAJ38)
CIADNAGNNRKLLW

SEQ ID NO: 666610 - protein, 17 aa, Homo sapiens
  CDR3 for beta chain variable domain of TCR clone 333305 (TRBV20-1, TRBJ2-2)
CSASGSGQGGLTGELFF

SEQ ID NO: 666611 - protein, 17 aa, Homo sapiens
  CDR3 for alpha chain variable domain of TCR clone 333306 (TRAV4, TRAJ42)
CLVGVLNYGGSQGNLIF

SEQ ID NO: 666612 - protein, 12 aa, Homo sapiens
  CDR3 for beta chain variable domain of TCR clone 333306 (TRBV20-1, TRBJ2-1)
CSAQFTYNEQFF

SEQ ID NO: 666613 - protein, 13 aa, Homo sapiens
  CDR3 for alpha chain variable domain of TCR clone 333307 (TRAV2, TRAJ40)
CAVVTSGSYKYIF

SEQ ID NO: 666614 - protein, 16 aa, Homo sapiens
  CDR3 for beta chain variable domain of TCR clone 333307 (TRBV29-1, TRBJ1-2)
CSVEANRDIANYGYTF

SEQ ID NO: 666615 - protein, 15 aa, Homo sapiens
  CDR3 for alpha chain variable domain of TCR clone 333308 (TRAV12-1, TRAJ4)
CVVTPWMGGYNKLIF

SEQ ID NO: 666616 - protein, 12 aa, Homo sapiens
  CDR3 for beta chain variable domain of TCR clone 333308 (TRBV7-8, TRBJ2-7)
CASSLGDREQYF

SEQ ID NO: 666617 - protein, 15 aa, Homo sapiens
  CDR3 for alpha chain variable domain of TCR clone 333309 (TRAV29/DV5, TRAJ42)
CAAKTDGGSQGNLIF

SEQ ID NO: 666618 - protein, 15 aa, Homo sapiens
  CDR3 for beta chain variable domain of TCR clone 333309 (TRBV5-1, TRBJ2-2)
CASSSQGGNAGELFF

SEQ ID NO: 666619 - protein, 16 aa, Homo sapiens
  CDR3 for alpha chain variable domain of TCR clone 333310 (TRAV12-2, TRAJ32)
CAVNLGQGGATNKLIF

SEQ ID NO: 666620 - protein, 15 aa, Homo sapiens
  CDR3 for beta chain variable domain of TCR clone 333310 (TRBV20-1, TRBJ2-7)
CSARGPLAGGREQYS

SEQ ID NO: 666621 - protein, 15 aa, Homo sapiens
  CDR3 for alpha chain variable domain of TCR clone 333311 (TRAV17, TRAJ37)
CATDHGSSNTGKLIF

SEQ ID NO: 666622 - protein, 13 aa, Homo sapiens
  CDR3 for beta chain variable domain of TCR clone 333311 (TRBV27, TRBJ2-1)
CASRTLGVGEQFF

SEQ ID NO: 666623 - protein, 13 aa, Homo sapiens
  CDR3 for alpha chain variable domain of TCR clone 333312 (TRAV2, TRAJ15)
CAVASQAGTALIF

SEQ ID NO: 666624 - protein, 15 aa, Homo sapiens
  CDR3 for beta chain variable domain of TCR clone 333312 (TRBV7-2, TRBJ2-3)
CASSSTGLETDTQYF

SEQ ID NO: 666625 - protein, 13 aa, Homo sapiens
  CDR3 for alpha chain variable domain of TCR clone 333313 (TRAV3, TRAJ30)
CAVRDRGDEKIIL

SEQ ID NO: 666626 - protein, 16 aa, Homo sapiens
  CDR3 for beta chain variable domain of TCR clone 333313 (TRBV7-3, TRBJ2-2)
CASSLKRGTLSGELFF

SEQ ID NO: 666627 - protein, 17 aa, Homo sapiens
  CDR3 for alpha chain variable domain of TCR clone 333314 (TRAV13-1, TRAJ52)
CAASSGAGGTSYGKLTF

SEQ ID NO: 666628 - protein, 15 aa, Homo sapiens
  CDR3 for beta chain variable domain of TCR clone 333314 (TRBV2, TRBJ2-1)
CASSELAGGYNEQFL

SEQ ID NO: 666629 - protein, 13 aa, Homo sapiens
  CDR3 for alpha chain variable domain of TCR clone 333315 (TRAV3, TRAJ21)
CAVREPDFNKFYS

SEQ ID NO: 666630 - protein, 13 aa, Homo sapiens
  CDR3 for beta chain variable domain of TCR clone 333315 (TRBV9, TRBJ2-1)
CASSPSGGNKQFF

SEQ ID NO: 666631 - protein, 14 aa, Homo sapiens
  CDR3 for alpha chain variable domain of TCR clone 333316 (TRAV8-3, TRAJ39)
CAVGANNAGNMLTF

SEQ ID NO: 666632 - protein, 14 aa, Homo sapiens
  CDR3 for beta chain variable domain of TCR clone 333316 (TRBV7-9, TRBJ2-3)
CASSLEQGTNTQYF

SEQ ID NO: 666633 - protein, 13 aa, Homo sapiens
  CDR3 for alpha chain variable domain of TCR clone 333317 (TRAV13-2, TRAJ48)
CAEMDFGNEKLTF

SEQ ID NO: 666634 - protein, 16 aa, Homo sapiens
  CDR3 for beta chain variable domain of TCR clone 333317 (TRBV2, TRBJ1-1)
CASSPPNRGMNTEAFF

SEQ ID NO: 666635 - protein, 11 aa, Homo sapiens
  CDR3 for alpha chain variable domain of TCR clone 333318 (TRAV20, TRAJ23)
CACHQGGKLIF

SEQ ID NO: 666636 - protein, 16 aa, Homo sapiens
  CDR3 for beta chain variable domain of TCR clone 333318 (TRBV7-8, TRBJ2-5)
CASSFGGQPAQETQYF

SEQ ID NO: 666637 - protein, 11 aa, Homo sapiens
  CDR3 for alpha chain variable domain of TCR clone 333319 (TRAV3, TRAJ21)
CAVGNFNKFYF

SEQ ID NO: 666638 - protein, 16 aa, Homo sapiens
  CDR3 for beta chain variable domain of TCR clone 333319 (TRBV20-1, TRBJ2-3)
CSAVRDRGPIADTQYF

SEQ ID NO: 666639 - protein, 14 aa, Homo sapiens
  CDR3 for alpha chain variable domain of TCR clone 333320 (TRAV1-2, TRAJ8)
CAVREDTGFQKLVF

SEQ ID NO: 666640 - protein, 15 aa, Homo sapiens
  CDR3 for beta chain variable domain of TCR clone 333320 (TRBV4-1, TRBJ2-7)
CASSQNTGRLYKQYF

SEQ ID NO: 666641 - protein, 11 aa, Homo sapiens
  CDR3 for alpha chain variable domain of TCR clone 333321 (TRAV13-1, TRAJ9)
CAASECWRLQN

SEQ ID NO: 666642 - protein, 14 aa, Homo sapiens
  CDR3 for beta chain variable domain of TCR clone 333321 (TRBV5-1, TRBJ2-1)
CASSLDDRFDEQFF

SEQ ID NO: 666643 - protein, 14 aa, Homo sapiens
  CDR3 for alpha chain variable domain of TCR clone 333322 (TRAV2, TRAJ9)
CAVEYRSGGFKTIF

SEQ ID NO: 666644 - protein, 13 aa, Homo sapiens
  CDR3 for beta chain variable domain of TCR clone 333322 (TRBV19, TRBJ1-2)
CASSVPGQDGYTF

SEQ ID NO: 666645 - protein, 14 aa, Homo sapiens
  CDR3 for alpha chain variable domain of TCR clone 333323 (TRAV17, TRAJ42)
CATAGGGSQGNPIF

SEQ ID NO: 666646 - protein, 14 aa, Homo sapiens
  CDR3 for beta chain variable domain of TCR clone 333323 (TRBV7-2, TRBJ2-3)
CASRFSRPSDTQYF

SEQ ID NO: 666647 - protein, 17 aa, Homo sapiens
  CDR3 for alpha chain variable domain of TCR clone 333324 (TRAV38-1, TRAJ28)
CAFMKPTSGAGSYQLTF

SEQ ID NO: 666648 - protein, 15 aa, Homo sapiens
  CDR3 for beta chain variable domain of TCR clone 333324 (TRBV5-1, TRBJ2-1)
CASSPPRAPYNEQFF

SEQ ID NO: 666649 - protein, 12 aa, Homo sapiens
  CDR3 for alpha chain variable domain of TCR clone 333325 (TRAV2, TRAJ9)
CAVGAGGFKTIF

SEQ ID NO: 666650 - protein, 15 aa, Homo sapiens
  CDR3 for beta chain variable domain of TCR clone 333325 (TRBV7-2, TRBJ1-2)
CASSLVSGGDYGYTF

SEQ ID NO: 666651 - protein, 11 aa, Homo sapiens
  CDR3 for alpha chain variable domain of TCR clone 333326 (TRAV17, TRAJ31)
CATDRTARLMF

SEQ ID NO: 666652 - protein, 17 aa, Homo sapiens
  CDR3 for beta chain variable domain of TCR clone 333326 (TRBV11-2, TRBJ2-1)
CASSLYPPGVEYNEQFF

SEQ ID NO: 666653 - protein, 16 aa, Homo sapiens
  CDR3 for alpha chain variable domain of TCR clone 333327 (TRAV30, TRAJ24)
CGTEIVDADSWGKFQF

SEQ ID NO: 666654 - protein, 14 aa, Homo sapiens
  CDR3 for beta chain variable domain of TCR clone 333327 (TRBV12-5, TRBJ2-5)
CASGSRTHNETQYF

SEQ ID NO: 666655 - protein, 12 aa, Homo sapiens
  CDR3 for alpha chain variable domain of TCR clone 333328 (TRAV12-2, TRAJ31)
CAVNTPDARLMF

SEQ ID NO: 666656 - protein, 12 aa, Homo sapiens
  CDR3 for beta chain variable domain of TCR clone 333328 (TRBV20-1, TRBJ2-1)
CSARLGTDEQFF

SEQ ID NO: 666657 - protein, 11 aa, Homo sapiens
  CDR3 for alpha chain variable domain of TCR clone 333329 (TRAV13-2, TRAJ23)
CAESPRGKLIF

SEQ ID NO: 666658 - protein, 18 aa, Homo sapiens
  CDR3 for beta chain variable domain of TCR clone 333329 (TRBV4-1, TRBJ1-5)
CASSQDPRGQGLNQPQHF

SEQ ID NO: 666659 - protein, 12 aa, Homo sapiens
  CDR3 for alpha chain variable domain of TCR clone 333330 (TRAV8-4, TRAJ43)
WAVSVNNNDMRF

SEQ ID NO: 666660 - protein, 14 aa, Homo sapiens
  CDR3 for beta chain variable domain of TCR clone 333330 (TRBV11-2, TRBJ1-2)
CANSLGTANYGYTF

SEQ ID NO: 666661 - protein, 12 aa, Homo sapiens
  CDR3 for alpha chain variable domain of TCR clone 333331 (TRAV13-1, TRAJ22)
CAVSGSARQLTF

SEQ ID NO: 666662 - protein, 13 aa, Homo sapiens
  CDR3 for beta chain variable domain of TCR clone 333331 (TRBV7-9, TRBJ2-2)
CASSLDPTGELFF

SEQ ID NO: 666663 - protein, 16 aa, Homo sapiens
  CDR3 for alpha chain variable domain of TCR clone 333332 (TRAV3, TRAJ37)
CAVRVRGSGNKGKLIF

SEQ ID NO: 666664 - protein, 13 aa, Homo sapiens
  CDR3 for beta chain variable domain of TCR clone 333332 (TRBV14, TRBJ2-1)
CASSQDRRNEQFF

SEQ ID NO: 666665 - protein, 14 aa, Homo sapiens
  CDR3 for alpha chain variable domain of TCR clone 333333 (TRAV1-2, TRAJ16)
CAVNRFSDGQKLLF

SEQ ID NO: 666666 - protein, 13 aa, Homo sapiens
  CDR3 for beta chain variable domain of TCR clone 333333 (TRBV19, TRBJ2-5)
CASRDSRRETQYF

SEQ ID NO: 666667 - protein, 14 aa, Homo sapiens
  CDR3 for alpha chain variable domain of TCR clone 333334 (TRAV8-6, TRAJ38)
CAAYNAGNNRKLIW

SEQ ID NO: 666668 - protein, 11 aa, Homo sapiens
  CDR3 for beta chain variable domain of TCR clone 333334 (TRBV12-4, TRBJ2-3)
CASTATDTQYF

SEQ ID NO: 666669 - protein, 17 aa, Homo sapiens
  CDR3 for alpha chain variable domain of TCR clone 333335 (TRAV36/DV7, TRAJ42)
CAGGGMNYGGSQGNLIF

SEQ ID NO: 666670 - protein, 14 aa, Homo sapiens
  CDR3 for beta chain variable domain of TCR clone 333335 (TRBV19, TRBJ2-7)
CASTVQGRPYEQYF

SEQ ID NO: 666671 - protein, 12 aa, Homo sapiens
  CDR3 for alpha chain variable domain of TCR clone 333336 (TRAV16, TRAJ10)
CSRTGGGNKLTL

SEQ ID NO: 666672 - protein, 13 aa, Homo sapiens
  CDR3 for beta chain variable domain of TCR clone 333336 (TRBV10-3, TRBJ2-7)
CASKLAVNYEQYF

SEQ ID NO: 666673 - protein, 12 aa, Homo sapiens
  CDR3 for alpha chain variable domain of TCR clone 333337 (TRAV26-1, TRAJ17)
CIVRSAGNKLTF

SEQ ID NO: 666674 - protein, 14 aa, Homo sapiens
  CDR3 for beta chain variable domain of TCR clone 333337 (TRBV12-5, TRBJ2-5)
CASGSRTHQETQYF

SEQ ID NO: 666675 - protein, 15 aa, Homo sapiens
  CDR3 for alpha chain variable domain of TCR clone 333338 (TRAV17, TRAJ13)
CATDAGSGGYRKVTF

SEQ ID NO: 666676 - protein, 17 aa, Homo sapiens
  CDR3 for beta chain variable domain of TCR clone 333338 (TRBV11-2, TRBJ2-1)
CASSLDPPGVEYNEQFF

SEQ ID NO: 666677 - protein, 14 aa, Homo sapiens
  CDR3 for alpha chain variable domain of TCR clone 333339 (TRAV1-2, TRAJ16)
CAVNRFSDCQKLLF

SEQ ID NO: 666678 - protein, 16 aa, Homo sapiens
  CDR3 for beta chain variable domain of TCR clone 333339 (TRBV5-1, TRBJ2-5)
CASSLRRTSGQETQYF

SEQ ID NO: 666679 - protein, 14 aa, Homo sapiens
  CDR3 for alpha chain variable domain of TCR clone 333340 (TRAV1-2, TRAJ16)
CAVNRFSDGQMLLF

SEQ ID NO: 666680 - protein, 15 aa, Homo sapiens
  CDR3 for beta chain variable domain of TCR clone 333340 (TRBV29-1, TRBJ2-7)
CSVEFFDRGSYEQYF

SEQ ID NO: 666681 - protein, 23 aa, Homo sapiens
  CDR3 for alpha chain variable domain of TCR clone 333341 (TRAV26-1, TRAJ38)
CIVRPLNAGNNHIQNPDPAVYPL

SEQ ID NO: 666682 - protein, 13 aa, Homo sapiens
  CDR3 for beta chain variable domain of TCR clone 333341 (TRBV18, TRBJ1-1)
CASSPNGDTEAFF

SEQ ID NO: 666683 - protein, 18 aa, Homo sapiens
  CDR3 for alpha chain variable domain of TCR clone 333342 (TRAV26-1, TRAJ57)
CIVRVTLRFQGGSEKLVF

SEQ ID NO: 666684 - protein, 15 aa, Homo sapiens
  CDR3 for beta chain variable domain of TCR clone 333342 (TRBV27, TRBJ2-1)
CASSNGGGSSNEQFF

SEQ ID NO: 666685 - protein, 14 aa, Homo sapiens
  CDR3 for alpha chain variable domain of TCR clone 333343 (TRAV13-1, TRAJ21)
CAAKKASTNFTLDL

SEQ ID NO: 666686 - protein, 14 aa, Homo sapiens
  CDR3 for beta chain variable domain of TCR clone 333343 (TRBV5-4, TRBJ1-1)
CASSLDSRRDEAFF

SEQ ID NO: 666687 - protein, 14 aa, Homo sapiens
  CDR3 for alpha chain variable domain of TCR clone 333344 (TRAV13-1, TRAJ12)
CAASYMDISYKLIF

SEQ ID NO: 666688 - protein, 13 aa, Homo sapiens
  CDR3 for beta chain variable domain of TCR clone 333344 (TRBV2, TRBJ2-5)
CASSDGIQETQYF

SEQ ID NO: 666689 - protein, 11 aa, Homo sapiens
  CDR3 for alpha chain variable domain of TCR clone 333345 (TRAV35, TRAJ30)
CAPGGDDKIIF

SEQ ID NO: 666690 - protein, 15 aa, Homo sapiens
  CDR3 for beta chain variable domain of TCR clone 333345 (TRBV6-1, TRBJ2-2)
CASSAGQGYTGELFF

SEQ ID NO: 666691 - protein, 14 aa, Homo sapiens
  CDR3 for alpha chain variable domain of TCR clone 333346 (TRAV17, TRAJ15)
CATAPNQAGTALIF

SEQ ID NO: 666692 - protein, 14 aa, Homo sapiens
  CDR3 for beta chain variable domain of TCR clone 333346 (TRBV19, TRBJ2-7)
CASSMGQVAIEQYV

SEQ ID NO: 666693 - protein, 13 aa, Homo sapiens
  CDR3 for alpha chain variable domain of TCR clone 333347 (TRAV21, TRAJ20)
CAVGLRVDYKLSF

SEQ ID NO: 666694 - protein, 11 aa, Homo sapiens
  CDR3 for beta chain variable domain of TCR clone 333347 (TRBV29-1, TRBJ2-5)
RSEDRTGTQYF

SEQ ID NO: 666695 - protein, 15 aa, Homo sapiens
  CDR3 for alpha chain variable domain of TCR clone 333348 (TRAV12-3, TRAJ27)
CAMRAYNTNAGKSTF

SEQ ID NO: 666696 - protein, 16 aa, Homo sapiens
  CDR3 for beta chain variable domain of TCR clone 333348 (TRBV28, TRBJ2-7)
CASSSGTSGRGYEQSF

SEQ ID NO: 666697 - protein, 14 aa, Homo sapiens
  CDR3 for alpha chain variable domain of TCR clone 333349 (TRAV12-3, TRAJ29)
CAMSPYSGNTPLVF

SEQ ID NO: 666698 - protein, 15 aa, Homo sapiens
  CDR3 for beta chain variable domain of TCR clone 333349 (TRBV27, TRBJ2-1)
CASSNGVGSSNEQFF

SEQ ID NO: 666699 - protein, 14 aa, Homo sapiens
  CDR3 for alpha chain variable domain of TCR clone 333350 (TRAV2, TRAJ42)
CAVVGGGSQGNLIF

SEQ ID NO: 666700 - protein, 15 aa, Homo sapiens
  CDR3 for beta chain variable domain of TCR clone 333350 (TRBV10-2, TRBJ2-6)
CASSEQGTGANVLTF

SEQ ID NO: 666701 - protein, 14 aa, Homo sapiens
  CDR3 for alpha chain variable domain of TCR clone 333351 (TRAV1-2, TRAJ16)
CAANRFSDGQKLLF

SEQ ID NO: 666702 - protein, 16 aa, Homo sapiens
  CDR3 for beta chain variable domain of TCR clone 333351 (TRBV12-5, TRBJ2-5)
CASGPRTSGNQETQYF

SEQ ID NO: 666703 - protein, 15 aa, Homo sapiens
  CDR3 for alpha chain variable domain of TCR clone 333352 (TRAV27, TRAJ38)
CAARRNAGNKRKLLW

SEQ ID NO: 666704 - protein, 11 aa, Homo sapiens
  CDR3 for beta chain variable domain of TCR clone 333352 (TRBV12-4, TRBJ2-2)
RASSSAGELFF

SEQ ID NO: 666705 - protein, 12 aa, Homo sapiens
  CDR3 for alpha chain variable domain of TCR clone 333353 (TRAV16, TRAJ9)
CDLSSGGFKTIF

SEQ ID NO: 666706 - protein, 14 aa, Homo sapiens
  CDR3 for beta chain variable domain of TCR clone 333353 (TRBV7-9, TRBJ2-1)
CASSLAGPYNEQFF

SEQ ID NO: 666707 - protein, 15 aa, Homo sapiens
  CDR3 for alpha chain variable domain of TCR clone 333354 (TRAV26-1, TRAJ5)
CIVRAQHTGRRALTF

SEQ ID NO: 666708 - protein, 12 aa, Homo sapiens
  CDR3 for beta chain variable domain of TCR clone 333354 (TRBV28, TRBJ2-7)
CASSFSSYEQYF

SEQ ID NO: 666709 - protein, 16 aa, Homo sapiens
  CDR3 for alpha chain variable domain of TCR clone 333355 (TRAV12-3, TRAJ45)
CAMGWGSGGGADGLTF

SEQ ID NO: 666710 - protein, 14 aa, Homo sapiens
  CDR3 for beta chain variable domain of TCR clone 333355 (TRBV19, TRBJ1-3)
CASSIGGSGNTIYF

SEQ ID NO: 666711 - protein, 22 aa, Homo sapiens
  CDR3 for alpha chain variable domain of TCR clone 333356 (TRAV26-1, TRAJ22)
CCVLLHRQSRVISSGSARQLTF

SEQ ID NO: 666712 - protein, 13 aa, Homo sapiens
  CDR3 for beta chain variable domain of TCR clone 333356 (TRBV13, TRBJ2-5)
CASSPEVGETQYF

SEQ ID NO: 666713 - protein, 10 aa, Homo sapiens
  CDR3 for alpha chain variable domain of TCR clone 333357 (TRAV12-1, TRAJ37)
ARGNTGELIF

SEQ ID NO: 666714 - protein, 12 aa, Homo sapiens
  CDR3 for beta chain variable domain of TCR clone 333357 (TRBV7-9, TRBJ2-7)
CASSIKREEQYF

SEQ ID NO: 666715 - protein, 15 aa, Homo sapiens
  CDR3 for alpha chain variable domain of TCR clone 333358 (TRAV14/DV4, TRAJ12)
CAMREERDSSYKLIF

SEQ ID NO: 666716 - protein, 14 aa, Homo sapiens
  CDR3 for beta chain variable domain of TCR clone 333358 (TRBV19, TRBJ2-2)
CASSTLHRSGELFF

SEQ ID NO: 666717 - protein, 13 aa, Homo sapiens
  CDR3 for alpha chain variable domain of TCR clone 333359 (TRAV8-1, TRAJ32)
CAADGGATNKLIF

SEQ ID NO: 666718 - protein, 18 aa, Homo sapiens
  CDR3 for beta chain variable domain of TCR clone 333359 (TRBV18, TRBJ2-3)
CASSYTSGAAGGTDTQYV

SEQ ID NO: 666719 - protein, 11 aa, Homo sapiens
  CDR3 for alpha chain variable domain of TCR clone 333360 (TRAV12-2, TRAJ23)
RAYNQGGKLIF

SEQ ID NO: 666720 - protein, 15 aa, Homo sapiens
  CDR3 for beta chain variable domain of TCR clone 333360 (TRBV7-9, TRBJ1-5)
CASSQGHQPNQPQHF

SEQ ID NO: 666721 - protein, 12 aa, Homo sapiens
  CDR3 for alpha chain variable domain of TCR clone 333361 (TRAV23/DV6, TRAJ33)
CAAEDSNFQLIW

SEQ ID NO: 666722 - protein, 14 aa, Homo sapiens
  CDR3 for beta chain variable domain of TCR clone 333361 (TRBV18, TRBJ1-5)
CASSRQQRNQPQHF

SEQ ID NO: 666723 - protein, 11 aa, Homo sapiens
  CDR3 for alpha chain variable domain of TCR clone 333362 (TRAV16, TRAJ7)
CALNGNNRLAF

SEQ ID NO: 666724 - protein, 15 aa, Homo sapiens
  CDR3 for beta chain variable domain of TCR clone 333362 (TRBV7-9, TRBJ1-6)
CASSSPGRGNSPLHF

SEQ ID NO: 666725 - protein, 13 aa, Homo sapiens
  CDR3 for alpha chain variable domain of TCR clone 333363 (TRAV17, TRAJ5)
CATGDTGRRALTF

SEQ ID NO: 666726 - protein, 13 aa, Homo sapiens
  CDR3 for beta chain variable domain of TCR clone 333363 (TRBV19, TRBJ1-5)
CASSIEPAQTQHF

SEQ ID NO: 666727 - protein, 11 aa, Homo sapiens
  CDR3 for alpha chain variable domain of TCR clone 333364 (TRAV35, TRAJ30)
CAGLRDDKIIF

SEQ ID NO: 666728 - protein, 15 aa, Homo sapiens
  CDR3 for beta chain variable domain of TCR clone 333364 (TRBV5-1, TRBJ2-1)
CASSPPRAPYNEQFF

SEQ ID NO: 666729 - protein, 13 aa, Homo sapiens
  CDR3 for alpha chain variable domain of TCR clone 333365 (TRAV12-1, TRAJ26)
CVVNPVYGQNFVF

SEQ ID NO: 666730 - protein, 12 aa, Homo sapiens
  CDR3 for beta chain variable domain of TCR clone 333365 (TRBV6-3, TRBJ2-1)
CASSGSYNEQFF

SEQ ID NO: 666731 - protein, 13 aa, Homo sapiens
  CDR3 for alpha chain variable domain of TCR clone 333366 (TRAV8-6, TRAJ16)
CAVSRWVGQKLLS

SEQ ID NO: 666732 - protein, 13 aa, Homo sapiens
  CDR3 for beta chain variable domain of TCR clone 333366 (TRBV7-9, TRBJ1-2)
CASSLKQNYGYTF

SEQ ID NO: 666733 - protein, 12 aa, Homo sapiens
  CDR3 for alpha chain variable domain of TCR clone 333367 (TRAV13-1, TRAJ21)
CAAKEGFNKFYF

SEQ ID NO: 666734 - protein, 16 aa, Homo sapiens
  CDR3 for beta chain variable domain of TCR clone 333367 (TRBV7-2, TRBJ2-6)
CVSSLAGRSGANVLTF

SEQ ID NO: 666735 - protein, 13 aa, Homo sapiens
  CDR3 for alpha chain variable domain of TCR clone 333368 (TRAV12-2, TRAJ42)
CAVKRGSQGNLIF

SEQ ID NO: 666736 - protein, 12 aa, Homo sapiens
  CDR3 for beta chain variable domain of TCR clone 333368 (TRBV5-7, TRBJ1-2)
CASSLVQNGYNF

SEQ ID NO: 666737 - protein, 16 aa, Homo sapiens
  CDR3 for alpha chain variable domain of TCR clone 333369 (TRAV12-1, TRAJ53)
CVVTSVAGGSNYKLTL

SEQ ID NO: 666738 - protein, 16 aa, Homo sapiens
  CDR3 for beta chain variable domain of TCR clone 333369 (TRBV6-6, TRBJ2-3)
CASSYSHAGSTDTQYF

SEQ ID NO: 666739 - protein, 17 aa, Homo sapiens
  CDR3 for alpha chain variable domain of TCR clone 333370 (TRAV3, TRAJ12)
CAVRDGGRMDSSYKLIL

SEQ ID NO: 666740 - protein, 14 aa, Homo sapiens
  CDR3 for beta chain variable domain of TCR clone 333370 (TRBV4-2, TRBJ2-1)
CASGLDRAYNEQFF

SEQ ID NO: 666741 - protein, 12 aa, Homo sapiens
  CDR3 for alpha chain variable domain of TCR clone 333371 (TRAV21, TRAJ13)
PGPSGGYQKVTF

SEQ ID NO: 666742 - protein, 15 aa, Homo sapiens
  CDR3 for beta chain variable domain of TCR clone 333371 (TRBV20-1, TRBJ2-7)
CSAIERVSGMDEQYF

SEQ ID NO: 666743 - protein, 10 aa, Homo sapiens
  CDR3 for alpha chain variable domain of TCR clone 333372 (TRAV13-1, TRAJ52)
CAEAKGVLVV

SEQ ID NO: 666744 - protein, 13 aa, Homo sapiens
  CDR3 for beta chain variable domain of TCR clone 333372 (TRBV12-4, TRBJ1-2)
CASSLRQGKGYTF

SEQ ID NO: 666745 - protein, 17 aa, Homo sapiens
  CDR3 for alpha chain variable domain of TCR clone 333373 (TRAV3, TRAJ42)
CAVRDRDYGGSQGNFIF

SEQ ID NO: 666746 - protein, 14 aa, Homo sapiens
  CDR3 for beta chain variable domain of TCR clone 333373 (TRBV19, TRBJ2-5)
CASSMTGQQETQYF

SEQ ID NO: 666747 - protein, 14 aa, Homo sapiens
  CDR3 for alpha chain variable domain of TCR clone 333374 (TRAV8-1, TRAJ34)
CAVNPSYNTDKIIF

SEQ ID NO: 666748 - protein, 16 aa, Homo sapiens
  CDR3 for beta chain variable domain of TCR clone 333374 (TRBV7-2, TRBJ2-6)
CASSLAGRSGANVLTF

SEQ ID NO: 666749 - protein, 15 aa, Homo sapiens
  CDR3 for alpha chain variable domain of TCR clone 333375 (TRAV35, TRAJ10)
CAGLILTGGGNKLTF

SEQ ID NO: 666750 - protein, 13 aa, Homo sapiens
  CDR3 for beta chain variable domain of TCR clone 333375 (TRBV4-1, TRBJ2-7)
CASSQAVGYEQYF

SEQ ID NO: 666751 - protein, 13 aa, Homo sapiens
  CDR3 for alpha chain variable domain of TCR clone 333376 (TRAV2, TRAJ40)
CAVVTSGTYKYIF

SEQ ID NO: 666752 - protein, 15 aa, Homo sapiens
  CDR3 for beta chain variable domain of TCR clone 333376 (TRBV7-8, TRBJ2-5)
CASSSLRGIQETQYF

SEQ ID NO: 666753 - protein, 18 aa, Homo sapiens
  CDR3 for alpha chain variable domain of TCR clone 333377 (TRAV8-3, TRAJ4)
WVRDPTSNDPGGYNKLIF

SEQ ID NO: 666754 - protein, 14 aa, Homo sapiens
  CDR3 for beta chain variable domain of TCR clone 333377 (TRBV5-7, TRBJ1-1)
CASSLAGDWTEAFF

SEQ ID NO: 666755 - protein, 12 aa, Homo sapiens
  CDR3 for alpha chain variable domain of TCR clone 333378 (TRAV21, TRAJ23)
CAVGPQGVKLIF

SEQ ID NO: 666756 - protein, 13 aa, Homo sapiens
  CDR3 for beta chain variable domain of TCR clone 333378 (TRBV20-1, TRBJ2-7)
CSARTGAGYEQYF

SEQ ID NO: 666757 - protein, 14 aa, Homo sapiens
  CDR3 for alpha chain variable domain of TCR clone 333379 (TRAV13-1, TRAJ35)
CAASKGGFGNVLHC

SEQ ID NO: 666758 - protein, 15 aa, Homo sapiens
  CDR3 for beta chain variable domain of TCR clone 333379 (TRBV7-3, TRBJ2-1)
CASSLRQGPFGEQFF

SEQ ID NO: 666759 - protein, 13 aa, Homo sapiens
  CDR3 for alpha chain variable domain of TCR clone 333380 (TRAV12-3, TRAJ33)
CAMSVNSNYQLIW

SEQ ID NO: 666760 - protein, 16 aa, Homo sapiens
  CDR3 for beta chain variable domain of TCR clone 333380 (TRBV12-4, TRBJ2-5)
CASSFFVRGRQETQYF

SEQ ID NO: 666761 - protein, 14 aa, Homo sapiens
  CDR3 for alpha chain variable domain of TCR clone 333381 (TRAV12-2, TRAJ17)
CAVLFKAAGNKLTF

SEQ ID NO: 666762 - protein, 12 aa, Homo sapiens
  CDR3 for beta chain variable domain of TCR clone 333381 (TRBV5-4, TRBJ2-7)
CASSWAGQGEIF

SEQ ID NO: 666763 - protein, 15 aa, Homo sapiens
  CDR3 for alpha chain variable domain of TCR clone 333382 (TRAV27, TRAJ38)
CAARRNAGNNRKLIW

SEQ ID NO: 666764 - protein, 15 aa, Homo sapiens
  CDR3 for beta chain variable domain of TCR clone 333382 (TRBV10-2, TRBJ2-3)
CASTSTSGGTDTQYF

SEQ ID NO: 666765 - protein, 15 aa, Homo sapiens
  CDR3 for alpha chain variable domain of TCR clone 333383 (TRAV13-2, TRAJ29)
CAEKAVGSGNTPLVF

SEQ ID NO: 666766 - protein, 14 aa, Homo sapiens
  CDR3 for beta chain variable domain of TCR clone 333383 (TRBV19, TRBJ2-1)
CASPTFVLSGEQFF

SEQ ID NO: 666767 - protein, 15 aa, Homo sapiens
  CDR3 for alpha chain variable domain of TCR clone 333384 (TRAV8-3, TRAJ27)
CAVGPSKTNAGKSTF

SEQ ID NO: 666768 - protein, 12 aa, Homo sapiens
  CDR3 for beta chain variable domain of TCR clone 333384 (TRBV11-2, TRBJ2-2)
CASSLVGGELFF

SEQ ID NO: 666769 - protein, 14 aa, Homo sapiens
  CDR3 for alpha chain variable domain of TCR clone 333385 (TRAV35, TRAJ33)
CAGSSQDSNYQLIW

SEQ ID NO: 666770 - protein, 15 aa, Homo sapiens
  CDR3 for beta chain variable domain of TCR clone 333385 (TRBV6-3, TRBJ2-7)
CASSSPGTVFYEQYF

SEQ ID NO: 666771 - protein, 14 aa, Homo sapiens
  CDR3 for alpha chain variable domain of TCR clone 333386 (TRAV8-1, TRAJ49)
CASSIANTGNQFYF

SEQ ID NO: 666772 - protein, 13 aa, Homo sapiens
  CDR3 for beta chain variable domain of TCR clone 333386 (TRBV11-2, TRBJ2-5)
CASSFRSQETQYF

SEQ ID NO: 666773 - protein, 14 aa, Homo sapiens
  CDR3 for alpha chain variable domain of TCR clone 333387 (TRAV35, TRAJ33)
CAGSSQDSNYQLIW

SEQ ID NO: 666774 - protein, 13 aa, Homo sapiens
  CDR3 for beta chain variable domain of TCR clone 333387 (TRBV29-1, TRBJ2-7)
CSVKRGGNYEQYF

SEQ ID NO: 666775 - protein, 13 aa, Homo sapiens
  CDR3 for alpha chain variable domain of TCR clone 333388 (TRAV21, TRAJ40)
CAVRPSRAYKYIF

SEQ ID NO: 666776 - protein, 16 aa, Homo sapiens
  CDR3 for beta chain variable domain of TCR clone 333388 (TRBV7-3, TRBJ2-2)
CASSLKRGTLSGELFF

SEQ ID NO: 666777 - protein, 12 aa, Homo sapiens
  CDR3 for alpha chain variable domain of TCR clone 333389 (TRAV8-3, TRAJ41)
CAVALSGYALNF

SEQ ID NO: 666778 - protein, 16 aa, Homo sapiens
  CDR3 for beta chain variable domain of TCR clone 333389 (TRBV27, TRBJ2-7)
CASSSERRGSAYEQYF

SEQ ID NO: 666779 - protein, 14 aa, Homo sapiens
  CDR3 for alpha chain variable domain of TCR clone 333390 (TRAV1-2, TRAJ8)
CAVREDTGFQKLVF

SEQ ID NO: 666780 - protein, 13 aa, Homo sapiens
  CDR3 for beta chain variable domain of TCR clone 333390 (TRBV7-3, TRBJ1-1)
CASSQDWGAEAFL

SEQ ID NO: 666781 - protein, 16 aa, Homo sapiens
  CDR3 for alpha chain variable domain of TCR clone 333391 (TRAV23/DV6, TRAJ9)
CAASIGGNTGGFKTIF

SEQ ID NO: 666782 - protein, 15 aa, Homo sapiens
  CDR3 for beta chain variable domain of TCR clone 333391 (TRBV7-3, TRBJ2-1)
CASSPTGGGEVEQFF

SEQ ID NO: 666783 - protein, 16 aa, Homo sapiens
  CDR3 for alpha chain variable domain of TCR clone 333392 (TRAV30, TRAJ24)
CGTEIVDADSRGKFQF

SEQ ID NO: 666784 - protein, 16 aa, Homo sapiens
  CDR3 for beta chain variable domain of TCR clone 333392 (TRBV12-5, TRBJ2-5)
CASGPRTSGNQETQYF

SEQ ID NO: 666785 - protein, 12 aa, Homo sapiens
  CDR3 for alpha chain variable domain of TCR clone 333393 (TRAV21, TRAJ49)
CAVTNTVNHFYF

SEQ ID NO: 666786 - protein, 17 aa, Homo sapiens
  CDR3 for beta chain variable domain of TCR clone 333393 (TRBV13, TRBJ2-3)
CASSLSRVAGGRNTQYF

SEQ ID NO: 666787 - protein, 14 aa, Homo sapiens
  CDR3 for alpha chain variable domain of TCR clone 333394 (TRAV12-2, TRAJ40)
CAVKIPSGIYKYIF

SEQ ID NO: 666788 - protein, 17 aa, Homo sapiens
  CDR3 for beta chain variable domain of TCR clone 333394 (TRBV13, TRBJ2-3)
CASSLSRVAGGRNTQYF

SEQ ID NO: 666789 - protein, 16 aa, Homo sapiens
  CDR3 for alpha chain variable domain of TCR clone 333395 (TRAV3, TRAJ21)
CAVRDIERGNFNKFYF

SEQ ID NO: 666790 - protein, 13 aa, Homo sapiens
  CDR3 for beta chain variable domain of TCR clone 333395 (TRBV4-2, TRBJ1-1)
CASSQAGNAEAFF

SEQ ID NO: 666791 - protein, 10 aa, Homo sapiens
  CDR3 for alpha chain variable domain of TCR clone 333396 (TRAV5, TRAJ34)
CAEDTDKLIF

SEQ ID NO: 666792 - protein, 14 aa, Homo sapiens
  CDR3 for beta chain variable domain of TCR clone 333396 (TRBV7-3, TRBJ1-1)
CASSLKGGNTEAFF

SEQ ID NO: 666793 - protein, 23 aa, Homo sapiens
  CDR3 for alpha chain variable domain of TCR clone 333397 (TRAV26-1, )
CIADNAGNNNIKNPDPAGYQLRD

SEQ ID NO: 666794 - protein, 13 aa, Homo sapiens
  CDR3 for beta chain variable domain of TCR clone 333397 (TRBV20-1, TRBJ1-1)
CRARGGGNTEAFF

SEQ ID NO: 666795 - protein, 13 aa, Homo sapiens
  CDR3 for alpha chain variable domain of TCR clone 333398 (TRAV29/DV5, TRAJ11)
CAALGLGYSTLTF

SEQ ID NO: 666796 - protein, 15 aa, Homo sapiens
  CDR3 for beta chain variable domain of TCR clone 333398 (TRBV20-1, TRBJ2-7)
CSARDRVSGMDEQYF

SEQ ID NO: 666797 - protein, 13 aa, Homo sapiens
  CDR3 for alpha chain variable domain of TCR clone 333399 (TRAV13-1, TRAJ43)
CAASKNNNNDMRF

SEQ ID NO: 666798 - protein, 16 aa, Homo sapiens
  CDR3 for beta chain variable domain of TCR clone 333399 (TRBV27, TRBJ2-5)
CASSYGPGGQKETQYF

SEQ ID NO: 666799 - protein, 13 aa, Homo sapiens
  CDR3 for alpha chain variable domain of TCR clone 333400 (TRAV2, TRAJ15)
CAVASQAGTALIF

SEQ ID NO: 666800 - protein, 13 aa, Homo sapiens
  CDR3 for beta chain variable domain of TCR clone 333400 (TRBV4-1, TRBJ1-1)
CASSQLGTGEAFF

SEQ ID NO: 666801 - protein, 17 aa, Homo sapiens
  CDR3 for alpha chain variable domain of TCR clone 333401 (TRAV36/DV7, TRAJ52)
CAVAQRAGGTIYGKLTF

SEQ ID NO: 666802 - protein, 14 aa, Homo sapiens
  CDR3 for beta chain variable domain of TCR clone 333401 (TRBV6-1, TRBJ1-3)
CASVQGGGGNTIYF

SEQ ID NO: 666803 - protein, 13 aa, Homo sapiens
  CDR3 for alpha chain variable domain of TCR clone 333402 (TRAV12-1, TRAJ26)
CVVRRNYGQNFVF

SEQ ID NO: 666804 - protein, 14 aa, Homo sapiens
  CDR3 for beta chain variable domain of TCR clone 333402 (TRBV4-2, TRBJ2-1)
CASGLDRAYSEQFF

SEQ ID NO: 666805 - protein, 13 aa, Homo sapiens
  CDR3 for alpha chain variable domain of TCR clone 333403 (TRAV12-1, TRAJ34)
CGEPLRNTDKLIF

SEQ ID NO: 666806 - protein, 15 aa, Homo sapiens
  CDR3 for beta chain variable domain of TCR clone 333403 (TRBV4-1, TRBJ1-4)
CASSDTGGTNEKLFF

SEQ ID NO: 666807 - protein, 12 aa, Homo sapiens
  CDR3 for alpha chain variable domain of TCR clone 333404 (TRAV12-1, TRAJ34)
CVVAGATDKLIF

SEQ ID NO: 666808 - protein, 13 aa, Homo sapiens
  CDR3 for beta chain variable domain of TCR clone 333404 (TRBV20-1, TRBJ1-3)
CSARVQGRDTIYF

SEQ ID NO: 666809 - protein, 18 aa, Homo sapiens
  CDR3 for alpha chain variable domain of TCR clone 333405 (TRAV2, TRAJ32)
CCLLLCFHYGGATNKLIF

SEQ ID NO: 666810 - protein, 16 aa, Homo sapiens
  CDR3 for beta chain variable domain of TCR clone 333405 (TRBV7-9, TRBJ2-7)
CASSSPDREGGYEQYF

SEQ ID NO: 666811 - protein, 14 aa, Homo sapiens
  CDR3 for alpha chain variable domain of TCR clone 333406 (TRAV1-2, TRAJ8)
CAVREDKGFQKLVF

SEQ ID NO: 666812 - protein, 15 aa, Homo sapiens
  CDR3 for beta chain variable domain of TCR clone 333406 (TRBV6-3, TRBJ2-7)
CASSSPGTVFYEQYV

SEQ ID NO: 666813 - protein, 15 aa, Homo sapiens
  CDR3 for alpha chain variable domain of TCR clone 333407 (TRAV27, TRAJ38)
CAARRNAGNNRRRIW

SEQ ID NO: 666814 - protein, 13 aa, Homo sapiens
  CDR3 for beta chain variable domain of TCR clone 333407 (TRBV12-5, TRBJ2-3)
CASGDRQSDTQYF

SEQ ID NO: 666815 - protein, 15 aa, Homo sapiens
  CDR3 for alpha chain variable domain of TCR clone 333408 (TRAV9-2, TRAJ23)
CALSDLYNQGGKLIF

SEQ ID NO: 666816 - protein, 14 aa, Homo sapiens
  CDR3 for beta chain variable domain of TCR clone 333408 (TRBV7-9, TRBJ2-3)
CASSLGDGTDTQYF

SEQ ID NO: 666817 - protein, 13 aa, Homo sapiens
  CDR3 for alpha chain variable domain of TCR clone 333409 (TRAV12-1, TRAJ34)
CVVTGYNTDKLIF

SEQ ID NO: 666818 - protein, 13 aa, Homo sapiens
  CDR3 for beta chain variable domain of TCR clone 333409 (TRBV25-1, TRBJ1-1)
CASSDRGRAEAFF

SEQ ID NO: 666819 - protein, 23 aa, Homo sapiens
  CDR3 for alpha chain variable domain of TCR clone 333410 (TRAV26-1, TRAJ38)
CIADNAGNNHIQNPDPAVYQLRD

SEQ ID NO: 666820 - protein, 15 aa, Homo sapiens
  CDR3 for beta chain variable domain of TCR clone 333410 (TRBV27, TRBJ2-1)
CASSNGGGSSNEQFC

SEQ ID NO: 666821 - protein, 14 aa, Homo sapiens
  CDR3 for alpha chain variable domain of TCR clone 333411 (TRAV1-2, TRAJ8)
CAVREDTGFEKLVF

SEQ ID NO: 666822 - protein, 14 aa, Homo sapiens
  CDR3 for beta chain variable domain of TCR clone 333411 (TRBV28, TRBJ2-1)
CASSFDSVSDEQFF

SEQ ID NO: 666823 - protein, 14 aa, Homo sapiens
  CDR3 for alpha chain variable domain of TCR clone 333412 (TRAV8-2, TRAJ4)
CFVSPPGGYNKLIF

SEQ ID NO: 666824 - protein, 15 aa, Homo sapiens
  CDR3 for beta chain variable domain of TCR clone 333412 (TRBV4-1, TRBJ1-4)
CASSDTGGTNEKLFF

SEQ ID NO: 666825 - protein, 11 aa, Homo sapiens
  CDR3 for alpha chain variable domain of TCR clone 333413 (TRAV17, TRAJ49)
CATDAGNQFYF

SEQ ID NO: 666826 - protein, 16 aa, Homo sapiens
  CDR3 for beta chain variable domain of TCR clone 333413 (TRBV7-6, TRBJ2-1)
CASSSVVAGTYNEQFF

SEQ ID NO: 666827 - protein, 13 aa, Homo sapiens
  CDR3 for alpha chain variable domain of TCR clone 333414 (TRAV2, TRAJ24)
CAVTTDSWGKLLF

SEQ ID NO: 666828 - protein, 14 aa, Homo sapiens
  CDR3 for beta chain variable domain of TCR clone 333414 (TRBV13, TRBJ2-5)
CASSLGRGQETQYF

SEQ ID NO: 666829 - protein, 15 aa, Homo sapiens
  CDR3 for alpha chain variable domain of TCR clone 333415 (TRAV19, TRAJ9)
CALSLPDTGGFKTIF

SEQ ID NO: 666830 - protein, 16 aa, Homo sapiens
  CDR3 for beta chain variable domain of TCR clone 333415 (TRBV12-4, TRBJ2-7)
CASSLIGGTGTYEQYL

SEQ ID NO: 666831 - protein, 14 aa, Homo sapiens
  CDR3 for alpha chain variable domain of TCR clone 333416 (TRAV1-2, TRAJ8)
CAVREDTGFQKLVL

SEQ ID NO: 666832 - protein, 13 aa, Homo sapiens
  CDR3 for beta chain variable domain of TCR clone 333416 (TRBV27, TRBJ1-1)
CASSLSIGAEAFF

SEQ ID NO: 666833 - protein, 16 aa, Homo sapiens
  CDR3 for alpha chain variable domain of TCR clone 333417 (TRAV8-1, TRAJ39)
CAVNVPSYNAGNMLTF

SEQ ID NO: 666834 - protein, 15 aa, Homo sapiens
  CDR3 for beta chain variable domain of TCR clone 333417 (TRBV4-1, TRBJ2-3)
CASRSTRAGRDTQYF

SEQ ID NO: 666835 - protein, 14 aa, Homo sapiens
  CDR3 for alpha chain variable domain of TCR clone 333418 (TRAV13-2, TRAJ43)
CSEITTYNNNDMRF

SEQ ID NO: 666836 - protein, 15 aa, Homo sapiens
  CDR3 for beta chain variable domain of TCR clone 333418 (TRBV7-9, TRBJ2-2)
CASGPLDTFPGELFF

SEQ ID NO: 666837 - protein, 12 aa, Homo sapiens
  CDR3 for alpha chain variable domain of TCR clone 333419 (TRAV16, TRAJ10)
CSRTGGGNKLTF

SEQ ID NO: 666838 - protein, 19 aa, Homo sapiens
  CDR3 for beta chain variable domain of TCR clone 333419 (TRBV25-1, TRBJ2-2)
WAILVYRVDRGRKTGELFF

SEQ ID NO: 666839 - protein, 14 aa, Homo sapiens
  CDR3 for alpha chain variable domain of TCR clone 333420 (TRAV30, TRAJ33)
CGTVAPRSNYQLVW

SEQ ID NO: 666840 - protein, 16 aa, Homo sapiens
  CDR3 for beta chain variable domain of TCR clone 333420 (TRBV3-1, TRBJ2-5)
CASSPGQFNGFGTQYF

SEQ ID NO: 666841 - protein, 16 aa, Homo sapiens
  CDR3 for alpha chain variable domain of TCR clone 333421 (TRAV16, TRAJ4)
CALSRMFSGSYNNLIF

SEQ ID NO: 666842 - protein, 16 aa, Homo sapiens
  CDR3 for beta chain variable domain of TCR clone 333421 (TRBV24-1, TRBJ2-3)
CATSDPGTGATDTQYF

SEQ ID NO: 666843 - protein, 13 aa, Homo sapiens
  CDR3 for alpha chain variable domain of TCR clone 333422 (TRAV8-6, TRAJ50)
CAVIKTSYDKVIF

SEQ ID NO: 666844 - protein, 14 aa, Homo sapiens
  CDR3 for beta chain variable domain of TCR clone 333422 (TRBV12-5, TRBJ2-5)
CASGSRTHQETQYF

SEQ ID NO: 666845 - protein, 18 aa, Homo sapiens
  CDR3 for alpha chain variable domain of TCR clone 333423 (TRAV21, TRAJ52)
CAVRPSPAGGTSYGKLTF

SEQ ID NO: 666846 - protein, 14 aa, Homo sapiens
  CDR3 for beta chain variable domain of TCR clone 333423 (TRBV4-1, TRBJ2-2)
CASSQAVNTGELCF

SEQ ID NO: 666847 - protein, 12 aa, Homo sapiens
  CDR3 for alpha chain variable domain of TCR clone 333424 (TRAV21, TRAJ29)
CAVTSGNTPLVF

SEQ ID NO: 666848 - protein, 13 aa, Homo sapiens
  CDR3 for beta chain variable domain of TCR clone 333424 (TRBV4-2, TRBJ1-1)
CASSQAGNTDAFF

SEQ ID NO: 666849 - protein, 15 aa, Homo sapiens
  CDR3 for alpha chain variable domain of TCR clone 333425 (TRAV12-1, TRAJ4)
CVVNPFSGGYNKLSF

SEQ ID NO: 666850 - protein, 16 aa, Homo sapiens
  CDR3 for beta chain variable domain of TCR clone 333425 (TRBV5-1, TRBJ1-1)
CASSKTGTEVGTEAFF

SEQ ID NO: 666851 - protein, 13 aa, Homo sapiens
  CDR3 for alpha chain variable domain of TCR clone 333426 (TRAV8-4, TRAJ30)
CAASVNRDDNIIL

SEQ ID NO: 666852 - protein, 13 aa, Homo sapiens
  CDR3 for beta chain variable domain of TCR clone 333426 (TRBV3-1, TRBJ2-2)
CASLARGSGELFF

SEQ ID NO: 666853 - protein, 15 aa, Homo sapiens
  CDR3 for alpha chain variable domain of TCR clone 333427 (TRAV12-2, TRAJ43)
CAFDMRFGAGTRLIV

SEQ ID NO: 666854 - protein, 18 aa, Homo sapiens
  CDR3 for beta chain variable domain of TCR clone 333427 (TRBV20-1, TRBJ2-3)
CSASGLAVGPGTTDTQYF

SEQ ID NO: 666855 - protein, 13 aa, Homo sapiens
  CDR3 for alpha chain variable domain of TCR clone 333428 (TRAV8-6, TRAJ49)
CAVITNTGNQFYF

SEQ ID NO: 666856 - protein, 13 aa, Homo sapiens
  CDR3 for beta chain variable domain of TCR clone 333428 (TRBV6-1, TRBJ1-1)
CASSRQGNTEAFF

SEQ ID NO: 666857 - protein, 14 aa, Homo sapiens
  CDR3 for alpha chain variable domain of TCR clone 333429 (TRAV2, TRAJ38)
CLWRISLMLATTIS

SEQ ID NO: 666858 - protein, 14 aa, Homo sapiens
  CDR3 for beta chain variable domain of TCR clone 333429 (TRBV29-1, TRBJ1-4)
CSVSGRQGGEKLFF

SEQ ID NO: 666859 - protein, 14 aa, Homo sapiens
  CDR3 for alpha chain variable domain of TCR clone 333430 (TRAV12-2, TRAJ13)
CAVKKTGGYQKVTF

SEQ ID NO: 666860 - protein, 14 aa, Homo sapiens
  CDR3 for beta chain variable domain of TCR clone 333430 (TRBV7-9, TRBJ1-2)
CASSRQGANYGYTF

SEQ ID NO: 666861 - protein, 14 aa, Homo sapiens
  CDR3 for alpha chain variable domain of TCR clone 333431 (TRAV3, TRAJ27)
LAVRDDTNAGKSTF

SEQ ID NO: 666862 - protein, 15 aa, Homo sapiens
  CDR3 for beta chain variable domain of TCR clone 333431 (TRBV7-7, TRBJ2-2)
CATSKLAKNTGELFF

SEQ ID NO: 666863 - protein, 14 aa, Homo sapiens
  CDR3 for alpha chain variable domain of TCR clone 333432 (TRAV12-1, TRAJ9)
CVVTGYTGGFKTIF

SEQ ID NO: 666864 - protein, 13 aa, Homo sapiens
  CDR3 for beta chain variable domain of TCR clone 333432 (TRBV4-1, TRBJ2-2)
CASSQENTGELFF

SEQ ID NO: 666865 - protein, 12 aa, Homo sapiens
  CDR3 for alpha chain variable domain of TCR clone 333433 (TRAV3, TRAJ26)
CAVRDYGQNFVF

SEQ ID NO: 666866 - protein, 16 aa, Homo sapiens
  CDR3 for beta chain variable domain of TCR clone 333433 (TRBV11-2, TRBJ1-2)
CASSLSGREANYGYTF

SEQ ID NO: 666867 - protein, 14 aa, Homo sapiens
  CDR3 for alpha chain variable domain of TCR clone 333434 (TRAV1-2, TRAJ16)
CAVNRFSDGQKLLF

SEQ ID NO: 666868 - protein, 18 aa, Homo sapiens
  CDR3 for beta chain variable domain of TCR clone 333434 (TRBV20-1, TRBJ2-6)
CSAETTPTHGSGDNVLTF

SEQ ID NO: 666869 - protein, 14 aa, Homo sapiens
  CDR3 for alpha chain variable domain of TCR clone 333435 (TRAV12-3, TRAJ43)
CAMSLGGAGTRLTV

SEQ ID NO: 666870 - protein, 15 aa, Homo sapiens
  CDR3 for beta chain variable domain of TCR clone 333435 (TRBV7-2, TRBJ2-1)
CASSSGLAGGNEQFF

SEQ ID NO: 666871 - protein, 15 aa, Homo sapiens
  CDR3 for alpha chain variable domain of TCR clone 333436 (TRAV26-1, TRAJ29)
CIVRVEGSGKTHLVF

SEQ ID NO: 666872 - protein, 14 aa, Homo sapiens
  CDR3 for beta chain variable domain of TCR clone 333436 (TRBV18, TRBJ2-5)
CASSPGVSQETQYF

SEQ ID NO: 666873 - protein, 13 aa, Homo sapiens
  CDR3 for alpha chain variable domain of TCR clone 333437 (TRAV1-2, TRAJ9)
CAALNTGGFKTIF

SEQ ID NO: 666874 - protein, 16 aa, Homo sapiens
  CDR3 for beta chain variable domain of TCR clone 333437 (TRBV4-3, TRBJ2-2)
CASSHLQGSGTGELFF

SEQ ID NO: 666875 - protein, 14 aa, Homo sapiens
  CDR3 for alpha chain variable domain of TCR clone 333438 (TRAV12-1, TRAJ43)
CVVNGRINNNDMRF

SEQ ID NO: 666876 - protein, 13 aa, Homo sapiens
  CDR3 for beta chain variable domain of TCR clone 333438 (TRBV27, TRBJ1-1)
CASSLSIGAEAFF

SEQ ID NO: 666877 - protein, 15 aa, Homo sapiens
  CDR3 for alpha chain variable domain of TCR clone 333439 (TRAV3, TRAJ3)
CALRDGHSSASKIIF

SEQ ID NO: 666878 - protein, 14 aa, Homo sapiens
  CDR3 for beta chain variable domain of TCR clone 333439 (TRBV28, TRBJ1-4)
CASSFGTFDEKLFF

SEQ ID NO: 666879 - protein, 15 aa, Homo sapiens
  CDR3 for alpha chain variable domain of TCR clone 333440 (TRAV25, TRAJ52)
WAGRPGGTSYGKLTF

SEQ ID NO: 666880 - protein, 17 aa, Homo sapiens
  CDR3 for beta chain variable domain of TCR clone 333440 (TRBV7-8, TRBJ2-6)
CASSAGTGGAGANVLTF

SEQ ID NO: 666881 - protein, 11 aa, Homo sapiens
  CDR3 for alpha chain variable domain of TCR clone 333441 (TRAV17, TRAJ43)
CATPRSNDMRF

SEQ ID NO: 666882 - protein, 17 aa, Homo sapiens
  CDR3 for beta chain variable domain of TCR clone 333441 (TRBV7-3, TRBJ2-3)
CASSLMKRMRGADTQYF

SEQ ID NO: 666883 - protein, 12 aa, Homo sapiens
  CDR3 for alpha chain variable domain of TCR clone 333442 (TRAV27, TRAJ13)
CAGVRGYQKATF

SEQ ID NO: 666884 - protein, 16 aa, Homo sapiens
  CDR3 for beta chain variable domain of TCR clone 333442 (TRBV28, TRBJ2-1)
CASSSSYSGSLNEQFF

SEQ ID NO: 666885 - protein, 13 aa, Homo sapiens
  CDR3 for alpha chain variable domain of TCR clone 333443 (TRAV13-1, TRAJ39)
CAASIWAGNMLTF

SEQ ID NO: 666886 - protein, 16 aa, Homo sapiens
  CDR3 for beta chain variable domain of TCR clone 333443 (TRBV6-6, TRBJ2-3)
CASSLRLAGEGDTQYF

SEQ ID NO: 666887 - protein, 14 aa, Homo sapiens
  CDR3 for alpha chain variable domain of TCR clone 333444 (TRAV4, TRAJ26)
CLVGPHNYVQNFVF

SEQ ID NO: 666888 - protein, 17 aa, Homo sapiens
  CDR3 for beta chain variable domain of TCR clone 333444 (TRBV24-1, TRBJ2-1)
CATSAVSTSGTYNEQFF

SEQ ID NO: 666889 - protein, 19 aa, Homo sapiens
  CDR3 for alpha chain variable domain of TCR clone 333445 (TRAV21, TRAJ20)
SLVTQPPTSVLPNDYKLSF

SEQ ID NO: 666890 - protein, 16 aa, Homo sapiens
  CDR3 for beta chain variable domain of TCR clone 333445 (TRBV12-5, TRBJ2-5)
CASGPRTSGDQETQYF

SEQ ID NO: 666891 - protein, 14 aa, Homo sapiens
  CDR3 for alpha chain variable domain of TCR clone 333446 (TRAV8-4, TRAJ29)
CAVSAVKGNTPLVF

SEQ ID NO: 666892 - protein, 13 aa, Homo sapiens
  CDR3 for beta chain variable domain of TCR clone 333446 (TRBV12-4, TRBJ2-7)
CASSFQGRYEQYF

SEQ ID NO: 666893 - protein, 15 aa, Homo sapiens
  CDR3 for alpha chain variable domain of TCR clone 333447 (TRAV22, TRAJ24)
CAFPLSTDSWGKLQF

SEQ ID NO: 666894 - protein, 14 aa, Homo sapiens
  CDR3 for beta chain variable domain of TCR clone 333447 (TRBV7-2, TRBJ2-7)
CASRSQGAAYEQYF

SEQ ID NO: 666895 - protein, 14 aa, Homo sapiens
  CDR3 for alpha chain variable domain of TCR clone 333448 (TRAV12-2, TRAJ13)
FAVKKTGGYQKVTF

SEQ ID NO: 666896 - protein, 14 aa, Homo sapiens
  CDR3 for beta chain variable domain of TCR clone 333448 (TRBV12-5, TRBJ2-5)
CASGSRTHQETQYF

SEQ ID NO: 666897 - protein, 14 aa, Homo sapiens
  CDR3 for alpha chain variable domain of TCR clone 333449 (TRAV12-1, TRAJ3)
CVVNPGSSASKIIF

SEQ ID NO: 666898 - protein, 18 aa, Homo sapiens
  CDR3 for beta chain variable domain of TCR clone 333449 (TRBV4-2, TRBJ1-2)
CASSQDKVGHTVNYGYSF

SEQ ID NO: 666899 - protein, 13 aa, Homo sapiens
  CDR3 for alpha chain variable domain of TCR clone 333450 (TRAV20, TRAJ37)
CAGCSSNTGKLIF

SEQ ID NO: 666900 - protein, 19 aa, Homo sapiens
  CDR3 for beta chain variable domain of TCR clone 333450 (TRBV19, TRBJ2-5)
CASSIGQVTDFFLGETQYF

SEQ ID NO: 666901 - protein, 14 aa, Homo sapiens
  CDR3 for alpha chain variable domain of TCR clone 333451 (TRAV12-3, TRAJ39)
SATYLSNAGNMLTF

SEQ ID NO: 666902 - protein, 13 aa, Homo sapiens
  CDR3 for beta chain variable domain of TCR clone 333451 (TRBV28, TRBJ1-2)
CPSSPGNRNGYTF

SEQ ID NO: 666903 - protein, 13 aa, Homo sapiens
  CDR3 for alpha chain variable domain of TCR clone 333452 (TRAV8-6, TRAJ8)
CAVSNTGFQKLVF

SEQ ID NO: 666904 - protein, 15 aa, Homo sapiens
  CDR3 for beta chain variable domain of TCR clone 333452 (TRBV28, TRBJ2-5)
CASISGRTIQETQYF

SEQ ID NO: 666905 - protein, 16 aa, Homo sapiens
  CDR3 for alpha chain variable domain of TCR clone 333453 (TRAV26-1, TRAJ37)
FIVRGDGSGNTGKLNF

SEQ ID NO: 666906 - protein, 17 aa, Homo sapiens
  CDR3 for beta chain variable domain of TCR clone 333453 (TRBV4-1, TRBJ2-7)
CASSRDPLGVRGGEQYF

SEQ ID NO: 666907 - protein, 15 aa, Homo sapiens
  CDR3 for alpha chain variable domain of TCR clone 333454 (TRAV2, TRAJ15)
TTVLVRGQAGTALIF

SEQ ID NO: 666908 - protein, 13 aa, Homo sapiens
  CDR3 for beta chain variable domain of TCR clone 333454 (TRBV27, TRBJ2-1)
CASRTLGVGEQFF

SEQ ID NO: 666909 - protein, 14 aa, Homo sapiens
  CDR3 for alpha chain variable domain of TCR clone 333455 (TRAV4, TRAJ11)
CLVGEYSGYSTLTF

SEQ ID NO: 666910 - protein, 17 aa, Homo sapiens
  CDR3 for beta chain variable domain of TCR clone 333455 (TRBV2, TRBJ1-4)
CASSKRELTQGEEKLFF

SEQ ID NO: 666911 - protein, 12 aa, Homo sapiens
  CDR3 for alpha chain variable domain of TCR clone 333456 (TRAV12-3, TRAJ17)
CAMTLTGNKLTF

SEQ ID NO: 666912 - protein, 16 aa, Homo sapiens
  CDR3 for beta chain variable domain of TCR clone 333456 (TRBV6-3, TRBJ2-1)
CASSYRRGDSYNEQFF

SEQ ID NO: 666913 - protein, 13 aa, Homo sapiens
  CDR3 for alpha chain variable domain of TCR clone 333457 (TRAV13-1, TRAJ49)
CAAVVRGGNQFFF

SEQ ID NO: 666914 - protein, 16 aa, Homo sapiens
  CDR3 for beta chain variable domain of TCR clone 333457 (TRBV7-3, TRBJ2-1)
CASSLTVESSYNEQFF

SEQ ID NO: 666915 - protein, 15 aa, Homo sapiens
  CDR3 for alpha chain variable domain of TCR clone 333458 (TRAV23/DV6, TRAJ33)
CAASNSGGGNYQLIW

SEQ ID NO: 666916 - protein, 14 aa, Homo sapiens
  CDR3 for beta chain variable domain of TCR clone 333458 (TRBV7-2, TRBJ2-7)
CASRSQGAAYEQYF

SEQ ID NO: 666917 - protein, 11 aa, Homo sapiens
  CDR3 for alpha chain variable domain of TCR clone 333459 (TRAV13-1, TRAJ30)
CAASRDGKIIF

SEQ ID NO: 666918 - protein, 15 aa, Homo sapiens
  CDR3 for beta chain variable domain of TCR clone 333459 (TRBV18, TRBJ1-1)
CASSPSSWVNTEAFF

SEQ ID NO: 666919 - protein, 15 aa, Homo sapiens
  CDR3 for alpha chain variable domain of TCR clone 333460 (TRAV8-1, TRAJ42)
CAVSSYGGSQGNLIF

SEQ ID NO: 666920 - protein, 21 aa, Homo sapiens
  CDR3 for beta chain variable domain of TCR clone 333460 (TRBV5-1, TRBJ1-6)
CASSPRGGADSTGGVRSPLHF

SEQ ID NO: 666921 - protein, 15 aa, Homo sapiens
  CDR3 for alpha chain variable domain of TCR clone 333461 (TRAV26-1, TRAJ29)
CIVRVEGSGNTPIVF

SEQ ID NO: 666922 - protein, 14 aa, Homo sapiens
  CDR3 for beta chain variable domain of TCR clone 333461 (TRBV18, TRBJ2-5)
CASSPGVSQETQYS

SEQ ID NO: 666923 - protein, 14 aa, Homo sapiens
  CDR3 for alpha chain variable domain of TCR clone 333462 (TRAV8-6, TRAJ5)
CAVSVDTGRRALTF

SEQ ID NO: 666924 - protein, 11 aa, Homo sapiens
  CDR3 for beta chain variable domain of TCR clone 333462 (TRBV7-3, TRBJ2-5)
CASSLRETQYF

SEQ ID NO: 666925 - protein, 11 aa, Homo sapiens
  CDR3 for alpha chain variable domain of TCR clone 333463 (TRAV3, TRAJ21)
GALGNFNKFYF

SEQ ID NO: 666926 - protein, 16 aa, Homo sapiens
  CDR3 for beta chain variable domain of TCR clone 333463 (TRBV19, TRBJ2-1)
CASSKAGPSSYNEQFF

SEQ ID NO: 666927 - protein, 15 aa, Homo sapiens
  CDR3 for alpha chain variable domain of TCR clone 333464 (TRAV12-2, TRAJ38)
CAVSENAGNNRKLIW

SEQ ID NO: 666928 - protein, 16 aa, Homo sapiens
  CDR3 for beta chain variable domain of TCR clone 333464 (TRBV4-1, TRBJ2-7)
CASSLTAGQATYEQYF

SEQ ID NO: 666929 - protein, 13 aa, Homo sapiens
  CDR3 for alpha chain variable domain of TCR clone 333465 (TRAV21, TRAJ27)
CAARPGNAGKSTF

SEQ ID NO: 666930 - protein, 15 aa, Homo sapiens
  CDR3 for beta chain variable domain of TCR clone 333465 (TRBV7-8, TRBJ2-5)
CASSDAAGSQETQYF

SEQ ID NO: 666931 - protein, 16 aa, Homo sapiens
  CDR3 for alpha chain variable domain of TCR clone 333466 (TRAV30, TRAJ24)
CGTEIVDADSWGEFQF

SEQ ID NO: 666932 - protein, 14 aa, Homo sapiens
  CDR3 for beta chain variable domain of TCR clone 333466 (TRBV11-2, TRBJ2-7)
CASSLGAGAYEQYF

SEQ ID NO: 666933 - protein, 11 aa, Homo sapiens
  CDR3 for alpha chain variable domain of TCR clone 333467 (TRAV12-3, TRAJ49)
CVANTGNQFYF

SEQ ID NO: 666934 - protein, 12 aa, Homo sapiens
  CDR3 for beta chain variable domain of TCR clone 333467 (TRBV6-3, TRBJ2-7)
CASSEPGFEQYF

SEQ ID NO: 666935 - protein, 12 aa, Homo sapiens
  CDR3 for alpha chain variable domain of TCR clone 333468 (TRAV27, TRAJ35)
CAGADFGNVLHC

SEQ ID NO: 666936 - protein, 15 aa, Homo sapiens
  CDR3 for beta chain variable domain of TCR clone 333468 (TRBV2, TRBJ2-1)
CASSELAGSYNEQFF

SEQ ID NO: 666937 - protein, 13 aa, Homo sapiens
  CDR3 for alpha chain variable domain of TCR clone 333469 (TRAV27, TRAJ49)
CAPRPYAGNQFYF

SEQ ID NO: 666938 - protein, 16 aa, Homo sapiens
  CDR3 for beta chain variable domain of TCR clone 333469 (TRBV4-1, TRBJ1-2)
CASSQDAGQVLYGYTF

SEQ ID NO: 666939 - protein, 15 aa, Homo sapiens
  CDR3 for alpha chain variable domain of TCR clone 333470 (TRAV27, TRAJ38)
CAARRNAGNNRKLIW

SEQ ID NO: 666940 - protein, 13 aa, Homo sapiens
  CDR3 for beta chain variable domain of TCR clone 333470 (TRBV12-5, TRBJ2-3)
CACGDRQSDTRYF

SEQ ID NO: 666941 - protein, 15 aa, Homo sapiens
  CDR3 for alpha chain variable domain of TCR clone 333471 (TRAV16, TRAJ57)
CYYLITQGGSEKLVF

SEQ ID NO: 666942 - protein, 17 aa, Homo sapiens
  CDR3 for beta chain variable domain of TCR clone 333471 (TRBV24-1, TRBJ2-4)
CATSDAEARGVRNIQYF

SEQ ID NO: 666943 - protein, 16 aa, Homo sapiens
  CDR3 for alpha chain variable domain of TCR clone 333472 (TRAV12-2, TRAJ10)
CAVNRVLTGGGNKLNF

SEQ ID NO: 666944 - protein, 12 aa, Homo sapiens
  CDR3 for beta chain variable domain of TCR clone 333472 (TRBV28, TRBJ2-7)
CASSFSSYEQYF

SEQ ID NO: 666945 - protein, 17 aa, Homo sapiens
  CDR3 for alpha chain variable domain of TCR clone 333473 (TRAV4, TRAJ18)
CLVGERSVGSTLGRLYF

SEQ ID NO: 666946 - protein, 15 aa, Homo sapiens
  CDR3 for beta chain variable domain of TCR clone 333473 (TRBV11-3, TRBJ2-1)
CASSPGDREGNEQFF

SEQ ID NO: 666947 - protein, 15 aa, Homo sapiens
  CDR3 for alpha chain variable domain of TCR clone 333474 (TRAV30, TRAJ57)
CGTAIPQGGSEKLVF

SEQ ID NO: 666948 - protein, 15 aa, Homo sapiens
  CDR3 for beta chain variable domain of TCR clone 333474 (TRBV7-2, TRBJ2-1)
CASSSGLAGGNEQFF

SEQ ID NO: 666949 - protein, 12 aa, Homo sapiens
  CDR3 for alpha chain variable domain of TCR clone 333475 (TRAV4, TRAJ6)
CLAPGGSYIPTF

SEQ ID NO: 666950 - protein, 16 aa, Homo sapiens
  CDR3 for beta chain variable domain of TCR clone 333475 (TRBV28, TRBJ2-4)
CASSLIQGPLGNIQYF

SEQ ID NO: 666951 - protein, 19 aa, Homo sapiens
  CDR3 for alpha chain variable domain of TCR clone 333476 (TRAV35, TRAJ30)
CAPGGMTRSSLEKGRDFIF

SEQ ID NO: 666952 - protein, 14 aa, Homo sapiens
  CDR3 for beta chain variable domain of TCR clone 333476 (TRBV7-6, TRBJ2-1)
CASSLGGGADEQFF

SEQ ID NO: 666953 - protein, 14 aa, Homo sapiens
  CDR3 for alpha chain variable domain of TCR clone 333477 (TRAV1-1, TRAJ33)
CAVGPEDSNYQLIW

SEQ ID NO: 666954 - protein, 15 aa, Homo sapiens
  CDR3 for beta chain variable domain of TCR clone 333477 (TRBV20-1, TRBJ2-1)
CSARSPGGPGNEQFF

SEQ ID NO: 666955 - protein, 15 aa, Homo sapiens
  CDR3 for alpha chain variable domain of TCR clone 333478 (TRAV21, TRAJ53)
CAVRQSGGSNYKLKF

SEQ ID NO: 666956 - protein, 16 aa, Homo sapiens
  CDR3 for beta chain variable domain of TCR clone 333478 (TRBV19, TRBJ2-1)
CASSKAGPSSYNEQFF

SEQ ID NO: 666957 - protein, 15 aa, Homo sapiens
  CDR3 for alpha chain variable domain of TCR clone 333479 (TRAV3, TRAJ24)
CAVRDKMTAGGSCSL

SEQ ID NO: 666958 - protein, 14 aa, Homo sapiens
  CDR3 for beta chain variable domain of TCR clone 333479 (TRBV7-2, TRBJ2-3)
CASSQTGSSYTQYF

SEQ ID NO: 666959 - protein, 15 aa, Homo sapiens
  CDR3 for alpha chain variable domain of TCR clone 333480 (TRAV17, TRAJ42)
CATDHYGGSQGNLIF

SEQ ID NO: 666960 - protein, 15 aa, Homo sapiens
  CDR3 for beta chain variable domain of TCR clone 333480 (TRBV5-1, TRBJ2-2)
CASSSQGGNTGELFF

SEQ ID NO: 666961 - protein, 14 aa, Homo sapiens
  CDR3 for alpha chain variable domain of TCR clone 333481 (TRAV12-2, TRAJ40)
CAVKIPSGTYKHIF

SEQ ID NO: 666962 - protein, 17 aa, Homo sapiens
  CDR3 for beta chain variable domain of TCR clone 333481 (TRBV11-2, TRBJ2-1)
CASSLYPPGVEYNKQFF

SEQ ID NO: 666963 - protein, 14 aa, Homo sapiens
  CDR3 for alpha chain variable domain of TCR clone 333482 (TRAV8-4, TRAJ15)
WSVILNQAGTALIF

SEQ ID NO: 666964 - protein, 12 aa, Homo sapiens
  CDR3 for beta chain variable domain of TCR clone 333482 (TRBV7-9, TRBJ1-6)
CASSASESPLHF

SEQ ID NO: 666965 - protein, 14 aa, Homo sapiens
  CDR3 for alpha chain variable domain of TCR clone 333483 (TRAV1-2, TRAJ8)
CAVREDTGFQKLVF

SEQ ID NO: 666966 - protein, 12 aa, Homo sapiens
  CDR3 for beta chain variable domain of TCR clone 333483 (TRBV7-6, TRBJ2-5)
CASSLSQETQYF

SEQ ID NO: 666967 - protein, 14 aa, Homo sapiens
  CDR3 for alpha chain variable domain of TCR clone 333484 (TRAV1-2, TRAJ8)
CAVREDTGFQKLVL

SEQ ID NO: 666968 - protein, 15 aa, Homo sapiens
  CDR3 for beta chain variable domain of TCR clone 333484 (TRBV7-2, TRBJ2-3)
CASSLVVRGPDTQYF

SEQ ID NO: 666969 - protein, 12 aa, Homo sapiens
  CDR3 for alpha chain variable domain of TCR clone 333485 (TRAV3, TRAJ27)
CAVRDKAGKSTF

SEQ ID NO: 666970 - protein, 13 aa, Homo sapiens
  CDR3 for beta chain variable domain of TCR clone 333485 (TRBV27, TRBJ1-1)
CASSLSIGAEAFF

SEQ ID NO: 666971 - protein, 12 aa, Homo sapiens
  CDR3 for alpha chain variable domain of TCR clone 333486 (TRAV8-3, TRAJ15)
CAGSQAGTALIF

SEQ ID NO: 666972 - protein, 13 aa, Homo sapiens
  CDR3 for beta chain variable domain of TCR clone 333486 (TRBV11-1, TRBJ1-1)
CASSKQGRTEAFF

SEQ ID NO: 666973 - protein, 12 aa, Homo sapiens
  CDR3 for alpha chain variable domain of TCR clone 333487 (TRAV1-2, TRAJ33)
CAALDSNYQLIW

SEQ ID NO: 666974 - protein, 16 aa, Homo sapiens
  CDR3 for beta chain variable domain of TCR clone 333487 (TRBV28, TRBJ2-7)
CASSPWVATGDLSQYF

SEQ ID NO: 666975 - protein, 12 aa, Homo sapiens
  CDR3 for alpha chain variable domain of TCR clone 333488 (TRAV16, TRAJ57)
CALEGGSEKLVF

SEQ ID NO: 666976 - protein, 12 aa, Homo sapiens
  CDR3 for beta chain variable domain of TCR clone 333488 (TRBV28, TRBJ2-7)
CASSGQPYEQYF

SEQ ID NO: 666977 - protein, 14 aa, Homo sapiens
  CDR3 for alpha chain variable domain of TCR clone 333489 (TRAV21, TRAJ35)
CAVMPIGFGSVLPF

SEQ ID NO: 666978 - protein, 12 aa, Homo sapiens
  CDR3 for beta chain variable domain of TCR clone 333489 (TRBV7-9, TRBJ2-7)
CASSIKREEQYF

SEQ ID NO: 666979 - protein, 15 aa, Homo sapiens
  CDR3 for alpha chain variable domain of TCR clone 333490 (TRAV12-1, TRAJ9)
CVVSFGYTGGFKTIF

SEQ ID NO: 666980 - protein, 12 aa, Homo sapiens
  CDR3 for beta chain variable domain of TCR clone 333490 (TRBV11-3, TRBJ1-1)
CASSHRQGEAFF

SEQ ID NO: 666981 - protein, 15 aa, Homo sapiens
  CDR3 for alpha chain variable domain of TCR clone 333491 (TRAV35, TRAJ41)
CAGQLFSNSGYALNF

SEQ ID NO: 666982 - protein, 14 aa, Homo sapiens
  CDR3 for beta chain variable domain of TCR clone 333491 (TRBV7-2, TRBJ1-2)
CASSRGVTNYGYTF

SEQ ID NO: 666983 - protein, 12 aa, Homo sapiens
  CDR3 for alpha chain variable domain of TCR clone 333492 (TRAV21, TRAJ31)
CAVWGNNARLMF

SEQ ID NO: 666984 - protein, 16 aa, Homo sapiens
  CDR3 for beta chain variable domain of TCR clone 333492 (TRBV7-8, TRBJ2-5)
CASSYGPGGQKETQYF

SEQ ID NO: 666985 - protein, 14 aa, Homo sapiens
  CDR3 for alpha chain variable domain of TCR clone 333493 (TRAV38-2/DV8, TRAJ30)
CAYMDGLGGDKIIF

SEQ ID NO: 666986 - protein, 15 aa, Homo sapiens
  CDR3 for beta chain variable domain of TCR clone 333493 (TRBV7-9, TRBJ2-2)
CASRPADRDTGELFV

SEQ ID NO: 666987 - protein, 15 aa, Homo sapiens
  CDR3 for alpha chain variable domain of TCR clone 333494 (TRAV3, TRAJ22)
CAVRDRGGSARQVTF

SEQ ID NO: 666988 - protein, 13 aa, Homo sapiens
  CDR3 for beta chain variable domain of TCR clone 333494 (TRBV12-4, TRBJ1-2)
CASSLRQGKGYTF

SEQ ID NO: 666989 - protein, 16 aa, Homo sapiens
  CDR3 for alpha chain variable domain of TCR clone 333495 (TRAV12-2, TRAJ48)
CAVNPTSNFGNEKLTF

SEQ ID NO: 666990 - protein, 12 aa, Homo sapiens
  CDR3 for beta chain variable domain of TCR clone 333495 (TRBV11-2, TRBJ2-2)
CASSLGGGELFF

SEQ ID NO: 666991 - protein, 14 aa, Homo sapiens
  CDR3 for alpha chain variable domain of TCR clone 333496 (TRAV12-3, TRAJ10)
SHLPLTGGGNKLTF

SEQ ID NO: 666992 - protein, 16 aa, Homo sapiens
  CDR3 for beta chain variable domain of TCR clone 333496 (TRBV19, TRBJ2-1)
CASSKAGPGSYNEQFF

SEQ ID NO: 666993 - protein, 13 aa, Homo sapiens
  CDR3 for alpha chain variable domain of TCR clone 333497 (TRAV8-3, TRAJ47)
CAVSMEYGNKLVF

SEQ ID NO: 666994 - protein, 13 aa, Homo sapiens
  CDR3 for beta chain variable domain of TCR clone 333497 (TRBV25-1, TRBJ2-3)
CASSEWGTDTQYF

SEQ ID NO: 666995 - protein, 18 aa, Homo sapiens
  CDR3 for alpha chain variable domain of TCR clone 333498 (TRAV38-1, TRAJ40)
CDVFLCLRPTSGTYKYIF

SEQ ID NO: 666996 - protein, 14 aa, Homo sapiens
  CDR3 for beta chain variable domain of TCR clone 333498 (TRBV25-1, TRBJ1-1)
CASTHLGGNTEAFF

SEQ ID NO: 666997 - protein, 14 aa, Homo sapiens
  CDR3 for alpha chain variable domain of TCR clone 333499 (TRAV14/DV4, TRAJ15)
CAMRRDQAGTALIF

SEQ ID NO: 666998 - protein, 14 aa, Homo sapiens
  CDR3 for beta chain variable domain of TCR clone 333499 (TRBV6-6, TRBJ2-7)
CASSDSGAGYEQYF

SEQ ID NO: 666999 - protein, 12 aa, Homo sapiens
  CDR3 for alpha chain variable domain of TCR clone 333500 (TRAV13-1, TRAJ48)
CAANFGNEKFTF

SEQ ID NO: 667000 - protein, 11 aa, Homo sapiens
  CDR3 for beta chain variable domain of TCR clone 333500 (TRBV7-8, TRBJ2-7)
CASSLSLEQYF

SEQ ID NO: 667001 - protein, 15 aa, Homo sapiens
  CDR3 for alpha chain variable domain of TCR clone 333501 (TRAV26-2, TRAJ50)
CILRDEETSYDKVIF

SEQ ID NO: 667002 - protein, 17 aa, Homo sapiens
  CDR3 for beta chain variable domain of TCR clone 333501 (TRBV5-6, TRBJ1-6)
CASSLAPGDTYNSPLHF

SEQ ID NO: 667003 - protein, 18 aa, Homo sapiens
  CDR3 for alpha chain variable domain of TCR clone 333502 (TRAV20, TRAJ4)
CAVQPYYMFSGGYNKLIF

SEQ ID NO: 667004 - protein, 14 aa, Homo sapiens
  CDR3 for beta chain variable domain of TCR clone 333502 (TRBV7-3, TRBJ2-7)
CASSYDQDYYEQYF

SEQ ID NO: 667005 - protein, 14 aa, Homo sapiens
  CDR3 for alpha chain variable domain of TCR clone 333503 (TRAV20, TRAJ42)
CAVQAGGSQGNLIF

SEQ ID NO: 667006 - protein, 12 aa, Homo sapiens
  CDR3 for beta chain variable domain of TCR clone 333503 (TRBV7-6, TRBJ2-5)
CASSLSQETQYF

SEQ ID NO: 667007 - protein, 13 aa, Homo sapiens
  CDR3 for alpha chain variable domain of TCR clone 333504 (TRAV8-3, TRAJ4)
WVFYSGGHNKLIF

SEQ ID NO: 667008 - protein, 14 aa, Homo sapiens
  CDR3 for beta chain variable domain of TCR clone 333504 (TRBV7-9, TRBJ2-3)
CASSLEDGTDTQYF

SEQ ID NO: 667009 - protein, 14 aa, Homo sapiens
  CDR3 for alpha chain variable domain of TCR clone 333505 (TRAV12-2, TRAJ40)
CAVKIPSGTYKYIL

SEQ ID NO: 667010 - protein, 14 aa, Homo sapiens
  CDR3 for beta chain variable domain of TCR clone 333505 (TRBV20-1, TRBJ1-1)
CSAKTRIGGTEAFF

SEQ ID NO: 667011 - protein, 10 aa, Homo sapiens
  CDR3 for alpha chain variable domain of TCR clone 333506 (TRAV12-1, TRAJ21)
CVVNPIKFYF

SEQ ID NO: 667012 - protein, 14 aa, Homo sapiens
  CDR3 for beta chain variable domain of TCR clone 333506 (TRBV6-1, TRBJ1-3)
CASVQGGGGNTIYF

SEQ ID NO: 667013 - protein, 13 aa, Homo sapiens
  CDR3 for alpha chain variable domain of TCR clone 333507 (TRAV8-2, TRAJ43)
CVVSDQGDNDMGF

SEQ ID NO: 667014 - protein, 12 aa, Homo sapiens
  CDR3 for beta chain variable domain of TCR clone 333507 (TRBV7-9, TRBJ2-7)
CASRTGFDEQYF

SEQ ID NO: 667015 - protein, 12 aa, Homo sapiens
  CDR3 for alpha chain variable domain of TCR clone 333508 (TRAV12-1, TRAJ29)
CVADSGNTPPVF

SEQ ID NO: 667016 - protein, 12 aa, Homo sapiens
  CDR3 for beta chain variable domain of TCR clone 333508 (TRBV2, TRBJ2-7)
CASKRGSYEQYF

SEQ ID NO: 667017 - protein, 16 aa, Homo sapiens
  CDR3 for alpha chain variable domain of TCR clone 333509 (TRAV3, TRAJ37)
CAARGKGSGNTGKLIF

SEQ ID NO: 667018 - protein, 17 aa, Homo sapiens
  CDR3 for beta chain variable domain of TCR clone 333509 (TRBV7-8, TRBJ2-6)
CASSAGTGGAGANVLTF

SEQ ID NO: 667019 - protein, 13 aa, Homo sapiens
  CDR3 for alpha chain variable domain of TCR clone 333510 (TRAV8-3, TRAJ21)
CAVGAHNFNKFYF

SEQ ID NO: 667020 - protein, 11 aa, Homo sapiens
  CDR3 for beta chain variable domain of TCR clone 333510 (TRBV24-1, TRBJ1-1)
CQAKGWTEAFF

SEQ ID NO: 667021 - protein, 13 aa, Homo sapiens
  CDR3 for alpha chain variable domain of TCR clone 333511 (TRAV29/DV5, TRAJ31)
CAASRNNNARLML

SEQ ID NO: 667022 - protein, 14 aa, Homo sapiens
  CDR3 for beta chain variable domain of TCR clone 333511 (TRBV7-9, TRBJ2-2)
CASSLVQDTGELFF

SEQ ID NO: 667023 - protein, 15 aa, Homo sapiens
  CDR3 for alpha chain variable domain of TCR clone 333512 (TRAV19, TRAJ8)
CALSGPNTGFQKLVF

SEQ ID NO: 667024 - protein, 14 aa, Homo sapiens
  CDR3 for beta chain variable domain of TCR clone 333512 (TRBV11-2, TRBJ2-7)
CASSLGAGFYEQYF

SEQ ID NO: 667025 - protein, 17 aa, Homo sapiens
  CDR3 for alpha chain variable domain of TCR clone 333513 (TRAV3, TRAJ38)
CAVRDCLNAGNNRKLIW

SEQ ID NO: 667026 - protein, 14 aa, Homo sapiens
  CDR3 for beta chain variable domain of TCR clone 333513 (TRBV5-5, TRBJ1-5)
SASSGQGVDQPQHF

SEQ ID NO: 667027 - protein, 15 aa, Homo sapiens
  CDR3 for alpha chain variable domain of TCR clone 333514 (TRAV13-1, TRAJ53)
CSAHSPGGSNYKLTF

SEQ ID NO: 667028 - protein, 15 aa, Homo sapiens
  CDR3 for beta chain variable domain of TCR clone 333514 (TRBV7-2, TRBJ2-1)
CASSLVAGRYNEQFF

SEQ ID NO: 667029 - protein, 17 aa, Homo sapiens
  CDR3 for alpha chain variable domain of TCR clone 333515 (TRAV13-1, TRAJ52)
CAASSGAGGTSYGKLTF

SEQ ID NO: 667030 - protein, 14 aa, Homo sapiens
  CDR3 for beta chain variable domain of TCR clone 333515 (TRBV5-7, TRBJ1-2)
CASSLVRGDYGYTF

SEQ ID NO: 667031 - protein, 12 aa, Homo sapiens
  CDR3 for alpha chain variable domain of TCR clone 333516 (TRAV13-2, TRAJ53)
CAPLSSNYKLTF

SEQ ID NO: 667032 - protein, 18 aa, Homo sapiens
  CDR3 for beta chain variable domain of TCR clone 333516 (TRBV5-7, TRBJ2-7)
CASSARGGRQPVPYEQYF

SEQ ID NO: 667033 - protein, 12 aa, Homo sapiens
  CDR3 for alpha chain variable domain of TCR clone 333517 (TRAV12-3, TRAJ17)
CAITLTGDKLTF

SEQ ID NO: 667034 - protein, 15 aa, Homo sapiens
  CDR3 for beta chain variable domain of TCR clone 333517 (TRBV20-1, TRBJ2-7)
CSARDRVSGMDEQYF

SEQ ID NO: 667035 - protein, 15 aa, Homo sapiens
  CDR3 for alpha chain variable domain of TCR clone 333518 (TRAV13-1, TRAJ52)
CAASSPSTSYGKLTF

SEQ ID NO: 667036 - protein, 13 aa, Homo sapiens
  CDR3 for beta chain variable domain of TCR clone 333518 (TRBV29-1, TRBJ1-1)
CSVGDSRNTEDFF

SEQ ID NO: 667037 - protein, 16 aa, Homo sapiens
  CDR3 for alpha chain variable domain of TCR clone 333519 (TRAV16, TRAJ4)
CALSRMFSGGYNKLIF

SEQ ID NO: 667038 - protein, 13 aa, Homo sapiens
  CDR3 for beta chain variable domain of TCR clone 333519 (TRBV7-2, TRBJ2-5)
CASSQTSVETQYF

SEQ ID NO: 667039 - protein, 14 aa, Homo sapiens
  CDR3 for alpha chain variable domain of TCR clone 333520 (TRAV21, TRAJ48)
CAVIAHFGNEKLTF

SEQ ID NO: 667040 - protein, 16 aa, Homo sapiens
  CDR3 for beta chain variable domain of TCR clone 333520 (TRBV19, TRBJ2-1)
CASSKAGPSSYNEQFF

SEQ ID NO: 667041 - protein, 12 aa, Homo sapiens
  CDR3 for alpha chain variable domain of TCR clone 333521 (TRAV2, TRAJ40)
CVVYSGTYKYIF

SEQ ID NO: 667042 - protein, 18 aa, Homo sapiens
  CDR3 for beta chain variable domain of TCR clone 333521 (TRBV11-2, TRBJ2-3)
CASSLGGASRGAPNTQYF

SEQ ID NO: 667043 - protein, 16 aa, Homo sapiens
  CDR3 for alpha chain variable domain of TCR clone 333522 (TRAV12-2, TRAJ43)
CAGDDMRFGAGTRLTV

SEQ ID NO: 667044 - protein, 15 aa, Homo sapiens
  CDR3 for beta chain variable domain of TCR clone 333522 (TRBV5-1, TRBJ2-3)
CASSVTSGSTDTQYF

SEQ ID NO: 667045 - protein, 18 aa, Homo sapiens
  CDR3 for alpha chain variable domain of TCR clone 333523 (TRAV13-1, TRAJ52)
CAASKRSAGGTSYGKLTF

SEQ ID NO: 667046 - protein, 16 aa, Homo sapiens
  CDR3 for beta chain variable domain of TCR clone 333523 (TRBV19, TRBJ2-1)
CASSSKGTRSYNEQFF

SEQ ID NO: 667047 - protein, 14 aa, Homo sapiens
  CDR3 for alpha chain variable domain of TCR clone 333524 (TRAV17, TRAJ40)
CATALTSGAYKYIF

SEQ ID NO: 667048 - protein, 13 aa, Homo sapiens
  CDR3 for beta chain variable domain of TCR clone 333524 (TRBV27, TRBJ2-1)
CASSSGSYNEQFF

SEQ ID NO: 667049 - protein, 12 aa, Homo sapiens
  CDR3 for alpha chain variable domain of TCR clone 333525 (TRAV3, TRAJ20)
CAVRDHDYKLSF

SEQ ID NO: 667050 - protein, 17 aa, Homo sapiens
  CDR3 for beta chain variable domain of TCR clone 333525 (TRBV9, TRBJ1-6)
CASSVAGQGIHPSTLGT

SEQ ID NO: 667051 - protein, 13 aa, Homo sapiens
  CDR3 for alpha chain variable domain of TCR clone 333526 (TRAV8-3, TRAJ43)
CAVVPYNNNDMRF

SEQ ID NO: 667052 - protein, 16 aa, Homo sapiens
  CDR3 for beta chain variable domain of TCR clone 333526 (TRBV7-2, TRBJ2-5)
CASSPFPTGGEETQYC

SEQ ID NO: 667053 - protein, 15 aa, Homo sapiens
  CDR3 for alpha chain variable domain of TCR clone 333527 (TRAV26-1, TRAJ29)
FIVRVEGSGNTPLVF

SEQ ID NO: 667054 - protein, 13 aa, Homo sapiens
  CDR3 for beta chain variable domain of TCR clone 333527 (TRBV28, TRBJ1-1)
CASSKQGWTEAFF

SEQ ID NO: 667055 - protein, 15 aa, Homo sapiens
  CDR3 for alpha chain variable domain of TCR clone 333528 (TRAV26-1, TRAJ37)
CIVENGSGNTGKLIF

SEQ ID NO: 667056 - protein, 14 aa, Homo sapiens
  CDR3 for beta chain variable domain of TCR clone 333528 (TRBV25-1, TRBJ1-1)
CASTHLGGNTEAFF

SEQ ID NO: 667057 - protein, 13 aa, Homo sapiens
  CDR3 for alpha chain variable domain of TCR clone 333529 (TRAV2, TRAJ40)
FAVVTSGTYKYIF

SEQ ID NO: 667058 - protein, 14 aa, Homo sapiens
  CDR3 for beta chain variable domain of TCR clone 333529 (TRBV19, TRBJ2-1)
CAIPTFVLSGEQFF

SEQ ID NO: 667059 - protein, 15 aa, Homo sapiens
  CDR3 for alpha chain variable domain of TCR clone 333530 (TRAV27, TRAJ38)
CAARRNAGNNRKLIW

SEQ ID NO: 667060 - protein, 13 aa, Homo sapiens
  CDR3 for beta chain variable domain of TCR clone 333530 (TRBV19, TRBJ1-2)
CASSVPGQDGDTF

SEQ ID NO: 667061 - protein, 13 aa, Homo sapiens
  CDR3 for alpha chain variable domain of TCR clone 333531 (TRAV23/DV6, TRAJ6)
CAAKTEGSYIPTF

SEQ ID NO: 667062 - protein, 15 aa, Homo sapiens
  CDR3 for beta chain variable domain of TCR clone 333531 (TRBV5-1, TRBJ1-2)
CASSSYGEFDYGYTF

SEQ ID NO: 667063 - protein, 23 aa, Homo sapiens
  CDR3 for alpha chain variable domain of TCR clone 333532 (TRAV26-1, TRAJ38)
CIADNAGNNHIQNPDPAVYQLRH

SEQ ID NO: 667064 - protein, 13 aa, Homo sapiens
  CDR3 for beta chain variable domain of TCR clone 333532 (TRBV20-1, TRBJ1-1)
CSARDGGNTEAFF

SEQ ID NO: 667065 - protein, 12 aa, Homo sapiens
  CDR3 for alpha chain variable domain of TCR clone 333533 (TRAV12-1, TRAJ34)
CVVAGATDKLIF

SEQ ID NO: 667066 - protein, 14 aa, Homo sapiens
  CDR3 for beta chain variable domain of TCR clone 333533 (TRBV7-2, TRBJ2-1)
CASSPVTFYNEQFF

SEQ ID NO: 667067 - protein, 15 aa, Homo sapiens
  CDR3 for alpha chain variable domain of TCR clone 333534 (TRAV17, TRAJ4)
CATGTWSGGYNKLIF

SEQ ID NO: 667068 - protein, 15 aa, Homo sapiens
  CDR3 for beta chain variable domain of TCR clone 333534 (TRBV11-2, TRBJ1-6)
CASSLDPWAVSPLHF

SEQ ID NO: 667069 - protein, 16 aa, Homo sapiens
  CDR3 for alpha chain variable domain of TCR clone 333535 (TRAV23/DV6, TRAJ57)
CAASSALSQGGSEKLF

SEQ ID NO: 667070 - protein, 14 aa, Homo sapiens
  CDR3 for beta chain variable domain of TCR clone 333535 (TRBV11-2, TRBJ2-1)
CASSLSGPYNEQFF

SEQ ID NO: 667071 - protein, 14 aa, Homo sapiens
  CDR3 for alpha chain variable domain of TCR clone 333536 (TRAV1-2, TRAJ16)
CAVNLVSDGQKLLF

SEQ ID NO: 667072 - protein, 17 aa, Homo sapiens
  CDR3 for beta chain variable domain of TCR clone 333536 (TRBV28, TRBJ2-5)
CASSTPEGDALQETQYF

SEQ ID NO: 667073 - protein, 16 aa, Homo sapiens
  CDR3 for alpha chain variable domain of TCR clone 333537 (TRAV12-2, TRAJ28)
CAVITDSGAGGYQLTF

SEQ ID NO: 667074 - protein, 12 aa, Homo sapiens
  CDR3 for beta chain variable domain of TCR clone 333537 (TRBV9, TRBJ2-2)
CASSLVTGELFF

SEQ ID NO: 667075 - protein, 17 aa, Homo sapiens
  CDR3 for alpha chain variable domain of TCR clone 333538 (TRAV3, TRAJ6)
CAVRDGPRAGGSYIPPF

SEQ ID NO: 667076 - protein, 16 aa, Homo sapiens
  CDR3 for beta chain variable domain of TCR clone 333538 (TRBV7-8, TRBJ2-3)
CASSTEGQRETDTQYF

SEQ ID NO: 667077 - protein, 16 aa, Homo sapiens
  CDR3 for alpha chain variable domain of TCR clone 333539 (TRAV38-2/DV8, TRAJ44)
CAYRSSNTGTASKLTF

SEQ ID NO: 667078 - protein, 16 aa, Homo sapiens
  CDR3 for beta chain variable domain of TCR clone 333539 (TRBV7-3, TRBJ2-5)
CASSLMWGASQETQYF

SEQ ID NO: 667079 - protein, 14 aa, Homo sapiens
  CDR3 for alpha chain variable domain of TCR clone 333540 (TRAV12-1, TRAJ13)
CVVIDSGGYQKVSF

SEQ ID NO: 667080 - protein, 12 aa, Homo sapiens
  CDR3 for beta chain variable domain of TCR clone 333540 (TRBV24-1, TRBJ1-1)
CATLYPDTEAFF

SEQ ID NO: 667081 - protein, 20 aa, Homo sapiens
  CDR3 for alpha chain variable domain of TCR clone 333541 (TRAV26-1, TRAJ42)
CCVLLHRQTYYGGSQGNLIF

SEQ ID NO: 667082 - protein, 15 aa, Homo sapiens
  CDR3 for beta chain variable domain of TCR clone 333541 (TRBV7-9, TRBJ1-6)
CASSSPGRGNSPLHF

SEQ ID NO: 667083 - protein, 16 aa, Homo sapiens
  CDR3 for alpha chain variable domain of TCR clone 333542 (TRAV12-3, TRAJ45)
CAMGWGSGGGADGRTF

SEQ ID NO: 667084 - protein, 18 aa, Homo sapiens
  CDR3 for beta chain variable domain of TCR clone 333542 (TRBV12-4, TRBJ2-2)
CASSLVAGTRGRTGELFF

SEQ ID NO: 667085 - protein, 16 aa, Homo sapiens
  CDR3 for alpha chain variable domain of TCR clone 333543 (TRAV35, TRAJ28)
CAGQRYSGAGSYQLTF

SEQ ID NO: 667086 - protein, 12 aa, Homo sapiens
  CDR3 for beta chain variable domain of TCR clone 333543 (TRBV5-1, TRBJ1-2)
CASSQDTYGYTF

SEQ ID NO: 667087 - protein, 14 aa, Homo sapiens
  CDR3 for alpha chain variable domain of TCR clone 333544 (TRAV3, TRAJ7)
CAVREEEREQQTRF

SEQ ID NO: 667088 - protein, 15 aa, Homo sapiens
  CDR3 for beta chain variable domain of TCR clone 333544 (TRBV4-1, TRBJ1-4)
CASSDTGGANEKLFF

SEQ ID NO: 667089 - protein, 15 aa, Homo sapiens
  CDR3 for alpha chain variable domain of TCR clone 333545 (TRAV16, TRAJ16)
CSKWPGHRDGQKLLF

SEQ ID NO: 667090 - protein, 16 aa, Homo sapiens
  CDR3 for beta chain variable domain of TCR clone 333545 (TRBV7-9, TRBJ2-4)
CASTTGGAKTFSTSAP

SEQ ID NO: 667091 - protein, 15 aa, Homo sapiens
  CDR3 for alpha chain variable domain of TCR clone 333546 (TRAV8-4, TRAJ8)
CAVSDLNTGCQKLVF

SEQ ID NO: 667092 - protein, 14 aa, Homo sapiens
  CDR3 for beta chain variable domain of TCR clone 333546 (TRBV7-2, TRBJ2-3)
CASGQTGSSYTQYF

SEQ ID NO: 667093 - protein, 18 aa, Homo sapiens
  CDR3 for alpha chain variable domain of TCR clone 333547 (TRAV8-4, TRAJ52)
CAVTRANAGGTSYGKLTF

SEQ ID NO: 667094 - protein, 11 aa, Homo sapiens
  CDR3 for beta chain variable domain of TCR clone 333547 (TRBV12-4, TRBJ2-3)
CASTATDTQYF

SEQ ID NO: 667095 - protein, 12 aa, Homo sapiens
  CDR3 for alpha chain variable domain of TCR clone 333548 (TRAV35, TRAJ49)
CAGWNTGNQFYF

SEQ ID NO: 667096 - protein, 14 aa, Homo sapiens
  CDR3 for beta chain variable domain of TCR clone 333548 (TRBV13, TRBJ2-7)
CASSLKGASYEQYF

SEQ ID NO: 667097 - protein, 15 aa, Homo sapiens
  CDR3 for alpha chain variable domain of TCR clone 333549 (TRAV16, TRAJ17)
CALSGNKAAGNKLTF

SEQ ID NO: 667098 - protein, 18 aa, Homo sapiens
  CDR3 for beta chain variable domain of TCR clone 333549 (TRBV7-6, TRBJ1-6)
CASSSLPAGEYSPLTLGT

SEQ ID NO: 667099 - protein, 13 aa, Homo sapiens
  CDR3 for alpha chain variable domain of TCR clone 333550 (TRAV27, TRAJ57)
CAGFQGGSEKLVF

SEQ ID NO: 667100 - protein, 19 aa, Homo sapiens
  CDR3 for beta chain variable domain of TCR clone 333550 (TRBV5-7, TRBJ2-6)
CASSPRARGTFSGANVLTF

SEQ ID NO: 667101 - protein, 14 aa, Homo sapiens
  CDR3 for alpha chain variable domain of TCR clone 333551 (TRAV1-2, TRAJ16)
CAVNRFSDGQKLLF

SEQ ID NO: 667102 - protein, 13 aa, Homo sapiens
  CDR3 for beta chain variable domain of TCR clone 333551 (TRBV10-3, TRBJ2-7)
CASKLAVNYKRYF

SEQ ID NO: 667103 - protein, 12 aa, Homo sapiens
  CDR3 for alpha chain variable domain of TCR clone 333552 (TRAV12-2, TRAJ52)
IGGGTSYGKLTF

SEQ ID NO: 667104 - protein, 13 aa, Homo sapiens
  CDR3 for beta chain variable domain of TCR clone 333552 (TRBV15, TRBJ2-7)
CATSKTGHYEQYF

SEQ ID NO: 667105 - protein, 14 aa, Homo sapiens
  CDR3 for alpha chain variable domain of TCR clone 333553 (TRAV21, TRAJ38)
CAVMGAGNNRKLIW

SEQ ID NO: 667106 - protein, 13 aa, Homo sapiens
  CDR3 for beta chain variable domain of TCR clone 333553 (TRBV7-3, TRBJ2-5)
CASSMGFFETQYF

SEQ ID NO: 667107 - protein, 14 aa, Homo sapiens
  CDR3 for alpha chain variable domain of TCR clone 333554 (TRAV8-4, TRAJ54)
CAVSEVLGAQKLVF

SEQ ID NO: 667108 - protein, 15 aa, Homo sapiens
  CDR3 for beta chain variable domain of TCR clone 333554 (TRBV6-1, TRBJ2-6)
CASSSRPSGANALTF

SEQ ID NO: 667109 - protein, 18 aa, Homo sapiens
  CDR3 for alpha chain variable domain of TCR clone 333555 (TRAV26-1, TRAJ52)
CIVRVAGAGGTSYGKLTL

SEQ ID NO: 667110 - protein, 13 aa, Homo sapiens
  CDR3 for beta chain variable domain of TCR clone 333555 (TRBV7-8, TRBJ1-2)
CASSAQSYYGYTF

SEQ ID NO: 667111 - protein, 13 aa, Homo sapiens
  CDR3 for alpha chain variable domain of TCR clone 333556 (TRAV16, TRAJ11)
CALTQSGSSTLTF

SEQ ID NO: 667112 - protein, 14 aa, Homo sapiens
  CDR3 for beta chain variable domain of TCR clone 333556 (TRBV19, TRBJ2-7)
CASSTTRSSYEQYF

SEQ ID NO: 667113 - protein, 14 aa, Homo sapiens
  CDR3 for alpha chain variable domain of TCR clone 333557 (TRAV1-2, TRAJ16)
CAVNRFSDGQKLLF

SEQ ID NO: 667114 - protein, 13 aa, Homo sapiens
  CDR3 for beta chain variable domain of TCR clone 333557 (TRBV6-6, TRBJ2-7)
SASSPKHLAEQYF

SEQ ID NO: 667115 - protein, 19 aa, Homo sapiens
  CDR3 for alpha chain variable domain of TCR clone 333558 (TRAV26-1, TRAJ28)
CIVRVAHAYSGAGSYQPTF

SEQ ID NO: 667116 - protein, 12 aa, Homo sapiens
  CDR3 for beta chain variable domain of TCR clone 333558 (TRBV7-9, TRBJ1-5)
RASSSDQAPQHF

SEQ ID NO: 667117 - protein, 16 aa, Homo sapiens
  CDR3 for alpha chain variable domain of TCR clone 333559 (TRAV26-2, TRAJ57)
CILRDVGSGGSEKLVI

SEQ ID NO: 667118 - protein, 13 aa, Homo sapiens
  CDR3 for beta chain variable domain of TCR clone 333559 (TRBV18, TRBJ2-3)
CASSPGVTDTQYF

SEQ ID NO: 667119 - protein, 17 aa, Homo sapiens
  CDR3 for alpha chain variable domain of TCR clone 333560 (TRAV3, TRAJ28)
CAVREAYSGAGSYQLTF

SEQ ID NO: 667120 - protein, 15 aa, Homo sapiens
  CDR3 for beta chain variable domain of TCR clone 333560 (TRBV9, TRBJ1-6)
CASSVAGTGDSPLHF

SEQ ID NO: 667121 - protein, 15 aa, Homo sapiens
  CDR3 for alpha chain variable domain of TCR clone 333561 (TRAV3, TRAJ17)
CAVRDTGAAGNKLTF

SEQ ID NO: 667122 - protein, 16 aa, Homo sapiens
  CDR3 for beta chain variable domain of TCR clone 333561 (TRBV19, TRBJ2-1)
CASSKAGPSSYNEQFF

SEQ ID NO: 667123 - protein, 14 aa, Homo sapiens
  CDR3 for alpha chain variable domain of TCR clone 333562 (TRAV17, TRAJ57)
CATDPQGGSEKLGF

SEQ ID NO: 667124 - protein, 20 aa, Homo sapiens
  CDR3 for beta chain variable domain of TCR clone 333562 (TRBV28, TRBJ2-1)
CASTPIGRSPGLAGGNEQFF

SEQ ID NO: 667125 - protein, 16 aa, Homo sapiens
  CDR3 for alpha chain variable domain of TCR clone 333563 (TRAV12-1, TRAJ28)
CVVIAYSGAGSYQFTF

SEQ ID NO: 667126 - protein, 15 aa, Homo sapiens
  CDR3 for beta chain variable domain of TCR clone 333563 (TRBV14, TRBJ1-1)
CASSQEGMGFTEAFF

SEQ ID NO: 667127 - protein, 13 aa, Homo sapiens
  CDR3 for alpha chain variable domain of TCR clone 333564 (TRAV27, TRAJ57)
CRSAQGGSEKLVF

SEQ ID NO: 667128 - protein, 11 aa, Homo sapiens
  CDR3 for beta chain variable domain of TCR clone 333564 (TRBV11-2, TRBJ1-1)
CASSINTEAFI

SEQ ID NO: 667129 - protein, 13 aa, Homo sapiens
  CDR3 for alpha chain variable domain of TCR clone 333565 (TRAV12-1, TRAJ31)
CVVNDNNNPRLML

SEQ ID NO: 667130 - protein, 14 aa, Homo sapiens
  CDR3 for beta chain variable domain of TCR clone 333565 (TRBV7-2, TRBJ2-1)
CASSFGTSYGEQFF

SEQ ID NO: 667131 - protein, 15 aa, Homo sapiens
  CDR3 for alpha chain variable domain of TCR clone 333566 (TRAV12-2, TRAJ53)
CAVNGGVGSNYKLTF

SEQ ID NO: 667132 - protein, 13 aa, Homo sapiens
  CDR3 for beta chain variable domain of TCR clone 333566 (TRBV3-1, TRBJ1-1)
CASSPGVITEAFF

SEQ ID NO: 667133 - protein, 16 aa, Homo sapiens
  CDR3 for alpha chain variable domain of TCR clone 333567 (TRAV26-1, TRAJ13)
CIVSPKDSGGYQKVTF

SEQ ID NO: 667134 - protein, 13 aa, Homo sapiens
  CDR3 for beta chain variable domain of TCR clone 333567 (TRBV7-3, TRBJ1-1)
CASSQDWGAEAFF

SEQ ID NO: 667135 - protein, 12 aa, Homo sapiens
  CDR3 for alpha chain variable domain of TCR clone 333568 (TRAV17, TRAJ4)
CATDGGYDKLIF

SEQ ID NO: 667136 - protein, 13 aa, Homo sapiens
  CDR3 for beta chain variable domain of TCR clone 333568 (TRBV29-1, TRBJ2-2)
CSTTGVNTGELFF

SEQ ID NO: 667137 - protein, 11 aa, Homo sapiens
  CDR3 for alpha chain variable domain of TCR clone 333569 (TRAV30, TRAJ23)
CGTEIAGKLIF

SEQ ID NO: 667138 - protein, 15 aa, Homo sapiens
  CDR3 for beta chain variable domain of TCR clone 333569 (TRBV6-3, TRBJ2-7)
CASSSPGTVFYEQYF

SEQ ID NO: 667139 - protein, 15 aa, Homo sapiens
  CDR3 for alpha chain variable domain of TCR clone 333570 (TRAV8-4, TRAJ10)
CAVSDGPGGGNKLTF

SEQ ID NO: 667140 - protein, 13 aa, Homo sapiens
  CDR3 for beta chain variable domain of TCR clone 333570 (TRBV28, TRBJ1-3)
CASSFLGSGTIYS

SEQ ID NO: 667141 - protein, 11 aa, Homo sapiens
  CDR3 for alpha chain variable domain of TCR clone 333571 (TRAV17, TRAJ9)
CATTGGFKTIF

SEQ ID NO: 667142 - protein, 14 aa, Homo sapiens
  CDR3 for beta chain variable domain of TCR clone 333571 (TRBV6-1, TRBJ1-3)
CASVQGGGGNTIYF

SEQ ID NO: 667143 - protein, 15 aa, Homo sapiens
  CDR3 for alpha chain variable domain of TCR clone 333572 (TRAV13-2, TRAJ3)
CAENTAYSSASKIIF

SEQ ID NO: 667144 - protein, 15 aa, Homo sapiens
  CDR3 for beta chain variable domain of TCR clone 333572 (TRBV4-1, TRBJ2-2)
CASSEGQGITGELFF

SEQ ID NO: 667145 - protein, 17 aa, Homo sapiens
  CDR3 for alpha chain variable domain of TCR clone 333573 (TRAV23/DV6, TRAJ9)
CAASLSPPNTGGFKTIF

SEQ ID NO: 667146 - protein, 14 aa, Homo sapiens
  CDR3 for beta chain variable domain of TCR clone 333573 (TRBV11-2, TRBJ2-5)
CASGRTGGIETQYF

SEQ ID NO: 667147 - protein, 15 aa, Homo sapiens
  CDR3 for alpha chain variable domain of TCR clone 333574 (TRAV13-1, TRAJ17)
CAASIERAAGNKLTF

SEQ ID NO: 667148 - protein, 12 aa, Homo sapiens
  CDR3 for beta chain variable domain of TCR clone 333574 (TRBV5-7, TRBJ1-1)
CANSLGRGKALF

SEQ ID NO: 667149 - protein, 12 aa, Homo sapiens
  CDR3 for alpha chain variable domain of TCR clone 333575 (TRAV29/DV5, TRAJ49)
CAATDTGNQFYF

SEQ ID NO: 667150 - protein, 16 aa, Homo sapiens
  CDR3 for beta chain variable domain of TCR clone 333575 (TRBV11-2, TRBJ2-2)
CASSTHRGSDTGELFF

SEQ ID NO: 667151 - protein, 18 aa, Homo sapiens
  CDR3 for alpha chain variable domain of TCR clone 333576 (TRAV21, TRAJ52)
CAVRPSPAGGTSYGKLTF

SEQ ID NO: 667152 - protein, 13 aa, Homo sapiens
  CDR3 for beta chain variable domain of TCR clone 333576 (TRBV18, TRBJ1-1)
CASSPETKPEAFF

SEQ ID NO: 667153 - protein, 18 aa, Homo sapiens
  CDR3 for alpha chain variable domain of TCR clone 333577 (TRAV21, TRAJ52)
CAVRPSQAGGTSYGKLTF

SEQ ID NO: 667154 - protein, 15 aa, Homo sapiens
  CDR3 for beta chain variable domain of TCR clone 333577 (TRBV19, TRBJ1-1)
CASTSGQIQNTEALF

SEQ ID NO: 667155 - protein, 11 aa, Homo sapiens
  CDR3 for alpha chain variable domain of TCR clone 333578 (TRAV27, TRAJ20)
CAGLNDYKLSF

SEQ ID NO: 667156 - protein, 16 aa, Homo sapiens
  CDR3 for beta chain variable domain of TCR clone 333578 (TRBV27, TRBJ2-2)
CASSCRGLVRTGELFF

SEQ ID NO: 667157 - protein, 12 aa, Homo sapiens
  CDR3 for alpha chain variable domain of TCR clone 333579 (TRAV12-2, TRAJ45)
CAVTGGADRLTF

SEQ ID NO: 667158 - protein, 15 aa, Homo sapiens
  CDR3 for beta chain variable domain of TCR clone 333579 (TRBV27, TRBJ2-1)
CASSNGGGSSNEQFF

SEQ ID NO: 667159 - protein, 14 aa, Homo sapiens
  CDR3 for alpha chain variable domain of TCR clone 333580 (TRAV12-2, TRAJ29)
CAVRRNSGNTPLVF

SEQ ID NO: 667160 - protein, 13 aa, Homo sapiens
  CDR3 for beta chain variable domain of TCR clone 333580 (TRBV12-4, TRBJ2-1)
CASRHYTDNEQFF

SEQ ID NO: 667161 - protein, 14 aa, Homo sapiens
  CDR3 for alpha chain variable domain of TCR clone 333581 (TRAV16, TRAJ4)
CALHFSGGYNQLIF

SEQ ID NO: 667162 - protein, 15 aa, Homo sapiens
  CDR3 for beta chain variable domain of TCR clone 333581 (TRBV7-2, TRBJ2-7)
CASSTRLAGVDEQYF

SEQ ID NO: 667163 - protein, 18 aa, Homo sapiens
  CDR3 for alpha chain variable domain of TCR clone 333582 (TRAV6, TRAJ37)
CALRWQHRQTNLWAMDNF

SEQ ID NO: 667164 - protein, 15 aa, Homo sapiens
  CDR3 for beta chain variable domain of TCR clone 333582 (TRBV12-4, TRBJ2-5)
CASSPPTGLQETQYF

SEQ ID NO: 667165 - protein, 13 aa, Homo sapiens
  CDR3 for alpha chain variable domain of TCR clone 333583 (TRAV12-3, TRAJ6)
CANPSGGSYIPTF

SEQ ID NO: 667166 - protein, 14 aa, Homo sapiens
  CDR3 for beta chain variable domain of TCR clone 333583 (TRBV19, TRBJ1-1)
CASSRDGDATEAFF

SEQ ID NO: 667167 - protein, 14 aa, Homo sapiens
  CDR3 for alpha chain variable domain of TCR clone 333584 (TRAV23/DV6, TRAJ17)
CAARGRAAGNKLTF

SEQ ID NO: 667168 - protein, 12 aa, Homo sapiens
  CDR3 for beta chain variable domain of TCR clone 333584 (TRBV7-9, TRBJ2-3)
CASSCITDTQYF

SEQ ID NO: 667169 - protein, 11 aa, Homo sapiens
  CDR3 for alpha chain variable domain of TCR clone 333585 (TRAV3, TRAJ21)
CAVGNFNRFYF

SEQ ID NO: 667170 - protein, 14 aa, Homo sapiens
  CDR3 for beta chain variable domain of TCR clone 333585 (TRBV20-1, TRBJ2-2)
FSAPDTANTGELFF

SEQ ID NO: 667171 - protein, 15 aa, Homo sapiens
  CDR3 for alpha chain variable domain of TCR clone 333586 (TRAV40, TRAJ45)
CVLGDLGGGADGLTF

SEQ ID NO: 667172 - protein, 13 aa, Homo sapiens
  CDR3 for beta chain variable domain of TCR clone 333586 (TRBV7-9, TRBJ1-2)
CASSLKQNYGYTF

SEQ ID NO: 667173 - protein, 14 aa, Homo sapiens
  CDR3 for alpha chain variable domain of TCR clone 333587 (TRAV1-1, TRAJ30)
CAVRSLNRDDKIIF

SEQ ID NO: 667174 - protein, 13 aa, Homo sapiens
  CDR3 for beta chain variable domain of TCR clone 333587 (TRBV24-1, TRBJ1-2)
CATSGTALDGYTF

SEQ ID NO: 667175 - protein, 15 aa, Homo sapiens
  CDR3 for alpha chain variable domain of TCR clone 333588 (TRAV8-2, TRAJ44)
CVVSPNTGTASKLTF

SEQ ID NO: 667176 - protein, 12 aa, Homo sapiens
  CDR3 for beta chain variable domain of TCR clone 333588 (TRBV11-2, TRBJ2-2)
CAVPRNTGELFL

SEQ ID NO: 667177 - protein, 15 aa, Homo sapiens
  CDR3 for alpha chain variable domain of TCR clone 333589 (TRAV17, TRAJ56)
CATAANPGANSKLTF

SEQ ID NO: 667178 - protein, 14 aa, Homo sapiens
  CDR3 for beta chain variable domain of TCR clone 333589 (TRBV19, TRBJ1-5)
CASSLGTGGQPQHF

SEQ ID NO: 667179 - protein, 15 aa, Homo sapiens
  CDR3 for alpha chain variable domain of TCR clone 333590 (TRAV3, TRAJ3)
CAVRDMSSSASKIIF

SEQ ID NO: 667180 - protein, 13 aa, Homo sapiens
  CDR3 for beta chain variable domain of TCR clone 333590 (TRBV13, TRBJ2-2)
CASSGGNTGELFF

SEQ ID NO: 667181 - protein, 13 aa, Homo sapiens
  CDR3 for alpha chain variable domain of TCR clone 333591 (TRAV21, TRAJ20)
CAVGLRVDYKLSF

SEQ ID NO: 667182 - protein, 14 aa, Homo sapiens
  CDR3 for beta chain variable domain of TCR clone 333591 (TRBV19, TRBJ2-1)
CASPTLVVSGEQFF

SEQ ID NO: 667183 - protein, 14 aa, Homo sapiens
  CDR3 for alpha chain variable domain of TCR clone 333592 (TRAV1-2, TRAJ16)
CAVNRFSDGQKLLF

SEQ ID NO: 667184 - protein, 13 aa, Homo sapiens
  CDR3 for beta chain variable domain of TCR clone 333592 (TRBV10-3, TRBJ2-7)
CAAKLAVNYEQYF

SEQ ID NO: 667185 - protein, 12 aa, Homo sapiens
  CDR3 for alpha chain variable domain of TCR clone 333593 (TRAV13-2, TRAJ23)
CAERHRGGKLIF

SEQ ID NO: 667186 - protein, 15 aa, Homo sapiens
  CDR3 for beta chain variable domain of TCR clone 333593 (TRBV5-4, TRBJ2-2)
CASSRRGGGTGELFF

SEQ ID NO: 667187 - protein, 14 aa, Homo sapiens
  CDR3 for alpha chain variable domain of TCR clone 333594 (TRAV35, TRAJ33)
CAGSSRDSNYQLIW

SEQ ID NO: 667188 - protein, 15 aa, Homo sapiens
  CDR3 for beta chain variable domain of TCR clone 333594 (TRBV20-1, TRBJ2-1)
CSAESGTSGAYEQYF

SEQ ID NO: 667189 - protein, 18 aa, Homo sapiens
  CDR3 for alpha chain variable domain of TCR clone 333595 (TRAV21, TRAJ52)
CAVRPSPAGGTSYGKLTF

SEQ ID NO: 667190 - protein, 17 aa, Homo sapiens
  CDR3 for beta chain variable domain of TCR clone 333595 (TRBV13, TRBJ2-3)
CASSLSRVAGGRNTQNF

SEQ ID NO: 667191 - protein, 15 aa, Homo sapiens
  CDR3 for alpha chain variable domain of TCR clone 333596 (TRAV12-3, TRAJ6)
CAMSATTGGSYIPTF

SEQ ID NO: 667192 - protein, 13 aa, Homo sapiens
  CDR3 for beta chain variable domain of TCR clone 333596 (TRBV7-9, TRBJ1-2)
CASSLKQNYGYIF

SEQ ID NO: 667193 - protein, 14 aa, Homo sapiens
  CDR3 for alpha chain variable domain of TCR clone 333597 (TRAV17, TRAJ57)
CATDPQCGSEKLVF

SEQ ID NO: 667194 - protein, 14 aa, Homo sapiens
  CDR3 for beta chain variable domain of TCR clone 333597 (TRBV25-1, TRBJ1-1)
CASTHLGGNTESFF

SEQ ID NO: 667195 - protein, 14 aa, Homo sapiens
  CDR3 for alpha chain variable domain of TCR clone 333598 (TRAV12-2, TRAJ44)
CAVNKAGTASKLTF

SEQ ID NO: 667196 - protein, 16 aa, Homo sapiens
  CDR3 for beta chain variable domain of TCR clone 333598 (TRBV20-1, TRBJ1-4)
CSAPGQGLLTNEKLFF

SEQ ID NO: 667197 - protein, 15 aa, Homo sapiens
  CDR3 for alpha chain variable domain of TCR clone 333599 (TRAV3, TRAJ5)
CAVRDLDTGRRALTF

SEQ ID NO: 667198 - protein, 15 aa, Homo sapiens
  CDR3 for beta chain variable domain of TCR clone 333599 (TRBV7-9, TRBJ2-7)
CASQVQGPATGEQYF

SEQ ID NO: 667199 - protein, 12 aa, Homo sapiens
  CDR3 for alpha chain variable domain of TCR clone 333600 (TRAV12-1, TRAJ40)
CVVNGETYKYIF

SEQ ID NO: 667200 - protein, 12 aa, Homo sapiens
  CDR3 for beta chain variable domain of TCR clone 333600 (TRBV28, TRBJ2-3)
CASSLYRDTQYF

SEQ ID NO: 667201 - protein, 14 aa, Homo sapiens
  CDR3 for alpha chain variable domain of TCR clone 333601 (TRAV3, TRAJ13)
CAVSYSGGYQKVTL

SEQ ID NO: 667202 - protein, 15 aa, Homo sapiens
  CDR3 for beta chain variable domain of TCR clone 333601 (TRBV7-2, TRBJ1-3)
CASSLQAGGENTIYF

SEQ ID NO: 667203 - protein, 14 aa, Homo sapiens
  CDR3 for alpha chain variable domain of TCR clone 333602 (TRAV26-1, TRAJ21)
CIVRPPYNFNKFYF

SEQ ID NO: 667204 - protein, 12 aa, Homo sapiens
  CDR3 for beta chain variable domain of TCR clone 333602 (TRBV7-8, TRBJ2-7)
CASGLGDREQYF

SEQ ID NO: 667205 - protein, 14 aa, Homo sapiens
  CDR3 for alpha chain variable domain of TCR clone 333603 (TRAV12-2, TRAJ36)
CAVNPPTGANNLFF

SEQ ID NO: 667206 - protein, 13 aa, Homo sapiens
  CDR3 for beta chain variable domain of TCR clone 333603 (TRBV20-1, TRBJ1-6)
CSAPTGLGSPLHC

SEQ ID NO: 667207 - protein, 14 aa, Homo sapiens
  CDR3 for alpha chain variable domain of TCR clone 333604 (TRAV12-3, TRAJ22)
CAMSLFGSAKQLTF

SEQ ID NO: 667208 - protein, 15 aa, Homo sapiens
  CDR3 for beta chain variable domain of TCR clone 333604 (TRBV7-3, TRBJ2-1)
CASSPTGGGEVEQFF

SEQ ID NO: 667209 - protein, 21 aa, Homo sapiens
  CDR3 for alpha chain variable domain of TCR clone 333605 (TRAV1-1, TRAJ6)
CAVRREEATYLHLDEEPALLF

SEQ ID NO: 667210 - protein, 15 aa, Homo sapiens
  CDR3 for beta chain variable domain of TCR clone 333605 (TRBV6-6, TRBJ2-1)
CATRQGVSSYNEQFF

SEQ ID NO: 667211 - protein, 11 aa, Homo sapiens
  CDR3 for alpha chain variable domain of TCR clone 333606 (TRAV21, TRAJ7)
CAAYGNNRLAF

SEQ ID NO: 667212 - protein, 14 aa, Homo sapiens
  CDR3 for beta chain variable domain of TCR clone 333606 (TRBV4-1, TRBJ2-7)
CASSRTGVAFEQNF

SEQ ID NO: 667213 - protein, 15 aa, Homo sapiens
  CDR3 for alpha chain variable domain of TCR clone 333607 (TRAV8-6, TRAJ42)
CAVRRRKPRKSHLWK

SEQ ID NO: 667214 - protein, 13 aa, Homo sapiens
  CDR3 for beta chain variable domain of TCR clone 333607 (TRBV7-3, TRBJ1-1)
CASSQDWGAEAFF

SEQ ID NO: 667215 - protein, 10 aa, Homo sapiens
  CDR3 for alpha chain variable domain of TCR clone 333608 (TRAV38-1, TRAJ34)
CAFMDDKLIL

SEQ ID NO: 667216 - protein, 14 aa, Homo sapiens
  CDR3 for beta chain variable domain of TCR clone 333608 (TRBV12-5, TRBJ2-5)
CASGSRTHQETQYF

SEQ ID NO: 667217 - protein, 16 aa, Homo sapiens
  CDR3 for alpha chain variable domain of TCR clone 333609 (TRAV30, TRAJ24)
CGTEIVDADSWGKFQF

SEQ ID NO: 667218 - protein, 15 aa, Homo sapiens
  CDR3 for beta chain variable domain of TCR clone 333609 (TRBV7-8, TRBJ2-1)
CASSLHGGPYNEQFF

SEQ ID NO: 667219 - protein, 14 aa, Homo sapiens
  CDR3 for alpha chain variable domain of TCR clone 333610 (TRAV17, TRAJ15)
CATGPNQAGTALFF

SEQ ID NO: 667220 - protein, 15 aa, Homo sapiens
  CDR3 for beta chain variable domain of TCR clone 333610 (TRBV11-2, TRBJ2-2)
CASSSDRVNAGELFF

SEQ ID NO: 667221 - protein, 16 aa, Homo sapiens
  CDR3 for alpha chain variable domain of TCR clone 333611 (TRAV13-1, TRAJ17)
CAASKGVTAAGNKLTF

SEQ ID NO: 667222 - protein, 15 aa, Homo sapiens
  CDR3 for beta chain variable domain of TCR clone 333611 (TRBV20-1, TRBJ1-5)
CSAREGGYSNQPQHF

SEQ ID NO: 667223 - protein, 12 aa, Homo sapiens
  CDR3 for alpha chain variable domain of TCR clone 333612 (TRAV38-2/DV8, TRAJ43)
CAPTPGGNDMRF

SEQ ID NO: 667224 - protein, 13 aa, Homo sapiens
  CDR3 for beta chain variable domain of TCR clone 333612 (TRBV7-2, TRBJ2-2)
CQQRTGAAGELFF

SEQ ID NO: 667225 - protein, 20 aa, Homo sapiens
  CDR3 for alpha chain variable domain of TCR clone 333613 (TRAV12-3, TRAJ41)
SLFIRDSQPSDSATPEALNF

SEQ ID NO: 667226 - protein, 12 aa, Homo sapiens
  CDR3 for beta chain variable domain of TCR clone 333613 (TRBV28, TRBJ1-2)
CASSLTTGGYTF

SEQ ID NO: 667227 - protein, 14 aa, Homo sapiens
  CDR3 for alpha chain variable domain of TCR clone 333614 (TRAV13-2, TRAJ17)
CAENSKAAGNKLTF

SEQ ID NO: 667228 - protein, 17 aa, Homo sapiens
  CDR3 for beta chain variable domain of TCR clone 333614 (TRBV6-3, TRBJ2-3)
CASSLMKRMRGADTQYF

SEQ ID NO: 667229 - protein, 17 aa, Homo sapiens
  CDR3 for alpha chain variable domain of TCR clone 333615 (TRAV3, TRAJ6)
CAVRDGPRAGGSYIPTL

SEQ ID NO: 667230 - protein, 14 aa, Homo sapiens
  CDR3 for beta chain variable domain of TCR clone 333615 (TRBV7-2, TRBJ2-7)
CASSPKTSFYERYF

SEQ ID NO: 667231 - protein, 14 aa, Homo sapiens
  CDR3 for alpha chain variable domain of TCR clone 333616 (TRAV3, TRAJ26)
CAVRDYNYGQNFVF

SEQ ID NO: 667232 - protein, 14 aa, Homo sapiens
  CDR3 for beta chain variable domain of TCR clone 333616 (TRBV7-9, TRBJ2-4)
CASSLAMGGNMQYF

SEQ ID NO: 667233 - protein, 16 aa, Homo sapiens
  CDR3 for alpha chain variable domain of TCR clone 333617 (TRAV3, TRAJ37)
CAVRPHGSGNTGKLIF

SEQ ID NO: 667234 - protein, 14 aa, Homo sapiens
  CDR3 for beta chain variable domain of TCR clone 333617 (TRBV15, TRBJ2-5)
CATSIGGLGETQYF

SEQ ID NO: 667235 - protein, 11 aa, Homo sapiens
  CDR3 for alpha chain variable domain of TCR clone 333618 (TRAV3, TRAJ21)
CAVGNFNKFYF

SEQ ID NO: 667236 - protein, 12 aa, Homo sapiens
  CDR3 for beta chain variable domain of TCR clone 333618 (TRBV14, TRBJ2-5)
CASSHLNETQYF

SEQ ID NO: 667237 - protein, 13 aa, Homo sapiens
  CDR3 for alpha chain variable domain of TCR clone 333619 (TRAV16, TRAJ20)
CALGPSNDYKLSF

SEQ ID NO: 667238 - protein, 15 aa, Homo sapiens
  CDR3 for beta chain variable domain of TCR clone 333619 (TRBV5-1, TRBJ2-2)
CASSRVGSNTGELFF

SEQ ID NO: 667239 - protein, 13 aa, Homo sapiens
  CDR3 for alpha chain variable domain of TCR clone 333620 (TRAV25, TRAJ30)
YAGRVDRDDKIIF

SEQ ID NO: 667240 - protein, 17 aa, Homo sapiens
  CDR3 for beta chain variable domain of TCR clone 333620 (TRBV7-9, TRBJ2-6)
CASSFGAGYSGANVLTF

SEQ ID NO: 667241 - protein, 22 aa, Homo sapiens
  CDR3 for alpha chain variable domain of TCR clone 333621 (TRAV21, TRAJ35)
CAVMPIGFGNVPHCGSGPQVIV

SEQ ID NO: 667242 - protein, 12 aa, Homo sapiens
  CDR3 for beta chain variable domain of TCR clone 333621 (TRBV7-9, TRBJ2-7)
CASSIKREEQYF

SEQ ID NO: 667243 - protein, 14 aa, Homo sapiens
  CDR3 for alpha chain variable domain of TCR clone 333622 (TRAV21, TRAJ56)
CALAPTGANSKLAF

SEQ ID NO: 667244 - protein, 15 aa, Homo sapiens
  CDR3 for beta chain variable domain of TCR clone 333622 (TRBV27, TRBJ2-7)
CASSTAGTGSYEQYF

SEQ ID NO: 667245 - protein, 14 aa, Homo sapiens
  CDR3 for alpha chain variable domain of TCR clone 333623 (TRAV21, TRAJ21)
CAVKGFGNFNKFYF

SEQ ID NO: 667246 - protein, 13 aa, Homo sapiens
  CDR3 for beta chain variable domain of TCR clone 333623 (TRBV19, TRBJ2-5)
CASSGRAGETQYF

SEQ ID NO: 667247 - protein, 15 aa, Homo sapiens
  CDR3 for alpha chain variable domain of TCR clone 333624 (TRAV3, TRAJ22)
CAVRDRGGSARQLTF

SEQ ID NO: 667248 - protein, 15 aa, Homo sapiens
  CDR3 for beta chain variable domain of TCR clone 333624 (TRBV11-2, TRBJ1-1)
CASSSRSSLLRSLDK

SEQ ID NO: 667249 - protein, 13 aa, Homo sapiens
  CDR3 for alpha chain variable domain of TCR clone 333625 (TRAV13-1, TRAJ39)
CAASIWAGNMLTF

SEQ ID NO: 667250 - protein, 15 aa, Homo sapiens
  CDR3 for beta chain variable domain of TCR clone 333625 (TRBV7-9, TRBJ1-1)
CASSLLEQGGTEAFI

SEQ ID NO: 667251 - protein, 17 aa, Homo sapiens
  CDR3 for alpha chain variable domain of TCR clone 333626 (TRAV12-1, TRAJ42)
CVVMRMNYGGSQGNPIF

SEQ ID NO: 667252 - protein, 13 aa, Homo sapiens
  CDR3 for beta chain variable domain of TCR clone 333626 (TRBV7-2, TRBJ1-1)
CASSLARPADAFF

SEQ ID NO: 667253 - protein, 14 aa, Homo sapiens
  CDR3 for alpha chain variable domain of TCR clone 333627 (TRAV2, TRAJ9)
CAVEDRSGGFKTIF

SEQ ID NO: 667254 - protein, 17 aa, Homo sapiens
  CDR3 for beta chain variable domain of TCR clone 333627 (TRBV7-9, TRBJ2-4)
CASSPGTGHLAKNIQYF

SEQ ID NO: 667255 - protein, 11 aa, Homo sapiens
  CDR3 for alpha chain variable domain of TCR clone 333628 (TRAV2, TRAJ13)
CASGVYQKVTF

SEQ ID NO: 667256 - protein, 14 aa, Homo sapiens
  CDR3 for beta chain variable domain of TCR clone 333628 (TRBV7-3, TRBJ2-1)
CASSLAGGTNEQFF

SEQ ID NO: 667257 - protein, 15 aa, Homo sapiens
  CDR3 for alpha chain variable domain of TCR clone 333629 (TRAV12-1, TRAJ4)
CVVNPFSGGYYKLIF

SEQ ID NO: 667258 - protein, 16 aa, Homo sapiens
  CDR3 for beta chain variable domain of TCR clone 333629 (TRBV5-1, TRBJ1-1)
CASSKTGTEVGTEAFF

SEQ ID NO: 667259 - protein, 14 aa, Homo sapiens
  CDR3 for alpha chain variable domain of TCR clone 333630 (TRAV12-2, TRAJ36)
CAVNPPTGTNNLFF

SEQ ID NO: 667260 - protein, 13 aa, Homo sapiens
  CDR3 for beta chain variable domain of TCR clone 333630 (TRBV20-1, TRBJ1-6)
CSAPTGLGSPLHF

SEQ ID NO: 667261 - protein, 16 aa, Homo sapiens
  CDR3 for alpha chain variable domain of TCR clone 333631 (TRAV30, TRAJ42)
CGTSKNYGGSQGNPIF

SEQ ID NO: 667262 - protein, 14 aa, Homo sapiens
  CDR3 for beta chain variable domain of TCR clone 333631 (TRBV19, TRBJ1-5)
CASNSYGTHQPQHF

SEQ ID NO: 667263 - protein, 16 aa, Homo sapiens
  CDR3 for alpha chain variable domain of TCR clone 333632 (TRAV3, TRAJ37)
CAVRPHGTGNTGRLIF

SEQ ID NO: 667264 - protein, 15 aa, Homo sapiens
  CDR3 for beta chain variable domain of TCR clone 333632 (TRBV5-5, TRBJ2-7)
CASSLAAPLSYEQYF

SEQ ID NO: 667265 - protein, 14 aa, Homo sapiens
  CDR3 for alpha chain variable domain of TCR clone 333633 (TRAV29/DV5, TRAJ36)
CAARRKTGANNLSF

SEQ ID NO: 667266 - protein, 12 aa, Homo sapiens
  CDR3 for beta chain variable domain of TCR clone 333633 (TRBV14, TRBJ2-5)
CASSQLKETQYF

SEQ ID NO: 667267 - protein, 13 aa, Homo sapiens
  CDR3 for alpha chain variable domain of TCR clone 333634 (TRAV13-2, TRAJ48)
CAEMDFGNEKLTF

SEQ ID NO: 667268 - protein, 15 aa, Homo sapiens
  CDR3 for beta chain variable domain of TCR clone 333634 (TRBV7-9, TRBJ1-6)
CSSSSPGRGNSPLHF

SEQ ID NO: 667269 - protein, 14 aa, Homo sapiens
  CDR3 for alpha chain variable domain of TCR clone 333635 (TRAV38-1, TRAJ45)
CAYYSGGGADGLTF

SEQ ID NO: 667270 - protein, 15 aa, Homo sapiens
  CDR3 for beta chain variable domain of TCR clone 333635 (TRBV7-6, TRBJ2-1)
CASILGGQSHNEQFF

SEQ ID NO: 667271 - protein, 14 aa, Homo sapiens
  CDR3 for alpha chain variable domain of TCR clone 333636 (TRAV36/DV7, TRAJ13)
WGSGENGGYQKVTY

SEQ ID NO: 667272 - protein, 15 aa, Homo sapiens
  CDR3 for beta chain variable domain of TCR clone 333636 (TRBV19, TRBJ2-1)
CASSTGTSSYNEQFF

SEQ ID NO: 667273 - protein, 16 aa, Homo sapiens
  CDR3 for alpha chain variable domain of TCR clone 333637 (TRAV3, TRAJ10)
CAVRDMRAGGGNKPTF

SEQ ID NO: 667274 - protein, 15 aa, Homo sapiens
  CDR3 for beta chain variable domain of TCR clone 333637 (TRBV15, TRBJ1-5)
CATSTTGVVNQPQHF

SEQ ID NO: 667275 - protein, 14 aa, Homo sapiens
  CDR3 for alpha chain variable domain of TCR clone 333638 (TRAV16, TRAJ15)
CALSFNQAGTALIF

SEQ ID NO: 667276 - protein, 15 aa, Homo sapiens
  CDR3 for beta chain variable domain of TCR clone 333638 (TRBV7-9, TRBJ1-6)
CASSSPGRGNSPLHF

SEQ ID NO: 667277 - protein, 13 aa, Homo sapiens
  CDR3 for alpha chain variable domain of TCR clone 333639 (TRAV13-1, TRAJ10)
CAALEGGGNKLTF

SEQ ID NO: 667278 - protein, 13 aa, Homo sapiens
  CDR3 for beta chain variable domain of TCR clone 333639 (TRBV7-9, TRBJ1-2)
CASSVKQNYGYTF

SEQ ID NO: 667279 - protein, 15 aa, Homo sapiens
  CDR3 for alpha chain variable domain of TCR clone 333640 (TRAV26-1, TRAJ22)
CIVRVSFWFCKATDL

SEQ ID NO: 667280 - protein, 13 aa, Homo sapiens
  CDR3 for beta chain variable domain of TCR clone 333640 (TRBV12-4, TRBJ1-5)
CASSSRSYQPQHF

SEQ ID NO: 667281 - protein, 17 aa, Homo sapiens
  CDR3 for alpha chain variable domain of TCR clone 333641 (TRAV4, )
CLVDIQNPDPAVYQLRD

SEQ ID NO: 667282 - protein, 15 aa, Homo sapiens
  CDR3 for beta chain variable domain of TCR clone 333641 (TRBV20-1, TRBJ1-5)
CSARVGRVVRQPQHF

SEQ ID NO: 667283 - protein, 11 aa, Homo sapiens
  CDR3 for alpha chain variable domain of TCR clone 333642 (TRAV2, TRAJ21)
CAVFNFNKFYF

SEQ ID NO: 667284 - protein, 16 aa, Homo sapiens
  CDR3 for beta chain variable domain of TCR clone 333642 (TRBV4-1, TRBJ1-2)
CASSQDAGQVLYGYTF

SEQ ID NO: 667285 - protein, 16 aa, Homo sapiens
  CDR3 for alpha chain variable domain of TCR clone 333643 (TRAV35, TRAJ37)
CWAFLRGSSNTGKIIF

SEQ ID NO: 667286 - protein, 13 aa, Homo sapiens
  CDR3 for beta chain variable domain of TCR clone 333643 (TRBV2, TRBJ1-2)
CASSVRGNYGYTF

SEQ ID NO: 667287 - protein, 13 aa, Homo sapiens
  CDR3 for alpha chain variable domain of TCR clone 333644 (TRAV23/DV6, TRAJ22)
CAPYSGSARQLTF

SEQ ID NO: 667288 - protein, 14 aa, Homo sapiens
  CDR3 for beta chain variable domain of TCR clone 333644 (TRBV11-1, TRBJ2-4)
CASSPVIGKNIQYF

SEQ ID NO: 667289 - protein, 10 aa, Homo sapiens
  CDR3 for alpha chain variable domain of TCR clone 333645 (TRAV3, TRAJ20)
CAVRPSLTTT

SEQ ID NO: 667290 - protein, 16 aa, Homo sapiens
  CDR3 for beta chain variable domain of TCR clone 333645 (TRBV12-5, TRBJ2-5)
CASGPRTSGNQETQYF

SEQ ID NO: 667291 - protein, 14 aa, Homo sapiens
  CDR3 for alpha chain variable domain of TCR clone 333646 (TRAV29/DV5, TRAJ45)
CAPYSGGGADGLTF

SEQ ID NO: 667292 - protein, 15 aa, Homo sapiens
  CDR3 for beta chain variable domain of TCR clone 333646 (TRBV7-2, TRBJ2-3)
CASSSTGLETDTQYF

SEQ ID NO: 667293 - protein, 13 aa, Homo sapiens
  CDR3 for alpha chain variable domain of TCR clone 333647 (TRAV13-2, TRAJ48)
FAEMDFGNEKLTF

SEQ ID NO: 667294 - protein, 15 aa, Homo sapiens
  CDR3 for beta chain variable domain of TCR clone 333647 (TRBV7-9, TRBJ1-6)
CASSSPGRGNSHLHF

SEQ ID NO: 667295 - protein, 15 aa, Homo sapiens
  CDR3 for alpha chain variable domain of TCR clone 333648 (TRAV3, TRAJ22)
CAVRNRGGSARQLTF

SEQ ID NO: 667296 - protein, 16 aa, Homo sapiens
  CDR3 for beta chain variable domain of TCR clone 333648 (TRBV5-4, TRBJ2-3)
CASQQPGAGGADTQYF

SEQ ID NO: 667297 - protein, 16 aa, Homo sapiens
  CDR3 for alpha chain variable domain of TCR clone 333649 (TRAV1-2, TRAJ10)
CAVRGVLTGGGNKLTF

SEQ ID NO: 667298 - protein, 14 aa, Homo sapiens
  CDR3 for beta chain variable domain of TCR clone 333649 (TRBV27, TRBJ2-5)
CASSSLKGWETQYF

SEQ ID NO: 667299 - protein, 17 aa, Homo sapiens
  CDR3 for alpha chain variable domain of TCR clone 333650 (TRAV3, TRAJ6)
CAVRDGPRAGGSYIPTF

SEQ ID NO: 667300 - protein, 17 aa, Homo sapiens
  CDR3 for beta chain variable domain of TCR clone 333650 (TRBV20-1, TRBJ2-1)
CSASSSGLAGSYNEQFY

SEQ ID NO: 667301 - protein, 11 aa, Homo sapiens
  CDR3 for alpha chain variable domain of TCR clone 333651 (TRAV3, TRAJ21)
CAVGNFNKFCF

SEQ ID NO: 667302 - protein, 13 aa, Homo sapiens
  CDR3 for beta chain variable domain of TCR clone 333651 (TRBV20-1, TRBJ2-5)
CSARGDYQETQYF

SEQ ID NO: 667303 - protein, 15 aa, Homo sapiens
  CDR3 for alpha chain variable domain of TCR clone 333652 (TRAV35, TRAJ52)
CAGPRGGTSYGKLTF

SEQ ID NO: 667304 - protein, 14 aa, Homo sapiens
  CDR3 for beta chain variable domain of TCR clone 333652 (TRBV20-1, TRBJ2-7)
CSAWTDLSSYEQYF

SEQ ID NO: 667305 - protein, 16 aa, Homo sapiens
  CDR3 for alpha chain variable domain of TCR clone 333653 (TRAV30, TRAJ24)
CGTEIVDADSWGKFQF

SEQ ID NO: 667306 - protein, 14 aa, Homo sapiens
  CDR3 for beta chain variable domain of TCR clone 333653 (TRBV4-2, TRBJ2-7)
CASSQDGRKGEQYF

SEQ ID NO: 667307 - protein, 17 aa, Homo sapiens
  CDR3 for alpha chain variable domain of TCR clone 333654 (TRAV13-1, TRAJ28)
CAASPPYSGAGSYQLTF

SEQ ID NO: 667308 - protein, 20 aa, Homo sapiens
  CDR3 for beta chain variable domain of TCR clone 333654 (TRBV7-8, TRBJ2-2)
CASSHLFPGPTIHITGELFF

SEQ ID NO: 667309 - protein, 13 aa, Homo sapiens
  CDR3 for alpha chain variable domain of TCR clone 333655 (TRAV17, TRAJ6)
CATGFGGSYIPTF

SEQ ID NO: 667310 - protein, 14 aa, Homo sapiens
  CDR3 for beta chain variable domain of TCR clone 333655 (TRBV5-1, TRBJ2-5)
CASSFGGSQETQFF

SEQ ID NO: 667311 - protein, 13 aa, Homo sapiens
  CDR3 for alpha chain variable domain of TCR clone 333656 (TRAV20, TRAJ49)
CAVQARTGNKLYF

SEQ ID NO: 667312 - protein, 14 aa, Homo sapiens
  CDR3 for beta chain variable domain of TCR clone 333656 (TRBV5-1, TRBJ1-1)
CAGSLQGASTEAFF

SEQ ID NO: 667313 - protein, 12 aa, Homo sapiens
  CDR3 for alpha chain variable domain of TCR clone 333657 (TRAV12-3, TRAJ39)
CAIENAGNMLTF

SEQ ID NO: 667314 - protein, 14 aa, Homo sapiens
  CDR3 for beta chain variable domain of TCR clone 333657 (TRBV19, TRBJ2-1)
CARGARSFQWEQFV

SEQ ID NO: 667315 - protein, 13 aa, Homo sapiens
  CDR3 for alpha chain variable domain of TCR clone 333658 (TRAV2, TRAJ15)
CAVASQAGTALIF

SEQ ID NO: 667316 - protein, 14 aa, Homo sapiens
  CDR3 for beta chain variable domain of TCR clone 333658 (TRBV20-1, TRBJ1-1)
CSAQTRIGGTEAVF

SEQ ID NO: 667317 - protein, 10 aa, Homo sapiens
  CDR3 for alpha chain variable domain of TCR clone 333659 (TRAV12-2, TRAJ20)
CAVYLYKLSF

SEQ ID NO: 667318 - protein, 14 aa, Homo sapiens
  CDR3 for beta chain variable domain of TCR clone 333659 (TRBV10-3, TRBJ2-2)
CANSEVSHSGELFF

SEQ ID NO: 667319 - protein, 13 aa, Homo sapiens
  CDR3 for alpha chain variable domain of TCR clone 333660 (TRAV2, TRAJ29)
CADQNSGNTPLVF

SEQ ID NO: 667320 - protein, 14 aa, Homo sapiens
  CDR3 for beta chain variable domain of TCR clone 333660 (TRBV7-9, TRBJ2-4)
CASSLAMGGNIQYF

SEQ ID NO: 667321 - protein, 15 aa, Homo sapiens
  CDR3 for alpha chain variable domain of TCR clone 333661 (TRAV12-3, TRAJ49)
CAMAVTPNTGNQFYF

SEQ ID NO: 667322 - protein, 14 aa, Homo sapiens
  CDR3 for beta chain variable domain of TCR clone 333661 (TRBV7-8, TRBJ2-3)
CASSLEAGTDTEYF

SEQ ID NO: 667323 - protein, 15 aa, Homo sapiens
  CDR3 for alpha chain variable domain of TCR clone 333662 (TRAV17, TRAJ22)
CATAPISGSARQLTF

SEQ ID NO: 667324 - protein, 14 aa, Homo sapiens
  CDR3 for beta chain variable domain of TCR clone 333662 (TRBV20-1, TRBJ1-1)
CSAQTRIGGTEAFF

SEQ ID NO: 667325 - protein, 14 aa, Homo sapiens
  CDR3 for alpha chain variable domain of TCR clone 333663 (TRAV12-2, TRAJ13)
CAVKKTGGYQKVTF

SEQ ID NO: 667326 - protein, 16 aa, Homo sapiens
  CDR3 for beta chain variable domain of TCR clone 333663 (TRBV5-1, TRBJ2-5)
CASSLTTSLGKETQYF

SEQ ID NO: 667327 - protein, 16 aa, Homo sapiens
  CDR3 for alpha chain variable domain of TCR clone 333664 (TRAV30, TRAJ24)
CGTEIVDDDSWGKFQF

SEQ ID NO: 667328 - protein, 15 aa, Homo sapiens
  CDR3 for beta chain variable domain of TCR clone 333664 (TRBV9, TRBJ2-1)
CASSLAGSSYNEQFF

SEQ ID NO: 667329 - protein, 13 aa, Homo sapiens
  CDR3 for alpha chain variable domain of TCR clone 333665 (TRAV36/DV7, TRAJ34)
CAVGEVNTDKLIF

SEQ ID NO: 667330 - protein, 12 aa, Homo sapiens
  CDR3 for beta chain variable domain of TCR clone 333665 (TRBV12-4, TRBJ2-3)
CASSSTTDTQYF

SEQ ID NO: 667331 - protein, 12 aa, Homo sapiens
  CDR3 for alpha chain variable domain of TCR clone 333666 (TRAV2, TRAJ10)
CASTGGGNKLTF

SEQ ID NO: 667332 - protein, 14 aa, Homo sapiens
  CDR3 for beta chain variable domain of TCR clone 333666 (TRBV7-2, TRBJ2-2)
CASRGQGAAGELFV

SEQ ID NO: 667333 - protein, 23 aa, Homo sapiens
  CDR3 for alpha chain variable domain of TCR clone 333667 (TRAV8-4, TRAJ38)
CARLNAGNNHIQNPDPAVCQLRD

SEQ ID NO: 667334 - protein, 14 aa, Homo sapiens
  CDR3 for beta chain variable domain of TCR clone 333667 (TRBV7-8, TRBJ2-3)
CASSLEAGTDTQYF

SEQ ID NO: 667335 - protein, 14 aa, Homo sapiens
  CDR3 for alpha chain variable domain of TCR clone 333668 (TRAV12-2, TRAJ45)
CALQERGGADGLTF

SEQ ID NO: 667336 - protein, 14 aa, Homo sapiens
  CDR3 for beta chain variable domain of TCR clone 333668 (TRBV18, TRBJ1-5)
CASSPGNSNQPQHF

SEQ ID NO: 667337 - protein, 14 aa, Homo sapiens
  CDR3 for alpha chain variable domain of TCR clone 333669 (TRAV1-2, TRAJ8)
CAVREDTGFQKRVS

SEQ ID NO: 667338 - protein, 15 aa, Homo sapiens
  CDR3 for beta chain variable domain of TCR clone 333669 (TRBV6-3, TRBJ2-7)
CASSSPGTVFYEQYF

SEQ ID NO: 667339 - protein, 14 aa, Homo sapiens
  CDR3 for alpha chain variable domain of TCR clone 333670 (TRAV3, TRAJ7)
CAVREEEREQQTRF

SEQ ID NO: 667340 - protein, 12 aa, Homo sapiens
  CDR3 for beta chain variable domain of TCR clone 333670 (TRBV6-3, TRBJ2-7)
CDSSLTPYEQYF

SEQ ID NO: 667341 - protein, 12 aa, Homo sapiens
  CDR3 for alpha chain variable domain of TCR clone 333671 (TRAV12-2, TRAJ10)
WGVTGGGNKLTF

SEQ ID NO: 667342 - protein, 15 aa, Homo sapiens
  CDR3 for beta chain variable domain of TCR clone 333671 (TRBV7-2, TRBJ1-2)
CASSPRAGWNYGYTF

SEQ ID NO: 667343 - protein, 16 aa, Homo sapiens
  CDR3 for alpha chain variable domain of TCR clone 333672 (TRAV2, TRAJ4)
CAVEDRFSGGYNKMIF

SEQ ID NO: 667344 - protein, 13 aa, Homo sapiens
  CDR3 for beta chain variable domain of TCR clone 333672 (TRBV7-7, TRBJ2-5)
CASSRSGQETQYF

SEQ ID NO: 667345 - protein, 14 aa, Homo sapiens
  CDR3 for alpha chain variable domain of TCR clone 333673 (TRAV12-2, TRAJ40)
CAVKIPSGTYKYIF

SEQ ID NO: 667346 - protein, 15 aa, Homo sapiens
  CDR3 for beta chain variable domain of TCR clone 333673 (TRBV7-9, TRBJ1-1)
CASSLLEQGGTEAFF

SEQ ID NO: 667347 - protein, 12 aa, Homo sapiens
  CDR3 for alpha chain variable domain of TCR clone 333674 (TRAV25, TRAJ29)
CAGPRGNTPLVF

SEQ ID NO: 667348 - protein, 14 aa, Homo sapiens
  CDR3 for beta chain variable domain of TCR clone 333674 (TRBV2, TRBJ1-6)
CALSPSDPRSPLHF

SEQ ID NO: 667349 - protein, 14 aa, Homo sapiens
  CDR3 for alpha chain variable domain of TCR clone 333675 (TRAV21, TRAJ38)
CAVANAGNNRKLIW

SEQ ID NO: 667350 - protein, 16 aa, Homo sapiens
  CDR3 for beta chain variable domain of TCR clone 333675 (TRBV5-4, TRBJ2-1)
CASSLALAGTYNEQFF

SEQ ID NO: 667351 - protein, 14 aa, Homo sapiens
  CDR3 for alpha chain variable domain of TCR clone 333676 (TRAV20, TRAJ22)
CAVALGGSARQLTF

SEQ ID NO: 667352 - protein, 15 aa, Homo sapiens
  CDR3 for beta chain variable domain of TCR clone 333676 (TRBV7-2, TRBJ1-1)
CASSFAGDRGTEAFF

SEQ ID NO: 667353 - protein, 12 aa, Homo sapiens
  CDR3 for alpha chain variable domain of TCR clone 333677 (TRAV13-2, TRAJ42)
VHPGGSQGNLIF

SEQ ID NO: 667354 - protein, 14 aa, Homo sapiens
  CDR3 for beta chain variable domain of TCR clone 333677 (TRBV19, TRBJ2-1)
CASPTFVLSGEQFF

SEQ ID NO: 667355 - protein, 14 aa, Homo sapiens
  CDR3 for alpha chain variable domain of TCR clone 333678 (TRAV2, TRAJ9)
CAVDPNTGGFKTIF

SEQ ID NO: 667356 - protein, 21 aa, Homo sapiens
  CDR3 for beta chain variable domain of TCR clone 333678 (TRBV7-2, TRBJ2-7)
RRTRPCISVPAALTSFYEQYF

SEQ ID NO: 667357 - protein, 15 aa, Homo sapiens
  CDR3 for alpha chain variable domain of TCR clone 333679 (TRAV12-1, TRAJ44)
CVADLPTGTASKLTF

SEQ ID NO: 667358 - protein, 13 aa, Homo sapiens
  CDR3 for beta chain variable domain of TCR clone 333679 (TRBV6-5, TRBJ2-5)
CASSPEGGETQYF

SEQ ID NO: 667359 - protein, 13 aa, Homo sapiens
  CDR3 for alpha chain variable domain of TCR clone 333680 (TRAV26-2, TRAJ43)
CILRDVNNNDMRF

SEQ ID NO: 667360 - protein, 15 aa, Homo sapiens
  CDR3 for beta chain variable domain of TCR clone 333680 (TRBV7-2, TRBJ2-1)
CASTHGTGIYNEQFF

SEQ ID NO: 667361 - protein, 14 aa, Homo sapiens
  CDR3 for alpha chain variable domain of TCR clone 333681 (TRAV3, TRAJ36)
CAVRDGTGANNVFF

SEQ ID NO: 667362 - protein, 16 aa, Homo sapiens
  CDR3 for beta chain variable domain of TCR clone 333681 (TRBV7-3, TRBJ2-5)
CASIQPGGSVQETQYF

SEQ ID NO: 667363 - protein, 14 aa, Homo sapiens
  CDR3 for alpha chain variable domain of TCR clone 333682 (TRAV4, TRAJ17)
CLVGDMAAGNKLTF

SEQ ID NO: 667364 - protein, 14 aa, Homo sapiens
  CDR3 for beta chain variable domain of TCR clone 333682 (TRBV19, TRBJ2-1)
CASPTFVLSGEQFF

SEQ ID NO: 667365 - protein, 11 aa, Homo sapiens
  CDR3 for alpha chain variable domain of TCR clone 333683 (TRAV1-1, TRAJ23)
CAVRQGGKLIF

SEQ ID NO: 667366 - protein, 15 aa, Homo sapiens
  CDR3 for beta chain variable domain of TCR clone 333683 (TRBV7-2, TRBJ2-1)
CASSLVGSSYNEQFF

SEQ ID NO: 667367 - protein, 17 aa, Homo sapiens
  CDR3 for alpha chain variable domain of TCR clone 333684 (TRAV8-3, )
CAVDIQNPDPAVYQLRD

SEQ ID NO: 667368 - protein, 14 aa, Homo sapiens
  CDR3 for beta chain variable domain of TCR clone 333684 (TRBV5-1, TRBJ2-7)
CASSRGESLYEQYF

SEQ ID NO: 667369 - protein, 16 aa, Homo sapiens
  CDR3 for alpha chain variable domain of TCR clone 333685 (TRAV21, TRAJ17)
CAVRPGEGAAGNKLTF

SEQ ID NO: 667370 - protein, 16 aa, Homo sapiens
  CDR3 for beta chain variable domain of TCR clone 333685 (TRBV2, TRBJ2-7)
CASSEPWTGPSYEQYF

SEQ ID NO: 667371 - protein, 13 aa, Homo sapiens
  CDR3 for alpha chain variable domain of TCR clone 333686 (TRAV29/DV5, TRAJ49)
CAASTNTGNLFYF

SEQ ID NO: 667372 - protein, 13 aa, Homo sapiens
  CDR3 for beta chain variable domain of TCR clone 333686 (TRBV7-2, TRBJ1-4)
CASSLAGLEKLFF

SEQ ID NO: 667373 - protein, 14 aa, Homo sapiens
  CDR3 for alpha chain variable domain of TCR clone 333687 (TRAV8-4, TRAJ13)
CAVTLSGGYQKVTF

SEQ ID NO: 667374 - protein, 11 aa, Homo sapiens
  CDR3 for beta chain variable domain of TCR clone 333687 (TRBV7-2, TRBJ1-2)
CASSQTGQLMA

SEQ ID NO: 667375 - protein, 10 aa, Homo sapiens
  CDR3 for alpha chain variable domain of TCR clone 333688 (TRAV8-4, TRAJ43)
WAVSADDMRF

SEQ ID NO: 667376 - protein, 15 aa, Homo sapiens
  CDR3 for beta chain variable domain of TCR clone 333688 (TRBV28, TRBJ2-1)
CASSGLAEVDNEQFF

SEQ ID NO: 667377 - protein, 16 aa, Homo sapiens
  CDR3 for alpha chain variable domain of TCR clone 333689 (TRAV4, TRAJ18)
CCVLLIGGSTLGGLYF

SEQ ID NO: 667378 - protein, 16 aa, Homo sapiens
  CDR3 for beta chain variable domain of TCR clone 333689 (TRBV7-6, TRBJ1-6)
CASSLSSRIGDSPLHF

SEQ ID NO: 667379 - protein, 18 aa, Homo sapiens
  CDR3 for alpha chain variable domain of TCR clone 333690 (TRAV9-2, TRAJ52)
CALSRHNAGGTSYGKLTF

SEQ ID NO: 667380 - protein, 14 aa, Homo sapiens
  CDR3 for beta chain variable domain of TCR clone 333690 (TRBV7-3, TRBJ1-1)
CASSLKGGNTEAFF

SEQ ID NO: 667381 - protein, 13 aa, Homo sapiens
  CDR3 for alpha chain variable domain of TCR clone 333691 (TRAV12-2, TRAJ15)
CAVFNQAGTALIF

SEQ ID NO: 667382 - protein, 12 aa, Homo sapiens
  CDR3 for beta chain variable domain of TCR clone 333691 (TRBV3-1, TRBJ2-5)
CASSQRGETQYF

SEQ ID NO: 667383 - protein, 22 aa, Homo sapiens
  CDR3 for alpha chain variable domain of TCR clone 333692 (TRAV26-1, TRAJ30)
CIVRVRTEMTRSSLEKGNEFIF

SEQ ID NO: 667384 - protein, 18 aa, Homo sapiens
  CDR3 for beta chain variable domain of TCR clone 333692 (TRBV4-1, TRBJ1-5)
CASSQDPRGQGLNQPQHF

SEQ ID NO: 667385 - protein, 14 aa, Homo sapiens
  CDR3 for alpha chain variable domain of TCR clone 333693 (TRAV12-2, TRAJ17)
CAVLFKAAGNKLTF

SEQ ID NO: 667386 - protein, 13 aa, Homo sapiens
  CDR3 for beta chain variable domain of TCR clone 333693 (TRBV24-1, TRBJ2-3)
CATSTGGTDTQYF

SEQ ID NO: 667387 - protein, 13 aa, Homo sapiens
  CDR3 for alpha chain variable domain of TCR clone 333694 (TRAV17, TRAJ30)
CAPSLNRDDKIIF

SEQ ID NO: 667388 - protein, 13 aa, Homo sapiens
  CDR3 for beta chain variable domain of TCR clone 333694 (TRBV3-1, TRBJ1-4)
CASSQDRGEKLFF

SEQ ID NO: 667389 - protein, 14 aa, Homo sapiens
  CDR3 for alpha chain variable domain of TCR clone 333695 (TRAV8-4, TRAJ54)
CAVSEVLGAQKLVF

SEQ ID NO: 667390 - protein, 17 aa, Homo sapiens
  CDR3 for beta chain variable domain of TCR clone 333695 (TRBV4-1, TRBJ1-4)
CASSQEGPRGVEEQLFF

SEQ ID NO: 667391 - protein, 13 aa, Homo sapiens
  CDR3 for alpha chain variable domain of TCR clone 333696 (TRAV38-2/DV8, TRAJ56)
CADQSRANSKLTF

SEQ ID NO: 667392 - protein, 16 aa, Homo sapiens
  CDR3 for beta chain variable domain of TCR clone 333696 (TRBV28, TRBJ1-1)
CASSSGGQPVATDAFF

SEQ ID NO: 667393 - protein, 15 aa, Homo sapiens
  CDR3 for alpha chain variable domain of TCR clone 333697 (TRAV8-4, TRAJ7)
CAVSGGNYGNNRLAF

SEQ ID NO: 667394 - protein, 11 aa, Homo sapiens
  CDR3 for beta chain variable domain of TCR clone 333697 (TRBV20-1, TRBJ2-1)
FSLSSGSEQFF

SEQ ID NO: 667395 - protein, 12 aa, Homo sapiens
  CDR3 for alpha chain variable domain of TCR clone 333698 (TRAV12-2, TRAJ8)
CAVNTGFQKLVF

SEQ ID NO: 667396 - protein, 13 aa, Homo sapiens
  CDR3 for beta chain variable domain of TCR clone 333698 (TRBV19, TRBJ1-3)
CASRLSLGNTIYF

SEQ ID NO: 667397 - protein, 14 aa, Homo sapiens
  CDR3 for alpha chain variable domain of TCR clone 333699 (TRAV8-3, TRAJ4)
CAVGASGGYNKLLF

SEQ ID NO: 667398 - protein, 13 aa, Homo sapiens
  CDR3 for beta chain variable domain of TCR clone 333699 (TRBV27, TRBJ2-7)
CASGRGGAYEQYF

SEQ ID NO: 667399 - protein, 18 aa, Homo sapiens
  CDR3 for alpha chain variable domain of TCR clone 333700 (TRAV13-1, TRAJ52)
CAAKNPNAGGTSYGKPTF

SEQ ID NO: 667400 - protein, 18 aa, Homo sapiens
  CDR3 for beta chain variable domain of TCR clone 333700 (TRBV4-1, TRBJ1-4)
CASSPRTGGAWTNEELFF

SEQ ID NO: 667401 - protein, 15 aa, Homo sapiens
  CDR3 for alpha chain variable domain of TCR clone 333701 (TRAV26-1, TRAJ29)
CIVRVEESGNTPLVF

SEQ ID NO: 667402 - protein, 12 aa, Homo sapiens
  CDR3 for beta chain variable domain of TCR clone 333701 (TRBV11-2, TRBJ2-1)
CASSPGNNEQFF

SEQ ID NO: 667403 - protein, 10 aa, Homo sapiens
  CDR3 for alpha chain variable domain of TCR clone 333702 (TRAV12-3, TRAJ49)
CAMNDDQFYF

SEQ ID NO: 667404 - protein, 18 aa, Homo sapiens
  CDR3 for beta chain variable domain of TCR clone 333702 (TRBV11-2, TRBJ2-3)
CASSLGGASRGAPNTQYF

SEQ ID NO: 667405 - protein, 13 aa, Homo sapiens
  CDR3 for alpha chain variable domain of TCR clone 333703 (TRAV12-1, TRAJ12)
CVVNIESSYKLIF

SEQ ID NO: 667406 - protein, 15 aa, Homo sapiens
  CDR3 for beta chain variable domain of TCR clone 333703 (TRBV2, TRBJ2-5)
CASSSSVAGGDTQYF

SEQ ID NO: 667407 - protein, 14 aa, Homo sapiens
  CDR3 for alpha chain variable domain of TCR clone 333704 (TRAV12-3, TRAJ13)
CAMQNSGGYQKVTF

SEQ ID NO: 667408 - protein, 14 aa, Homo sapiens
  CDR3 for beta chain variable domain of TCR clone 333704 (TRBV4-1, TRBJ1-6)
CASSPGSDSSPLHF

SEQ ID NO: 667409 - protein, 15 aa, Homo sapiens
  CDR3 for alpha chain variable domain of TCR clone 333705 (TRAV21, TRAJ53)
CATLNSGGSNYKLTF

SEQ ID NO: 667410 - protein, 15 aa, Homo sapiens
  CDR3 for beta chain variable domain of TCR clone 333705 (TRBV12-4, TRBJ1-1)
CASSLAVSRGAEAFF

SEQ ID NO: 667411 - protein, 14 aa, Homo sapiens
  CDR3 for alpha chain variable domain of TCR clone 333706 (TRAV2, TRAJ9)
CAVEDRSGGFKTIF

SEQ ID NO: 667412 - protein, 15 aa, Homo sapiens
  CDR3 for beta chain variable domain of TCR clone 333706 (TRBV7-6, TRBJ2-7)
CASSLGGAEPYEQYF

SEQ ID NO: 667413 - protein, 13 aa, Homo sapiens
  CDR3 for alpha chain variable domain of TCR clone 333707 (TRAV2, TRAJ40)
CAVVTSGTYKYIF

SEQ ID NO: 667414 - protein, 14 aa, Homo sapiens
  CDR3 for beta chain variable domain of TCR clone 333707 (TRBV4-3, TRBJ1-1)
CASSQGWTPARAFF

SEQ ID NO: 667415 - protein, 12 aa, Homo sapiens
  CDR3 for alpha chain variable domain of TCR clone 333708 (TRAV17, TRAJ57)
CATDGGSEKLVF

SEQ ID NO: 667416 - protein, 13 aa, Homo sapiens
  CDR3 for beta chain variable domain of TCR clone 333708 (TRBV7-9, TRBJ2-7)
CASSIAGAYEQYF

SEQ ID NO: 667417 - protein, 10 aa, Homo sapiens
  CDR3 for alpha chain variable domain of TCR clone 333709 (TRAV12-1, TRAJ43)
CVVHNNDMRF

SEQ ID NO: 667418 - protein, 13 aa, Homo sapiens
  CDR3 for beta chain variable domain of TCR clone 333709 (TRBV10-2, TRBJ2-7)
CASGASGGYEQYF

SEQ ID NO: 667419 - protein, 20 aa, Homo sapiens
  CDR3 for alpha chain variable domain of TCR clone 333710 (TRAV8-3, TRAJ44)
LSTSVLWVRLYTGTASKLTF

SEQ ID NO: 667420 - protein, 13 aa, Homo sapiens
  CDR3 for beta chain variable domain of TCR clone 333710 (TRBV12-4, TRBJ2-1)
CASSFHSGSEQFF

SEQ ID NO: 667421 - protein, 15 aa, Homo sapiens
  CDR3 for alpha chain variable domain of TCR clone 333711 (TRAV27, TRAJ38)
CAARRNAGNNRKLIW

SEQ ID NO: 667422 - protein, 16 aa, Homo sapiens
  CDR3 for beta chain variable domain of TCR clone 333711 (TRBV28, TRBJ1-5)
CASSLTGQGWNQPQHF

SEQ ID NO: 667423 - protein, 12 aa, Homo sapiens
  CDR3 for alpha chain variable domain of TCR clone 333712 (TRAV12-3, TRAJ20)
CAMVRGDYKLSF

SEQ ID NO: 667424 - protein, 13 aa, Homo sapiens
  CDR3 for beta chain variable domain of TCR clone 333712 (TRBV4-1, TRBJ2-7)
CASSQGQAYEQYF

SEQ ID NO: 667425 - protein, 15 aa, Homo sapiens
  CDR3 for alpha chain variable domain of TCR clone 333713 (TRAV13-1, TRAJ8)
CAASIPNTGFQTLVF

SEQ ID NO: 667426 - protein, 13 aa, Homo sapiens
  CDR3 for beta chain variable domain of TCR clone 333713 (TRBV3-1, TRBJ2-2)
CASLARGSGELFF

SEQ ID NO: 667427 - protein, 15 aa, Homo sapiens
  CDR3 for alpha chain variable domain of TCR clone 333714 (TRAV14/DV4, TRAJ26)
CAMREGQNYGQNFVF

SEQ ID NO: 667428 - protein, 13 aa, Homo sapiens
  CDR3 for beta chain variable domain of TCR clone 333714 (TRBV24-1, TRBJ2-2)
CSTSDWSTGELFF

SEQ ID NO: 667429 - protein, 17 aa, Homo sapiens
  CDR3 for alpha chain variable domain of TCR clone 333715 (TRAV26-1, TRAJ22)
CIVRVPNHSGSARQLTF

SEQ ID NO: 667430 - protein, 16 aa, Homo sapiens
  CDR3 for beta chain variable domain of TCR clone 333715 (TRBV28, TRBJ2-1)
CASRRSGRVVGNEQFF

SEQ ID NO: 667431 - protein, 12 aa, Homo sapiens
  CDR3 for alpha chain variable domain of TCR clone 333716 (TRAV13-1, TRAJ15)
CAASQAGTALIF

SEQ ID NO: 667432 - protein, 14 aa, Homo sapiens
  CDR3 for beta chain variable domain of TCR clone 333716 (TRBV19, TRBJ2-2)
CASSTHHRSGELFF

SEQ ID NO: 667433 - protein, 15 aa, Homo sapiens
  CDR3 for alpha chain variable domain of TCR clone 333717 (TRAV21, TRAJ53)
CATLNSGGSNYKLTF

SEQ ID NO: 667434 - protein, 13 aa, Homo sapiens
  CDR3 for beta chain variable domain of TCR clone 333717 (TRBV7-3, TRBJ1-1)
CASSQVWGAEAFF

SEQ ID NO: 667435 - protein, 14 aa, Homo sapiens
  CDR3 for alpha chain variable domain of TCR clone 333718 (TRAV1-2, TRAJ16)
CAVNRFSDGQKLLF

SEQ ID NO: 667436 - protein, 13 aa, Homo sapiens
  CDR3 for beta chain variable domain of TCR clone 333718 (TRBV23-1, TRBJ2-1)
CASNRETYNEQFF

SEQ ID NO: 667437 - protein, 13 aa, Homo sapiens
  CDR3 for alpha chain variable domain of TCR clone 333719 (TRAV2, TRAJ12)
CAVGADSSYKLIF

SEQ ID NO: 667438 - protein, 13 aa, Homo sapiens
  CDR3 for beta chain variable domain of TCR clone 333719 (TRBV20-1, TRBJ2-1)
CSARSSPRDAQFF

SEQ ID NO: 667439 - protein, 14 aa, Homo sapiens
  CDR3 for alpha chain variable domain of TCR clone 333720 (TRAV20, TRAJ56)
CAVQFGGANSKLTF

SEQ ID NO: 667440 - protein, 14 aa, Homo sapiens
  CDR3 for beta chain variable domain of TCR clone 333720 (TRBV20-1, TRBJ2-7)
CNAKRGRSSYEQYF

SEQ ID NO: 667441 - protein, 16 aa, Homo sapiens
  CDR3 for alpha chain variable domain of TCR clone 333721 (TRAV39, TRAJ32)
CAVDMEYGGTTNKLIF

SEQ ID NO: 667442 - protein, 14 aa, Homo sapiens
  CDR3 for beta chain variable domain of TCR clone 333721 (TRBV9, TRBJ2-4)
CASSPSGTSGFRYF

SEQ ID NO: 667443 - protein, 14 aa, Homo sapiens
  CDR3 for alpha chain variable domain of TCR clone 333722 (TRAV29/DV5, TRAJ44)
CAAFLVGTASKLTF

SEQ ID NO: 667444 - protein, 16 aa, Homo sapiens
  CDR3 for beta chain variable domain of TCR clone 333722 (TRBV19, TRBJ2-1)
CASSKAGPSSYNEQFF

SEQ ID NO: 667445 - protein, 15 aa, Homo sapiens
  CDR3 for alpha chain variable domain of TCR clone 333723 (TRAV13-1, TRAJ52)
SYYNAGGTSYGKLTF

SEQ ID NO: 667446 - protein, 18 aa, Homo sapiens
  CDR3 for beta chain variable domain of TCR clone 333723 (TRBV11-3, TRBJ2-3)
CASSLGGASRGAPNTQYF

SEQ ID NO: 667447 - protein, 15 aa, Homo sapiens
  CDR3 for alpha chain variable domain of TCR clone 333724 (TRAV25, TRAJ52)
CAGRPGGTSYGKLTF

SEQ ID NO: 667448 - protein, 16 aa, Homo sapiens
  CDR3 for beta chain variable domain of TCR clone 333724 (TRBV6-1, TRBJ2-5)
CASSETLDRGAETQYF

SEQ ID NO: 667449 - protein, 16 aa, Homo sapiens
  CDR3 for alpha chain variable domain of TCR clone 333725 (TRAV3, TRAJ37)
CAGRGKGSGNTGKLIF

SEQ ID NO: 667450 - protein, 19 aa, Homo sapiens
  CDR3 for beta chain variable domain of TCR clone 333725 (TRBV28, TRBJ2-7)
WASSYSGTSRLGWVYEQYF

SEQ ID NO: 667451 - protein, 13 aa, Homo sapiens
  CDR3 for alpha chain variable domain of TCR clone 333726 (TRAV2, TRAJ15)
CAVASQAGTALIM

SEQ ID NO: 667452 - protein, 17 aa, Homo sapiens
  CDR3 for beta chain variable domain of TCR clone 333726 (TRBV20-1, TRBJ2-2)
CSASGSGQGGLTGELFF

SEQ ID NO: 667453 - protein, 15 aa, Homo sapiens
  CDR3 for alpha chain variable domain of TCR clone 333727 (TRAV27, TRAJ38)
CAGRFDAGNNRKLIW

SEQ ID NO: 667454 - protein, 13 aa, Homo sapiens
  CDR3 for beta chain variable domain of TCR clone 333727 (TRBV20-1, TRBJ2-1)
TSVALPPGNEQFF

SEQ ID NO: 667455 - protein, 14 aa, Homo sapiens
  CDR3 for alpha chain variable domain of TCR clone 333728 (TRAV1-2, TRAJ8)
CAVSEDTGFQKLVF

SEQ ID NO: 667456 - protein, 15 aa, Homo sapiens
  CDR3 for beta chain variable domain of TCR clone 333728 (TRBV7-9, TRBJ1-4)
CASSARTGGNEKLFF

SEQ ID NO: 667457 - protein, 15 aa, Homo sapiens
  CDR3 for alpha chain variable domain of TCR clone 333729 (TRAV27, TRAJ38)
CAARRNSGNNRNLIW

SEQ ID NO: 667458 - protein, 13 aa, Homo sapiens
  CDR3 for beta chain variable domain of TCR clone 333729 (TRBV12-5, TRBJ2-3)
CASGDRQSDTQYF

SEQ ID NO: 667459 - protein, 11 aa, Homo sapiens
  CDR3 for alpha chain variable domain of TCR clone 333730 (TRAV2, TRAJ13)
CASVGYQKVTF

SEQ ID NO: 667460 - protein, 12 aa, Homo sapiens
  CDR3 for beta chain variable domain of TCR clone 333730 (TRBV11-2, TRBJ2-2)
CASSLGGGELFF

SEQ ID NO: 667461 - protein, 14 aa, Homo sapiens
  CDR3 for alpha chain variable domain of TCR clone 333731 (TRAV12-3, TRAJ13)
CAMRNSGGYQKVNF

SEQ ID NO: 667462 - protein, 14 aa, Homo sapiens
  CDR3 for beta chain variable domain of TCR clone 333731 (TRBV4-1, TRBJ1-6)
CASSPGSDSSPLHF

SEQ ID NO: 667463 - protein, 12 aa, Homo sapiens
  CDR3 for alpha chain variable domain of TCR clone 333732 (TRAV3, TRAJ31)
CAVRDGNALLMF

SEQ ID NO: 667464 - protein, 18 aa, Homo sapiens
  CDR3 for beta chain variable domain of TCR clone 333732 (TRBV7-2, TRBJ2-3)
CASSLKREGSGITDTQYC

SEQ ID NO: 667465 - protein, 14 aa, Homo sapiens
  CDR3 for alpha chain variable domain of TCR clone 333733 (TRAV20, TRAJ56)
CAVQFGGANSKLTF

SEQ ID NO: 667466 - protein, 16 aa, Homo sapiens
  CDR3 for beta chain variable domain of TCR clone 333733 (TRBV4-2, TRBJ2-3)
CASSQELAGDTDTQYF

SEQ ID NO: 667467 - protein, 15 aa, Homo sapiens
  CDR3 for alpha chain variable domain of TCR clone 333734 (TRAV40, TRAJ45)
CLLGYLGGGADGLTF

SEQ ID NO: 667468 - protein, 13 aa, Homo sapiens
  CDR3 for beta chain variable domain of TCR clone 333734 (TRBV7-9, TRBJ1-2)
CASILKQNYGYTF

SEQ ID NO: 667469 - protein, 16 aa, Homo sapiens
  CDR3 for alpha chain variable domain of TCR clone 333735 (TRAV30, TRAJ24)
CGTEIVDTDSWGKFQF

SEQ ID NO: 667470 - protein, 14 aa, Homo sapiens
  CDR3 for beta chain variable domain of TCR clone 333735 (TRBV12-5, TRBJ2-5)
CASGSRTHQETQYL

SEQ ID NO: 667471 - protein, 14 aa, Homo sapiens
  CDR3 for alpha chain variable domain of TCR clone 333736 (TRAV8-4, TRAJ5)
CAVSTDTGRRALTF

SEQ ID NO: 667472 - protein, 13 aa, Homo sapiens
  CDR3 for beta chain variable domain of TCR clone 333736 (TRBV7-2, TRBJ2-4)
CASSREHANIQYF

SEQ ID NO: 667473 - protein, 13 aa, Homo sapiens
  CDR3 for alpha chain variable domain of TCR clone 333737 (TRAV26-1, TRAJ36)
RIAVRRGANNLFF

SEQ ID NO: 667474 - protein, 19 aa, Homo sapiens
  CDR3 for beta chain variable domain of TCR clone 333737 (TRBV27, TRBJ2-1)
CASSLEILSPGAAGNEQFF

SEQ ID NO: 667475 - protein, 14 aa, Homo sapiens
  CDR3 for alpha chain variable domain of TCR clone 333738 (TRAV3, TRAJ22)
CAVRDYGSAWQLTF

SEQ ID NO: 667476 - protein, 13 aa, Homo sapiens
  CDR3 for beta chain variable domain of TCR clone 333738 (TRBV11-2, TRBJ2-5)
CASGHGAKETQYF

SEQ ID NO: 667477 - protein, 17 aa, Homo sapiens
  CDR3 for alpha chain variable domain of TCR clone 333739 (TRAV3, TRAJ38)
CAVRDCLNAGNNRKLIW

SEQ ID NO: 667478 - protein, 12 aa, Homo sapiens
  CDR3 for beta chain variable domain of TCR clone 333739 (TRBV2, TRBJ2-5)
CASKEYGETQYF

SEQ ID NO: 667479 - protein, 11 aa, Homo sapiens
  CDR3 for alpha chain variable domain of TCR clone 333740 (TRAV12-1, TRAJ8)
CVVTGFQKLGF

SEQ ID NO: 667480 - protein, 14 aa, Homo sapiens
  CDR3 for beta chain variable domain of TCR clone 333740 (TRBV19, TRBJ2-1)
CASGKSTQYNEQFF

SEQ ID NO: 667481 - protein, 14 aa, Homo sapiens
  CDR3 for alpha chain variable domain of TCR clone 333741 (TRAV35, TRAJ22)
CAGLRPGSARQLTF

SEQ ID NO: 667482 - protein, 12 aa, Homo sapiens
  CDR3 for beta chain variable domain of TCR clone 333741 (TRBV19, TRBJ2-1)
CASSMQDTEQFF

SEQ ID NO: 667483 - protein, 12 aa, Homo sapiens
  CDR3 for alpha chain variable domain of TCR clone 333742 (TRAV12-3, TRAJ17)
CAMTLTGNKLTF

SEQ ID NO: 667484 - protein, 15 aa, Homo sapiens
  CDR3 for beta chain variable domain of TCR clone 333742 (TRBV5-7, TRBJ2-7)
CASSPYCEGSYEQYF

SEQ ID NO: 667485 - protein, 12 aa, Homo sapiens
  CDR3 for alpha chain variable domain of TCR clone 333743 (TRAV2, TRAJ9)
CAVGAGGFKTIF

SEQ ID NO: 667486 - protein, 13 aa, Homo sapiens
  CDR3 for beta chain variable domain of TCR clone 333743 (TRBV7-3, TRBJ2-1)
CASSLDSYNEQFF

SEQ ID NO: 667487 - protein, 12 aa, Homo sapiens
  CDR3 for alpha chain variable domain of TCR clone 333744 (TRAV8-3, TRAJ26)
CAGDNYGQNFVF

SEQ ID NO: 667488 - protein, 15 aa, Homo sapiens
  CDR3 for beta chain variable domain of TCR clone 333744 (TRBV11-2, TRBJ2-1)
CASSLGTSGLNEQFF

SEQ ID NO: 667489 - protein, 14 aa, Homo sapiens
  CDR3 for alpha chain variable domain of TCR clone 333745 (TRAV1-2, TRAJ8)
GAVREDTGFQERVF

SEQ ID NO: 667490 - protein, 17 aa, Homo sapiens
  CDR3 for beta chain variable domain of TCR clone 333745 (TRBV11-2, TRBJ2-1)
CASSLYPPGVEYNEQFF

SEQ ID NO: 667491 - protein, 12 aa, Homo sapiens
  CDR3 for alpha chain variable domain of TCR clone 333746 (TRAV8-1, TRAJ23)
CAVGNKGGKLIF

SEQ ID NO: 667492 - protein, 16 aa, Homo sapiens
  CDR3 for beta chain variable domain of TCR clone 333746 (TRBV7-3, TRBJ2-2)
CASSLKRGTLSGELFF

SEQ ID NO: 667493 - protein, 14 aa, Homo sapiens
  CDR3 for alpha chain variable domain of TCR clone 333747 (TRAV26-1, TRAJ38)
FIADNAGNNRKLIW

SEQ ID NO: 667494 - protein, 13 aa, Homo sapiens
  CDR3 for beta chain variable domain of TCR clone 333747 (TRBV20-1, TRBJ1-1)
CSARGGVNTEDFF

SEQ ID NO: 667495 - protein, 13 aa, Homo sapiens
  CDR3 for alpha chain variable domain of TCR clone 333748 (TRAV23/DV6, TRAJ47)
CAASSQYGNKLVF

SEQ ID NO: 667496 - protein, 15 aa, Homo sapiens
  CDR3 for beta chain variable domain of TCR clone 333748 (TRBV27, TRBJ1-6)
CASSFDRGLGSPLHF

SEQ ID NO: 667497 - protein, 17 aa, Homo sapiens
  CDR3 for alpha chain variable domain of TCR clone 333749 (TRAV26-1, TRAJ53)
CIVRVDDSGGSNYKPTF

SEQ ID NO: 667498 - protein, 15 aa, Homo sapiens
  CDR3 for beta chain variable domain of TCR clone 333749 (TRBV20-1, TRBJ2-7)
CRARVPAAYFYEQYF

SEQ ID NO: 667499 - protein, 13 aa, Homo sapiens
  CDR3 for alpha chain variable domain of TCR clone 333750 (TRAV23/DV6, TRAJ58)
CAVSEIGGSRLTF

SEQ ID NO: 667500 - protein, 15 aa, Homo sapiens
  CDR3 for beta chain variable domain of TCR clone 333750 (TRBV19, TRBJ1-1)
CASTSGQIQNTEAFF

SEQ ID NO: 667501 - protein, 15 aa, Homo sapiens
  CDR3 for alpha chain variable domain of TCR clone 333751 (TRAV12-2, TRAJ50)
CAVNGLETSYDKLIF

SEQ ID NO: 667502 - protein, 14 aa, Homo sapiens
  CDR3 for beta chain variable domain of TCR clone 333751 (TRBV7-2, TRBJ1-1)
CASSFLTGTTEAFF

SEQ ID NO: 667503 - protein, 14 aa, Homo sapiens
  CDR3 for alpha chain variable domain of TCR clone 333752 (TRAV38-1, TRAJ40)
CALRPTSGTYKYIF

SEQ ID NO: 667504 - protein, 13 aa, Homo sapiens
  CDR3 for beta chain variable domain of TCR clone 333752 (TRBV10-2, TRBJ2-7)
CASGASGGYEQYF

SEQ ID NO: 667505 - protein, 17 aa, Homo sapiens
  CDR3 for alpha chain variable domain of TCR clone 333753 (TRAV8-6, TRAJ58)
CAVSSWVGETSGSRLNF

SEQ ID NO: 667506 - protein, 15 aa, Homo sapiens
  CDR3 for beta chain variable domain of TCR clone 333753 (TRBV6-5, TRBJ2-1)
CASSYDAGAGNEQFF

SEQ ID NO: 667507 - protein, 10 aa, Homo sapiens
  CDR3 for alpha chain variable domain of TCR clone 333754 (TRAV8-4, TRAJ43)
CAGSADDMRF

SEQ ID NO: 667508 - protein, 14 aa, Homo sapiens
  CDR3 for beta chain variable domain of TCR clone 333754 (TRBV19, TRBJ2-7)
CASSIEASSYEQYF

SEQ ID NO: 667509 - protein, 10 aa, Homo sapiens
  CDR3 for alpha chain variable domain of TCR clone 333755 (TRAV2, TRAJ23)
CVGGKLIFGQ

SEQ ID NO: 667510 - protein, 20 aa, Homo sapiens
  CDR3 for beta chain variable domain of TCR clone 333755 (TRBV20-1, TRBJ2-5)
CSARAGLAGRLAGHLETQYF

SEQ ID NO: 667511 - protein, 12 aa, Homo sapiens
  CDR3 for alpha chain variable domain of TCR clone 333756 (TRAV1-1, TRAJ39)
CSVPVVGNMLTF

SEQ ID NO: 667512 - protein, 12 aa, Homo sapiens
  CDR3 for beta chain variable domain of TCR clone 333756 (TRBV2, TRBJ1-2)
CASSGQTYGYTF

SEQ ID NO: 667513 - protein, 18 aa, Homo sapiens
  CDR3 for alpha chain variable domain of TCR clone 333757 (TRAV26-1, TRAJ23)
CIVRVGLEVWNQGGKLIF

SEQ ID NO: 667514 - protein, 15 aa, Homo sapiens
  CDR3 for beta chain variable domain of TCR clone 333757 (TRBV10-3, TRBJ2-3)
CAISDWDRDTDTQYY

SEQ ID NO: 667515 - protein, 16 aa, Homo sapiens
  CDR3 for alpha chain variable domain of TCR clone 333758 (TRAV27, TRAJ13)
CAGAKSDSGGYQKVTF

SEQ ID NO: 667516 - protein, 19 aa, Homo sapiens
  CDR3 for beta chain variable domain of TCR clone 333758 (TRBV25-1, TRBJ2-2)
CAILVYRVDRGRKTGELFF

SEQ ID NO: 667517 - protein, 11 aa, Homo sapiens
  CDR3 for alpha chain variable domain of TCR clone 333759 (TRAV12-2, TRAJ49)
CALHGGNQFYF

SEQ ID NO: 667518 - protein, 14 aa, Homo sapiens
  CDR3 for beta chain variable domain of TCR clone 333759 (TRBV7-2, TRBJ2-7)
CASSPKTSFYEQYF

SEQ ID NO: 667519 - protein, 15 aa, Homo sapiens
  CDR3 for alpha chain variable domain of TCR clone 333760 (TRAV13-1, TRAJ17)
CTASIERAAGNKLTF

SEQ ID NO: 667520 - protein, 13 aa, Homo sapiens
  CDR3 for beta chain variable domain of TCR clone 333760 (TRBV7-7, TRBJ2-3)
CASSLSRADTQYF

SEQ ID NO: 667521 - protein, 15 aa, Homo sapiens
  CDR3 for alpha chain variable domain of TCR clone 333761 (TRAV26-1, TRAJ29)
CIVRVEGSGNTPLVF

SEQ ID NO: 667522 - protein, 15 aa, Homo sapiens
  CDR3 for beta chain variable domain of TCR clone 333761 (TRBV28, TRBJ2-5)
CASSPGQGIIETQYF

SEQ ID NO: 667523 - protein, 11 aa, Homo sapiens
  CDR3 for alpha chain variable domain of TCR clone 333762 (TRAV2, TRAJ13)
CASGGYQKVTF

SEQ ID NO: 667524 - protein, 14 aa, Homo sapiens
  CDR3 for beta chain variable domain of TCR clone 333762 (TRBV18, TRBJ2-5)
CASSPGVCQETQYF

SEQ ID NO: 667525 - protein, 14 aa, Homo sapiens
  CDR3 for alpha chain variable domain of TCR clone 333763 (TRAV12-3, TRAJ57)
CAMSAWGGSEKLVF

SEQ ID NO: 667526 - protein, 15 aa, Homo sapiens
  CDR3 for beta chain variable domain of TCR clone 333763 (TRBV5-1, TRBJ2-7)
CASSLNPAGSYEQYF

SEQ ID NO: 667527 - protein, 14 aa, Homo sapiens
  CDR3 for alpha chain variable domain of TCR clone 333764 (TRAV9-2, TRAJ39)
CALYIYNAGNMPTF

SEQ ID NO: 667528 - protein, 15 aa, Homo sapiens
  CDR3 for beta chain variable domain of TCR clone 333764 (TRBV5-1, TRBJ2-3)
CASSVTSGSTDTQYF

SEQ ID NO: 667529 - protein, 14 aa, Homo sapiens
  CDR3 for alpha chain variable domain of TCR clone 333765 (TRAV39, TRAJ42)
CAVDIARSLGNLIF

SEQ ID NO: 667530 - protein, 15 aa, Homo sapiens
  CDR3 for beta chain variable domain of TCR clone 333765 (TRBV27, TRBJ2-7)
CASSLFGTGLDEQYF

SEQ ID NO: 667531 - protein, 17 aa, Homo sapiens
  CDR3 for alpha chain variable domain of TCR clone 333766 (TRAV26-1, TRAJ58)
CIVRVGAEETSGSRLTF

SEQ ID NO: 667532 - protein, 13 aa, Homo sapiens
  CDR3 for beta chain variable domain of TCR clone 333766 (TRBV7-3, TRBJ2-5)
CASSLTAGETQYF

SEQ ID NO: 667533 - protein, 13 aa, Homo sapiens
  CDR3 for alpha chain variable domain of TCR clone 333767 (TRAV26-2, TRAJ43)
CILRAVNNNDIRF

SEQ ID NO: 667534 - protein, 19 aa, Homo sapiens
  CDR3 for beta chain variable domain of TCR clone 333767 (TRBV28, TRBJ2-1)
CASSFSIRGSGRTRYEQFF

SEQ ID NO: 667535 - protein, 14 aa, Homo sapiens
  CDR3 for alpha chain variable domain of TCR clone 333768 (TRAV12-2, TRAJ44)
CAVNPAGTASKLTF

SEQ ID NO: 667536 - protein, 15 aa, Homo sapiens
  CDR3 for beta chain variable domain of TCR clone 333768 (TRBV27, TRBJ2-3)
CASSLGLAGPDTQYF

SEQ ID NO: 667537 - protein, 15 aa, Homo sapiens
  CDR3 for alpha chain variable domain of TCR clone 333769 (TRAV12-3, TRAJ49)
CAMAVTPNTGNQFYF

SEQ ID NO: 667538 - protein, 18 aa, Homo sapiens
  CDR3 for beta chain variable domain of TCR clone 333769 (TRBV4-1, TRBJ1-5)
CASSQDPPGQGLNQPQHF

SEQ ID NO: 667539 - protein, 15 aa, Homo sapiens
  CDR3 for alpha chain variable domain of TCR clone 333770 (TRAV8-3, TRAJ11)
CAVGLLNSGYSTLTF

SEQ ID NO: 667540 - protein, 14 aa, Homo sapiens
  CDR3 for beta chain variable domain of TCR clone 333770 (TRBV7-9, TRBJ2-5)
CASSLVGGEETQYF

SEQ ID NO: 667541 - protein, 12 aa, Homo sapiens
  CDR3 for alpha chain variable domain of TCR clone 333771 (TRAV21, TRAJ33)
CAKMDSNDQLIW

SEQ ID NO: 667542 - protein, 17 aa, Homo sapiens
  CDR3 for beta chain variable domain of TCR clone 333771 (TRBV20-1, TRBJ2-2)
CSASGSGQGGLTGELFF

SEQ ID NO: 667543 - protein, 14 aa, Homo sapiens
  CDR3 for alpha chain variable domain of TCR clone 333772 (TRAV23/DV6, TRAJ57)
CAASNQGGSEKLVF

SEQ ID NO: 667544 - protein, 13 aa, Homo sapiens
  CDR3 for beta chain variable domain of TCR clone 333772 (TRBV11-2, TRBJ2-7)
CASSSYPSYGQYF

SEQ ID NO: 667545 - protein, 13 aa, Homo sapiens
  CDR3 for alpha chain variable domain of TCR clone 333773 (TRAV13-2, TRAJ40)
CAEFTSGTCKYIF

SEQ ID NO: 667546 - protein, 14 aa, Homo sapiens
  CDR3 for beta chain variable domain of TCR clone 333773 (TRBV10-2, TRBJ1-5)
CASSSTGRNQPQHF

SEQ ID NO: 667547 - protein, 14 aa, Homo sapiens
  CDR3 for alpha chain variable domain of TCR clone 333774 (TRAV12-2, TRAJ48)
CAVNVDFGNEKLTF

SEQ ID NO: 667548 - protein, 16 aa, Homo sapiens
  CDR3 for beta chain variable domain of TCR clone 333774 (TRBV12-5, TRBJ2-5)
CASGPRTSGNQETQYF

SEQ ID NO: 667549 - protein, 16 aa, Homo sapiens
  CDR3 for alpha chain variable domain of TCR clone 333775 (TRAV12-2, TRAJ6)
CAAPLAGSGGSYIPTF

SEQ ID NO: 667550 - protein, 14 aa, Homo sapiens
  CDR3 for beta chain variable domain of TCR clone 333775 (TRBV19, TRBJ2-1)
CASPTFVLSGEQFF

SEQ ID NO: 667551 - protein, 14 aa, Homo sapiens
  CDR3 for alpha chain variable domain of TCR clone 333776 (TRAV1-2, TRAJ16)
CAVNRFSAGQKLPF

SEQ ID NO: 667552 - protein, 15 aa, Homo sapiens
  CDR3 for beta chain variable domain of TCR clone 333776 (TRBV9, TRBJ1-6)
CASSVAGTGDSPLHF

SEQ ID NO: 667553 - protein, 13 aa, Homo sapiens
  CDR3 for alpha chain variable domain of TCR clone 333777 (TRAV1-2, TRAJ9)
VAALNTGGFKTIF

SEQ ID NO: 667554 - protein, 16 aa, Homo sapiens
  CDR3 for beta chain variable domain of TCR clone 333777 (TRBV19, TRBJ2-1)
CASSKAGPSSYNEQFF

SEQ ID NO: 667555 - protein, 18 aa, Homo sapiens
  CDR3 for alpha chain variable domain of TCR clone 333778 (TRAV13-1, TRAJ52)
CAASKRSAGGTSYGKLKF

SEQ ID NO: 667556 - protein, 14 aa, Homo sapiens
  CDR3 for beta chain variable domain of TCR clone 333778 (TRBV7-2, TRBJ2-5)
CASSTGGELKTQYF

SEQ ID NO: 667557 - protein, 14 aa, Homo sapiens
  CDR3 for alpha chain variable domain of TCR clone 333779 (TRAV12-3, TRAJ10)
SHLPMTGGGNKLTF

SEQ ID NO: 667558 - protein, 15 aa, Homo sapiens
  CDR3 for beta chain variable domain of TCR clone 333779 (TRBV10-2, TRBJ2-6)
CASSEQGTGANVLTF

SEQ ID NO: 667559 - protein, 15 aa, Homo sapiens
  CDR3 for alpha chain variable domain of TCR clone 333780 (TRAV3, TRAJ5)
CAVRDLDTGRRALTF

SEQ ID NO: 667560 - protein, 17 aa, Homo sapiens
  CDR3 for beta chain variable domain of TCR clone 333780 (TRBV7-3, TRBJ2-3)
CASSLMKRMRGADTQYF

SEQ ID NO: 667561 - protein, 13 aa, Homo sapiens
  CDR3 for alpha chain variable domain of TCR clone 333781 (TRAV29/DV5, TRAJ47)
CAASAEYGNKLVF

SEQ ID NO: 667562 - protein, 17 aa, Homo sapiens
  CDR3 for beta chain variable domain of TCR clone 333781 (TRBV7-9, TRBJ2-6)
CASSCGAGYSGANVLTF

SEQ ID NO: 667563 - protein, 14 aa, Homo sapiens
  CDR3 for alpha chain variable domain of TCR clone 333782 (TRAV17, TRAJ57)
CATDPQGGAEKLVF

SEQ ID NO: 667564 - protein, 18 aa, Homo sapiens
  CDR3 for beta chain variable domain of TCR clone 333782 (TRBV25-1, TRBJ2-1)
CASSESRAGGPGYNEQFF

SEQ ID NO: 667565 - protein, 13 aa, Homo sapiens
  CDR3 for alpha chain variable domain of TCR clone 333783 (TRAV35, TRAJ33)
CAGRHDSNYQLIW

SEQ ID NO: 667566 - protein, 19 aa, Homo sapiens
  CDR3 for beta chain variable domain of TCR clone 333783 (TRBV6-3, TRBJ2-1)
CASSYSWTSGRSTYNEQFF

SEQ ID NO: 667567 - protein, 10 aa, Homo sapiens
  CDR3 for alpha chain variable domain of TCR clone 333784 (TRAV36/DV7, TRAJ48)
CAVGNEKLTF

SEQ ID NO: 667568 - protein, 12 aa, Homo sapiens
  CDR3 for beta chain variable domain of TCR clone 333784 (TRBV29-1, TRBJ2-3)
CSVTGGADTQYL

SEQ ID NO: 667569 - protein, 16 aa, Homo sapiens
  CDR3 for alpha chain variable domain of TCR clone 333785 (TRAV3, TRAJ37)
CAVRGKGSGNTGKPIF

SEQ ID NO: 667570 - protein, 13 aa, Homo sapiens
  CDR3 for beta chain variable domain of TCR clone 333785 (TRBV7-2, TRBJ2-2)
CASSSVRAGELFF

SEQ ID NO: 667571 - protein, 15 aa, Homo sapiens
  CDR3 for alpha chain variable domain of TCR clone 333786 (TRAV8-3, TRAJ23)
CAVGDRYNQGGNLIF

SEQ ID NO: 667572 - protein, 13 aa, Homo sapiens
  CDR3 for beta chain variable domain of TCR clone 333786 (TRBV20-1, TRBJ2-1)
CSARPPPGNEQFF

SEQ ID NO: 667573 - protein, 13 aa, Homo sapiens
  CDR3 for alpha chain variable domain of TCR clone 333787 (TRAV17, TRAJ22)
CAHHSGSARQLTF

SEQ ID NO: 667574 - protein, 14 aa, Homo sapiens
  CDR3 for beta chain variable domain of TCR clone 333787 (TRBV16, TRBJ1-1)
CTSSQAGPNTEAFF

SEQ ID NO: 667575 - protein, 17 aa, Homo sapiens
  CDR3 for alpha chain variable domain of TCR clone 333788 (TRAV3, TRAJ6)
CAVRDGPRPGGGYIPTF

SEQ ID NO: 667576 - protein, 14 aa, Homo sapiens
  CDR3 for beta chain variable domain of TCR clone 333788 (TRBV7-2, TRBJ2-7)
CASSPKTSFYEQYF

SEQ ID NO: 667577 - protein, 14 aa, Homo sapiens
  CDR3 for alpha chain variable domain of TCR clone 333789 (TRAV8-4, TRAJ38)
CARLNAGNNRKLIW

SEQ ID NO: 667578 - protein, 18 aa, Homo sapiens
  CDR3 for beta chain variable domain of TCR clone 333789 (TRBV12-4, TRBJ2-2)
CASSLVAGTRGRTGELFF

SEQ ID NO: 667579 - protein, 13 aa, Homo sapiens
  CDR3 for alpha chain variable domain of TCR clone 333790 (TRAV20, TRAJ9)
CAVPDTGGFKTLF

SEQ ID NO: 667580 - protein, 14 aa, Homo sapiens
  CDR3 for beta chain variable domain of TCR clone 333790 (TRBV7-2, TRBJ2-5)
CASSPRGSSETQYF

SEQ ID NO: 667581 - protein, 15 aa, Homo sapiens
  CDR3 for alpha chain variable domain of TCR clone 333791 (TRAV21, TRAJ24)
CAARSSTDSWGKLTF

SEQ ID NO: 667582 - protein, 13 aa, Homo sapiens
  CDR3 for beta chain variable domain of TCR clone 333791 (TRBV10-3, TRBJ2-7)
CASKLAVNYEQYF

SEQ ID NO: 667583 - protein, 13 aa, Homo sapiens
  CDR3 for alpha chain variable domain of TCR clone 333792 (TRAV2, TRAJ29)
CAAGNSGNTPLVF

SEQ ID NO: 667584 - protein, 16 aa, Homo sapiens
  CDR3 for beta chain variable domain of TCR clone 333792 (TRBV7-9, TRBJ1-2)
CASSPGGVAINYGYTF

SEQ ID NO: 667585 - protein, 12 aa, Homo sapiens
  CDR3 for alpha chain variable domain of TCR clone 333793 (TRAV8-3, TRAJ26)
CAGDNYGQNFVF

SEQ ID NO: 667586 - protein, 14 aa, Homo sapiens
  CDR3 for beta chain variable domain of TCR clone 333793 (TRBV12-4, TRBJ1-1)
CASTWTGHDTEAFF

SEQ ID NO: 667587 - protein, 15 aa, Homo sapiens
  CDR3 for alpha chain variable domain of TCR clone 333794 (TRAV2, TRAJ28)
CAVPYSGAGSYQLIF

SEQ ID NO: 667588 - protein, 17 aa, Homo sapiens
  CDR3 for beta chain variable domain of TCR clone 333794 (TRBV20-1, TRBJ2-4)
CSARDWASGGRENMQYF

SEQ ID NO: 667589 - protein, 13 aa, Homo sapiens
  CDR3 for alpha chain variable domain of TCR clone 333795 (TRAV8-3, TRAJ28)
CAVGAVGSYQLTF

SEQ ID NO: 667590 - protein, 14 aa, Homo sapiens
  CDR3 for beta chain variable domain of TCR clone 333795 (TRBV7-6, TRBJ2-4)
CIAVPAAREGIQYF

SEQ ID NO: 667591 - protein, 12 aa, Homo sapiens
  CDR3 for alpha chain variable domain of TCR clone 333796 (TRAV21, TRAJ56)
CAVGVNLSKLTF

SEQ ID NO: 667592 - protein, 14 aa, Homo sapiens
  CDR3 for beta chain variable domain of TCR clone 333796 (TRBV19, TRBJ2-1)
CASPTFVLSGEQFF

SEQ ID NO: 667593 - protein, 12 aa, Homo sapiens
  CDR3 for alpha chain variable domain of TCR clone 333797 (TRAV12-1, TRAJ16)
CVVFRDGQKLLF

SEQ ID NO: 667594 - protein, 15 aa, Homo sapiens
  CDR3 for beta chain variable domain of TCR clone 333797 (TRBV5-1, TRBJ2-2)
CASSSQGGNTGELFF

SEQ ID NO: 667595 - protein, 13 aa, Homo sapiens
  CDR3 for alpha chain variable domain of TCR clone 333798 (TRAV12-3, TRAJ56)
CALASGANSKLTF

SEQ ID NO: 667596 - protein, 16 aa, Homo sapiens
  CDR3 for beta chain variable domain of TCR clone 333798 (TRBV4-2, TRBJ2-7)
CASSQDGVERGYEQYF

SEQ ID NO: 667597 - protein, 10 aa, Homo sapiens
  CDR3 for alpha chain variable domain of TCR clone 333799 (TRAV13-2, TRAJ40)
CAKGKYIFGT

SEQ ID NO: 667598 - protein, 15 aa, Homo sapiens
  CDR3 for beta chain variable domain of TCR clone 333799 (TRBV7-2, TRBJ2-1)
CASSSGLAGGNEQFF

SEQ ID NO: 667599 - protein, 14 aa, Homo sapiens
  CDR3 for alpha chain variable domain of TCR clone 333800 (TRAV12-2, TRAJ13)
CAVKKTGGYQKVTF

SEQ ID NO: 667600 - protein, 14 aa, Homo sapiens
  CDR3 for beta chain variable domain of TCR clone 333800 (TRBV5-1, TRBJ1-1)
CASSLAVGSGEAFF

SEQ ID NO: 667601 - protein, 16 aa, Homo sapiens
  CDR3 for alpha chain variable domain of TCR clone 333801 (TRAV12-3, TRAJ6)
CAMSEGRGRRKLHTYI

SEQ ID NO: 667602 - protein, 12 aa, Homo sapiens
  CDR3 for beta chain variable domain of TCR clone 333801 (TRBV12-4, TRBJ2-3)
CASSTLPDTQYF

SEQ ID NO: 667603 - protein, 16 aa, Homo sapiens
  CDR3 for alpha chain variable domain of TCR clone 333802 (TRAV12-2, TRAJ28)
CAVITDSGAGSYQLTF

SEQ ID NO: 667604 - protein, 14 aa, Homo sapiens
  CDR3 for beta chain variable domain of TCR clone 333802 (TRBV25-1, TRBJ1-1)
CAGTHLGGNTEAFF

SEQ ID NO: 667605 - protein, 16 aa, Homo sapiens
  CDR3 for alpha chain variable domain of TCR clone 333803 (TRAV20, TRAJ26)
FAVQHRRDNYGQNFVF

SEQ ID NO: 667606 - protein, 13 aa, Homo sapiens
  CDR3 for beta chain variable domain of TCR clone 333803 (TRBV27, TRBJ1-4)
CASSLMGDEKLFF

SEQ ID NO: 667607 - protein, 14 aa, Homo sapiens
  CDR3 for alpha chain variable domain of TCR clone 333804 (TRAV2, TRAJ9)
CAVEDRSGGFKTII

SEQ ID NO: 667608 - protein, 18 aa, Homo sapiens
  CDR3 for beta chain variable domain of TCR clone 333804 (TRBV7-3, TRBJ2-5)
CASSFRGGGDPVLRARHA

SEQ ID NO: 667609 - protein, 12 aa, Homo sapiens
  CDR3 for alpha chain variable domain of TCR clone 333805 (TRAV26-1, TRAJ13)
CIVSRGYQKVTF

SEQ ID NO: 667610 - protein, 17 aa, Homo sapiens
  CDR3 for beta chain variable domain of TCR clone 333805 (TRBV11-2, TRBJ2-1)
CASSLYPPGVEYNEQFF

SEQ ID NO: 667611 - protein, 14 aa, Homo sapiens
  CDR3 for alpha chain variable domain of TCR clone 333806 (TRAV35, TRAJ33)
CAGSSQDSNYQLIW

SEQ ID NO: 667612 - protein, 15 aa, Homo sapiens
  CDR3 for beta chain variable domain of TCR clone 333806 (TRBV20-1, TRBJ2-2)
CSAIPGHSNTGELFF

SEQ ID NO: 667613 - protein, 23 aa, Homo sapiens
  CDR3 for alpha chain variable domain of TCR clone 333807 (TRAV26-1, TRAJ38)
CIADNAGNNHIQNPDPAMYQLID

SEQ ID NO: 667614 - protein, 13 aa, Homo sapiens
  CDR3 for beta chain variable domain of TCR clone 333807 (TRBV20-1, TRBJ1-1)
CSARGGGNTEAFF

SEQ ID NO: 667615 - protein, 12 aa, Homo sapiens
  CDR3 for alpha chain variable domain of TCR clone 333808 (TRAV12-3, TRAJ17)
CAMTLTVNKLTF

SEQ ID NO: 667616 - protein, 15 aa, Homo sapiens
  CDR3 for beta chain variable domain of TCR clone 333808 (TRBV19, TRBJ2-1)
CASSILGEGRNEQFF

SEQ ID NO: 667617 - protein, 16 aa, Homo sapiens
  CDR3 for alpha chain variable domain of TCR clone 333809 (TRAV23/DV6, )
CADIQNPDPAVYQLRD

SEQ ID NO: 667618 - protein, 15 aa, Homo sapiens
  CDR3 for beta chain variable domain of TCR clone 333809 (TRBV3-1, TRBJ2-7)
CASSQAPSGSYEQYF

SEQ ID NO: 667619 - protein, 13 aa, Homo sapiens
  CDR3 for alpha chain variable domain of TCR clone 333810 (TRAV27, TRAJ6)
CAGGTRGSSIPTF

SEQ ID NO: 667620 - protein, 13 aa, Homo sapiens
  CDR3 for beta chain variable domain of TCR clone 333810 (TRBV4-1, TRBJ2-5)
CASSLTRGETQYF

SEQ ID NO: 667621 - protein, 14 aa, Homo sapiens
  CDR3 for alpha chain variable domain of TCR clone 333811 (TRAV16, TRAJ32)
CALKSGGATNKLIF

SEQ ID NO: 667622 - protein, 17 aa, Homo sapiens
  CDR3 for beta chain variable domain of TCR clone 333811 (TRBV20-1, TRBJ2-1)
CSASSSGLAGAYNEQFF

SEQ ID NO: 667623 - protein, 16 aa, Homo sapiens
  CDR3 for alpha chain variable domain of TCR clone 333812 (TRAV30, TRAJ24)
CGTEIVDADSWGKFQF

SEQ ID NO: 667624 - protein, 22 aa, Homo sapiens
  CDR3 for beta chain variable domain of TCR clone 333812 (TRBV19, TRBJ2-1)
CASSVRDRVTGTSGRIYNEQFF

SEQ ID NO: 667625 - protein, 10 aa, Homo sapiens
  CDR3 for alpha chain variable domain of TCR clone 333813 (TRAV30, TRAJ32)
CGTEKDMVVL

SEQ ID NO: 667626 - protein, 15 aa, Homo sapiens
  CDR3 for beta chain variable domain of TCR clone 333813 (TRBV19, TRBJ1-1)
CASTSGQIQNTEAFF

SEQ ID NO: 667627 - protein, 15 aa, Homo sapiens
  CDR3 for alpha chain variable domain of TCR clone 333814 (TRAV20, TRAJ53)
CAVQASGGSNYKLTF

SEQ ID NO: 667628 - protein, 15 aa, Homo sapiens
  CDR3 for beta chain variable domain of TCR clone 333814 (TRBV9, TRBJ2-1)
CDSSLAGSSYNEQFF

SEQ ID NO: 667629 - protein, 20 aa, Homo sapiens
  CDR3 for alpha chain variable domain of TCR clone 333815 (TRAV12-3, TRAJ41)
SLFIRDSQPSDSATPEALNF

SEQ ID NO: 667630 - protein, 15 aa, Homo sapiens
  CDR3 for beta chain variable domain of TCR clone 333815 (TRBV5-1, TRBJ2-7)
CASSLDLTSAYEQYF

SEQ ID NO: 667631 - protein, 14 aa, Homo sapiens
  CDR3 for alpha chain variable domain of TCR clone 333816 (TRAV2, TRAJ37)
CAVDFTSNTGKLIF

SEQ ID NO: 667632 - protein, 15 aa, Homo sapiens
  CDR3 for beta chain variable domain of TCR clone 333816 (TRBV20-1, TRBJ1-1)
CSASRVVTGNTEAVF

SEQ ID NO: 667633 - protein, 17 aa, Homo sapiens
  CDR3 for alpha chain variable domain of TCR clone 333817 (TRAV12-1, TRAJ52)
CVVTPNAGGTSYGKLTF

SEQ ID NO: 667634 - protein, 20 aa, Homo sapiens
  CDR3 for beta chain variable domain of TCR clone 333817 (TRBV7-8, TRBJ2-2)
CASSHLFPGPTIHITGELFF

SEQ ID NO: 667635 - protein, 16 aa, Homo sapiens
  CDR3 for alpha chain variable domain of TCR clone 333818 (TRAV3, TRAJ18)
CAVRDGKGSTLGRLYF

SEQ ID NO: 667636 - protein, 17 aa, Homo sapiens
  CDR3 for beta chain variable domain of TCR clone 333818 (TRBV5-1, TRBJ2-3)
CASSQIGLADRTDTQYF

SEQ ID NO: 667637 - protein, 15 aa, Homo sapiens
  CDR3 for alpha chain variable domain of TCR clone 333819 (TRAV27, TRAJ45)
CAPGDSGGGADGLTF

SEQ ID NO: 667638 - protein, 15 aa, Homo sapiens
  CDR3 for beta chain variable domain of TCR clone 333819 (TRBV23-1, TRBJ1-5)
CASSQSRGQGWGAYI

SEQ ID NO: 667639 - protein, 15 aa, Homo sapiens
  CDR3 for alpha chain variable domain of TCR clone 333820 (TRAV16, TRAJ4)
CALEDPSGGYNKLIF

SEQ ID NO: 667640 - protein, 16 aa, Homo sapiens
  CDR3 for beta chain variable domain of TCR clone 333820 (TRBV11-2, TRBJ1-2)
CASSPSGREANYGYTF

SEQ ID NO: 667641 - protein, 15 aa, Homo sapiens
  CDR3 for alpha chain variable domain of TCR clone 333821 (TRAV21, TRAJ24)
CAARSSTDTWGKLQF

SEQ ID NO: 667642 - protein, 13 aa, Homo sapiens
  CDR3 for beta chain variable domain of TCR clone 333821 (TRBV11-2, TRBJ2-5)
CASSSTGEETQYF

SEQ ID NO: 667643 - protein, 13 aa, Homo sapiens
  CDR3 for alpha chain variable domain of TCR clone 333822 (TRAV12-3, TRAJ31)
CAMSANNNARLMF

SEQ ID NO: 667644 - protein, 16 aa, Homo sapiens
  CDR3 for beta chain variable domain of TCR clone 333822 (TRBV7-9, TRBJ1-2)
CASSLSFSSGEDGYTF

SEQ ID NO: 667645 - protein, 12 aa, Homo sapiens
  CDR3 for alpha chain variable domain of TCR clone 333823 (TRAV12-3, TRAJ34)
CAMGYNTDKLIF

SEQ ID NO: 667646 - protein, 15 aa, Homo sapiens
  CDR3 for beta chain variable domain of TCR clone 333823 (TRBV5-8, TRBJ2-3)
CASSPNFGGRDTQYF

SEQ ID NO: 667647 - protein, 17 aa, Homo sapiens
  CDR3 for alpha chain variable domain of TCR clone 333824 (TRAV4, )
CLVDIQNPDPAVYQLRD

SEQ ID NO: 667648 - protein, 16 aa, Homo sapiens
  CDR3 for beta chain variable domain of TCR clone 333824 (TRBV10-3, TRBJ2-1)
CAISGVGDGGGGEQFF

SEQ ID NO: 667649 - protein, 12 aa, Homo sapiens
  CDR3 for alpha chain variable domain of TCR clone 333825 (TRAV13-2, TRAJ23)
CAERHRGGKLIF

SEQ ID NO: 667650 - protein, 16 aa, Homo sapiens
  CDR3 for beta chain variable domain of TCR clone 333825 (TRBV19, TRBJ2-1)
CASSKAGPSAYNEQFF

SEQ ID NO: 667651 - protein, 14 aa, Homo sapiens
  CDR3 for alpha chain variable domain of TCR clone 333826 (TRAV12-2, TRAJ9)
CAVNALEGGFKTIF

SEQ ID NO: 667652 - protein, 18 aa, Homo sapiens
  CDR3 for beta chain variable domain of TCR clone 333826 (TRBV19, TRBJ1-6)
CASSVAPVAGNSPPTLGT

SEQ ID NO: 667653 - protein, 13 aa, Homo sapiens
  CDR3 for alpha chain variable domain of TCR clone 333827 (TRAV8-3, TRAJ28)
FAVGAVGIYQLTF

SEQ ID NO: 667654 - protein, 14 aa, Homo sapiens
  CDR3 for beta chain variable domain of TCR clone 333827 (TRBV7-2, TRBJ2-7)
CASRSQGAAYEQYF

SEQ ID NO: 667655 - protein, 12 aa, Homo sapiens
  CDR3 for alpha chain variable domain of TCR clone 333828 (TRAV23/DV6, TRAJ30)
CAASMGDDKIIF

SEQ ID NO: 667656 - protein, 18 aa, Homo sapiens
  CDR3 for beta chain variable domain of TCR clone 333828 (TRBV10-3, TRBJ2-3)
CAISESRVGPMRGDTQYF

SEQ ID NO: 667657 - protein, 14 aa, Homo sapiens
  CDR3 for alpha chain variable domain of TCR clone 333829 (TRAV10, TRAJ36)
CVVKYEGGANNLFF

SEQ ID NO: 667658 - protein, 16 aa, Homo sapiens
  CDR3 for beta chain variable domain of TCR clone 333829 (TRBV7-3, TRBJ2-2)
CDSSLKRGTLSGELFF

SEQ ID NO: 667659 - protein, 12 aa, Homo sapiens
  CDR3 for alpha chain variable domain of TCR clone 333830 (TRAV12-2, TRAJ3)
CAVWSSASKIIF

SEQ ID NO: 667660 - protein, 12 aa, Homo sapiens
  CDR3 for beta chain variable domain of TCR clone 333830 (TRBV11-2, TRBJ2-1)
CASSPGNNEEFF

SEQ ID NO: 667661 - protein, 14 aa, Homo sapiens
  CDR3 for alpha chain variable domain of TCR clone 333831 (TRAV4, TRAJ9)
CLVGSGTGGFKTIF

SEQ ID NO: 667662 - protein, 17 aa, Homo sapiens
  CDR3 for beta chain variable domain of TCR clone 333831 (TRBV19, TRBJ2-6)
CASSTGQVFSGANVLTF

SEQ ID NO: 667663 - protein, 12 aa, Homo sapiens
  CDR3 for alpha chain variable domain of TCR clone 333832 (TRAV20, TRAJ37)
CALPSNTGKLIF

SEQ ID NO: 667664 - protein, 14 aa, Homo sapiens
  CDR3 for beta chain variable domain of TCR clone 333832 (TRBV5-1, TRBJ2-7)
CASSRGESLYEQYF

SEQ ID NO: 667665 - protein, 14 aa, Homo sapiens
  CDR3 for alpha chain variable domain of TCR clone 333833 (TRAV12-1, TRAJ17)
CVVNYKAAGNKLTF

SEQ ID NO: 667666 - protein, 14 aa, Homo sapiens
  CDR3 for beta chain variable domain of TCR clone 333833 (TRBV20-1, TRBJ1-1)
CSAMGGTANTEAFF

SEQ ID NO: 667667 - protein, 16 aa, Homo sapiens
  CDR3 for alpha chain variable domain of TCR clone 333834 (TRAV3, TRAJ10)
CAVRDMRAGGGNKLTS

SEQ ID NO: 667668 - protein, 14 aa, Homo sapiens
  CDR3 for beta chain variable domain of TCR clone 333834 (TRBV7-2, TRBJ2-7)
CASSPKTSFYEQYF

SEQ ID NO: 667669 - protein, 15 aa, Homo sapiens
  CDR3 for alpha chain variable domain of TCR clone 333835 (TRAV13-1, TRAJ44)
CAASRGGGTASKLTF

SEQ ID NO: 667670 - protein, 12 aa, Homo sapiens
  CDR3 for beta chain variable domain of TCR clone 333835 (TRBV11-2, TRBJ2-2)
CSSSLGGGELFF

SEQ ID NO: 667671 - protein, 11 aa, Homo sapiens
  CDR3 for alpha chain variable domain of TCR clone 333836 (TRAV13-1, TRAJ20)
CAASNDYKLSF

SEQ ID NO: 667672 - protein, 12 aa, Homo sapiens
  CDR3 for beta chain variable domain of TCR clone 333836 (TRBV28, TRBJ2-6)
CAIQAGANVLTF

SEQ ID NO: 667673 - protein, 15 aa, Homo sapiens
  CDR3 for alpha chain variable domain of TCR clone 333837 (TRAV17, TRAJ56)
CATDANTGANSKLTF

SEQ ID NO: 667674 - protein, 15 aa, Homo sapiens
  CDR3 for beta chain variable domain of TCR clone 333837 (TRBV7-8, TRBJ1-1)
CASSLGDSRNTEAFF

SEQ ID NO: 667675 - protein, 17 aa, Homo sapiens
  CDR3 for alpha chain variable domain of TCR clone 333838 (TRAV13-1, TRAJ31)
CAPRDRLMFGDGTQLVV

SEQ ID NO: 667676 - protein, 12 aa, Homo sapiens
  CDR3 for beta chain variable domain of TCR clone 333838 (TRBV7-9, TRBJ2-7)
CGSSLEGYEQYF

SEQ ID NO: 667677 - protein, 13 aa, Homo sapiens
  CDR3 for alpha chain variable domain of TCR clone 333839 (TRAV12-2, TRAJ6)
CAVNVSRKIHTYI

SEQ ID NO: 667678 - protein, 12 aa, Homo sapiens
  CDR3 for beta chain variable domain of TCR clone 333839 (TRBV29-1, TRBJ2-3)
CSVTGGADTQYF

SEQ ID NO: 667679 - protein, 17 aa, Homo sapiens
  CDR3 for alpha chain variable domain of TCR clone 333840 (TRAV26-1, TRAJ58)
CIVRVGAEENRGSRLTF

SEQ ID NO: 667680 - protein, 12 aa, Homo sapiens
  CDR3 for beta chain variable domain of TCR clone 333840 (TRBV11-2, TRBJ2-5)
CASSLDTQTQYF

SEQ ID NO: 667681 - protein, 14 aa, Homo sapiens
  CDR3 for alpha chain variable domain of TCR clone 333841 (TRAV30, TRAJ26)
CGTEIVSYGQNFVF

SEQ ID NO: 667682 - protein, 13 aa, Homo sapiens
  CDR3 for beta chain variable domain of TCR clone 333841 (TRBV19, TRBJ1-3)
CASRLSLGNTIHF

SEQ ID NO: 667683 - protein, 22 aa, Homo sapiens
  CDR3 for alpha chain variable domain of TCR clone 333842 (TRAV26-1, TRAJ30)
CIVRVRTEMTRASLEKGNDFIF

SEQ ID NO: 667684 - protein, 18 aa, Homo sapiens
  CDR3 for beta chain variable domain of TCR clone 333842 (TRBV4-1, TRBJ1-5)
CASSQDPRGQGLNQPQHF

SEQ ID NO: 667685 - protein, 15 aa, Homo sapiens
  CDR3 for alpha chain variable domain of TCR clone 333843 (TRAV8-4, TRAJ8)
CAVSDLNTGFQTLVF

SEQ ID NO: 667686 - protein, 14 aa, Homo sapiens
  CDR3 for beta chain variable domain of TCR clone 333843 (TRBV7-2, TRBJ2-3)
CASSQTGSSYTQYF

SEQ ID NO: 667687 - protein, 14 aa, Homo sapiens
  CDR3 for alpha chain variable domain of TCR clone 333844 (TRAV12-3, TRAJ57)
CARALEGGSEKLVF

SEQ ID NO: 667688 - protein, 17 aa, Homo sapiens
  CDR3 for beta chain variable domain of TCR clone 333844 (TRBV4-2, TRBJ1-1)
CASTQFGGGSGNTEAFF

SEQ ID NO: 667689 - protein, 12 aa, Homo sapiens
  CDR3 for alpha chain variable domain of TCR clone 333845 (TRAV8-3, TRAJ26)
CAGDNYGQNFVF

SEQ ID NO: 667690 - protein, 14 aa, Homo sapiens
  CDR3 for beta chain variable domain of TCR clone 333845 (TRBV7-2, TRBJ2-7)
CASRPKTSFYEQYF

SEQ ID NO: 667691 - protein, 16 aa, Homo sapiens
  CDR3 for alpha chain variable domain of TCR clone 333846 (TRAV3, TRAJ10)
CAVRDMRAGGGNKLTF

SEQ ID NO: 667692 - protein, 14 aa, Homo sapiens
  CDR3 for beta chain variable domain of TCR clone 333846 (TRBV7-9, TRBJ2-1)
CASRAGGRRNEQFF

SEQ ID NO: 667693 - protein, 14 aa, Homo sapiens
  CDR3 for alpha chain variable domain of TCR clone 333847 (TRAV38-1, TRAJ28)
CAFTSGAGSYQLTF

SEQ ID NO: 667694 - protein, 20 aa, Homo sapiens
  CDR3 for beta chain variable domain of TCR clone 333847 (TRBV7-8, TRBJ2-2)
CASSHLFPGPTIHITGELFF

SEQ ID NO: 667695 - protein, 12 aa, Homo sapiens
  CDR3 for alpha chain variable domain of TCR clone 333848 (TRAV21, TRAJ42)
CAVGGSQGNLIF

SEQ ID NO: 667696 - protein, 15 aa, Homo sapiens
  CDR3 for beta chain variable domain of TCR clone 333848 (TRBV20-1, TRBJ2-7)
YSARDRVSGMDEQYF

SEQ ID NO: 667697 - protein, 12 aa, Homo sapiens
  CDR3 for alpha chain variable domain of TCR clone 333849 (TRAV8-3, TRAJ20)
CAVAFNDYKLSF

SEQ ID NO: 667698 - protein, 17 aa, Homo sapiens
  CDR3 for beta chain variable domain of TCR clone 333849 (TRBV7-8, TRBJ2-6)
CASSAGTGGAGANVLTF

SEQ ID NO: 667699 - protein, 14 aa, Homo sapiens
  CDR3 for alpha chain variable domain of TCR clone 333850 (TRAV8-4, TRAJ8)
CAVSEDQGFQKLVF

SEQ ID NO: 667700 - protein, 12 aa, Homo sapiens
  CDR3 for beta chain variable domain of TCR clone 333850 (TRBV14, TRBJ1-1)
CASRPYETEAFF

SEQ ID NO: 667701 - protein, 13 aa, Homo sapiens
  CDR3 for alpha chain variable domain of TCR clone 333851 (TRAV21, TRAJ15)
CAVANQAGTDLLF

SEQ ID NO: 667702 - protein, 14 aa, Homo sapiens
  CDR3 for beta chain variable domain of TCR clone 333851 (TRBV27, TRBJ2-2)
CASSLGAATGELFF

SEQ ID NO: 667703 - protein, 17 aa, Homo sapiens
  CDR3 for alpha chain variable domain of TCR clone 333852 (TRAV3, TRAJ6)
CAVRDGPRAGGSYIPTF

SEQ ID NO: 667704 - protein, 20 aa, Homo sapiens
  CDR3 for beta chain variable domain of TCR clone 333852 (TRBV29-1, TRBJ2-5)
SAALGTSGKSRDPVLRARHA

SEQ ID NO: 667705 - protein, 14 aa, Homo sapiens
  CDR3 for alpha chain variable domain of TCR clone 333853 (TRAV8-1, TRAJ39)
CAVNASNAGNMLTF

SEQ ID NO: 667706 - protein, 16 aa, Homo sapiens
  CDR3 for beta chain variable domain of TCR clone 333853 (TRBV4-1, TRBJ1-2)
CASSQDAGQVLYGYTF

SEQ ID NO: 667707 - protein, 15 aa, Homo sapiens
  CDR3 for alpha chain variable domain of TCR clone 333854 (TRAV19, TRAJ8)
CALSGPNTGFQKLVF

SEQ ID NO: 667708 - protein, 14 aa, Homo sapiens
  CDR3 for beta chain variable domain of TCR clone 333854 (TRBV11-2, TRBJ2-7)
CASSSGAGAYEQYF

SEQ ID NO: 667709 - protein, 14 aa, Homo sapiens
  CDR3 for alpha chain variable domain of TCR clone 333855 (TRAV38-1, TRAJ45)
CAYYSGGGADGLTF

SEQ ID NO: 667710 - protein, 12 aa, Homo sapiens
  CDR3 for beta chain variable domain of TCR clone 333855 (TRBV14, TRBJ2-5)
CASSQLKETQYF

SEQ ID NO: 667711 - protein, 12 aa, Homo sapiens
  CDR3 for alpha chain variable domain of TCR clone 333856 (TRAV12-1, TRAJ40)
CVVYSGTYKYIF

SEQ ID NO: 667712 - protein, 16 aa, Homo sapiens
  CDR3 for beta chain variable domain of TCR clone 333856 (TRBV20-1, TRBJ1-4)
CSAPGQGLLTNEKLFF

SEQ ID NO: 667713 - protein, 14 aa, Homo sapiens
  CDR3 for alpha chain variable domain of TCR clone 333857 (TRAV23/DV6, TRAJ39)
CAASIGNAGNMLTF

SEQ ID NO: 667714 - protein, 12 aa, Homo sapiens
  CDR3 for beta chain variable domain of TCR clone 333857 (TRBV11-2, TRBJ2-2)
CASSLPTGELFF

SEQ ID NO: 667715 - protein, 16 aa, Homo sapiens
  CDR3 for alpha chain variable domain of TCR clone 333858 (TRAV12-2, TRAJ10)
CAVNRVLTGGGNKLTF

SEQ ID NO: 667716 - protein, 12 aa, Homo sapiens
  CDR3 for beta chain variable domain of TCR clone 333858 (TRBV28, TRBJ2-7)
CACSFSSYEQYF

SEQ ID NO: 667717 - protein, 12 aa, Homo sapiens
  CDR3 for alpha chain variable domain of TCR clone 333859 (TRAV13-2, TRAJ8)
CAPWLGFLKLVF

SEQ ID NO: 667718 - protein, 13 aa, Homo sapiens
  CDR3 for beta chain variable domain of TCR clone 333859 (TRBV12-4, TRBJ1-5)
CASSPDRAQPQHF

SEQ ID NO: 667719 - protein, 13 aa, Homo sapiens
  CDR3 for alpha chain variable domain of TCR clone 333860 (TRAV23/DV6, TRAJ34)
CAAIENNTDKLIF

SEQ ID NO: 667720 - protein, 15 aa, Homo sapiens
  CDR3 for beta chain variable domain of TCR clone 333860 (TRBV7-9, TRBJ2-2)
CASSPETGAGGELFF

SEQ ID NO: 667721 - protein, 13 aa, Homo sapiens
  CDR3 for alpha chain variable domain of TCR clone 333861 (TRAV2, TRAJ29)
CAAQNSGNTPLVF

SEQ ID NO: 667722 - protein, 16 aa, Homo sapiens
  CDR3 for beta chain variable domain of TCR clone 333861 (TRBV27, TRBJ2-5)
CASSYGPGGQKETQYF

SEQ ID NO: 667723 - protein, 11 aa, Homo sapiens
  CDR3 for alpha chain variable domain of TCR clone 333862 (TRAV21, TRAJ34)
CAVTKTDKLIF

SEQ ID NO: 667724 - protein, 13 aa, Homo sapiens
  CDR3 for beta chain variable domain of TCR clone 333862 (TRBV4-2, TRBJ1-1)
CASSQAGNTEAFF

SEQ ID NO: 667725 - protein, 12 aa, Homo sapiens
  CDR3 for alpha chain variable domain of TCR clone 333863 (TRAV2, TRAJ31)
CAVEDNNARLMF

SEQ ID NO: 667726 - protein, 15 aa, Homo sapiens
  CDR3 for beta chain variable domain of TCR clone 333863 (TRBV11-3, TRBJ2-2)
CASSYFSTGTGELFF

SEQ ID NO: 667727 - protein, 11 aa, Homo sapiens
  CDR3 for alpha chain variable domain of TCR clone 333864 (TRAV25, TRAJ47)
CAGLYGNKLIF

SEQ ID NO: 667728 - protein, 14 aa, Homo sapiens
  CDR3 for beta chain variable domain of TCR clone 333864 (TRBV19, TRBJ2-1)
CASKEGVQVNEQFF

SEQ ID NO: 667729 - protein, 17 aa, Homo sapiens
  CDR3 for alpha chain variable domain of TCR clone 333865 (TRAV3, TRAJ42)
CAVSDRDYGGSQGNLIF

SEQ ID NO: 667730 - protein, 15 aa, Homo sapiens
  CDR3 for beta chain variable domain of TCR clone 333865 (TRBV6-6, TRBJ2-7)
CGSSYSYGGSYEQYF

SEQ ID NO: 667731 - protein, 16 aa, Homo sapiens
  CDR3 for alpha chain variable domain of TCR clone 333866 (TRAV3, TRAJ40)
CAVRDRIASGTYKYIF

SEQ ID NO: 667732 - protein, 16 aa, Homo sapiens
  CDR3 for beta chain variable domain of TCR clone 333866 (TRBV6-1, TRBJ1-2)
CASSEANSIINYGYTV

SEQ ID NO: 667733 - protein, 14 aa, Homo sapiens
  CDR3 for alpha chain variable domain of TCR clone 333867 (TRAV14/DV4, TRAJ32)
SHVLPLTPTNKLIF

SEQ ID NO: 667734 - protein, 14 aa, Homo sapiens
  CDR3 for beta chain variable domain of TCR clone 333867 (TRBV7-2, TRBJ2-7)
CASSPKTSFYEQYF

SEQ ID NO: 667735 - protein, 22 aa, Homo sapiens
  CDR3 for alpha chain variable domain of TCR clone 333868 (TRAV3, TRAJ38)
CAVRDCLNAGNNHIQNPDPTVY

SEQ ID NO: 667736 - protein, 19 aa, Homo sapiens
  CDR3 for beta chain variable domain of TCR clone 333868 (TRBV7-2, TRBJ2-3)
CASSFLSRNWGGGTDTQYF

SEQ ID NO: 667737 - protein, 18 aa, Homo sapiens
  CDR3 for alpha chain variable domain of TCR clone 333869 (TRAV13-1, TRAJ52)
CAASPYQNAGTSYGKLTF

SEQ ID NO: 667738 - protein, 13 aa, Homo sapiens
  CDR3 for beta chain variable domain of TCR clone 333869 (TRBV5-5, TRBJ1-2)
CASSFWRGEDYTF

SEQ ID NO: 667739 - protein, 14 aa, Homo sapiens
  CDR3 for alpha chain variable domain of TCR clone 333870 (TRAV2, TRAJ3)
CAVDRYSSASKIIF

SEQ ID NO: 667740 - protein, 16 aa, Homo sapiens
  CDR3 for beta chain variable domain of TCR clone 333870 (TRBV20-1, TRBJ1-5)
CSAELPGQQTNQTQHF

SEQ ID NO: 667741 - protein, 12 aa, Homo sapiens
  CDR3 for alpha chain variable domain of TCR clone 333871 (TRAV27, TRAJ34)
CAGAKNTDNLIF

SEQ ID NO: 667742 - protein, 13 aa, Homo sapiens
  CDR3 for beta chain variable domain of TCR clone 333871 (TRBV4-1, TRBJ2-1)
CASSQEVQYEQFF

SEQ ID NO: 667743 - protein, 17 aa, Homo sapiens
  CDR3 for alpha chain variable domain of TCR clone 333872 (TRAV27, TRAJ42)
CAERVIYYGGSQGNLIF

SEQ ID NO: 667744 - protein, 14 aa, Homo sapiens
  CDR3 for beta chain variable domain of TCR clone 333872 (TRBV6-6, TRBJ2-3)
CASRLQREADTQYL

SEQ ID NO: 667745 - protein, 18 aa, Homo sapiens
  CDR3 for alpha chain variable domain of TCR clone 333873 (TRAV12-2, )
CAVEDIQNPDPAVYQLRD

SEQ ID NO: 667746 - protein, 16 aa, Homo sapiens
  CDR3 for beta chain variable domain of TCR clone 333873 (TRBV24-1, TRBJ2-3)
CATSDPGTGATDTQYF

SEQ ID NO: 667747 - protein, 15 aa, Homo sapiens
  CDR3 for alpha chain variable domain of TCR clone 333874 (TRAV27, TRAJ38)
CAARRNAGSNRELIW

SEQ ID NO: 667748 - protein, 13 aa, Homo sapiens
  CDR3 for beta chain variable domain of TCR clone 333874 (TRBV7-3, TRBJ2-1)
CASSLDSYNEQFF

SEQ ID NO: 667749 - protein, 11 aa, Homo sapiens
  CDR3 for alpha chain variable domain of TCR clone 333875 (TRAV12-1, TRAJ33)
CVVNMNYQLIW

SEQ ID NO: 667750 - protein, 15 aa, Homo sapiens
  CDR3 for beta chain variable domain of TCR clone 333875 (TRBV20-1, TRBJ2-7)
CSARDRVSGMDEQYF

SEQ ID NO: 667751 - protein, 14 aa, Homo sapiens
  CDR3 for alpha chain variable domain of TCR clone 333876 (TRAV8-4, TRAJ45)
CASGGGGGADGLTF

SEQ ID NO: 667752 - protein, 12 aa, Homo sapiens
  CDR3 for beta chain variable domain of TCR clone 333876 (TRBV4-3, TRBJ2-3)
CASSPRVEMRLA

SEQ ID NO: 667753 - protein, 19 aa, Homo sapiens
  CDR3 for alpha chain variable domain of TCR clone 333877 (TRAV13-1, TRAJ52)
CAASPYQNAGGTSDGKLTF

SEQ ID NO: 667754 - protein, 14 aa, Homo sapiens
  CDR3 for beta chain variable domain of TCR clone 333877 (TRBV19, TRBJ2-7)
CASTVQGRPYEQYF

SEQ ID NO: 667755 - protein, 13 aa, Homo sapiens
  CDR3 for alpha chain variable domain of TCR clone 333878 (TRAV8-3, TRAJ12)
WVLRMDSSYKLIF

SEQ ID NO: 667756 - protein, 12 aa, Homo sapiens
  CDR3 for beta chain variable domain of TCR clone 333878 (TRBV11-2, TRBJ2-2)
CASSLGGGELFF

SEQ ID NO: 667757 - protein, 11 aa, Homo sapiens
  CDR3 for alpha chain variable domain of TCR clone 333879 (TRAV3, TRAJ21)
CAVGNFNKFYF

SEQ ID NO: 667758 - protein, 15 aa, Homo sapiens
  CDR3 for beta chain variable domain of TCR clone 333879 (TRBV11-2, TRBJ2-1)
CASSLGTSGLNEQFF

SEQ ID NO: 667759 - protein, 12 aa, Homo sapiens
  CDR3 for alpha chain variable domain of TCR clone 333880 (TRAV21, TRAJ31)
CAVSPARGRPMV

SEQ ID NO: 667760 - protein, 14 aa, Homo sapiens
  CDR3 for beta chain variable domain of TCR clone 333880 (TRBV28, TRBJ2-7)
CASSLLRISYEQYF

SEQ ID NO: 667761 - protein, 11 aa, Homo sapiens
  CDR3 for alpha chain variable domain of TCR clone 333881 (TRAV21, TRAJ48)
CAVDGNEKLTF

SEQ ID NO: 667762 - protein, 15 aa, Homo sapiens
  CDR3 for beta chain variable domain of TCR clone 333881 (TRBV28, TRBJ1-2)
CVSTRPGIMAYGYTF

SEQ ID NO: 667763 - protein, 12 aa, Homo sapiens
  CDR3 for alpha chain variable domain of TCR clone 333882 (TRAV12-3, TRAJ41)
CAMSYSGYALNF

SEQ ID NO: 667764 - protein, 13 aa, Homo sapiens
  CDR3 for beta chain variable domain of TCR clone 333882 (TRBV7-9, TRBJ1-2)
CASSLKQNYGYTF

SEQ ID NO: 667765 - protein, 13 aa, Homo sapiens
  CDR3 for alpha chain variable domain of TCR clone 333883 (TRAV20, TRAJ20)
CAVRWVRDYKLSF

SEQ ID NO: 667766 - protein, 14 aa, Homo sapiens
  CDR3 for beta chain variable domain of TCR clone 333883 (TRBV19, TRBJ2-2)
CASAVTANTGELFF

SEQ ID NO: 667767 - protein, 12 aa, Homo sapiens
  CDR3 for alpha chain variable domain of TCR clone 333884 (TRAV29/DV5, TRAJ15)
CAASGEGTALIL

SEQ ID NO: 667768 - protein, 15 aa, Homo sapiens
  CDR3 for beta chain variable domain of TCR clone 333884 (TRBV4-3, TRBJ1-5)
CASSHDSGGGQPQHF

SEQ ID NO: 667769 - protein, 14 aa, Homo sapiens
  CDR3 for alpha chain variable domain of TCR clone 333885 (TRAV12-3, TRAJ10)
SHLPLTGGGNKLTF

SEQ ID NO: 667770 - protein, 15 aa, Homo sapiens
  CDR3 for beta chain variable domain of TCR clone 333885 (TRBV18, TRBJ2-1)
CASLPDRGRDNEQFF

SEQ ID NO: 667771 - protein, 13 aa, Homo sapiens
  CDR3 for alpha chain variable domain of TCR clone 333886 (TRAV21, TRAJ42)
CAVGGGSQGNLIF

SEQ ID NO: 667772 - protein, 13 aa, Homo sapiens
  CDR3 for beta chain variable domain of TCR clone 333886 (TRBV7-2, TRBJ2-5)
CASSPDRGETQYV

SEQ ID NO: 667773 - protein, 14 aa, Homo sapiens
  CDR3 for alpha chain variable domain of TCR clone 333887 (TRAV21, TRAJ17)
CAARGRAAGNKLTF

SEQ ID NO: 667774 - protein, 12 aa, Homo sapiens
  CDR3 for beta chain variable domain of TCR clone 333887 (TRBV7-9, TRBJ2-3)
CASSFITDTQYF

SEQ ID NO: 667775 - protein, 14 aa, Homo sapiens
  CDR3 for alpha chain variable domain of TCR clone 333888 (TRAV4, TRAJ30)
CLVGDMNRYDKIIF

SEQ ID NO: 667776 - protein, 16 aa, Homo sapiens
  CDR3 for beta chain variable domain of TCR clone 333888 (TRBV20-1, TRBJ1-4)
CSAPGQGLLTNEKLFF

SEQ ID NO: 667777 - protein, 16 aa, Homo sapiens
  CDR3 for alpha chain variable domain of TCR clone 333889 (TRAV30, TRAJ24)
CGTEIVDADSWGKFQF

SEQ ID NO: 667778 - protein, 14 aa, Homo sapiens
  CDR3 for beta chain variable domain of TCR clone 333889 (TRBV13, TRBJ2-1)
CGSSPRPRYNEQFF

SEQ ID NO: 667779 - protein, 13 aa, Homo sapiens
  CDR3 for alpha chain variable domain of TCR clone 333890 (TRAV12-2, TRAJ18)
CAVRGSTLGRLYF

SEQ ID NO: 667780 - protein, 20 aa, Homo sapiens
  CDR3 for beta chain variable domain of TCR clone 333890 (TRBV7-8, TRBJ2-2)
CASSHLFPGPTIHTTGELFF

SEQ ID NO: 667781 - protein, 15 aa, Homo sapiens
  CDR3 for alpha chain variable domain of TCR clone 333891 (TRAV17, TRAJ57)
CATGPSQGGSEKLDF

SEQ ID NO: 667782 - protein, 18 aa, Homo sapiens
  CDR3 for beta chain variable domain of TCR clone 333891 (TRBV7-9, TRBJ2-7)
CASSLTTSGSRTWYEQYF

SEQ ID NO: 667783 - protein, 12 aa, Homo sapiens
  CDR3 for alpha chain variable domain of TCR clone 333892 (TRAV21, TRAJ13)
PGPSGGYQKVTF

SEQ ID NO: 667784 - protein, 15 aa, Homo sapiens
  CDR3 for beta chain variable domain of TCR clone 333892 (TRBV7-9, TRBJ1-6)
CACSSPGRGNSPLHF

SEQ ID NO: 667785 - protein, 17 aa, Homo sapiens
  CDR3 for alpha chain variable domain of TCR clone 333893 (TRAV26-1, TRAJ58)
YIVRVGAEETSGSRLTF

SEQ ID NO: 667786 - protein, 13 aa, Homo sapiens
  CDR3 for beta chain variable domain of TCR clone 333893 (TRBV12-5, TRBJ1-2)
CASGVRTGNGYTL

SEQ ID NO: 667787 - protein, 12 aa, Homo sapiens
  CDR3 for alpha chain variable domain of TCR clone 333894 (TRAV8-3, TRAJ26)
CAGDNYGQNFVF

SEQ ID NO: 667788 - protein, 15 aa, Homo sapiens
  CDR3 for beta chain variable domain of TCR clone 333894 (TRBV27, TRBJ2-5)
CASSLIPSGGETQYF

SEQ ID NO: 667789 - protein, 13 aa, Homo sapiens
  CDR3 for alpha chain variable domain of TCR clone 333895 (TRAV20, TRAJ37)
CAGCSSNTGKLIF

SEQ ID NO: 667790 - protein, 16 aa, Homo sapiens
  CDR3 for beta chain variable domain of TCR clone 333895 (TRBV10-3, TRBJ2-1)
CAISGVGDGGGGEQFF

SEQ ID NO: 667791 - protein, 13 aa, Homo sapiens
  CDR3 for alpha chain variable domain of TCR clone 333896 (TRAV8-4, TRAJ9)
CAVSETGGFKTIF

SEQ ID NO: 667792 - protein, 15 aa, Homo sapiens
  CDR3 for beta chain variable domain of TCR clone 333896 (TRBV5-1, TRBJ2-3)
CASSYTSGSADTQYF

SEQ ID NO: 667793 - protein, 13 aa, Homo sapiens
  CDR3 for alpha chain variable domain of TCR clone 333897 (TRAV3, TRAJ3)
CAVRALGASKIIF

SEQ ID NO: 667794 - protein, 16 aa, Homo sapiens
  CDR3 for beta chain variable domain of TCR clone 333897 (TRBV12-4, TRBJ2-5)
CTSVPAVLRGGETQYF

SEQ ID NO: 667795 - protein, 13 aa, Homo sapiens
  CDR3 for alpha chain variable domain of TCR clone 333898 (TRAV23/DV6, TRAJ22)
CAPYSGSARQLTF

SEQ ID NO: 667796 - protein, 12 aa, Homo sapiens
  CDR3 for beta chain variable domain of TCR clone 333898 (TRBV11-2, TRBJ2-5)
CASSLVGETQYF

SEQ ID NO: 667797 - protein, 14 aa, Homo sapiens
  CDR3 for alpha chain variable domain of TCR clone 333899 (TRAV27, TRAJ13)
CRSSNSGGYQEVTF

SEQ ID NO: 667798 - protein, 14 aa, Homo sapiens
  CDR3 for beta chain variable domain of TCR clone 333899 (TRBV7-6, TRBJ2-1)
WASSLGGGADEQFF

SEQ ID NO: 667799 - protein, 14 aa, Homo sapiens
  CDR3 for alpha chain variable domain of TCR clone 333900 (TRAV2, TRAJ9)
CAVEDRSGGFKTIF

SEQ ID NO: 667800 - protein, 15 aa, Homo sapiens
  CDR3 for beta chain variable domain of TCR clone 333900 (TRBV12-4, TRBJ2-5)
CASSLSGAFQEIQYF

SEQ ID NO: 667801 - protein, 13 aa, Homo sapiens
  CDR3 for alpha chain variable domain of TCR clone 333901 (TRAV8-3, TRAJ48)
CAVVPFGNEKLTF

SEQ ID NO: 667802 - protein, 19 aa, Homo sapiens
  CDR3 for beta chain variable domain of TCR clone 333901 (TRBV25-1, TRBJ2-2)
CAILVYLVDRGRKTGELFF

SEQ ID NO: 667803 - protein, 12 aa, Homo sapiens
  CDR3 for alpha chain variable domain of TCR clone 333902 (TRAV17, TRAJ20)
CATDGDDYKLSF

SEQ ID NO: 667804 - protein, 15 aa, Homo sapiens
  CDR3 for beta chain variable domain of TCR clone 333902 (TRBV10-2, TRBJ2-6)
CASSEQGTGANVLTF

SEQ ID NO: 667805 - protein, 12 aa, Homo sapiens
  CDR3 for alpha chain variable domain of TCR clone 333903 (TRAV17, TRAJ20)
CATDSNEYKLSF

SEQ ID NO: 667806 - protein, 17 aa, Homo sapiens
  CDR3 for beta chain variable domain of TCR clone 333903 (TRBV5-1, TRBJ2-2)
CASSLAGLSGGTGELFF

SEQ ID NO: 667807 - protein, 11 aa, Homo sapiens
  CDR3 for alpha chain variable domain of TCR clone 333904 (TRAV3, TRAJ21)
CAVGNFNKFYF

SEQ ID NO: 667808 - protein, 15 aa, Homo sapiens
  CDR3 for beta chain variable domain of TCR clone 333904 (TRBV6-3, TRBJ2-7)
CASSSPGTVFYEQYF

SEQ ID NO: 667809 - protein, 16 aa, Homo sapiens
  CDR3 for alpha chain variable domain of TCR clone 333905 (TRAV3, TRAJ10)
CAVRDMRAGGGNKLTC

SEQ ID NO: 667810 - protein, 20 aa, Homo sapiens
  CDR3 for beta chain variable domain of TCR clone 333905 (TRBV11-3, TRBJ2-7)
CASSQRTSGSLRAVLRAGHQ

SEQ ID NO: 667811 - protein, 13 aa, Homo sapiens
  CDR3 for alpha chain variable domain of TCR clone 333906 (TRAV8-4, TRAJ4)
CAVSDIGYNKLIF

SEQ ID NO: 667812 - protein, 13 aa, Homo sapiens
  CDR3 for beta chain variable domain of TCR clone 333906 (TRBV19, TRBJ1-2)
CASSQGQVYGDAV

SEQ ID NO: 667813 - protein, 12 aa, Homo sapiens
  CDR3 for alpha chain variable domain of TCR clone 333907 (TRAV1-2, TRAJ33)
CAALDSNYQLIW

SEQ ID NO: 667814 - protein, 18 aa, Homo sapiens
  CDR3 for beta chain variable domain of TCR clone 333907 (TRBV18, TRBJ1-3)
CASSPRGGAGPSGNTIYF

SEQ ID NO: 667815 - protein, 14 aa, Homo sapiens
  CDR3 for alpha chain variable domain of TCR clone 333908 (TRAV12-2, TRAJ24)
CAVTPADSWGKLQF

SEQ ID NO: 667816 - protein, 16 aa, Homo sapiens
  CDR3 for beta chain variable domain of TCR clone 333908 (TRBV15, TRBJ1-2)
CATSRGPRTGGGGYTF

SEQ ID NO: 667817 - protein, 12 aa, Homo sapiens
  CDR3 for alpha chain variable domain of TCR clone 333909 (TRAV12-3, TRAJ17)
CAMTLTDNKLTF

SEQ ID NO: 667818 - protein, 15 aa, Homo sapiens
  CDR3 for beta chain variable domain of TCR clone 333909 (TRBV20-1, TRBJ2-7)
CSASDRVSGMDEQYF

SEQ ID NO: 667819 - protein, 12 aa, Homo sapiens
  CDR3 for alpha chain variable domain of TCR clone 333910 (TRAV13-1, TRAJ21)
CAAKEGFNKFYF

SEQ ID NO: 667820 - protein, 14 aa, Homo sapiens
  CDR3 for beta chain variable domain of TCR clone 333910 (TRBV19, TRBJ2-1)
CASRPGLAPNEQFF

SEQ ID NO: 667821 - protein, 10 aa, Homo sapiens
  CDR3 for alpha chain variable domain of TCR clone 333911 (TRAV1-2, TRAJ31)
CVSEDARLMF

SEQ ID NO: 667822 - protein, 16 aa, Homo sapiens
  CDR3 for beta chain variable domain of TCR clone 333911 (TRBV7-2, TRBJ1-3)
CASSRLEASSGNTIYF

SEQ ID NO: 667823 - protein, 13 aa, Homo sapiens
  CDR3 for alpha chain variable domain of TCR clone 333912 (TRAV21, TRAJ20)
CAVGLRVDYKLSF

SEQ ID NO: 667824 - protein, 18 aa, Homo sapiens
  CDR3 for beta chain variable domain of TCR clone 333912 (TRBV20-1, TRBJ2-2)
CSARVHTARPSGTGELFF

SEQ ID NO: 667825 - protein, 12 aa, Homo sapiens
  CDR3 for alpha chain variable domain of TCR clone 333913 (TRAV12-3, TRAJ17)
CAITLTGNKLTL

SEQ ID NO: 667826 - protein, 15 aa, Homo sapiens
  CDR3 for beta chain variable domain of TCR clone 333913 (TRBV20-1, TRBJ2-7)
CSARDRVSGMDEQYF

SEQ ID NO: 667827 - protein, 17 aa, Homo sapiens
  CDR3 for alpha chain variable domain of TCR clone 333914 (TRAV13-1, TRAJ52)
CAVSSGAGGTSYGKLTF

SEQ ID NO: 667828 - protein, 15 aa, Homo sapiens
  CDR3 for beta chain variable domain of TCR clone 333914 (TRBV2, TRBJ2-1)
CASSELAGSYNEQFF

SEQ ID NO: 667829 - protein, 12 aa, Homo sapiens
  CDR3 for alpha chain variable domain of TCR clone 333915 (TRAV12-2, TRAJ7)
CAVMRGNNSLAF

SEQ ID NO: 667830 - protein, 17 aa, Homo sapiens
  CDR3 for beta chain variable domain of TCR clone 333915 (TRBV7-9, TRBJ2-3)
CASSPTVAGDLTDTQYF

SEQ ID NO: 667831 - protein, 18 aa, Homo sapiens
  CDR3 for alpha chain variable domain of TCR clone 333916 (TRAV12-3, TRAJ52)
CAMSVGGAGGTSYGKLTF

SEQ ID NO: 667832 - protein, 14 aa, Homo sapiens
  CDR3 for beta chain variable domain of TCR clone 333916 (TRBV19, TRBJ1-2)
CASSLQGQAYGYTF

SEQ ID NO: 667833 - protein, 14 aa, Homo sapiens
  CDR3 for alpha chain variable domain of TCR clone 333917 (TRAV23/DV6, TRAJ53)
CAANSGGSNYKLTF

SEQ ID NO: 667834 - protein, 16 aa, Homo sapiens
  CDR3 for beta chain variable domain of TCR clone 333917 (TRBV10-3, TRBJ2-1)
CAISGVGDGGGGEQFF

SEQ ID NO: 667835 - protein, 15 aa, Homo sapiens
  CDR3 for alpha chain variable domain of TCR clone 333918 (TRAV21, TRAJ24)
CAVRSSTESWGKLQF

SEQ ID NO: 667836 - protein, 13 aa, Homo sapiens
  CDR3 for beta chain variable domain of TCR clone 333918 (TRBV11-2, TRBJ2-5)
CASSSTGEETQYF

SEQ ID NO: 667837 - protein, 12 aa, Homo sapiens
  CDR3 for alpha chain variable domain of TCR clone 333919 (TRAV12-1, TRAJ40)
CVFYSGTYKYIF

SEQ ID NO: 667838 - protein, 13 aa, Homo sapiens
  CDR3 for beta chain variable domain of TCR clone 333919 (TRBV12-4, TRBJ2-7)
YASSPTETYEQYF

SEQ ID NO: 667839 - protein, 15 aa, Homo sapiens
  CDR3 for alpha chain variable domain of TCR clone 333920 (TRAV8-2, TRAJ16)
CVVSDGFSDGQKPLF

SEQ ID NO: 667840 - protein, 14 aa, Homo sapiens
  CDR3 for beta chain variable domain of TCR clone 333920 (TRBV7-3, TRBJ1-1)
CASSLGTGYTEAFF

SEQ ID NO: 667841 - protein, 16 aa, Homo sapiens
  CDR3 for alpha chain variable domain of TCR clone 333921 (TRAV13-1, TRAJ45)
CAARGSRKGGAYGLTF

SEQ ID NO: 667842 - protein, 13 aa, Homo sapiens
  CDR3 for beta chain variable domain of TCR clone 333921 (TRBV12-4, TRBJ2-5)
CASRKRGKETQYF

SEQ ID NO: 667843 - protein, 10 aa, Homo sapiens
  CDR3 for alpha chain variable domain of TCR clone 333922 (TRAV16, TRAJ22)
SAMYLPQLTF

SEQ ID NO: 667844 - protein, 13 aa, Homo sapiens
  CDR3 for beta chain variable domain of TCR clone 333922 (TRBV15, TRBJ2-5)
CATSQIGEETQYF

SEQ ID NO: 667845 - protein, 14 aa, Homo sapiens
  CDR3 for alpha chain variable domain of TCR clone 333923 (TRAV8-4, TRAJ17)
CAVSEQAAGNKLTF

SEQ ID NO: 667846 - protein, 15 aa, Homo sapiens
  CDR3 for beta chain variable domain of TCR clone 333923 (TRBV7-2, TRBJ1-2)
CASSLAPDRGLGYTF

SEQ ID NO: 667847 - protein, 17 aa, Homo sapiens
  CDR3 for alpha chain variable domain of TCR clone 333924 (TRAV13-1, TRAJ52)
CAASSGAGGTSYGKLTF

SEQ ID NO: 667848 - protein, 13 aa, Homo sapiens
  CDR3 for beta chain variable domain of TCR clone 333924 (TRBV4-1, TRBJ1-1)
CASSRKMNTEAFF

SEQ ID NO: 667849 - protein, 14 aa, Homo sapiens
  CDR3 for alpha chain variable domain of TCR clone 333925 (TRAV1-2, TRAJ8)
CAVREDTGFQKLVF

SEQ ID NO: 667850 - protein, 13 aa, Homo sapiens
  CDR3 for beta chain variable domain of TCR clone 333925 (TRBV18, TRBJ2-5)
CASSLQGQETQYF

SEQ ID NO: 667851 - protein, 13 aa, Homo sapiens
  CDR3 for alpha chain variable domain of TCR clone 333926 (TRAV1-2, TRAJ9)
CAALNTGGFKTIF

SEQ ID NO: 667852 - protein, 12 aa, Homo sapiens
  CDR3 for beta chain variable domain of TCR clone 333926 (TRBV6-3, TRBJ2-1)
CASSGSYNEQFF

SEQ ID NO: 667853 - protein, 15 aa, Homo sapiens
  CDR3 for alpha chain variable domain of TCR clone 333927 (TRAV27, TRAJ53)
CRAINSGGSNYKLTF

SEQ ID NO: 667854 - protein, 14 aa, Homo sapiens
  CDR3 for beta chain variable domain of TCR clone 333927 (TRBV28, TRBJ1-2)
CASRIQGANYGYTF

SEQ ID NO: 667855 - protein, 16 aa, Homo sapiens
  CDR3 for alpha chain variable domain of TCR clone 333928 (TRAV12-3, TRAJ53)
CAMSPGSGGSNYKLTF

SEQ ID NO: 667856 - protein, 13 aa, Homo sapiens
  CDR3 for beta chain variable domain of TCR clone 333928 (TRBV28, TRBJ2-7)
CASKAGGVYEQYF

SEQ ID NO: 667857 - protein, 14 aa, Homo sapiens
  CDR3 for alpha chain variable domain of TCR clone 333929 (TRAV2, TRAJ37)
CAVDFTSNTGKLIF

SEQ ID NO: 667858 - protein, 14 aa, Homo sapiens
  CDR3 for beta chain variable domain of TCR clone 333929 (TRBV4-1, TRBJ1-6)
CASSPGSDSSPLHF

SEQ ID NO: 667859 - protein, 15 aa, Homo sapiens
  CDR3 for alpha chain variable domain of TCR clone 333930 (TRAV2, TRAJ22)
CAVPSRGGSARQLTF

SEQ ID NO: 667860 - protein, 11 aa, Homo sapiens
  CDR3 for beta chain variable domain of TCR clone 333930 (TRBV19, TRBJ1-1)
CASSIGSEAFF

SEQ ID NO: 667861 - protein, 11 aa, Homo sapiens
  CDR3 for alpha chain variable domain of TCR clone 333931 (TRAV17, TRAJ9)
CGFTGGFKTIF

SEQ ID NO: 667862 - protein, 18 aa, Homo sapiens
  CDR3 for beta chain variable domain of TCR clone 333931 (TRBV12-4, TRBJ2-2)
CASSLVAGARGRTGELFF

SEQ ID NO: 667863 - protein, 19 aa, Homo sapiens
  CDR3 for alpha chain variable domain of TCR clone 333932 (TRAV26-1, TRAJ29)
CCVLCIVRVEGSGNTPLVF

SEQ ID NO: 667864 - protein, 14 aa, Homo sapiens
  CDR3 for beta chain variable domain of TCR clone 333932 (TRBV18, TRBJ2-5)
CASSPGVSQETQYF

SEQ ID NO: 667865 - protein, 16 aa, Homo sapiens
  CDR3 for alpha chain variable domain of TCR clone 333933 (TRAV30, TRAJ24)
CGSEIVDADSWGKFQF

SEQ ID NO: 667866 - protein, 12 aa, Homo sapiens
  CDR3 for beta chain variable domain of TCR clone 333933 (TRBV11-2, TRBJ2-2)
CASSLGGGELFF

SEQ ID NO: 667867 - protein, 12 aa, Homo sapiens
  CDR3 for alpha chain variable domain of TCR clone 333934 (TRAV1-1, TRAJ39)
CAVPVVGNMLTF

SEQ ID NO: 667868 - protein, 18 aa, Homo sapiens
  CDR3 for beta chain variable domain of TCR clone 333934 (TRBV7-9, TRBJ2-7)
CASSLTPSGSRTWYEQYF

SEQ ID NO: 667869 - protein, 16 aa, Homo sapiens
  CDR3 for alpha chain variable domain of TCR clone 333935 (TRAV30, TRAJ24)
CGTEIVDADIWGKFQF

SEQ ID NO: 667870 - protein, 18 aa, Homo sapiens
  CDR3 for beta chain variable domain of TCR clone 333935 (TRBV12-5, TRBJ2-5)
CASGSRTHKRPSTSGQAR

SEQ ID NO: 667871 - protein, 15 aa, Homo sapiens
  CDR3 for alpha chain variable domain of TCR clone 333936 (TRAV17, TRAJ57)
CATGPPQGGSKKLVF

SEQ ID NO: 667872 - protein, 16 aa, Homo sapiens
  CDR3 for beta chain variable domain of TCR clone 333936 (TRBV12-4, TRBJ1-5)
CASSRPVGGSNQPQHF

SEQ ID NO: 667873 - protein, 22 aa, Homo sapiens
  CDR3 for alpha chain variable domain of TCR clone 333937 (TRAV21, TRAJ39)
AASQPGDSATPKGAKAGNMLTF

SEQ ID NO: 667874 - protein, 14 aa, Homo sapiens
  CDR3 for beta chain variable domain of TCR clone 333937 (TRBV11-2, TRBJ2-5)
CASSRTGGIETQYF

SEQ ID NO: 667875 - protein, 14 aa, Homo sapiens
  CDR3 for alpha chain variable domain of TCR clone 333938 (TRAV9-2, TRAJ39)
CALYIYNAGNMLTF

SEQ ID NO: 667876 - protein, 16 aa, Homo sapiens
  CDR3 for beta chain variable domain of TCR clone 333938 (TRBV7-2, TRBJ2-3)
CASSLVALYSTDTQYF

SEQ ID NO: 667877 - protein, 15 aa, Homo sapiens
  CDR3 for alpha chain variable domain of TCR clone 333939 (TRAV4, TRAJ42)
CLVGGYGGSQRNLIF

SEQ ID NO: 667878 - protein, 16 aa, Homo sapiens
  CDR3 for beta chain variable domain of TCR clone 333939 (TRBV27, TRBJ2-1)
CASSSRLAGNYNEQFF

SEQ ID NO: 667879 - protein, 14 aa, Homo sapiens
  CDR3 for alpha chain variable domain of TCR clone 333940 (TRAV12-3, TRAJ42)
CAMNYGGSQGNLIF

SEQ ID NO: 667880 - protein, 15 aa, Homo sapiens
  CDR3 for beta chain variable domain of TCR clone 333940 (TRBV5-7, TRBJ1-5)
CASSYGKLWEQPQHF

SEQ ID NO: 667881 - protein, 12 aa, Homo sapiens
  CDR3 for alpha chain variable domain of TCR clone 333941 (TRAV13-1, TRAJ49)
CAAPNTGNQFYF

SEQ ID NO: 667882 - protein, 17 aa, Homo sapiens
  CDR3 for beta chain variable domain of TCR clone 333941 (TRBV25-1, TRBJ2-7)
GASSDARVVFSSYEQYF

SEQ ID NO: 667883 - protein, 16 aa, Homo sapiens
  CDR3 for alpha chain variable domain of TCR clone 333942 (TRAV12-2, TRAJ40)
CAVIRGGTSGTYKYIF

SEQ ID NO: 667884 - protein, 13 aa, Homo sapiens
  CDR3 for beta chain variable domain of TCR clone 333942 (TRBV7-9, TRBJ2-5)
CASLSPGQETQYF

SEQ ID NO: 667885 - protein, 12 aa, Homo sapiens
  CDR3 for alpha chain variable domain of TCR clone 333943 (TRAV12-3, TRAJ17)
CAMTLTGNKLTF

SEQ ID NO: 667886 - protein, 13 aa, Homo sapiens
  CDR3 for beta chain variable domain of TCR clone 333943 (TRBV7-2, TRBJ2-2)
CASSLAVTEELFF

SEQ ID NO: 667887 - protein, 15 aa, Homo sapiens
  CDR3 for alpha chain variable domain of TCR clone 333944 (TRAV3, TRAJ4)
CAVRDGTGGYNKLIF

SEQ ID NO: 667888 - protein, 16 aa, Homo sapiens
  CDR3 for beta chain variable domain of TCR clone 333944 (TRBV7-9, TRBJ2-1)
CASSDVAGGSYNEQFF

SEQ ID NO: 667889 - protein, 17 aa, Homo sapiens
  CDR3 for alpha chain variable domain of TCR clone 333945 (TRAV3, TRAJ6)
CAVRDGPRAGGSYIPTF

SEQ ID NO: 667890 - protein, 15 aa, Homo sapiens
  CDR3 for beta chain variable domain of TCR clone 333945 (TRBV29-1, TRBJ2-5)
CSVEGLAVNKETQYF

SEQ ID NO: 667891 - protein, 15 aa, Homo sapiens
  CDR3 for alpha chain variable domain of TCR clone 333946 (TRAV26-1, TRAJ29)
CIVRVEGPGKTPLVF

SEQ ID NO: 667892 - protein, 15 aa, Homo sapiens
  CDR3 for beta chain variable domain of TCR clone 333946 (TRBV7-9, TRBJ1-5)
CASSQGHQPNQPQHF

SEQ ID NO: 667893 - protein, 14 aa, Homo sapiens
  CDR3 for alpha chain variable domain of TCR clone 333947 (TRAV29/DV5, TRAJ49)
CAASLSNTGNQFYF

SEQ ID NO: 667894 - protein, 14 aa, Homo sapiens
  CDR3 for beta chain variable domain of TCR clone 333947 (TRBV7-3, TRBJ2-1)
CASSLAGGTNEQFF

SEQ ID NO: 667895 - protein, 14 aa, Homo sapiens
  CDR3 for alpha chain variable domain of TCR clone 333948 (TRAV8-2, TRAJ4)
CVVSPSGGYNKLIF

SEQ ID NO: 667896 - protein, 12 aa, Homo sapiens
  CDR3 for beta chain variable domain of TCR clone 333948 (TRBV5-5, TRBJ2-5)
CASSYFGETQYF

SEQ ID NO: 667897 - protein, 14 aa, Homo sapiens
  CDR3 for alpha chain variable domain of TCR clone 333949 (TRAV12-2, TRAJ6)
CASKWGGGSYIPTF

SEQ ID NO: 667898 - protein, 13 aa, Homo sapiens
  CDR3 for beta chain variable domain of TCR clone 333949 (TRBV24-1, TRBJ2-1)
CATSAGPYNEQFF

SEQ ID NO: 667899 - protein, 11 aa, Homo sapiens
  CDR3 for alpha chain variable domain of TCR clone 333950 (TRAV12-2, TRAJ49)
CAVNTGNQFYF

SEQ ID NO: 667900 - protein, 15 aa, Homo sapiens
  CDR3 for beta chain variable domain of TCR clone 333950 (TRBV6-5, TRBJ2-1)
CASSYDAGAGNEQFF

SEQ ID NO: 667901 - protein, 13 aa, Homo sapiens
  CDR3 for alpha chain variable domain of TCR clone 333951 (TRAV26-1, TRAJ48)
CIVRVVGDEKLTF

SEQ ID NO: 667902 - protein, 15 aa, Homo sapiens
  CDR3 for beta chain variable domain of TCR clone 333951 (TRBV10-3, TRBJ2-3)
CAISLTSGGTDTQYF

SEQ ID NO: 667903 - protein, 17 aa, Homo sapiens
  CDR3 for alpha chain variable domain of TCR clone 333952 (TRAV13-1, TRAJ28)
CAASPPYSGAGSYQLTF

SEQ ID NO: 667904 - protein, 15 aa, Homo sapiens
  CDR3 for beta chain variable domain of TCR clone 333952 (TRBV6-5, TRBJ1-2)
CASSYSQAFNYGYTF

SEQ ID NO: 667905 - protein, 15 aa, Homo sapiens
  CDR3 for alpha chain variable domain of TCR clone 333953 (TRAV12-3, TRAJ17)
CAMSPSLAAGNKLTF

SEQ ID NO: 667906 - protein, 20 aa, Homo sapiens
  CDR3 for beta chain variable domain of TCR clone 333953 (TRBV7-8, TRBJ2-2)
WASSHLFPGPTIHITGELFF

SEQ ID NO: 667907 - protein, 12 aa, Homo sapiens
  CDR3 for alpha chain variable domain of TCR clone 333954 (TRAV12-3, TRAJ40)
CAMSSGTYKYIF

SEQ ID NO: 667908 - protein, 19 aa, Homo sapiens
  CDR3 for beta chain variable domain of TCR clone 333954 (TRBV4-3, TRBJ2-7)
CASSQEFIGWQVTPYEQYF

SEQ ID NO: 667909 - protein, 13 aa, Homo sapiens
  CDR3 for alpha chain variable domain of TCR clone 333955 (TRAV23/DV6, TRAJ22)
CASRAGSARQLTF

SEQ ID NO: 667910 - protein, 14 aa, Homo sapiens
  CDR3 for beta chain variable domain of TCR clone 333955 (TRBV7-2, TRBJ2-7)
CASSRKTSFYEQYF

SEQ ID NO: 667911 - protein, 15 aa, Homo sapiens
  CDR3 for alpha chain variable domain of TCR clone 333956 (TRAV3, TRAJ22)
CAVRDRGGSASQLTF

SEQ ID NO: 667912 - protein, 15 aa, Homo sapiens
  CDR3 for beta chain variable domain of TCR clone 333956 (TRBV20-1, TRBJ1-1)
CSASRGVTGNTEAFF

SEQ ID NO: 667913 - protein, 12 aa, Homo sapiens
  CDR3 for alpha chain variable domain of TCR clone 333957 (TRAV12-3, TRAJ17)
CAMTLTGNKLTF

SEQ ID NO: 667914 - protein, 18 aa, Homo sapiens
  CDR3 for beta chain variable domain of TCR clone 333957 (TRBV20-1, TRBJ2-6)
CSARTLAGGPSGANVLTF

SEQ ID NO: 667915 - protein, 13 aa, Homo sapiens
  CDR3 for alpha chain variable domain of TCR clone 333958 (TRAV2, TRAJ40)
CAVVTSGTYKYIF

SEQ ID NO: 667916 - protein, 14 aa, Homo sapiens
  CDR3 for beta chain variable domain of TCR clone 333958 (TRBV7-7, TRBJ2-7)
CASSLGRGVGEQYF

SEQ ID NO: 667917 - protein, 12 aa, Homo sapiens
  CDR3 for alpha chain variable domain of TCR clone 333959 (TRAV12-3, TRAJ4)
CALTGAGTRLAV

SEQ ID NO: 667918 - protein, 14 aa, Homo sapiens
  CDR3 for beta chain variable domain of TCR clone 333959 (TRBV10-3, TRBJ1-1)
CAISDTDRGVEAFF

SEQ ID NO: 667919 - protein, 14 aa, Homo sapiens
  CDR3 for alpha chain variable domain of TCR clone 333960 (TRAV9-2, TRAJ39)
CALYIYNAGNMLTF

SEQ ID NO: 667920 - protein, 16 aa, Homo sapiens
  CDR3 for beta chain variable domain of TCR clone 333960 (TRBV19, TRBJ2-1)
CASSIQAGGSYNEQFF

SEQ ID NO: 667921 - protein, 23 aa, Homo sapiens
  CDR3 for alpha chain variable domain of TCR clone 333961 (TRAV13-2, TRAJ6)
CAEEVHQEEATYLHLEEEPALLF

SEQ ID NO: 667922 - protein, 14 aa, Homo sapiens
  CDR3 for beta chain variable domain of TCR clone 333961 (TRBV12-4, TRBJ2-5)
CASSLWQKQETQYF

SEQ ID NO: 667923 - protein, 13 aa, Homo sapiens
  CDR3 for alpha chain variable domain of TCR clone 333962 (TRAV13-2, TRAJ13)
CAERPGGYQKVTF

SEQ ID NO: 667924 - protein, 15 aa, Homo sapiens
  CDR3 for beta chain variable domain of TCR clone 333962 (TRBV11-2, TRBJ2-1)
CASSRNRGLMYEQFF

SEQ ID NO: 667925 - protein, 13 aa, Homo sapiens
  CDR3 for alpha chain variable domain of TCR clone 333963 (TRAV8-1, TRAJ34)
CAVRPYNTDKPIF

SEQ ID NO: 667926 - protein, 15 aa, Homo sapiens
  CDR3 for beta chain variable domain of TCR clone 333963 (TRBV7-9, TRBJ1-3)
CASSLRSGSGNTIYF

SEQ ID NO: 667927 - protein, 14 aa, Homo sapiens
  CDR3 for alpha chain variable domain of TCR clone 333964 (TRAV8-1, TRAJ34)
CAMPRGTTSSSLGL

SEQ ID NO: 667928 - protein, 16 aa, Homo sapiens
  CDR3 for beta chain variable domain of TCR clone 333964 (TRBV11-2, TRBJ1-2)
CASSLDTGGADYGYTF

SEQ ID NO: 667929 - protein, 17 aa, Homo sapiens
  CDR3 for alpha chain variable domain of TCR clone 333965 (TRAV8-6, TRAJ22)
CAVSLYPSSGSARQLTF

SEQ ID NO: 667930 - protein, 16 aa, Homo sapiens
  CDR3 for beta chain variable domain of TCR clone 333965 (TRBV7-3, TRBJ2-2)
CASSLKRGTLSGELFF

SEQ ID NO: 667931 - protein, 12 aa, Homo sapiens
  CDR3 for alpha chain variable domain of TCR clone 333966 (TRAV21, TRAJ15)
CAVNQAGTALIF

SEQ ID NO: 667932 - protein, 14 aa, Homo sapiens
  CDR3 for beta chain variable domain of TCR clone 333966 (TRBV19, TRBJ2-2)
CASSGQGIAGELFF

SEQ ID NO: 667933 - protein, 13 aa, Homo sapiens
  CDR3 for alpha chain variable domain of TCR clone 333967 (TRAV17, TRAJ5)
CAPMDTGRIALTF

SEQ ID NO: 667934 - protein, 16 aa, Homo sapiens
  CDR3 for beta chain variable domain of TCR clone 333967 (TRBV27, TRBJ2-7)
CASSSERRDSAYEQYF

SEQ ID NO: 667935 - protein, 18 aa, Homo sapiens
  CDR3 for alpha chain variable domain of TCR clone 333968 (TRAV13-1, TRAJ52)
CAAKNPNAGGTSYGKLTF

SEQ ID NO: 667936 - protein, 17 aa, Homo sapiens
  CDR3 for beta chain variable domain of TCR clone 333968 (TRBV5-4, TRBJ2-1)
CASSSAGGRGPYNEQFF

SEQ ID NO: 667937 - protein, 13 aa, Homo sapiens
  CDR3 for alpha chain variable domain of TCR clone 333969 (TRAV13-2, TRAJ40)
CAELISGTYKYHF

SEQ ID NO: 667938 - protein, 13 aa, Homo sapiens
  CDR3 for beta chain variable domain of TCR clone 333969 (TRBV20-1, TRBJ2-5)
CSARGDYQETQYF

SEQ ID NO: 667939 - protein, 15 aa, Homo sapiens
  CDR3 for alpha chain variable domain of TCR clone 333970 (TRAV8-3, TRAJ45)
CALSYSGGGADGLTF

SEQ ID NO: 667940 - protein, 12 aa, Homo sapiens
  CDR3 for beta chain variable domain of TCR clone 333970 (TRBV5-5, TRBJ2-5)
CASSYFGETQYF

SEQ ID NO: 667941 - protein, 13 aa, Homo sapiens
  CDR3 for alpha chain variable domain of TCR clone 333971 (TRAV2, TRAJ40)
CAVVTSGTYKYIF

SEQ ID NO: 667942 - protein, 14 aa, Homo sapiens
  CDR3 for beta chain variable domain of TCR clone 333971 (TRBV9, TRBJ1-5)
CASSGGDTNQPQHF

SEQ ID NO: 667943 - protein, 13 aa, Homo sapiens
  CDR3 for alpha chain variable domain of TCR clone 333972 (TRAV8-3, TRAJ28)
CAVGAVGSYQLTF

SEQ ID NO: 667944 - protein, 17 aa, Homo sapiens
  CDR3 for beta chain variable domain of TCR clone 333972 (TRBV7-9, TRBJ2-3)
CASSPTVAGDLTDTQYF

SEQ ID NO: 667945 - protein, 14 aa, Homo sapiens
  CDR3 for alpha chain variable domain of TCR clone 333973 (TRAV1-2, TRAJ8)
CAVREDTGFQKLVF

SEQ ID NO: 667946 - protein, 20 aa, Homo sapiens
  CDR3 for beta chain variable domain of TCR clone 333973 (TRBV7-8, TRBJ2-1)
CASSLAHRLAGVRSYNEQFF

SEQ ID NO: 667947 - protein, 11 aa, Homo sapiens
  CDR3 for alpha chain variable domain of TCR clone 333974 (TRAV29/DV5, TRAJ31)
CAAMNNDRPMF

SEQ ID NO: 667948 - protein, 14 aa, Homo sapiens
  CDR3 for beta chain variable domain of TCR clone 333974 (TRBV15, TRBJ2-4)
CATEGGQGANIQYF

SEQ ID NO: 667949 - protein, 15 aa, Homo sapiens
  CDR3 for alpha chain variable domain of TCR clone 333975 (TRAV27, TRAJ38)
CAARRNAGNNRKLIW

SEQ ID NO: 667950 - protein, 14 aa, Homo sapiens
  CDR3 for beta chain variable domain of TCR clone 333975 (TRBV7-8, TRBJ2-3)
CASSLEAGTDMQYF

SEQ ID NO: 667951 - protein, 13 aa, Homo sapiens
  CDR3 for alpha chain variable domain of TCR clone 333976 (TRAV9-2, TRAJ53)
CALSGGSNYKLTF

SEQ ID NO: 667952 - protein, 15 aa, Homo sapiens
  CDR3 for beta chain variable domain of TCR clone 333976 (TRBV7-2, TRBJ2-1)
CASSSGLAGGNEKFF

SEQ ID NO: 667953 - protein, 16 aa, Homo sapiens
  CDR3 for alpha chain variable domain of TCR clone 333977 (TRAV3, TRAJ21)
CAVRDRSASTNFTLDL

SEQ ID NO: 667954 - protein, 16 aa, Homo sapiens
  CDR3 for beta chain variable domain of TCR clone 333977 (TRBV7-2, TRBJ2-5)
CASSSESAGGRETQYF

SEQ ID NO: 667955 - protein, 12 aa, Homo sapiens
  CDR3 for alpha chain variable domain of TCR clone 333978 (TRAV36/DV7, TRAJ54)
CAVVRGAQKLVF

SEQ ID NO: 667956 - protein, 14 aa, Homo sapiens
  CDR3 for beta chain variable domain of TCR clone 333978 (TRBV11-2, TRBJ2-5)
CASSRTGGIETQYF

SEQ ID NO: 667957 - protein, 16 aa, Homo sapiens
  CDR3 for alpha chain variable domain of TCR clone 333979 (TRAV23/DV6, )
CADIQNPDPAVYQMRD

SEQ ID NO: 667958 - protein, 13 aa, Homo sapiens
  CDR3 for beta chain variable domain of TCR clone 333979 (TRBV28, TRBJ2-7)
CASRSSGVYEQYF

SEQ ID NO: 667959 - protein, 15 aa, Homo sapiens
  CDR3 for alpha chain variable domain of TCR clone 333980 (TRAV17, TRAJ52)
CATEAGGTSYGKLTF

SEQ ID NO: 667960 - protein, 13 aa, Homo sapiens
  CDR3 for beta chain variable domain of TCR clone 333980 (TRBV28, TRBJ1-5)
CQQFGGLGQAQHF

SEQ ID NO: 667961 - protein, 12 aa, Homo sapiens
  CDR3 for alpha chain variable domain of TCR clone 333981 (TRAV13-2, TRAJ23)
CAERHRGGKLIF

SEQ ID NO: 667962 - protein, 12 aa, Homo sapiens
  CDR3 for beta chain variable domain of TCR clone 333981 (TRBV28, TRBJ2-5)
CASSGGPETQYF

SEQ ID NO: 667963 - protein, 14 aa, Homo sapiens
  CDR3 for alpha chain variable domain of TCR clone 333982 (TRAV8-3, TRAJ4)
CAVGAAGGYHKLIF

SEQ ID NO: 667964 - protein, 15 aa, Homo sapiens
  CDR3 for beta chain variable domain of TCR clone 333982 (TRBV6-5, TRBJ2-1)
CASSYDAGAGNEQVF

SEQ ID NO: 667965 - protein, 18 aa, Homo sapiens
  CDR3 for alpha chain variable domain of TCR clone 333983 (TRAV21, TRAJ52)
CSVRPSPAGGTSYGKLTF

SEQ ID NO: 667966 - protein, 16 aa, Homo sapiens
  CDR3 for beta chain variable domain of TCR clone 333983 (TRBV19, TRBJ2-1)
CASSKAGPSSYNEQFF

SEQ ID NO: 667967 - protein, 20 aa, Homo sapiens
  CDR3 for alpha chain variable domain of TCR clone 333984 (TRAV13-1, )
CAASPMDIENPDPAVYQLRD

SEQ ID NO: 667968 - protein, 13 aa, Homo sapiens
  CDR3 for beta chain variable domain of TCR clone 333984 (TRBV20-1, TRBJ2-2)
CSASAAGTGELFF

SEQ ID NO: 667969 - protein, 13 aa, Homo sapiens
  CDR3 for alpha chain variable domain of TCR clone 333985 (TRAV8-3, TRAJ28)
CAVGAVGSYHLTF

SEQ ID NO: 667970 - protein, 15 aa, Homo sapiens
  CDR3 for beta chain variable domain of TCR clone 333985 (TRBV5-8, TRBJ2-2)
CASSLDRGATGELFF

SEQ ID NO: 667971 - protein, 13 aa, Homo sapiens
  CDR3 for alpha chain variable domain of TCR clone 333986 (TRAV36/DV7, TRAJ49)
CAGDSNTGNQFYF

SEQ ID NO: 667972 - protein, 14 aa, Homo sapiens
  CDR3 for beta chain variable domain of TCR clone 333986 (TRBV7-3, TRBJ2-1)
CASSLAGGTNEQFF

SEQ ID NO: 667973 - protein, 15 aa, Homo sapiens
  CDR3 for alpha chain variable domain of TCR clone 333987 (TRAV8-2, TRAJ24)
CVVSDRTDSWGKLQV

SEQ ID NO: 667974 - protein, 13 aa, Homo sapiens
  CDR3 for beta chain variable domain of TCR clone 333987 (TRBV7-9, TRBJ1-2)
CASSLKQNYGYTF

SEQ ID NO: 667975 - protein, 13 aa, Homo sapiens
  CDR3 for alpha chain variable domain of TCR clone 333988 (TRAV2, TRAJ15)
CAVASQAGTALIF

SEQ ID NO: 667976 - protein, 19 aa, Homo sapiens
  CDR3 for beta chain variable domain of TCR clone 333988 (TRBV11-3, TRBJ2-2)
CASSTRPGAKTTNTGELFF

SEQ ID NO: 667977 - protein, 16 aa, Homo sapiens
  CDR3 for alpha chain variable domain of TCR clone 333989 (TRAV26-1, TRAJ23)
CIVRPAIYNQEGKLIF

SEQ ID NO: 667978 - protein, 15 aa, Homo sapiens
  CDR3 for beta chain variable domain of TCR clone 333989 (TRBV11-1, TRBJ1-3)
CASTDPRAFGNTIYF

SEQ ID NO: 667979 - protein, 15 aa, Homo sapiens
  CDR3 for alpha chain variable domain of TCR clone 333990 (TRAV14/DV4, TRAJ10)
CAMRELTEGGNKLTF

SEQ ID NO: 667980 - protein, 18 aa, Homo sapiens
  CDR3 for beta chain variable domain of TCR clone 333990 (TRBV7-9, TRBJ2-7)
CASSLTTSGSRTWYEQYF

SEQ ID NO: 667981 - protein, 14 aa, Homo sapiens
  CDR3 for alpha chain variable domain of TCR clone 333991 (TRAV23/DV6, TRAJ22)
CADISSGSARQLTF

SEQ ID NO: 667982 - protein, 16 aa, Homo sapiens
  CDR3 for beta chain variable domain of TCR clone 333991 (TRBV5-7, TRBJ2-5)
CASIRGQTGYQGTQYF

SEQ ID NO: 667983 - protein, 19 aa, Homo sapiens
  CDR3 for alpha chain variable domain of TCR clone 333992 (TRAV25, TRAJ20)
TATQTTDVGILPHDYKLSF

SEQ ID NO: 667984 - protein, 15 aa, Homo sapiens
  CDR3 for beta chain variable domain of TCR clone 333992 (TRBV6-6, TRBJ1-5)
CASSSIQGTNQPKHF

SEQ ID NO: 667985 - protein, 14 aa, Homo sapiens
  CDR3 for alpha chain variable domain of TCR clone 333993 (TRAV12-2, TRAJ17)
CAVLFKAAGNKLTF

SEQ ID NO: 667986 - protein, 16 aa, Homo sapiens
  CDR3 for beta chain variable domain of TCR clone 333993 (TRBV19, TRBJ2-1)
CASSKAGPSSHNEQFF

SEQ ID NO: 667987 - protein, 14 aa, Homo sapiens
  CDR3 for alpha chain variable domain of TCR clone 333994 (TRAV1-2, TRAJ16)
CAVNRFSDGQKLLF

SEQ ID NO: 667988 - protein, 15 aa, Homo sapiens
  CDR3 for beta chain variable domain of TCR clone 333994 (TRBV19, TRBJ1-5)
CASSIVWADNQPQQF

SEQ ID NO: 667989 - protein, 15 aa, Homo sapiens
  CDR3 for alpha chain variable domain of TCR clone 333995 (TRAV35, TRAJ58)
CAGRRQETSGSRLTF

SEQ ID NO: 667990 - protein, 16 aa, Homo sapiens
  CDR3 for beta chain variable domain of TCR clone 333995 (TRBV20-1, TRBJ2-1)
CSARDHLAGGRGEQFF

SEQ ID NO: 667991 - protein, 13 aa, Homo sapiens
  CDR3 for alpha chain variable domain of TCR clone 333996 (TRAV2, TRAJ16)
CAVEFGDGQKLFF

SEQ ID NO: 667992 - protein, 14 aa, Homo sapiens
  CDR3 for beta chain variable domain of TCR clone 333996 (TRBV6-3, TRBJ2-5)
CASSYSLREKTQYF

SEQ ID NO: 667993 - protein, 19 aa, Homo sapiens
  CDR3 for alpha chain variable domain of TCR clone 333997 (TRAV1-2, TRAJ26)
CLLPLCCERPDNYGQNFVF

SEQ ID NO: 667994 - protein, 11 aa, Homo sapiens
  CDR3 for beta chain variable domain of TCR clone 333997 (TRBV23-1, TRBJ2-7)
SSSGTGLEQYF

SEQ ID NO: 667995 - protein, 17 aa, Homo sapiens
  CDR3 for alpha chain variable domain of TCR clone 333998 (TRAV3, TRAJ6)
CAVRDGPRAGGSYIPTF

SEQ ID NO: 667996 - protein, 16 aa, Homo sapiens
  CDR3 for beta chain variable domain of TCR clone 333998 (TRBV7-8, TRBJ2-4)
CPSSAERTLAKNIQYF

SEQ ID NO: 667997 - protein, 18 aa, Homo sapiens
  CDR3 for alpha chain variable domain of TCR clone 333999 (TRAV21, TRAJ52)
CAVRPSPAGGTSYGKLTF

SEQ ID NO: 667998 - protein, 15 aa, Homo sapiens
  CDR3 for beta chain variable domain of TCR clone 333999 (TRBV20-1, TRBJ2-7)
CSAIDRVSGMDEQYF

SEQ ID NO: 667999 - protein, 13 aa, Homo sapiens
  CDR3 for alpha chain variable domain of TCR clone 334000 (TRAV8-1, TRAJ30)
CAVIMNRDDKIIF

SEQ ID NO: 668000 - protein, 14 aa, Homo sapiens
  CDR3 for beta chain variable domain of TCR clone 334000 (TRBV7-2, TRBJ1-6)
CASSLQGANTPLHF

SEQ ID NO: 668001 - protein, 16 aa, Homo sapiens
  CDR3 for alpha chain variable domain of TCR clone 334001 (TRAV20, TRAJ10)
CAVLRGLTGGGNTLTF

SEQ ID NO: 668002 - protein, 14 aa, Homo sapiens
  CDR3 for beta chain variable domain of TCR clone 334001 (TRBV19, TRBJ1-5)
CASRAPDSFLSQHF

SEQ ID NO: 668003 - protein, 18 aa, Homo sapiens
  CDR3 for alpha chain variable domain of TCR clone 334002 (TRAV12-3, TRAJ52)
CAMSVGGAGGTSYGKLTF

SEQ ID NO: 668004 - protein, 17 aa, Homo sapiens
  CDR3 for beta chain variable domain of TCR clone 334002 (TRBV13, TRBJ2-3)
CASGLSRVAGGRNTQYF

SEQ ID NO: 668005 - protein, 15 aa, Homo sapiens
  CDR3 for alpha chain variable domain of TCR clone 334003 (TRAV3, TRAJ9)
CAVRARNTGGFKTIF

SEQ ID NO: 668006 - protein, 12 aa, Homo sapiens
  CDR3 for beta chain variable domain of TCR clone 334003 (TRBV12-4, TRBJ2-7)
CASSLGGYEQYF

SEQ ID NO: 668007 - protein, 17 aa, Homo sapiens
  CDR3 for alpha chain variable domain of TCR clone 334004 (TRAV13-1, TRAJ28)
CAASPPYSGAGSYQLPF

SEQ ID NO: 668008 - protein, 14 aa, Homo sapiens
  CDR3 for beta chain variable domain of TCR clone 334004 (TRBV24-1, TRBJ1-1)
CATSIPRGDTEASF

SEQ ID NO: 668009 - protein, 10 aa, Homo sapiens
  CDR3 for alpha chain variable domain of TCR clone 334005 (TRAV23/DV6, TRAJ57)
CAASSTLSQG

SEQ ID NO: 668010 - protein, 16 aa, Homo sapiens
  CDR3 for beta chain variable domain of TCR clone 334005 (TRBV4-2, TRBJ1-1)
CASSQAGFGMNTEAFF

SEQ ID NO: 668011 - protein, 15 aa, Homo sapiens
  CDR3 for alpha chain variable domain of TCR clone 334006 (TRAV38-1, TRAJ37)
CAFIFGSGNTGKLIF

SEQ ID NO: 668012 - protein, 12 aa, Homo sapiens
  CDR3 for beta chain variable domain of TCR clone 334006 (TRBV7-9, TRBJ2-7)
CASSLESYEQYF

SEQ ID NO: 668013 - protein, 13 aa, Homo sapiens
  CDR3 for alpha chain variable domain of TCR clone 334007 (TRAV2, TRAJ23)
CAVMGNQGGKLIF

SEQ ID NO: 668014 - protein, 14 aa, Homo sapiens
  CDR3 for beta chain variable domain of TCR clone 334007 (TRBV7-2, TRBJ1-2)
CASSQTGSTYGYTF

SEQ ID NO: 668015 - protein, 17 aa, Homo sapiens
  CDR3 for alpha chain variable domain of TCR clone 334008 (TRAV3, TRAJ6)
CALRDGPRAGGSYITTF

SEQ ID NO: 668016 - protein, 14 aa, Homo sapiens
  CDR3 for beta chain variable domain of TCR clone 334008 (TRBV7-2, TRBJ2-7)
CASSPKTSFYEQYF

SEQ ID NO: 668017 - protein, 12 aa, Homo sapiens
  CDR3 for alpha chain variable domain of TCR clone 334009 (TRAV30, TRAJ15)
CGTNQAGTALIF

SEQ ID NO: 668018 - protein, 13 aa, Homo sapiens
  CDR3 for beta chain variable domain of TCR clone 334009 (TRBV24-1, TRBJ2-7)
CATSDLGTYEQYF

SEQ ID NO: 668019 - protein, 13 aa, Homo sapiens
  CDR3 for alpha chain variable domain of TCR clone 334010 (TRAV12-2, TRAJ39)
CGVNNNAGNMLTF

SEQ ID NO: 668020 - protein, 13 aa, Homo sapiens
  CDR3 for beta chain variable domain of TCR clone 334010 (TRBV2, TRBJ1-5)
CATAGPGNQPQHF

SEQ ID NO: 668021 - protein, 11 aa, Homo sapiens
  CDR3 for alpha chain variable domain of TCR clone 334011 (TRAV17, TRAJ39)
RATGAGNMLTF

SEQ ID NO: 668022 - protein, 16 aa, Homo sapiens
  CDR3 for beta chain variable domain of TCR clone 334011 (TRBV5-1, TRBJ2-1)
CASSIGVSGSYNEQFF

SEQ ID NO: 668023 - protein, 13 aa, Homo sapiens
  CDR3 for alpha chain variable domain of TCR clone 334012 (TRAV3, TRAJ20)
CAVRSLNDYKLSF

SEQ ID NO: 668024 - protein, 13 aa, Homo sapiens
  CDR3 for beta chain variable domain of TCR clone 334012 (TRBV4-2, TRBJ1-1)
CASSQAGNTEAFF

SEQ ID NO: 668025 - protein, 16 aa, Homo sapiens
  CDR3 for alpha chain variable domain of TCR clone 334013 (TRAV26-1, TRAJ23)
CIVRPHGNNQGGNLIF

SEQ ID NO: 668026 - protein, 16 aa, Homo sapiens
  CDR3 for beta chain variable domain of TCR clone 334013 (TRBV5-4, TRBJ2-7)
CRQLRSEPRSSYEQYF

SEQ ID NO: 668027 - protein, 12 aa, Homo sapiens
  CDR3 for alpha chain variable domain of TCR clone 334014 (TRAV21, TRAJ11)
CAATSGYSTLTF

SEQ ID NO: 668028 - protein, 16 aa, Homo sapiens
  CDR3 for beta chain variable domain of TCR clone 334014 (TRBV28, TRBJ2-2)
CASSLEGGWNTGELFF

SEQ ID NO: 668029 - protein, 12 aa, Homo sapiens
  CDR3 for alpha chain variable domain of TCR clone 334015 (TRAV12-3, TRAJ20)
CAMVRGDYKLSF

SEQ ID NO: 668030 - protein, 13 aa, Homo sapiens
  CDR3 for beta chain variable domain of TCR clone 334015 (TRBV20-1, TRBJ2-7)
CSAQTGLSYEQYF

SEQ ID NO: 668031 - protein, 11 aa, Homo sapiens
  CDR3 for alpha chain variable domain of TCR clone 334016 (TRAV1-1, TRAJ23)
CAVRQGGKLIL

SEQ ID NO: 668032 - protein, 14 aa, Homo sapiens
  CDR3 for beta chain variable domain of TCR clone 334016 (TRBV19, TRBJ2-7)
CASSMGQGAIEQYF

SEQ ID NO: 668033 - protein, 14 aa, Homo sapiens
  CDR3 for alpha chain variable domain of TCR clone 334017 (TRAV27, TRAJ23)
CAGAFDNQGGKLIF

SEQ ID NO: 668034 - protein, 15 aa, Homo sapiens
  CDR3 for beta chain variable domain of TCR clone 334017 (TRBV7-3, TRBJ2-7)
CGSSLTGQGKYEQYF

SEQ ID NO: 668035 - protein, 12 aa, Homo sapiens
  CDR3 for alpha chain variable domain of TCR clone 334018 (TRAV13-2, TRAJ23)
CAERHRGGKLIF

SEQ ID NO: 668036 - protein, 13 aa, Homo sapiens
  CDR3 for beta chain variable domain of TCR clone 334018 (TRBV2, TRBJ1-6)
CADSGSYNSPLDF

SEQ ID NO: 668037 - protein, 12 aa, Homo sapiens
  CDR3 for alpha chain variable domain of TCR clone 334019 (TRAV8-3, TRAJ26)
CAGDNYGQNFAF

SEQ ID NO: 668038 - protein, 15 aa, Homo sapiens
  CDR3 for beta chain variable domain of TCR clone 334019 (TRBV12-4, TRBJ2-1)
CASSLSGGASNEQFF

SEQ ID NO: 668039 - protein, 15 aa, Homo sapiens
  CDR3 for alpha chain variable domain of TCR clone 334020 (TRAV21, TRAJ24)
CAARSSTDSWGKFQL

SEQ ID NO: 668040 - protein, 13 aa, Homo sapiens
  CDR3 for beta chain variable domain of TCR clone 334020 (TRBV11-3, TRBJ2-5)
CASSSTGEETQYF

SEQ ID NO: 668041 - protein, 13 aa, Homo sapiens
  CDR3 for alpha chain variable domain of TCR clone 334021 (TRAV12-2, TRAJ30)
CAVNLNRDDKIIF

SEQ ID NO: 668042 - protein, 13 aa, Homo sapiens
  CDR3 for beta chain variable domain of TCR clone 334021 (TRBV20-1, TRBJ2-7)
CSARPSTNYEQYF

SEQ ID NO: 668043 - protein, 14 aa, Homo sapiens
  CDR3 for alpha chain variable domain of TCR clone 334022 (TRAV12-1, TRAJ17)
CVVNYKAAGNKLTF

SEQ ID NO: 668044 - protein, 16 aa, Homo sapiens
  CDR3 for beta chain variable domain of TCR clone 334022 (TRBV7-3, TRBJ2-1)
CASSLEGYRSYNEQFF

SEQ ID NO: 668045 - protein, 14 aa, Homo sapiens
  CDR3 for alpha chain variable domain of TCR clone 334023 (TRAV26-1, TRAJ45)
CIEVTGGGADVLTF

SEQ ID NO: 668046 - protein, 12 aa, Homo sapiens
  CDR3 for beta chain variable domain of TCR clone 334023 (TRBV12-4, TRBJ2-7)
CASSLGGYEQYF

SEQ ID NO: 668047 - protein, 14 aa, Homo sapiens
  CDR3 for alpha chain variable domain of TCR clone 334024 (TRAV23/DV6, TRAJ24)
CAASLSDSWGKLQF

SEQ ID NO: 668048 - protein, 15 aa, Homo sapiens
  CDR3 for beta chain variable domain of TCR clone 334024 (TRBV27, TRBJ1-6)
CASSFDRGLGSPLHF

SEQ ID NO: 668049 - protein, 14 aa, Homo sapiens
  CDR3 for alpha chain variable domain of TCR clone 334025 (TRAV38-1, TRAJ40)
CALRPTSGTYKYIF

SEQ ID NO: 668050 - protein, 14 aa, Homo sapiens
  CDR3 for beta chain variable domain of TCR clone 334025 (TRBV7-3, TRBJ2-2)
CASSLNSNTGELFF

SEQ ID NO: 668051 - protein, 11 aa, Homo sapiens
  CDR3 for alpha chain variable domain of TCR clone 334026 (TRAV1-2, TRAJ20)
CAVANDYKPSF

SEQ ID NO: 668052 - protein, 13 aa, Homo sapiens
  CDR3 for beta chain variable domain of TCR clone 334026 (TRBV7-3, TRBJ1-1)
CASSQDWGAEAFF

SEQ ID NO: 668053 - protein, 13 aa, Homo sapiens
  CDR3 for alpha chain variable domain of TCR clone 334027 (TRAV22, TRAJ29)
CAVRGSGNTPLVF

SEQ ID NO: 668054 - protein, 14 aa, Homo sapiens
  CDR3 for beta chain variable domain of TCR clone 334027 (TRBV7-2, TRBJ2-7)
CASRSQGAAYEQYF

SEQ ID NO: 668055 - protein, 14 aa, Homo sapiens
  CDR3 for alpha chain variable domain of TCR clone 334028 (TRAV17, TRAJ57)
CATDPQGGSEKLVF

SEQ ID NO: 668056 - protein, 14 aa, Homo sapiens
  CDR3 for beta chain variable domain of TCR clone 334028 (TRBV7-9, TRBJ2-2)
CASSGLADTGELFF

SEQ ID NO: 668057 - protein, 14 aa, Homo sapiens
  CDR3 for alpha chain variable domain of TCR clone 334029 (TRAV8-1, TRAJ34)
CAVITTYNTDKLIF

SEQ ID NO: 668058 - protein, 12 aa, Homo sapiens
  CDR3 for beta chain variable domain of TCR clone 334029 (TRBV11-2, TRBJ2-5)
CASSLVGETQYF

SEQ ID NO: 668059 - protein, 14 aa, Homo sapiens
  CDR3 for alpha chain variable domain of TCR clone 334030 (TRAV2, TRAJ9)
CAVEDRSGGFKTIF

SEQ ID NO: 668060 - protein, 12 aa, Homo sapiens
  CDR3 for beta chain variable domain of TCR clone 334030 (TRBV12-4, TRBJ1-3)
CASSFSGNTIYF

SEQ ID NO: 668061 - protein, 19 aa, Homo sapiens
  CDR3 for alpha chain variable domain of TCR clone 334031 (TRAV29/DV5, TRAJ53)
CSVLLCSKPDRVSNYKLTF

SEQ ID NO: 668062 - protein, 15 aa, Homo sapiens
  CDR3 for beta chain variable domain of TCR clone 334031 (TRBV19, TRBJ2-4)
CASSIGLAGANIQYF

SEQ ID NO: 668063 - protein, 14 aa, Homo sapiens
  CDR3 for alpha chain variable domain of TCR clone 334032 (TRAV26-1, TRAJ38)
CIADNAGNNRKLIL

SEQ ID NO: 668064 - protein, 14 aa, Homo sapiens
  CDR3 for beta chain variable domain of TCR clone 334032 (TRBV11-2, TRBJ2-5)
CASSRTGGIETQYF

SEQ ID NO: 668065 - protein, 16 aa, Homo sapiens
  CDR3 for alpha chain variable domain of TCR clone 334033 (TRAV21, TRAJ52)
CAVTNAGGTSYGKLTF

SEQ ID NO: 668066 - protein, 14 aa, Homo sapiens
  CDR3 for beta chain variable domain of TCR clone 334033 (TRBV4-1, TRBJ2-2)
CASSQAVNTGELFF

SEQ ID NO: 668067 - protein, 17 aa, Homo sapiens
  CDR3 for alpha chain variable domain of TCR clone 334034 (TRAV3, TRAJ6)
CAVRDGPRAGGSYIPPF

SEQ ID NO: 668068 - protein, 18 aa, Homo sapiens
  CDR3 for beta chain variable domain of TCR clone 334034 (TRBV25-1, TRBJ1-2)
CASSGLQNGQGLIFGYTF

SEQ ID NO: 668069 - protein, 10 aa, Homo sapiens
  CDR3 for alpha chain variable domain of TCR clone 334035 (TRAV13-1, TRAJ8)
CTAPFQKLVF

SEQ ID NO: 668070 - protein, 20 aa, Homo sapiens
  CDR3 for beta chain variable domain of TCR clone 334035 (TRBV3-1, TRBJ2-6)
CASSPRPGLEGGAGANVLTF

SEQ ID NO: 668071 - protein, 16 aa, Homo sapiens
  CDR3 for alpha chain variable domain of TCR clone 334036 (TRAV30, TRAJ24)
CGTEIVDDDSWGKFQF

SEQ ID NO: 668072 - protein, 14 aa, Homo sapiens
  CDR3 for beta chain variable domain of TCR clone 334036 (TRBV12-5, TRBJ2-5)
CASGSRTHQETQYF

SEQ ID NO: 668073 - protein, 14 aa, Homo sapiens
  CDR3 for alpha chain variable domain of TCR clone 334037 (TRAV21, TRAJ45)
CAVVSGGGADGLTC

SEQ ID NO: 668074 - protein, 14 aa, Homo sapiens
  CDR3 for beta chain variable domain of TCR clone 334037 (TRBV20-1, TRBJ2-3)
CSALGLEGADTQYF

SEQ ID NO: 668075 - protein, 21 aa, Homo sapiens
  CDR3 for alpha chain variable domain of TCR clone 334038 (TRAV25, TRAJ47)
TATQTTDVGTYFREYGNKLVF

SEQ ID NO: 668076 - protein, 16 aa, Homo sapiens
  CDR3 for beta chain variable domain of TCR clone 334038 (TRBV6-6, TRBJ2-1)
CASSWGGQGPYNEQFF

SEQ ID NO: 668077 - protein, 16 aa, Homo sapiens
  CDR3 for alpha chain variable domain of TCR clone 334039 (TRAV4, TRAJ22)
CLVGDLCSGSARQLTF

SEQ ID NO: 668078 - protein, 14 aa, Homo sapiens
  CDR3 for beta chain variable domain of TCR clone 334039 (TRBV28, TRBJ2-3)
CASSWRGRADTQYF

SEQ ID NO: 668079 - protein, 14 aa, Homo sapiens
  CDR3 for alpha chain variable domain of TCR clone 334040 (TRAV17, TRAJ57)
CATDPQCGSEKLVF

SEQ ID NO: 668080 - protein, 16 aa, Homo sapiens
  CDR3 for beta chain variable domain of TCR clone 334040 (TRBV27, TRBJ2-2)
CASSFRGLVRTGELFF

SEQ ID NO: 668081 - protein, 15 aa, Homo sapiens
  CDR3 for alpha chain variable domain of TCR clone 334041 (TRAV27, TRAJ53)
CRAINSGGSNYKLTF

SEQ ID NO: 668082 - protein, 14 aa, Homo sapiens
  CDR3 for beta chain variable domain of TCR clone 334041 (TRBV7-3, TRBJ2-1)
CASSLAGWTNEQFF

SEQ ID NO: 668083 - protein, 11 aa, Homo sapiens
  CDR3 for alpha chain variable domain of TCR clone 334042 (TRAV2, TRAJ13)
CASGGYQKVTF

SEQ ID NO: 668084 - protein, 17 aa, Homo sapiens
  CDR3 for beta chain variable domain of TCR clone 334042 (TRBV11-2, TRBJ2-3)
CASSLEGAGALTDTQYF

SEQ ID NO: 668085 - protein, 14 aa, Homo sapiens
  CDR3 for alpha chain variable domain of TCR clone 334043 (TRAV1-2, TRAJ16)
CAVNRFSAGQKLLF

SEQ ID NO: 668086 - protein, 14 aa, Homo sapiens
  CDR3 for beta chain variable domain of TCR clone 334043 (TRBV19, TRBJ2-7)
CASSVDSESYEQYF

SEQ ID NO: 668087 - protein, 13 aa, Homo sapiens
  CDR3 for alpha chain variable domain of TCR clone 334044 (TRAV27, TRAJ41)
CAGEGNSGYARNF

SEQ ID NO: 668088 - protein, 14 aa, Homo sapiens
  CDR3 for beta chain variable domain of TCR clone 334044 (TRBV7-2, TRBJ1-1)
CASSFLTGTTEAFV

SEQ ID NO: 668089 - protein, 15 aa, Homo sapiens
  CDR3 for alpha chain variable domain of TCR clone 334045 (TRAV13-2, TRAJ23)
CAERGFYNQGGKLIF

SEQ ID NO: 668090 - protein, 14 aa, Homo sapiens
  CDR3 for beta chain variable domain of TCR clone 334045 (TRBV4-1, TRBJ2-3)
CASSQDGSTDTQYF

SEQ ID NO: 668091 - protein, 11 aa, Homo sapiens
  CDR3 for alpha chain variable domain of TCR clone 334046 (TRAV1-2, TRAJ40)
CAVPGTYKYIF

SEQ ID NO: 668092 - protein, 14 aa, Homo sapiens
  CDR3 for beta chain variable domain of TCR clone 334046 (TRBV7-9, TRBJ2-2)
CASSGLADTGELFF

SEQ ID NO: 668093 - protein, 12 aa, Homo sapiens
  CDR3 for alpha chain variable domain of TCR clone 334047 (TRAV12-3, TRAJ17)
CAMTLTGNKLTF

SEQ ID NO: 668094 - protein, 15 aa, Homo sapiens
  CDR3 for beta chain variable domain of TCR clone 334047 (TRBV27, TRBJ2-1)
CASSLARGAYNEQFV

SEQ ID NO: 668095 - protein, 13 aa, Homo sapiens
  CDR3 for alpha chain variable domain of TCR clone 334048 (TRAV2, TRAJ36)
CAVHQTGANNLFF

SEQ ID NO: 668096 - protein, 12 aa, Homo sapiens
  CDR3 for beta chain variable domain of TCR clone 334048 (TRBV19, TRBJ1-1)
CASMNRYTEAFF

SEQ ID NO: 668097 - protein, 15 aa, Homo sapiens
  CDR3 for alpha chain variable domain of TCR clone 334049 (TRAV8-6, TRAJ26)
CAVSDQSPGGQNFFF

SEQ ID NO: 668098 - protein, 13 aa, Homo sapiens
  CDR3 for beta chain variable domain of TCR clone 334049 (TRBV27, TRBJ2-7)
CASSLRHRYEQYF

SEQ ID NO: 668099 - protein, 21 aa, Homo sapiens
  CDR3 for alpha chain variable domain of TCR clone 334050 (TRAV1-1, TRAJ6)
CLLLLRCERLERTGGSYIPTF

SEQ ID NO: 668100 - protein, 13 aa, Homo sapiens
  CDR3 for beta chain variable domain of TCR clone 334050 (TRBV10-2, TRBJ2-1)
CASGASGGYEQYF

SEQ ID NO: 668101 - protein, 13 aa, Homo sapiens
  CDR3 for alpha chain variable domain of TCR clone 334051 (TRAV17, TRAJ54)
CATSWAGAQKLVF

SEQ ID NO: 668102 - protein, 15 aa, Homo sapiens
  CDR3 for beta chain variable domain of TCR clone 334051 (TRBV4-3, TRBJ2-3)
CASSPSLLSTDTQYF

SEQ ID NO: 668103 - protein, 15 aa, Homo sapiens
  CDR3 for alpha chain variable domain of TCR clone 334052 (TRAV12-3, TRAJ6)
CAMSASTGGSYIPTF

SEQ ID NO: 668104 - protein, 16 aa, Homo sapiens
  CDR3 for beta chain variable domain of TCR clone 334052 (TRBV20-1, TRBJ1-2)
CSASMGQGVANYGETF

SEQ ID NO: 668105 - protein, 15 aa, Homo sapiens
  CDR3 for alpha chain variable domain of TCR clone 334053 (TRAV1-2, TRAJ15)
CAVDVMGSAGTALIF

SEQ ID NO: 668106 - protein, 17 aa, Homo sapiens
  CDR3 for beta chain variable domain of TCR clone 334053 (TRBV4-1, TRBJ1-5)
CASSQQPPTVANQPQHF

SEQ ID NO: 668107 - protein, 12 aa, Homo sapiens
  CDR3 for alpha chain variable domain of TCR clone 334054 (TRAV35, TRAJ30)
CAGLNRNDKIIF

SEQ ID NO: 668108 - protein, 15 aa, Homo sapiens
  CDR3 for beta chain variable domain of TCR clone 334054 (TRBV9, TRBJ1-6)
CASSVAGTGDSPLHF

SEQ ID NO: 668109 - protein, 11 aa, Homo sapiens
  CDR3 for alpha chain variable domain of TCR clone 334055 (TRAV17, TRAJ29)
CYVATDTPLVF

SEQ ID NO: 668110 - protein, 17 aa, Homo sapiens
  CDR3 for beta chain variable domain of TCR clone 334055 (TRBV4-1, TRBJ2-3)
CASSQVLQGGGTDTQYF

SEQ ID NO: 668111 - protein, 11 aa, Homo sapiens
  CDR3 for alpha chain variable domain of TCR clone 334056 (TRAV1-1, TRAJ23)
CAVRQGGKLIF

SEQ ID NO: 668112 - protein, 20 aa, Homo sapiens
  CDR3 for beta chain variable domain of TCR clone 334056 (TRBV7-8, TRBJ2-2)
CASSHVFPGPAIHITGELFF

SEQ ID NO: 668113 - protein, 16 aa, Homo sapiens
  CDR3 for alpha chain variable domain of TCR clone 334057 (TRAV14/DV4, TRAJ54)
CAMREGRIQGAQKLVF

SEQ ID NO: 668114 - protein, 13 aa, Homo sapiens
  CDR3 for beta chain variable domain of TCR clone 334057 (TRBV7-2, TRBJ2-2)
CASSLAVTGELFF

SEQ ID NO: 668115 - protein, 13 aa, Homo sapiens
  CDR3 for alpha chain variable domain of TCR clone 334058 (TRAV3, TRAJ20)
CAVRPLNDYKLSF

SEQ ID NO: 668116 - protein, 12 aa, Homo sapiens
  CDR3 for beta chain variable domain of TCR clone 334058 (TRBV6-1, TRBJ2-1)
CATYGLNNAQFF

SEQ ID NO: 668117 - protein, 12 aa, Homo sapiens
  CDR3 for alpha chain variable domain of TCR clone 334059 (TRAV13-1, TRAJ9)
WASHTGGFKTIF

SEQ ID NO: 668118 - protein, 18 aa, Homo sapiens
  CDR3 for beta chain variable domain of TCR clone 334059 (TRBV11-2, TRBJ2-3)
CASSLGGASRGAPNTQYF

SEQ ID NO: 668119 - protein, 16 aa, Homo sapiens
  CDR3 for alpha chain variable domain of TCR clone 334060 (TRAV8-3, TRAJ52)
CAVQPAGGTTYGKLTF

SEQ ID NO: 668120 - protein, 15 aa, Homo sapiens
  CDR3 for beta chain variable domain of TCR clone 334060 (TRBV11-2, TRBJ2-7)
CASSLAGGVATEQYF

SEQ ID NO: 668121 - protein, 14 aa, Homo sapiens
  CDR3 for alpha chain variable domain of TCR clone 334061 (TRAV17, TRAJ53)
CATDSGGSNYKLTF

SEQ ID NO: 668122 - protein, 16 aa, Homo sapiens
  CDR3 for beta chain variable domain of TCR clone 334061 (TRBV4-1, TRBJ1-1)
CASSQDAGMGNTEAFF

SEQ ID NO: 668123 - protein, 10 aa, Homo sapiens
  CDR3 for alpha chain variable domain of TCR clone 334062 (TRAV16, TRAJ22)
SAMYLRQLTF

SEQ ID NO: 668124 - protein, 14 aa, Homo sapiens
  CDR3 for beta chain variable domain of TCR clone 334062 (TRBV12-5, TRBJ2-5)
CASGSRTHQETQYF

SEQ ID NO: 668125 - protein, 15 aa, Homo sapiens
  CDR3 for alpha chain variable domain of TCR clone 334063 (TRAV4, TRAJ39)
CLVGPNNNAGNMLTF

SEQ ID NO: 668126 - protein, 16 aa, Homo sapiens
  CDR3 for beta chain variable domain of TCR clone 334063 (TRBV5-1, TRBJ1-1)
CASSSGGNSLNTEAFF

SEQ ID NO: 668127 - protein, 16 aa, Homo sapiens
  CDR3 for alpha chain variable domain of TCR clone 334064 (TRAV26-1, TRAJ44)
IASSESRTGTASKLTF

SEQ ID NO: 668128 - protein, 13 aa, Homo sapiens
  CDR3 for beta chain variable domain of TCR clone 334064 (TRBV7-2, TRBJ1-5)
CTSSFARNQPQHF

SEQ ID NO: 668129 - protein, 14 aa, Homo sapiens
  CDR3 for alpha chain variable domain of TCR clone 334065 (TRAV17, TRAJ57)
CATDPQDGSEKLVF

SEQ ID NO: 668130 - protein, 18 aa, Homo sapiens
  CDR3 for beta chain variable domain of TCR clone 334065 (TRBV25-1, TRBJ2-1)
CASSESRAGGPGYNEQFF

SEQ ID NO: 668131 - protein, 15 aa, Homo sapiens
  CDR3 for alpha chain variable domain of TCR clone 334066 (TRAV3, TRAJ5)
CAVTDRKTGRRALTF

SEQ ID NO: 668132 - protein, 15 aa, Homo sapiens
  CDR3 for beta chain variable domain of TCR clone 334066 (TRBV7-8, TRBJ2-1)
CASSLADSLYNEQFF

SEQ ID NO: 668133 - protein, 22 aa, Homo sapiens
  CDR3 for alpha chain variable domain of TCR clone 334067 (TRAV8-3, TRAJ30)
CAVGDMNRDERSSLEKGHDFIF

SEQ ID NO: 668134 - protein, 17 aa, Homo sapiens
  CDR3 for beta chain variable domain of TCR clone 334067 (TRBV19, TRBJ2-2)
CASSRNPGGFGTGELFF

SEQ ID NO: 668135 - protein, 17 aa, Homo sapiens
  CDR3 for alpha chain variable domain of TCR clone 334068 (TRAV2, TRAJ23)
CCLLLCWERGLGGKLIF

SEQ ID NO: 668136 - protein, 13 aa, Homo sapiens
  CDR3 for beta chain variable domain of TCR clone 334068 (TRBV7-3, TRBJ1-1)
CASSQDWGAEAFF

SEQ ID NO: 668137 - protein, 13 aa, Homo sapiens
  CDR3 for alpha chain variable domain of TCR clone 334069 (TRAV12-3, TRAJ54)
CAMFAQGAQKLVF

SEQ ID NO: 668138 - protein, 16 aa, Homo sapiens
  CDR3 for beta chain variable domain of TCR clone 334069 (TRBV7-6, TRBJ2-3)
CASSHRRGGLGDTQYF

SEQ ID NO: 668139 - protein, 12 aa, Homo sapiens
  CDR3 for alpha chain variable domain of TCR clone 334070 (TRAV26-1, TRAJ31)
CIVRNNNARLMF

SEQ ID NO: 668140 - protein, 15 aa, Homo sapiens
  CDR3 for beta chain variable domain of TCR clone 334070 (TRBV20-1, TRBJ2-4)
CSARDLTGGPNIQYL

SEQ ID NO: 668141 - protein, 13 aa, Homo sapiens
  CDR3 for alpha chain variable domain of TCR clone 334071 (TRAV2, TRAJ12)
CAVGADSSYKLIF

SEQ ID NO: 668142 - protein, 13 aa, Homo sapiens
  CDR3 for beta chain variable domain of TCR clone 334071 (TRBV20-1, TRBJ2-1)
CSARSSARDEQFF

SEQ ID NO: 668143 - protein, 15 aa, Homo sapiens
  CDR3 for alpha chain variable domain of TCR clone 334072 (TRAV8-3, TRAJ45)
CASSYSGGGAHGLTF

SEQ ID NO: 668144 - protein, 17 aa, Homo sapiens
  CDR3 for beta chain variable domain of TCR clone 334072 (TRBV7-8, TRBJ1-2)
CASSLRPLQGHLYGYTF

SEQ ID NO: 668145 - protein, 14 aa, Homo sapiens
  CDR3 for alpha chain variable domain of TCR clone 334073 (TRAV1-2, TRAJ16)
CAVNRFSDGQKLLS

SEQ ID NO: 668146 - protein, 13 aa, Homo sapiens
  CDR3 for beta chain variable domain of TCR clone 334073 (TRBV7-9, TRBJ1-2)
CASSPSNFWGYTF

SEQ ID NO: 668147 - protein, 12 aa, Homo sapiens
  CDR3 for alpha chain variable domain of TCR clone 334074 (TRAV27, TRAJ36)
ASTPAGANNLFF

SEQ ID NO: 668148 - protein, 13 aa, Homo sapiens
  CDR3 for beta chain variable domain of TCR clone 334074 (TRBV7-9, TRBJ2-3)
CASSPRSTDTQYF

SEQ ID NO: 668149 - protein, 15 aa, Homo sapiens
  CDR3 for alpha chain variable domain of TCR clone 334075 (TRAV21, TRAJ53)
CATLHSGGSNYKLTF

SEQ ID NO: 668150 - protein, 16 aa, Homo sapiens
  CDR3 for beta chain variable domain of TCR clone 334075 (TRBV10-3, TRBJ2-1)
CAIRGGGRGDYNEQFF

SEQ ID NO: 668151 - protein, 13 aa, Homo sapiens
  CDR3 for alpha chain variable domain of TCR clone 334076 (TRAV8-6, TRAJ41)
CAVSENSGYALNF

SEQ ID NO: 668152 - protein, 17 aa, Homo sapiens
  CDR3 for beta chain variable domain of TCR clone 334076 (TRBV7-2, TRBJ2-3)
CASSLEVRGTSTDTQYF

SEQ ID NO: 668153 - protein, 11 aa, Homo sapiens
  CDR3 for alpha chain variable domain of TCR clone 334077 (TRAV13-1, TRAJ43)
CRGRFNNDMRF

SEQ ID NO: 668154 - protein, 12 aa, Homo sapiens
  CDR3 for beta chain variable domain of TCR clone 334077 (TRBV11-2, TRBJ2-1)
CASSPGNNEQFF

SEQ ID NO: 668155 - protein, 15 aa, Homo sapiens
  CDR3 for alpha chain variable domain of TCR clone 334078 (TRAV8-3, TRAJ20)
CAVVAKGSNDYKLSF

SEQ ID NO: 668156 - protein, 12 aa, Homo sapiens
  CDR3 for beta chain variable domain of TCR clone 334078 (TRBV7-2, TRBJ1-2)
CASRDSIYGYTF

SEQ ID NO: 668157 - protein, 13 aa, Homo sapiens
  CDR3 for alpha chain variable domain of TCR clone 334079 (TRAV23/DV6, TRAJ20)
CAAGGFHDYKLSF

SEQ ID NO: 668158 - protein, 13 aa, Homo sapiens
  CDR3 for beta chain variable domain of TCR clone 334079 (TRBV7-3, TRBJ1-1)
CASSQDWGAEAFF

SEQ ID NO: 668159 - protein, 15 aa, Homo sapiens
  CDR3 for alpha chain variable domain of TCR clone 334080 (TRAV23/DV6, TRAJ18)
CAARYRGSTLGRLYF

SEQ ID NO: 668160 - protein, 16 aa, Homo sapiens
  CDR3 for beta chain variable domain of TCR clone 334080 (TRBV11-2, TRBJ1-2)
CASSLDRGGNNYGYTF

SEQ ID NO: 668161 - protein, 12 aa, Homo sapiens
  CDR3 for alpha chain variable domain of TCR clone 334081 (TRAV21, TRAJ20)
CCGLRVDYKLSF

SEQ ID NO: 668162 - protein, 18 aa, Homo sapiens
  CDR3 for beta chain variable domain of TCR clone 334081 (TRBV7-6, TRBJ2-1)
CASSPRTSGMSSYNEQFF

SEQ ID NO: 668163 - protein, 14 aa, Homo sapiens
  CDR3 for alpha chain variable domain of TCR clone 334082 (TRAV12-2, TRAJ13)
CAVKKTGGYQKVTF

SEQ ID NO: 668164 - protein, 15 aa, Homo sapiens
  CDR3 for beta chain variable domain of TCR clone 334082 (TRBV6-3, TRBJ2-7)
CASSSPVTVFYEQYF

SEQ ID NO: 668165 - protein, 15 aa, Homo sapiens
  CDR3 for alpha chain variable domain of TCR clone 334083 (TRAV3, TRAJ5)
CAVRDRKTGSRELTF

SEQ ID NO: 668166 - protein, 15 aa, Homo sapiens
  CDR3 for beta chain variable domain of TCR clone 334083 (TRBV7-8, TRBJ2-1)
CASSLADSLYNEQFF

SEQ ID NO: 668167 - protein, 12 aa, Homo sapiens
  CDR3 for alpha chain variable domain of TCR clone 334084 (TRAV16, TRAJ10)
RSRTGGGNKLTF

SEQ ID NO: 668168 - protein, 13 aa, Homo sapiens
  CDR3 for beta chain variable domain of TCR clone 334084 (TRBV7-3, TRBJ1-1)
CASSQDWGAEAFF

SEQ ID NO: 668169 - protein, 18 aa, Homo sapiens
  CDR3 for alpha chain variable domain of TCR clone 334085 (TRAV21, TRAJ52)
CAVRPSPAGGTSYGKLTF

SEQ ID NO: 668170 - protein, 19 aa, Homo sapiens
  CDR3 for beta chain variable domain of TCR clone 334085 (TRBV27, TRBJ2-2)
CTSVPAVPPGRERTGELFF

SEQ ID NO: 668171 - protein, 15 aa, Homo sapiens
  CDR3 for alpha chain variable domain of TCR clone 334086 (TRAV26-1, TRAJ17)
CIVSSVKAAGNKLTF

SEQ ID NO: 668172 - protein, 14 aa, Homo sapiens
  CDR3 for beta chain variable domain of TCR clone 334086 (TRBV6-1, TRBJ2-2)
CASTWQGNTGELFF

SEQ ID NO: 668173 - protein, 15 aa, Homo sapiens
  CDR3 for alpha chain variable domain of TCR clone 334087 (TRAV12-3, TRAJ6)
YAMSATTGGSYIPTF

SEQ ID NO: 668174 - protein, 15 aa, Homo sapiens
  CDR3 for beta chain variable domain of TCR clone 334087 (TRBV7-6, TRBJ1-5)
CASSQSSGINQPQHF

SEQ ID NO: 668175 - protein, 15 aa, Homo sapiens
  CDR3 for alpha chain variable domain of TCR clone 334088 (TRAV21, TRAJ57)
CAVRPTQGGSEKLVF

SEQ ID NO: 668176 - protein, 14 aa, Homo sapiens
  CDR3 for beta chain variable domain of TCR clone 334088 (TRBV14, TRBJ2-1)
CASSQVQGRGEQFF

SEQ ID NO: 668177 - protein, 17 aa, Homo sapiens
  CDR3 for alpha chain variable domain of TCR clone 334089 (TRAV3, TRAJ29)
CAVRDSDSEFRKHTSFL

SEQ ID NO: 668178 - protein, 15 aa, Homo sapiens
  CDR3 for beta chain variable domain of TCR clone 334089 (TRBV7-2, TRBJ2-5)
CASSGILAGAETQYF

SEQ ID NO: 668179 - protein, 13 aa, Homo sapiens
  CDR3 for alpha chain variable domain of TCR clone 334090 (TRAV13-1, TRAJ20)
CAASILDDYKLSF

SEQ ID NO: 668180 - protein, 13 aa, Homo sapiens
  CDR3 for beta chain variable domain of TCR clone 334090 (TRBV10-3, TRBJ2-7)
CASKLAVNYEQYF

SEQ ID NO: 668181 - protein, 14 aa, Homo sapiens
  CDR3 for alpha chain variable domain of TCR clone 334091 (TRAV1-2, TRAJ16)
CAVKRFSDGQKLLF

SEQ ID NO: 668182 - protein, 16 aa, Homo sapiens
  CDR3 for beta chain variable domain of TCR clone 334091 (TRBV19, TRBJ2-1)
CASSKAGPSSYNEQFF

SEQ ID NO: 668183 - protein, 14 aa, Homo sapiens
  CDR3 for alpha chain variable domain of TCR clone 334092 (TRAV8-4, TRAJ13)
CAVTLSGGYQKVTF

SEQ ID NO: 668184 - protein, 14 aa, Homo sapiens
  CDR3 for beta chain variable domain of TCR clone 334092 (TRBV7-8, TRBJ2-7)
CASSPRDRVYEQYF

SEQ ID NO: 668185 - protein, 14 aa, Homo sapiens
  CDR3 for alpha chain variable domain of TCR clone 334093 (TRAV1-2, TRAJ8)
CAVREVTGLQKLVF

SEQ ID NO: 668186 - protein, 15 aa, Homo sapiens
  CDR3 for beta chain variable domain of TCR clone 334093 (TRBV29-1, TRBJ2-1)
CSVPTGLALYNEQFF

SEQ ID NO: 668187 - protein, 13 aa, Homo sapiens
  CDR3 for alpha chain variable domain of TCR clone 334094 (TRAV3, TRAJ20)
CCEAFCNEYKLSF

SEQ ID NO: 668188 - protein, 15 aa, Homo sapiens
  CDR3 for beta chain variable domain of TCR clone 334094 (TRBV19, TRBJ2-6)
CASVRRDSGANVLTF

SEQ ID NO: 668189 - protein, 15 aa, Homo sapiens
  CDR3 for alpha chain variable domain of TCR clone 334095 (TRAV21, TRAJ53)
CATLNSGGSNYKLTF

SEQ ID NO: 668190 - protein, 12 aa, Homo sapiens
  CDR3 for beta chain variable domain of TCR clone 334095 (TRBV18, TRBJ1-1)
CASSPGGTEAFF

SEQ ID NO: 668191 - protein, 14 aa, Homo sapiens
  CDR3 for alpha chain variable domain of TCR clone 334096 (TRAV2, TRAJ37)
CAVDFTSNTGKLIF

SEQ ID NO: 668192 - protein, 14 aa, Homo sapiens
  CDR3 for beta chain variable domain of TCR clone 334096 (TRBV11-2, TRBJ2-3)
CASSLYAGRDTQYF

SEQ ID NO: 668193 - protein, 15 aa, Homo sapiens
  CDR3 for alpha chain variable domain of TCR clone 334097 (TRAV12-2, TRAJ11)
CAAPGLNSGYSTLTF

SEQ ID NO: 668194 - protein, 15 aa, Homo sapiens
  CDR3 for beta chain variable domain of TCR clone 334097 (TRBV7-9, TRBJ1-4)
CASSATGGNNEKLFF

SEQ ID NO: 668195 - protein, 14 aa, Homo sapiens
  CDR3 for alpha chain variable domain of TCR clone 334098 (TRAV1-2, TRAJ16)
CAVNRFSDGQKLLF

SEQ ID NO: 668196 - protein, 18 aa, Homo sapiens
  CDR3 for beta chain variable domain of TCR clone 334098 (TRBV18, TRBJ1-1)
CASSLPGAPQGAGTEAFF

SEQ ID NO: 668197 - protein, 12 aa, Homo sapiens
  CDR3 for alpha chain variable domain of TCR clone 334099 (TRAV13-2, TRAJ23)
CAERHRGGKLIF

SEQ ID NO: 668198 - protein, 16 aa, Homo sapiens
  CDR3 for beta chain variable domain of TCR clone 334099 (TRBV4-1, TRBJ2-5)
GASSHADRAGGETQYF

SEQ ID NO: 668199 - protein, 15 aa, Homo sapiens
  CDR3 for alpha chain variable domain of TCR clone 334100 (TRAV17, TRAJ23)
CATDAEDNQGGKLIF

SEQ ID NO: 668200 - protein, 12 aa, Homo sapiens
  CDR3 for beta chain variable domain of TCR clone 334100 (TRBV2, TRBJ2-1)
CAKRAGYNEQFF

SEQ ID NO: 668201 - protein, 15 aa, Homo sapiens
  CDR3 for alpha chain variable domain of TCR clone 334101 (TRAV8-1, TRAJ37)
CAVKKGSGNTGKLIF

SEQ ID NO: 668202 - protein, 17 aa, Homo sapiens
  CDR3 for beta chain variable domain of TCR clone 334101 (TRBV12-4, TRBJ1-1)
CASSLSGFRTRNTEAFF

SEQ ID NO: 668203 - protein, 14 aa, Homo sapiens
  CDR3 for alpha chain variable domain of TCR clone 334102 (TRAV21, TRAJ35)
CAVMPIGFGNVLHC

SEQ ID NO: 668204 - protein, 15 aa, Homo sapiens
  CDR3 for beta chain variable domain of TCR clone 334102 (TRBV10-3, TRBJ1-5)
CAISEVGGREQPQHF

SEQ ID NO: 668205 - protein, 18 aa, Homo sapiens
  CDR3 for alpha chain variable domain of TCR clone 334103 (TRAV12-3, TRAJ52)
CAMSVGGAGGTSYGKLTF

SEQ ID NO: 668206 - protein, 15 aa, Homo sapiens
  CDR3 for beta chain variable domain of TCR clone 334103 (TRBV7-2, TRBJ2-3)
CASTPTSGETDTQYF

SEQ ID NO: 668207 - protein, 14 aa, Homo sapiens
  CDR3 for alpha chain variable domain of TCR clone 334104 (TRAV29/DV5, TRAJ36)
CAARRKTGANNLFF

SEQ ID NO: 668208 - protein, 15 aa, Homo sapiens
  CDR3 for beta chain variable domain of TCR clone 334104 (TRBV7-9, TRBJ1-4)
CAGSRTGGFNEKLFF

SEQ ID NO: 668209 - protein, 23 aa, Homo sapiens
  CDR3 for alpha chain variable domain of TCR clone 334105 (TRAV27, TRAJ24)
VIQASTSVQEFLGATDSWGKFQF

SEQ ID NO: 668210 - protein, 15 aa, Homo sapiens
  CDR3 for beta chain variable domain of TCR clone 334105 (TRBV11-2, TRBJ2-2)
CASSSGATYTGELFF

SEQ ID NO: 668211 - protein, 15 aa, Homo sapiens
  CDR3 for alpha chain variable domain of TCR clone 334106 (TRAV29/DV5, TRAJ42)
CAAKTDGGSQGNLIF

SEQ ID NO: 668212 - protein, 18 aa, Homo sapiens
  CDR3 for beta chain variable domain of TCR clone 334106 (TRBV20-1, TRBJ2-6)
CSARTLAGGPSGANVLTF

SEQ ID NO: 668213 - protein, 12 aa, Homo sapiens
  CDR3 for alpha chain variable domain of TCR clone 334107 (TRAV34, TRAJ27)
CGADTNAGKSTF

SEQ ID NO: 668214 - protein, 14 aa, Homo sapiens
  CDR3 for beta chain variable domain of TCR clone 334107 (TRBV7-2, TRBJ2-7)
CASSPKTSFYEQYF

SEQ ID NO: 668215 - protein, 15 aa, Homo sapiens
  CDR3 for alpha chain variable domain of TCR clone 334108 (TRAV3, TRAJ47)
CAVRDIGGYGNKLVF

SEQ ID NO: 668216 - protein, 17 aa, Homo sapiens
  CDR3 for beta chain variable domain of TCR clone 334108 (TRBV11-2, TRBJ2-1)
CASSLYPPGVGYNEQFF

SEQ ID NO: 668217 - protein, 12 aa, Homo sapiens
  CDR3 for alpha chain variable domain of TCR clone 334109 (TRAV21, TRAJ13)
PGPSGVYQKVTF

SEQ ID NO: 668218 - protein, 14 aa, Homo sapiens
  CDR3 for beta chain variable domain of TCR clone 334109 (TRBV20-1, TRBJ2-7)
CSAKDRKGAYEQYF

SEQ ID NO: 668219 - protein, 14 aa, Homo sapiens
  CDR3 for alpha chain variable domain of TCR clone 334110 (TRAV26-1, TRAJ34)
CIVRVAYNPDKLIF

SEQ ID NO: 668220 - protein, 14 aa, Homo sapiens
  CDR3 for beta chain variable domain of TCR clone 334110 (TRBV20-1, TRBJ2-7)
CSAWTALSSYEQYF

SEQ ID NO: 668221 - protein, 11 aa, Homo sapiens
  CDR3 for alpha chain variable domain of TCR clone 334111 (TRAV17, TRAJ9)
CATTGGFKTIF

SEQ ID NO: 668222 - protein, 11 aa, Homo sapiens
  CDR3 for beta chain variable domain of TCR clone 334111 (TRBV29-1, TRBJ2-5)
CSEDRTETQYF

SEQ ID NO: 668223 - protein, 13 aa, Homo sapiens
  CDR3 for alpha chain variable domain of TCR clone 334112 (TRAV2, TRAJ29)
CAAGNSGNTHLVF

SEQ ID NO: 668224 - protein, 16 aa, Homo sapiens
  CDR3 for beta chain variable domain of TCR clone 334112 (TRBV7-9, TRBJ1-2)
CASSPGGGAINYGYTF

SEQ ID NO: 668225 - protein, 13 aa, Homo sapiens
  CDR3 for alpha chain variable domain of TCR clone 334113 (TRAV16, TRAJ58)
LSNGETSGPRLTF

SEQ ID NO: 668226 - protein, 16 aa, Homo sapiens
  CDR3 for beta chain variable domain of TCR clone 334113 (TRBV19, TRBJ2-5)
CASSIDGTGLEETQYF

SEQ ID NO: 668227 - protein, 14 aa, Homo sapiens
  CDR3 for alpha chain variable domain of TCR clone 334114 (TRAV2, TRAJ9)
CAVEDRSGGFTTIF

SEQ ID NO: 668228 - protein, 13 aa, Homo sapiens
  CDR3 for beta chain variable domain of TCR clone 334114 (TRBV4-1, TRBJ2-2)
CASSQENTGELFF

SEQ ID NO: 668229 - protein, 14 aa, Homo sapiens
  CDR3 for alpha chain variable domain of TCR clone 334115 (TRAV13-1, TRAJ35)
CAASKGGFGNVLHR

SEQ ID NO: 668230 - protein, 13 aa, Homo sapiens
  CDR3 for beta chain variable domain of TCR clone 334115 (TRBV7-3, TRBJ1-1)
CASSQDWGADAFF

SEQ ID NO: 668231 - protein, 14 aa, Homo sapiens
  CDR3 for alpha chain variable domain of TCR clone 334116 (TRAV12-1, TRAJ17)
CVVNYKAAGNKLTF

SEQ ID NO: 668232 - protein, 13 aa, Homo sapiens
  CDR3 for beta chain variable domain of TCR clone 334116 (TRBV24-1, TRBJ2-2)
CATSDWSTGELFF

SEQ ID NO: 668233 - protein, 15 aa, Homo sapiens
  CDR3 for alpha chain variable domain of TCR clone 334117 (TRAV13-1, TRAJ36)
CAASTRQTGAKNLFF

SEQ ID NO: 668234 - protein, 16 aa, Homo sapiens
  CDR3 for beta chain variable domain of TCR clone 334117 (TRBV4-1, TRBJ2-7)
CASSQEWTSGPLEQYF

SEQ ID NO: 668235 - protein, 17 aa, Homo sapiens
  CDR3 for alpha chain variable domain of TCR clone 334118 (TRAV35, TRAJ47)
GLLDCRTHTEYGNKLVF

SEQ ID NO: 668236 - protein, 11 aa, Homo sapiens
  CDR3 for beta chain variable domain of TCR clone 334118 (TRBV29-1, TRBJ1-1)
CSVEVGTRTLF

SEQ ID NO: 668237 - protein, 14 aa, Homo sapiens
  CDR3 for alpha chain variable domain of TCR clone 334119 (TRAV16, TRAJ42)
CALLAGGSQGNLIF

SEQ ID NO: 668238 - protein, 15 aa, Homo sapiens
  CDR3 for beta chain variable domain of TCR clone 334119 (TRBV2, TRBJ2-7)
CASSEGLAWSYEQYF

SEQ ID NO: 668239 - protein, 17 aa, Homo sapiens
  CDR3 for alpha chain variable domain of TCR clone 334120 (TRAV4, TRAJ18)
CLVGERSVGSTLGRLYF

SEQ ID NO: 668240 - protein, 13 aa, Homo sapiens
  CDR3 for beta chain variable domain of TCR clone 334120 (TRBV7-9, TRBJ1-1)
CASSLAGVTEAFF

SEQ ID NO: 668241 - protein, 16 aa, Homo sapiens
  CDR3 for alpha chain variable domain of TCR clone 334121 (TRAV30, TRAJ24)
CGTEIVDADSWGKFQF

SEQ ID NO: 668242 - protein, 12 aa, Homo sapiens
  CDR3 for beta chain variable domain of TCR clone 334121 (TRBV5-1, TRBJ1-2)
CASSQQGFGYTF

SEQ ID NO: 668243 - protein, 17 aa, Homo sapiens
  CDR3 for alpha chain variable domain of TCR clone 334122 (TRAV13-1, TRAJ52)
CAASSGAGGTSYGKLTF

SEQ ID NO: 668244 - protein, 13 aa, Homo sapiens
  CDR3 for beta chain variable domain of TCR clone 334122 (TRBV12-4, TRBJ2-2)
CASSLVRRTRGFK

SEQ ID NO: 668245 - protein, 10 aa, Homo sapiens
  CDR3 for alpha chain variable domain of TCR clone 334123 (TRAV12-3, TRAJ34)
CAMSAYKLIF

SEQ ID NO: 668246 - protein, 15 aa, Homo sapiens
  CDR3 for beta chain variable domain of TCR clone 334123 (TRBV27, TRBJ2-1)
CASSNGGGSSNEQFF

SEQ ID NO: 668247 - protein, 11 aa, Homo sapiens
  CDR3 for alpha chain variable domain of TCR clone 334124 (TRAV12-1, TRAJ43)
CVEYDNNDMRV

SEQ ID NO: 668248 - protein, 15 aa, Homo sapiens
  CDR3 for beta chain variable domain of TCR clone 334124 (TRBV18, TRBJ2-5)
CASSPRASEAETQYF

SEQ ID NO: 668249 - protein, 14 aa, Homo sapiens
  CDR3 for alpha chain variable domain of TCR clone 334125 (TRAV34, TRAJ22)
CGADTSGSARQLTF

SEQ ID NO: 668250 - protein, 16 aa, Homo sapiens
  CDR3 for beta chain variable domain of TCR clone 334125 (TRBV2, TRBJ2-3)
CASTEGPRRWTDTQYF

SEQ ID NO: 668251 - protein, 13 aa, Homo sapiens
  CDR3 for alpha chain variable domain of TCR clone 334126 (TRAV27, TRAJ45)
CRSSGGGADGLTF

SEQ ID NO: 668252 - protein, 17 aa, Homo sapiens
  CDR3 for beta chain variable domain of TCR clone 334126 (TRBV11-2, TRBJ2-1)
CASSLYPPGVESNEQFF

SEQ ID NO: 668253 - protein, 14 aa, Homo sapiens
  CDR3 for alpha chain variable domain of TCR clone 334127 (TRAV1-2, TRAJ8)
CAVIEDTGFQKLVF

SEQ ID NO: 668254 - protein, 16 aa, Homo sapiens
  CDR3 for beta chain variable domain of TCR clone 334127 (TRBV20-1, TRBJ2-1)
CSARDLKQGMNNEQFF

SEQ ID NO: 668255 - protein, 13 aa, Homo sapiens
  CDR3 for alpha chain variable domain of TCR clone 334128 (TRAV27, TRAJ40)
CAGVLASTYKYIF

SEQ ID NO: 668256 - protein, 16 aa, Homo sapiens
  CDR3 for beta chain variable domain of TCR clone 334128 (TRBV11-3, TRBJ2-3)
CASSAISGAGTDTQYF

SEQ ID NO: 668257 - protein, 17 aa, Homo sapiens
  CDR3 for alpha chain variable domain of TCR clone 334129 (TRAV23/DV6, TRAJ58)
CAARLLRGETSGSRLTF

SEQ ID NO: 668258 - protein, 16 aa, Homo sapiens
  CDR3 for beta chain variable domain of TCR clone 334129 (TRBV7-3, TRBJ2-1)
CASSLTVESSYNEQFF

SEQ ID NO: 668259 - protein, 11 aa, Homo sapiens
  CDR3 for alpha chain variable domain of TCR clone 334130 (TRAV13-1, TRAJ39)
CASHAVNMLTF

SEQ ID NO: 668260 - protein, 14 aa, Homo sapiens
  CDR3 for beta chain variable domain of TCR clone 334130 (TRBV11-2, TRBJ1-5)
CASSLDRGRQPQHF

SEQ ID NO: 668261 - protein, 15 aa, Homo sapiens
  CDR3 for alpha chain variable domain of TCR clone 334131 (TRAV16, TRAJ48)
CALFISNFGNEKLTF

SEQ ID NO: 668262 - protein, 14 aa, Homo sapiens
  CDR3 for beta chain variable domain of TCR clone 334131 (TRBV28, TRBJ2-5)
CDSTGAGGVETQYF

SEQ ID NO: 668263 - protein, 13 aa, Homo sapiens
  CDR3 for alpha chain variable domain of TCR clone 334132 (TRAV1-1, TRAJ15)
CAVVDQAGTALIC

SEQ ID NO: 668264 - protein, 14 aa, Homo sapiens
  CDR3 for beta chain variable domain of TCR clone 334132 (TRBV5-4, TRBJ1-6)
CASSLWSDNSPLHF

SEQ ID NO: 668265 - protein, 12 aa, Homo sapiens
  CDR3 for alpha chain variable domain of TCR clone 334133 (TRAV21, TRAJ4)
STLAGGYNKLIF

SEQ ID NO: 668266 - protein, 19 aa, Homo sapiens
  CDR3 for beta chain variable domain of TCR clone 334133 (TRBV18, TRBJ1-3)
CASSPLSRTGMSSGNTIYF

SEQ ID NO: 668267 - protein, 16 aa, Homo sapiens
  CDR3 for alpha chain variable domain of TCR clone 334134 (TRAV8-3, TRAJ10)
CAVGPGVTGGGNKLTF

SEQ ID NO: 668268 - protein, 13 aa, Homo sapiens
  CDR3 for beta chain variable domain of TCR clone 334134 (TRBV18, TRBJ1-1)
CASSPGHSGEAFF

SEQ ID NO: 668269 - protein, 14 aa, Homo sapiens
  CDR3 for alpha chain variable domain of TCR clone 334135 (TRAV20, TRAJ42)
CAVQAGGSQGNLLF

SEQ ID NO: 668270 - protein, 14 aa, Homo sapiens
  CDR3 for beta chain variable domain of TCR clone 334135 (TRBV28, TRBJ1-2)
CASRIQGANYGYTF

SEQ ID NO: 668271 - protein, 12 aa, Homo sapiens
  CDR3 for alpha chain variable domain of TCR clone 334136 (TRAV12-2, TRAJ10)
WGVTGGGNKLTF

SEQ ID NO: 668272 - protein, 15 aa, Homo sapiens
  CDR3 for beta chain variable domain of TCR clone 334136 (TRBV11-3, TRBJ2-3)
CASLKDGREGDTQYF

SEQ ID NO: 668273 - protein, 12 aa, Homo sapiens
  CDR3 for alpha chain variable domain of TCR clone 334137 (TRAV20, TRAJ39)
CAVGNAGNMLNF

SEQ ID NO: 668274 - protein, 17 aa, Homo sapiens
  CDR3 for beta chain variable domain of TCR clone 334137 (TRBV4-1, TRBJ2-3)
CASSQGYVSGGTDTQYF

SEQ ID NO: 668275 - protein, 14 aa, Homo sapiens
  CDR3 for alpha chain variable domain of TCR clone 334138 (TRAV1-2, TRAJ16)
CAINRFSDGQKLLF

SEQ ID NO: 668276 - protein, 15 aa, Homo sapiens
  CDR3 for beta chain variable domain of TCR clone 334138 (TRBV9, TRBJ1-6)
CASSVAGTGDSTLHF

SEQ ID NO: 668277 - protein, 17 aa, Homo sapiens
  CDR3 for alpha chain variable domain of TCR clone 334139 (TRAV17, TRAJ23)
CATASPMIYNQGGKLIF

SEQ ID NO: 668278 - protein, 15 aa, Homo sapiens
  CDR3 for beta chain variable domain of TCR clone 334139 (TRBV7-9, TRBJ1-4)
CASSRTGGFNEKLFF

SEQ ID NO: 668279 - protein, 14 aa, Homo sapiens
  CDR3 for alpha chain variable domain of TCR clone 334140 (TRAV4, TRAJ20)
CLVGRRSNDYKLSF

SEQ ID NO: 668280 - protein, 18 aa, Homo sapiens
  CDR3 for beta chain variable domain of TCR clone 334140 (TRBV2, TRBJ2-5)
CASSGVPQGRGAQETQYF

SEQ ID NO: 668281 - protein, 14 aa, Homo sapiens
  CDR3 for alpha chain variable domain of TCR clone 334141 (TRAV1-2, TRAJ16)
CAVNRFSDGQKLPF

SEQ ID NO: 668282 - protein, 14 aa, Homo sapiens
  CDR3 for beta chain variable domain of TCR clone 334141 (TRBV5-1, TRBJ1-5)
CASSLGQGAQPQHF

SEQ ID NO: 668283 - protein, 15 aa, Homo sapiens
  CDR3 for alpha chain variable domain of TCR clone 334142 (TRAV3, TRAJ3)
CAVRDRRSSASKINF

SEQ ID NO: 668284 - protein, 13 aa, Homo sapiens
  CDR3 for beta chain variable domain of TCR clone 334142 (TRBV9, TRBJ2-5)
CASSPAGLGTQYF

SEQ ID NO: 668285 - protein, 16 aa, Homo sapiens
  CDR3 for alpha chain variable domain of TCR clone 334143 (TRAV12-3, TRAJ53)
CAMSPGSGGSNYKLTF

SEQ ID NO: 668286 - protein, 17 aa, Homo sapiens
  CDR3 for beta chain variable domain of TCR clone 334143 (TRBV28, TRBJ2-7)
WASSPLRGRRWKGGQYF

SEQ ID NO: 668287 - protein, 14 aa, Homo sapiens
  CDR3 for alpha chain variable domain of TCR clone 334144 (TRAV1-2, TRAJ16)
CAVNRFSYGQKLLF

SEQ ID NO: 668288 - protein, 15 aa, Homo sapiens
  CDR3 for beta chain variable domain of TCR clone 334144 (TRBV7-9, TRBJ2-2)
CASGPLDTFPGELFF

SEQ ID NO: 668289 - protein, 13 aa, Homo sapiens
  CDR3 for alpha chain variable domain of TCR clone 334145 (TRAV8-3, TRAJ44)
CAVVPGTASKLAF

SEQ ID NO: 668290 - protein, 14 aa, Homo sapiens
  CDR3 for beta chain variable domain of TCR clone 334145 (TRBV11-2, TRBJ2-3)
CASRRLARTDTQYF

SEQ ID NO: 668291 - protein, 15 aa, Homo sapiens
  CDR3 for alpha chain variable domain of TCR clone 334146 (TRAV4, TRAJ8)
CLVGEQHTGFKKLVF

SEQ ID NO: 668292 - protein, 15 aa, Homo sapiens
  CDR3 for beta chain variable domain of TCR clone 334146 (TRBV7-9, TRBJ2-5)
CASSNRDYLQETQYF

SEQ ID NO: 668293 - protein, 12 aa, Homo sapiens
  CDR3 for alpha chain variable domain of TCR clone 334147 (TRAV3, TRAJ43)
CAVRDPNNDMRF

SEQ ID NO: 668294 - protein, 14 aa, Homo sapiens
  CDR3 for beta chain variable domain of TCR clone 334147 (TRBV19, TRBJ2-2)
CASSTLHRSGELFF

SEQ ID NO: 668295 - protein, 14 aa, Homo sapiens
  CDR3 for alpha chain variable domain of TCR clone 334148 (TRAV13-1, TRAJ35)
CAASKGGFGTVLHR

SEQ ID NO: 668296 - protein, 13 aa, Homo sapiens
  CDR3 for beta chain variable domain of TCR clone 334148 (TRBV7-3, TRBJ1-1)
CASSQDWGAEAFF

SEQ ID NO: 668297 - protein, 18 aa, Homo sapiens
  CDR3 for alpha chain variable domain of TCR clone 334149 (TRAV27, TRAJ3)
SLVIQASLRGSSASKVIF

SEQ ID NO: 668298 - protein, 15 aa, Homo sapiens
  CDR3 for beta chain variable domain of TCR clone 334149 (TRBV28, TRBJ1-3)
CASSMGWSSGNTIYF

SEQ ID NO: 668299 - protein, 16 aa, Homo sapiens
  CDR3 for alpha chain variable domain of TCR clone 334150 (TRAV13-1, TRAJ48)
CAASIFVNFGNETSTF

SEQ ID NO: 668300 - protein, 16 aa, Homo sapiens
  CDR3 for beta chain variable domain of TCR clone 334150 (TRBV18, TRBJ1-5)
CASSPYRVEGNQPQHF

SEQ ID NO: 668301 - protein, 12 aa, Homo sapiens
  CDR3 for alpha chain variable domain of TCR clone 334151 (TRAV13-1, TRAJ21)
CAAKEGFNKFYF

SEQ ID NO: 668302 - protein, 15 aa, Homo sapiens
  CDR3 for beta chain variable domain of TCR clone 334151 (TRBV12-4, TRBJ2-5)
CASSPPTGLQEAQYF

SEQ ID NO: 668303 - protein, 14 aa, Homo sapiens
  CDR3 for alpha chain variable domain of TCR clone 334152 (TRAV8-3, TRAJ30)
CAGGDMNRDDKIIF

SEQ ID NO: 668304 - protein, 17 aa, Homo sapiens
  CDR3 for beta chain variable domain of TCR clone 334152 (TRBV19, TRBJ2-2)
CASSRNPGGFGTGELFF

SEQ ID NO: 668305 - protein, 13 aa, Homo sapiens
  CDR3 for alpha chain variable domain of TCR clone 334153 (TRAV3, TRAJ27)
CAVRPLGAGKSTF

SEQ ID NO: 668306 - protein, 14 aa, Homo sapiens
  CDR3 for beta chain variable domain of TCR clone 334153 (TRBV7-9, TRBJ2-2)
CASSQAVNTGELFF

SEQ ID NO: 668307 - protein, 14 aa, Homo sapiens
  CDR3 for alpha chain variable domain of TCR clone 334154 (TRAV2, TRAJ37)
CAVDFTSNTGKLIF

SEQ ID NO: 668308 - protein, 13 aa, Homo sapiens
  CDR3 for beta chain variable domain of TCR clone 334154 (TRBV4-1, TRBJ2-2)
CASSPENTGELFF

SEQ ID NO: 668309 - protein, 14 aa, Homo sapiens
  CDR3 for alpha chain variable domain of TCR clone 334155 (TRAV12-3, TRAJ10)
SHLPLTGGGNKLTF

SEQ ID NO: 668310 - protein, 12 aa, Homo sapiens
  CDR3 for beta chain variable domain of TCR clone 334155 (TRBV24-1, TRBJ2-7)
CATSDPGYEQYF

SEQ ID NO: 668311 - protein, 14 aa, Homo sapiens
  CDR3 for alpha chain variable domain of TCR clone 334156 (TRAV12-1, TRAJ30)
CVVNIGGRDDKIII

SEQ ID NO: 668312 - protein, 15 aa, Homo sapiens
  CDR3 for beta chain variable domain of TCR clone 334156 (TRBV18, TRBJ1-2)
CASSPSNTPNYGYTF

SEQ ID NO: 668313 - protein, 14 aa, Homo sapiens
  CDR3 for alpha chain variable domain of TCR clone 334157 (TRAV27, TRAJ37)
CAGERSSNTGKLIF

SEQ ID NO: 668314 - protein, 15 aa, Homo sapiens
  CDR3 for beta chain variable domain of TCR clone 334157 (TRBV11-3, TRBJ1-6)
CATSLDWGASSPLHF

SEQ ID NO: 668315 - protein, 15 aa, Homo sapiens
  CDR3 for alpha chain variable domain of TCR clone 334158 (TRAV27, TRAJ38)
CAARGNAGNNRKLIW

SEQ ID NO: 668316 - protein, 17 aa, Homo sapiens
  CDR3 for beta chain variable domain of TCR clone 334158 (TRBV5-8, TRBJ1-5)
CASSSRLQLYSNQPQHF

SEQ ID NO: 668317 - protein, 10 aa, Homo sapiens
  CDR3 for alpha chain variable domain of TCR clone 334159 (TRAV12-3, TRAJ49)
CAMNDDQFYF

SEQ ID NO: 668318 - protein, 12 aa, Homo sapiens
  CDR3 for beta chain variable domain of TCR clone 334159 (TRBV7-9, TRBJ2-7)
CASSLEGYEQYF

SEQ ID NO: 668319 - protein, 12 aa, Homo sapiens
  CDR3 for alpha chain variable domain of TCR clone 334160 (TRAV12-1, TRAJ40)
CVVYSGTYKYIF

SEQ ID NO: 668320 - protein, 17 aa, Homo sapiens
  CDR3 for beta chain variable domain of TCR clone 334160 (TRBV20-1, TRBJ2-7)
CSATRAGGVAGVEEQYF

SEQ ID NO: 668321 - protein, 13 aa, Homo sapiens
  CDR3 for alpha chain variable domain of TCR clone 334161 (TRAV17, TRAJ5)
CATMVTGRRALTF

SEQ ID NO: 668322 - protein, 15 aa, Homo sapiens
  CDR3 for beta chain variable domain of TCR clone 334161 (TRBV20-1, TRBJ2-5)
CSATRTSGSLETQYF

SEQ ID NO: 668323 - protein, 10 aa, Homo sapiens
  CDR3 for alpha chain variable domain of TCR clone 334162 (TRAV5, TRAJ34)
CAEETDKLIF

SEQ ID NO: 668324 - protein, 12 aa, Homo sapiens
  CDR3 for beta chain variable domain of TCR clone 334162 (TRBV11-2, TRBJ2-2)
CASSLGGGELFF

SEQ ID NO: 668325 - protein, 15 aa, Homo sapiens
  CDR3 for alpha chain variable domain of TCR clone 334163 (TRAV38-2/DV8, TRAJ45)
CAYWDSGGGADGLTF

SEQ ID NO: 668326 - protein, 15 aa, Homo sapiens
  CDR3 for beta chain variable domain of TCR clone 334163 (TRBV27, TRBJ1-5)
CASSLGTGFDQPQHF

SEQ ID NO: 668327 - protein, 15 aa, Homo sapiens
  CDR3 for alpha chain variable domain of TCR clone 334164 (TRAV13-2, TRAJ40)
CAENRSRQGTYKYIF

SEQ ID NO: 668328 - protein, 15 aa, Homo sapiens
  CDR3 for beta chain variable domain of TCR clone 334164 (TRBV19, TRBJ2-1)
CASSIGWNSNNEQFF

SEQ ID NO: 668329 - protein, 15 aa, Homo sapiens
  CDR3 for alpha chain variable domain of TCR clone 334165 (TRAV12-1, TRAJ4)
CVVTPWMGGYNKLNF

SEQ ID NO: 668330 - protein, 18 aa, Homo sapiens
  CDR3 for beta chain variable domain of TCR clone 334165 (TRBV11-2, TRBJ2-3)
CASSVRTSGSKKTDTQYF

SEQ ID NO: 668331 - protein, 13 aa, Homo sapiens
  CDR3 for alpha chain variable domain of TCR clone 334166 (TRAV3, TRAJ21)
CAVREPAFNKFYF

SEQ ID NO: 668332 - protein, 15 aa, Homo sapiens
  CDR3 for beta chain variable domain of TCR clone 334166 (TRBV2, TRBJ2-1)
CASSELAGGYNEQFF

SEQ ID NO: 668333 - protein, 18 aa, Homo sapiens
  CDR3 for alpha chain variable domain of TCR clone 334167 (TRAV26-1, TRAJ52)
CIVRVAGAGGTSYGKLTF

SEQ ID NO: 668334 - protein, 13 aa, Homo sapiens
  CDR3 for beta chain variable domain of TCR clone 334167 (TRBV29-1, TRBJ2-3)
SAALQGGADTQYF

SEQ ID NO: 668335 - protein, 23 aa, Homo sapiens
  CDR3 for alpha chain variable domain of TCR clone 334168 (TRAV23/DV6, TRAJ47)
SLHIMDSQPGDSATGGEGNKLVF

SEQ ID NO: 668336 - protein, 12 aa, Homo sapiens
  CDR3 for beta chain variable domain of TCR clone 334168 (TRBV28, TRBJ2-7)
CASSRSGYEQYF

SEQ ID NO: 668337 - protein, 19 aa, Homo sapiens
  CDR3 for alpha chain variable domain of TCR clone 334169 (TRAV21, TRAJ20)
SLVTQTPTSVLPNDYKLSF

SEQ ID NO: 668338 - protein, 14 aa, Homo sapiens
  CDR3 for beta chain variable domain of TCR clone 334169 (TRBV7-2, TRBJ1-3)
CASSRLRSGNTMYF

SEQ ID NO: 668339 - protein, 14 aa, Homo sapiens
  CDR3 for alpha chain variable domain of TCR clone 334170 (TRAV17, TRAJ53)
CATDAGGSNYKLTF

SEQ ID NO: 668340 - protein, 16 aa, Homo sapiens
  CDR3 for beta chain variable domain of TCR clone 334170 (TRBV4-1, TRBJ1-1)
CANSQDAGMGNTEAFF

SEQ ID NO: 668341 - protein, 22 aa, Homo sapiens
  CDR3 for alpha chain variable domain of TCR clone 334171 (TRAV27, TRAJ38)
CAARRNAGNNHIQNPEPAGYQL

SEQ ID NO: 668342 - protein, 13 aa, Homo sapiens
  CDR3 for beta chain variable domain of TCR clone 334171 (TRBV12-5, TRBJ2-3)
CASGDRQSDTQYF

SEQ ID NO: 668343 - protein, 14 aa, Homo sapiens
  CDR3 for alpha chain variable domain of TCR clone 334172 (TRAV8-3, TRAJ30)
CAVGYMNRDDKIIF

SEQ ID NO: 668344 - protein, 17 aa, Homo sapiens
  CDR3 for beta chain variable domain of TCR clone 334172 (TRBV19, TRBJ2-2)
CASSRNPGGFGTGELFL

SEQ ID NO: 668345 - protein, 11 aa, Homo sapiens
  CDR3 for alpha chain variable domain of TCR clone 334173 (TRAV3, TRAJ21)
CAVGNFNKFYF

SEQ ID NO: 668346 - protein, 13 aa, Homo sapiens
  CDR3 for beta chain variable domain of TCR clone 334173 (TRBV6-1, TRBJ1-1)
CASSRKGNTEAFF

SEQ ID NO: 668347 - protein, 13 aa, Homo sapiens
  CDR3 for alpha chain variable domain of TCR clone 334174 (TRAV12-1, TRAJ49)
CVVTPFTGNQFYV

SEQ ID NO: 668348 - protein, 13 aa, Homo sapiens
  CDR3 for beta chain variable domain of TCR clone 334174 (TRBV20-1, TRBJ1-1)
CSARGGANTEAFF

SEQ ID NO: 668349 - protein, 13 aa, Homo sapiens
  CDR3 for alpha chain variable domain of TCR clone 334175 (TRAV13-1, TRAJ5)
CAARVTGRRALTF

SEQ ID NO: 668350 - protein, 14 aa, Homo sapiens
  CDR3 for beta chain variable domain of TCR clone 334175 (TRBV20-1, TRBJ2-1)
CSAQIGGSANEQFF

SEQ ID NO: 668351 - protein, 16 aa, Homo sapiens
  CDR3 for alpha chain variable domain of TCR clone 334176 (TRAV30, TRAJ24)
CGTEIVDADSWGKFQF

SEQ ID NO: 668352 - protein, 14 aa, Homo sapiens
  CDR3 for beta chain variable domain of TCR clone 334176 (TRBV28, TRBJ2-3)
CASSLTDLLDTQYF

SEQ ID NO: 668353 - protein, 14 aa, Homo sapiens
  CDR3 for alpha chain variable domain of TCR clone 334177 (TRAV3, TRAJ22)
CAVRDYGSARQLTF

SEQ ID NO: 668354 - protein, 14 aa, Homo sapiens
  CDR3 for beta chain variable domain of TCR clone 334177 (TRBV7-2, TRBJ2-7)
CASSPKTSFYEQYF

SEQ ID NO: 668355 - protein, 15 aa, Homo sapiens
  CDR3 for alpha chain variable domain of TCR clone 334178 (TRAV27, TRAJ38)
CAARRNAGNNRKLIW

SEQ ID NO: 668356 - protein, 13 aa, Homo sapiens
  CDR3 for beta chain variable domain of TCR clone 334178 (TRBV12-5, TRBJ2-3)
CASGDRQSDTQCF

SEQ ID NO: 668357 - protein, 17 aa, Homo sapiens
  CDR3 for alpha chain variable domain of TCR clone 334179 (TRAV8-3, TRAJ42)
CAVGNPEERRSQGNLIF

SEQ ID NO: 668358 - protein, 14 aa, Homo sapiens
  CDR3 for beta chain variable domain of TCR clone 334179 (TRBV7-2, TRBJ2-5)
CASSPAGNQETQYF

SEQ ID NO: 668359 - protein, 15 aa, Homo sapiens
  CDR3 for alpha chain variable domain of TCR clone 334180 (TRAV27, TRAJ50)
CAGVGRGTSYDKVIF

SEQ ID NO: 668360 - protein, 14 aa, Homo sapiens
  CDR3 for beta chain variable domain of TCR clone 334180 (TRBV7-2, TRBJ1-1)
CASSFYDLNTEAFF

SEQ ID NO: 668361 - protein, 11 aa, Homo sapiens
  CDR3 for alpha chain variable domain of TCR clone 334181 (TRAV2, TRAJ33)
CAVDSNYKLIC

SEQ ID NO: 668362 - protein, 14 aa, Homo sapiens
  CDR3 for beta chain variable domain of TCR clone 334181 (TRBV11-2, TRBJ2-3)
CASSRLARTDTQYF

SEQ ID NO: 668363 - protein, 14 aa, Homo sapiens
  CDR3 for alpha chain variable domain of TCR clone 334182 (TRAV2, TRAJ37)
CAVDFTSNAGKLIL

SEQ ID NO: 668364 - protein, 15 aa, Homo sapiens
  CDR3 for beta chain variable domain of TCR clone 334182 (TRBV28, TRBJ2-1)
CASSIIAGGRSEQFF

SEQ ID NO: 668365 - protein, 12 aa, Homo sapiens
  CDR3 for alpha chain variable domain of TCR clone 334183 (TRAV12-3, TRAJ17)
CAMTLTGNKLTL

SEQ ID NO: 668366 - protein, 15 aa, Homo sapiens
  CDR3 for beta chain variable domain of TCR clone 334183 (TRBV11-3, TRBJ2-3)
CASLRAGREGDTQYF

SEQ ID NO: 668367 - protein, 16 aa, Homo sapiens
  CDR3 for alpha chain variable domain of TCR clone 334184 (TRAV30, TRAJ24)
CGAEIVDADSWGKFQF

SEQ ID NO: 668368 - protein, 14 aa, Homo sapiens
  CDR3 for beta chain variable domain of TCR clone 334184 (TRBV12-5, TRBJ2-5)
CASGLRTHQETQYF

SEQ ID NO: 668369 - protein, 15 aa, Homo sapiens
  CDR3 for alpha chain variable domain of TCR clone 334185 (TRAV26-1, TRAJ40)
CIVRAVPSGTYKYIF

SEQ ID NO: 668370 - protein, 14 aa, Homo sapiens
  CDR3 for beta chain variable domain of TCR clone 334185 (TRBV19, TRBJ2-1)
CASKDPGLAKEQFF

SEQ ID NO: 668371 - protein, 12 aa, Homo sapiens
  CDR3 for alpha chain variable domain of TCR clone 334186 (TRAV12-3, TRAJ17)
CAMTLTGNKRTL

SEQ ID NO: 668372 - protein, 14 aa, Homo sapiens
  CDR3 for beta chain variable domain of TCR clone 334186 (TRBV7-2, TRBJ2-7)
CASSPKTSFYEQYF

SEQ ID NO: 668373 - protein, 12 aa, Homo sapiens
  CDR3 for alpha chain variable domain of TCR clone 334187 (TRAV12-3, TRAJ17)
CATTLTGNKLTF

SEQ ID NO: 668374 - protein, 13 aa, Homo sapiens
  CDR3 for beta chain variable domain of TCR clone 334187 (TRBV7-3, TRBJ1-1)
CASSQDWGAEACF

SEQ ID NO: 668375 - protein, 14 aa, Homo sapiens
  CDR3 for alpha chain variable domain of TCR clone 334188 (TRAV16, TRAJ33)
CALSAMDSNYQLIW

SEQ ID NO: 668376 - protein, 17 aa, Homo sapiens
  CDR3 for beta chain variable domain of TCR clone 334188 (TRBV4-1, TRBJ2-5)
CASSQDPSGGPQETQYF

SEQ ID NO: 668377 - protein, 12 aa, Homo sapiens
  CDR3 for alpha chain variable domain of TCR clone 334189 (TRAV13-2, TRAJ23)
CAERHRGGKLIF

SEQ ID NO: 668378 - protein, 16 aa, Homo sapiens
  CDR3 for beta chain variable domain of TCR clone 334189 (TRBV7-9, TRBJ1-2)
CAISLGFSSGEDGYTF

SEQ ID NO: 668379 - protein, 15 aa, Homo sapiens
  CDR3 for alpha chain variable domain of TCR clone 334190 (TRAV3, TRAJ5)
CAVRDLDTGRRALTF

SEQ ID NO: 668380 - protein, 14 aa, Homo sapiens
  CDR3 for beta chain variable domain of TCR clone 334190 (TRBV25-1, TRBJ1-1)
CASTDLGGNTEAFL

SEQ ID NO: 668381 - protein, 14 aa, Homo sapiens
  CDR3 for alpha chain variable domain of TCR clone 334191 (TRAV1-2, TRAJ8)
CAVREDTGFQKLVF

SEQ ID NO: 668382 - protein, 16 aa, Homo sapiens
  CDR3 for beta chain variable domain of TCR clone 334191 (TRBV7-3, TRBJ2-1)
CASSSIRRAPTMSSSS

SEQ ID NO: 668383 - protein, 10 aa, Homo sapiens
  CDR3 for alpha chain variable domain of TCR clone 334192 (TRAV13-1, TRAJ15)
INQAGTALIF

SEQ ID NO: 668384 - protein, 14 aa, Homo sapiens
  CDR3 for beta chain variable domain of TCR clone 334192 (TRBV7-9, TRBJ2-1)
CASSDNSGYNEQFV

SEQ ID NO: 668385 - protein, 14 aa, Homo sapiens
  CDR3 for alpha chain variable domain of TCR clone 334193 (TRAV12-1, TRAJ17)
CVVNYKAAGNKLTF

SEQ ID NO: 668386 - protein, 14 aa, Homo sapiens
  CDR3 for beta chain variable domain of TCR clone 334193 (TRBV7-2, TRBJ1-1)
CASSFLTGATEAFF

SEQ ID NO: 668387 - protein, 10 aa, Homo sapiens
  CDR3 for alpha chain variable domain of TCR clone 334194 (TRAV16, TRAJ18)
SAMYLRQLTF

SEQ ID NO: 668388 - protein, 15 aa, Homo sapiens
  CDR3 for beta chain variable domain of TCR clone 334194 (TRBV7-9, TRBJ1-6)
CASSSPGRGNSPLHF

SEQ ID NO: 668389 - protein, 12 aa, Homo sapiens
  CDR3 for alpha chain variable domain of TCR clone 334195 (TRAV12-3, TRAJ17)
CAMTLTGNRLNF

SEQ ID NO: 668390 - protein, 14 aa, Homo sapiens
  CDR3 for beta chain variable domain of TCR clone 334195 (TRBV25-1, TRBJ1-1)
CASTHLGGNTEAFF

SEQ ID NO: 668391 - protein, 12 aa, Homo sapiens
  CDR3 for alpha chain variable domain of TCR clone 334196 (TRAV8-3, TRAJ26)
CAGDNYGQNFVF

SEQ ID NO: 668392 - protein, 13 aa, Homo sapiens
  CDR3 for beta chain variable domain of TCR clone 334196 (TRBV27, TRBJ1-4)
CASSLMGDEKLFF

SEQ ID NO: 668393 - protein, 13 aa, Homo sapiens
  CDR3 for alpha chain variable domain of TCR clone 334197 (TRAV13-1, TRAJ10)
CAATAGGGNKLTF

SEQ ID NO: 668394 - protein, 14 aa, Homo sapiens
  CDR3 for beta chain variable domain of TCR clone 334197 (TRBV12-4, TRBJ2-7)
CASSPAGLKYAQYF

SEQ ID NO: 668395 - protein, 14 aa, Homo sapiens
  CDR3 for alpha chain variable domain of TCR clone 334198 (TRAV1-2, TRAJ16)
CAVNRFSDGQKLLF

SEQ ID NO: 668396 - protein, 17 aa, Homo sapiens
  CDR3 for beta chain variable domain of TCR clone 334198 (TRBV5-1, TRBJ2-2)
CASSLAGLSGVTGELFF

SEQ ID NO: 668397 - protein, 13 aa, Homo sapiens
  CDR3 for alpha chain variable domain of TCR clone 334199 (TRAV13-1, TRAJ37)
CAAVSGNTGKLIF

SEQ ID NO: 668398 - protein, 17 aa, Homo sapiens
  CDR3 for beta chain variable domain of TCR clone 334199 (TRBV10-2, TRBJ1-6)
CASSETRGSSYTSPLHF

SEQ ID NO: 668399 - protein, 16 aa, Homo sapiens
  CDR3 for alpha chain variable domain of TCR clone 334200 (TRAV8-3, TRAJ48)
CAVGLISNFGNEKLTF

SEQ ID NO: 668400 - protein, 16 aa, Homo sapiens
  CDR3 for beta chain variable domain of TCR clone 334200 (TRBV20-1, TRBJ1-4)
CSAPGQGLLTNEKLFF

SEQ ID NO: 668401 - protein, 16 aa, Homo sapiens
  CDR3 for alpha chain variable domain of TCR clone 334201 (TRAV30, TRAJ24)
CGTEIVDADSWGKFQF

SEQ ID NO: 668402 - protein, 13 aa, Homo sapiens
  CDR3 for beta chain variable domain of TCR clone 334201 (TRBV7-9, TRBJ2-3)
CASSPGATDTQYF

SEQ ID NO: 668403 - protein, 14 aa, Homo sapiens
  CDR3 for alpha chain variable domain of TCR clone 334202 (TRAV25, TRAJ6)
CAGRESGGSYIPTF

SEQ ID NO: 668404 - protein, 13 aa, Homo sapiens
  CDR3 for beta chain variable domain of TCR clone 334202 (TRBV15, TRBJ2-7)
CATSSTGHYEQYF

SEQ ID NO: 668405 - protein, 15 aa, Homo sapiens
  CDR3 for alpha chain variable domain of TCR clone 334203 (TRAV25, TRAJ52)
CAGTSGGTSYGKLTF

SEQ ID NO: 668406 - protein, 14 aa, Homo sapiens
  CDR3 for beta chain variable domain of TCR clone 334203 (TRBV7-6, TRBJ2-3)
CASSLGTVTDTQYF

SEQ ID NO: 668407 - protein, 16 aa, Homo sapiens
  CDR3 for alpha chain variable domain of TCR clone 334204 (TRAV26-1, TRAJ37)
CIVRGDGSGNTGKLIF

SEQ ID NO: 668408 - protein, 17 aa, Homo sapiens
  CDR3 for beta chain variable domain of TCR clone 334204 (TRBV4-1, TRBJ2-7)
GASSRDPLGVRGGEQYF

SEQ ID NO: 668409 - protein, 16 aa, Homo sapiens
  CDR3 for alpha chain variable domain of TCR clone 334205 (TRAV26-1, TRAJ37)
CIVRGDGSGNTGKLIF

SEQ ID NO: 668410 - protein, 14 aa, Homo sapiens
  CDR3 for beta chain variable domain of TCR clone 334205 (TRBV7-2, TRBJ2-7)
CASRSQGAAYEQYF

SEQ ID NO: 668411 - protein, 14 aa, Homo sapiens
  CDR3 for alpha chain variable domain of TCR clone 334206 (TRAV23/DV6, TRAJ40)
CAASLTSGTYTYIF

SEQ ID NO: 668412 - protein, 13 aa, Homo sapiens
  CDR3 for beta chain variable domain of TCR clone 334206 (TRBV11-2, TRBJ2-5)
CASSSTGEETQYF

SEQ ID NO: 668413 - protein, 14 aa, Homo sapiens
  CDR3 for alpha chain variable domain of TCR clone 334207 (TRAV17, TRAJ17)
CATDARAAGNKLTF

SEQ ID NO: 668414 - protein, 13 aa, Homo sapiens
  CDR3 for beta chain variable domain of TCR clone 334207 (TRBV7-2, TRBJ2-2)
CASSLAVTGELFF

SEQ ID NO: 668415 - protein, 15 aa, Homo sapiens
  CDR3 for alpha chain variable domain of TCR clone 334208 (TRAV2, TRAJ13)
CATPSYSGGYQKVTF

SEQ ID NO: 668416 - protein, 14 aa, Homo sapiens
  CDR3 for beta chain variable domain of TCR clone 334208 (TRBV4-2, TRBJ2-1)
CAGGLDRAYNEQFF

SEQ ID NO: 668417 - protein, 12 aa, Homo sapiens
  CDR3 for alpha chain variable domain of TCR clone 334209 (TRAV12-3, TRAJ17)
CAMTLTGNKLTF

SEQ ID NO: 668418 - protein, 15 aa, Homo sapiens
  CDR3 for beta chain variable domain of TCR clone 334209 (TRBV19, TRBJ1-6)
CASSTQGAVGSPLHF

SEQ ID NO: 668419 - protein, 13 aa, Homo sapiens
  CDR3 for alpha chain variable domain of TCR clone 334210 (TRAV12-3, TRAJ31)
CAMSANNNARLMF

SEQ ID NO: 668420 - protein, 16 aa, Homo sapiens
  CDR3 for beta chain variable domain of TCR clone 334210 (TRBV7-9, TRBJ1-2)
CASSLGFSSGEYGYTF

SEQ ID NO: 668421 - protein, 13 aa, Homo sapiens
  CDR3 for alpha chain variable domain of TCR clone 334211 (TRAV27, TRAJ45)
CRSSGGGADGLTF

SEQ ID NO: 668422 - protein, 15 aa, Homo sapiens
  CDR3 for beta chain variable domain of TCR clone 334211 (TRBV6-4, TRBJ2-7)
CASSDQGPPNYEQYF

SEQ ID NO: 668423 - protein, 15 aa, Homo sapiens
  CDR3 for alpha chain variable domain of TCR clone 334212 (TRAV12-1, TRAJ15)
CVVTRANQAGTALIF

SEQ ID NO: 668424 - protein, 14 aa, Homo sapiens
  CDR3 for beta chain variable domain of TCR clone 334212 (TRBV5-1, TRBJ1-1)
CASSLVSINNEAVF

SEQ ID NO: 668425 - protein, 18 aa, Homo sapiens
  CDR3 for alpha chain variable domain of TCR clone 334213 (TRAV21, TRAJ52)
CAVRPSPAGGTSSGKLTL

SEQ ID NO: 668426 - protein, 12 aa, Homo sapiens
  CDR3 for beta chain variable domain of TCR clone 334213 (TRBV11-2, TRBJ2-2)
CASSLGGGELFF

SEQ ID NO: 668427 - protein, 10 aa, Homo sapiens
  CDR3 for alpha chain variable domain of TCR clone 334214 (TRAV26-1, TRAJ22)
CIVSLNFFWF

SEQ ID NO: 668428 - protein, 15 aa, Homo sapiens
  CDR3 for beta chain variable domain of TCR clone 334214 (TRBV4-2, TRBJ1-2)
CASSQRTGGRDAYTF

SEQ ID NO: 668429 - protein, 18 aa, Homo sapiens
  CDR3 for alpha chain variable domain of TCR clone 334215 (TRAV12-3, TRAJ52)
CAMSRTNAGGTSYGKLTF

SEQ ID NO: 668430 - protein, 17 aa, Homo sapiens
  CDR3 for beta chain variable domain of TCR clone 334215 (TRBV7-3, TRBJ2-3)
CASSLMKRIRGADTQYF

SEQ ID NO: 668431 - protein, 15 aa, Homo sapiens
  CDR3 for alpha chain variable domain of TCR clone 334216 (TRAV2, TRAJ24)
CAVVRLKNSWGKLQF

SEQ ID NO: 668432 - protein, 13 aa, Homo sapiens
  CDR3 for beta chain variable domain of TCR clone 334216 (TRBV19, TRBJ2-7)
CASSIDRTYEQYF

SEQ ID NO: 668433 - protein, 12 aa, Homo sapiens
  CDR3 for alpha chain variable domain of TCR clone 334217 (TRAV25, TRAJ29)
CAGHSGNTPLVF

SEQ ID NO: 668434 - protein, 14 aa, Homo sapiens
  CDR3 for beta chain variable domain of TCR clone 334217 (TRBV7-6, TRBJ2-3)
CASSLGTVTDTQYF

SEQ ID NO: 668435 - protein, 14 aa, Homo sapiens
  CDR3 for alpha chain variable domain of TCR clone 334218 (TRAV26-1, TRAJ38)
CIADNAGNNRKLIW

SEQ ID NO: 668436 - protein, 17 aa, Homo sapiens
  CDR3 for beta chain variable domain of TCR clone 334218 (TRBV7-9, TRBJ2-3)
CASSPTVAGDLKDTQYF

SEQ ID NO: 668437 - protein, 15 aa, Homo sapiens
  CDR3 for alpha chain variable domain of TCR clone 334219 (TRAV10, TRAJ22)
CVVRISSGSARQPTF

SEQ ID NO: 668438 - protein, 15 aa, Homo sapiens
  CDR3 for beta chain variable domain of TCR clone 334219 (TRBV12-4, TRBJ2-3)
CQQFHSGSGTDTQYF

SEQ ID NO: 668439 - protein, 11 aa, Homo sapiens
  CDR3 for alpha chain variable domain of TCR clone 334220 (TRAV35, TRAJ30)
CAGPGDDKIIF

SEQ ID NO: 668440 - protein, 12 aa, Homo sapiens
  CDR3 for beta chain variable domain of TCR clone 334220 (TRBV27, TRBJ2-1)
RASRGFYNEQFF

SEQ ID NO: 668441 - protein, 14 aa, Homo sapiens
  CDR3 for alpha chain variable domain of TCR clone 334221 (TRAV25, TRAJ44)
CAVFPTGTASKLTF

SEQ ID NO: 668442 - protein, 14 aa, Homo sapiens
  CDR3 for beta chain variable domain of TCR clone 334221 (TRBV7-2, TRBJ2-7)
CASSPKTSFYEQYF

SEQ ID NO: 668443 - protein, 13 aa, Homo sapiens
  CDR3 for alpha chain variable domain of TCR clone 334222 (TRAV8-3, TRAJ48)
CAVVTFGNEKLTF

SEQ ID NO: 668444 - protein, 14 aa, Homo sapiens
  CDR3 for beta chain variable domain of TCR clone 334222 (TRBV18, TRBJ2-7)
CASSPRGGAYEQYF

SEQ ID NO: 668445 - protein, 14 aa, Homo sapiens
  CDR3 for alpha chain variable domain of TCR clone 334223 (TRAV25, TRAJ35)
CARRMEGFGNVLHC

SEQ ID NO: 668446 - protein, 13 aa, Homo sapiens
  CDR3 for beta chain variable domain of TCR clone 334223 (TRBV7-2, TRBJ1-4)
CASSLAGLEKLFV

SEQ ID NO: 668447 - protein, 14 aa, Homo sapiens
  CDR3 for alpha chain variable domain of TCR clone 334224 (TRAV12-2, TRAJ9)
CAVNMEGGGFKTIF

SEQ ID NO: 668448 - protein, 15 aa, Homo sapiens
  CDR3 for beta chain variable domain of TCR clone 334224 (TRBV6-3, TRBJ2-7)
CASSSPGTVFYEQYF

SEQ ID NO: 668449 - protein, 17 aa, Homo sapiens
  CDR3 for alpha chain variable domain of TCR clone 334225 (TRAV16, TRAJ36)
CAPHANPHQTGANNLFF

SEQ ID NO: 668450 - protein, 16 aa, Homo sapiens
  CDR3 for beta chain variable domain of TCR clone 334225 (TRBV7-3, TRBJ2-1)
CASSLEGYRSYNEQFF

SEQ ID NO: 668451 - protein, 15 aa, Homo sapiens
  CDR3 for alpha chain variable domain of TCR clone 334226 (TRAV2, TRAJ15)
CAVEDRGQAGTALIF

SEQ ID NO: 668452 - protein, 13 aa, Homo sapiens
  CDR3 for beta chain variable domain of TCR clone 334226 (TRBV12-4, TRBJ2-5)
CASRLAVQETQYF

SEQ ID NO: 668453 - protein, 15 aa, Homo sapiens
  CDR3 for alpha chain variable domain of TCR clone 334227 (TRAV34, TRAJ38)
CGADFTPGNNRKLIW

SEQ ID NO: 668454 - protein, 11 aa, Homo sapiens
  CDR3 for beta chain variable domain of TCR clone 334227 (TRBV7-3, TRBJ2-5)
CASSLSETQYF

SEQ ID NO: 668455 - protein, 22 aa, Homo sapiens
  CDR3 for alpha chain variable domain of TCR clone 334228 (TRAV3, TRAJ38)
CAVRDCLNAGNNHIQNPDHAVY

SEQ ID NO: 668456 - protein, 14 aa, Homo sapiens
  CDR3 for beta chain variable domain of TCR clone 334228 (TRBV5-5, TRBJ1-5)
CASSGQGVDQPQHF

SEQ ID NO: 668457 - protein, 17 aa, Homo sapiens
  CDR3 for alpha chain variable domain of TCR clone 334229 (TRAV36/DV7, TRAJ52)
CAVAQRAGGTSYGKLTF

SEQ ID NO: 668458 - protein, 13 aa, Homo sapiens
  CDR3 for beta chain variable domain of TCR clone 334229 (TRBV20-1, TRBJ2-5)
CSAREAFQETQYF

SEQ ID NO: 668459 - protein, 11 aa, Homo sapiens
  CDR3 for alpha chain variable domain of TCR clone 334230 (TRAV12-1, TRAJ43)
CVEYDNNDIRF

SEQ ID NO: 668460 - protein, 14 aa, Homo sapiens
  CDR3 for beta chain variable domain of TCR clone 334230 (TRBV10-2, TRBJ2-1)
CASSEGTSEDEQFF

SEQ ID NO: 668461 - protein, 14 aa, Homo sapiens
  CDR3 for alpha chain variable domain of TCR clone 334231 (TRAV17, TRAJ12)
CATDEKDSSYKLIF

SEQ ID NO: 668462 - protein, 16 aa, Homo sapiens
  CDR3 for beta chain variable domain of TCR clone 334231 (TRBV11-2, TRBJ2-1)
CASSPRLVGVYNEQFF

SEQ ID NO: 668463 - protein, 15 aa, Homo sapiens
  CDR3 for alpha chain variable domain of TCR clone 334232 (TRAV25, TRAJ53)
CAATGGRGSNYKLTF

SEQ ID NO: 668464 - protein, 19 aa, Homo sapiens
  CDR3 for beta chain variable domain of TCR clone 334232 (TRBV7-2, TRBJ2-3)
CASSFLSRNWGGGTDTQYF

SEQ ID NO: 668465 - protein, 17 aa, Homo sapiens
  CDR3 for alpha chain variable domain of TCR clone 334233 (TRAV12-2, TRAJ53)
CAPLTDSQEGSNYKLTF

SEQ ID NO: 668466 - protein, 12 aa, Homo sapiens
  CDR3 for beta chain variable domain of TCR clone 334233 (TRBV11-2, TRBJ2-2)
CASSLPTGELFF

SEQ ID NO: 668467 - protein, 14 aa, Homo sapiens
  CDR3 for alpha chain variable domain of TCR clone 334234 (TRAV1-2, TRAJ8)
CAVREDTGFQKLAF

SEQ ID NO: 668468 - protein, 16 aa, Homo sapiens
  CDR3 for beta chain variable domain of TCR clone 334234 (TRBV7-6, TRBJ2-6)
CASSLPGLSGANALTF

SEQ ID NO: 668469 - protein, 13 aa, Homo sapiens
  CDR3 for alpha chain variable domain of TCR clone 334235 (TRAV21, TRAJ27)
CAQWGGNAGKSTF

SEQ ID NO: 668470 - protein, 13 aa, Homo sapiens
  CDR3 for beta chain variable domain of TCR clone 334235 (TRBV19, TRBJ1-2)
CASSVPGQDGYTF

SEQ ID NO: 668471 - protein, 13 aa, Homo sapiens
  CDR3 for alpha chain variable domain of TCR clone 334236 (TRAV8-4, TRAJ29)
CAVSATGNTPLVF

SEQ ID NO: 668472 - protein, 18 aa, Homo sapiens
  CDR3 for beta chain variable domain of TCR clone 334236 (TRBV4-1, TRBJ1-5)
CASSQDPRGQGLNQPQHF

SEQ ID NO: 668473 - protein, 14 aa, Homo sapiens
  CDR3 for alpha chain variable domain of TCR clone 334237 (TRAV26-1, TRAJ38)
CIVMGAGNNRKLIW

SEQ ID NO: 668474 - protein, 18 aa, Homo sapiens
  CDR3 for beta chain variable domain of TCR clone 334237 (TRBV12-4, TRBJ2-2)
CASSLVAGTRGRTGELFF

SEQ ID NO: 668475 - protein, 16 aa, Homo sapiens
  CDR3 for alpha chain variable domain of TCR clone 334238 (TRAV8-6, TRAJ28)
CAVTSKPGAGSDQLTF

SEQ ID NO: 668476 - protein, 16 aa, Homo sapiens
  CDR3 for beta chain variable domain of TCR clone 334238 (TRBV12-4, TRBJ2-5)
CASSWRPSGDLETQYF

SEQ ID NO: 668477 - protein, 11 aa, Homo sapiens
  CDR3 for alpha chain variable domain of TCR clone 334239 (TRAV26-1, TRAJ38)
CIAEMLATTIS

SEQ ID NO: 668478 - protein, 15 aa, Homo sapiens
  CDR3 for beta chain variable domain of TCR clone 334239 (TRBV27, TRBJ2-1)
CASSNGGGSSNEQFF

SEQ ID NO: 668479 - protein, 15 aa, Homo sapiens
  CDR3 for alpha chain variable domain of TCR clone 334240 (TRAV26-1, TRAJ44)
CIVRIGTGTASKLTF

SEQ ID NO: 668480 - protein, 13 aa, Homo sapiens
  CDR3 for beta chain variable domain of TCR clone 334240 (TRBV12-5, TRBJ2-3)
CASGDRQSDTQYF

SEQ ID NO: 668481 - protein, 17 aa, Homo sapiens
  CDR3 for alpha chain variable domain of TCR clone 334241 (TRAV23/DV6, TRAJ57)
CAASSPLSQGGSAKLVF

SEQ ID NO: 668482 - protein, 14 aa, Homo sapiens
  CDR3 for beta chain variable domain of TCR clone 334241 (TRBV25-1, TRBJ1-1)
CASTHLGGNTEAFF

SEQ ID NO: 668483 - protein, 16 aa, Homo sapiens
  CDR3 for alpha chain variable domain of TCR clone 334242 (TRAV30, TRAJ24)
CGTEIVDADSWGKFQF

SEQ ID NO: 668484 - protein, 12 aa, Homo sapiens
  CDR3 for beta chain variable domain of TCR clone 334242 (TRBV24-1, TRBJ2-7)
CATGTGTYEQYF

SEQ ID NO: 668485 - protein, 13 aa, Homo sapiens
  CDR3 for alpha chain variable domain of TCR clone 334243 (TRAV8-4, TRAJ49)
CAVSDSTGNQFYF

SEQ ID NO: 668486 - protein, 17 aa, Homo sapiens
  CDR3 for beta chain variable domain of TCR clone 334243 (TRBV11-3, TRBJ2-3)
CASSLGLTGGGTDTQYF

SEQ ID NO: 668487 - protein, 13 aa, Homo sapiens
  CDR3 for alpha chain variable domain of TCR clone 334244 (TRAV1-2, TRAJ9)
CAALNTGGFKTIF

SEQ ID NO: 668488 - protein, 17 aa, Homo sapiens
  CDR3 for beta chain variable domain of TCR clone 334244 (TRBV15, TRBJ1-1)
CATSRVGGADGDTEAFF

SEQ ID NO: 668489 - protein, 17 aa, Homo sapiens
  CDR3 for alpha chain variable domain of TCR clone 334245 (TRAV13-1, TRAJ31)
CAPRDRLMFGDGTQLVV

SEQ ID NO: 668490 - protein, 13 aa, Homo sapiens
  CDR3 for beta chain variable domain of TCR clone 334245 (TRBV7-9, TRBJ2-2)
CASSLDPTGELFF

SEQ ID NO: 668491 - protein, 17 aa, Homo sapiens
  CDR3 for alpha chain variable domain of TCR clone 334246 (TRAV13-1, TRAJ28)
CAASPPYSGAGSYQLTF

SEQ ID NO: 668492 - protein, 15 aa, Homo sapiens
  CDR3 for beta chain variable domain of TCR clone 334246 (TRBV11-2, TRBJ2-2)
CASSSDRVNAGELFF

SEQ ID NO: 668493 - protein, 11 aa, Homo sapiens
  CDR3 for alpha chain variable domain of TCR clone 334247 (TRAV3, TRAJ21)
CAVGTFNKFYF

SEQ ID NO: 668494 - protein, 15 aa, Homo sapiens
  CDR3 for beta chain variable domain of TCR clone 334247 (TRBV5-1, TRBJ2-1)
CASSLVANSYNEQFF

SEQ ID NO: 668495 - protein, 12 aa, Homo sapiens
  CDR3 for alpha chain variable domain of TCR clone 334248 (TRAV12-1, TRAJ26)
CVVDNYGQNFVF

SEQ ID NO: 668496 - protein, 13 aa, Homo sapiens
  CDR3 for beta chain variable domain of TCR clone 334248 (TRBV7-3, TRBJ1-1)
CASSQDWGAEAFF

SEQ ID NO: 668497 - protein, 14 aa, Homo sapiens
  CDR3 for alpha chain variable domain of TCR clone 334249 (TRAV12-2, TRAJ33)
CAVKRARSNYQLTR

SEQ ID NO: 668498 - protein, 15 aa, Homo sapiens
  CDR3 for beta chain variable domain of TCR clone 334249 (TRBV20-1, TRBJ2-7)
CSARDRVSGMDEQYF

SEQ ID NO: 668499 - protein, 14 aa, Homo sapiens
  CDR3 for alpha chain variable domain of TCR clone 334250 (TRAV21, TRAJ35)
CAVMPICFGNVLHC

SEQ ID NO: 668500 - protein, 12 aa, Homo sapiens
  CDR3 for beta chain variable domain of TCR clone 334250 (TRBV7-9, TRBJ2-7)
CASSIKREEQYF

SEQ ID NO: 668501 - protein, 15 aa, Homo sapiens
  CDR3 for alpha chain variable domain of TCR clone 334251 (TRAV8-4, TRAJ9)
CAVSDLAGGGVKTIF

SEQ ID NO: 668502 - protein, 12 aa, Homo sapiens
  CDR3 for beta chain variable domain of TCR clone 334251 (TRBV29-1, TRBJ2-3)
CSVTGGADTQYF

SEQ ID NO: 668503 - protein, 16 aa, Homo sapiens
  CDR3 for alpha chain variable domain of TCR clone 334252 (TRAV13-1, TRAJ45)
CAARGSRKGGADGLTF

SEQ ID NO: 668504 - protein, 12 aa, Homo sapiens
  CDR3 for beta chain variable domain of TCR clone 334252 (TRBV7-3, TRBJ2-1)
CASSLGFNEQFF

SEQ ID NO: 668505 - protein, 13 aa, Homo sapiens
  CDR3 for alpha chain variable domain of TCR clone 334253 (TRAV12-2, TRAJ53)
CAGVGGSNYKLTF

SEQ ID NO: 668506 - protein, 16 aa, Homo sapiens
  CDR3 for beta chain variable domain of TCR clone 334253 (TRBV12-4, TRBJ2-5)
CASSCFVRGRQETQYF

SEQ ID NO: 668507 - protein, 15 aa, Homo sapiens
  CDR3 for alpha chain variable domain of TCR clone 334254 (TRAV8-3, TRAJ20)
CAVEAKGSNDYKLSF

SEQ ID NO: 668508 - protein, 12 aa, Homo sapiens
  CDR3 for beta chain variable domain of TCR clone 334254 (TRBV7-2, TRBJ1-2)
CASRDSIYGHTF

SEQ ID NO: 668509 - protein, 12 aa, Homo sapiens
  CDR3 for alpha chain variable domain of TCR clone 334255 (TRAV16, TRAJ9)
CALRAGGFKTIF

SEQ ID NO: 668510 - protein, 13 aa, Homo sapiens
  CDR3 for beta chain variable domain of TCR clone 334255 (TRBV4-3, TRBJ1-1)
CASSQVEGSRAVV

SEQ ID NO: 668511 - protein, 14 aa, Homo sapiens
  CDR3 for alpha chain variable domain of TCR clone 334256 (TRAV13-1, TRAJ12)
CAASYMDSSHKLIF

SEQ ID NO: 668512 - protein, 13 aa, Homo sapiens
  CDR3 for beta chain variable domain of TCR clone 334256 (TRBV2, TRBJ2-5)
CASSDGIQETQYF

SEQ ID NO: 668513 - protein, 14 aa, Homo sapiens
  CDR3 for alpha chain variable domain of TCR clone 334257 (TRAV1-2, TRAJ10)
CAVRVTGGGNKLTF

SEQ ID NO: 668514 - protein, 15 aa, Homo sapiens
  CDR3 for beta chain variable domain of TCR clone 334257 (TRBV7-9, TRBJ1-6)
CASSSPGRGNSPLHF

SEQ ID NO: 668515 - protein, 16 aa, Homo sapiens
  CDR3 for alpha chain variable domain of TCR clone 334258 (TRAV30, TRAJ24)
CGTEIVYADSWGKFQF

SEQ ID NO: 668516 - protein, 13 aa, Homo sapiens
  CDR3 for beta chain variable domain of TCR clone 334258 (TRBV10-3, TRBJ2-7)
CASKLAVNYEQYF

SEQ ID NO: 668517 - protein, 13 aa, Homo sapiens
  CDR3 for alpha chain variable domain of TCR clone 334259 (TRAV35, TRAJ36)
CAGPRIGANNLFF

SEQ ID NO: 668518 - protein, 12 aa, Homo sapiens
  CDR3 for beta chain variable domain of TCR clone 334259 (TRBV7-8, TRBJ2-7)
CASSLGDREQYF

SEQ ID NO: 668519 - protein, 14 aa, Homo sapiens
  CDR3 for alpha chain variable domain of TCR clone 334260 (TRAV13-2, TRAJ22)
CADGTLGSARPLTF

SEQ ID NO: 668520 - protein, 16 aa, Homo sapiens
  CDR3 for beta chain variable domain of TCR clone 334260 (TRBV19, TRBJ2-1)
CASSSKGTRSYNEQFF

SEQ ID NO: 668521 - protein, 14 aa, Homo sapiens
  CDR3 for alpha chain variable domain of TCR clone 334261 (TRAV30, TRAJ33)
CGTVAPRSNYQLIR

SEQ ID NO: 668522 - protein, 16 aa, Homo sapiens
  CDR3 for beta chain variable domain of TCR clone 334261 (TRBV3-1, TRBJ2-5)
CASSPGQLNGFGTQYF

SEQ ID NO: 668523 - protein, 14 aa, Homo sapiens
  CDR3 for alpha chain variable domain of TCR clone 334262 (TRAV8-2, TRAJ4)
CVVSPSGGYNKLIF

SEQ ID NO: 668524 - protein, 16 aa, Homo sapiens
  CDR3 for beta chain variable domain of TCR clone 334262 (TRBV7-3, TRBJ2-1)
CASSLEGYRSYKEQFF

SEQ ID NO: 668525 - protein, 13 aa, Homo sapiens
  CDR3 for alpha chain variable domain of TCR clone 334263 (TRAV8-4, TRAJ10)
CAAFTGGGNQLTF

SEQ ID NO: 668526 - protein, 12 aa, Homo sapiens
  CDR3 for beta chain variable domain of TCR clone 334263 (TRBV3-1, TRBJ2-1)
CASSQGSSGQFF

SEQ ID NO: 668527 - protein, 15 aa, Homo sapiens
  CDR3 for alpha chain variable domain of TCR clone 334264 (TRAV26-1, TRAJ22)
CIVRVSFWFCKATDL

SEQ ID NO: 668528 - protein, 14 aa, Homo sapiens
  CDR3 for beta chain variable domain of TCR clone 334264 (TRBV7-2, TRBJ2-5)
CASSPRGSSETQYF

SEQ ID NO: 668529 - protein, 12 aa, Homo sapiens
  CDR3 for alpha chain variable domain of TCR clone 334265 (TRAV20, TRAJ56)
CAVTGANSKLTF

SEQ ID NO: 668530 - protein, 14 aa, Homo sapiens
  CDR3 for beta chain variable domain of TCR clone 334265 (TRBV28, TRBJ2-1)
CASSRPGLRDEQFF

SEQ ID NO: 668531 - protein, 14 aa, Homo sapiens
  CDR3 for alpha chain variable domain of TCR clone 334266 (TRAV12-2, TRAJ45)
CAVNIGGGADGLTF

SEQ ID NO: 668532 - protein, 13 aa, Homo sapiens
  CDR3 for beta chain variable domain of TCR clone 334266 (TRBV19, TRBJ2-2)
CAISIWSTGELFF

SEQ ID NO: 668533 - protein, 14 aa, Homo sapiens
  CDR3 for alpha chain variable domain of TCR clone 334267 (TRAV1-2, TRAJ16)
CAVNRFSDGQKMLF

SEQ ID NO: 668534 - protein, 15 aa, Homo sapiens
  CDR3 for beta chain variable domain of TCR clone 334267 (TRBV7-2, TRBJ2-2)
CASSSLTGGTGELFF

SEQ ID NO: 668535 - protein, 12 aa, Homo sapiens
  CDR3 for alpha chain variable domain of TCR clone 334268 (TRAV13-2, TRAJ23)
CAERHRGGKLIL

SEQ ID NO: 668536 - protein, 15 aa, Homo sapiens
  CDR3 for beta chain variable domain of TCR clone 334268 (TRBV27, TRBJ2-1)
CASSNGEGPPMSSSS

SEQ ID NO: 668537 - protein, 15 aa, Homo sapiens
  CDR3 for alpha chain variable domain of TCR clone 334269 (TRAV4, TRAJ39)
CLVAPNNNAGNMLTF

SEQ ID NO: 668538 - protein, 13 aa, Homo sapiens
  CDR3 for beta chain variable domain of TCR clone 334269 (TRBV11-2, TRBJ2-5)
CASSSTGEETQYF

SEQ ID NO: 668539 - protein, 13 aa, Homo sapiens
  CDR3 for alpha chain variable domain of TCR clone 334270 (TRAV13-1, TRAJ13)
CAASKGCYQKVTF

SEQ ID NO: 668540 - protein, 16 aa, Homo sapiens
  CDR3 for beta chain variable domain of TCR clone 334270 (TRBV18, TRBJ1-2)
CASSPPERVTIYGYTF

SEQ ID NO: 668541 - protein, 12 aa, Homo sapiens
  CDR3 for alpha chain variable domain of TCR clone 334271 (TRAV13-1, TRAJ21)
CAAKEGFNKFYF

SEQ ID NO: 668542 - protein, 16 aa, Homo sapiens
  CDR3 for beta chain variable domain of TCR clone 334271 (TRBV4-3, TRBJ2-3)
CASSQGGLAGTDTQYF

SEQ ID NO: 668543 - protein, 14 aa, Homo sapiens
  CDR3 for alpha chain variable domain of TCR clone 334272 (TRAV16, TRAJ40)
CALHESSYLRNLQI

SEQ ID NO: 668544 - protein, 12 aa, Homo sapiens
  CDR3 for beta chain variable domain of TCR clone 334272 (TRBV7-3, TRBJ2-3)
CASSSLTDTQYF

SEQ ID NO: 668545 - protein, 10 aa, Homo sapiens
  CDR3 for alpha chain variable domain of TCR clone 334273 (TRAV12-2, TRAJ20)
CAVYLYKLSF

SEQ ID NO: 668546 - protein, 14 aa, Homo sapiens
  CDR3 for beta chain variable domain of TCR clone 334273 (TRBV10-3, TRBJ2-2)
CAISEVAHSGELFF

SEQ ID NO: 668547 - protein, 15 aa, Homo sapiens
  CDR3 for alpha chain variable domain of TCR clone 334274 (TRAV23/DV6, TRAJ10)
CAAGGLTGGGNKLTF

SEQ ID NO: 668548 - protein, 17 aa, Homo sapiens
  CDR3 for beta chain variable domain of TCR clone 334274 (TRBV20-1, TRBJ2-1)
CSARDPLAGVWDNEQFF

SEQ ID NO: 668549 - protein, 11 aa, Homo sapiens
  CDR3 for alpha chain variable domain of TCR clone 334275 (TRAV2, TRAJ13)
CASGGYQKVIF

SEQ ID NO: 668550 - protein, 15 aa, Homo sapiens
  CDR3 for beta chain variable domain of TCR clone 334275 (TRBV9, TRBJ1-6)
CASSVAGTGDSPLHF

SEQ ID NO: 668551 - protein, 13 aa, Homo sapiens
  CDR3 for alpha chain variable domain of TCR clone 334276 (TRAV12-1, TRAJ21)
CVVTLYNFNKFYF

SEQ ID NO: 668552 - protein, 20 aa, Homo sapiens
  CDR3 for beta chain variable domain of TCR clone 334276 (TRBV7-8, TRBJ2-1)
CASSVAHRLAGVRSYNEQFF

SEQ ID NO: 668553 - protein, 15 aa, Homo sapiens
  CDR3 for alpha chain variable domain of TCR clone 334277 (TRAV12-3, TRAJ11)
CAMSEEDSGYSTLTF

SEQ ID NO: 668554 - protein, 16 aa, Homo sapiens
  CDR3 for beta chain variable domain of TCR clone 334277 (TRBV5-1, TRBJ2-7)
CASSLEGLAGLYEQYF

SEQ ID NO: 668555 - protein, 13 aa, Homo sapiens
  CDR3 for alpha chain variable domain of TCR clone 334278 (TRAV21, TRAJ27)
RAARRGNAGKSTF

SEQ ID NO: 668556 - protein, 14 aa, Homo sapiens
  CDR3 for beta chain variable domain of TCR clone 334278 (TRBV7-6, TRBJ2-3)
CASSLGTVTDTQYF

SEQ ID NO: 668557 - protein, 14 aa, Homo sapiens
  CDR3 for alpha chain variable domain of TCR clone 334279 (TRAV8-6, TRAJ12)
CALKAADSSYKLIF

SEQ ID NO: 668558 - protein, 15 aa, Homo sapiens
  CDR3 for beta chain variable domain of TCR clone 334279 (TRBV5-1, TRBJ2-5)
CASSLGLAEQETQYF

SEQ ID NO: 668559 - protein, 13 aa, Homo sapiens
  CDR3 for alpha chain variable domain of TCR clone 334280 (TRAV8-6, TRAJ41)
CAVSENSGYALNF

SEQ ID NO: 668560 - protein, 12 aa, Homo sapiens
  CDR3 for beta chain variable domain of TCR clone 334280 (TRBV28, TRBJ2-3)
CASSLYRDTQYF

SEQ ID NO: 668561 - protein, 11 aa, Homo sapiens
  CDR3 for alpha chain variable domain of TCR clone 334281 (TRAV1-1, TRAJ23)
SAVRQGGKLIF

SEQ ID NO: 668562 - protein, 12 aa, Homo sapiens
  CDR3 for beta chain variable domain of TCR clone 334281 (TRBV19, TRBJ1-5)
CASSIAQQPQHF

SEQ ID NO: 668563 - protein, 16 aa, Homo sapiens
  CDR3 for alpha chain variable domain of TCR clone 334282 (TRAV30, TRAJ24)
CGTEIVDADSWGNSQF

SEQ ID NO: 668564 - protein, 14 aa, Homo sapiens
  CDR3 for beta chain variable domain of TCR clone 334282 (TRBV12-5, TRBJ2-5)
CASGSRTHQETQYF

SEQ ID NO: 668565 - protein, 14 aa, Homo sapiens
  CDR3 for alpha chain variable domain of TCR clone 334283 (TRAV23/DV6, TRAJ8)
CAASKNTGFQKLVF

SEQ ID NO: 668566 - protein, 16 aa, Homo sapiens
  CDR3 for beta chain variable domain of TCR clone 334283 (TRBV4-1, TRBJ2-6)
CASSQVGDPEANGLTF

SEQ ID NO: 668567 - protein, 17 aa, Homo sapiens
  CDR3 for alpha chain variable domain of TCR clone 334284 (TRAV3, TRAJ6)
CAVRDGPRAGGGYIPTF

SEQ ID NO: 668568 - protein, 13 aa, Homo sapiens
  CDR3 for beta chain variable domain of TCR clone 334284 (TRBV7-9, TRBJ1-2)
CASSLKQNYGYTF

SEQ ID NO: 668569 - protein, 14 aa, Homo sapiens
  CDR3 for alpha chain variable domain of TCR clone 334285 (TRAV1-2, TRAJ8)
CAVREDTGFQKLVF

SEQ ID NO: 668570 - protein, 15 aa, Homo sapiens
  CDR3 for beta chain variable domain of TCR clone 334285 (TRBV7-2, TRBJ2-3)
CASSLVVRGPDTQYL

SEQ ID NO: 668571 - protein, 14 aa, Homo sapiens
  CDR3 for alpha chain variable domain of TCR clone 334286 (TRAV26-1, TRAJ38)
CIADNAGNNRNLMW

SEQ ID NO: 668572 - protein, 13 aa, Homo sapiens
  CDR3 for beta chain variable domain of TCR clone 334286 (TRBV20-1, TRBJ1-1)
CSARGGGNTEAFF

SEQ ID NO: 668573 - protein, 14 aa, Homo sapiens
  CDR3 for alpha chain variable domain of TCR clone 334287 (TRAV12-2, TRAJ17)
CAVLFKAAGNKLTF

SEQ ID NO: 668574 - protein, 17 aa, Homo sapiens
  CDR3 for beta chain variable domain of TCR clone 334287 (TRBV19, TRBJ2-6)
CASSTGQVFSGANVLTF

SEQ ID NO: 668575 - protein, 14 aa, Homo sapiens
  CDR3 for alpha chain variable domain of TCR clone 334288 (TRAV30, TRAJ33)
CGTVAPRSNYQLIW

SEQ ID NO: 668576 - protein, 15 aa, Homo sapiens
  CDR3 for beta chain variable domain of TCR clone 334288 (TRBV7-6, TRBJ2-2)
CASRRTSGNTGELFF

SEQ ID NO: 668577 - protein, 14 aa, Homo sapiens
  CDR3 for alpha chain variable domain of TCR clone 334289 (TRAV23/DV6, TRAJ37)
CAASTSSNTGKLIF

SEQ ID NO: 668578 - protein, 14 aa, Homo sapiens
  CDR3 for beta chain variable domain of TCR clone 334289 (TRBV7-9, TRBJ2-2)
CASSLVQDTGELFF

SEQ ID NO: 668579 - protein, 16 aa, Homo sapiens
  CDR3 for alpha chain variable domain of TCR clone 334290 (TRAV8-3, TRAJ44)
CAVGASNTGTASKLTF

SEQ ID NO: 668580 - protein, 16 aa, Homo sapiens
  CDR3 for beta chain variable domain of TCR clone 334290 (TRBV19, TRBJ2-2)
CASRSPGTGATGELFF

SEQ ID NO: 668581 - protein, 16 aa, Homo sapiens
  CDR3 for alpha chain variable domain of TCR clone 334291 (TRAV3, TRAJ37)
CAGRGKGSGNTGKLIF

SEQ ID NO: 668582 - protein, 20 aa, Homo sapiens
  CDR3 for beta chain variable domain of TCR clone 334291 (TRBV7-8, TRBJ2-2)
CASSHLFPGPTIHITGELFF

SEQ ID NO: 668583 - protein, 17 aa, Homo sapiens
  CDR3 for alpha chain variable domain of TCR clone 334292 (TRAV8-3, TRAJ42)
CAVGNPEERRSQGNLIF

SEQ ID NO: 668584 - protein, 12 aa, Homo sapiens
  CDR3 for beta chain variable domain of TCR clone 334292 (TRBV11-2, TRBJ2-2)
CASSLGGGELFF

SEQ ID NO: 668585 - protein, 11 aa, Homo sapiens
  CDR3 for alpha chain variable domain of TCR clone 334293 (TRAV3, TRAJ21)
CAVDNFNKFYF

SEQ ID NO: 668586 - protein, 16 aa, Homo sapiens
  CDR3 for beta chain variable domain of TCR clone 334293 (TRBV19, TRBJ2-1)
CASSKAGPRSYNEQFF

SEQ ID NO: 668587 - protein, 14 aa, Homo sapiens
  CDR3 for alpha chain variable domain of TCR clone 334294 (TRAV8-6, TRAJ4)
CAVSGSVGYNKLIF

SEQ ID NO: 668588 - protein, 13 aa, Homo sapiens
  CDR3 for beta chain variable domain of TCR clone 334294 (TRBV3-1, TRBJ2-5)
CASSPGLQETQYF

SEQ ID NO: 668589 - protein, 14 aa, Homo sapiens
  CDR3 for alpha chain variable domain of TCR clone 334295 (TRAV29/DV5, TRAJ45)
CAASFRGGADGLTF

SEQ ID NO: 668590 - protein, 16 aa, Homo sapiens
  CDR3 for beta chain variable domain of TCR clone 334295 (TRBV28, TRBJ1-2)
CASSHGQGVYKDGYTF

SEQ ID NO: 668591 - protein, 13 aa, Homo sapiens
  CDR3 for alpha chain variable domain of TCR clone 334296 (TRAV12-3, TRAJ43)
CAMIRPNNNDMRF

SEQ ID NO: 668592 - protein, 16 aa, Homo sapiens
  CDR3 for beta chain variable domain of TCR clone 334296 (TRBV7-2, TRBJ1-5)
CASSLARRREGQPQHF

SEQ ID NO: 668593 - protein, 14 aa, Homo sapiens
  CDR3 for alpha chain variable domain of TCR clone 334297 (TRAV1-2, TRAJ6)
CAVSLSGGSYIPTF

SEQ ID NO: 668594 - protein, 14 aa, Homo sapiens
  CDR3 for beta chain variable domain of TCR clone 334297 (TRBV7-2, TRBJ2-7)
CASSPKTSFYEQYF

SEQ ID NO: 668595 - protein, 13 aa, Homo sapiens
  CDR3 for alpha chain variable domain of TCR clone 334298 (TRAV12-1, TRAJ34)
CVVTGYNTEKLIF

SEQ ID NO: 668596 - protein, 14 aa, Homo sapiens
  CDR3 for beta chain variable domain of TCR clone 334298 (TRBV19, TRBJ2-1)
CASPTFVLSGVQFF

SEQ ID NO: 668597 - protein, 16 aa, Homo sapiens
  CDR3 for alpha chain variable domain of TCR clone 334299 (TRAV1-2, TRAJ6)
CAVRDQGTGGSYIPTF

SEQ ID NO: 668598 - protein, 13 aa, Homo sapiens
  CDR3 for beta chain variable domain of TCR clone 334299 (TRBV28, TRBJ2-7)
CTSTPGLAGEQYF

SEQ ID NO: 668599 - protein, 14 aa, Homo sapiens
  CDR3 for alpha chain variable domain of TCR clone 334300 (TRAV12-2, TRAJ24)
CAVTPADSWGKLQF

SEQ ID NO: 668600 - protein, 16 aa, Homo sapiens
  CDR3 for beta chain variable domain of TCR clone 334300 (TRBV6-4, TRBJ2-3)
APSAGGRAWGTDTQYF

SEQ ID NO: 668601 - protein, 15 aa, Homo sapiens
  CDR3 for alpha chain variable domain of TCR clone 334301 (TRAV26-1, TRAJ23)
CIVRVAGYQGGKLSF

SEQ ID NO: 668602 - protein, 18 aa, Homo sapiens
  CDR3 for beta chain variable domain of TCR clone 334301 (TRBV28, TRBJ2-1)
CASSSTSGRANSYNEQFF

SEQ ID NO: 668603 - protein, 16 aa, Homo sapiens
  CDR3 for alpha chain variable domain of TCR clone 334302 (TRAV30, TRAJ24)
CGTEIVDADSWGKFQF

SEQ ID NO: 668604 - protein, 16 aa, Homo sapiens
  CDR3 for beta chain variable domain of TCR clone 334302 (TRBV7-2, TRBJ2-6)
CAILSGVSSGANVLTF

SEQ ID NO: 668605 - protein, 13 aa, Homo sapiens
  CDR3 for alpha chain variable domain of TCR clone 334303 (TRAV13-1, TRAJ10)
CAALEGGGNKLTF

SEQ ID NO: 668606 - protein, 13 aa, Homo sapiens
  CDR3 for beta chain variable domain of TCR clone 334303 (TRBV7-9, TRBJ1-2)
CASSLKQNYGYTV

SEQ ID NO: 668607 - protein, 13 aa, Homo sapiens
  CDR3 for alpha chain variable domain of TCR clone 334304 (TRAV13-1, TRAJ43)
CAASLSNNNDMRF

SEQ ID NO: 668608 - protein, 20 aa, Homo sapiens
  CDR3 for beta chain variable domain of TCR clone 334304 (TRBV5-1, TRBJ2-5)
GSWCSVSAGCWGAGEKTQYC

SEQ ID NO: 668609 - protein, 13 aa, Homo sapiens
  CDR3 for alpha chain variable domain of TCR clone 334305 (TRAV13-1, TRAJ39)
CAARIRAGNMLTF

SEQ ID NO: 668610 - protein, 15 aa, Homo sapiens
  CDR3 for beta chain variable domain of TCR clone 334305 (TRBV7-9, TRBJ1-1)
CASSLLEQGGTEAFF

SEQ ID NO: 668611 - protein, 14 aa, Homo sapiens
  CDR3 for alpha chain variable domain of TCR clone 334306 (TRAV8-4, TRAJ9)
CAVRINTGGFKPIF

SEQ ID NO: 668612 - protein, 15 aa, Homo sapiens
  CDR3 for beta chain variable domain of TCR clone 334306 (TRBV10-2, TRBJ2-6)
CASSEQGTGANVLTF

SEQ ID NO: 668613 - protein, 12 aa, Homo sapiens
  CDR3 for alpha chain variable domain of TCR clone 334307 (TRAV19, TRAJ26)
CSDVNYGQNFVF

SEQ ID NO: 668614 - protein, 14 aa, Homo sapiens
  CDR3 for beta chain variable domain of TCR clone 334307 (TRBV4-1, TRBJ1-1)
CASSRSGQSFEAFF

SEQ ID NO: 668615 - protein, 12 aa, Homo sapiens
  CDR3 for alpha chain variable domain of TCR clone 334308 (TRAV13-1, TRAJ15)
CAASQAGTALIF

SEQ ID NO: 668616 - protein, 14 aa, Homo sapiens
  CDR3 for beta chain variable domain of TCR clone 334308 (TRBV19, TRBJ2-1)
CASPTFGLSGEQFF

SEQ ID NO: 668617 - protein, 14 aa, Homo sapiens
  CDR3 for alpha chain variable domain of TCR clone 334309 (TRAV38-1, TRAJ45)
CAYYSGGGADGLTF

SEQ ID NO: 668618 - protein, 12 aa, Homo sapiens
  CDR3 for beta chain variable domain of TCR clone 334309 (TRBV11-2, TRBJ2-5)
CASSLVGETQYF

SEQ ID NO: 668619 - protein, 14 aa, Homo sapiens
  CDR3 for alpha chain variable domain of TCR clone 334310 (TRAV17, TRAJ22)
CATVLSCSARQLTF

SEQ ID NO: 668620 - protein, 13 aa, Homo sapiens
  CDR3 for beta chain variable domain of TCR clone 334310 (TRBV15, TRBJ1-6)
CATSGGLNSPLHF

SEQ ID NO: 668621 - protein, 14 aa, Homo sapiens
  CDR3 for alpha chain variable domain of TCR clone 334311 (TRAV1-2, TRAJ16)
CAVNRFSDGQKLLF

SEQ ID NO: 668622 - protein, 15 aa, Homo sapiens
  CDR3 for beta chain variable domain of TCR clone 334311 (TRBV7-9, TRBJ1-6)
YASSSPGRGNSPLHF

SEQ ID NO: 668623 - protein, 12 aa, Homo sapiens
  CDR3 for alpha chain variable domain of TCR clone 334312 (TRAV13-1, TRAJ39)
CAASNAGNMLIF

SEQ ID NO: 668624 - protein, 13 aa, Homo sapiens
  CDR3 for beta chain variable domain of TCR clone 334312 (TRBV19, TRBJ1-3)
CASRLSLGNTIYF

SEQ ID NO: 668625 - protein, 15 aa, Homo sapiens
  CDR3 for alpha chain variable domain of TCR clone 334313 (TRAV8-3, TRAJ40)
CAAPSLGSGTYKYIF

SEQ ID NO: 668626 - protein, 16 aa, Homo sapiens
  CDR3 for beta chain variable domain of TCR clone 334313 (TRBV7-3, TRBJ2-3)
CASSSSGYRPDDTQYF

SEQ ID NO: 668627 - protein, 16 aa, Homo sapiens
  CDR3 for alpha chain variable domain of TCR clone 334314 (TRAV1-2, TRAJ10)
CAVRGVITGGGNKLTC

SEQ ID NO: 668628 - protein, 12 aa, Homo sapiens
  CDR3 for beta chain variable domain of TCR clone 334314 (TRBV7-8, TRBJ2-7)
CASSLGDREQYF

SEQ ID NO: 668629 - protein, 11 aa, Homo sapiens
  CDR3 for alpha chain variable domain of TCR clone 334315 (TRAV29/DV5, TRAJ31)
CSAMNNARLMF

SEQ ID NO: 668630 - protein, 14 aa, Homo sapiens
  CDR3 for beta chain variable domain of TCR clone 334315 (TRBV15, TRBJ2-5)
CATSIGGLGETQYF

SEQ ID NO: 668631 - protein, 16 aa, Homo sapiens
  CDR3 for alpha chain variable domain of TCR clone 334316 (TRAV2, TRAJ4)
FAVEDRFSGGYNKLIF

SEQ ID NO: 668632 - protein, 13 aa, Homo sapiens
  CDR3 for beta chain variable domain of TCR clone 334316 (TRBV7-7, TRBJ2-5)
CASSRSGQETQYF

SEQ ID NO: 668633 - protein, 17 aa, Homo sapiens
  CDR3 for alpha chain variable domain of TCR clone 334317 (TRAV13-1, TRAJ52)
CAAGRNAGGTSYGKLTF

SEQ ID NO: 668634 - protein, 12 aa, Homo sapiens
  CDR3 for beta chain variable domain of TCR clone 334317 (TRBV29-1, TRBJ1-3)
CSTRDSGNAIYF

SEQ ID NO: 668635 - protein, 13 aa, Homo sapiens
  CDR3 for alpha chain variable domain of TCR clone 334318 (TRAV12-1, TRAJ22)
CVALGGSARQLTF

SEQ ID NO: 668636 - protein, 14 aa, Homo sapiens
  CDR3 for beta chain variable domain of TCR clone 334318 (TRBV11-3, TRBJ1-2)
CASSLGSGTYGYTF

SEQ ID NO: 668637 - protein, 12 aa, Homo sapiens
  CDR3 for alpha chain variable domain of TCR clone 334319 (TRAV12-3, TRAJ17)
CAMTLTGNKLTF

SEQ ID NO: 668638 - protein, 14 aa, Homo sapiens
  CDR3 for beta chain variable domain of TCR clone 334319 (TRBV7-2, TRBJ2-7)
CASSLYPWRYEQYF

SEQ ID NO: 668639 - protein, 12 aa, Homo sapiens
  CDR3 for alpha chain variable domain of TCR clone 334320 (TRAV27, TRAJ41)
CAGRNSGYALNF

SEQ ID NO: 668640 - protein, 15 aa, Homo sapiens
  CDR3 for beta chain variable domain of TCR clone 334320 (TRBV20-1, TRBJ1-5)
CSATSDRGLGQPQHY

SEQ ID NO: 668641 - protein, 12 aa, Homo sapiens
  CDR3 for alpha chain variable domain of TCR clone 334321 (TRAV4, TRAJ26)
CLVGDYGQNFVF

SEQ ID NO: 668642 - protein, 16 aa, Homo sapiens
  CDR3 for beta chain variable domain of TCR clone 334321 (TRBV7-2, TRBJ1-2)
CASSSNQDRRGHSYTF

SEQ ID NO: 668643 - protein, 16 aa, Homo sapiens
  CDR3 for alpha chain variable domain of TCR clone 334322 (TRAV26-1, TRAJ23)
CIVRVHPYNQGGKLIF

SEQ ID NO: 668644 - protein, 15 aa, Homo sapiens
  CDR3 for beta chain variable domain of TCR clone 334322 (TRBV7-3, TRBJ2-1)
CASSLDGNSYNEQFF

SEQ ID NO: 668645 - protein, 13 aa, Homo sapiens
  CDR3 for alpha chain variable domain of TCR clone 334323 (TRAV12-2, TRAJ6)
CAVNVSRKLHTYI

SEQ ID NO: 668646 - protein, 11 aa, Homo sapiens
  CDR3 for beta chain variable domain of TCR clone 334323 (TRBV12-4, TRBJ2-3)
CASTATDTQYF

SEQ ID NO: 668647 - protein, 13 aa, Homo sapiens
  CDR3 for alpha chain variable domain of TCR clone 334324 (TRAV30, TRAJ6)
CGFIEGGSYIPTF

SEQ ID NO: 668648 - protein, 13 aa, Homo sapiens
  CDR3 for beta chain variable domain of TCR clone 334324 (TRBV5-4, TRBJ2-5)
CASIPVSQETQYF

SEQ ID NO: 668649 - protein, 14 aa, Homo sapiens
  CDR3 for alpha chain variable domain of TCR clone 334325 (TRAV12-3, TRAJ42)
CAMNYGGSQGNLIF

SEQ ID NO: 668650 - protein, 16 aa, Homo sapiens
  CDR3 for beta chain variable domain of TCR clone 334325 (TRBV7-2, TRBJ2-5)
CASSPFPAGGEETQYF

SEQ ID NO: 668651 - protein, 15 aa, Homo sapiens
  CDR3 for alpha chain variable domain of TCR clone 334326 (TRAV8-3, TRAJ11)
CVVGLLNSGYSALTF

SEQ ID NO: 668652 - protein, 16 aa, Homo sapiens
  CDR3 for beta chain variable domain of TCR clone 334326 (TRBV7-9, TRBJ1-2)
CASSLGFSSGEDGYTF

SEQ ID NO: 668653 - protein, 16 aa, Homo sapiens
  CDR3 for alpha chain variable domain of TCR clone 334327 (TRAV12-3, TRAJ53)
CAMSPGSGGSNYKLTF

SEQ ID NO: 668654 - protein, 16 aa, Homo sapiens
  CDR3 for beta chain variable domain of TCR clone 334327 (TRBV7-8, TRBJ2-5)
CASSLDGAGGLETQYF

SEQ ID NO: 668655 - protein, 16 aa, Homo sapiens
  CDR3 for alpha chain variable domain of TCR clone 334328 (TRAV35, TRAJ28)
CAGVAYSGAGSYQLTF

SEQ ID NO: 668656 - protein, 13 aa, Homo sapiens
  CDR3 for beta chain variable domain of TCR clone 334328 (TRBV7-9, TRBJ1-2)
CASSLKQNYGYTF

SEQ ID NO: 668657 - protein, 13 aa, Homo sapiens
  CDR3 for alpha chain variable domain of TCR clone 334329 (TRAV1-2, TRAJ36)
CAVDQTGANNLFF

SEQ ID NO: 668658 - protein, 14 aa, Homo sapiens
  CDR3 for beta chain variable domain of TCR clone 334329 (TRBV20-1, TRBJ2-5)
CSAREMTKQETPYF

SEQ ID NO: 668659 - protein, 13 aa, Homo sapiens
  CDR3 for alpha chain variable domain of TCR clone 334330 (TRAV21, TRAJ27)
CAVRPGNTGKSTF

SEQ ID NO: 668660 - protein, 14 aa, Homo sapiens
  CDR3 for beta chain variable domain of TCR clone 334330 (TRBV7-6, TRBJ2-3)
CASSLGTVTDTQYF

SEQ ID NO: 668661 - protein, 15 aa, Homo sapiens
  CDR3 for alpha chain variable domain of TCR clone 334331 (TRAV8-3, TRAJ45)
CASSYSGGGADGLTF

SEQ ID NO: 668662 - protein, 17 aa, Homo sapiens
  CDR3 for beta chain variable domain of TCR clone 334331 (TRBV5-1, TRBJ2-2)
CASSLAGLSGGTGELFF

SEQ ID NO: 668663 - protein, 18 aa, Homo sapiens
  CDR3 for alpha chain variable domain of TCR clone 334332 (TRAV9-2, TRAJ52)
CALSRHNAGGTSYGELTF

SEQ ID NO: 668664 - protein, 13 aa, Homo sapiens
  CDR3 for beta chain variable domain of TCR clone 334332 (TRBV7-9, TRBJ1-2)
CASSLKQNYGYTF

SEQ ID NO: 668665 - protein, 14 aa, Homo sapiens
  CDR3 for alpha chain variable domain of TCR clone 334333 (TRAV1-2, TRAJ16)
CAVNRFSDGQKLRF

SEQ ID NO: 668666 - protein, 15 aa, Homo sapiens
  CDR3 for beta chain variable domain of TCR clone 334333 (TRBV27, TRBJ2-1)
CASSNGGGSSNEQFF

SEQ ID NO: 668667 - protein, 18 aa, Homo sapiens
  CDR3 for alpha chain variable domain of TCR clone 334334 (TRAV26-2, TRAJ54)
CILRDVEVGIQGAQKRVF

SEQ ID NO: 668668 - protein, 15 aa, Homo sapiens
  CDR3 for beta chain variable domain of TCR clone 334334 (TRBV29-1, TRBJ2-1)
CSVPTGLALYNEQFF

SEQ ID NO: 668669 - protein, 13 aa, Homo sapiens
  CDR3 for alpha chain variable domain of TCR clone 334335 (TRAV12-2, TRAJ24)
CAVSTDSLGKLQF

SEQ ID NO: 668670 - protein, 14 aa, Homo sapiens
  CDR3 for beta chain variable domain of TCR clone 334335 (TRBV25-1, TRBJ1-1)
CASTHLGGNTEAFF

SEQ ID NO: 668671 - protein, 15 aa, Homo sapiens
  CDR3 for alpha chain variable domain of TCR clone 334336 (TRAV23/DV6, TRAJ38)
CAASGGAGNNRKLIW

SEQ ID NO: 668672 - protein, 13 aa, Homo sapiens
  CDR3 for beta chain variable domain of TCR clone 334336 (TRBV7-2, TRBJ1-2)
CASSVPGLYGYTF

SEQ ID NO: 668673 - protein, 13 aa, Homo sapiens
  CDR3 for alpha chain variable domain of TCR clone 334337 (TRAV1-2, TRAJ35)
CAASRGFGNVLHC

SEQ ID NO: 668674 - protein, 15 aa, Homo sapiens
  CDR3 for beta chain variable domain of TCR clone 334337 (TRBV6-3, TRBJ2-7)
CASSSPGTVFYEQYF

SEQ ID NO: 668675 - protein, 14 aa, Homo sapiens
  CDR3 for alpha chain variable domain of TCR clone 334338 (TRAV26-1, TRAJ48)
CIVSVGFGNEKLTF

SEQ ID NO: 668676 - protein, 13 aa, Homo sapiens
  CDR3 for beta chain variable domain of TCR clone 334338 (TRBV11-3, TRBJ2-3)
CASSHDTKDTQYF

SEQ ID NO: 668677 - protein, 12 aa, Homo sapiens
  CDR3 for alpha chain variable domain of TCR clone 334339 (TRAV1-2, TRAJ11)
CAVRGGYSTLTF

SEQ ID NO: 668678 - protein, 12 aa, Homo sapiens
  CDR3 for beta chain variable domain of TCR clone 334339 (TRBV19, TRBJ1-5)
CASSIAHQPQHF

SEQ ID NO: 668679 - protein, 14 aa, Homo sapiens
  CDR3 for alpha chain variable domain of TCR clone 334340 (TRAV12-2, TRAJ17)
CAVLFKAAGNKLTF

SEQ ID NO: 668680 - protein, 11 aa, Homo sapiens
  CDR3 for beta chain variable domain of TCR clone 334340 (TRBV29-1, TRBJ2-5)
CSEARTGTQYF

SEQ ID NO: 668681 - protein, 14 aa, Homo sapiens
  CDR3 for alpha chain variable domain of TCR clone 334341 (TRAV17, TRAJ16)
CATADFSDGQKLLF

SEQ ID NO: 668682 - protein, 15 aa, Homo sapiens
  CDR3 for beta chain variable domain of TCR clone 334341 (TRBV7-6, TRBJ2-1)
CASSSLAGEGNEQFF

SEQ ID NO: 668683 - protein, 12 aa, Homo sapiens
  CDR3 for alpha chain variable domain of TCR clone 334342 (TRAV12-3, TRAJ17)
CAMTLTGNKLTF

SEQ ID NO: 668684 - protein, 13 aa, Homo sapiens
  CDR3 for beta chain variable domain of TCR clone 334342 (TRBV27, TRBJ2-1)
CDSRTLGVGEQFF

SEQ ID NO: 668685 - protein, 16 aa, Homo sapiens
  CDR3 for alpha chain variable domain of TCR clone 334343 (TRAV8-2, TRAJ50)
CVVSDHMKTSYDKVIV

SEQ ID NO: 668686 - protein, 15 aa, Homo sapiens
  CDR3 for beta chain variable domain of TCR clone 334343 (TRBV7-2, TRBJ2-1)
CASSFQADEYNEQFF

SEQ ID NO: 668687 - protein, 17 aa, Homo sapiens
  CDR3 for alpha chain variable domain of TCR clone 334344 (TRAV29/DV5, TRAJ42)
CAVSAGNYGGSQGNLIF

SEQ ID NO: 668688 - protein, 16 aa, Homo sapiens
  CDR3 for beta chain variable domain of TCR clone 334344 (TRBV27, TRBJ2-2)
CASSFRGLVRTGELFF

SEQ ID NO: 668689 - protein, 15 aa, Homo sapiens
  CDR3 for alpha chain variable domain of TCR clone 334345 (TRAV17, TRAJ16)
CATALRFSDGQKLLF

SEQ ID NO: 668690 - protein, 15 aa, Homo sapiens
  CDR3 for beta chain variable domain of TCR clone 334345 (TRBV13, TRBJ1-5)
CASRFGQGGVQPQHF

SEQ ID NO: 668691 - protein, 17 aa, Homo sapiens
  CDR3 for alpha chain variable domain of TCR clone 334346 (TRAV3, TRAJ6)
CAVRDGPRAGGSYIPTF

SEQ ID NO: 668692 - protein, 15 aa, Homo sapiens
  CDR3 for beta chain variable domain of TCR clone 334346 (TRBV11-2, TRBJ2-1)
CASSPAGQSLNEQFF

SEQ ID NO: 668693 - protein, 16 aa, Homo sapiens
  CDR3 for alpha chain variable domain of TCR clone 334347 (TRAV30, TRAJ24)
CGTEIVDADSWGKFQF

SEQ ID NO: 668694 - protein, 15 aa, Homo sapiens
  CDR3 for beta chain variable domain of TCR clone 334347 (TRBV20-1, TRBJ1-1)
CSARPRQGSPTEAFF

SEQ ID NO: 668695 - protein, 14 aa, Homo sapiens
  CDR3 for alpha chain variable domain of TCR clone 334348 (TRAV13-2, TRAJ29)
CAENIEPGNTPLVF

SEQ ID NO: 668696 - protein, 14 aa, Homo sapiens
  CDR3 for beta chain variable domain of TCR clone 334348 (TRBV19, TRBJ2-2)
CATTGHANTEELFF

SEQ ID NO: 668697 - protein, 11 aa, Homo sapiens
  CDR3 for alpha chain variable domain of TCR clone 334349 (TRAV13-2, TRAJ23)
CAESPRGTLIF

SEQ ID NO: 668698 - protein, 18 aa, Homo sapiens
  CDR3 for beta chain variable domain of TCR clone 334349 (TRBV6-5, TRBJ1-1)
CASSYSAPGGTGGTEAFF

SEQ ID NO: 668699 - protein, 16 aa, Homo sapiens
  CDR3 for alpha chain variable domain of TCR clone 334350 (TRAV27, TRAJ56)
CAGVSRKDGANSKLTF

SEQ ID NO: 668700 - protein, 15 aa, Homo sapiens
  CDR3 for beta chain variable domain of TCR clone 334350 (TRBV4-1, TRBJ2-5)
GASSQLAGGQETQYF

SEQ ID NO: 668701 - protein, 12 aa, Homo sapiens
  CDR3 for alpha chain variable domain of TCR clone 334351 (TRAV38-1, TRAJ47)
CAFETYGNKLVF

SEQ ID NO: 668702 - protein, 16 aa, Homo sapiens
  CDR3 for beta chain variable domain of TCR clone 334351 (TRBV3-1, TRBJ2-5)
CASSQDWASGQETQYF

SEQ ID NO: 668703 - protein, 16 aa, Homo sapiens
  CDR3 for alpha chain variable domain of TCR clone 334352 (TRAV1-2, TRAJ17)
CAVVAGTRAAGNKLTF

SEQ ID NO: 668704 - protein, 14 aa, Homo sapiens
  CDR3 for beta chain variable domain of TCR clone 334352 (TRBV7-6, TRBJ2-3)
CASSLGTVTDTQYF

SEQ ID NO: 668705 - protein, 13 aa, Homo sapiens
  CDR3 for alpha chain variable domain of TCR clone 334353 (TRAV2, TRAJ15)
CAVASQAGTALIF

SEQ ID NO: 668706 - protein, 16 aa, Homo sapiens
  CDR3 for beta chain variable domain of TCR clone 334353 (TRBV5-7, TRBJ2-5)
CASTVAPAGGRETQYF

SEQ ID NO: 668707 - protein, 10 aa, Homo sapiens
  CDR3 for alpha chain variable domain of TCR clone 334354 (TRAV26-1, TRAJ22)
CIVSLNFFWF

SEQ ID NO: 668708 - protein, 15 aa, Homo sapiens
  CDR3 for beta chain variable domain of TCR clone 334354 (TRBV7-9, TRBJ1-4)
CASSAWTGGNEKLFF

SEQ ID NO: 668709 - protein, 12 aa, Homo sapiens
  CDR3 for alpha chain variable domain of TCR clone 334355 (TRAV13-2, TRAJ23)
CAERHRGGKLIF

SEQ ID NO: 668710 - protein, 16 aa, Homo sapiens
  CDR3 for beta chain variable domain of TCR clone 334355 (TRBV7-3, TRBJ2-1)
CASSLVSGSSNNEQFF

SEQ ID NO: 668711 - protein, 12 aa, Homo sapiens
  CDR3 for alpha chain variable domain of TCR clone 334356 (TRAV35, TRAJ49)
CAGWNTGNQFYF

SEQ ID NO: 668712 - protein, 16 aa, Homo sapiens
  CDR3 for beta chain variable domain of TCR clone 334356 (TRBV19, TRBJ1-1)
CAGSPTRFWPGTEAFF

SEQ ID NO: 668713 - protein, 15 aa, Homo sapiens
  CDR3 for alpha chain variable domain of TCR clone 334357 (TRAV2, TRAJ15)
CAVEDRGQAGTSLIF

SEQ ID NO: 668714 - protein, 13 aa, Homo sapiens
  CDR3 for beta chain variable domain of TCR clone 334357 (TRBV12-4, TRBJ2-5)
CASSLGGSRTQYF

SEQ ID NO: 668715 - protein, 14 aa, Homo sapiens
  CDR3 for alpha chain variable domain of TCR clone 334358 (TRAV13-1, TRAJ40)
CAAHPTSGTYKYIF

SEQ ID NO: 668716 - protein, 15 aa, Homo sapiens
  CDR3 for beta chain variable domain of TCR clone 334358 (TRBV11-2, TRBJ2-2)
CASSPSGGETGELFF

SEQ ID NO: 668717 - protein, 13 aa, Homo sapiens
  CDR3 for alpha chain variable domain of TCR clone 334359 (TRAV29/DV5, TRAJ48)
CAASSFGNEKLPF

SEQ ID NO: 668718 - protein, 14 aa, Homo sapiens
  CDR3 for beta chain variable domain of TCR clone 334359 (TRBV3-1, TRBJ2-2)
CASSQDWVQGELFF

SEQ ID NO: 668719 - protein, 16 aa, Homo sapiens
  CDR3 for alpha chain variable domain of TCR clone 334360 (TRAV16, TRAJ4)
CSLSRMFSGGYNKLIF

SEQ ID NO: 668720 - protein, 16 aa, Homo sapiens
  CDR3 for beta chain variable domain of TCR clone 334360 (TRBV24-1, TRBJ2-3)
CATSGPGTGATDTQYF

SEQ ID NO: 668721 - protein, 15 aa, Homo sapiens
  CDR3 for alpha chain variable domain of TCR clone 334361 (TRAV3, TRAJ5)
CAVRDLDTGRTALTF

SEQ ID NO: 668722 - protein, 15 aa, Homo sapiens
  CDR3 for beta chain variable domain of TCR clone 334361 (TRBV7-2, TRBJ2-3)
CASSSTGLETDTQYF

SEQ ID NO: 668723 - protein, 11 aa, Homo sapiens
  CDR3 for alpha chain variable domain of TCR clone 334362 (TRAV12-3, TRAJ43)
CAMSVSNDMRF

SEQ ID NO: 668724 - protein, 14 aa, Homo sapiens
  CDR3 for beta chain variable domain of TCR clone 334362 (TRBV15, TRBJ2-3)
CATRSGTSTDTQYF

SEQ ID NO: 668725 - protein, 15 aa, Homo sapiens
  CDR3 for alpha chain variable domain of TCR clone 334363 (TRAV12-2, TRAJ53)
CAVNGGGGSNYKLTF

SEQ ID NO: 668726 - protein, 17 aa, Homo sapiens
  CDR3 for beta chain variable domain of TCR clone 334363 (TRBV24-1, TRBJ2-1)
CATSDVSTSGTYNEQFF

SEQ ID NO: 668727 - protein, 17 aa, Homo sapiens
  CDR3 for alpha chain variable domain of TCR clone 334364 (TRAV2, TRAJ22)
ILQVREADAAEQRQLTF

SEQ ID NO: 668728 - protein, 16 aa, Homo sapiens
  CDR3 for beta chain variable domain of TCR clone 334364 (TRBV2, TRBJ2-5)
CASSETQGGGEETQYF

SEQ ID NO: 668729 - protein, 13 aa, Homo sapiens
  CDR3 for alpha chain variable domain of TCR clone 334365 (TRAV35, TRAJ57)
CAGSQGGSEKLVS

SEQ ID NO: 668730 - protein, 14 aa, Homo sapiens
  CDR3 for beta chain variable domain of TCR clone 334365 (TRBV25-1, TRBJ1-1)
CASTHLGGNTEAFF

SEQ ID NO: 668731 - protein, 15 aa, Homo sapiens
  CDR3 for alpha chain variable domain of TCR clone 334366 (TRAV26-1, TRAJ52)
CIVSDLGTSYGKLTS

SEQ ID NO: 668732 - protein, 16 aa, Homo sapiens
  CDR3 for beta chain variable domain of TCR clone 334366 (TRBV4-1, TRBJ2-3)
CASSQSTSGAEDTQYF

SEQ ID NO: 668733 - protein, 13 aa, Homo sapiens
  CDR3 for alpha chain variable domain of TCR clone 334367 (TRAV9-2, TRAJ53)
CALSGGSNSKLTF

SEQ ID NO: 668734 - protein, 17 aa, Homo sapiens
  CDR3 for beta chain variable domain of TCR clone 334367 (TRBV11-2, TRBJ2-1)
CASSLYPPGVEYNEQFF

SEQ ID NO: 668735 - protein, 12 aa, Homo sapiens
  CDR3 for alpha chain variable domain of TCR clone 334368 (TRAV12-3, TRAJ20)
CAMVSGDYKLSF

SEQ ID NO: 668736 - protein, 12 aa, Homo sapiens
  CDR3 for beta chain variable domain of TCR clone 334368 (TRBV6-1, TRBJ2-7)
CASSDYSYEQYF

SEQ ID NO: 668737 - protein, 14 aa, Homo sapiens
  CDR3 for alpha chain variable domain of TCR clone 334369 (TRAV12-2, TRAJ44)
CAVNPAGTASKLTF

SEQ ID NO: 668738 - protein, 13 aa, Homo sapiens
  CDR3 for beta chain variable domain of TCR clone 334369 (TRBV20-1, TRBJ1-6)
CSAPLGVGSRLHF

SEQ ID NO: 668739 - protein, 13 aa, Homo sapiens
  CDR3 for alpha chain variable domain of TCR clone 334370 (TRAV13-1, TRAJ6)
CAASKGGSYIPTF

SEQ ID NO: 668740 - protein, 14 aa, Homo sapiens
  CDR3 for beta chain variable domain of TCR clone 334370 (TRBV7-2, TRBJ2-1)
CASSGGVGYNEQFF

SEQ ID NO: 668741 - protein, 14 aa, Homo sapiens
  CDR3 for alpha chain variable domain of TCR clone 334371 (TRAV27, TRAJ23)
CAGAFDNQGGELIF

SEQ ID NO: 668742 - protein, 15 aa, Homo sapiens
  CDR3 for beta chain variable domain of TCR clone 334371 (TRBV7-3, TRBJ2-7)
CASSLTGQGKYEQYF

SEQ ID NO: 668743 - protein, 16 aa, Homo sapiens
  CDR3 for alpha chain variable domain of TCR clone 334372 (TRAV12-3, TRAJ53)
CAMSPGSGGSNYKLTF

SEQ ID NO: 668744 - protein, 16 aa, Homo sapiens
  CDR3 for beta chain variable domain of TCR clone 334372 (TRBV4-2, TRBJ1-1)
CASSQAGFGMTTEAFF

SEQ ID NO: 668745 - protein, 14 aa, Homo sapiens
  CDR3 for alpha chain variable domain of TCR clone 334373 (TRAV1-2, TRAJ16)
CAVNRFSDGQTLLF

SEQ ID NO: 668746 - protein, 16 aa, Homo sapiens
  CDR3 for beta chain variable domain of TCR clone 334373 (TRBV13, TRBJ2-2)
CASSPRTGEHTGELFF

SEQ ID NO: 668747 - protein, 13 aa, Homo sapiens
  CDR3 for alpha chain variable domain of TCR clone 334374 (TRAV23/DV6, TRAJ12)
CAPRVDSSYKLFF

SEQ ID NO: 668748 - protein, 12 aa, Homo sapiens
  CDR3 for beta chain variable domain of TCR clone 334374 (TRBV7-8, TRBJ2-7)
CASSLGDREQYF

SEQ ID NO: 668749 - protein, 16 aa, Homo sapiens
  CDR3 for alpha chain variable domain of TCR clone 334375 (TRAV30, TRAJ57)
CGTGWAPQGGAEKLVF

SEQ ID NO: 668750 - protein, 14 aa, Homo sapiens
  CDR3 for beta chain variable domain of TCR clone 334375 (TRBV18, TRBJ1-1)
CASSPGFQGGEAFF

SEQ ID NO: 668751 - protein, 13 aa, Homo sapiens
  CDR3 for alpha chain variable domain of TCR clone 334376 (TRAV20, TRAJ34)
CCAGSYNTDKLIF

SEQ ID NO: 668752 - protein, 16 aa, Homo sapiens
  CDR3 for beta chain variable domain of TCR clone 334376 (TRBV3-1, TRBJ2-2)
CASSQFVSANTGELFF

SEQ ID NO: 668753 - protein, 13 aa, Homo sapiens
  CDR3 for alpha chain variable domain of TCR clone 334377 (TRAV6, TRAJ23)
CALDQNQGGKLIF

SEQ ID NO: 668754 - protein, 15 aa, Homo sapiens
  CDR3 for beta chain variable domain of TCR clone 334377 (TRBV28, TRBJ1-2)
CASSGSEQRASGDTF

SEQ ID NO: 668755 - protein, 15 aa, Homo sapiens
  CDR3 for alpha chain variable domain of TCR clone 334378 (TRAV13-1, TRAJ15)
CAASIERQAGTALIF

SEQ ID NO: 668756 - protein, 15 aa, Homo sapiens
  CDR3 for beta chain variable domain of TCR clone 334378 (TRBV4-1, TRBJ2-5)
CASSQWDLYQETQYF

SEQ ID NO: 668757 - protein, 16 aa, Homo sapiens
  CDR3 for alpha chain variable domain of TCR clone 334379 (TRAV3, TRAJ27)
FAVRDPPGTNAGKSTF

SEQ ID NO: 668758 - protein, 15 aa, Homo sapiens
  CDR3 for beta chain variable domain of TCR clone 334379 (TRBV20-1, TRBJ2-7)
CSARDRVSGMDEQYF

SEQ ID NO: 668759 - protein, 14 aa, Homo sapiens
  CDR3 for alpha chain variable domain of TCR clone 334380 (TRAV1-2, TRAJ16)
CAVNRFSDGQKLLF

SEQ ID NO: 668760 - protein, 14 aa, Homo sapiens
  CDR3 for beta chain variable domain of TCR clone 334380 (TRBV19, TRBJ2-1)
CDSPTFVLSGEQFF

SEQ ID NO: 668761 - protein, 14 aa, Homo sapiens
  CDR3 for alpha chain variable domain of TCR clone 334381 (TRAV1-2, TRAJ8)
CAVREHTGFQKLVF

SEQ ID NO: 668762 - protein, 15 aa, Homo sapiens
  CDR3 for beta chain variable domain of TCR clone 334381 (TRBV4-1, TRBJ2-7)
CASSQNTGRLYEQYF

SEQ ID NO: 668763 - protein, 10 aa, Homo sapiens
  CDR3 for alpha chain variable domain of TCR clone 334382 (TRAV36/DV7, TRAJ48)
CAVGTEKLTF

SEQ ID NO: 668764 - protein, 15 aa, Homo sapiens
  CDR3 for beta chain variable domain of TCR clone 334382 (TRBV6-5, TRBJ1-4)
CASSSVGGAGEKLFF

SEQ ID NO: 668765 - protein, 14 aa, Homo sapiens
  CDR3 for alpha chain variable domain of TCR clone 334383 (TRAV1-2, TRAJ16)
CAVNRFSDGQKLLF

SEQ ID NO: 668766 - protein, 15 aa, Homo sapiens
  CDR3 for beta chain variable domain of TCR clone 334383 (TRBV28, TRBJ2-7)
CASSPGGGGFYEQYF

SEQ ID NO: 668767 - protein, 22 aa, Homo sapiens
  CDR3 for alpha chain variable domain of TCR clone 334384 (TRAV34, TRAJ52)
STSVEQTRRSNAGGTSYGKLTF

SEQ ID NO: 668768 - protein, 11 aa, Homo sapiens
  CDR3 for beta chain variable domain of TCR clone 334384 (TRBV6-4, TRBJ2-1)
CASSDSYAQFF

SEQ ID NO: 668769 - protein, 13 aa, Homo sapiens
  CDR3 for alpha chain variable domain of TCR clone 334385 (TRAV12-3, TRAJ33)
CAMSVNSNYQLIW

SEQ ID NO: 668770 - protein, 15 aa, Homo sapiens
  CDR3 for beta chain variable domain of TCR clone 334385 (TRBV28, TRBJ2-1)
CASSIIAGGRSEQFF

SEQ ID NO: 668771 - protein, 14 aa, Homo sapiens
  CDR3 for alpha chain variable domain of TCR clone 334386 (TRAV23/DV6, TRAJ4)
CAAPSSGGYIKLIF

SEQ ID NO: 668772 - protein, 16 aa, Homo sapiens
  CDR3 for beta chain variable domain of TCR clone 334386 (TRBV19, TRBJ1-1)
CASGFGGPVTGTEAFF

SEQ ID NO: 668773 - protein, 11 aa, Homo sapiens
  CDR3 for alpha chain variable domain of TCR clone 334387 (TRAV26-1, TRAJ37)
CIVRVGRNLIF

SEQ ID NO: 668774 - protein, 13 aa, Homo sapiens
  CDR3 for beta chain variable domain of TCR clone 334387 (TRBV7-2, TRBJ2-2)
CASSLAVTGELFF

SEQ ID NO: 668775 - protein, 15 aa, Homo sapiens
  CDR3 for alpha chain variable domain of TCR clone 334388 (TRAV20, TRAJ23)
CAVQALRNQGGKLIF

SEQ ID NO: 668776 - protein, 13 aa, Homo sapiens
  CDR3 for beta chain variable domain of TCR clone 334388 (TRBV9, TRBJ2-7)
CASSASDSYEQYF

SEQ ID NO: 668777 - protein, 17 aa, Homo sapiens
  CDR3 for alpha chain variable domain of TCR clone 334389 (TRAV3, TRAJ12)
CAVRDGGRMDSSYKLIF

SEQ ID NO: 668778 - protein, 13 aa, Homo sapiens
  CDR3 for beta chain variable domain of TCR clone 334389 (TRBV18, TRBJ2-5)
CASSLQGQETQYF

SEQ ID NO: 668779 - protein, 23 aa, Homo sapiens
  CDR3 for alpha chain variable domain of TCR clone 334390 (TRAV26-1, TRAJ38)
CIADNAGNNHIQNPDPAVYQLRD

SEQ ID NO: 668780 - protein, 19 aa, Homo sapiens
  CDR3 for beta chain variable domain of TCR clone 334390 (TRBV4-1, TRBJ1-1)
CASSRIILTPRGVNTEAFF

SEQ ID NO: 668781 - protein, 17 aa, Homo sapiens
  CDR3 for alpha chain variable domain of TCR clone 334391 (TRAV4, )
CLVDIQNPDPAVYQLRD

SEQ ID NO: 668782 - protein, 14 aa, Homo sapiens
  CDR3 for beta chain variable domain of TCR clone 334391 (TRBV5-7, TRBJ1-2)
CASSAVGVSGGYTF

SEQ ID NO: 668783 - protein, 17 aa, Homo sapiens
  CDR3 for alpha chain variable domain of TCR clone 334392 (TRAV36/DV7, TRAJ52)
CAAAQRAGGTSYGKLTF

SEQ ID NO: 668784 - protein, 15 aa, Homo sapiens
  CDR3 for beta chain variable domain of TCR clone 334392 (TRBV6-5, TRBJ1-2)
CASSYSQAFNYGYTF

SEQ ID NO: 668785 - protein, 14 aa, Homo sapiens
  CDR3 for alpha chain variable domain of TCR clone 334393 (TRAV8-4, TRAJ22)
CAVSPQGSARQLTF

SEQ ID NO: 668786 - protein, 15 aa, Homo sapiens
  CDR3 for beta chain variable domain of TCR clone 334393 (TRBV19, TRBJ2-2)
CARRGPGSNTGELFF

SEQ ID NO: 668787 - protein, 16 aa, Homo sapiens
  CDR3 for alpha chain variable domain of TCR clone 334394 (TRAV35, TRAJ42)
GRMERYYGGSQGNLIF

SEQ ID NO: 668788 - protein, 16 aa, Homo sapiens
  CDR3 for beta chain variable domain of TCR clone 334394 (TRBV13, TRBJ2-2)
CASSPRTGEHTGELFF

SEQ ID NO: 668789 - protein, 12 aa, Homo sapiens
  CDR3 for alpha chain variable domain of TCR clone 334395 (TRAV12-3, TRAJ17)
CAMTLTGNKLTL

SEQ ID NO: 668790 - protein, 15 aa, Homo sapiens
  CDR3 for beta chain variable domain of TCR clone 334395 (TRBV20-1, TRBJ2-7)
CSARDRVSGMDEKYF

SEQ ID NO: 668791 - protein, 15 aa, Homo sapiens
  CDR3 for alpha chain variable domain of TCR clone 334396 (TRAV21, TRAJ53)
CATMNSGGSNYKLTF

SEQ ID NO: 668792 - protein, 13 aa, Homo sapiens
  CDR3 for beta chain variable domain of TCR clone 334396 (TRBV7-9, TRBJ2-3)
CASSPGSTDTQYF

SEQ ID NO: 668793 - protein, 14 aa, Homo sapiens
  CDR3 for alpha chain variable domain of TCR clone 334397 (TRAV17, TRAJ16)
CATADFSDGQKLLF

SEQ ID NO: 668794 - protein, 14 aa, Homo sapiens
  CDR3 for beta chain variable domain of TCR clone 334397 (TRBV9, TRBJ2-7)
CACSVGVGSYEQYF

SEQ ID NO: 668795 - protein, 16 aa, Homo sapiens
  CDR3 for alpha chain variable domain of TCR clone 334398 (TRAV12-3, TRAJ53)
CAISPGSGGSNYKLTF

SEQ ID NO: 668796 - protein, 12 aa, Homo sapiens
  CDR3 for beta chain variable domain of TCR clone 334398 (TRBV11-2, TRBJ2-2)
CASSLGGGEQFF

SEQ ID NO: 668797 - protein, 13 aa, Homo sapiens
  CDR3 for alpha chain variable domain of TCR clone 334399 (TRAV1-2, TRAJ9)
CAALTTGGFKTIF

SEQ ID NO: 668798 - protein, 13 aa, Homo sapiens
  CDR3 for beta chain variable domain of TCR clone 334399 (TRBV19, TRBJ1-2)
CASSVPGRDGYTF

SEQ ID NO: 668799 - protein, 12 aa, Homo sapiens
  CDR3 for alpha chain variable domain of TCR clone 334400 (TRAV26-1, TRAJ31)
CIVRNNNARLMF

SEQ ID NO: 668800 - protein, 18 aa, Homo sapiens
  CDR3 for beta chain variable domain of TCR clone 334400 (TRBV7-6, TRBJ2-1)
CASSPRTSGMSSYNEQFF

SEQ ID NO: 668801 - protein, 14 aa, Homo sapiens
  CDR3 for alpha chain variable domain of TCR clone 334401 (TRAV13-1, TRAJ44)
CAAKATGTASKLTF

SEQ ID NO: 668802 - protein, 16 aa, Homo sapiens
  CDR3 for beta chain variable domain of TCR clone 334401 (TRBV10-3, TRBJ1-6)
CAISERRGQGNSPLHF

SEQ ID NO: 668803 - protein, 11 aa, Homo sapiens
  CDR3 for alpha chain variable domain of TCR clone 334402 (TRAV17, TRAJ31)
CATSNNARLLF

SEQ ID NO: 668804 - protein, 16 aa, Homo sapiens
  CDR3 for beta chain variable domain of TCR clone 334402 (TRBV7-8, TRBJ2-4)
CASSAERTLAKNIQYF

SEQ ID NO: 668805 - protein, 13 aa, Homo sapiens
  CDR3 for alpha chain variable domain of TCR clone 334403 (TRAV35, TRAJ43)
CAGYPYNNNNMRF

SEQ ID NO: 668806 - protein, 15 aa, Homo sapiens
  CDR3 for beta chain variable domain of TCR clone 334403 (TRBV25-1, TRBJ1-4)
CASSKRIATNEKLFF

SEQ ID NO: 668807 - protein, 12 aa, Homo sapiens
  CDR3 for alpha chain variable domain of TCR clone 334404 (TRAV23/DV6, TRAJ18)
CAASMNHRGSTL

SEQ ID NO: 668808 - protein, 17 aa, Homo sapiens
  CDR3 for beta chain variable domain of TCR clone 334404 (TRBV11-2, TRBJ2-1)
CASSLYPPGVEYNEQFF

SEQ ID NO: 668809 - protein, 18 aa, Homo sapiens
  CDR3 for alpha chain variable domain of TCR clone 334405 (TRAV13-1, TRAJ52)
CAPKNPNAGGTSYGKLTF

SEQ ID NO: 668810 - protein, 15 aa, Homo sapiens
  CDR3 for beta chain variable domain of TCR clone 334405 (TRBV6-1, TRBJ2-3)
CASSERGGITDTQYF

SEQ ID NO: 668811 - protein, 14 aa, Homo sapiens
  CDR3 for alpha chain variable domain of TCR clone 334406 (TRAV38-1, TRAJ40)
CALRPTSGTYKYIF

SEQ ID NO: 668812 - protein, 16 aa, Homo sapiens
  CDR3 for beta chain variable domain of TCR clone 334406 (TRBV6-1, TRBJ1-2)
CASSGAWQGRSHGYSF

SEQ ID NO: 668813 - protein, 13 aa, Homo sapiens
  CDR3 for alpha chain variable domain of TCR clone 334407 (TRAV23/DV6, TRAJ34)
CAAIENNTDKLIF

SEQ ID NO: 668814 - protein, 13 aa, Homo sapiens
  CDR3 for beta chain variable domain of TCR clone 334407 (TRBV20-1, TRBJ1-1)
CSAGTVGNTEAFF

SEQ ID NO: 668815 - protein, 15 aa, Homo sapiens
  CDR3 for alpha chain variable domain of TCR clone 334408 (TRAV21, TRAJ13)
CAVRPTSEGYQKFTF

SEQ ID NO: 668816 - protein, 18 aa, Homo sapiens
  CDR3 for beta chain variable domain of TCR clone 334408 (TRBV11-3, TRBJ2-1)
CASSSYPGGRDSYNEQFF

SEQ ID NO: 668817 - protein, 14 aa, Homo sapiens
  CDR3 for alpha chain variable domain of TCR clone 334409 (TRAV16, TRAJ26)
CALSSANYGQNFVF

SEQ ID NO: 668818 - protein, 14 aa, Homo sapiens
  CDR3 for beta chain variable domain of TCR clone 334409 (TRBV4-3, TRBJ2-2)
CASSQGHVTGELFF

SEQ ID NO: 668819 - protein, 14 aa, Homo sapiens
  CDR3 for alpha chain variable domain of TCR clone 334410 (TRAV1-2, TRAJ16)
CAVNRFSDGQKLLF

SEQ ID NO: 668820 - protein, 15 aa, Homo sapiens
  CDR3 for beta chain variable domain of TCR clone 334410 (TRBV7-2, TRBJ2-5)
CQQFFVRGRQETQYF

SEQ ID NO: 668821 - protein, 15 aa, Homo sapiens
  CDR3 for alpha chain variable domain of TCR clone 334411 (TRAV8-3, TRAJ40)
CAAPSLGSGTYKYIF

SEQ ID NO: 668822 - protein, 16 aa, Homo sapiens
  CDR3 for beta chain variable domain of TCR clone 334411 (TRBV7-3, TRBJ2-3)
CSSSLSGDRPEDAQYF

SEQ ID NO: 668823 - protein, 14 aa, Homo sapiens
  CDR3 for alpha chain variable domain of TCR clone 334412 (TRAV12-2, TRAJ5)
CAVNRSTGRRALTF

SEQ ID NO: 668824 - protein, 12 aa, Homo sapiens
  CDR3 for beta chain variable domain of TCR clone 334412 (TRBV19, TRBJ1-5)
CANSIAQQHQHF

SEQ ID NO: 668825 - protein, 12 aa, Homo sapiens
  CDR3 for alpha chain variable domain of TCR clone 334413 (TRAV29/DV5, TRAJ34)
CAASGNNDKLIF

SEQ ID NO: 668826 - protein, 16 aa, Homo sapiens
  CDR3 for beta chain variable domain of TCR clone 334413 (TRBV12-4, TRBJ1-5)
CASRQPVEGSNQTQHF

SEQ ID NO: 668827 - protein, 16 aa, Homo sapiens
  CDR3 for alpha chain variable domain of TCR clone 334414 (TRAV12-2, TRAJ45)
CAVIFLSGGGAAGLTF

SEQ ID NO: 668828 - protein, 19 aa, Homo sapiens
  CDR3 for beta chain variable domain of TCR clone 334414 (TRBV28, TRBJ2-4)
CASSFQPGGPAHSKNIQYF

SEQ ID NO: 668829 - protein, 14 aa, Homo sapiens
  CDR3 for alpha chain variable domain of TCR clone 334415 (TRAV12-3, TRAJ10)
SHLPLTVGGNKLTF

SEQ ID NO: 668830 - protein, 15 aa, Homo sapiens
  CDR3 for beta chain variable domain of TCR clone 334415 (TRBV4-1, TRBJ1-4)
RASSDTGGTNEKLFF

SEQ ID NO: 668831 - protein, 15 aa, Homo sapiens
  CDR3 for alpha chain variable domain of TCR clone 334416 (TRAV3, TRAJ5)
CAVRDLDTGRRALTL

SEQ ID NO: 668832 - protein, 12 aa, Homo sapiens
  CDR3 for beta chain variable domain of TCR clone 334416 (TRBV11-2, TRBJ2-2)
CASSLGGGELFF

SEQ ID NO: 668833 - protein, 13 aa, Homo sapiens
  CDR3 for alpha chain variable domain of TCR clone 334417 (TRAV3, TRAJ21)
CAVTEPDFNKFYF

SEQ ID NO: 668834 - protein, 13 aa, Homo sapiens
  CDR3 for beta chain variable domain of TCR clone 334417 (TRBV9, TRBJ2-1)
CASSPSGGNEQFF

SEQ ID NO: 668835 - protein, 16 aa, Homo sapiens
  CDR3 for alpha chain variable domain of TCR clone 334418 (TRAV17, TRAJ28)
CATASVSGAGSYQLTF

SEQ ID NO: 668836 - protein, 11 aa, Homo sapiens
  CDR3 for beta chain variable domain of TCR clone 334418 (TRBV7-9, TRBJ2-5)
CASGLGETQYL

SEQ ID NO: 668837 - protein, 16 aa, Homo sapiens
  CDR3 for alpha chain variable domain of TCR clone 334419 (TRAV16, TRAJ52)
CALSAAGGTSDGKLTF

SEQ ID NO: 668838 - protein, 12 aa, Homo sapiens
  CDR3 for beta chain variable domain of TCR clone 334419 (TRBV12-4, TRBJ1-3)
CASSFSGNTMYF

SEQ ID NO: 668839 - protein, 14 aa, Homo sapiens
  CDR3 for alpha chain variable domain of TCR clone 334420 (TRAV1-2, TRAJ29)
CAVRERTSATPLVF

SEQ ID NO: 668840 - protein, 14 aa, Homo sapiens
  CDR3 for beta chain variable domain of TCR clone 334420 (TRBV3-1, TRBJ2-5)
CASSQGPDQETQYF

SEQ ID NO: 668841 - protein, 13 aa, Homo sapiens
  CDR3 for alpha chain variable domain of TCR clone 334421 (TRAV21, TRAJ20)
CAVGLRVDSKLSF

SEQ ID NO: 668842 - protein, 12 aa, Homo sapiens
  CDR3 for beta chain variable domain of TCR clone 334421 (TRBV27, TRBJ2-5)
CASSPTGETQYF

SEQ ID NO: 668843 - protein, 15 aa, Homo sapiens
  CDR3 for alpha chain variable domain of TCR clone 334422 (TRAV8-3, TRAJ15)
CAVGAPNPAGTALIF

SEQ ID NO: 668844 - protein, 14 aa, Homo sapiens
  CDR3 for beta chain variable domain of TCR clone 334422 (TRBV20-1, TRBJ2-1)
CSPSDEASYNEQFF

SEQ ID NO: 668845 - protein, 14 aa, Homo sapiens
  CDR3 for alpha chain variable domain of TCR clone 334423 (TRAV29/DV5, TRAJ12)
CAASGGDSSYKLIF

SEQ ID NO: 668846 - protein, 12 aa, Homo sapiens
  CDR3 for beta chain variable domain of TCR clone 334423 (TRBV7-8, TRBJ2-7)
CASSLGDREQYF

SEQ ID NO: 668847 - protein, 18 aa, Homo sapiens
  CDR3 for alpha chain variable domain of TCR clone 334424 (TRAV26-2, TRAJ54)
CILRDVEVGIQGAQKLVF

SEQ ID NO: 668848 - protein, 14 aa, Homo sapiens
  CDR3 for beta chain variable domain of TCR clone 334424 (TRBV12-4, TRBJ2-5)
CASSFGDRGENQYF

SEQ ID NO: 668849 - protein, 11 aa, Homo sapiens
  CDR3 for alpha chain variable domain of TCR clone 334425 (TRAV12-1, TRAJ8)
CVVTGFQQLVF

SEQ ID NO: 668850 - protein, 14 aa, Homo sapiens
  CDR3 for beta chain variable domain of TCR clone 334425 (TRBV19, TRBJ2-1)
CASVKSTQYNEQFF

SEQ ID NO: 668851 - protein, 17 aa, Homo sapiens
  CDR3 for alpha chain variable domain of TCR clone 334426 (TRAV3, TRAJ6)
CAVRDGPRAGGSYMTTF

SEQ ID NO: 668852 - protein, 15 aa, Homo sapiens
  CDR3 for beta chain variable domain of TCR clone 334426 (TRBV7-9, TRBJ2-7)
CASSSALAEAYEQYF

SEQ ID NO: 668853 - protein, 13 aa, Homo sapiens
  CDR3 for alpha chain variable domain of TCR clone 334427 (TRAV1-2, TRAJ9)
CAALNTGGFKTIF

SEQ ID NO: 668854 - protein, 14 aa, Homo sapiens
  CDR3 for beta chain variable domain of TCR clone 334427 (TRBV11-2, TRBJ1-5)
CASSLDRGRQPQHF

SEQ ID NO: 668855 - protein, 14 aa, Homo sapiens
  CDR3 for alpha chain variable domain of TCR clone 334428 (TRAV9-2, TRAJ39)
CALYIYNTGNMLTF

SEQ ID NO: 668856 - protein, 14 aa, Homo sapiens
  CDR3 for beta chain variable domain of TCR clone 334428 (TRBV9, TRBJ2-7)
CASSPLRAVGEQYF

SEQ ID NO: 668857 - protein, 14 aa, Homo sapiens
  CDR3 for alpha chain variable domain of TCR clone 334429 (TRAV16, TRAJ17)
CALSGRAAGNKLTF

SEQ ID NO: 668858 - protein, 14 aa, Homo sapiens
  CDR3 for beta chain variable domain of TCR clone 334429 (TRBV24-1, TRBJ2-5)
CATSDALKGETQYF

SEQ ID NO: 668859 - protein, 12 aa, Homo sapiens
  CDR3 for alpha chain variable domain of TCR clone 334430 (TRAV12-2, TRAJ42)
CAVGGSQGNVIF

SEQ ID NO: 668860 - protein, 15 aa, Homo sapiens
  CDR3 for beta chain variable domain of TCR clone 334430 (TRBV9, TRBJ1-6)
CASSVAGTGDSPLHF

SEQ ID NO: 668861 - protein, 13 aa, Homo sapiens
  CDR3 for alpha chain variable domain of TCR clone 334431 (TRAV8-3, TRAJ21)
CAVGAYNFNQFYF

SEQ ID NO: 668862 - protein, 14 aa, Homo sapiens
  CDR3 for beta chain variable domain of TCR clone 334431 (TRBV19, TRBJ2-1)
CASPTFVLSGEQFF

SEQ ID NO: 668863 - protein, 16 aa, Homo sapiens
  CDR3 for alpha chain variable domain of TCR clone 334432 (TRAV17, TRAJ35)
CATAEGGIGFGNVLHC

SEQ ID NO: 668864 - protein, 15 aa, Homo sapiens
  CDR3 for beta chain variable domain of TCR clone 334432 (TRBV7-9, TRBJ2-2)
CASSPETGAGGELFF

SEQ ID NO: 668865 - protein, 14 aa, Homo sapiens
  CDR3 for alpha chain variable domain of TCR clone 334433 (TRAV26-1, TRAJ49)
CIVRPSNTGNQFNF

SEQ ID NO: 668866 - protein, 15 aa, Homo sapiens
  CDR3 for beta chain variable domain of TCR clone 334433 (TRBV19, TRBJ1-1)
CASMGFRDVNTEAFF

SEQ ID NO: 668867 - protein, 14 aa, Homo sapiens
  CDR3 for alpha chain variable domain of TCR clone 334434 (TRAV23/DV6, TRAJ37)
CAASTSSNTVKLIF

SEQ ID NO: 668868 - protein, 13 aa, Homo sapiens
  CDR3 for beta chain variable domain of TCR clone 334434 (TRBV18, TRBJ2-5)
CASSPIPGETQYF

SEQ ID NO: 668869 - protein, 15 aa, Homo sapiens
  CDR3 for alpha chain variable domain of TCR clone 334435 (TRAV21, TRAJ24)
CAARSSTDSWGKLQF

SEQ ID NO: 668870 - protein, 12 aa, Homo sapiens
  CDR3 for beta chain variable domain of TCR clone 334435 (TRBV5-4, TRBJ2-5)
CASSSTRETQYF

SEQ ID NO: 668871 - protein, 23 aa, Homo sapiens
  CDR3 for alpha chain variable domain of TCR clone 334436 (TRAV13-1, )
CAASTRRAQIPDIQNPDPAVYQL

SEQ ID NO: 668872 - protein, 15 aa, Homo sapiens
  CDR3 for beta chain variable domain of TCR clone 334436 (TRBV7-2, TRBJ1-2)
CASSLVSGGDYGYTF

SEQ ID NO: 668873 - protein, 13 aa, Homo sapiens
  CDR3 for alpha chain variable domain of TCR clone 334437 (TRAV1-2, TRAJ9)
CAALNTGGFKTIF

SEQ ID NO: 668874 - protein, 15 aa, Homo sapiens
  CDR3 for beta chain variable domain of TCR clone 334437 (TRBV2, TRBJ2-5)
RASSEQGLIGETQYF

SEQ ID NO: 668875 - protein, 11 aa, Homo sapiens
  CDR3 for alpha chain variable domain of TCR clone 334438 (TRAV12-3, TRAJ43)
CAMSVSNDMRF

SEQ ID NO: 668876 - protein, 15 aa, Homo sapiens
  CDR3 for beta chain variable domain of TCR clone 334438 (TRBV19, TRBJ2-1)
CASSIQATSYNEQFF

SEQ ID NO: 668877 - protein, 14 aa, Homo sapiens
  CDR3 for alpha chain variable domain of TCR clone 334439 (TRAV21, TRAJ10)
CAVALTGGGNKRTF

SEQ ID NO: 668878 - protein, 13 aa, Homo sapiens
  CDR3 for beta chain variable domain of TCR clone 334439 (TRBV7-2, TRBJ1-6)
CASSLGSNSPLHF

SEQ ID NO: 668879 - protein, 16 aa, Homo sapiens
  CDR3 for alpha chain variable domain of TCR clone 334440 (TRAV3, TRAJ37)
CAVRGKGSGNTGKLIF

SEQ ID NO: 668880 - protein, 15 aa, Homo sapiens
  CDR3 for beta chain variable domain of TCR clone 334440 (TRBV7-9, TRBJ2-2)
CARGPLDTFPGELFF

SEQ ID NO: 668881 - protein, 15 aa, Homo sapiens
  CDR3 for alpha chain variable domain of TCR clone 334441 (TRAV2, TRAJ15)
CAVEDRGQAVTALIF

SEQ ID NO: 668882 - protein, 13 aa, Homo sapiens
  CDR3 for beta chain variable domain of TCR clone 334441 (TRBV7-9, TRBJ2-3)
CASSPGSTDTQYF

SEQ ID NO: 668883 - protein, 15 aa, Homo sapiens
  CDR3 for alpha chain variable domain of TCR clone 334442 (TRAV26-1, TRAJ56)
CIVRVDNGANSKLTF

SEQ ID NO: 668884 - protein, 15 aa, Homo sapiens
  CDR3 for beta chain variable domain of TCR clone 334442 (TRBV20-1, TRBJ2-7)
CSARDPTEVGHEQYL

SEQ ID NO: 668885 - protein, 13 aa, Homo sapiens
  CDR3 for alpha chain variable domain of TCR clone 334443 (TRAV23/DV6, TRAJ58)
CAATGTRGSRLTF

SEQ ID NO: 668886 - protein, 13 aa, Homo sapiens
  CDR3 for beta chain variable domain of TCR clone 334443 (TRBV5-5, TRBJ1-2)
CASSFWRGEDYTF

SEQ ID NO: 668887 - protein, 14 aa, Homo sapiens
  CDR3 for alpha chain variable domain of TCR clone 334444 (TRAV1-2, TRAJ8)
CAVREDKGFPKLVF

SEQ ID NO: 668888 - protein, 15 aa, Homo sapiens
  CDR3 for beta chain variable domain of TCR clone 334444 (TRBV6-3, TRBJ2-7)
CASSSPGTVFYEQYF

SEQ ID NO: 668889 - protein, 11 aa, Homo sapiens
  CDR3 for alpha chain variable domain of TCR clone 334445 (TRAV2, TRAJ21)
CAVFNFKKFYF

SEQ ID NO: 668890 - protein, 14 aa, Homo sapiens
  CDR3 for beta chain variable domain of TCR clone 334445 (TRBV15, TRBJ2-3)
CATRSGTSTDTQYF

SEQ ID NO: 668891 - protein, 14 aa, Homo sapiens
  CDR3 for alpha chain variable domain of TCR clone 334446 (TRAV12-2, TRAJ52)
CAVPGGTSYGKLTF

SEQ ID NO: 668892 - protein, 14 aa, Homo sapiens
  CDR3 for beta chain variable domain of TCR clone 334446 (TRBV25-1, TRBJ1-1)
CASTHLGGNTEAFF

SEQ ID NO: 668893 - protein, 14 aa, Homo sapiens
  CDR3 for alpha chain variable domain of TCR clone 334447 (TRAV9-2, TRAJ39)
CALYIYNAGNMLTF

SEQ ID NO: 668894 - protein, 11 aa, Homo sapiens
  CDR3 for beta chain variable domain of TCR clone 334447 (TRBV20-1, TRBJ2-5)
CSADRAETQYF

SEQ ID NO: 668895 - protein, 12 aa, Homo sapiens
  CDR3 for alpha chain variable domain of TCR clone 334448 (TRAV17, TRAJ20)
CATLANDYKLSF

SEQ ID NO: 668896 - protein, 12 aa, Homo sapiens
  CDR3 for beta chain variable domain of TCR clone 334448 (TRBV11-2, TRBJ2-2)
CASSLGGGELFF

SEQ ID NO: 668897 - protein, 12 aa, Homo sapiens
  CDR3 for alpha chain variable domain of TCR clone 334449 (TRAV35, TRAJ12)
CAGMDSSYKLIF

SEQ ID NO: 668898 - protein, 14 aa, Homo sapiens
  CDR3 for beta chain variable domain of TCR clone 334449 (TRBV28, TRBJ2-5)
CAGSLYRGTETQYF

SEQ ID NO: 668899 - protein, 14 aa, Homo sapiens
  CDR3 for alpha chain variable domain of TCR clone 334450 (TRAV1-2, TRAJ16)
CAVNRFSDGQKLLF

SEQ ID NO: 668900 - protein, 14 aa, Homo sapiens
  CDR3 for beta chain variable domain of TCR clone 334450 (TRBV11-2, TRBJ1-2)
CASSLGTANYGYSF

SEQ ID NO: 668901 - protein, 14 aa, Homo sapiens
  CDR3 for alpha chain variable domain of TCR clone 334451 (TRAV14/DV4, TRAJ57)
CAMREEGGSEKLVF

SEQ ID NO: 668902 - protein, 12 aa, Homo sapiens
  CDR3 for beta chain variable domain of TCR clone 334451 (TRBV7-2, TRBJ2-5)
CASSQYQETQYF

SEQ ID NO: 668903 - protein, 14 aa, Homo sapiens
  CDR3 for alpha chain variable domain of TCR clone 334452 (TRAV8-4, TRAJ17)
CAWSEGAAGNKLTF

SEQ ID NO: 668904 - protein, 13 aa, Homo sapiens
  CDR3 for beta chain variable domain of TCR clone 334452 (TRBV19, TRBJ2-1)
CASSMYRVNEQFF

SEQ ID NO: 668905 - protein, 15 aa, Homo sapiens
  CDR3 for alpha chain variable domain of TCR clone 334453 (TRAV4, TRAJ39)
CLVGPNNNAGNMLTF

SEQ ID NO: 668906 - protein, 16 aa, Homo sapiens
  CDR3 for beta chain variable domain of TCR clone 334453 (TRBV13, TRBJ2-2)
CASSPRTGEHAGELFF

SEQ ID NO: 668907 - protein, 14 aa, Homo sapiens
  CDR3 for alpha chain variable domain of TCR clone 334454 (TRAV38-1, TRAJ40)
FALRPTPGTYKYIF

SEQ ID NO: 668908 - protein, 16 aa, Homo sapiens
  CDR3 for beta chain variable domain of TCR clone 334454 (TRBV4-1, TRBJ2-3)
CASSQSTSGAEDTQYF

SEQ ID NO: 668909 - protein, 14 aa, Homo sapiens
  CDR3 for alpha chain variable domain of TCR clone 334455 (TRAV12-2, TRAJ13)
CAVKQTGGYQKVTF

SEQ ID NO: 668910 - protein, 15 aa, Homo sapiens
  CDR3 for beta chain variable domain of TCR clone 334455 (TRBV27, TRBJ2-1)
FASSNGGGSSNEQFF

SEQ ID NO: 668911 - protein, 12 aa, Homo sapiens
  CDR3 for alpha chain variable domain of TCR clone 334456 (TRAV12-3, TRAJ40)
CAMSSGTYKYIF

SEQ ID NO: 668912 - protein, 15 aa, Homo sapiens
  CDR3 for beta chain variable domain of TCR clone 334456 (TRBV7-9, TRBJ2-5)
CASSFKAGREETQYF

SEQ ID NO: 668913 - protein, 14 aa, Homo sapiens
  CDR3 for alpha chain variable domain of TCR clone 334457 (TRAV1-2, TRAJ16)
CAANRFSDGQKLLF

SEQ ID NO: 668914 - protein, 16 aa, Homo sapiens
  CDR3 for beta chain variable domain of TCR clone 334457 (TRBV7-9, TRBJ1-2)
CASSLGFSSGEDGYTF

SEQ ID NO: 668915 - protein, 15 aa, Homo sapiens
  CDR3 for alpha chain variable domain of TCR clone 334458 (TRAV13-2, TRAJ35)
FAESPNIGFGNVLHC

SEQ ID NO: 668916 - protein, 13 aa, Homo sapiens
  CDR3 for beta chain variable domain of TCR clone 334458 (TRBV10-2, TRBJ2-5)
CASSTLARETQYF

SEQ ID NO: 668917 - protein, 15 aa, Homo sapiens
  CDR3 for alpha chain variable domain of TCR clone 334459 (TRAV12-1, TRAJ9)
CVVSFGDTGGFKTIF

SEQ ID NO: 668918 - protein, 15 aa, Homo sapiens
  CDR3 for beta chain variable domain of TCR clone 334459 (TRBV2, TRBJ1-4)
CASSERAGENCFLAV

SEQ ID NO: 668919 - protein, 15 aa, Homo sapiens
  CDR3 for alpha chain variable domain of TCR clone 334460 (TRAV21, TRAJ38)
CAVRQDDGNNRKLIW

SEQ ID NO: 668920 - protein, 16 aa, Homo sapiens
  CDR3 for beta chain variable domain of TCR clone 334460 (TRBV4-2, TRBJ1-1)
CASRPLDGGGDTEAFF

SEQ ID NO: 668921 - protein, 12 aa, Homo sapiens
  CDR3 for alpha chain variable domain of TCR clone 334461 (TRAV13-2, TRAJ23)
CAERHRGGKLIF

SEQ ID NO: 668922 - protein, 16 aa, Homo sapiens
  CDR3 for beta chain variable domain of TCR clone 334461 (TRBV7-2, TRBJ2-6)
CAILSGVSSGANILTF

SEQ ID NO: 668923 - protein, 15 aa, Homo sapiens
  CDR3 for alpha chain variable domain of TCR clone 334462 (TRAV8-3, TRAJ11)
CAVGLLNSGYSTLTF

SEQ ID NO: 668924 - protein, 19 aa, Homo sapiens
  CDR3 for beta chain variable domain of TCR clone 334462 (TRBV6-3, TRBJ2-1)
CASSYSWTSGRATYNEQFF

SEQ ID NO: 668925 - protein, 17 aa, Homo sapiens
  CDR3 for alpha chain variable domain of TCR clone 334463 (TRAV12-2, TRAJ52)
CAVNKGAGGTSYGKLTF

SEQ ID NO: 668926 - protein, 17 aa, Homo sapiens
  CDR3 for beta chain variable domain of TCR clone 334463 (TRBV14, TRBJ2-7)
CASSQLAGTGGSYEQYF

SEQ ID NO: 668927 - protein, 18 aa, Homo sapiens
  CDR3 for alpha chain variable domain of TCR clone 334464 (TRAV26-2, TRAJ45)
CILRLWGYSGGGADGLTF

SEQ ID NO: 668928 - protein, 12 aa, Homo sapiens
  CDR3 for beta chain variable domain of TCR clone 334464 (TRBV11-3, TRBJ1-1)
CASSHRQGEAFL

SEQ ID NO: 668929 - protein, 15 aa, Homo sapiens
  CDR3 for alpha chain variable domain of TCR clone 334465 (TRAV3, TRAJ3)
CAVRDRDSSASKIIF

SEQ ID NO: 668930 - protein, 17 aa, Homo sapiens
  CDR3 for beta chain variable domain of TCR clone 334465 (TRBV7-3, TRBJ2-3)
CASSLMKRMRGADTQYF

SEQ ID NO: 668931 - protein, 12 aa, Homo sapiens
  CDR3 for alpha chain variable domain of TCR clone 334466 (TRAV21, TRAJ58)
CAAETSGSRLTF

SEQ ID NO: 668932 - protein, 15 aa, Homo sapiens
  CDR3 for beta chain variable domain of TCR clone 334466 (TRBV7-6, TRBJ1-5)
CASSQSSGINQPQHF

SEQ ID NO: 668933 - protein, 16 aa, Homo sapiens
  CDR3 for alpha chain variable domain of TCR clone 334467 (TRAV30, TRAJ24)
CGTEMVDADSWGKFQF

SEQ ID NO: 668934 - protein, 15 aa, Homo sapiens
  CDR3 for beta chain variable domain of TCR clone 334467 (TRBV28, TRBJ1-5)
CASSRTGGYVQPQHF

SEQ ID NO: 668935 - protein, 13 aa, Homo sapiens
  CDR3 for alpha chain variable domain of TCR clone 334468 (TRAV29/DV5, TRAJ13)
CAARPGGYQKVTF

SEQ ID NO: 668936 - protein, 16 aa, Homo sapiens
  CDR3 for beta chain variable domain of TCR clone 334468 (TRBV7-3, TRBJ2-2)
CASSLKRGTLSGELFF

SEQ ID NO: 668937 - protein, 15 aa, Homo sapiens
  CDR3 for alpha chain variable domain of TCR clone 334469 (TRAV12-3, TRAJ11)
CAMSEENSGYSTLTF

SEQ ID NO: 668938 - protein, 14 aa, Homo sapiens
  CDR3 for beta chain variable domain of TCR clone 334469 (TRBV19, TRBJ2-2)
CASSTLHRSGELFF

SEQ ID NO: 668939 - protein, 18 aa, Homo sapiens
  CDR3 for alpha chain variable domain of TCR clone 334470 (TRAV21, TRAJ52)
CAVMPSPAGGTSYGKLTF

SEQ ID NO: 668940 - protein, 17 aa, Homo sapiens
  CDR3 for beta chain variable domain of TCR clone 334470 (TRBV13, TRBJ2-3)
RASSLSRVAGGRNTQYF

SEQ ID NO: 668941 - protein, 17 aa, Homo sapiens
  CDR3 for alpha chain variable domain of TCR clone 334471 (TRAV3, TRAJ6)
CAVRGCPRAGGSYIPTF

SEQ ID NO: 668942 - protein, 14 aa, Homo sapiens
  CDR3 for beta chain variable domain of TCR clone 334471 (TRBV7-2, TRBJ2-7)
CASSPKTSFYEQYF

SEQ ID NO: 668943 - protein, 13 aa, Homo sapiens
  CDR3 for alpha chain variable domain of TCR clone 334472 (TRAV20, TRAJ34)
CAVRTYNTDKLIF

SEQ ID NO: 668944 - protein, 15 aa, Homo sapiens
  CDR3 for beta chain variable domain of TCR clone 334472 (TRBV27, TRBJ1-3)
CASSPSPGSGNTIYF

SEQ ID NO: 668945 - protein, 15 aa, Homo sapiens
  CDR3 for alpha chain variable domain of TCR clone 334473 (TRAV20, TRAJ50)
CAVRQMKTSYDKVIF

SEQ ID NO: 668946 - protein, 15 aa, Homo sapiens
  CDR3 for beta chain variable domain of TCR clone 334473 (TRBV7-3, TRBJ2-1)
CASSPTGGGEVEQFF

SEQ ID NO: 668947 - protein, 14 aa, Homo sapiens
  CDR3 for alpha chain variable domain of TCR clone 334474 (TRAV12-2, TRAJ13)
CAVKKTGGYQKVTF

SEQ ID NO: 668948 - protein, 15 aa, Homo sapiens
  CDR3 for beta chain variable domain of TCR clone 334474 (TRBV9, TRBJ1-6)
CASSVAGTGESPLHF

SEQ ID NO: 668949 - protein, 14 aa, Homo sapiens
  CDR3 for alpha chain variable domain of TCR clone 334475 (TRAV8-2, TRAJ6)
CVVISAGGSYIPTI

SEQ ID NO: 668950 - protein, 16 aa, Homo sapiens
  CDR3 for beta chain variable domain of TCR clone 334475 (TRBV7-6, TRBJ2-6)
CASSLPGLSGANVLTF

SEQ ID NO: 668951 - protein, 12 aa, Homo sapiens
  CDR3 for alpha chain variable domain of TCR clone 334476 (TRAV12-1, TRAJ40)
CVVYSGTYKYIF

SEQ ID NO: 668952 - protein, 14 aa, Homo sapiens
  CDR3 for beta chain variable domain of TCR clone 334476 (TRBV11-2, TRBJ2-3)
CASSLGGGANTQYF

SEQ ID NO: 668953 - protein, 11 aa, Homo sapiens
  CDR3 for alpha chain variable domain of TCR clone 334477 (TRAV17, TRAJ31)
CATSNNARLMF

SEQ ID NO: 668954 - protein, 14 aa, Homo sapiens
  CDR3 for beta chain variable domain of TCR clone 334477 (TRBV7-2, TRBJ2-7)
CASRSQGAAYEQYF

SEQ ID NO: 668955 - protein, 15 aa, Homo sapiens
  CDR3 for alpha chain variable domain of TCR clone 334478 (TRAV21, TRAJ53)
CATLNSGGSNYKLTI

SEQ ID NO: 668956 - protein, 16 aa, Homo sapiens
  CDR3 for beta chain variable domain of TCR clone 334478 (TRBV20-1, TRBJ1-2)
CSASMGQGVANYGYTF

SEQ ID NO: 668957 - protein, 14 aa, Homo sapiens
  CDR3 for alpha chain variable domain of TCR clone 334479 (TRAV9-2, TRAJ39)
CALYIYNAGNMLTF

SEQ ID NO: 668958 - protein, 15 aa, Homo sapiens
  CDR3 for beta chain variable domain of TCR clone 334479 (TRBV18, TRBJ1-1)
CASSPRQGENTEAFF

SEQ ID NO: 668959 - protein, 17 aa, Homo sapiens
  CDR3 for alpha chain variable domain of TCR clone 334480 (TRAV3, TRAJ6)
CAVRDGPRAGGSYIPTF

SEQ ID NO: 668960 - protein, 16 aa, Homo sapiens
  CDR3 for beta chain variable domain of TCR clone 334480 (TRBV5-1, TRBJ2-3)
CASSLALAVVSDTQYF

SEQ ID NO: 668961 - protein, 12 aa, Homo sapiens
  CDR3 for alpha chain variable domain of TCR clone 334481 (TRAV16, TRAJ56)
CAPTGANSKLTF

SEQ ID NO: 668962 - protein, 17 aa, Homo sapiens
  CDR3 for beta chain variable domain of TCR clone 334481 (TRBV27, TRBJ2-6)
CASSLTWFASEANVLTF

SEQ ID NO: 668963 - protein, 16 aa, Homo sapiens
  CDR3 for alpha chain variable domain of TCR clone 334482 (TRAV3, TRAJ18)
CAVRDGRGSILGRLYF

SEQ ID NO: 668964 - protein, 15 aa, Homo sapiens
  CDR3 for beta chain variable domain of TCR clone 334482 (TRBV7-9, TRBJ1-6)
CASSSPGRGNSPLHF

SEQ ID NO: 668965 - protein, 15 aa, Homo sapiens
  CDR3 for alpha chain variable domain of TCR clone 334483 (TRAV12-1, TRAJ44)
CVVFVNTGTASKLTF

SEQ ID NO: 668966 - protein, 16 aa, Homo sapiens
  CDR3 for beta chain variable domain of TCR clone 334483 (TRBV7-8, TRBJ2-6)
CQQRRTGGAGANVLTF

SEQ ID NO: 668967 - protein, 14 aa, Homo sapiens
  CDR3 for alpha chain variable domain of TCR clone 334484 (TRAV17, TRAJ12)
CATDEKDSSYKLIF

SEQ ID NO: 668968 - protein, 17 aa, Homo sapiens
  CDR3 for beta chain variable domain of TCR clone 334484 (TRBV4-3, TRBJ1-5)
CASSQWGDGGPNQPQHF

SEQ ID NO: 668969 - protein, 13 aa, Homo sapiens
  CDR3 for alpha chain variable domain of TCR clone 334485 (TRAV17, TRAJ9)
CATDYTGGFKTIF

SEQ ID NO: 668970 - protein, 16 aa, Homo sapiens
  CDR3 for beta chain variable domain of TCR clone 334485 (TRBV7-7, TRBJ2-1)
CASSSASGTSFNEQFF

SEQ ID NO: 668971 - protein, 13 aa, Homo sapiens
  CDR3 for alpha chain variable domain of TCR clone 334486 (TRAV36/DV7, TRAJ53)
CTLSGGSNYKLTF

SEQ ID NO: 668972 - protein, 13 aa, Homo sapiens
  CDR3 for beta chain variable domain of TCR clone 334486 (TRBV28, TRBJ2-7)
CASSLPSRYEQYF

SEQ ID NO: 668973 - protein, 16 aa, Homo sapiens
  CDR3 for alpha chain variable domain of TCR clone 334487 (TRAV8-3, TRAJ28)
CAVPPQRGAGSYQLTF

SEQ ID NO: 668974 - protein, 13 aa, Homo sapiens
  CDR3 for beta chain variable domain of TCR clone 334487 (TRBV7-6, TRBJ2-3)
CASSLRSDNTQYF

SEQ ID NO: 668975 - protein, 14 aa, Homo sapiens
  CDR3 for alpha chain variable domain of TCR clone 334488 (TRAV16, TRAJ39)
CALSKNNAGNMLTF

SEQ ID NO: 668976 - protein, 17 aa, Homo sapiens
  CDR3 for beta chain variable domain of TCR clone 334488 (TRBV4-2, TRBJ2-1)
CASSQVSGLAMNNEQFF

SEQ ID NO: 668977 - protein, 15 aa, Homo sapiens
  CDR3 for alpha chain variable domain of TCR clone 334489 (TRAV2, TRAJ22)
CAVPSRGGSARQLTF

SEQ ID NO: 668978 - protein, 15 aa, Homo sapiens
  CDR3 for beta chain variable domain of TCR clone 334489 (TRBV20-1, TRBJ2-7)
CSARKGLAESYEQYF

SEQ ID NO: 668979 - protein, 13 aa, Homo sapiens
  CDR3 for alpha chain variable domain of TCR clone 334490 (TRAV21, TRAJ57)
FAVTQGGSGKLVF

SEQ ID NO: 668980 - protein, 16 aa, Homo sapiens
  CDR3 for beta chain variable domain of TCR clone 334490 (TRBV29-1, TRBJ2-7)
CSVEDAEDGTAYEQYF

SEQ ID NO: 668981 - protein, 10 aa, Homo sapiens
  CDR3 for alpha chain variable domain of TCR clone 334491 (TRAV12-2, TRAJ43)
CAVKVLSMRF

SEQ ID NO: 668982 - protein, 15 aa, Homo sapiens
  CDR3 for beta chain variable domain of TCR clone 334491 (TRBV19, TRBJ1-2)
CASSVGQVLNYGYTF

SEQ ID NO: 668983 - protein, 15 aa, Homo sapiens
  CDR3 for alpha chain variable domain of TCR clone 334492 (TRAV3, TRAJ16)
CSVRDGFSDGQKLLF

SEQ ID NO: 668984 - protein, 12 aa, Homo sapiens
  CDR3 for beta chain variable domain of TCR clone 334492 (TRBV11-2, TRBJ2-2)
CASSLPTGELFF

SEQ ID NO: 668985 - protein, 12 aa, Homo sapiens
  CDR3 for alpha chain variable domain of TCR clone 334493 (TRAV12-3, TRAJ17)
CAMTLTCNNLTF

SEQ ID NO: 668986 - protein, 15 aa, Homo sapiens
  CDR3 for beta chain variable domain of TCR clone 334493 (TRBV20-1, TRBJ2-7)
CSARDRVSGMDEQYF

SEQ ID NO: 668987 - protein, 11 aa, Homo sapiens
  CDR3 for alpha chain variable domain of TCR clone 334494 (TRAV35, TRAJ12)
RRMDSSYKLIF

SEQ ID NO: 668988 - protein, 14 aa, Homo sapiens
  CDR3 for beta chain variable domain of TCR clone 334494 (TRBV7-2, TRBJ2-7)
CASSPKTSFYEQYF

SEQ ID NO: 668989 - protein, 11 aa, Homo sapiens
  CDR3 for alpha chain variable domain of TCR clone 334495 (TRAV2, TRAJ13)
CASGGYQKVTF

SEQ ID NO: 668990 - protein, 16 aa, Homo sapiens
  CDR3 for beta chain variable domain of TCR clone 334495 (TRBV18, TRBJ2-7)
CASSPRSQGISYEQYF

SEQ ID NO: 668991 - protein, 14 aa, Homo sapiens
  CDR3 for alpha chain variable domain of TCR clone 334496 (TRAV1-2, TRAJ16)
CAVNRFSDGQKLLF

SEQ ID NO: 668992 - protein, 15 aa, Homo sapiens
  CDR3 for beta chain variable domain of TCR clone 334496 (TRBV12-4, TRBJ2-5)
CASSPPTGLQGTQYF

SEQ ID NO: 668993 - protein, 16 aa, Homo sapiens
  CDR3 for alpha chain variable domain of TCR clone 334497 (TRAV14/DV4, TRAJ53)
CAMREGGGGSNYKLTF

SEQ ID NO: 668994 - protein, 11 aa, Homo sapiens
  CDR3 for beta chain variable domain of TCR clone 334497 (TRBV29-1, TRBJ2-5)
CSEDRTGTQYF

SEQ ID NO: 668995 - protein, 14 aa, Homo sapiens
  CDR3 for alpha chain variable domain of TCR clone 334498 (TRAV1-2, TRAJ16)
CAVNRFSDGQKLLF

SEQ ID NO: 668996 - protein, 11 aa, Homo sapiens
  CDR3 for beta chain variable domain of TCR clone 334498 (TRBV10-3, TRBJ2-4)
CAISEQGIQKH

SEQ ID NO: 668997 - protein, 13 aa, Homo sapiens
  CDR3 for alpha chain variable domain of TCR clone 334499 (TRAV21, TRAJ27)
CAALNTNAGRSTF

SEQ ID NO: 668998 - protein, 14 aa, Homo sapiens
  CDR3 for beta chain variable domain of TCR clone 334499 (TRBV27, TRBJ1-1)
CASSLLSGLSEAFF

SEQ ID NO: 668999 - protein, 15 aa, Homo sapiens
  CDR3 for alpha chain variable domain of TCR clone 334500 (TRAV2, TRAJ9)
CAVEDRGTGVFKTIF

SEQ ID NO: 669000 - protein, 13 aa, Homo sapiens
  CDR3 for beta chain variable domain of TCR clone 334500 (TRBV7-2, TRBJ2-2)
CASSSVRAGELLF

SEQ ID NO: 669001 - protein, 14 aa, Homo sapiens
  CDR3 for alpha chain variable domain of TCR clone 334501 (TRAV12-1, TRAJ43)
CVVNGRSNNNDMRF

SEQ ID NO: 669002 - protein, 13 aa, Homo sapiens
  CDR3 for beta chain variable domain of TCR clone 334501 (TRBV11-2, TRBJ1-6)
CASSLAGVSPLHF

SEQ ID NO: 669003 - protein, 17 aa, Homo sapiens
  CDR3 for alpha chain variable domain of TCR clone 334502 (TRAV3, TRAJ38)
CAVRDCLNAGNNRKLIL

SEQ ID NO: 669004 - protein, 16 aa, Homo sapiens
  CDR3 for beta chain variable domain of TCR clone 334502 (TRBV20-1, TRBJ1-4)
CSAPGQGLLTNEKLFF

SEQ ID NO: 669005 - protein, 11 aa, Homo sapiens
  CDR3 for alpha chain variable domain of TCR clone 334503 (TRAV21, TRAJ33)
CAKMDSNYQLI

SEQ ID NO: 669006 - protein, 14 aa, Homo sapiens
  CDR3 for beta chain variable domain of TCR clone 334503 (TRBV2, TRBJ2-7)
CASSLTSGGYEQYF

SEQ ID NO: 669007 - protein, 14 aa, Homo sapiens
  CDR3 for alpha chain variable domain of TCR clone 334504 (TRAV26-2, TRAJ32)
CILVRGGATNKLIF

SEQ ID NO: 669008 - protein, 15 aa, Homo sapiens
  CDR3 for beta chain variable domain of TCR clone 334504 (TRBV2, TRBJ2-2)
CASSGFGAGTGELFF

SEQ ID NO: 669009 - protein, 12 aa, Homo sapiens
  CDR3 for alpha chain variable domain of TCR clone 334505 (TRAV1-1, TRAJ39)
CAVPVVGNMLTF

SEQ ID NO: 669010 - protein, 14 aa, Homo sapiens
  CDR3 for beta chain variable domain of TCR clone 334505 (TRBV2, TRBJ1-5)
CASSGTGFNQPQHF

SEQ ID NO: 669011 - protein, 15 aa, Homo sapiens
  CDR3 for alpha chain variable domain of TCR clone 334506 (TRAV8-3, TRAJ32)
CAVGPYGGATNKLIF

SEQ ID NO: 669012 - protein, 15 aa, Homo sapiens
  CDR3 for beta chain variable domain of TCR clone 334506 (TRBV19, TRBJ2-1)
CASSSPGVPLDEQFF

SEQ ID NO: 669013 - protein, 12 aa, Homo sapiens
  CDR3 for alpha chain variable domain of TCR clone 334507 (TRAV26-1, TRAJ35)
CIGLSFGNVLHC

SEQ ID NO: 669014 - protein, 15 aa, Homo sapiens
  CDR3 for beta chain variable domain of TCR clone 334507 (TRBV7-2, TRBJ2-2)
CASSPTGANTGELFF

SEQ ID NO: 669015 - protein, 13 aa, Homo sapiens
  CDR3 for alpha chain variable domain of TCR clone 334508 (TRAV12-1, TRAJ11)
CVVNRAGYSSLTF

SEQ ID NO: 669016 - protein, 13 aa, Homo sapiens
  CDR3 for beta chain variable domain of TCR clone 334508 (TRBV10-3, TRBJ2-7)
CASKLAVNYEQYF

SEQ ID NO: 669017 - protein, 16 aa, Homo sapiens
  CDR3 for alpha chain variable domain of TCR clone 334509 (TRAV12-3, TRAJ53)
CAMRPGSGGSNYKLPF

SEQ ID NO: 669018 - protein, 11 aa, Homo sapiens
  CDR3 for beta chain variable domain of TCR clone 334509 (TRBV29-1, TRBJ2-5)
CSEDRTGTQYF

SEQ ID NO: 669019 - protein, 12 aa, Homo sapiens
  CDR3 for alpha chain variable domain of TCR clone 334510 (TRAV12-2, TRAJ34)
CAVPYNTDKLIF

SEQ ID NO: 669020 - protein, 16 aa, Homo sapiens
  CDR3 for beta chain variable domain of TCR clone 334510 (TRBV27, TRBJ2-5)
CASSYGPGGQKETQYF

SEQ ID NO: 669021 - protein, 16 aa, Homo sapiens
  CDR3 for alpha chain variable domain of TCR clone 334511 (TRAV16, TRAJ52)
CALSAAGGTSYGNLTF

SEQ ID NO: 669022 - protein, 19 aa, Homo sapiens
  CDR3 for beta chain variable domain of TCR clone 334511 (TRBV19, TRBJ2-5)
CASSIGQVTDFFLGETQYF

SEQ ID NO: 669023 - protein, 13 aa, Homo sapiens
  CDR3 for alpha chain variable domain of TCR clone 334512 (TRAV1-2, TRAJ9)
CAALNTGGSKTIF

SEQ ID NO: 669024 - protein, 12 aa, Homo sapiens
  CDR3 for beta chain variable domain of TCR clone 334512 (TRBV11-3, TRBJ1-1)
CASSHRQGEAFF

SEQ ID NO: 669025 - protein, 14 aa, Homo sapiens
  CDR3 for alpha chain variable domain of TCR clone 334513 (TRAV1-2, TRAJ29)
CAVRELTSATPLVF

SEQ ID NO: 669026 - protein, 16 aa, Homo sapiens
  CDR3 for beta chain variable domain of TCR clone 334513 (TRBV13, TRBJ2-2)
CASSPRTGEHTGELFF

SEQ ID NO: 669027 - protein, 11 aa, Homo sapiens
  CDR3 for alpha chain variable domain of TCR clone 334514 (TRAV35, TRAJ34)
CWARNTDKLIF

SEQ ID NO: 669028 - protein, 13 aa, Homo sapiens
  CDR3 for beta chain variable domain of TCR clone 334514 (TRBV12-4, TRBJ2-5)
CASSLGGSRTQYF

SEQ ID NO: 669029 - protein, 14 aa, Homo sapiens
  CDR3 for alpha chain variable domain of TCR clone 334515 (TRAV1-1, TRAJ28)
CAAPSGAGSYQLTF

SEQ ID NO: 669030 - protein, 15 aa, Homo sapiens
  CDR3 for beta chain variable domain of TCR clone 334515 (TRBV13, TRBJ1-2)
CASSLGRQPGYGYTF

SEQ ID NO: 669031 - protein, 12 aa, Homo sapiens
  CDR3 for alpha chain variable domain of TCR clone 334516 (TRAV13-1, TRAJ21)
CAAREGSNKFYF

SEQ ID NO: 669032 - protein, 14 aa, Homo sapiens
  CDR3 for beta chain variable domain of TCR clone 334516 (TRBV5-4, TRBJ1-1)
CASSLDSRRDEAFF

SEQ ID NO: 669033 - protein, 16 aa, Homo sapiens
  CDR3 for alpha chain variable domain of TCR clone 334517 (TRAV29/DV5, TRAJ28)
CAADAYSGAGSYQLTF

SEQ ID NO: 669034 - protein, 15 aa, Homo sapiens
  CDR3 for beta chain variable domain of TCR clone 334517 (TRBV24-1, TRBJ1-4)
CATSDPQGADEKLLF

SEQ ID NO: 669035 - protein, 14 aa, Homo sapiens
  CDR3 for alpha chain variable domain of TCR clone 334518 (TRAV12-3, TRAJ22)
CATSLFGSARQLTF

SEQ ID NO: 669036 - protein, 14 aa, Homo sapiens
  CDR3 for beta chain variable domain of TCR clone 334518 (TRBV5-1, TRBJ1-1)
CASSLQGASTEAFF

SEQ ID NO: 669037 - protein, 17 aa, Homo sapiens
  CDR3 for alpha chain variable domain of TCR clone 334519 (TRAV3, TRAJ6)
CAVRDGPMAGGNYIPTF

SEQ ID NO: 669038 - protein, 14 aa, Homo sapiens
  CDR3 for beta chain variable domain of TCR clone 334519 (TRBV7-2, TRBJ2-7)
CASSPKTSFYEQYF

SEQ ID NO: 669039 - protein, 13 aa, Homo sapiens
  CDR3 for alpha chain variable domain of TCR clone 334520 (TRAV16, TRAJ20)
CALGPSDDYKLSF

SEQ ID NO: 669040 - protein, 15 aa, Homo sapiens
  CDR3 for beta chain variable domain of TCR clone 334520 (TRBV5-1, TRBJ2-2)
CASSRVGSDTGELFF

SEQ ID NO: 669041 - protein, 13 aa, Homo sapiens
  CDR3 for alpha chain variable domain of TCR clone 334521 (TRAV3, TRAJ16)
CAVRDRNGQKLLF

SEQ ID NO: 669042 - protein, 15 aa, Homo sapiens
  CDR3 for beta chain variable domain of TCR clone 334521 (TRBV5-1, TRBJ2-1)
CASSPPMAPYNEQFF

SEQ ID NO: 669043 - protein, 10 aa, Homo sapiens
  CDR3 for alpha chain variable domain of TCR clone 334522 (TRAV12-1, TRAJ37)
ARGNTGNIIF

SEQ ID NO: 669044 - protein, 15 aa, Homo sapiens
  CDR3 for beta chain variable domain of TCR clone 334522 (TRBV7-2, TRBJ2-3)
CASSLEQGGTDTQYF

SEQ ID NO: 669045 - protein, 14 aa, Homo sapiens
  CDR3 for alpha chain variable domain of TCR clone 334523 (TRAV29/DV5, TRAJ30)
CAARLMNRDDKIIF

SEQ ID NO: 669046 - protein, 14 aa, Homo sapiens
  CDR3 for beta chain variable domain of TCR clone 334523 (TRBV7-2, TRBJ2-7)
CASSPKTSFYEQYF

SEQ ID NO: 669047 - protein, 11 aa, Homo sapiens
  CDR3 for alpha chain variable domain of TCR clone 334524 (TRAV1-1, TRAJ23)
CAVRQGGELIF

SEQ ID NO: 669048 - protein, 20 aa, Homo sapiens
  CDR3 for beta chain variable domain of TCR clone 334524 (TRBV7-8, TRBJ2-2)
CASSHLFPGPTIHITGGLFF

SEQ ID NO: 669049 - protein, 12 aa, Homo sapiens
  CDR3 for alpha chain variable domain of TCR clone 334525 (TRAV13-1, TRAJ21)
CAAKEGFNKFYF

SEQ ID NO: 669050 - protein, 12 aa, Homo sapiens
  CDR3 for beta chain variable domain of TCR clone 334525 (TRBV6-3, TRBJ2-7)
CASSLTPYEQYF

SEQ ID NO: 669051 - protein, 14 aa, Homo sapiens
  CDR3 for alpha chain variable domain of TCR clone 334526 (TRAV1-2, TRAJ16)
CAVNRFSDGQQLLF

SEQ ID NO: 669052 - protein, 14 aa, Homo sapiens
  CDR3 for beta chain variable domain of TCR clone 334526 (TRBV19, TRBJ2-1)
CASPTFVLSGEQFF

SEQ ID NO: 669053 - protein, 14 aa, Homo sapiens
  CDR3 for alpha chain variable domain of TCR clone 334527 (TRAV2, TRAJ29)
CAGPFQYGNTPLVF

SEQ ID NO: 669054 - protein, 16 aa, Homo sapiens
  CDR3 for beta chain variable domain of TCR clone 334527 (TRBV12-5, TRBJ2-5)
CASGPRTSGNQETQYF

SEQ ID NO: 669055 - protein, 11 aa, Homo sapiens
  CDR3 for alpha chain variable domain of TCR clone 334528 (TRAV21, TRAJ11)
CAVNGYSTLTF

SEQ ID NO: 669056 - protein, 13 aa, Homo sapiens
  CDR3 for beta chain variable domain of TCR clone 334528 (TRBV7-9, TRBJ1-2)
CASSLKQYYGYTF

SEQ ID NO: 669057 - protein, 13 aa, Homo sapiens
  CDR3 for alpha chain variable domain of TCR clone 334529 (TRAV39, TRAJ33)
CAANPDSNYQLIL

SEQ ID NO: 669058 - protein, 13 aa, Homo sapiens
  CDR3 for beta chain variable domain of TCR clone 334529 (TRBV18, TRBJ1-1)
CASSGGGNTEAFF

SEQ ID NO: 669059 - protein, 16 aa, Homo sapiens
  CDR3 for alpha chain variable domain of TCR clone 334530 (TRAV30, TRAJ24)
CGTEIVDADSWGKFQF

SEQ ID NO: 669060 - protein, 12 aa, Homo sapiens
  CDR3 for beta chain variable domain of TCR clone 334530 (TRBV5-1, TRBJ2-5)
CASSLGLETQYF

SEQ ID NO: 669061 - protein, 14 aa, Homo sapiens
  CDR3 for alpha chain variable domain of TCR clone 334531 (TRAV17, TRAJ58)
CAADGETSGSRLTF

SEQ ID NO: 669062 - protein, 15 aa, Homo sapiens
  CDR3 for beta chain variable domain of TCR clone 334531 (TRBV6-3, TRBJ2-7)
CASSSPGTVFYEQYF

SEQ ID NO: 669063 - protein, 16 aa, Homo sapiens
  CDR3 for alpha chain variable domain of TCR clone 334532 (TRAV3, TRAJ37)
CAVGGKGSGNPGKLIF

SEQ ID NO: 669064 - protein, 13 aa, Homo sapiens
  CDR3 for beta chain variable domain of TCR clone 334532 (TRBV14, TRBJ2-7)
CASSQDRRYEQYF

SEQ ID NO: 669065 - protein, 15 aa, Homo sapiens
  CDR3 for alpha chain variable domain of TCR clone 334533 (TRAV13-1, TRAJ16)
CAARYQMARSCSLQG

SEQ ID NO: 669066 - protein, 14 aa, Homo sapiens
  CDR3 for beta chain variable domain of TCR clone 334533 (TRBV12-4, TRBJ2-3)
CASSLGQGTDTQYF

SEQ ID NO: 669067 - protein, 16 aa, Homo sapiens
  CDR3 for alpha chain variable domain of TCR clone 334534 (TRAV8-6, TRAJ22)
CAVSPISSVSARQLTF

SEQ ID NO: 669068 - protein, 14 aa, Homo sapiens
  CDR3 for beta chain variable domain of TCR clone 334534 (TRBV2, TRBJ2-1)
CASSARAAYNEQFF

SEQ ID NO: 669069 - protein, 14 aa, Homo sapiens
  CDR3 for alpha chain variable domain of TCR clone 334535 (TRAV1-2, TRAJ16)
CAVNRFSDVQKLLF

SEQ ID NO: 669070 - protein, 12 aa, Homo sapiens
  CDR3 for beta chain variable domain of TCR clone 334535 (TRBV20-1, TRBJ2-5)
CSAPRSQETQYF

SEQ ID NO: 669071 - protein, 21 aa, Homo sapiens
  CDR3 for alpha chain variable domain of TCR clone 334536 (TRAV1-1, TRAJ6)
CLLLLRCERLERTGGSYIPTF

SEQ ID NO: 669072 - protein, 14 aa, Homo sapiens
  CDR3 for beta chain variable domain of TCR clone 334536 (TRBV19, TRBJ1-2)
CASSLQGQAYGYTF

SEQ ID NO: 669073 - protein, 14 aa, Homo sapiens
  CDR3 for alpha chain variable domain of TCR clone 334537 (TRAV12-3, TRAJ13)
CAMKNSGGNQKVTF

SEQ ID NO: 669074 - protein, 13 aa, Homo sapiens
  CDR3 for beta chain variable domain of TCR clone 334537 (TRBV29-1, TRBJ2-5)
CSARDRVEETQYF

SEQ ID NO: 669075 - protein, 14 aa, Homo sapiens
  CDR3 for alpha chain variable domain of TCR clone 334538 (TRAV12-2, TRAJ6)
CASKWGGGSYIPTF

SEQ ID NO: 669076 - protein, 13 aa, Homo sapiens
  CDR3 for beta chain variable domain of TCR clone 334538 (TRBV2, TRBJ1-1)
CARSEGGNTEAFF

SEQ ID NO: 669077 - protein, 18 aa, Homo sapiens
  CDR3 for alpha chain variable domain of TCR clone 334539 (TRAV26-2, TRAJ54)
CILRDVEGGIQGAQKVVF

SEQ ID NO: 669078 - protein, 16 aa, Homo sapiens
  CDR3 for beta chain variable domain of TCR clone 334539 (TRBV6-1, TRBJ2-5)
CASSETLDRGAETQYF

SEQ ID NO: 669079 - protein, 13 aa, Homo sapiens
  CDR3 for alpha chain variable domain of TCR clone 334540 (TRAV2, TRAJ40)
CAVVPSGTYTYIF

SEQ ID NO: 669080 - protein, 14 aa, Homo sapiens
  CDR3 for beta chain variable domain of TCR clone 334540 (TRBV19, TRBJ2-1)
CASPTFVLSGEQFF

SEQ ID NO: 669081 - protein, 14 aa, Homo sapiens
  CDR3 for alpha chain variable domain of TCR clone 334541 (TRAV1-2, TRAJ16)
CAVNRFSDGQKLLF

SEQ ID NO: 669082 - protein, 14 aa, Homo sapiens
  CDR3 for beta chain variable domain of TCR clone 334541 (TRBV5-5, TRBJ2-7)
CASSLGQGTYEQYF

SEQ ID NO: 669083 - protein, 14 aa, Homo sapiens
  CDR3 for alpha chain variable domain of TCR clone 334542 (TRAV12-1, TRAJ43)
CVVNGRSNNNDMPF

SEQ ID NO: 669084 - protein, 13 aa, Homo sapiens
  CDR3 for beta chain variable domain of TCR clone 334542 (TRBV27, TRBJ1-1)
CASSLSIGAEAFF

SEQ ID NO: 669085 - protein, 13 aa, Homo sapiens
  CDR3 for alpha chain variable domain of TCR clone 334543 (TRAV13-2, TRAJ48)
CAEMDFGNEKLTF

SEQ ID NO: 669086 - protein, 12 aa, Homo sapiens
  CDR3 for beta chain variable domain of TCR clone 334543 (TRBV7-9, TRBJ1-1)
CASSLEGTEAFF

SEQ ID NO: 669087 - protein, 11 aa, Homo sapiens
  CDR3 for alpha chain variable domain of TCR clone 334544 (TRAV1-2, TRAJ31)
CALTNNARLMF

SEQ ID NO: 669088 - protein, 15 aa, Homo sapiens
  CDR3 for beta chain variable domain of TCR clone 334544 (TRBV28, TRBJ2-1)
CASSIIAGGRSEQFF

SEQ ID NO: 669089 - protein, 15 aa, Homo sapiens
  CDR3 for alpha chain variable domain of TCR clone 334545 (TRAV3, TRAJ22)
CAVRDRGGSASQVTF

SEQ ID NO: 669090 - protein, 16 aa, Homo sapiens
  CDR3 for beta chain variable domain of TCR clone 334545 (TRBV5-4, TRBJ2-3)
CASQQPGAGGADTQYF

SEQ ID NO: 669091 - protein, 13 aa, Homo sapiens
  CDR3 for alpha chain variable domain of TCR clone 334546 (TRAV21, TRAJ27)
CGARPGNAGKSTF

SEQ ID NO: 669092 - protein, 13 aa, Homo sapiens
  CDR3 for beta chain variable domain of TCR clone 334546 (TRBV27, TRBJ2-1)
CASRTLGVGEQFF

SEQ ID NO: 669093 - protein, 12 aa, Homo sapiens
  CDR3 for alpha chain variable domain of TCR clone 334547 (TRAV1-2, TRAJ9)
CAGYTGGFKTIF

SEQ ID NO: 669094 - protein, 15 aa, Homo sapiens
  CDR3 for beta chain variable domain of TCR clone 334547 (TRBV11-2, TRBJ2-1)
CASSPAGQSLNESSS

SEQ ID NO: 669095 - protein, 14 aa, Homo sapiens
  CDR3 for alpha chain variable domain of TCR clone 334548 (TRAV1-2, TRAJ16)
CAVNRFSDGQKLLF

SEQ ID NO: 669096 - protein, 11 aa, Homo sapiens
  CDR3 for beta chain variable domain of TCR clone 334548 (TRBV7-9, TRBJ2-3)
CASSYTDTQYF

SEQ ID NO: 669097 - protein, 12 aa, Homo sapiens
  CDR3 for alpha chain variable domain of TCR clone 334549 (TRAV16, TRAJ11)
CSYTIGYSTLTF

SEQ ID NO: 669098 - protein, 14 aa, Homo sapiens
  CDR3 for beta chain variable domain of TCR clone 334549 (TRBV19, TRBJ2-7)
CASSTTRSSYEQYF

SEQ ID NO: 669099 - protein, 14 aa, Homo sapiens
  CDR3 for alpha chain variable domain of TCR clone 334550 (TRAV16, TRAJ54)
CALSLIQGAQKLVF

SEQ ID NO: 669100 - protein, 16 aa, Homo sapiens
  CDR3 for beta chain variable domain of TCR clone 334550 (TRBV13, TRBJ2-2)
CASSPRTGEHTGELFF

SEQ ID NO: 669101 - protein, 14 aa, Homo sapiens
  CDR3 for alpha chain variable domain of TCR clone 334551 (TRAV30, TRAJ26)
CGTEIVSYDQNFVF

SEQ ID NO: 669102 - protein, 13 aa, Homo sapiens
  CDR3 for beta chain variable domain of TCR clone 334551 (TRBV24-1, TRBJ2-2)
CATSDWSTGELFF

SEQ ID NO: 669103 - protein, 17 aa, Homo sapiens
  CDR3 for alpha chain variable domain of TCR clone 334552 (TRAV3, TRAJ6)
CAVRDGPRAGGSYIPTF

SEQ ID NO: 669104 - protein, 16 aa, Homo sapiens
  CDR3 for beta chain variable domain of TCR clone 334552 (TRBV7-8, TRBJ2-3)
CASSAEGQRETDTQYF

SEQ ID NO: 669105 - protein, 12 aa, Homo sapiens
  CDR3 for alpha chain variable domain of TCR clone 334553 (TRAV12-3, TRAJ5)
CAMDTGRRALTC

SEQ ID NO: 669106 - protein, 13 aa, Homo sapiens
  CDR3 for beta chain variable domain of TCR clone 334553 (TRBV7-7, TRBJ2-2)
CASSLTSAGELFF

SEQ ID NO: 669107 - protein, 12 aa, Homo sapiens
  CDR3 for alpha chain variable domain of TCR clone 334554 (TRAV27, TRAJ13)
CAGLRGYQKVTF

SEQ ID NO: 669108 - protein, 16 aa, Homo sapiens
  CDR3 for beta chain variable domain of TCR clone 334554 (TRBV28, TRBJ2-1)
CASSSSYSGSLNEQFF

SEQ ID NO: 669109 - protein, 14 aa, Homo sapiens
  CDR3 for alpha chain variable domain of TCR clone 334555 (TRAV12-2, TRAJ11)
CAVEGGSGYSTLTF

SEQ ID NO: 669110 - protein, 16 aa, Homo sapiens
  CDR3 for beta chain variable domain of TCR clone 334555 (TRBV6-1, TRBJ1-2)
CASSGAWQGRSHGYIF

SEQ ID NO: 669111 - protein, 13 aa, Homo sapiens
  CDR3 for alpha chain variable domain of TCR clone 334556 (TRAV12-2, TRAJ37)
CAGGSGNTGKLIF

SEQ ID NO: 669112 - protein, 14 aa, Homo sapiens
  CDR3 for beta chain variable domain of TCR clone 334556 (TRBV7-2, TRBJ2-7)
CASSPKTSFYEQYF

SEQ ID NO: 669113 - protein, 11 aa, Homo sapiens
  CDR3 for alpha chain variable domain of TCR clone 334557 (TRAV12-3, TRAJ43)
YAMSISNDMRF

SEQ ID NO: 669114 - protein, 13 aa, Homo sapiens
  CDR3 for beta chain variable domain of TCR clone 334557 (TRBV20-1, TRBJ1-1)
CSAPLGGGTEAFF

SEQ ID NO: 669115 - protein, 14 aa, Homo sapiens
  CDR3 for alpha chain variable domain of TCR clone 334558 (TRAV12-2, TRAJ13)
CAVKKTGGYQKVTF

SEQ ID NO: 669116 - protein, 15 aa, Homo sapiens
  CDR3 for beta chain variable domain of TCR clone 334558 (TRBV27, TRBJ2-1)
CASSNGGGSSKSSSS

SEQ ID NO: 669117 - protein, 12 aa, Homo sapiens
  CDR3 for alpha chain variable domain of TCR clone 334559 (TRAV8-3, TRAJ20)
CAVGANDYKLSF

SEQ ID NO: 669118 - protein, 15 aa, Homo sapiens
  CDR3 for beta chain variable domain of TCR clone 334559 (TRBV7-6, TRBJ2-1)
CASSSLAGEGNEQFF

SEQ ID NO: 669119 - protein, 13 aa, Homo sapiens
  CDR3 for alpha chain variable domain of TCR clone 334560 (TRAV17, TRAJ40)
CATDSSGTYKYIF

SEQ ID NO: 669120 - protein, 14 aa, Homo sapiens
  CDR3 for beta chain variable domain of TCR clone 334560 (TRBV19, TRBJ2-2)
CASSGQGIAGELFF

SEQ ID NO: 669121 - protein, 11 aa, Homo sapiens
  CDR3 for alpha chain variable domain of TCR clone 334561 (TRAV3, TRAJ13)
CAVTSYQKVTF

SEQ ID NO: 669122 - protein, 15 aa, Homo sapiens
  CDR3 for beta chain variable domain of TCR clone 334561 (TRBV7-9, TRBJ2-7)
FASSSSGLAVYEQYF

SEQ ID NO: 669123 - protein, 15 aa, Homo sapiens
  CDR3 for alpha chain variable domain of TCR clone 334562 (TRAV21, TRAJ24)
CAARSSTDSWGKLQF

SEQ ID NO: 669124 - protein, 14 aa, Homo sapiens
  CDR3 for beta chain variable domain of TCR clone 334562 (TRBV12-4, TRBJ1-2)
CASSPLGTVGGYTF

SEQ ID NO: 669125 - protein, 13 aa, Homo sapiens
  CDR3 for alpha chain variable domain of TCR clone 334563 (TRAV29/DV5, TRAJ54)
CAAHLQGAQKLVF

SEQ ID NO: 669126 - protein, 14 aa, Homo sapiens
  CDR3 for beta chain variable domain of TCR clone 334563 (TRBV6-1, TRBJ1-3)
CASVQGGGGNTIYF

SEQ ID NO: 669127 - protein, 10 aa, Homo sapiens
  CDR3 for alpha chain variable domain of TCR clone 334564 (TRAV13-1, TRAJ27)
CAPLARHINL

SEQ ID NO: 669128 - protein, 13 aa, Homo sapiens
  CDR3 for beta chain variable domain of TCR clone 334564 (TRBV28, TRBJ1-1)
CASSKQGWTEAFF

SEQ ID NO: 669129 - protein, 14 aa, Homo sapiens
  CDR3 for alpha chain variable domain of TCR clone 334565 (TRAV12-2, TRAJ45)
CAVYSGGGADGLTF

SEQ ID NO: 669130 - protein, 17 aa, Homo sapiens
  CDR3 for beta chain variable domain of TCR clone 334565 (TRBV3-1, TRBJ2-2)
CASSQFRDKGDTGELFF

SEQ ID NO: 669131 - protein, 14 aa, Homo sapiens
  CDR3 for alpha chain variable domain of TCR clone 334566 (TRAV12-2, TRAJ11)
CAVEGGPGYSTLTF

SEQ ID NO: 669132 - protein, 15 aa, Homo sapiens
  CDR3 for beta chain variable domain of TCR clone 334566 (TRBV10-2, TRBJ2-6)
CASSEQGTGANVLTF

SEQ ID NO: 669133 - protein, 13 aa, Homo sapiens
  CDR3 for alpha chain variable domain of TCR clone 334567 (TRAV30, TRAJ6)
CGTEAGGSYIPTF

SEQ ID NO: 669134 - protein, 16 aa, Homo sapiens
  CDR3 for beta chain variable domain of TCR clone 334567 (TRBV4-3, TRBJ2-3)
CDSSLGLAGEGDTQYF

SEQ ID NO: 669135 - protein, 14 aa, Homo sapiens
  CDR3 for alpha chain variable domain of TCR clone 334568 (TRAV12-2, TRAJ17)
CAVNIQAAGNKLTF

SEQ ID NO: 669136 - protein, 16 aa, Homo sapiens
  CDR3 for beta chain variable domain of TCR clone 334568 (TRBV20-1, TRBJ2-6)
CSASSQGYDGANVLTF

SEQ ID NO: 669137 - protein, 15 aa, Homo sapiens
  CDR3 for alpha chain variable domain of TCR clone 334569 (TRAV8-4, TRAJ9)
CAVSDLEGGGFKTIF

SEQ ID NO: 669138 - protein, 15 aa, Homo sapiens
  CDR3 for beta chain variable domain of TCR clone 334569 (TRBV4-1, TRBJ1-4)
CASSDTGGTNEKLFF

SEQ ID NO: 669139 - protein, 12 aa, Homo sapiens
  CDR3 for alpha chain variable domain of TCR clone 334570 (TRAV13-2, TRAJ39)
CAENSERNRLTF

SEQ ID NO: 669140 - protein, 14 aa, Homo sapiens
  CDR3 for beta chain variable domain of TCR clone 334570 (TRBV20-1, TRBJ1-1)
CSAMGGIANTEAFF

SEQ ID NO: 669141 - protein, 10 aa, Homo sapiens
  CDR3 for alpha chain variable domain of TCR clone 334571 (TRAV27, TRAJ20)
VSTSADKLSF

SEQ ID NO: 669142 - protein, 13 aa, Homo sapiens
  CDR3 for beta chain variable domain of TCR clone 334571 (TRBV7-3, TRBJ1-1)
CASSQDWGAEAFF

SEQ ID NO: 669143 - protein, 17 aa, Homo sapiens
  CDR3 for alpha chain variable domain of TCR clone 334572 (TRAV8-6, TRAJ8)
SAVKEGIENTGFQKLVF

SEQ ID NO: 669144 - protein, 12 aa, Homo sapiens
  CDR3 for beta chain variable domain of TCR clone 334572 (TRBV19, TRBJ1-4)
CASKDWPGGLFF

SEQ ID NO: 669145 - protein, 14 aa, Homo sapiens
  CDR3 for alpha chain variable domain of TCR clone 334573 (TRAV1-2, TRAJ8)
CAVREDTGFQKLVF

SEQ ID NO: 669146 - protein, 13 aa, Homo sapiens
  CDR3 for beta chain variable domain of TCR clone 334573 (TRBV11-3, TRBJ2-7)
CASSLDKLYEQYF

SEQ ID NO: 669147 - protein, 13 aa, Homo sapiens
  CDR3 for alpha chain variable domain of TCR clone 334574 (TRAV27, TRAJ41)
CAGEGNSGYALNL

SEQ ID NO: 669148 - protein, 11 aa, Homo sapiens
  CDR3 for beta chain variable domain of TCR clone 334574 (TRBV7-8, TRBJ2-7)
CASSLSLEQYF

SEQ ID NO: 669149 - protein, 15 aa, Homo sapiens
  CDR3 for alpha chain variable domain of TCR clone 334575 (TRAV23/DV6, TRAJ27)
CAASKPMQANQPLGM

SEQ ID NO: 669150 - protein, 15 aa, Homo sapiens
  CDR3 for beta chain variable domain of TCR clone 334575 (TRBV3-1, TRBJ2-5)
CASSANLGGPETQYF

SEQ ID NO: 669151 - protein, 13 aa, Homo sapiens
  CDR3 for alpha chain variable domain of TCR clone 334576 (TRAV8-4, TRAJ10)
CAAFTGGGNKLTF

SEQ ID NO: 669152 - protein, 15 aa, Homo sapiens
  CDR3 for beta chain variable domain of TCR clone 334576 (TRBV2, TRBJ2-3)
CARSDFEKATDTQYF

SEQ ID NO: 669153 - protein, 16 aa, Homo sapiens
  CDR3 for alpha chain variable domain of TCR clone 334577 (TRAV13-2, TRAJ53)
CAENANSGGSNYNLTF

SEQ ID NO: 669154 - protein, 19 aa, Homo sapiens
  CDR3 for beta chain variable domain of TCR clone 334577 (TRBV28, TRBJ2-7)
CASSYSGTSRLGWVYEQYF

SEQ ID NO: 669155 - protein, 16 aa, Homo sapiens
  CDR3 for alpha chain variable domain of TCR clone 334578 (TRAV30, TRAJ24)
CGTEIVDADSWGKFQF

SEQ ID NO: 669156 - protein, 18 aa, Homo sapiens
  CDR3 for beta chain variable domain of TCR clone 334578 (TRBV28, TRBJ1-5)
CASSPLQGARYSNQPQHF

SEQ ID NO: 669157 - protein, 14 aa, Homo sapiens
  CDR3 for alpha chain variable domain of TCR clone 334579 (TRAV17, TRAJ35)
CATDRPGFGDVLHC

SEQ ID NO: 669158 - protein, 14 aa, Homo sapiens
  CDR3 for beta chain variable domain of TCR clone 334579 (TRBV7-8, TRBJ2-3)
CASSLEAGTDTQYF

SEQ ID NO: 669159 - protein, 14 aa, Homo sapiens
  CDR3 for alpha chain variable domain of TCR clone 334580 (TRAV26-1, TRAJ38)
CIADNAGNNRKLIW

SEQ ID NO: 669160 - protein, 17 aa, Homo sapiens
  CDR3 for beta chain variable domain of TCR clone 334580 (TRBV7-9, TRBJ2-3)
CASSTTVAGDLTDTQYF

SEQ ID NO: 669161 - protein, 14 aa, Homo sapiens
  CDR3 for alpha chain variable domain of TCR clone 334581 (TRAV20, TRAJ16)
CAVQENSDGQKLLF

SEQ ID NO: 669162 - protein, 14 aa, Homo sapiens
  CDR3 for beta chain variable domain of TCR clone 334581 (TRBV12-5, TRBJ2-5)
CASGSRTHQETQYF

SEQ ID NO: 669163 - protein, 14 aa, Homo sapiens
  CDR3 for alpha chain variable domain of TCR clone 334582 (TRAV12-3, TRAJ9)
CAMSPNTGGFKTIF

SEQ ID NO: 669164 - protein, 16 aa, Homo sapiens
  CDR3 for beta chain variable domain of TCR clone 334582 (TRBV7-2, TRBJ2-5)
CASSSKWLSGQETQYF

SEQ ID NO: 669165 - protein, 14 aa, Homo sapiens
  CDR3 for alpha chain variable domain of TCR clone 334583 (TRAV3, TRAJ22)
CAVRDYGSARQLTF

SEQ ID NO: 669166 - protein, 16 aa, Homo sapiens
  CDR3 for beta chain variable domain of TCR clone 334583 (TRBV7-2, TRBJ1-4)
CASSPVGRFDREKLFF

SEQ ID NO: 669167 - protein, 15 aa, Homo sapiens
  CDR3 for alpha chain variable domain of TCR clone 334584 (TRAV26-1, TRAJ37)
CIVRVAAGNTGKLIF

SEQ ID NO: 669168 - protein, 14 aa, Homo sapiens
  CDR3 for beta chain variable domain of TCR clone 334584 (TRBV10-3, TRBJ2-2)
CATFGQLNTGELFF

SEQ ID NO: 669169 - protein, 10 aa, Homo sapiens
  CDR3 for alpha chain variable domain of TCR clone 334585 (TRAV4, TRAJ33)
TLDSNYQLIW

SEQ ID NO: 669170 - protein, 15 aa, Homo sapiens
  CDR3 for beta chain variable domain of TCR clone 334585 (TRBV28, TRBJ2-1)
CASSIIAGGRSEQFF

SEQ ID NO: 669171 - protein, 15 aa, Homo sapiens
  CDR3 for alpha chain variable domain of TCR clone 334586 (TRAV21, TRAJ53)
RATLNSGGSNYKRTF

SEQ ID NO: 669172 - protein, 16 aa, Homo sapiens
  CDR3 for beta chain variable domain of TCR clone 334586 (TRBV9, TRBJ2-1)
CASSVGGGGNYNEQFF

SEQ ID NO: 669173 - protein, 14 aa, Homo sapiens
  CDR3 for alpha chain variable domain of TCR clone 334587 (TRAV36/DV7, TRAJ44)
CCGANTGTASKLTF

SEQ ID NO: 669174 - protein, 12 aa, Homo sapiens
  CDR3 for beta chain variable domain of TCR clone 334587 (TRBV11-2, TRBJ2-2)
CASSLGGGELFF

SEQ ID NO: 669175 - protein, 14 aa, Homo sapiens
  CDR3 for alpha chain variable domain of TCR clone 334588 (TRAV29/DV5, TRAJ36)
CAARRKTGANNLFF

SEQ ID NO: 669176 - protein, 13 aa, Homo sapiens
  CDR3 for beta chain variable domain of TCR clone 334588 (TRBV6-1, TRBJ2-1)
CASSERPRGEQFF

SEQ ID NO: 669177 - protein, 17 aa, Homo sapiens
  CDR3 for alpha chain variable domain of TCR clone 334589 (TRAV3, TRAJ6)
CAVRDGPRAGGSYIPTF

SEQ ID NO: 669178 - protein, 20 aa, Homo sapiens
  CDR3 for beta chain variable domain of TCR clone 334589 (TRBV28, TRBJ2-1)
CASTPIGRSPGVAGGNEQFF

SEQ ID NO: 669179 - protein, 13 aa, Homo sapiens
  CDR3 for alpha chain variable domain of TCR clone 334590 (TRAV2, TRAJ29)
CAVEPTGNTPLVF

SEQ ID NO: 669180 - protein, 14 aa, Homo sapiens
  CDR3 for beta chain variable domain of TCR clone 334590 (TRBV7-3, TRBJ2-2)
CVSSLLGSTGELFF

SEQ ID NO: 669181 - protein, 13 aa, Homo sapiens
  CDR3 for alpha chain variable domain of TCR clone 334591 (TRAV2, TRAJ15)
CAVASQAGTALIF

SEQ ID NO: 669182 - protein, 12 aa, Homo sapiens
  CDR3 for beta chain variable domain of TCR clone 334591 (TRBV7-3, TRBJ2-1)
CASSFQSGPQFF

SEQ ID NO: 669183 - protein, 14 aa, Homo sapiens
  CDR3 for alpha chain variable domain of TCR clone 334592 (TRAV12-1, TRAJ12)
CVVNRPDSSYKLIF

SEQ ID NO: 669184 - protein, 15 aa, Homo sapiens
  CDR3 for beta chain variable domain of TCR clone 334592 (TRBV5-1, TRBJ1-1)
CASSLGMGTSTEAVF

SEQ ID NO: 669185 - protein, 15 aa, Homo sapiens
  CDR3 for alpha chain variable domain of TCR clone 334593 (TRAV2, TRAJ9)
CAVEDRGTGGFKTIF

SEQ ID NO: 669186 - protein, 15 aa, Homo sapiens
  CDR3 for beta chain variable domain of TCR clone 334593 (TRBV2, TRBJ2-3)
CASSDAGGPPDTQYF

SEQ ID NO: 669187 - protein, 15 aa, Homo sapiens
  CDR3 for alpha chain variable domain of TCR clone 334594 (TRAV21, TRAJ45)
CAGSYSGGGADGLTF

SEQ ID NO: 669188 - protein, 13 aa, Homo sapiens
  CDR3 for beta chain variable domain of TCR clone 334594 (TRBV7-9, TRBJ1-2)
CASSLKQNYGYTF

SEQ ID NO: 669189 - protein, 14 aa, Homo sapiens
  CDR3 for alpha chain variable domain of TCR clone 334595 (TRAV12-3, TRAJ42)
CAMNYGGSQGNLIF

SEQ ID NO: 669190 - protein, 16 aa, Homo sapiens
  CDR3 for beta chain variable domain of TCR clone 334595 (TRBV10-3, TRBJ2-1)
CAIRGGGRGDYNEQFF

SEQ ID NO: 669191 - protein, 14 aa, Homo sapiens
  CDR3 for alpha chain variable domain of TCR clone 334596 (TRAV16, TRAJ26)
CALSSANYGQNFVS

SEQ ID NO: 669192 - protein, 12 aa, Homo sapiens
  CDR3 for beta chain variable domain of TCR clone 334596 (TRBV6-5, TRBJ2-2)
CASRTGTGELFF

SEQ ID NO: 669193 - protein, 16 aa, Homo sapiens
  CDR3 for alpha chain variable domain of TCR clone 334597 (TRAV3, TRAJ10)
CAVRDMRAGGGNKLTF

SEQ ID NO: 669194 - protein, 13 aa, Homo sapiens
  CDR3 for beta chain variable domain of TCR clone 334597 (TRBV7-2, TRBJ1-1)
CASNLKGAKVAFF

SEQ ID NO: 669195 - protein, 13 aa, Homo sapiens
  CDR3 for alpha chain variable domain of TCR clone 334598 (TRAV35, TRAJ44)
CAGLSGTASKLTF

SEQ ID NO: 669196 - protein, 15 aa, Homo sapiens
  CDR3 for beta chain variable domain of TCR clone 334598 (TRBV2, TRBJ2-7)
CASSEGLARSYEQYF

SEQ ID NO: 669197 - protein, 14 aa, Homo sapiens
  CDR3 for alpha chain variable domain of TCR clone 334599 (TRAV17, TRAJ26)
CATDDHNYGQNFVF

SEQ ID NO: 669198 - protein, 17 aa, Homo sapiens
  CDR3 for beta chain variable domain of TCR clone 334599 (TRBV7-8, TRBJ2-7)
CASSFTSGRPPSYEQYF

SEQ ID NO: 669199 - protein, 13 aa, Homo sapiens
  CDR3 for alpha chain variable domain of TCR clone 334600 (TRAV26-1, TRAJ48)
CIVRVVGDEKLTF

SEQ ID NO: 669200 - protein, 19 aa, Homo sapiens
  CDR3 for beta chain variable domain of TCR clone 334600 (TRBV11-3, TRBJ2-2)
CARSTRTGAKTTNTGELFF

SEQ ID NO: 669201 - protein, 14 aa, Homo sapiens
  CDR3 for alpha chain variable domain of TCR clone 334601 (TRAV12-2, TRAJ17)
CAVLFKAAGNKLTF

SEQ ID NO: 669202 - protein, 20 aa, Homo sapiens
  CDR3 for beta chain variable domain of TCR clone 334601 (TRBV19, TRBJ2-1)
CASSISRTVTSTRLSNEQFF

SEQ ID NO: 669203 - protein, 11 aa, Homo sapiens
  CDR3 for alpha chain variable domain of TCR clone 334602 (TRAV21, TRAJ11)
CAVNGYSTLTF

SEQ ID NO: 669204 - protein, 15 aa, Homo sapiens
  CDR3 for beta chain variable domain of TCR clone 334602 (TRBV4-1, TRBJ1-4)
CASSETGGTNEKLFF

SEQ ID NO: 669205 - protein, 21 aa, Homo sapiens
  CDR3 for alpha chain variable domain of TCR clone 334603 (TRAV8-4, TRAJ47)
HLTKPSAHMSDAAERGNKLVF

SEQ ID NO: 669206 - protein, 14 aa, Homo sapiens
  CDR3 for beta chain variable domain of TCR clone 334603 (TRBV7-9, TRBJ2-1)
CASSPRDSLDEQFF

SEQ ID NO: 669207 - protein, 13 aa, Homo sapiens
  CDR3 for alpha chain variable domain of TCR clone 334604 (TRAV41, TRAJ49)
CAVSGTPGNQFYF

SEQ ID NO: 669208 - protein, 16 aa, Homo sapiens
  CDR3 for beta chain variable domain of TCR clone 334604 (TRBV12-5, TRBJ2-5)
CASGPRTSGNQETQYF

SEQ ID NO: 669209 - protein, 14 aa, Homo sapiens
  CDR3 for alpha chain variable domain of TCR clone 334605 (TRAV12-2, TRAJ45)
CALNKGGGADGLTF

SEQ ID NO: 669210 - protein, 14 aa, Homo sapiens
  CDR3 for beta chain variable domain of TCR clone 334605 (TRBV20-1, TRBJ1-1)
CSAMGGTANTEAFF

SEQ ID NO: 669211 - protein, 18 aa, Homo sapiens
  CDR3 for alpha chain variable domain of TCR clone 334606 (TRAV13-1, TRAJ52)
CAASKRSAGGTSYGKLTF

SEQ ID NO: 669212 - protein, 16 aa, Homo sapiens
  CDR3 for beta chain variable domain of TCR clone 334606 (TRBV19, TRBJ2-1)
CASSEAGPSSYNEQFF

SEQ ID NO: 669213 - protein, 15 aa, Homo sapiens
  CDR3 for alpha chain variable domain of TCR clone 334607 (TRAV8-3, TRAJ11)
CAVGLLNSGYSTLTF

SEQ ID NO: 669214 - protein, 13 aa, Homo sapiens
  CDR3 for beta chain variable domain of TCR clone 334607 (TRBV27, TRBJ2-7)
CASSLRHRYEQYF

SEQ ID NO: 669215 - protein, 14 aa, Homo sapiens
  CDR3 for alpha chain variable domain of TCR clone 334608 (TRAV17, TRAJ6)
CATNPAGGSYIPTF

SEQ ID NO: 669216 - protein, 16 aa, Homo sapiens
  CDR3 for beta chain variable domain of TCR clone 334608 (TRBV7-9, TRBJ2-1)
CASSDVAGGSYNEQFF

SEQ ID NO: 669217 - protein, 14 aa, Homo sapiens
  CDR3 for alpha chain variable domain of TCR clone 334609 (TRAV17, TRAJ16)
CATADLSDGQKLLF

SEQ ID NO: 669218 - protein, 15 aa, Homo sapiens
  CDR3 for beta chain variable domain of TCR clone 334609 (TRBV3-1, TRBJ2-2)
CASSQDWTRAGELFF

SEQ ID NO: 669219 - protein, 12 aa, Homo sapiens
  CDR3 for alpha chain variable domain of TCR clone 334610 (TRAV16, TRAJ10)
CSRTGGGNKLTF

SEQ ID NO: 669220 - protein, 13 aa, Homo sapiens
  CDR3 for beta chain variable domain of TCR clone 334610 (TRBV29-1, TRBJ2-5)
CSVEATAQGTQYF

SEQ ID NO: 669221 - protein, 16 aa, Homo sapiens
  CDR3 for alpha chain variable domain of TCR clone 334611 (TRAV13-1, TRAJ37)
CVASSLGSSNTGKLIF

SEQ ID NO: 669222 - protein, 12 aa, Homo sapiens
  CDR3 for beta chain variable domain of TCR clone 334611 (TRBV6-1, TRBJ2-5)
CASSEGRETQYF

SEQ ID NO: 669223 - protein, 14 aa, Homo sapiens
  CDR3 for alpha chain variable domain of TCR clone 334612 (TRAV8-4, TRAJ15)
CAVSPYQSGTALIF

SEQ ID NO: 669224 - protein, 16 aa, Homo sapiens
  CDR3 for beta chain variable domain of TCR clone 334612 (TRBV4-1, TRBJ1-1)
CASSSMSERPNTEASF

SEQ ID NO: 669225 - protein, 15 aa, Homo sapiens
  CDR3 for alpha chain variable domain of TCR clone 334613 (TRAV27, TRAJ38)
CAVRRNAGNNRELIW

SEQ ID NO: 669226 - protein, 13 aa, Homo sapiens
  CDR3 for beta chain variable domain of TCR clone 334613 (TRBV12-5, TRBJ2-3)
CASGDRQSDTQYF

SEQ ID NO: 669227 - protein, 11 aa, Homo sapiens
  CDR3 for alpha chain variable domain of TCR clone 334614 (TRAV12-2, TRAJ39)
CAVNNMLTFGG

SEQ ID NO: 669228 - protein, 14 aa, Homo sapiens
  CDR3 for beta chain variable domain of TCR clone 334614 (TRBV13, TRBJ2-7)
CASSLKGASYEQYF

SEQ ID NO: 669229 - protein, 15 aa, Homo sapiens
  CDR3 for alpha chain variable domain of TCR clone 334615 (TRAV29/DV5, TRAJ24)
CAASGATDSWGKFQL

SEQ ID NO: 669230 - protein, 20 aa, Homo sapiens
  CDR3 for beta chain variable domain of TCR clone 334615 (TRBV11-2, TRBJ2-2)
LRTRPCISVPAASLPGSCFF

SEQ ID NO: 669231 - protein, 17 aa, Homo sapiens
  CDR3 for alpha chain variable domain of TCR clone 334616 (TRAV3, TRAJ42)
CAVRDRDSGGSQGNLIF

SEQ ID NO: 669232 - protein, 14 aa, Homo sapiens
  CDR3 for beta chain variable domain of TCR clone 334616 (TRBV19, TRBJ2-5)
CASSMTGQQETQYF

SEQ ID NO: 669233 - protein, 15 aa, Homo sapiens
  CDR3 for alpha chain variable domain of TCR clone 334617 (TRAV26-1, TRAJ39)
CIVRDGSNAGNMLTF

SEQ ID NO: 669234 - protein, 14 aa, Homo sapiens
  CDR3 for beta chain variable domain of TCR clone 334617 (TRBV10-3, TRBJ1-2)
CAIRAGTGDYGYTV

SEQ ID NO: 669235 - protein, 14 aa, Homo sapiens
  CDR3 for alpha chain variable domain of TCR clone 334618 (TRAV12-2, TRAJ13)
CAVKKTGGYQKVTF

SEQ ID NO: 669236 - protein, 15 aa, Homo sapiens
  CDR3 for beta chain variable domain of TCR clone 334618 (TRBV27, TRBJ2-1)
CASSNGGGSSNEHVF

SEQ ID NO: 669237 - protein, 14 aa, Homo sapiens
  CDR3 for alpha chain variable domain of TCR clone 334619 (TRAV12-3, TRAJ33)
CAMSVPGSNYQFIW

SEQ ID NO: 669238 - protein, 14 aa, Homo sapiens
  CDR3 for beta chain variable domain of TCR clone 334619 (TRBV7-2, TRBJ2-7)
CASSPKTSFYEQYF

SEQ ID NO: 669239 - protein, 14 aa, Homo sapiens
  CDR3 for alpha chain variable domain of TCR clone 334620 (TRAV3, TRAJ17)
CAVRDAAAGNKLTF

SEQ ID NO: 669240 - protein, 15 aa, Homo sapiens
  CDR3 for beta chain variable domain of TCR clone 334620 (TRBV6-3, TRBJ2-5)
CASSLLRGDQETQYS

SEQ ID NO: 669241 - protein, 13 aa, Homo sapiens
  CDR3 for alpha chain variable domain of TCR clone 334621 (TRAV12-1, TRAJ39)
CGDDNNAGSMLTF

SEQ ID NO: 669242 - protein, 16 aa, Homo sapiens
  CDR3 for beta chain variable domain of TCR clone 334621 (TRBV7-2, TRBJ1-2)
CASSSNQDRRGHGYTF

SEQ ID NO: 669243 - protein, 16 aa, Homo sapiens
  CDR3 for alpha chain variable domain of TCR clone 334622 (TRAV30, TRAJ24)
CGTEIVDADSWGKFHF

SEQ ID NO: 669244 - protein, 17 aa, Homo sapiens
  CDR3 for beta chain variable domain of TCR clone 334622 (TRBV20-1, TRBJ2-1)
CSARDRRRASSYNEQFF

SEQ ID NO: 669245 - protein, 13 aa, Homo sapiens
  CDR3 for alpha chain variable domain of TCR clone 334623 (TRAV3, TRAJ30)
CAVRDRGDVKIIF

SEQ ID NO: 669246 - protein, 16 aa, Homo sapiens
  CDR3 for beta chain variable domain of TCR clone 334623 (TRBV7-3, TRBJ2-2)
CASSLKRGTLSGELFF

SEQ ID NO: 669247 - protein, 15 aa, Homo sapiens
  CDR3 for alpha chain variable domain of TCR clone 334624 (TRAV26-1, TRAJ40)
CIVRVTTSGTYKNIF

SEQ ID NO: 669248 - protein, 17 aa, Homo sapiens
  CDR3 for beta chain variable domain of TCR clone 334624 (TRBV28, TRBJ2-5)
CASSRQGGLAGAETQYF

SEQ ID NO: 669249 - protein, 14 aa, Homo sapiens
  CDR3 for alpha chain variable domain of TCR clone 334625 (TRAV26-1, TRAJ34)
CIVRVAYTTDKLIF

SEQ ID NO: 669250 - protein, 15 aa, Homo sapiens
  CDR3 for beta chain variable domain of TCR clone 334625 (TRBV20-1, TRBJ2-7)
CSARVPAAYFHEQYF

SEQ ID NO: 669251 - protein, 14 aa, Homo sapiens
  CDR3 for alpha chain variable domain of TCR clone 334626 (TRAV12-3, TRAJ29)
CAMILLSGNTPLVF

SEQ ID NO: 669252 - protein, 12 aa, Homo sapiens
  CDR3 for beta chain variable domain of TCR clone 334626 (TRBV11-2, TRBJ2-2)
CASSLPTGELFF

SEQ ID NO: 669253 - protein, 14 aa, Homo sapiens
  CDR3 for alpha chain variable domain of TCR clone 334627 (TRAV13-1, TRAJ20)
CAARSGSNDYQLSF

SEQ ID NO: 669254 - protein, 15 aa, Homo sapiens
  CDR3 for beta chain variable domain of TCR clone 334627 (TRBV4-1, TRBJ2-7)
CASSQQGQGFDEQYF

SEQ ID NO: 669255 - protein, 15 aa, Homo sapiens
  CDR3 for alpha chain variable domain of TCR clone 334628 (TRAV14/DV4, TRAJ15)
CNGEGPAQAGTALIF

SEQ ID NO: 669256 - protein, 12 aa, Homo sapiens
  CDR3 for beta chain variable domain of TCR clone 334628 (TRBV28, TRBJ2-6)
CAIQAGANVLTF

SEQ ID NO: 669257 - protein, 12 aa, Homo sapiens
  CDR3 for alpha chain variable domain of TCR clone 334629 (TRAV30, TRAJ43)
CGTEERGNDMRF

SEQ ID NO: 669258 - protein, 16 aa, Homo sapiens
  CDR3 for beta chain variable domain of TCR clone 334629 (TRBV19, TRBJ1-6)
CASSVAPVAGNSPLLF

SEQ ID NO: 669259 - protein, 14 aa, Homo sapiens
  CDR3 for alpha chain variable domain of TCR clone 334630 (TRAV8-4, TRAJ15)
CAGTIREAGTALIF

SEQ ID NO: 669260 - protein, 16 aa, Homo sapiens
  CDR3 for beta chain variable domain of TCR clone 334630 (TRBV29-1, TRBJ2-6)
CSVEDITYSGANVLTF

SEQ ID NO: 669261 - protein, 17 aa, Homo sapiens
  CDR3 for alpha chain variable domain of TCR clone 334631 (TRAV8-6, TRAJ58)
CAVSSWVGETSGSRLTF

SEQ ID NO: 669262 - protein, 17 aa, Homo sapiens
  CDR3 for beta chain variable domain of TCR clone 334631 (TRBV4-3, TRBJ1-2)
CACSSRLQAGGSVGYSF

SEQ ID NO: 669263 - protein, 15 aa, Homo sapiens
  CDR3 for alpha chain variable domain of TCR clone 334632 (TRAV21, TRAJ53)
CATLNSGGSNYKLTF

SEQ ID NO: 669264 - protein, 13 aa, Homo sapiens
  CDR3 for beta chain variable domain of TCR clone 334632 (TRBV7-9, TRBJ2-3)
CASSPGSTDTQYC

SEQ ID NO: 669265 - protein, 14 aa, Homo sapiens
  CDR3 for alpha chain variable domain of TCR clone 334633 (TRAV12-3, TRAJ56)
CARSVTGANSKLTF

SEQ ID NO: 669266 - protein, 15 aa, Homo sapiens
  CDR3 for beta chain variable domain of TCR clone 334633 (TRBV4-2, TRBJ1-1)
CASSQEDLPRTEAFF

SEQ ID NO: 669267 - protein, 14 aa, Homo sapiens
  CDR3 for alpha chain variable domain of TCR clone 334634 (TRAV23/DV6, TRAJ4)
CAANLSGGYNKLIF

SEQ ID NO: 669268 - protein, 11 aa, Homo sapiens
  CDR3 for beta chain variable domain of TCR clone 334634 (TRBV7-9, TRBJ2-3)
CASSATDTQYF

SEQ ID NO: 669269 - protein, 14 aa, Homo sapiens
  CDR3 for alpha chain variable domain of TCR clone 334635 (TRAV4, TRAJ17)
CLVGDMASGNKLTF

SEQ ID NO: 669270 - protein, 15 aa, Homo sapiens
  CDR3 for beta chain variable domain of TCR clone 334635 (TRBV5-5, TRBJ1-5)
CASSSTPGSNQPQHF

SEQ ID NO: 669271 - protein, 13 aa, Homo sapiens
  CDR3 for alpha chain variable domain of TCR clone 334636 (TRAV13-1, TRAJ43)
CVASLSNNNDMRF

SEQ ID NO: 669272 - protein, 15 aa, Homo sapiens
  CDR3 for beta chain variable domain of TCR clone 334636 (TRBV5-1, TRBJ2-1)
CASSQAGYWWNEQFF

SEQ ID NO: 669273 - protein, 12 aa, Homo sapiens
  CDR3 for alpha chain variable domain of TCR clone 334637 (TRAV12-2, TRAJ21)
CAVNRNFNKFYF

SEQ ID NO: 669274 - protein, 13 aa, Homo sapiens
  CDR3 for beta chain variable domain of TCR clone 334637 (TRBV7-9, TRBJ2-1)
CASSLDVGNEQFF

SEQ ID NO: 669275 - protein, 15 aa, Homo sapiens
  CDR3 for alpha chain variable domain of TCR clone 334638 (TRAV12-2, TRAJ53)
CAVNRGGGSNYKLTF

SEQ ID NO: 669276 - protein, 13 aa, Homo sapiens
  CDR3 for beta chain variable domain of TCR clone 334638 (TRBV3-1, TRBJ1-1)
CASSPGVITEAFF

SEQ ID NO: 669277 - protein, 16 aa, Homo sapiens
  CDR3 for alpha chain variable domain of TCR clone 334639 (TRAV17, TRAJ53)
CATDALSGGSNYKLTF

SEQ ID NO: 669278 - protein, 12 aa, Homo sapiens
  CDR3 for beta chain variable domain of TCR clone 334639 (TRBV5-1, TRBJ2-7)
CASSFRGYEQSF

SEQ ID NO: 669279 - protein, 13 aa, Homo sapiens
  CDR3 for alpha chain variable domain of TCR clone 334640 (TRAV25, TRAJ10)
CAGRTGGGNKLTF

SEQ ID NO: 669280 - protein, 15 aa, Homo sapiens
  CDR3 for beta chain variable domain of TCR clone 334640 (TRBV19, TRBJ2-1)
CASSSPGVPLDKQFF

SEQ ID NO: 669281 - protein, 17 aa, Homo sapiens
  CDR3 for alpha chain variable domain of TCR clone 334641 (TRAV8-6, TRAJ58)
CAVSSWVGETSGPRLIF

SEQ ID NO: 669282 - protein, 14 aa, Homo sapiens
  CDR3 for beta chain variable domain of TCR clone 334641 (TRBV4-2, TRBJ2-1)
CASGLDRAYNEQFF

SEQ ID NO: 669283 - protein, 11 aa, Homo sapiens
  CDR3 for alpha chain variable domain of TCR clone 334642 (TRAV1-2, TRAJ20)
CAVSNDYKLSF

SEQ ID NO: 669284 - protein, 12 aa, Homo sapiens
  CDR3 for beta chain variable domain of TCR clone 334642 (TRBV5-1, TRBJ1-2)
CASSQDTYGYTF

SEQ ID NO: 669285 - protein, 13 aa, Homo sapiens
  CDR3 for alpha chain variable domain of TCR clone 334643 (TRAV21, TRAJ27)
CAARPGNAGKSTF

SEQ ID NO: 669286 - protein, 16 aa, Homo sapiens
  CDR3 for beta chain variable domain of TCR clone 334643 (TRBV20-1, TRBJ1-2)
CSASMGQRVANYGYTF

SEQ ID NO: 669287 - protein, 16 aa, Homo sapiens
  CDR3 for alpha chain variable domain of TCR clone 334644 (TRAV13-1, TRAJ44)
CAAKATALPVNSPLGL

SEQ ID NO: 669288 - protein, 13 aa, Homo sapiens
  CDR3 for beta chain variable domain of TCR clone 334644 (TRBV5-5, TRBJ1-2)
CASSFWRGEDCTF

SEQ ID NO: 669289 - protein, 11 aa, Homo sapiens
  CDR3 for alpha chain variable domain of TCR clone 334645 (TRAV3, TRAJ21)
CACGNFNKFYF

SEQ ID NO: 669290 - protein, 16 aa, Homo sapiens
  CDR3 for beta chain variable domain of TCR clone 334645 (TRBV19, TRBJ2-1)
CASSKAGPSSYNEQFF

SEQ ID NO: 669291 - protein, 15 aa, Homo sapiens
  CDR3 for alpha chain variable domain of TCR clone 334646 (TRAV29/DV5, TRAJ42)
CAAKTDGGSQGNLIF

SEQ ID NO: 669292 - protein, 12 aa, Homo sapiens
  CDR3 for beta chain variable domain of TCR clone 334646 (TRBV11-2, TRBJ2-1)
CASSPGNNKQFF

SEQ ID NO: 669293 - protein, 13 aa, Homo sapiens
  CDR3 for alpha chain variable domain of TCR clone 334647 (TRAV3, TRAJ21)
CAVREPDFNKFYF

SEQ ID NO: 669294 - protein, 17 aa, Homo sapiens
  CDR3 for beta chain variable domain of TCR clone 334647 (TRBV7-8, TRBJ2-6)
CASSAGTGGAGANVLTL

SEQ ID NO: 669295 - protein, 16 aa, Homo sapiens
  CDR3 for alpha chain variable domain of TCR clone 334648 (TRAV30, TRAJ24)
CGTEIVDADSWGKFQF

SEQ ID NO: 669296 - protein, 14 aa, Homo sapiens
  CDR3 for beta chain variable domain of TCR clone 334648 (TRBV4-2, TRBJ1-2)
CASSQDRREGGYTF

SEQ ID NO: 669297 - protein, 12 aa, Homo sapiens
  CDR3 for alpha chain variable domain of TCR clone 334649 (TRAV2, TRAJ32)
CAVGGATNKLIF

SEQ ID NO: 669298 - protein, 15 aa, Homo sapiens
  CDR3 for beta chain variable domain of TCR clone 334649 (TRBV7-3, TRBJ2-1)
CASSPTGGGEVEQFF

SEQ ID NO: 669299 - protein, 14 aa, Homo sapiens
  CDR3 for alpha chain variable domain of TCR clone 334650 (TRAV29/DV5, TRAJ48)
CAAMALFGNEKLTF

SEQ ID NO: 669300 - protein, 15 aa, Homo sapiens
  CDR3 for beta chain variable domain of TCR clone 334650 (TRBV7-2, TRBJ2-1)
CASTHGTGSYNEQFF

SEQ ID NO: 669301 - protein, 13 aa, Homo sapiens
  CDR3 for alpha chain variable domain of TCR clone 334651 (TRAV8-3, TRAJ28)
CAVGAVGSYQLTF

SEQ ID NO: 669302 - protein, 13 aa, Homo sapiens
  CDR3 for beta chain variable domain of TCR clone 334651 (TRBV7-2, TRBJ2-2)
CASSSVRAGELFF

SEQ ID NO: 669303 - protein, 13 aa, Homo sapiens
  CDR3 for alpha chain variable domain of TCR clone 334652 (TRAV12-2, TRAJ6)
CAVNVSRKLHTYI

SEQ ID NO: 669304 - protein, 13 aa, Homo sapiens
  CDR3 for beta chain variable domain of TCR clone 334652 (TRBV7-6, TRBJ1-2)
CASSLVADYGYTF

SEQ ID NO: 669305 - protein, 18 aa, Homo sapiens
  CDR3 for alpha chain variable domain of TCR clone 334653 (TRAV21, TRAJ52)
CAVRPSPAGGTSYGKLTL

SEQ ID NO: 669306 - protein, 16 aa, Homo sapiens
  CDR3 for beta chain variable domain of TCR clone 334653 (TRBV4-1, TRBJ2-3)
CASSQRAGGLTDTQYF

SEQ ID NO: 669307 - protein, 15 aa, Homo sapiens
  CDR3 for alpha chain variable domain of TCR clone 334654 (TRAV12-2, TRAJ9)
CAVNNERTGGFKTIF

SEQ ID NO: 669308 - protein, 14 aa, Homo sapiens
  CDR3 for beta chain variable domain of TCR clone 334654 (TRBV4-1, TRBJ1-4)
CASSQERMNEKLFF

SEQ ID NO: 669309 - protein, 16 aa, Homo sapiens
  CDR3 for alpha chain variable domain of TCR clone 334655 (TRAV26-1, TRAJ23)
CIVRPHGNNQGGKLIF

SEQ ID NO: 669310 - protein, 19 aa, Homo sapiens
  CDR3 for beta chain variable domain of TCR clone 334655 (TRBV5-4, TRBJ2-7)
CASRLGQSPGAPTSSTSGR

SEQ ID NO: 669311 - protein, 13 aa, Homo sapiens
  CDR3 for alpha chain variable domain of TCR clone 334656 (TRAV3, TRAJ21)
CAVREPDFNKFYF

SEQ ID NO: 669312 - protein, 14 aa, Homo sapiens
  CDR3 for beta chain variable domain of TCR clone 334656 (TRBV7-9, TRBJ2-7)
CASSLSQGSYEQYF

SEQ ID NO: 669313 - protein, 15 aa, Homo sapiens
  CDR3 for alpha chain variable domain of TCR clone 334657 (TRAV8-2, TRAJ40)
CVVSDRGSGTYKYIF

SEQ ID NO: 669314 - protein, 15 aa, Homo sapiens
  CDR3 for beta chain variable domain of TCR clone 334657 (TRBV7-3, TRBJ2-1)
CASSPTGGGEVEQFF

SEQ ID NO: 669315 - protein, 11 aa, Homo sapiens
  CDR3 for alpha chain variable domain of TCR clone 334658 (TRAV12-3, TRAJ43)
CAMSVSNDMRF

SEQ ID NO: 669316 - protein, 13 aa, Homo sapiens
  CDR3 for beta chain variable domain of TCR clone 334658 (TRBV7-3, TRBJ2-5)
CASSIGFFETQYF

SEQ ID NO: 669317 - protein, 12 aa, Homo sapiens
  CDR3 for alpha chain variable domain of TCR clone 334659 (TRAV12-1, TRAJ34)
CVVAGATDKLIF

SEQ ID NO: 669318 - protein, 13 aa, Homo sapiens
  CDR3 for beta chain variable domain of TCR clone 334659 (TRBV7-2, TRBJ2-2)
CASSLAVTGELFF

SEQ ID NO: 669319 - protein, 11 aa, Homo sapiens
  CDR3 for alpha chain variable domain of TCR clone 334660 (TRAV13-2, TRAJ23)
CAESPRGKLIF

SEQ ID NO: 669320 - protein, 14 aa, Homo sapiens
  CDR3 for beta chain variable domain of TCR clone 334660 (TRBV20-1, TRBJ2-7)
CSATKNRGPYEQYF

SEQ ID NO: 669321 - protein, 17 aa, Homo sapiens
  CDR3 for alpha chain variable domain of TCR clone 334661 (TRAV3, TRAJ5)
CAVRDLDTGRRALTLGV

SEQ ID NO: 669322 - protein, 13 aa, Homo sapiens
  CDR3 for beta chain variable domain of TCR clone 334661 (TRBV12-4, TRBJ2-7)
CASSPTETYEQYF

SEQ ID NO: 669323 - protein, 15 aa, Homo sapiens
  CDR3 for alpha chain variable domain of TCR clone 334662 (TRAV8-3, TRAJ6)
CAVGEDRGGSYIPTF

SEQ ID NO: 669324 - protein, 15 aa, Homo sapiens
  CDR3 for beta chain variable domain of TCR clone 334662 (TRBV6-5, TRBJ2-1)
CASSYDAGAGNEQFF

SEQ ID NO: 669325 - protein, 16 aa, Homo sapiens
  CDR3 for alpha chain variable domain of TCR clone 334663 (TRAV30, TRAJ24)
CGAEIVDADSWGKFQF

SEQ ID NO: 669326 - protein, 17 aa, Homo sapiens
  CDR3 for beta chain variable domain of TCR clone 334663 (TRBV20-1, TRBJ2-1)
CSARDPLAGVWDNEQFF

SEQ ID NO: 669327 - protein, 15 aa, Homo sapiens
  CDR3 for alpha chain variable domain of TCR clone 334664 (TRAV16, TRAJ16)
CALQGGGSDGQKLLF

SEQ ID NO: 669328 - protein, 14 aa, Homo sapiens
  CDR3 for beta chain variable domain of TCR clone 334664 (TRBV5-1, TRBJ1-5)
CASSLGQGAQPQHF

SEQ ID NO: 669329 - protein, 14 aa, Homo sapiens
  CDR3 for alpha chain variable domain of TCR clone 334665 (TRAV8-3, TRAJ4)
CAVGAAGGYNKRLF

SEQ ID NO: 669330 - protein, 15 aa, Homo sapiens
  CDR3 for beta chain variable domain of TCR clone 334665 (TRBV6-5, TRBJ2-1)
CASSYDAGAGNEQFF

SEQ ID NO: 669331 - protein, 19 aa, Homo sapiens
  CDR3 for alpha chain variable domain of TCR clone 334666 (TRAV10, TRAJ45)
PTSVWCGGYSGGGADGLTF

SEQ ID NO: 669332 - protein, 12 aa, Homo sapiens
  CDR3 for beta chain variable domain of TCR clone 334666 (TRBV7-8, TRBJ2-3)
CQQLRGTDTQYF

SEQ ID NO: 669333 - protein, 10 aa, Homo sapiens
  CDR3 for alpha chain variable domain of TCR clone 334667 (TRAV8-3, TRAJ43)
CVVALADMRF

SEQ ID NO: 669334 - protein, 17 aa, Homo sapiens
  CDR3 for beta chain variable domain of TCR clone 334667 (TRBV10-1, TRBJ2-1)
CASSPQRAGGPFNERFF

SEQ ID NO: 669335 - protein, 17 aa, Homo sapiens
  CDR3 for alpha chain variable domain of TCR clone 334668 (TRAV2, TRAJ36)
CAVEDRGNWGKRPLLWD

SEQ ID NO: 669336 - protein, 14 aa, Homo sapiens
  CDR3 for beta chain variable domain of TCR clone 334668 (TRBV7-9, TRBJ2-5)
CASSLDTAQETQYF

SEQ ID NO: 669337 - protein, 18 aa, Homo sapiens
  CDR3 for alpha chain variable domain of TCR clone 334669 (TRAV21, TRAJ52)
CAVRPSPAGGTSYGKLTF

SEQ ID NO: 669338 - protein, 12 aa, Homo sapiens
  CDR3 for beta chain variable domain of TCR clone 334669 (TRBV6-5, TRBJ2-5)
CASSEGSETQYF

SEQ ID NO: 669339 - protein, 14 aa, Homo sapiens
  CDR3 for alpha chain variable domain of TCR clone 334670 (TRAV12-3, TRAJ10)
SHLPLTGGGNKLTF

SEQ ID NO: 669340 - protein, 16 aa, Homo sapiens
  CDR3 for beta chain variable domain of TCR clone 334670 (TRBV27, TRBJ2-2)
CASSSSGVSNTGELLF

SEQ ID NO: 669341 - protein, 17 aa, Homo sapiens
  CDR3 for alpha chain variable domain of TCR clone 334671 (TRAV4, TRAJ18)
CLVGERSVGSTLGSLYF

SEQ ID NO: 669342 - protein, 16 aa, Homo sapiens
  CDR3 for beta chain variable domain of TCR clone 334671 (TRBV15, TRBJ1-4)
CATSRDSPPGREKLFF

SEQ ID NO: 669343 - protein, 14 aa, Homo sapiens
  CDR3 for alpha chain variable domain of TCR clone 334672 (TRAV21, TRAJ35)
CAVMQIGFGNVLHF

SEQ ID NO: 669344 - protein, 12 aa, Homo sapiens
  CDR3 for beta chain variable domain of TCR clone 334672 (TRBV7-9, TRBJ2-7)
CASSIKREEQYF

SEQ ID NO: 669345 - protein, 13 aa, Homo sapiens
  CDR3 for alpha chain variable domain of TCR clone 334673 (TRAV17, TRAJ39)
CADPVRAGNMLTF

SEQ ID NO: 669346 - protein, 15 aa, Homo sapiens
  CDR3 for beta chain variable domain of TCR clone 334673 (TRBV13, TRBJ1-5)
CASRFGQGGVQPQHF

SEQ ID NO: 669347 - protein, 14 aa, Homo sapiens
  CDR3 for alpha chain variable domain of TCR clone 334674 (TRAV12-1, TRAJ17)
CVVNPKAAGNKLTF

SEQ ID NO: 669348 - protein, 13 aa, Homo sapiens
  CDR3 for beta chain variable domain of TCR clone 334674 (TRBV4-1, TRBJ2-2)
CASSQENTGELFF

SEQ ID NO: 669349 - protein, 12 aa, Homo sapiens
  CDR3 for alpha chain variable domain of TCR clone 334675 (TRAV26-1, TRAJ53)
CIEGGSNYKLTF

SEQ ID NO: 669350 - protein, 15 aa, Homo sapiens
  CDR3 for beta chain variable domain of TCR clone 334675 (TRBV19, TRBJ1-1)
CASTSGQIQNTEAFF

SEQ ID NO: 669351 - protein, 13 aa, Homo sapiens
  CDR3 for alpha chain variable domain of TCR clone 334676 (TRAV8-3, TRAJ20)
CTVGAQDDYKLSF

SEQ ID NO: 669352 - protein, 15 aa, Homo sapiens
  CDR3 for beta chain variable domain of TCR clone 334676 (TRBV9, TRBJ1-6)
CASSVAGTGDSPLHF

SEQ ID NO: 669353 - protein, 12 aa, Homo sapiens
  CDR3 for alpha chain variable domain of TCR clone 334677 (TRAV13-2, TRAJ23)
CAERHRGGKLIF

SEQ ID NO: 669354 - protein, 15 aa, Homo sapiens
  CDR3 for beta chain variable domain of TCR clone 334677 (TRBV5-1, TRBJ1-1)
CASSSTTGTNTEAFF

SEQ ID NO: 669355 - protein, 14 aa, Homo sapiens
  CDR3 for alpha chain variable domain of TCR clone 334678 (TRAV2, TRAJ15)
TTVVASQAGTALIF

SEQ ID NO: 669356 - protein, 16 aa, Homo sapiens
  CDR3 for beta chain variable domain of TCR clone 334678 (TRBV5-1, TRBJ1-1)
CASSSGGNSLNTEAFF

SEQ ID NO: 669357 - protein, 18 aa, Homo sapiens
  CDR3 for alpha chain variable domain of TCR clone 334679 (TRAV26-1, TRAJ23)
CIVRVGLEVWNQGGKLIF

SEQ ID NO: 669358 - protein, 16 aa, Homo sapiens
  CDR3 for beta chain variable domain of TCR clone 334679 (TRBV29-1, TRBJ2-7)
CSVEDAEDGTAYEQYF

SEQ ID NO: 669359 - protein, 18 aa, Homo sapiens
  CDR3 for alpha chain variable domain of TCR clone 334680 (TRAV12-3, TRAJ52)
CAMSVGGAAGTSYGKLTF

SEQ ID NO: 669360 - protein, 15 aa, Homo sapiens
  CDR3 for beta chain variable domain of TCR clone 334680 (TRBV27, TRBJ1-6)
CASSFDRGLGSPLHF

SEQ ID NO: 669361 - protein, 14 aa, Homo sapiens
  CDR3 for alpha chain variable domain of TCR clone 334681 (TRAV12-2, TRAJ13)
CAVKKTGGYQKVTF

SEQ ID NO: 669362 - protein, 14 aa, Homo sapiens
  CDR3 for beta chain variable domain of TCR clone 334681 (TRBV12-4, TRBJ2-5)
CQQSPTGLQETQYF

SEQ ID NO: 669363 - protein, 16 aa, Homo sapiens
  CDR3 for alpha chain variable domain of TCR clone 334682 (TRAV22, TRAJ45)
CAVERDKRGGADGLTF

SEQ ID NO: 669364 - protein, 13 aa, Homo sapiens
  CDR3 for beta chain variable domain of TCR clone 334682 (TRBV27, TRBJ1-1)
CASSLSIGAEAFF

SEQ ID NO: 669365 - protein, 14 aa, Homo sapiens
  CDR3 for alpha chain variable domain of TCR clone 334683 (TRAV13-1, TRAJ35)
CAAGKGGFGNVLHC

SEQ ID NO: 669366 - protein, 12 aa, Homo sapiens
  CDR3 for beta chain variable domain of TCR clone 334683 (TRBV11-2, TRBJ2-2)
CASSLGGGELFF

SEQ ID NO: 669367 - protein, 16 aa, Homo sapiens
  CDR3 for alpha chain variable domain of TCR clone 334684 (TRAV30, TRAJ24)
CGTELVDADSWGKFQF

SEQ ID NO: 669368 - protein, 14 aa, Homo sapiens
  CDR3 for beta chain variable domain of TCR clone 334684 (TRBV12-5, TRBJ2-7)
CASGSRTHQETQYF

SEQ ID NO: 669369 - protein, 14 aa, Homo sapiens
  CDR3 for alpha chain variable domain of TCR clone 334685 (TRAV12-2, TRAJ40)
CAVRIPSGTYTYIF

SEQ ID NO: 669370 - protein, 14 aa, Homo sapiens
  CDR3 for beta chain variable domain of TCR clone 334685 (TRBV20-1, TRBJ1-1)
CSAQTRIGGTEAFF

SEQ ID NO: 669371 - protein, 13 aa, Homo sapiens
  CDR3 for alpha chain variable domain of TCR clone 334686 (TRAV1-2, TRAJ9)
CAVLNTGGFKTIF

SEQ ID NO: 669372 - protein, 15 aa, Homo sapiens
  CDR3 for beta chain variable domain of TCR clone 334686 (TRBV19, TRBJ2-4)
CASRGPRRGENIQYF

SEQ ID NO: 669373 - protein, 14 aa, Homo sapiens
  CDR3 for alpha chain variable domain of TCR clone 334687 (TRAV13-2, TRAJ17)
CAENSKAAGNKLTF

SEQ ID NO: 669374 - protein, 15 aa, Homo sapiens
  CDR3 for beta chain variable domain of TCR clone 334687 (TRBV25-1, TRBJ1-4)
CASSPGDSTNEKLFF

SEQ ID NO: 669375 - protein, 13 aa, Homo sapiens
  CDR3 for alpha chain variable domain of TCR clone 334688 (TRAV13-2, TRAJ13)
CAETAGGYQKVTF

SEQ ID NO: 669376 - protein, 15 aa, Homo sapiens
  CDR3 for beta chain variable domain of TCR clone 334688 (TRBV20-1, TRBJ1-5)
CGARVGRVVSQPQHF

SEQ ID NO: 669377 - protein, 14 aa, Homo sapiens
  CDR3 for alpha chain variable domain of TCR clone 334689 (TRAV12-2, TRAJ17)
CAGLFKSAGNKLTF

SEQ ID NO: 669378 - protein, 17 aa, Homo sapiens
  CDR3 for beta chain variable domain of TCR clone 334689 (TRBV20-1, TRBJ2-2)
CSASGSGQGGLTGELFF

SEQ ID NO: 669379 - protein, 14 aa, Homo sapiens
  CDR3 for alpha chain variable domain of TCR clone 334690 (TRAV3, TRAJ5)
CAVRSDTGRRALTF

SEQ ID NO: 669380 - protein, 14 aa, Homo sapiens
  CDR3 for beta chain variable domain of TCR clone 334690 (TRBV7-2, TRBJ2-3)
CASSFVMPKDTQYF

SEQ ID NO: 669381 - protein, 15 aa, Homo sapiens
  CDR3 for alpha chain variable domain of TCR clone 334691 (TRAV3, TRAJ22)
CAVRDRGGSARQLTF

SEQ ID NO: 669382 - protein, 18 aa, Homo sapiens
  CDR3 for beta chain variable domain of TCR clone 334691 (TRBV11-2, TRBJ1-6)
CASSLVFATGGSVHPSTF

SEQ ID NO: 669383 - protein, 12 aa, Homo sapiens
  CDR3 for alpha chain variable domain of TCR clone 334692 (TRAV12-3, TRAJ17)
CAMTLTGNKLTF

SEQ ID NO: 669384 - protein, 11 aa, Homo sapiens
  CDR3 for beta chain variable domain of TCR clone 334692 (TRBV19, TRBJ1-2)
CASSISSGYTF

SEQ ID NO: 669385 - protein, 15 aa, Homo sapiens
  CDR3 for alpha chain variable domain of TCR clone 334693 (TRAV8-3, TRAJ27)
CAVGPSKTNAGKSTF

SEQ ID NO: 669386 - protein, 16 aa, Homo sapiens
  CDR3 for beta chain variable domain of TCR clone 334693 (TRBV19, TRBJ1-1)
CASRFGGPVTGTEAFF

SEQ ID NO: 669387 - protein, 13 aa, Homo sapiens
  CDR3 for alpha chain variable domain of TCR clone 334694 (TRAV1-2, TRAJ9)
CAALNTGGFKTIF

SEQ ID NO: 669388 - protein, 15 aa, Homo sapiens
  CDR3 for beta chain variable domain of TCR clone 334694 (TRBV28, TRBJ1-1)
CASGRLAGLNTEAFF

SEQ ID NO: 669389 - protein, 13 aa, Homo sapiens
  CDR3 for alpha chain variable domain of TCR clone 334695 (TRAV17, TRAJ54)
CAAGIQGAEKLVF

SEQ ID NO: 669390 - protein, 14 aa, Homo sapiens
  CDR3 for beta chain variable domain of TCR clone 334695 (TRBV11-2, TRBJ1-2)
CASSLGTANYGYTF

SEQ ID NO: 669391 - protein, 13 aa, Homo sapiens
  CDR3 for alpha chain variable domain of TCR clone 334696 (TRAV12-2, TRAJ6)
CAVNVSRKLHTYI

SEQ ID NO: 669392 - protein, 12 aa, Homo sapiens
  CDR3 for beta chain variable domain of TCR clone 334696 (TRBV27, TRBJ2-2)
CASKLFTGELFF

SEQ ID NO: 669393 - protein, 14 aa, Homo sapiens
  CDR3 for alpha chain variable domain of TCR clone 334697 (TRAV35, TRAJ53)
CAGNSGGSNYKLTF

SEQ ID NO: 669394 - protein, 11 aa, Homo sapiens
  CDR3 for beta chain variable domain of TCR clone 334697 (TRBV4-1, TRBJ1-4)
CASKENEKLFV

SEQ ID NO: 669395 - protein, 17 aa, Homo sapiens
  CDR3 for alpha chain variable domain of TCR clone 334698 (TRAV14/DV4, TRAJ4)
CAMREASGRGGYNKLIF

SEQ ID NO: 669396 - protein, 12 aa, Homo sapiens
  CDR3 for beta chain variable domain of TCR clone 334698 (TRBV24-1, TRBJ1-1)
CATSDSDRGAFF

SEQ ID NO: 669397 - protein, 12 aa, Homo sapiens
  CDR3 for alpha chain variable domain of TCR clone 334699 (TRAV22, TRAJ36)
CAVGTGANNLFF

SEQ ID NO: 669398 - protein, 15 aa, Homo sapiens
  CDR3 for beta chain variable domain of TCR clone 334699 (TRBV18, TRBJ2-1)
CASLPDRGRDNEQFF

SEQ ID NO: 669399 - protein, 14 aa, Homo sapiens
  CDR3 for alpha chain variable domain of TCR clone 334700 (TRAV26-1, TRAJ57)
CIRSGQGGSEKLVF

SEQ ID NO: 669400 - protein, 13 aa, Homo sapiens
  CDR3 for beta chain variable domain of TCR clone 334700 (TRBV19, TRBJ2-7)
CASRLTTSYEQYF

SEQ ID NO: 669401 - protein, 14 aa, Homo sapiens
  CDR3 for alpha chain variable domain of TCR clone 334701 (TRAV14/DV4, TRAJ26)
CATREGTYGQNFVF

SEQ ID NO: 669402 - protein, 16 aa, Homo sapiens
  CDR3 for beta chain variable domain of TCR clone 334701 (TRBV9, TRBJ1-2)
CASSVEEKVSPYGYTF

SEQ ID NO: 669403 - protein, 12 aa, Homo sapiens
  CDR3 for alpha chain variable domain of TCR clone 334702 (TRAV21, TRAJ23)
CVVGPQGGKLIF

SEQ ID NO: 669404 - protein, 13 aa, Homo sapiens
  CDR3 for beta chain variable domain of TCR clone 334702 (TRBV20-1, TRBJ2-7)
CSARTGAGYEQYF

SEQ ID NO: 669405 - protein, 16 aa, Homo sapiens
  CDR3 for alpha chain variable domain of TCR clone 334703 (TRAV26-1, TRAJ52)
CIVSNAGGTSYGKLTF

SEQ ID NO: 669406 - protein, 16 aa, Homo sapiens
  CDR3 for beta chain variable domain of TCR clone 334703 (TRBV5-1, TRBJ2-1)
CASSLEGRGLYNEQFV

SEQ ID NO: 669407 - protein, 10 aa, Homo sapiens
  CDR3 for alpha chain variable domain of TCR clone 334704 (TRAV1-2, TRAJ31)
CAFFRCQTHV

SEQ ID NO: 669408 - protein, 13 aa, Homo sapiens
  CDR3 for beta chain variable domain of TCR clone 334704 (TRBV7-9, TRBJ1-2)
CASSLKQNYGYAF

SEQ ID NO: 669409 - protein, 13 aa, Homo sapiens
  CDR3 for alpha chain variable domain of TCR clone 334705 (TRAV12-2, TRAJ13)
CAVTAGGYQKVTF

SEQ ID NO: 669410 - protein, 14 aa, Homo sapiens
  CDR3 for beta chain variable domain of TCR clone 334705 (TRBV7-9, TRBJ2-3)
CASSLEQGTNTQYF

SEQ ID NO: 669411 - protein, 14 aa, Homo sapiens
  CDR3 for alpha chain variable domain of TCR clone 334706 (TRAV12-3, TRAJ57)
CAMSAWGGSEKLVF

SEQ ID NO: 669412 - protein, 15 aa, Homo sapiens
  CDR3 for beta chain variable domain of TCR clone 334706 (TRBV19, TRBJ2-1)
CASSIVRGEGREQFF

SEQ ID NO: 669413 - protein, 13 aa, Homo sapiens
  CDR3 for alpha chain variable domain of TCR clone 334707 (TRAV26-1, TRAJ30)
CIVRVASNDKIIF

SEQ ID NO: 669414 - protein, 17 aa, Homo sapiens
  CDR3 for beta chain variable domain of TCR clone 334707 (TRBV13, TRBJ2-3)
CASSLSRVAGGRNTQYF

SEQ ID NO: 669415 - protein, 13 aa, Homo sapiens
  CDR3 for alpha chain variable domain of TCR clone 334708 (TRAV1-2, TRAJ9)
CAALNTGGFKTIF

SEQ ID NO: 669416 - protein, 15 aa, Homo sapiens
  CDR3 for beta chain variable domain of TCR clone 334708 (TRBV24-1, TRBJ2-1)
CATNGSGGFYNEQFF

SEQ ID NO: 669417 - protein, 14 aa, Homo sapiens
  CDR3 for alpha chain variable domain of TCR clone 334709 (TRAV38-1, TRAJ45)
CASHSGGGADGLTF

SEQ ID NO: 669418 - protein, 16 aa, Homo sapiens
  CDR3 for beta chain variable domain of TCR clone 334709 (TRBV27, TRBJ2-2)
CASSFRGLVRTGELFC

SEQ ID NO: 669419 - protein, 11 aa, Homo sapiens
  CDR3 for alpha chain variable domain of TCR clone 334710 (TRAV22, TRAJ30)
CAGNRDDKIIF

SEQ ID NO: 669420 - protein, 16 aa, Homo sapiens
  CDR3 for beta chain variable domain of TCR clone 334710 (TRBV10-3, TRBJ2-1)
CAISGVGDGGGGEQFF

SEQ ID NO: 669421 - protein, 18 aa, Homo sapiens
  CDR3 for alpha chain variable domain of TCR clone 334711 (TRAV26-1, TRAJ23)
CIVRAGLEVWNQGGKLSF

SEQ ID NO: 669422 - protein, 16 aa, Homo sapiens
  CDR3 for beta chain variable domain of TCR clone 334711 (TRBV12-4, TRBJ2-5)
CASSFFVRGRQETQYF

SEQ ID NO: 669423 - protein, 16 aa, Homo sapiens
  CDR3 for alpha chain variable domain of TCR clone 334712 (TRAV17, TRAJ52)
CATSNAGGTRYGKLTF

SEQ ID NO: 669424 - protein, 13 aa, Homo sapiens
  CDR3 for beta chain variable domain of TCR clone 334712 (TRBV27, TRBJ1-6)
CASSVVLVSPLQF

SEQ ID NO: 669425 - protein, 14 aa, Homo sapiens
  CDR3 for alpha chain variable domain of TCR clone 334713 (TRAV8-3, TRAJ4)
CAVGAAGGYNKLIF

SEQ ID NO: 669426 - protein, 15 aa, Homo sapiens
  CDR3 for beta chain variable domain of TCR clone 334713 (TRBV6-5, TRBJ2-7)
CASSRTSGFSYEQYF

SEQ ID NO: 669427 - protein, 14 aa, Homo sapiens
  CDR3 for alpha chain variable domain of TCR clone 334714 (TRAV12-2, TRAJ53)
CAVTGGGSNYKLTF

SEQ ID NO: 669428 - protein, 12 aa, Homo sapiens
  CDR3 for beta chain variable domain of TCR clone 334714 (TRBV28, TRBJ2-3)
CASSLYRDTQYF

SEQ ID NO: 669429 - protein, 14 aa, Homo sapiens
  CDR3 for alpha chain variable domain of TCR clone 334715 (TRAV27, TRAJ37)
CAGERSRNTGKLIF

SEQ ID NO: 669430 - protein, 15 aa, Homo sapiens
  CDR3 for beta chain variable domain of TCR clone 334715 (TRBV11-3, TRBJ1-6)
CASSLDWGANSPLHF

SEQ ID NO: 669431 - protein, 16 aa, Homo sapiens
  CDR3 for alpha chain variable domain of TCR clone 334716 (TRAV2, TRAJ4)
CAVEDRFSGGYSKLIF

SEQ ID NO: 669432 - protein, 13 aa, Homo sapiens
  CDR3 for beta chain variable domain of TCR clone 334716 (TRBV7-7, TRBJ2-5)
CASSRSGQETQYF

SEQ ID NO: 669433 - protein, 16 aa, Homo sapiens
  CDR3 for alpha chain variable domain of TCR clone 334717 (TRAV3, TRAJ37)
CAVRVRGSGNTAKLIF

SEQ ID NO: 669434 - protein, 13 aa, Homo sapiens
  CDR3 for beta chain variable domain of TCR clone 334717 (TRBV14, TRBJ2-1)
CASSQDRRNEQFF

SEQ ID NO: 669435 - protein, 10 aa, Homo sapiens
  CDR3 for alpha chain variable domain of TCR clone 334718 (TRAV30, TRAJ34)
CGTNPDKLLF

SEQ ID NO: 669436 - protein, 12 aa, Homo sapiens
  CDR3 for beta chain variable domain of TCR clone 334718 (TRBV19, TRBJ1-1)
CASSLSDTEAFF

SEQ ID NO: 669437 - protein, 15 aa, Homo sapiens
  CDR3 for alpha chain variable domain of TCR clone 334719 (TRAV20, TRAJ4)
CAVEGSSGGYNKLIF

SEQ ID NO: 669438 - protein, 14 aa, Homo sapiens
  CDR3 for beta chain variable domain of TCR clone 334719 (TRBV7-8, TRBJ2-7)
CASTLGGALSEQYF

SEQ ID NO: 669439 - protein, 12 aa, Homo sapiens
  CDR3 for alpha chain variable domain of TCR clone 334720 (TRAV12-3, TRAJ17)
CAMTLTGNKLTL

SEQ ID NO: 669440 - protein, 13 aa, Homo sapiens
  CDR3 for beta chain variable domain of TCR clone 334720 (TRBV7-9, TRBJ1-2)
CASSLKQNYGYIF

SEQ ID NO: 669441 - protein, 18 aa, Homo sapiens
  CDR3 for alpha chain variable domain of TCR clone 334721 (TRAV12-3, TRAJ52)
CAMSRTNAGDTSYGKMTF

SEQ ID NO: 669442 - protein, 17 aa, Homo sapiens
  CDR3 for beta chain variable domain of TCR clone 334721 (TRBV7-3, TRBJ2-3)
CASSLMKRMRGADTQYF

SEQ ID NO: 669443 - protein, 13 aa, Homo sapiens
  CDR3 for alpha chain variable domain of TCR clone 334722 (TRAV3, TRAJ29)
CAVRDIMDTPLVF

SEQ ID NO: 669444 - protein, 14 aa, Homo sapiens
  CDR3 for beta chain variable domain of TCR clone 334722 (TRBV27, TRBJ2-1)
CASSATGGYNEQFF

SEQ ID NO: 669445 - protein, 11 aa, Homo sapiens
  CDR3 for alpha chain variable domain of TCR clone 334723 (TRAV1-1, TRAJ23)
CAVRQGGKLIF

SEQ ID NO: 669446 - protein, 14 aa, Homo sapiens
  CDR3 for beta chain variable domain of TCR clone 334723 (TRBV19, TRBJ2-1)
CASPTFVLSGEKFF

SEQ ID NO: 669447 - protein, 14 aa, Homo sapiens
  CDR3 for alpha chain variable domain of TCR clone 334724 (TRAV26-1, TRAJ39)
CIVRGSRAGNMLTF

SEQ ID NO: 669448 - protein, 14 aa, Homo sapiens
  CDR3 for beta chain variable domain of TCR clone 334724 (TRBV5-1, TRBJ2-7)
CASSRGESLYEQYF

SEQ ID NO: 669449 - protein, 14 aa, Homo sapiens
  CDR3 for alpha chain variable domain of TCR clone 334725 (TRAV13-1, TRAJ45)
CAAIGGGGAAGLTF

SEQ ID NO: 669450 - protein, 16 aa, Homo sapiens
  CDR3 for beta chain variable domain of TCR clone 334725 (TRBV7-2, TRBJ1-1)
CASSLGAGWTNTEAFF

SEQ ID NO: 669451 - protein, 12 aa, Homo sapiens
  CDR3 for alpha chain variable domain of TCR clone 334726 (TRAV8-3, TRAJ27)
CAVGAEAGKSTF

SEQ ID NO: 669452 - protein, 14 aa, Homo sapiens
  CDR3 for beta chain variable domain of TCR clone 334726 (TRBV2, TRBJ2-1)
CASRLIVVHDEQFF

SEQ ID NO: 669453 - protein, 13 aa, Homo sapiens
  CDR3 for alpha chain variable domain of TCR clone 334727 (TRAV3, TRAJ21)
CAVREPDFNKFYF

SEQ ID NO: 669454 - protein, 15 aa, Homo sapiens
  CDR3 for beta chain variable domain of TCR clone 334727 (TRBV7-8, TRBJ2-1)
CASSLAGGLYNEQFF

SEQ ID NO: 669455 - protein, 13 aa, Homo sapiens
  CDR3 for alpha chain variable domain of TCR clone 334728 (TRAV13-2, TRAJ8)
CAFMNTGFQKLVF

SEQ ID NO: 669456 - protein, 17 aa, Homo sapiens
  CDR3 for beta chain variable domain of TCR clone 334728 (TRBV28, TRBJ2-1)
CASSSARQGLTYNEQFF

SEQ ID NO: 669457 - protein, 14 aa, Homo sapiens
  CDR3 for alpha chain variable domain of TCR clone 334729 (TRAV26-1, TRAJ45)
FIEVTGGGADGLTF

SEQ ID NO: 669458 - protein, 16 aa, Homo sapiens
  CDR3 for beta chain variable domain of TCR clone 334729 (TRBV6-3, TRBJ1-2)
CASSYSRRASNYGYTF

SEQ ID NO: 669459 - protein, 12 aa, Homo sapiens
  CDR3 for alpha chain variable domain of TCR clone 334730 (TRAV12-2, TRAJ52)
IGGGTSYGKLTF

SEQ ID NO: 669460 - protein, 13 aa, Homo sapiens
  CDR3 for beta chain variable domain of TCR clone 334730 (TRBV12-4, TRBJ1-1)
CAISPGTGFEAFF

SEQ ID NO: 669461 - protein, 13 aa, Homo sapiens
  CDR3 for alpha chain variable domain of TCR clone 334731 (TRAV23/DV6, TRAJ58)
CAASEIGGSRLTF

SEQ ID NO: 669462 - protein, 13 aa, Homo sapiens
  CDR3 for beta chain variable domain of TCR clone 334731 (TRBV19, TRBJ1-2)
CASSVPGQDGYTF

SEQ ID NO: 669463 - protein, 16 aa, Homo sapiens
  CDR3 for alpha chain variable domain of TCR clone 334732 (TRAV30, TRAJ24)
CGTEIVDADSWGKFQF

SEQ ID NO: 669464 - protein, 18 aa, Homo sapiens
  CDR3 for beta chain variable domain of TCR clone 334732 (TRBV12-4, TRBJ2-2)
CASSRSGGAIPNTGELFF

SEQ ID NO: 669465 - protein, 13 aa, Homo sapiens
  CDR3 for alpha chain variable domain of TCR clone 334733 (TRAV26-2, TRAJ43)
CILRAVNNNDMRF

SEQ ID NO: 669466 - protein, 15 aa, Homo sapiens
  CDR3 for beta chain variable domain of TCR clone 334733 (TRBV7-2, TRBJ2-1)
CASTHGTGIYNEKFF

SEQ ID NO: 669467 - protein, 17 aa, Homo sapiens
  CDR3 for alpha chain variable domain of TCR clone 334734 (TRAV3, TRAJ6)
CSLRDGPRAGGSYIPTF

SEQ ID NO: 669468 - protein, 13 aa, Homo sapiens
  CDR3 for beta chain variable domain of TCR clone 334734 (TRBV20-1, TRBJ1-6)
CSAPLGVGSPLHF

SEQ ID NO: 669469 - protein, 15 aa, Homo sapiens
  CDR3 for alpha chain variable domain of TCR clone 334735 (TRAV8-3, TRAJ11)
CAVGLLNSGYSTLTF

SEQ ID NO: 669470 - protein, 16 aa, Homo sapiens
  CDR3 for beta chain variable domain of TCR clone 334735 (TRBV27, TRBJ2-5)
CASSYGPGGQKETQYF

SEQ ID NO: 669471 - protein, 13 aa, Homo sapiens
  CDR3 for alpha chain variable domain of TCR clone 334736 (TRAV36/DV7, TRAJ37)
CAVFSSNTGKLIF

SEQ ID NO: 669472 - protein, 12 aa, Homo sapiens
  CDR3 for beta chain variable domain of TCR clone 334736 (TRBV11-2, TRBJ2-2)
CASSLEGGELFF

SEQ ID NO: 669473 - protein, 18 aa, Homo sapiens
  CDR3 for alpha chain variable domain of TCR clone 334737 (TRAV13-1, TRAJ52)
CAAKNPNAGGTSYGKLTF

SEQ ID NO: 669474 - protein, 14 aa, Homo sapiens
  CDR3 for beta chain variable domain of TCR clone 334737 (TRBV5-4, TRBJ2-5)
CASSLVRGQETQYF

SEQ ID NO: 669475 - protein, 15 aa, Homo sapiens
  CDR3 for alpha chain variable domain of TCR clone 334738 (TRAV3, TRAJ5)
CAVRDLDTGRRALTF

SEQ ID NO: 669476 - protein, 14 aa, Homo sapiens
  CDR3 for beta chain variable domain of TCR clone 334738 (TRBV25-1, TRBJ1-4)
CASSGGGQPEKLSF

SEQ ID NO: 669477 - protein, 14 aa, Homo sapiens
  CDR3 for alpha chain variable domain of TCR clone 334739 (TRAV1-2, TRAJ16)
CAVNRFSDGQKLLF

SEQ ID NO: 669478 - protein, 12 aa, Homo sapiens
  CDR3 for beta chain variable domain of TCR clone 334739 (TRBV28, TRBJ2-1)
CASSRLVGEQFF

SEQ ID NO: 669479 - protein, 12 aa, Homo sapiens
  CDR3 for alpha chain variable domain of TCR clone 334740 (TRAV16, TRAJ10)
CSRTGGGNKLTF

SEQ ID NO: 669480 - protein, 13 aa, Homo sapiens
  CDR3 for beta chain variable domain of TCR clone 334740 (TRBV12-4, TRBJ1-1)
CDSFDRVNTEAFF

SEQ ID NO: 669481 - protein, 16 aa, Homo sapiens
  CDR3 for alpha chain variable domain of TCR clone 334741 (TRAV26-1, TRAJ36)
CIVRVSYQTGANNLFF

SEQ ID NO: 669482 - protein, 11 aa, Homo sapiens
  CDR3 for beta chain variable domain of TCR clone 334741 (TRBV11-2, TRBJ2-2)
CASSLPGELFF

SEQ ID NO: 669483 - protein, 14 aa, Homo sapiens
  CDR3 for alpha chain variable domain of TCR clone 334742 (TRAV2, TRAJ9)
CAVEDRSGGFKTIC

SEQ ID NO: 669484 - protein, 13 aa, Homo sapiens
  CDR3 for beta chain variable domain of TCR clone 334742 (TRBV2, TRBJ2-7)
CASSVVEAHEQYF

SEQ ID NO: 669485 - protein, 11 aa, Homo sapiens
  CDR3 for alpha chain variable domain of TCR clone 334743 (TRAV12-2, TRAJ21)
CAVEVFNQFYF

SEQ ID NO: 669486 - protein, 15 aa, Homo sapiens
  CDR3 for beta chain variable domain of TCR clone 334743 (TRBV20-1, TRBJ1-5)
CSASRRGDLGQPQHF

SEQ ID NO: 669487 - protein, 17 aa, Homo sapiens
  CDR3 for alpha chain variable domain of TCR clone 334744 (TRAV13-1, TRAJ28)
CAASPPYSGAGSYHLTF

SEQ ID NO: 669488 - protein, 15 aa, Homo sapiens
  CDR3 for beta chain variable domain of TCR clone 334744 (TRBV6-3, TRBJ2-2)
CASSLLATLTGELFF

SEQ ID NO: 669489 - protein, 11 aa, Homo sapiens
  CDR3 for alpha chain variable domain of TCR clone 334745 (TRAV3, TRAJ21)
SAVGNFNKFYF

SEQ ID NO: 669490 - protein, 15 aa, Homo sapiens
  CDR3 for beta chain variable domain of TCR clone 334745 (TRBV5-1, TRBJ2-1)
CASSLVANSYNEQFF

SEQ ID NO: 669491 - protein, 14 aa, Homo sapiens
  CDR3 for alpha chain variable domain of TCR clone 334746 (TRAV26-1, TRAJ39)
CIVRGSRAGNMLTF

SEQ ID NO: 669492 - protein, 15 aa, Homo sapiens
  CDR3 for beta chain variable domain of TCR clone 334746 (TRBV12-4, TRBJ2-5)
CASSLLQGAGETQYF

SEQ ID NO: 669493 - protein, 17 aa, Homo sapiens
  CDR3 for alpha chain variable domain of TCR clone 334747 (TRAV3, TRAJ38)
CAVRDGLNAGNNRNLIW

SEQ ID NO: 669494 - protein, 13 aa, Homo sapiens
  CDR3 for beta chain variable domain of TCR clone 334747 (TRBV23-1, TRBJ1-4)
CASRGKFNEKLFF

SEQ ID NO: 669495 - protein, 13 aa, Homo sapiens
  CDR3 for alpha chain variable domain of TCR clone 334748 (TRAV13-2, TRAJ48)
CAEMDFGNEKITF

SEQ ID NO: 669496 - protein, 15 aa, Homo sapiens
  CDR3 for beta chain variable domain of TCR clone 334748 (TRBV7-9, TRBJ1-6)
CASSSPVRGNSPLHF

SEQ ID NO: 669497 - protein, 11 aa, Homo sapiens
  CDR3 for alpha chain variable domain of TCR clone 334749 (TRAV8-3, TRAJ49)
CAVNTGNQFYF

SEQ ID NO: 669498 - protein, 19 aa, Homo sapiens
  CDR3 for beta chain variable domain of TCR clone 334749 (TRBV4-3, TRBJ2-7)
CISAPAAKQPSGTPYEQYF

SEQ ID NO: 669499 - protein, 16 aa, Homo sapiens
  CDR3 for alpha chain variable domain of TCR clone 334750 (TRAV17, TRAJ52)
CATSKAGGTSYGKLTF

SEQ ID NO: 669500 - protein, 13 aa, Homo sapiens
  CDR3 for beta chain variable domain of TCR clone 334750 (TRBV27, TRBJ1-6)
CASSLVLVSPLHF

SEQ ID NO: 669501 - protein, 15 aa, Homo sapiens
  CDR3 for alpha chain variable domain of TCR clone 334751 (TRAV26-1, TRAJ23)
CIVRVAGYQGRKLIF

SEQ ID NO: 669502 - protein, 18 aa, Homo sapiens
  CDR3 for beta chain variable domain of TCR clone 334751 (TRBV28, TRBJ2-1)
CASSSTSGRANSYNEQFF

SEQ ID NO: 669503 - protein, 13 aa, Homo sapiens
  CDR3 for alpha chain variable domain of TCR clone 334752 (TRAV12-1, TRAJ39)
FVALNNAGNMLTF

SEQ ID NO: 669504 - protein, 15 aa, Homo sapiens
  CDR3 for beta chain variable domain of TCR clone 334752 (TRBV14, TRBJ2-5)
CASSRRGGVQETQYF

SEQ ID NO: 669505 - protein, 12 aa, Homo sapiens
  CDR3 for alpha chain variable domain of TCR clone 334753 (TRAV1-2, TRAJ33)
CAALDSNYQLIW

SEQ ID NO: 669506 - protein, 13 aa, Homo sapiens
  CDR3 for beta chain variable domain of TCR clone 334753 (TRBV11-2, TRBJ2-1)
CASSLDLVNEQFF

SEQ ID NO: 669507 - protein, 12 aa, Homo sapiens
  CDR3 for alpha chain variable domain of TCR clone 334754 (TRAV12-3, TRAJ17)
CAMTRTGNKLTF

SEQ ID NO: 669508 - protein, 16 aa, Homo sapiens
  CDR3 for beta chain variable domain of TCR clone 334754 (TRBV7-3, TRBJ2-1)
CASSLEGYRSYNEQFF

SEQ ID NO: 669509 - protein, 12 aa, Homo sapiens
  CDR3 for alpha chain variable domain of TCR clone 334755 (TRAV17, TRAJ49)
CATVTTGNQFYF

SEQ ID NO: 669510 - protein, 18 aa, Homo sapiens
  CDR3 for beta chain variable domain of TCR clone 334755 (TRBV11-2, TRBJ2-6)
CASRLNPFLGTGANVLTF

SEQ ID NO: 669511 - protein, 16 aa, Homo sapiens
  CDR3 for alpha chain variable domain of TCR clone 334756 (TRAV3, TRAJ3)
CAVRDRAKSSASKIIF

SEQ ID NO: 669512 - protein, 13 aa, Homo sapiens
  CDR3 for beta chain variable domain of TCR clone 334756 (TRBV10-3, TRBJ2-7)
CASKLAVNYERYF

SEQ ID NO: 669513 - protein, 13 aa, Homo sapiens
  CDR3 for alpha chain variable domain of TCR clone 334757 (TRAV2, TRAJ40)
CDVVTSGTYKYIF

SEQ ID NO: 669514 - protein, 14 aa, Homo sapiens
  CDR3 for beta chain variable domain of TCR clone 334757 (TRBV19, TRBJ2-1)
CASPTLVLSGEQFF

SEQ ID NO: 669515 - protein, 14 aa, Homo sapiens
  CDR3 for alpha chain variable domain of TCR clone 334758 (TRAV12-1, TRAJ43)
CVVNSRSNNNDMRF

SEQ ID NO: 669516 - protein, 12 aa, Homo sapiens
  CDR3 for beta chain variable domain of TCR clone 334758 (TRBV29-1, TRBJ2-3)
CSVTGGADTQYF

SEQ ID NO: 669517 - protein, 11 aa, Homo sapiens
  CDR3 for alpha chain variable domain of TCR clone 334759 (TRAV1-2, TRAJ31)
CAVNNNARLMF

SEQ ID NO: 669518 - protein, 15 aa, Homo sapiens
  CDR3 for beta chain variable domain of TCR clone 334759 (TRBV28, TRBJ2-1)
CASSIIAAGRSEQFF

SEQ ID NO: 669519 - protein, 12 aa, Homo sapiens
  CDR3 for alpha chain variable domain of TCR clone 334760 (TRAV21, TRAJ41)
CAVREFRVCTQL

SEQ ID NO: 669520 - protein, 15 aa, Homo sapiens
  CDR3 for beta chain variable domain of TCR clone 334760 (TRBV18, TRBJ1-5)
CASSTQARSNQPQHF

SEQ ID NO: 669521 - protein, 17 aa, Homo sapiens
  CDR3 for alpha chain variable domain of TCR clone 334761 (TRAV1-2, TRAJ8)
CAVRDPDENTGFQKLLF

SEQ ID NO: 669522 - protein, 11 aa, Homo sapiens
  CDR3 for beta chain variable domain of TCR clone 334761 (TRBV7-9, TRBJ2-2)
CASSGFGGANT

SEQ ID NO: 669523 - protein, 11 aa, Homo sapiens
  CDR3 for alpha chain variable domain of TCR clone 334762 (TRAV12-3, TRAJ27)
CAMANAGKSTF

SEQ ID NO: 669524 - protein, 15 aa, Homo sapiens
  CDR3 for beta chain variable domain of TCR clone 334762 (TRBV11-2, TRBJ2-1)
CASSSPSTRYNEQFF

SEQ ID NO: 669525 - protein, 12 aa, Homo sapiens
  CDR3 for alpha chain variable domain of TCR clone 334763 (TRAV13-1, TRAJ49)
CAAPNTGNQFYL

SEQ ID NO: 669526 - protein, 17 aa, Homo sapiens
  CDR3 for beta chain variable domain of TCR clone 334763 (TRBV25-1, TRBJ2-7)
CASSDARVVFSSYEQYF

SEQ ID NO: 669527 - protein, 14 aa, Homo sapiens
  CDR3 for alpha chain variable domain of TCR clone 334764 (TRAV12-3, TRAJ10)
SHLPLTGGGNKLTF

SEQ ID NO: 669528 - protein, 11 aa, Homo sapiens
  CDR3 for beta chain variable domain of TCR clone 334764 (TRBV2, TRBJ1-2)
CASSPGNGYTF

SEQ ID NO: 669529 - protein, 16 aa, Homo sapiens
  CDR3 for alpha chain variable domain of TCR clone 334765 (TRAV8-3, TRAJ48)
CAVGLISNFGNEKLTL

SEQ ID NO: 669530 - protein, 13 aa, Homo sapiens
  CDR3 for beta chain variable domain of TCR clone 334765 (TRBV20-1, TRBJ1-5)
CSASWGRSQPQHF

SEQ ID NO: 669531 - protein, 11 aa, Homo sapiens
  CDR3 for alpha chain variable domain of TCR clone 334766 (TRAV1-2, TRAJ31)
CAVKNNARLMF

SEQ ID NO: 669532 - protein, 14 aa, Homo sapiens
  CDR3 for beta chain variable domain of TCR clone 334766 (TRBV4-1, TRBJ2-2)
CASSQAVNTGELFF

SEQ ID NO: 669533 - protein, 13 aa, Homo sapiens
  CDR3 for alpha chain variable domain of TCR clone 334767 (TRAV20, TRAJ48)
CAVQGVGNERLTF

SEQ ID NO: 669534 - protein, 14 aa, Homo sapiens
  CDR3 for beta chain variable domain of TCR clone 334767 (TRBV27, TRBJ2-7)
CASSFRDGPYEQYF

SEQ ID NO: 669535 - protein, 16 aa, Homo sapiens
  CDR3 for alpha chain variable domain of TCR clone 334768 (TRAV13-1, TRAJ42)
CADLLNYGGSQGNLIF

SEQ ID NO: 669536 - protein, 15 aa, Homo sapiens
  CDR3 for beta chain variable domain of TCR clone 334768 (TRBV28, TRBJ2-1)
CASSIIAGGRSEQFF

SEQ ID NO: 669537 - protein, 15 aa, Homo sapiens
  CDR3 for alpha chain variable domain of TCR clone 334769 (TRAV8-3, TRAJ45)
RASSFSGGGADGLTF

SEQ ID NO: 669538 - protein, 13 aa, Homo sapiens
  CDR3 for beta chain variable domain of TCR clone 334769 (TRBV10-3, TRBJ2-7)
CASKLAVNYEQYF

SEQ ID NO: 669539 - protein, 13 aa, Homo sapiens
  CDR3 for alpha chain variable domain of TCR clone 334770 (TRAV27, TRAJ17)
CAGAATAGNKLTF

SEQ ID NO: 669540 - protein, 13 aa, Homo sapiens
  CDR3 for beta chain variable domain of TCR clone 334770 (TRBV5-7, TRBJ2-6)
CASTSSGANVLTF

SEQ ID NO: 669541 - protein, 17 aa, Homo sapiens
  CDR3 for alpha chain variable domain of TCR clone 334771 (TRAV3, TRAJ6)
CAVRDGPRDGGSYIPTF

SEQ ID NO: 669542 - protein, 20 aa, Homo sapiens
  CDR3 for beta chain variable domain of TCR clone 334771 (TRBV28, TRBJ2-1)
CASTPIGRSPGLAGGNEQFF

SEQ ID NO: 669543 - protein, 13 aa, Homo sapiens
  CDR3 for alpha chain variable domain of TCR clone 334772 (TRAV1-2, TRAJ9)
CAALNTGGFKTIF

SEQ ID NO: 669544 - protein, 15 aa, Homo sapiens
  CDR3 for beta chain variable domain of TCR clone 334772 (TRBV7-2, TRBJ2-2)
CASRRPGQNTGELFF

SEQ ID NO: 669545 - protein, 14 aa, Homo sapiens
  CDR3 for alpha chain variable domain of TCR clone 334773 (TRAV12-2, TRAJ15)
CAPHTGQAGTALIF

SEQ ID NO: 669546 - protein, 17 aa, Homo sapiens
  CDR3 for beta chain variable domain of TCR clone 334773 (TRBV5-5, TRBJ1-2)
CASGLGSLDGQSEGYTF

SEQ ID NO: 669547 - protein, 10 aa, Homo sapiens
  CDR3 for alpha chain variable domain of TCR clone 334774 (TRAV26-1, TRAJ40)
CIAGTYKYIF

SEQ ID NO: 669548 - protein, 13 aa, Homo sapiens
  CDR3 for beta chain variable domain of TCR clone 334774 (TRBV7-3, TRBJ1-1)
CASSQDWGAEDFF

SEQ ID NO: 669549 - protein, 11 aa, Homo sapiens
  CDR3 for alpha chain variable domain of TCR clone 334775 (TRAV35, TRAJ30)
CSGPGDDKIIF

SEQ ID NO: 669550 - protein, 18 aa, Homo sapiens
  CDR3 for beta chain variable domain of TCR clone 334775 (TRBV7-6, TRBJ2-1)
CASSPRTSGMSSYNEQFF

SEQ ID NO: 669551 - protein, 16 aa, Homo sapiens
  CDR3 for alpha chain variable domain of TCR clone 334776 (TRAV30, TRAJ24)
CGTEIVDADSWGKFQF

SEQ ID NO: 669552 - protein, 16 aa, Homo sapiens
  CDR3 for beta chain variable domain of TCR clone 334776 (TRBV7-9, TRBJ1-2)
CASSLGFASGEDGYTF

SEQ ID NO: 669553 - protein, 16 aa, Homo sapiens
  CDR3 for alpha chain variable domain of TCR clone 334777 (TRAV8-3, TRAJ13)
CAVGAYPSGGYQKVTF

SEQ ID NO: 669554 - protein, 15 aa, Homo sapiens
  CDR3 for beta chain variable domain of TCR clone 334777 (TRBV11-2, TRBJ2-2)
CASSSDRVNAGELFF

SEQ ID NO: 669555 - protein, 13 aa, Homo sapiens
  CDR3 for alpha chain variable domain of TCR clone 334778 (TRAV2, TRAJ24)
CALTTDSWGQLQF

SEQ ID NO: 669556 - protein, 14 aa, Homo sapiens
  CDR3 for beta chain variable domain of TCR clone 334778 (TRBV13, TRBJ2-5)
CASSLGREQETQYF

SEQ ID NO: 669557 - protein, 15 aa, Homo sapiens
  CDR3 for alpha chain variable domain of TCR clone 334779 (TRAV25, TRAJ53)
CPTSNSGGSNYNLTF

SEQ ID NO: 669558 - protein, 14 aa, Homo sapiens
  CDR3 for beta chain variable domain of TCR clone 334779 (TRBV11-2, TRBJ2-3)
CASSRLAHTDTQYF

SEQ ID NO: 669559 - protein, 15 aa, Homo sapiens
  CDR3 for alpha chain variable domain of TCR clone 334780 (TRAV8-2, TRAJ44)
CVVSPNTGNASKLTF

SEQ ID NO: 669560 - protein, 12 aa, Homo sapiens
  CDR3 for beta chain variable domain of TCR clone 334780 (TRBV11-2, TRBJ2-2)
CEVPRNTGELFF

SEQ ID NO: 669561 - protein, 18 aa, Homo sapiens
  CDR3 for alpha chain variable domain of TCR clone 334781 (TRAV1-1, TRAJ12)
CLLLLRCERGDSSYKLIF

SEQ ID NO: 669562 - protein, 15 aa, Homo sapiens
  CDR3 for beta chain variable domain of TCR clone 334781 (TRBV18, TRBJ2-5)
CASTDRGPRQETQYL

SEQ ID NO: 669563 - protein, 13 aa, Homo sapiens
  CDR3 for alpha chain variable domain of TCR clone 334782 (TRAV3, TRAJ21)
CAVREPDFNKFYF

SEQ ID NO: 669564 - protein, 19 aa, Homo sapiens
  CDR3 for beta chain variable domain of TCR clone 334782 (TRBV7-2, TRBJ2-3)
CADSFLSRNWGGGTDTQYF

SEQ ID NO: 669565 - protein, 14 aa, Homo sapiens
  CDR3 for alpha chain variable domain of TCR clone 334783 (TRAV13-1, TRAJ44)
CAAKATGTASKLTI

SEQ ID NO: 669566 - protein, 12 aa, Homo sapiens
  CDR3 for beta chain variable domain of TCR clone 334783 (TRBV7-8, TRBJ2-7)
CASSLGDREQYF

SEQ ID NO: 669567 - protein, 11 aa, Homo sapiens
  CDR3 for alpha chain variable domain of TCR clone 334784 (TRAV1-1, TRAJ23)
CAVRQGGKLIF

SEQ ID NO: 669568 - protein, 16 aa, Homo sapiens
  CDR3 for beta chain variable domain of TCR clone 334784 (TRBV20-1, TRBJ2-2)
CSARDDRVGLTGELFF

SEQ ID NO: 669569 - protein, 11 aa, Homo sapiens
  CDR3 for alpha chain variable domain of TCR clone 334785 (TRAV26-1, TRAJ29)
CIVRGNTPLVF

SEQ ID NO: 669570 - protein, 14 aa, Homo sapiens
  CDR3 for beta chain variable domain of TCR clone 334785 (TRBV20-1, TRBJ1-1)
CSAQTRIGGTEAFF

SEQ ID NO: 669571 - protein, 10 aa, Homo sapiens
  CDR3 for alpha chain variable domain of TCR clone 334786 (TRAV12-3, TRAJ34)
CAMSADKLIF

SEQ ID NO: 669572 - protein, 15 aa, Homo sapiens
  CDR3 for beta chain variable domain of TCR clone 334786 (TRBV27, TRBJ2-1)
CASSNGGGSYNEQFF

SEQ ID NO: 669573 - protein, 15 aa, Homo sapiens
  CDR3 for alpha chain variable domain of TCR clone 334787 (TRAV12-3, TRAJ6)
CAMSATTGGSYIPTF

SEQ ID NO: 669574 - protein, 14 aa, Homo sapiens
  CDR3 for beta chain variable domain of TCR clone 334787 (TRBV12-4, TRBJ1-1)
CASSFQSVGTEAFF

SEQ ID NO: 669575 - protein, 12 aa, Homo sapiens
  CDR3 for alpha chain variable domain of TCR clone 334788 (TRAV17, TRAJ26)
CATVGYGQNFVF

SEQ ID NO: 669576 - protein, 18 aa, Homo sapiens
  CDR3 for beta chain variable domain of TCR clone 334788 (TRBV11-2, TRBJ2-3)
CASSLGGASRGAPNTQYF

SEQ ID NO: 669577 - protein, 17 aa, Homo sapiens
  CDR3 for alpha chain variable domain of TCR clone 334789 (TRAV3, TRAJ12)
CAVRDGGRMDSSYKLIF

SEQ ID NO: 669578 - protein, 14 aa, Homo sapiens
  CDR3 for beta chain variable domain of TCR clone 334789 (TRBV7-2, TRBJ2-5)
CASSTGGELKTQYF

SEQ ID NO: 669579 - protein, 13 aa, Homo sapiens
  CDR3 for alpha chain variable domain of TCR clone 334790 (TRAV12-3, TRAJ6)
CAMIPGGSYIPTF

SEQ ID NO: 669580 - protein, 12 aa, Homo sapiens
  CDR3 for beta chain variable domain of TCR clone 334790 (TRBV12-5, TRBJ2-5)
CASGQGVETQYF

SEQ ID NO: 669581 - protein, 14 aa, Homo sapiens
  CDR3 for alpha chain variable domain of TCR clone 334791 (TRAV1-2, TRAJ16)
CAVNRFSDGQKLLF

SEQ ID NO: 669582 - protein, 17 aa, Homo sapiens
  CDR3 for beta chain variable domain of TCR clone 334791 (TRBV19, TRBJ2-7)
CASSISFYDSYPSEQYF

SEQ ID NO: 669583 - protein, 19 aa, Homo sapiens
  CDR3 for alpha chain variable domain of TCR clone 334792 (TRAV25, TRAJ20)
TATQTTDVGILPHDYKLSF

SEQ ID NO: 669584 - protein, 14 aa, Homo sapiens
  CDR3 for beta chain variable domain of TCR clone 334792 (TRBV7-9, TRBJ2-2)
CASSGLADTGELFG

SEQ ID NO: 669585 - protein, 14 aa, Homo sapiens
  CDR3 for alpha chain variable domain of TCR clone 334793 (TRAV12-2, TRAJ9)
CAVNALEGGFKTIF

SEQ ID NO: 669586 - protein, 13 aa, Homo sapiens
  CDR3 for beta chain variable domain of TCR clone 334793 (TRBV19, TRBJ2-5)
CASRDSRRETQYF

SEQ ID NO: 669587 - protein, 14 aa, Homo sapiens
  CDR3 for alpha chain variable domain of TCR clone 334794 (TRAV29/DV5, TRAJ5)
CAAGGDTGRRALTF

SEQ ID NO: 669588 - protein, 14 aa, Homo sapiens
  CDR3 for beta chain variable domain of TCR clone 334794 (TRBV7-2, TRBJ2-7)
CASSPKTSFYEQYF

SEQ ID NO: 669589 - protein, 16 aa, Homo sapiens
  CDR3 for alpha chain variable domain of TCR clone 334795 (TRAV30, TRAJ24)
CGTEIVDADSWGKFPF

SEQ ID NO: 669590 - protein, 16 aa, Homo sapiens
  CDR3 for beta chain variable domain of TCR clone 334795 (TRBV12-4, TRBJ2-5)
CASSFFVRGRQETQYF

SEQ ID NO: 669591 - protein, 12 aa, Homo sapiens
  CDR3 for alpha chain variable domain of TCR clone 334796 (TRAV21, TRAJ11)
CAATSGYSTLTF

SEQ ID NO: 669592 - protein, 15 aa, Homo sapiens
  CDR3 for beta chain variable domain of TCR clone 334796 (TRBV11-2, TRBJ1-2)
CASSLEGVQRNGYTF

SEQ ID NO: 669593 - protein, 13 aa, Homo sapiens
  CDR3 for alpha chain variable domain of TCR clone 334797 (TRAV30, TRAJ24)
CGTVTDSWGKLQF

SEQ ID NO: 669594 - protein, 15 aa, Homo sapiens
  CDR3 for beta chain variable domain of TCR clone 334797 (TRBV7-9, TRBJ1-4)
CASSATGGNNEKLFF

SEQ ID NO: 669595 - protein, 11 aa, Homo sapiens
  CDR3 for alpha chain variable domain of TCR clone 334798 (TRAV1-2, TRAJ11)
CAVRGYSTLTF

SEQ ID NO: 669596 - protein, 14 aa, Homo sapiens
  CDR3 for beta chain variable domain of TCR clone 334798 (TRBV7-6, TRBJ2-1)
CASSLGGGADEQFF

SEQ ID NO: 669597 - protein, 15 aa, Homo sapiens
  CDR3 for alpha chain variable domain of TCR clone 334799 (TRAV2, TRAJ11)
CAVGGRNSGYSTLTF

SEQ ID NO: 669598 - protein, 13 aa, Homo sapiens
  CDR3 for beta chain variable domain of TCR clone 334799 (TRBV5-5, TRBJ1-2)
CASSFWRGEDYTF

SEQ ID NO: 669599 - protein, 23 aa, Homo sapiens
  CDR3 for alpha chain variable domain of TCR clone 334800 (TRAV26-1, TRAJ38)
CIADNAGNNHIQNPDPAGYQLRD

SEQ ID NO: 669600 - protein, 15 aa, Homo sapiens
  CDR3 for beta chain variable domain of TCR clone 334800 (TRBV20-1, TRBJ2-7)
CSARDRVSGTDEQYF

SEQ ID NO: 669601 - protein, 12 aa, Homo sapiens
  CDR3 for alpha chain variable domain of TCR clone 334801 (TRAV16, TRAJ27)
CALNHQCRQINL

SEQ ID NO: 669602 - protein, 16 aa, Homo sapiens
  CDR3 for beta chain variable domain of TCR clone 334801 (TRBV11-2, TRBJ2-5)
CASSGQGYSPQETQYF

SEQ ID NO: 669603 - protein, 15 aa, Homo sapiens
  CDR3 for alpha chain variable domain of TCR clone 334802 (TRAV8-3, TRAJ20)
CAVEANGSNDYKLSF

SEQ ID NO: 669604 - protein, 12 aa, Homo sapiens
  CDR3 for beta chain variable domain of TCR clone 334802 (TRBV7-2, TRBJ1-2)
CASRDSIYGYTF

SEQ ID NO: 669605 - protein, 14 aa, Homo sapiens
  CDR3 for alpha chain variable domain of TCR clone 334803 (TRAV16, TRAJ3)
CALSQYSSASKIIF

SEQ ID NO: 669606 - protein, 13 aa, Homo sapiens
  CDR3 for beta chain variable domain of TCR clone 334803 (TRBV20-1, TRBJ1-1)
CSARGGGNTEAFF

SEQ ID NO: 669607 - protein, 14 aa, Homo sapiens
  CDR3 for alpha chain variable domain of TCR clone 334804 (TRAV12-2, TRAJ40)
CAVKIPSGTYKYIF

SEQ ID NO: 669608 - protein, 17 aa, Homo sapiens
  CDR3 for beta chain variable domain of TCR clone 334804 (TRBV7-8, TRBJ2-6)
CASSAGAGGAGANVLTF

SEQ ID NO: 669609 - protein, 16 aa, Homo sapiens
  CDR3 for alpha chain variable domain of TCR clone 334805 (TRAV38-2/DV8, TRAJ57)
CAYRSVGQGGSEKLVF

SEQ ID NO: 669610 - protein, 17 aa, Homo sapiens
  CDR3 for beta chain variable domain of TCR clone 334805 (TRBV20-1, TRBJ2-2)
CSASGSGQGGLTGELFF

SEQ ID NO: 669611 - protein, 12 aa, Homo sapiens
  CDR3 for alpha chain variable domain of TCR clone 334806 (TRAV12-3, TRAJ17)
CAMTLTGNKLTF

SEQ ID NO: 669612 - protein, 16 aa, Homo sapiens
  CDR3 for beta chain variable domain of TCR clone 334806 (TRBV11-1, TRBJ1-1)
CASSPRGAHMNSEAFF

SEQ ID NO: 669613 - protein, 20 aa, Homo sapiens
  CDR3 for alpha chain variable domain of TCR clone 334807 (TRAV30, TRAJ32)
RNLLLRHREGYGDATNKLIF

SEQ ID NO: 669614 - protein, 13 aa, Homo sapiens
  CDR3 for beta chain variable domain of TCR clone 334807 (TRBV10-3, TRBJ2-7)
CASKLAVNYEQYF

SEQ ID NO: 669615 - protein, 14 aa, Homo sapiens
  CDR3 for alpha chain variable domain of TCR clone 334808 (TRAV12-3, TRAJ58)
CAMSTDTSGSRLTF

SEQ ID NO: 669616 - protein, 13 aa, Homo sapiens
  CDR3 for beta chain variable domain of TCR clone 334808 (TRBV27, TRBJ2-3)
CASSWGRTDTQYF

SEQ ID NO: 669617 - protein, 15 aa, Homo sapiens
  CDR3 for alpha chain variable domain of TCR clone 334809 (TRAV21, TRAJ40)
CAVRPQTSGTYKYIF

SEQ ID NO: 669618 - protein, 13 aa, Homo sapiens
  CDR3 for beta chain variable domain of TCR clone 334809 (TRBV20-1, TRBJ2-7)
CSATHTSGYEQYF

SEQ ID NO: 669619 - protein, 12 aa, Homo sapiens
  CDR3 for alpha chain variable domain of TCR clone 334810 (TRAV12-3, TRAJ17)
CAMTLTGNKLTF

SEQ ID NO: 669620 - protein, 12 aa, Homo sapiens
  CDR3 for beta chain variable domain of TCR clone 334810 (TRBV7-9, TRBJ1-1)
CASSLVETEAFF

SEQ ID NO: 669621 - protein, 15 aa, Homo sapiens
  CDR3 for alpha chain variable domain of TCR clone 334811 (TRAV26-1, TRAJ21)
CVVRVPNYNFNKFYF

SEQ ID NO: 669622 - protein, 16 aa, Homo sapiens
  CDR3 for beta chain variable domain of TCR clone 334811 (TRBV7-9, TRBJ2-3)
CASSWQGNPGTDTQYF

SEQ ID NO: 669623 - protein, 14 aa, Homo sapiens
  CDR3 for alpha chain variable domain of TCR clone 334812 (TRAV12-2, TRAJ13)
FAVKKTGGYQKVTF

SEQ ID NO: 669624 - protein, 15 aa, Homo sapiens
  CDR3 for beta chain variable domain of TCR clone 334812 (TRBV19, TRBJ1-6)
CASSTQGAVGSPLHF

SEQ ID NO: 669625 - protein, 12 aa, Homo sapiens
  CDR3 for alpha chain variable domain of TCR clone 334813 (TRAV8-3, TRAJ26)
CAGDNYGQNFVF

SEQ ID NO: 669626 - protein, 15 aa, Homo sapiens
  CDR3 for beta chain variable domain of TCR clone 334813 (TRBV7-2, TRBJ1-1)
CASSFAGDRDTEAFF

SEQ ID NO: 669627 - protein, 14 aa, Homo sapiens
  CDR3 for alpha chain variable domain of TCR clone 334814 (TRAV13-1, TRAJ40)
CAAHPTSGTYKYIF

SEQ ID NO: 669628 - protein, 18 aa, Homo sapiens
  CDR3 for beta chain variable domain of TCR clone 334814 (TRBV11-2, TRBJ2-3)
CASSLGGASRGAPNTQYF

SEQ ID NO: 669629 - protein, 16 aa, Homo sapiens
  CDR3 for alpha chain variable domain of TCR clone 334815 (TRAV16, TRAJ42)
CARKMNYGGSQGNLIF

SEQ ID NO: 669630 - protein, 15 aa, Homo sapiens
  CDR3 for beta chain variable domain of TCR clone 334815 (TRBV20-1, TRBJ2-7)
CSAREGRDSLYEHYF

SEQ ID NO: 669631 - protein, 14 aa, Homo sapiens
  CDR3 for alpha chain variable domain of TCR clone 334816 (TRAV9-2, TRAJ39)
CALYIYNAGNMLPF

SEQ ID NO: 669632 - protein, 13 aa, Homo sapiens
  CDR3 for beta chain variable domain of TCR clone 334816 (TRBV20-1, TRBJ1-1)
CSARGGGNTEAFF

SEQ ID NO: 669633 - protein, 13 aa, Homo sapiens
  CDR3 for alpha chain variable domain of TCR clone 334817 (TRAV9-2, TRAJ49)
CALIQIGGNKFYF

SEQ ID NO: 669634 - protein, 13 aa, Homo sapiens
  CDR3 for beta chain variable domain of TCR clone 334817 (TRBV5-5, TRBJ1-2)
CASSFWRGEDYTF

SEQ ID NO: 669635 - protein, 14 aa, Homo sapiens
  CDR3 for alpha chain variable domain of TCR clone 334818 (TRAV12-1, TRAJ17)
CVVNYKSTGNKLTF

SEQ ID NO: 669636 - protein, 17 aa, Homo sapiens
  CDR3 for beta chain variable domain of TCR clone 334818 (TRBV20-1, TRBJ2-1)
CSASSSGLAGSYNEQFF

SEQ ID NO: 669637 - protein, 11 aa, Homo sapiens
  CDR3 for alpha chain variable domain of TCR clone 334819 (TRAV3, TRAJ21)
CAMGNFDKFYF

SEQ ID NO: 669638 - protein, 16 aa, Homo sapiens
  CDR3 for beta chain variable domain of TCR clone 334819 (TRBV19, TRBJ2-1)
CASSKAGPSSYNEQFL

SEQ ID NO: 669639 - protein, 13 aa, Homo sapiens
  CDR3 for alpha chain variable domain of TCR clone 334820 (TRAV21, TRAJ26)
CAVIGNYGQNFVF

SEQ ID NO: 669640 - protein, 19 aa, Homo sapiens
  CDR3 for beta chain variable domain of TCR clone 334820 (TRBV11-3, TRBJ2-2)
CASSTRPGAKTTNTGELFF

SEQ ID NO: 669641 - protein, 14 aa, Homo sapiens
  CDR3 for alpha chain variable domain of TCR clone 334821 (TRAV12-3, TRAJ10)
SHLPLTGGGNKLTF

SEQ ID NO: 669642 - protein, 14 aa, Homo sapiens
  CDR3 for beta chain variable domain of TCR clone 334821 (TRBV7-6, TRBJ2-1)
CASSLGGGADEQFF

SEQ ID NO: 669643 - protein, 11 aa, Homo sapiens
  CDR3 for alpha chain variable domain of TCR clone 334822 (TRAV35, TRAJ30)
CAPVGDDKIIF

SEQ ID NO: 669644 - protein, 15 aa, Homo sapiens
  CDR3 for beta chain variable domain of TCR clone 334822 (TRBV20-1, TRBJ2-7)
CSARDRVSGMDEQHF

SEQ ID NO: 669645 - protein, 11 aa, Homo sapiens
  CDR3 for alpha chain variable domain of TCR clone 334823 (TRAV21, TRAJ33)
YVVLSNYQLIW

SEQ ID NO: 669646 - protein, 15 aa, Homo sapiens
  CDR3 for beta chain variable domain of TCR clone 334823 (TRBV11-2, TRBJ2-7)
CASSLMVGGSYEQYF

SEQ ID NO: 669647 - protein, 16 aa, Homo sapiens
  CDR3 for alpha chain variable domain of TCR clone 334824 (TRAV38-1, TRAJ37)
CAFQGDGSSNTGKLIF

SEQ ID NO: 669648 - protein, 13 aa, Homo sapiens
  CDR3 for beta chain variable domain of TCR clone 334824 (TRBV12-4, TRBJ2-5)
CASSLFRRETQYF

SEQ ID NO: 669649 - protein, 14 aa, Homo sapiens
  CDR3 for alpha chain variable domain of TCR clone 334825 (TRAV12-2, TRAJ17)
CAVLFKAAGNKLTF

SEQ ID NO: 669650 - protein, 17 aa, Homo sapiens
  CDR3 for beta chain variable domain of TCR clone 334825 (TRBV20-1, TRBJ2-2)
CSASGSGQGGVPGELFF

SEQ ID NO: 669651 - protein, 16 aa, Homo sapiens
  CDR3 for alpha chain variable domain of TCR clone 334826 (TRAV39, TRAJ32)
CAVDMEYGGATNKLIF

SEQ ID NO: 669652 - protein, 15 aa, Homo sapiens
  CDR3 for beta chain variable domain of TCR clone 334826 (TRBV12-4, TRBJ2-3)
CASSLVAGAADTQYF

SEQ ID NO: 669653 - protein, 14 aa, Homo sapiens
  CDR3 for alpha chain variable domain of TCR clone 334827 (TRAV23/DV6, TRAJ37)
CAASTSSNTGKLIF

SEQ ID NO: 669654 - protein, 20 aa, Homo sapiens
  CDR3 for beta chain variable domain of TCR clone 334827 (TRBV4-2, TRBJ2-7)
CASSQASGGNLRAVLRAGHQ

SEQ ID NO: 669655 - protein, 14 aa, Homo sapiens
  CDR3 for alpha chain variable domain of TCR clone 334828 (TRAV12-2, TRAJ17)
CAVLFKAAGNKLTF

SEQ ID NO: 669656 - protein, 13 aa, Homo sapiens
  CDR3 for beta chain variable domain of TCR clone 334828 (TRBV2, TRBJ1-1)
CASRWTVNTEAFF

SEQ ID NO: 669657 - protein, 12 aa, Homo sapiens
  CDR3 for alpha chain variable domain of TCR clone 334829 (TRAV2, TRAJ10)
CASTGEGNKLTF

SEQ ID NO: 669658 - protein, 14 aa, Homo sapiens
  CDR3 for beta chain variable domain of TCR clone 334829 (TRBV7-2, TRBJ2-2)
CASRGQGAAGELFF

SEQ ID NO: 669659 - protein, 14 aa, Homo sapiens
  CDR3 for alpha chain variable domain of TCR clone 334830 (TRAV12-2, TRAJ33)
CAVKRARSNYQLIW

SEQ ID NO: 669660 - protein, 15 aa, Homo sapiens
  CDR3 for beta chain variable domain of TCR clone 334830 (TRBV7-9, TRBJ1-5)
CASSQGHQPNQTQHF

SEQ ID NO: 669661 - protein, 10 aa, Homo sapiens
  CDR3 for alpha chain variable domain of TCR clone 334831 (TRAV26-1, TRAJ22)
CIAGSRQLTF

SEQ ID NO: 669662 - protein, 13 aa, Homo sapiens
  CDR3 for beta chain variable domain of TCR clone 334831 (TRBV29-1, TRBJ2-1)
CSVEGGRVNEQFF

SEQ ID NO: 669663 - protein, 16 aa, Homo sapiens
  CDR3 for alpha chain variable domain of TCR clone 334832 (TRAV12-2, TRAJ6)
CAAPLAGSGGSYTPTF

SEQ ID NO: 669664 - protein, 10 aa, Homo sapiens
  CDR3 for beta chain variable domain of TCR clone 334832 (TRBV28, TRBJ1-2)
CASSSDRAVF

SEQ ID NO: 669665 - protein, 18 aa, Homo sapiens
  CDR3 for alpha chain variable domain of TCR clone 334833 (TRAV8-4, TRAJ52)
CAVASFNAGGTSYGKLTF

SEQ ID NO: 669666 - protein, 14 aa, Homo sapiens
  CDR3 for beta chain variable domain of TCR clone 334833 (TRBV18, TRBJ1-5)
CASSRQQRNQTQHF

SEQ ID NO: 669667 - protein, 12 aa, Homo sapiens
  CDR3 for alpha chain variable domain of TCR clone 334834 (TRAV8-4, TRAJ37)
CAVISNTGKLIF

SEQ ID NO: 669668 - protein, 16 aa, Homo sapiens
  CDR3 for beta chain variable domain of TCR clone 334834 (TRBV7-2, TRBJ2-3)
CASSLVGDASTDTQYF

SEQ ID NO: 669669 - protein, 14 aa, Homo sapiens
  CDR3 for alpha chain variable domain of TCR clone 334835 (TRAV1-2, TRAJ16)
CAVNRFSDGQKLLF

SEQ ID NO: 669670 - protein, 15 aa, Homo sapiens
  CDR3 for beta chain variable domain of TCR clone 334835 (TRBV4-2, TRBJ2-7)
CASSTTSGKFYEQYF

SEQ ID NO: 669671 - protein, 16 aa, Homo sapiens
  CDR3 for alpha chain variable domain of TCR clone 334836 (TRAV3, TRAJ27)
CAVRDPQGTTAGKSTF

SEQ ID NO: 669672 - protein, 15 aa, Homo sapiens
  CDR3 for beta chain variable domain of TCR clone 334836 (TRBV20-1, TRBJ2-7)
CSARDRVSGMDEQYF

SEQ ID NO: 669673 - protein, 18 aa, Homo sapiens
  CDR3 for alpha chain variable domain of TCR clone 334837 (TRAV12-3, TRAJ52)
CAMSVGGAGGTSYGKLTL

SEQ ID NO: 669674 - protein, 14 aa, Homo sapiens
  CDR3 for beta chain variable domain of TCR clone 334837 (TRBV7-2, TRBJ1-3)
CASSRGGTGNTIYF

SEQ ID NO: 669675 - protein, 16 aa, Homo sapiens
  CDR3 for alpha chain variable domain of TCR clone 334838 (TRAV16, TRAJ37)
CSKWPHGSSNTGKLIF

SEQ ID NO: 669676 - protein, 13 aa, Homo sapiens
  CDR3 for beta chain variable domain of TCR clone 334838 (TRBV7-2, TRBJ2-2)
CASSLAVTGELFF

SEQ ID NO: 669677 - protein, 14 aa, Homo sapiens
  CDR3 for alpha chain variable domain of TCR clone 334839 (TRAV26-1, TRAJ38)
CIADNAGNNRKLLW

SEQ ID NO: 669678 - protein, 14 aa, Homo sapiens
  CDR3 for beta chain variable domain of TCR clone 334839 (TRBV11-2, TRBJ2-5)
CASSRTGGIETQYF

SEQ ID NO: 669679 - protein, 15 aa, Homo sapiens
  CDR3 for alpha chain variable domain of TCR clone 334840 (TRAV1-2, TRAJ24)
CAVSGSTDSWGKFQF

SEQ ID NO: 669680 - protein, 16 aa, Homo sapiens
  CDR3 for beta chain variable domain of TCR clone 334840 (TRBV20-1, TRBJ2-1)
CSAATQGPVSYNEQFF

SEQ ID NO: 669681 - protein, 12 aa, Homo sapiens
  CDR3 for alpha chain variable domain of TCR clone 334841 (TRAV17, TRAJ20)
CATYYNDYKLSF

SEQ ID NO: 669682 - protein, 11 aa, Homo sapiens
  CDR3 for beta chain variable domain of TCR clone 334841 (TRBV4-1, TRBJ2-2)
CASEHTGKLFF

SEQ ID NO: 669683 - protein, 17 aa, Homo sapiens
  CDR3 for alpha chain variable domain of TCR clone 334842 (TRAV13-1, TRAJ28)
CAASPPYSGAGSYQHTF

SEQ ID NO: 669684 - protein, 15 aa, Homo sapiens
  CDR3 for beta chain variable domain of TCR clone 334842 (TRBV11-2, TRBJ2-1)
CASSLTSGGYNEQFF

SEQ ID NO: 669685 - protein, 13 aa, Homo sapiens
  CDR3 for alpha chain variable domain of TCR clone 334843 (TRAV13-1, TRAJ5)
CAAEHTGRRALTF

SEQ ID NO: 669686 - protein, 16 aa, Homo sapiens
  CDR3 for beta chain variable domain of TCR clone 334843 (TRBV7-3, TRBJ2-2)
CASSLKRGTLSGELFF

SEQ ID NO: 669687 - protein, 15 aa, Homo sapiens
  CDR3 for alpha chain variable domain of TCR clone 334844 (TRAV17, TRAJ45)
CATVELGGGADGLTF

SEQ ID NO: 669688 - protein, 14 aa, Homo sapiens
  CDR3 for beta chain variable domain of TCR clone 334844 (TRBV3-1, TRBJ2-5)
CASSQAVRQETQYF

SEQ ID NO: 669689 - protein, 16 aa, Homo sapiens
  CDR3 for alpha chain variable domain of TCR clone 334845 (TRAV30, TRAJ24)
CGTEIVDADSWGNFQF

SEQ ID NO: 669690 - protein, 16 aa, Homo sapiens
  CDR3 for beta chain variable domain of TCR clone 334845 (TRBV7-3, TRBJ2-2)
CASSYPPGDETGELFF

SEQ ID NO: 669691 - protein, 13 aa, Homo sapiens
  CDR3 for alpha chain variable domain of TCR clone 334846 (TRAV27, TRAJ49)
CAPRPYTGNQFYF

SEQ ID NO: 669692 - protein, 18 aa, Homo sapiens
  CDR3 for beta chain variable domain of TCR clone 334846 (TRBV7-3, TRBJ2-5)
CASSLGGAAQGRWETQCF

SEQ ID NO: 669693 - protein, 15 aa, Homo sapiens
  CDR3 for alpha chain variable domain of TCR clone 334847 (TRAV29/DV5, TRAJ24)
CAASVATDSWGKFQF

SEQ ID NO: 669694 - protein, 17 aa, Homo sapiens
  CDR3 for beta chain variable domain of TCR clone 334847 (TRBV7-2, TRBJ2-7)
CASSLGTGTSGRYEQYF

SEQ ID NO: 669695 - protein, 15 aa, Homo sapiens
  CDR3 for alpha chain variable domain of TCR clone 334848 (TRAV12-2, TRAJ53)
CAVNGGGGSNYNLTF

SEQ ID NO: 669696 - protein, 12 aa, Homo sapiens
  CDR3 for beta chain variable domain of TCR clone 334848 (TRBV11-2, TRBJ2-1)
CASSPGNNEQFF

SEQ ID NO: 669697 - protein, 15 aa, Homo sapiens
  CDR3 for alpha chain variable domain of TCR clone 334849 (TRAV27, TRAJ53)
CRAINSGGSNYKLTF

SEQ ID NO: 669698 - protein, 14 aa, Homo sapiens
  CDR3 for beta chain variable domain of TCR clone 334849 (TRBV7-3, TRBJ2-1)
CASSLAEGTNEQFF

SEQ ID NO: 669699 - protein, 13 aa, Homo sapiens
  CDR3 for alpha chain variable domain of TCR clone 334850 (TRAV27, TRAJ54)
CAGAGQGAQKLVF

SEQ ID NO: 669700 - protein, 15 aa, Homo sapiens
  CDR3 for beta chain variable domain of TCR clone 334850 (TRBV10-3, TRBJ2-3)
CAISLTSGGTDTQYF

SEQ ID NO: 669701 - protein, 14 aa, Homo sapiens
  CDR3 for alpha chain variable domain of TCR clone 334851 (TRAV17, TRAJ22)
CATSPSGSARQLTF

SEQ ID NO: 669702 - protein, 14 aa, Homo sapiens
  CDR3 for beta chain variable domain of TCR clone 334851 (TRBV7-3, TRBJ2-2)
CASSSGGYTGELFF

SEQ ID NO: 669703 - protein, 12 aa, Homo sapiens
  CDR3 for alpha chain variable domain of TCR clone 334852 (TRAV13-1, TRAJ48)
CAANFGNEKLTF

SEQ ID NO: 669704 - protein, 16 aa, Homo sapiens
  CDR3 for beta chain variable domain of TCR clone 334852 (TRBV12-4, TRBJ2-7)
CASSPEGQGSSYEQYF

SEQ ID NO: 669705 - protein, 13 aa, Homo sapiens
  CDR3 for alpha chain variable domain of TCR clone 334853 (TRAV36/DV7, TRAJ49)
CAGDSNTGNPFYF

SEQ ID NO: 669706 - protein, 16 aa, Homo sapiens
  CDR3 for beta chain variable domain of TCR clone 334853 (TRBV5-1, TRBJ1-1)
CASSKTGTEVGTGAFF

SEQ ID NO: 669707 - protein, 15 aa, Homo sapiens
  CDR3 for alpha chain variable domain of TCR clone 334854 (TRAV13-2, TRAJ50)
CAEEPLKTSYDKVIF

SEQ ID NO: 669708 - protein, 16 aa, Homo sapiens
  CDR3 for beta chain variable domain of TCR clone 334854 (TRBV13, TRBJ2-2)
CASSPRTGEHTGELFF

SEQ ID NO: 669709 - protein, 15 aa, Homo sapiens
  CDR3 for alpha chain variable domain of TCR clone 334855 (TRAV23/DV6, TRAJ30)
CAASSQESRDDKIIF

SEQ ID NO: 669710 - protein, 17 aa, Homo sapiens
  CDR3 for beta chain variable domain of TCR clone 334855 (TRBV4-3, TRBJ2-1)
CASSKFSSGRASGEQFF

SEQ ID NO: 669711 - protein, 13 aa, Homo sapiens
  CDR3 for alpha chain variable domain of TCR clone 334856 (TRAV1-2, TRAJ9)
CAALNTGGFKTIF

SEQ ID NO: 669712 - protein, 13 aa, Homo sapiens
  CDR3 for beta chain variable domain of TCR clone 334856 (TRBV19, TRBJ1-2)
CASSVAGQGGYTF

SEQ ID NO: 669713 - protein, 17 aa, Homo sapiens
  CDR3 for alpha chain variable domain of TCR clone 334857 (TRAV13-1, TRAJ31)
CAPRDRLMFGDGTQLAV

SEQ ID NO: 669714 - protein, 12 aa, Homo sapiens
  CDR3 for beta chain variable domain of TCR clone 334857 (TRBV7-9, TRBJ2-7)
CASRLEGYEQYF

SEQ ID NO: 669715 - protein, 13 aa, Homo sapiens
  CDR3 for alpha chain variable domain of TCR clone 334858 (TRAV23/DV6, TRAJ16)
CAASISDGQKLLF

SEQ ID NO: 669716 - protein, 15 aa, Homo sapiens
  CDR3 for beta chain variable domain of TCR clone 334858 (TRBV2, TRBJ2-2)
CASSMETVGTGELFF

SEQ ID NO: 669717 - protein, 14 aa, Homo sapiens
  CDR3 for alpha chain variable domain of TCR clone 334859 (TRAV12-1, TRAJ17)
CVVNYKAAGNQLTF

SEQ ID NO: 669718 - protein, 17 aa, Homo sapiens
  CDR3 for beta chain variable domain of TCR clone 334859 (TRBV20-1, TRBJ2-1)
CSASSSVLAGSYNEQFF

SEQ ID NO: 669719 - protein, 14 aa, Homo sapiens
  CDR3 for alpha chain variable domain of TCR clone 334860 (TRAV1-2, TRAJ6)
CTVSLPGGSYIPTF

SEQ ID NO: 669720 - protein, 14 aa, Homo sapiens
  CDR3 for beta chain variable domain of TCR clone 334860 (TRBV12-5, TRBJ2-5)
CASGSRTHQETQYF

SEQ ID NO: 669721 - protein, 22 aa, Homo sapiens
  CDR3 for alpha chain variable domain of TCR clone 334861 (TRAV26-1, TRAJ30)
CIVRGRTEMTRSSLEKGHDFIF

SEQ ID NO: 669722 - protein, 18 aa, Homo sapiens
  CDR3 for beta chain variable domain of TCR clone 334861 (TRBV4-1, TRBJ1-5)
CASSQDPRGQGLNQPQHF

SEQ ID NO: 669723 - protein, 11 aa, Homo sapiens
  CDR3 for alpha chain variable domain of TCR clone 334862 (TRAV21, TRAJ34)
CAHYNTDKLIF

SEQ ID NO: 669724 - protein, 12 aa, Homo sapiens
  CDR3 for beta chain variable domain of TCR clone 334862 (TRBV24-1, TRBJ2-3)
CATSDSTDTQYF

SEQ ID NO: 669725 - protein, 12 aa, Homo sapiens
  CDR3 for alpha chain variable domain of TCR clone 334863 (TRAV8-3, TRAJ26)
CAGDNYGQNFVF

SEQ ID NO: 669726 - protein, 13 aa, Homo sapiens
  CDR3 for beta chain variable domain of TCR clone 334863 (TRBV29-1, TRBJ2-5)
CSVLLASGETQYF

SEQ ID NO: 669727 - protein, 16 aa, Homo sapiens
  CDR3 for alpha chain variable domain of TCR clone 334864 (TRAV17, TRAJ52)
CATGIIGGTSYGKLTF

SEQ ID NO: 669728 - protein, 14 aa, Homo sapiens
  CDR3 for beta chain variable domain of TCR clone 334864 (TRBV7-3, TRBJ2-2)
GASSSGGYTGELFF

SEQ ID NO: 669729 - protein, 13 aa, Homo sapiens
  CDR3 for alpha chain variable domain of TCR clone 334865 (TRAV2, TRAJ15)
CAVASQAGTALIF

SEQ ID NO: 669730 - protein, 16 aa, Homo sapiens
  CDR3 for beta chain variable domain of TCR clone 334865 (TRBV5-1, TRBJ1-1)
CASSSGGNSLNTEAFY

SEQ ID NO: 669731 - protein, 15 aa, Homo sapiens
  CDR3 for alpha chain variable domain of TCR clone 334866 (TRAV26-1, TRAJ29)
CIVRVEGSGSTPLVF

SEQ ID NO: 669732 - protein, 15 aa, Homo sapiens
  CDR3 for beta chain variable domain of TCR clone 334866 (TRBV28, TRBJ2-5)
CASSPGQGSVETQYF

SEQ ID NO: 669733 - protein, 13 aa, Homo sapiens
  CDR3 for alpha chain variable domain of TCR clone 334867 (TRAV9-2, TRAJ44)
CALLTGTASKLTF

SEQ ID NO: 669734 - protein, 15 aa, Homo sapiens
  CDR3 for beta chain variable domain of TCR clone 334867 (TRBV11-2, TRBJ1-3)
CASSIWGSYGNTIYF

SEQ ID NO: 669735 - protein, 15 aa, Homo sapiens
  CDR3 for alpha chain variable domain of TCR clone 334868 (TRAV26-1, TRAJ39)
CIVRDGSNAGNMLTI

SEQ ID NO: 669736 - protein, 16 aa, Homo sapiens
  CDR3 for beta chain variable domain of TCR clone 334868 (TRBV7-2, TRBJ1-3)
CASSRLEASSGNTMYF

SEQ ID NO: 669737 - protein, 12 aa, Homo sapiens
  CDR3 for alpha chain variable domain of TCR clone 334869 (TRAV8-3, TRAJ20)
CAVGGGDYKISF

SEQ ID NO: 669738 - protein, 12 aa, Homo sapiens
  CDR3 for beta chain variable domain of TCR clone 334869 (TRBV3-1, TRBJ2-7)
CASSQVRYEQYF

SEQ ID NO: 669739 - protein, 13 aa, Homo sapiens
  CDR3 for alpha chain variable domain of TCR clone 334870 (TRAV8-6, TRAJ49)
CAVITNTGNQFYF

SEQ ID NO: 669740 - protein, 13 aa, Homo sapiens
  CDR3 for beta chain variable domain of TCR clone 334870 (TRBV7-9, TRBJ2-5)
CASLPSGRETQYI

SEQ ID NO: 669741 - protein, 15 aa, Homo sapiens
  CDR3 for alpha chain variable domain of TCR clone 334871 (TRAV8-4, TRAJ11)
CAVSRALSGYSTLTF

SEQ ID NO: 669742 - protein, 15 aa, Homo sapiens
  CDR3 for beta chain variable domain of TCR clone 334871 (TRBV12-4, TRBJ2-5)
CASSPPTGLQETQYF

SEQ ID NO: 669743 - protein, 13 aa, Homo sapiens
  CDR3 for alpha chain variable domain of TCR clone 334872 (TRAV35, TRAJ48)
CWGLNFGNEKLTF

SEQ ID NO: 669744 - protein, 15 aa, Homo sapiens
  CDR3 for beta chain variable domain of TCR clone 334872 (TRBV6-1, TRBJ2-3)
CASSERGGITDTQYF

SEQ ID NO: 669745 - protein, 10 aa, Homo sapiens
  CDR3 for alpha chain variable domain of TCR clone 334873 (TRAV13-1, TRAJ7)
LIGGNNRLAL

SEQ ID NO: 669746 - protein, 16 aa, Homo sapiens
  CDR3 for beta chain variable domain of TCR clone 334873 (TRBV4-1, TRBJ1-2)
CASSQDAGQVLYGYTF

SEQ ID NO: 669747 - protein, 16 aa, Homo sapiens
  CDR3 for alpha chain variable domain of TCR clone 334874 (TRAV3, TRAJ10)
CAVRDMRAGGGNKLTC

SEQ ID NO: 669748 - protein, 13 aa, Homo sapiens
  CDR3 for beta chain variable domain of TCR clone 334874 (TRBV6-1, TRBJ1-1)
CASSRQGNTEAFF

SEQ ID NO: 669749 - protein, 14 aa, Homo sapiens
  CDR3 for alpha chain variable domain of TCR clone 334875 (TRAV26-1, TRAJ38)
CIADNAGNNRKLIW

SEQ ID NO: 669750 - protein, 14 aa, Homo sapiens
  CDR3 for beta chain variable domain of TCR clone 334875 (TRBV7-2, TRBJ2-7)
CASRSQGAAYVQYF

SEQ ID NO: 669751 - protein, 16 aa, Homo sapiens
  CDR3 for alpha chain variable domain of TCR clone 334876 (TRAV23/DV6, TRAJ21)
CAAISGGGTTSTNFTL

SEQ ID NO: 669752 - protein, 11 aa, Homo sapiens
  CDR3 for beta chain variable domain of TCR clone 334876 (TRBV7-8, TRBJ2-7)
CASSLSREQYF

SEQ ID NO: 669753 - protein, 14 aa, Homo sapiens
  CDR3 for alpha chain variable domain of TCR clone 334877 (TRAV12-2, TRAJ40)
CAVKIPSGTYTYIF

SEQ ID NO: 669754 - protein, 20 aa, Homo sapiens
  CDR3 for beta chain variable domain of TCR clone 334877 (TRBV28, TRBJ2-1)
CASTPIGRSPGLAGGNEQFF

SEQ ID NO: 669755 - protein, 13 aa, Homo sapiens
  CDR3 for alpha chain variable domain of TCR clone 334878 (TRAV3, TRAJ3)
CAVADSSASKIIF

SEQ ID NO: 669756 - protein, 14 aa, Homo sapiens
  CDR3 for beta chain variable domain of TCR clone 334878 (TRBV2, TRBJ2-5)
CASSEGSYQETQYF

SEQ ID NO: 669757 - protein, 13 aa, Homo sapiens
  CDR3 for alpha chain variable domain of TCR clone 334879 (TRAV38-2/DV8, TRAJ45)
CAYVGGGADGLTF

SEQ ID NO: 669758 - protein, 14 aa, Homo sapiens
  CDR3 for beta chain variable domain of TCR clone 334879 (TRBV11-2, TRBJ2-3)
CASSRLARTDTQYF

SEQ ID NO: 669759 - protein, 12 aa, Homo sapiens
  CDR3 for alpha chain variable domain of TCR clone 334880 (TRAV16, TRAJ10)
CSRTGGGNKLTF

SEQ ID NO: 669760 - protein, 19 aa, Homo sapiens
  CDR3 for beta chain variable domain of TCR clone 334880 (TRBV25-1, TRBJ2-2)
RAILVCRVDRGRKTGELFF

SEQ ID NO: 669761 - protein, 15 aa, Homo sapiens
  CDR3 for alpha chain variable domain of TCR clone 334881 (TRAV3, TRAJ22)
CAVRDRGGSARQLTF

SEQ ID NO: 669762 - protein, 13 aa, Homo sapiens
  CDR3 for beta chain variable domain of TCR clone 334881 (TRBV7-9, TRBJ2-5)
CASLSPGQETQYF

SEQ ID NO: 669763 - protein, 14 aa, Homo sapiens
  CDR3 for alpha chain variable domain of TCR clone 334882 (TRAV13-1, TRAJ40)
CEARMTSGTYKYIF

SEQ ID NO: 669764 - protein, 15 aa, Homo sapiens
  CDR3 for beta chain variable domain of TCR clone 334882 (TRBV7-3, TRBJ2-1)
CASSPTGGGEGEQFF

SEQ ID NO: 669765 - protein, 11 aa, Homo sapiens
  CDR3 for alpha chain variable domain of TCR clone 334883 (TRAV21, TRAJ49)
CAVKDGNQFYF

SEQ ID NO: 669766 - protein, 12 aa, Homo sapiens
  CDR3 for beta chain variable domain of TCR clone 334883 (TRBV11-2, TRBJ2-5)
CASSLVGETQYF

SEQ ID NO: 669767 - protein, 13 aa, Homo sapiens
  CDR3 for alpha chain variable domain of TCR clone 334884 (TRAV8-2, TRAJ43)
CVVSDQGDNDMRF

SEQ ID NO: 669768 - protein, 18 aa, Homo sapiens
  CDR3 for beta chain variable domain of TCR clone 334884 (TRBV7-9, TRBJ2-3)
CASSLPINGQISTDTQYF

SEQ ID NO: 669769 - protein, 13 aa, Homo sapiens
  CDR3 for alpha chain variable domain of TCR clone 334885 (TRAV26-1, TRAJ40)
CIVRVEGTYKYIF

SEQ ID NO: 669770 - protein, 18 aa, Homo sapiens
  CDR3 for beta chain variable domain of TCR clone 334885 (TRBV11-2, TRBJ2-3)
CASSLGGASRGAPNTQYF

SEQ ID NO: 669771 - protein, 14 aa, Homo sapiens
  CDR3 for alpha chain variable domain of TCR clone 334886 (TRAV12-2, TRAJ13)
CAVKKTGGYQKVTF

SEQ ID NO: 669772 - protein, 14 aa, Homo sapiens
  CDR3 for beta chain variable domain of TCR clone 334886 (TRBV4-1, TRBJ2-2)
CASSQAVNTGDLFF

SEQ ID NO: 669773 - protein, 14 aa, Homo sapiens
  CDR3 for alpha chain variable domain of TCR clone 334887 (TRAV17, TRAJ57)
CATDPQGGSEKLVF

SEQ ID NO: 669774 - protein, 12 aa, Homo sapiens
  CDR3 for beta chain variable domain of TCR clone 334887 (TRBV20-1, TRBJ2-1)
CSARLGTDEQFF

SEQ ID NO: 669775 - protein, 14 aa, Homo sapiens
  CDR3 for alpha chain variable domain of TCR clone 334888 (TRAV2, TRAJ29)
CAVESYSGNTPLVF

SEQ ID NO: 669776 - protein, 17 aa, Homo sapiens
  CDR3 for beta chain variable domain of TCR clone 334888 (TRBV11-2, TRBJ2-1)
CASSLYPPGVEYNEQFF

SEQ ID NO: 669777 - protein, 16 aa, Homo sapiens
  CDR3 for alpha chain variable domain of TCR clone 334889 (TRAV30, TRAJ24)
CGTEIVDADSWGKFQF

SEQ ID NO: 669778 - protein, 14 aa, Homo sapiens
  CDR3 for beta chain variable domain of TCR clone 334889 (TRBV19, TRBJ2-1)
YASPTFVLSGEQFF

SEQ ID NO: 669779 - protein, 16 aa, Homo sapiens
  CDR3 for alpha chain variable domain of TCR clone 334890 (TRAV3, TRAJ18)
CAVRDGRGSTLGRLYF

SEQ ID NO: 669780 - protein, 15 aa, Homo sapiens
  CDR3 for beta chain variable domain of TCR clone 334890 (TRBV7-9, TRBJ1-6)
CDSSSPGRGNSPLHF

SEQ ID NO: 669781 - protein, 15 aa, Homo sapiens
  CDR3 for alpha chain variable domain of TCR clone 334891 (TRAV8-3, TRAJ45)
CASSDSGGGADGLTF

SEQ ID NO: 669782 - protein, 15 aa, Homo sapiens
  CDR3 for beta chain variable domain of TCR clone 334891 (TRBV20-1, TRBJ2-7)
CSARDRVSGMDEQYF

SEQ ID NO: 669783 - protein, 15 aa, Homo sapiens
  CDR3 for alpha chain variable domain of TCR clone 334892 (TRAV23/DV6, TRAJ44)
CAASGGTGTASKLTL

SEQ ID NO: 669784 - protein, 16 aa, Homo sapiens
  CDR3 for beta chain variable domain of TCR clone 334892 (TRBV28, TRBJ2-1)
CASSLERGSSYNEQFF

SEQ ID NO: 669785 - protein, 14 aa, Homo sapiens
  CDR3 for alpha chain variable domain of TCR clone 334893 (TRAV16, TRAJ22)
CALRGQGSARQLTF

SEQ ID NO: 669786 - protein, 15 aa, Homo sapiens
  CDR3 for beta chain variable domain of TCR clone 334893 (TRBV4-1, TRBJ1-2)
CASSKDSTFGYGYTF

SEQ ID NO: 669787 - protein, 15 aa, Homo sapiens
  CDR3 for alpha chain variable domain of TCR clone 334894 (TRAV26-2, TRAJ57)
CILRDIQGGSEKLVF

SEQ ID NO: 669788 - protein, 15 aa, Homo sapiens
  CDR3 for beta chain variable domain of TCR clone 334894 (TRBV2, TRBJ2-1)
CASDIGLAGEGEQFF

SEQ ID NO: 669789 - protein, 14 aa, Homo sapiens
  CDR3 for alpha chain variable domain of TCR clone 334895 (TRAV20, TRAJ42)
CAVQAGASQGNLIF

SEQ ID NO: 669790 - protein, 14 aa, Homo sapiens
  CDR3 for beta chain variable domain of TCR clone 334895 (TRBV28, TRBJ1-2)
CASRIQGANYGYTF

SEQ ID NO: 669791 - protein, 16 aa, Homo sapiens
  CDR3 for alpha chain variable domain of TCR clone 334896 (TRAV8-3, TRAJ10)
CAVGPILTGGGNNLTF

SEQ ID NO: 669792 - protein, 16 aa, Homo sapiens
  CDR3 for beta chain variable domain of TCR clone 334896 (TRBV7-2, TRBJ2-5)
RASSSKWLSGQETQYF

SEQ ID NO: 669793 - protein, 14 aa, Homo sapiens
  CDR3 for alpha chain variable domain of TCR clone 334897 (TRAV12-2, TRAJ17)
CAVLLKAAGNKLTF

SEQ ID NO: 669794 - protein, 17 aa, Homo sapiens
  CDR3 for beta chain variable domain of TCR clone 334897 (TRBV20-1, TRBJ2-2)
CSASGSGHGGLTGELFF

SEQ ID NO: 669795 - protein, 15 aa, Homo sapiens
  CDR3 for alpha chain variable domain of TCR clone 334898 (TRAV35, TRAJ58)
CAGRRQETSGSRLTF

SEQ ID NO: 669796 - protein, 15 aa, Homo sapiens
  CDR3 for beta chain variable domain of TCR clone 334898 (TRBV5-1, TRBJ2-7)
CASSLNGGPAREQYF

SEQ ID NO: 669797 - protein, 15 aa, Homo sapiens
  CDR3 for alpha chain variable domain of TCR clone 334899 (TRAV20, TRAJ12)
CAVRGLMDSSYKLIF

SEQ ID NO: 669798 - protein, 14 aa, Homo sapiens
  CDR3 for beta chain variable domain of TCR clone 334899 (TRBV20-1, TRBJ1-6)
CSARQGRDNSPLHF

SEQ ID NO: 669799 - protein, 13 aa, Homo sapiens
  CDR3 for alpha chain variable domain of TCR clone 334900 (TRAV36/DV7, TRAJ38)
CVANAGNNRKLIW

SEQ ID NO: 669800 - protein, 14 aa, Homo sapiens
  CDR3 for beta chain variable domain of TCR clone 334900 (TRBV7-2, TRBJ2-7)
CASSLRWEVIEQYF

SEQ ID NO: 669801 - protein, 16 aa, Homo sapiens
  CDR3 for alpha chain variable domain of TCR clone 334901 (TRAV1-2, TRAJ10)
CAVRGVLTGGGNKPTF

SEQ ID NO: 669802 - protein, 16 aa, Homo sapiens
  CDR3 for beta chain variable domain of TCR clone 334901 (TRBV9, TRBJ2-1)
CASSVGGGGNYNEQFF

SEQ ID NO: 669803 - protein, 15 aa, Homo sapiens
  CDR3 for alpha chain variable domain of TCR clone 334902 (TRAV27, TRAJ38)
CAGRFNAGNNRKLIW

SEQ ID NO: 669804 - protein, 16 aa, Homo sapiens
  CDR3 for beta chain variable domain of TCR clone 334902 (TRBV24-1, TRBJ2-3)
CATSDPGTGATDTQYF

SEQ ID NO: 669805 - protein, 10 aa, Homo sapiens
  CDR3 for alpha chain variable domain of TCR clone 334903 (TRAV23/DV6, TRAJ31)
CARGGARLMF

SEQ ID NO: 669806 - protein, 13 aa, Homo sapiens
  CDR3 for beta chain variable domain of TCR clone 334903 (TRBV4-3, TRBJ2-1)
CASSQKLERQQFF

SEQ ID NO: 669807 - protein, 13 aa, Homo sapiens
  CDR3 for alpha chain variable domain of TCR clone 334904 (TRAV26-1, TRAJ31)
CIVRVDGNARLMF

SEQ ID NO: 669808 - protein, 13 aa, Homo sapiens
  CDR3 for beta chain variable domain of TCR clone 334904 (TRBV7-9, TRBJ1-2)
CASSLKQNYGYTF

SEQ ID NO: 669809 - protein, 14 aa, Homo sapiens
  CDR3 for alpha chain variable domain of TCR clone 334905 (TRAV9-2, TRAJ39)
CALYIYNAGNMLTF

SEQ ID NO: 669810 - protein, 15 aa, Homo sapiens
  CDR3 for beta chain variable domain of TCR clone 334905 (TRBV12-4, TRBJ1-2)
CASSPITGGGYGYTF

SEQ ID NO: 669811 - protein, 14 aa, Homo sapiens
  CDR3 for alpha chain variable domain of TCR clone 334906 (TRAV1-2, TRAJ16)
CAVNRFSDGQKLLF

SEQ ID NO: 669812 - protein, 12 aa, Homo sapiens
  CDR3 for beta chain variable domain of TCR clone 334906 (TRBV24-1, TRBJ1-1)
CSTLYPDTEAFF

SEQ ID NO: 669813 - protein, 11 aa, Homo sapiens
  CDR3 for alpha chain variable domain of TCR clone 334907 (TRAV3, TRAJ21)
CAVGNFNKFYF

SEQ ID NO: 669814 - protein, 14 aa, Homo sapiens
  CDR3 for beta chain variable domain of TCR clone 334907 (TRBV6-6, TRBJ1-4)
CASRTDREYEKLFF

SEQ ID NO: 669815 - protein, 11 aa, Homo sapiens
  CDR3 for alpha chain variable domain of TCR clone 334908 (TRAV1-1, TRAJ23)
CAVRQGGKLIF

SEQ ID NO: 669816 - protein, 20 aa, Homo sapiens
  CDR3 for beta chain variable domain of TCR clone 334908 (TRBV7-8, TRBJ2-2)
CAISHLFPGPTIHSTGELFF

SEQ ID NO: 669817 - protein, 12 aa, Homo sapiens
  CDR3 for alpha chain variable domain of TCR clone 334909 (TRAV8-3, TRAJ26)
CAGDNYGQNFVF

SEQ ID NO: 669818 - protein, 17 aa, Homo sapiens
  CDR3 for beta chain variable domain of TCR clone 334909 (TRBV7-8, TRBJ2-6)
CASSAVTGGAGANVLTF

SEQ ID NO: 669819 - protein, 12 aa, Homo sapiens
  CDR3 for alpha chain variable domain of TCR clone 334910 (TRAV26-1, TRAJ17)
CIVRSAGNKLTF

SEQ ID NO: 669820 - protein, 16 aa, Homo sapiens
  CDR3 for beta chain variable domain of TCR clone 334910 (TRBV20-1, TRBJ1-1)
CSARALTQGMNTEAFF

SEQ ID NO: 669821 - protein, 17 aa, Homo sapiens
  CDR3 for alpha chain variable domain of TCR clone 334911 (TRAV26-2, TRAJ42)
CIPRDESYGGSQGNLIF

SEQ ID NO: 669822 - protein, 15 aa, Homo sapiens
  CDR3 for beta chain variable domain of TCR clone 334911 (TRBV6-6, TRBJ2-7)
CASSYSYGGSYEQYF

SEQ ID NO: 669823 - protein, 17 aa, Homo sapiens
  CDR3 for alpha chain variable domain of TCR clone 334912 (TRAV3, TRAJ6)
CAVRDGPRAGGSYIPTF

SEQ ID NO: 669824 - protein, 16 aa, Homo sapiens
  CDR3 for beta chain variable domain of TCR clone 334912 (TRBV4-1, TRBJ2-7)
CASSLTAGQANYEQYF

SEQ ID NO: 669825 - protein, 15 aa, Homo sapiens
  CDR3 for alpha chain variable domain of TCR clone 334913 (TRAV26-1, TRAJ40)
CIVRVNTSGTYKYIF

SEQ ID NO: 669826 - protein, 12 aa, Homo sapiens
  CDR3 for beta chain variable domain of TCR clone 334913 (TRBV7-9, TRBJ1-4)
CASSTDREKLFF

SEQ ID NO: 669827 - protein, 13 aa, Homo sapiens
  CDR3 for alpha chain variable domain of TCR clone 334914 (TRAV13-2, TRAJ53)
CAENMGSNYTLTF

SEQ ID NO: 669828 - protein, 11 aa, Homo sapiens
  CDR3 for beta chain variable domain of TCR clone 334914 (TRBV29-1, TRBJ2-5)
CSEDRTGTQYF

SEQ ID NO: 669829 - protein, 14 aa, Homo sapiens
  CDR3 for alpha chain variable domain of TCR clone 334915 (TRAV39, TRAJ33)
CAVDIKNSNYQLIW

SEQ ID NO: 669830 - protein, 13 aa, Homo sapiens
  CDR3 for beta chain variable domain of TCR clone 334915 (TRBV4-2, TRBJ2-1)
CARSPGTYNEQFF

SEQ ID NO: 669831 - protein, 13 aa, Homo sapiens
  CDR3 for alpha chain variable domain of TCR clone 334916 (TRAV8-4, TRAJ49)
CAVRTLTGNQFYF

SEQ ID NO: 669832 - protein, 16 aa, Homo sapiens
  CDR3 for beta chain variable domain of TCR clone 334916 (TRBV5-7, TRBJ2-5)
CASTVAPAGGRETQYF

SEQ ID NO: 669833 - protein, 13 aa, Homo sapiens
  CDR3 for alpha chain variable domain of TCR clone 334917 (TRAV13-2, TRAJ40)
CAEFTSGTYKYIF

SEQ ID NO: 669834 - protein, 13 aa, Homo sapiens
  CDR3 for beta chain variable domain of TCR clone 334917 (TRBV10-2, TRBJ2-7)
CASGASGGYEQYF

SEQ ID NO: 669835 - protein, 16 aa, Homo sapiens
  CDR3 for alpha chain variable domain of TCR clone 334918 (TRAV30, TRAJ24)
CGTEIVDADSWGKLQF

SEQ ID NO: 669836 - protein, 14 aa, Homo sapiens
  CDR3 for beta chain variable domain of TCR clone 334918 (TRBV12-5, TRBJ2-5)
CASGSRTHQENQYF

SEQ ID NO: 669837 - protein, 14 aa, Homo sapiens
  CDR3 for alpha chain variable domain of TCR clone 334919 (TRAV12-3, TRAJ29)
CAMILLSGNTPLVF

SEQ ID NO: 669838 - protein, 16 aa, Homo sapiens
  CDR3 for beta chain variable domain of TCR clone 334919 (TRBV28, TRBJ2-7)
CASSSGTSWRGYEQHF

SEQ ID NO: 669839 - protein, 16 aa, Homo sapiens
  CDR3 for alpha chain variable domain of TCR clone 334920 (TRAV26-1, TRAJ37)
CIYARHGPSNPGKLIF

SEQ ID NO: 669840 - protein, 13 aa, Homo sapiens
  CDR3 for beta chain variable domain of TCR clone 334920 (TRBV20-1, TRBJ1-1)
CSARGGGNTEAFF

SEQ ID NO: 669841 - protein, 15 aa, Homo sapiens
  CDR3 for alpha chain variable domain of TCR clone 334921 (TRAV12-3, TRAJ6)
CAMSATTGGSYIPTF

SEQ ID NO: 669842 - protein, 13 aa, Homo sapiens
  CDR3 for beta chain variable domain of TCR clone 334921 (TRBV11-3, TRBJ2-7)
CASSLDKLYEQYF

SEQ ID NO: 669843 - protein, 15 aa, Homo sapiens
  CDR3 for alpha chain variable domain of TCR clone 334922 (TRAV2, TRAJ11)
CAVGGRYSGYSTLTF

SEQ ID NO: 669844 - protein, 14 aa, Homo sapiens
  CDR3 for beta chain variable domain of TCR clone 334922 (TRBV20-1, TRBJ2-1)
CSAQIGGSANEQFF

SEQ ID NO: 669845 - protein, 17 aa, Homo sapiens
  CDR3 for alpha chain variable domain of TCR clone 334923 (TRAV3, TRAJ6)
CAVRDGPRAGGSYIPTF

SEQ ID NO: 669846 - protein, 13 aa, Homo sapiens
  CDR3 for beta chain variable domain of TCR clone 334923 (TRBV19, TRBJ2-7)
CASSINRTYEQYF

SEQ ID NO: 669847 - protein, 14 aa, Homo sapiens
  CDR3 for alpha chain variable domain of TCR clone 334924 (TRAV12-2, TRAJ13)
CAVNKTGGYQKVTF

SEQ ID NO: 669848 - protein, 17 aa, Homo sapiens
  CDR3 for beta chain variable domain of TCR clone 334924 (TRBV15, TRBJ2-4)
CATSRDNPQTGLDIQYF

SEQ ID NO: 669849 - protein, 14 aa, Homo sapiens
  CDR3 for alpha chain variable domain of TCR clone 334925 (TRAV2, TRAJ9)
CAVEDRSGGFKTIF

SEQ ID NO: 669850 - protein, 12 aa, Homo sapiens
  CDR3 for beta chain variable domain of TCR clone 334925 (TRBV24-1, TRBJ2-7)
CATSDPGYEQYF

SEQ ID NO: 669851 - protein, 11 aa, Homo sapiens
  CDR3 for alpha chain variable domain of TCR clone 334926 (TRAV21, TRAJ34)
CAHYNTDKLIF

SEQ ID NO: 669852 - protein, 13 aa, Homo sapiens
  CDR3 for beta chain variable domain of TCR clone 334926 (TRBV11-2, TRBJ2-1)
CASSLDLVNEQFF

SEQ ID NO: 669853 - protein, 14 aa, Homo sapiens
  CDR3 for alpha chain variable domain of TCR clone 334927 (TRAV13-1, TRAJ40)
CAASMTSGTYKYIF

SEQ ID NO: 669854 - protein, 12 aa, Homo sapiens
  CDR3 for beta chain variable domain of TCR clone 334927 (TRBV4-1, TRBJ2-3)
CASSQGTDTQYF

SEQ ID NO: 669855 - protein, 13 aa, Homo sapiens
  CDR3 for alpha chain variable domain of TCR clone 334928 (TRAV27, TRAJ45)
CRSSGGGADGLTF

SEQ ID NO: 669856 - protein, 12 aa, Homo sapiens
  CDR3 for beta chain variable domain of TCR clone 334928 (TRBV5-5, TRBJ2-5)
CASSYFGETQYF

SEQ ID NO: 669857 - protein, 14 aa, Homo sapiens
  CDR3 for alpha chain variable domain of TCR clone 334929 (TRAV35, TRAJ42)
CAGRYGGSQGNLIF

SEQ ID NO: 669858 - protein, 15 aa, Homo sapiens
  CDR3 for beta chain variable domain of TCR clone 334929 (TRBV7-9, TRBJ2-1)
CASSLAWGRANEQFF

SEQ ID NO: 669859 - protein, 13 aa, Homo sapiens
  CDR3 for alpha chain variable domain of TCR clone 334930 (TRAV1-2, TRAJ20)
CAVRDGNDYKLSF

SEQ ID NO: 669860 - protein, 17 aa, Homo sapiens
  CDR3 for beta chain variable domain of TCR clone 334930 (TRBV20-1, TRBJ2-1)
CSARSPSGGPPTMSSSS

SEQ ID NO: 669861 - protein, 13 aa, Homo sapiens
  CDR3 for alpha chain variable domain of TCR clone 334931 (TRAV3, TRAJ21)
CAVREPDFNKFYF

SEQ ID NO: 669862 - protein, 17 aa, Homo sapiens
  CDR3 for beta chain variable domain of TCR clone 334931 (TRBV7-8, TRBJ2-6)
CASSAGTGGAGANALTF

SEQ ID NO: 669863 - protein, 15 aa, Homo sapiens
  CDR3 for alpha chain variable domain of TCR clone 334932 (TRAV8-3, TRAJ37)
CAVGARASNTGKLIF

SEQ ID NO: 669864 - protein, 15 aa, Homo sapiens
  CDR3 for beta chain variable domain of TCR clone 334932 (TRBV5-4, TRBJ2-3)
CASSLAGRVTDTQYV

SEQ ID NO: 669865 - protein, 14 aa, Homo sapiens
  CDR3 for alpha chain variable domain of TCR clone 334933 (TRAV13-1, TRAJ35)
CAASKGGFGNVLHC

SEQ ID NO: 669866 - protein, 15 aa, Homo sapiens
  CDR3 for beta chain variable domain of TCR clone 334933 (TRBV28, TRBJ2-1)
CASGGLAEVDNEQFV

SEQ ID NO: 669867 - protein, 16 aa, Homo sapiens
  CDR3 for alpha chain variable domain of TCR clone 334934 (TRAV8-4, TRAJ9)
CAVTFNTGGFKNYLLS

SEQ ID NO: 669868 - protein, 15 aa, Homo sapiens
  CDR3 for beta chain variable domain of TCR clone 334934 (TRBV7-9, TRBJ2-2)
CASSPETGAGGELFF

SEQ ID NO: 669869 - protein, 12 aa, Homo sapiens
  CDR3 for alpha chain variable domain of TCR clone 334935 (TRAV2, TRAJ33)
CAVPDSNYQLIL

SEQ ID NO: 669870 - protein, 15 aa, Homo sapiens
  CDR3 for beta chain variable domain of TCR clone 334935 (TRBV29-1, TRBJ2-7)
CSVEFFDRGSYEQYF

SEQ ID NO: 669871 - protein, 13 aa, Homo sapiens
  CDR3 for alpha chain variable domain of TCR clone 334936 (TRAV21, TRAJ27)
CAARPGNAGKSTF

SEQ ID NO: 669872 - protein, 15 aa, Homo sapiens
  CDR3 for beta chain variable domain of TCR clone 334936 (TRBV11-3, TRBJ2-7)
WASSPGPASSYEQCF

SEQ ID NO: 669873 - protein, 14 aa, Homo sapiens
  CDR3 for alpha chain variable domain of TCR clone 334937 (TRAV26-1, TRAJ34)
CIVIVAYNTDKLIF

SEQ ID NO: 669874 - protein, 16 aa, Homo sapiens
  CDR3 for beta chain variable domain of TCR clone 334937 (TRBV2, TRBJ2-3)
CASSTSVEGVTDTQYF

SEQ ID NO: 669875 - protein, 12 aa, Homo sapiens
  CDR3 for alpha chain variable domain of TCR clone 334938 (TRAV2, TRAJ9)
CAVGAGGFKTIF

SEQ ID NO: 669876 - protein, 16 aa, Homo sapiens
  CDR3 for beta chain variable domain of TCR clone 334938 (TRBV7-3, TRBJ2-3)
CASSLSGYRPEDTQYF

SEQ ID NO: 669877 - protein, 14 aa, Homo sapiens
  CDR3 for alpha chain variable domain of TCR clone 334939 (TRAV1-2, TRAJ8)
CAVREDTGFQKLVF

SEQ ID NO: 669878 - protein, 21 aa, Homo sapiens
  CDR3 for beta chain variable domain of TCR clone 334939 (TRBV6-3, TRBJ2-7)
CAQDMNHEYISPGTVFYEQYF

SEQ ID NO: 669879 - protein, 16 aa, Homo sapiens
  CDR3 for alpha chain variable domain of TCR clone 334940 (TRAV3, TRAJ10)
CAVRDMNAGGGNKLTF

SEQ ID NO: 669880 - protein, 16 aa, Homo sapiens
  CDR3 for beta chain variable domain of TCR clone 334940 (TRBV7-3, TRBJ2-2)
CASSLKRGTLSGELFF

SEQ ID NO: 669881 - protein, 11 aa, Homo sapiens
  CDR3 for alpha chain variable domain of TCR clone 334941 (TRAV2, TRAJ13)
CASGGYQKATF

SEQ ID NO: 669882 - protein, 16 aa, Homo sapiens
  CDR3 for beta chain variable domain of TCR clone 334941 (TRBV15, TRBJ2-3)
CATSRDLGIVTDTQYF

SEQ ID NO: 669883 - protein, 13 aa, Homo sapiens
  CDR3 for alpha chain variable domain of TCR clone 334942 (TRAV10, TRAJ40)
CVVSAPGTYKYIF

SEQ ID NO: 669884 - protein, 15 aa, Homo sapiens
  CDR3 for beta chain variable domain of TCR clone 334942 (TRBV27, TRBJ2-1)
CASSNGGGSSNEQFF

SEQ ID NO: 669885 - protein, 15 aa, Homo sapiens
  CDR3 for alpha chain variable domain of TCR clone 334943 (TRAV21, TRAJ53)
CATLNSGDSNYKLTF

SEQ ID NO: 669886 - protein, 13 aa, Homo sapiens
  CDR3 for beta chain variable domain of TCR clone 334943 (TRBV7-6, TRBJ2-7)
CASSLDHTHEQYF

SEQ ID NO: 669887 - protein, 15 aa, Homo sapiens
  CDR3 for alpha chain variable domain of TCR clone 334944 (TRAV12-3, TRAJ6)
CAMSATTGGSYIPTF

SEQ ID NO: 669888 - protein, 15 aa, Homo sapiens
  CDR3 for beta chain variable domain of TCR clone 334944 (TRBV9, TRBJ2-1)
CASSLAGSAYNEQFF

SEQ ID NO: 669889 - protein, 12 aa, Homo sapiens
  CDR3 for alpha chain variable domain of TCR clone 334945 (TRAV8-4, TRAJ43)
CAVSVTNNDMRF

SEQ ID NO: 669890 - protein, 16 aa, Homo sapiens
  CDR3 for beta chain variable domain of TCR clone 334945 (TRBV7-9, TRBJ1-2)
CASSLGFSSGEDGYTF

SEQ ID NO: 669891 - protein, 13 aa, Homo sapiens
  CDR3 for alpha chain variable domain of TCR clone 334946 (TRAV20, TRAJ21)
CAVEGYNFNKFYF

SEQ ID NO: 669892 - protein, 14 aa, Homo sapiens
  CDR3 for beta chain variable domain of TCR clone 334946 (TRBV3-1, TRBJ2-5)
CASSRGPDQETQYF

SEQ ID NO: 669893 - protein, 15 aa, Homo sapiens
  CDR3 for alpha chain variable domain of TCR clone 334947 (TRAV34, TRAJ38)
CGADFTPGNNRKLIW

SEQ ID NO: 669894 - protein, 14 aa, Homo sapiens
  CDR3 for beta chain variable domain of TCR clone 334947 (TRBV12-5, TRBJ2-5)
CASGSRKHQGTQYF

SEQ ID NO: 669895 - protein, 15 aa, Homo sapiens
  CDR3 for alpha chain variable domain of TCR clone 334948 (TRAV12-2, TRAJ53)
CAVNGGGGSSYKLTF

SEQ ID NO: 669896 - protein, 14 aa, Homo sapiens
  CDR3 for beta chain variable domain of TCR clone 334948 (TRBV11-2, TRBJ2-5)
CASSRTGGIETQYF

SEQ ID NO: 669897 - protein, 12 aa, Homo sapiens
  CDR3 for alpha chain variable domain of TCR clone 334949 (TRAV3, TRAJ31)
CAVRDGNARLMF

SEQ ID NO: 669898 - protein, 18 aa, Homo sapiens
  CDR3 for beta chain variable domain of TCR clone 334949 (TRBV7-2, TRBJ2-3)
CASRLRREGSGITDTQYF

SEQ ID NO: 669899 - protein, 12 aa, Homo sapiens
  CDR3 for alpha chain variable domain of TCR clone 334950 (TRAV8-3, TRAJ20)
CAVGANDYKLSL

SEQ ID NO: 669900 - protein, 17 aa, Homo sapiens
  CDR3 for beta chain variable domain of TCR clone 334950 (TRBV19, TRBJ2-2)
CASSRNPGGFGTGELFF

SEQ ID NO: 669901 - protein, 12 aa, Homo sapiens
  CDR3 for alpha chain variable domain of TCR clone 334951 (TRAV16, TRAJ13)
CITLRGYQKVTF

SEQ ID NO: 669902 - protein, 17 aa, Homo sapiens
  CDR3 for beta chain variable domain of TCR clone 334951 (TRBV28, TRBJ2-5)
CASSRQGGLAGAETQYC

SEQ ID NO: 669903 - protein, 17 aa, Homo sapiens
  CDR3 for alpha chain variable domain of TCR clone 334952 (TRAV8-2, )
CVVNMQNPDPAVYQLRD

SEQ ID NO: 669904 - protein, 14 aa, Homo sapiens
  CDR3 for beta chain variable domain of TCR clone 334952 (TRBV7-9, TRBJ2-5)
CASSLVGGEETQYF

SEQ ID NO: 669905 - protein, 14 aa, Homo sapiens
  CDR3 for alpha chain variable domain of TCR clone 334953 (TRAV8-2, TRAJ37)
CVVSGSGNTGKLIF

SEQ ID NO: 669906 - protein, 15 aa, Homo sapiens
  CDR3 for beta chain variable domain of TCR clone 334953 (TRBV18, TRBJ2-7)
CARSPTVTPNYEQYF

SEQ ID NO: 669907 - protein, 11 aa, Homo sapiens
  CDR3 for alpha chain variable domain of TCR clone 334954 (TRAV35, TRAJ30)
CAGERYDKIIF

SEQ ID NO: 669908 - protein, 14 aa, Homo sapiens
  CDR3 for beta chain variable domain of TCR clone 334954 (TRBV15, TRBJ2-5)
CATSGDRGQETPYF

SEQ ID NO: 669909 - protein, 15 aa, Homo sapiens
  CDR3 for alpha chain variable domain of TCR clone 334955 (TRAV3, TRAJ5)
CAVRDRKTGTRALTF

SEQ ID NO: 669910 - protein, 15 aa, Homo sapiens
  CDR3 for beta chain variable domain of TCR clone 334955 (TRBV7-8, TRBJ2-1)
CASSLADSLYNEQFF

SEQ ID NO: 669911 - protein, 15 aa, Homo sapiens
  CDR3 for alpha chain variable domain of TCR clone 334956 (TRAV39, TRAJ32)
CAVDMAGGATNKPIF

SEQ ID NO: 669912 - protein, 13 aa, Homo sapiens
  CDR3 for beta chain variable domain of TCR clone 334956 (TRBV7-2, TRBJ2-7)
CASSSPSGSEQYF

SEQ ID NO: 669913 - protein, 15 aa, Homo sapiens
  CDR3 for alpha chain variable domain of TCR clone 334957 (TRAV26-2, TRAJ39)
CSLRGNNNAGNMLTF

SEQ ID NO: 669914 - protein, 13 aa, Homo sapiens
  CDR3 for beta chain variable domain of TCR clone 334957 (TRBV7-2, TRBJ1-2)
CASSFLGSYGYTF

SEQ ID NO: 669915 - protein, 14 aa, Homo sapiens
  CDR3 for alpha chain variable domain of TCR clone 334958 (TRAV8-6, TRAJ29)
CAVSRASGNTPHVF

SEQ ID NO: 669916 - protein, 13 aa, Homo sapiens
  CDR3 for beta chain variable domain of TCR clone 334958 (TRBV19, TRBJ1-5)
CASSEGSNQPQHF

SEQ ID NO: 669917 - protein, 11 aa, Homo sapiens
  CDR3 for alpha chain variable domain of TCR clone 334959 (TRAV2, TRAJ13)
CASGGYQKVTF

SEQ ID NO: 669918 - protein, 11 aa, Homo sapiens
  CDR3 for beta chain variable domain of TCR clone 334959 (TRBV19, TRBJ2-7)
CASGLSHEQYF

SEQ ID NO: 669919 - protein, 18 aa, Homo sapiens
  CDR3 for alpha chain variable domain of TCR clone 334960 (TRAV13-1, TRAJ52)
CAASKRSAGGTSYGKLTF

SEQ ID NO: 669920 - protein, 12 aa, Homo sapiens
  CDR3 for beta chain variable domain of TCR clone 334960 (TRBV6-3, TRBJ2-1)
CASSGSYNEQFF

SEQ ID NO: 669921 - protein, 14 aa, Homo sapiens
  CDR3 for alpha chain variable domain of TCR clone 334961 (TRAV12-2, TRAJ9)
CAVNALEGGFKTIF

SEQ ID NO: 669922 - protein, 15 aa, Homo sapiens
  CDR3 for beta chain variable domain of TCR clone 334961 (TRBV7-3, TRBJ2-1)
CASSPTGGGEVEQFF

SEQ ID NO: 669923 - protein, 11 aa, Homo sapiens
  CDR3 for alpha chain variable domain of TCR clone 334962 (TRAV21, TRAJ31)
CAVRNNARLMF

SEQ ID NO: 669924 - protein, 12 aa, Homo sapiens
  CDR3 for beta chain variable domain of TCR clone 334962 (TRBV6-3, TRBJ2-7)
CASSRQGYEQYF

SEQ ID NO: 669925 - protein, 11 aa, Homo sapiens
  CDR3 for alpha chain variable domain of TCR clone 334963 (TRAV21, TRAJ11)
CAVNGYSTLTF

SEQ ID NO: 669926 - protein, 15 aa, Homo sapiens
  CDR3 for beta chain variable domain of TCR clone 334963 (TRBV28, TRBJ2-5)
CASSPGQGSIETQYF

SEQ ID NO: 669927 - protein, 15 aa, Homo sapiens
  CDR3 for alpha chain variable domain of TCR clone 334964 (TRAV8-3, TRAJ11)
CAVGLLNSGYSTLTF

SEQ ID NO: 669928 - protein, 23 aa, Homo sapiens
  CDR3 for beta chain variable domain of TCR clone 334964 (TRBV7-9, TRBJ1-2)
EAQLEKSRLPSDRFSSGEDGYTF

SEQ ID NO: 669929 - protein, 14 aa, Homo sapiens
  CDR3 for alpha chain variable domain of TCR clone 334965 (TRAV21, TRAJ38)
CAVMGAGNNRKLSW

SEQ ID NO: 669930 - protein, 13 aa, Homo sapiens
  CDR3 for beta chain variable domain of TCR clone 334965 (TRBV7-3, TRBJ2-5)
CASSIGFFETQYF

SEQ ID NO: 669931 - protein, 10 aa, Homo sapiens
  CDR3 for alpha chain variable domain of TCR clone 334966 (TRAV30, TRAJ48)
CGIGNEKLTI

SEQ ID NO: 669932 - protein, 13 aa, Homo sapiens
  CDR3 for beta chain variable domain of TCR clone 334966 (TRBV29-1, TRBJ2-7)
CSVGPSGGYEQYF

SEQ ID NO: 669933 - protein, 16 aa, Homo sapiens
  CDR3 for alpha chain variable domain of TCR clone 334967 (TRAV12-2, TRAJ10)
CAVNRGLTGGGNKLTF

SEQ ID NO: 669934 - protein, 16 aa, Homo sapiens
  CDR3 for beta chain variable domain of TCR clone 334967 (TRBV12-5, TRBJ2-5)
CASGPRTSGNQETQYF

SEQ ID NO: 669935 - protein, 16 aa, Homo sapiens
  CDR3 for alpha chain variable domain of TCR clone 334968 (TRAV30, TRAJ24)
CGTEIVDADSWGKFQF

SEQ ID NO: 669936 - protein, 15 aa, Homo sapiens
  CDR3 for beta chain variable domain of TCR clone 334968 (TRBV5-1, TRBJ2-1)
CASSLEGLAANEQFF

SEQ ID NO: 669937 - protein, 14 aa, Homo sapiens
  CDR3 for alpha chain variable domain of TCR clone 334969 (TRAV8-4, TRAJ54)
CAVSEVSGAQKLVF

SEQ ID NO: 669938 - protein, 13 aa, Homo sapiens
  CDR3 for beta chain variable domain of TCR clone 334969 (TRBV27, TRBJ2-7)
CASSFVSSYEQYF

SEQ ID NO: 669939 - protein, 16 aa, Homo sapiens
  CDR3 for alpha chain variable domain of TCR clone 334970 (TRAV21, TRAJ45)
CAVSWGSGGGADGLTF

SEQ ID NO: 669940 - protein, 14 aa, Homo sapiens
  CDR3 for beta chain variable domain of TCR clone 334970 (TRBV4-2, TRBJ1-2)
CASSPGGCNYGYTF

SEQ ID NO: 669941 - protein, 12 aa, Homo sapiens
  CDR3 for alpha chain variable domain of TCR clone 334971 (TRAV1-2, TRAJ7)
CAVAYGNNSLAF

SEQ ID NO: 669942 - protein, 16 aa, Homo sapiens
  CDR3 for beta chain variable domain of TCR clone 334971 (TRBV5-1, TRBJ2-7)
CASSPMTGALSYEQYF

SEQ ID NO: 669943 - protein, 13 aa, Homo sapiens
  CDR3 for alpha chain variable domain of TCR clone 334972 (TRAV8-3, TRAJ48)
CAMVPFGNEKLTF

SEQ ID NO: 669944 - protein, 19 aa, Homo sapiens
  CDR3 for beta chain variable domain of TCR clone 334972 (TRBV28, TRBJ2-7)
CASSYSGTSRLGWVYEQYF

SEQ ID NO: 669945 - protein, 17 aa, Homo sapiens
  CDR3 for alpha chain variable domain of TCR clone 334973 (TRAV27, TRAJ42)
CAERVIYYGGSQGNLIF

SEQ ID NO: 669946 - protein, 16 aa, Homo sapiens
  CDR3 for beta chain variable domain of TCR clone 334973 (TRBV29-1, TRBJ2-7)
CSVEDAEDGTAYEQYF

SEQ ID NO: 669947 - protein, 18 aa, Homo sapiens
  CDR3 for alpha chain variable domain of TCR clone 334974 (TRAV13-1, TRAJ52)
CAAKNPNAGGTSYGKLTF

SEQ ID NO: 669948 - protein, 12 aa, Homo sapiens
  CDR3 for beta chain variable domain of TCR clone 334974 (TRBV5-1, TRBJ1-1)
CASSVGNTEAFF

SEQ ID NO: 669949 - protein, 13 aa, Homo sapiens
  CDR3 for alpha chain variable domain of TCR clone 334975 (TRAV8-1, TRAJ28)
CTVAGAGSYQLTF

SEQ ID NO: 669950 - protein, 14 aa, Homo sapiens
  CDR3 for beta chain variable domain of TCR clone 334975 (TRBV7-2, TRBJ2-2)
CASRGQGAAGELFF

SEQ ID NO: 669951 - protein, 14 aa, Homo sapiens
  CDR3 for alpha chain variable domain of TCR clone 334976 (TRAV12-2, TRAJ13)
CAVKKTGGYEKVTF

SEQ ID NO: 669952 - protein, 15 aa, Homo sapiens
  CDR3 for beta chain variable domain of TCR clone 334976 (TRBV28, TRBJ2-5)
CASSPPWSYQETQYF

SEQ ID NO: 669953 - protein, 13 aa, Homo sapiens
  CDR3 for alpha chain variable domain of TCR clone 334977 (TRAV13-1, TRAJ6)
CAASKGGSYIPTS

SEQ ID NO: 669954 - protein, 14 aa, Homo sapiens
  CDR3 for beta chain variable domain of TCR clone 334977 (TRBV7-2, TRBJ2-1)
CASSLGVGYNEQFF

SEQ ID NO: 669955 - protein, 14 aa, Homo sapiens
  CDR3 for alpha chain variable domain of TCR clone 334978 (TRAV17, TRAJ56)
RATVPAGANSKLTF

SEQ ID NO: 669956 - protein, 15 aa, Homo sapiens
  CDR3 for beta chain variable domain of TCR clone 334978 (TRBV6-6, TRBJ2-5)
CASSPGGGLEETQYF

SEQ ID NO: 669957 - protein, 14 aa, Homo sapiens
  CDR3 for alpha chain variable domain of TCR clone 334979 (TRAV26-1, TRAJ49)
CIVRLTNTGNQFYF

SEQ ID NO: 669958 - protein, 12 aa, Homo sapiens
  CDR3 for beta chain variable domain of TCR clone 334979 (TRBV11-2, TRBJ2-7)
CASSLPTYEQYF

SEQ ID NO: 669959 - protein, 18 aa, Homo sapiens
  CDR3 for alpha chain variable domain of TCR clone 334980 (TRAV29/DV5, TRAJ52)
CAAGFRGAGGTSYGKLTF

SEQ ID NO: 669960 - protein, 16 aa, Homo sapiens
  CDR3 for beta chain variable domain of TCR clone 334980 (TRBV24-1, TRBJ2-3)
CATSDRRQDLTDTQYF

SEQ ID NO: 669961 - protein, 12 aa, Homo sapiens
  CDR3 for alpha chain variable domain of TCR clone 334981 (TRAV17, TRAJ20)
CATQSNDYKLSF

SEQ ID NO: 669962 - protein, 13 aa, Homo sapiens
  CDR3 for beta chain variable domain of TCR clone 334981 (TRBV9, TRBJ2-1)
CASSPSGGNEQFF

SEQ ID NO: 669963 - protein, 15 aa, Homo sapiens
  CDR3 for alpha chain variable domain of TCR clone 334982 (TRAV23/DV6, TRAJ44)
CAASGGTGTASKLTF

SEQ ID NO: 669964 - protein, 15 aa, Homo sapiens
  CDR3 for beta chain variable domain of TCR clone 334982 (TRBV6-3, TRBJ2-7)
CASSSPGTVFYEQYV

SEQ ID NO: 669965 - protein, 13 aa, Homo sapiens
  CDR3 for alpha chain variable domain of TCR clone 334983 (TRAV27, TRAJ41)
CAGEGNPGYALNF

SEQ ID NO: 669966 - protein, 13 aa, Homo sapiens
  CDR3 for beta chain variable domain of TCR clone 334983 (TRBV19, TRBJ1-2)
CASSAPGQDGYTF

SEQ ID NO: 669967 - protein, 12 aa, Homo sapiens
  CDR3 for alpha chain variable domain of TCR clone 334984 (TRAV12-3, TRAJ3)
CAIDSSASKIIF

SEQ ID NO: 669968 - protein, 16 aa, Homo sapiens
  CDR3 for beta chain variable domain of TCR clone 334984 (TRBV11-2, TRBJ1-2)
CASSPSGREANYGYTF

SEQ ID NO: 669969 - protein, 13 aa, Homo sapiens
  CDR3 for alpha chain variable domain of TCR clone 334985 (TRAV20, TRAJ54)
CALTFEGARKLVF

SEQ ID NO: 669970 - protein, 13 aa, Homo sapiens
  CDR3 for beta chain variable domain of TCR clone 334985 (TRBV15, TRBJ2-7)
CATSTTGHYEQYF

SEQ ID NO: 669971 - protein, 14 aa, Homo sapiens
  CDR3 for alpha chain variable domain of TCR clone 334986 (TRAV38-1, TRAJ43)
CAFMKHNNNNDMRI

SEQ ID NO: 669972 - protein, 15 aa, Homo sapiens
  CDR3 for beta chain variable domain of TCR clone 334986 (TRBV9, TRBJ1-6)
CASSVAGTGDSPLHF

SEQ ID NO: 669973 - protein, 17 aa, Homo sapiens
  CDR3 for alpha chain variable domain of TCR clone 334987 (TRAV3, TRAJ6)
CAVRDGPRAGGSYIPTF

SEQ ID NO: 669974 - protein, 15 aa, Homo sapiens
  CDR3 for beta chain variable domain of TCR clone 334987 (TRBV28, TRBJ1-4)
CASSLSAGTNEKLFF

SEQ ID NO: 669975 - protein, 14 aa, Homo sapiens
  CDR3 for alpha chain variable domain of TCR clone 334988 (TRAV8-4, TRAJ13)
CAVTLSGGYQKVTF

SEQ ID NO: 669976 - protein, 13 aa, Homo sapiens
  CDR3 for beta chain variable domain of TCR clone 334988 (TRBV2, TRBJ1-5)
CATAGPGNQTQHF

SEQ ID NO: 669977 - protein, 17 aa, Homo sapiens
  CDR3 for alpha chain variable domain of TCR clone 334989 (TRAV3, TRAJ6)
CAVRDGPRVGGSYIPTF

SEQ ID NO: 669978 - protein, 16 aa, Homo sapiens
  CDR3 for beta chain variable domain of TCR clone 334989 (TRBV15, TRBJ2-3)
CATSRDLGIVTDTQYF

SEQ ID NO: 669979 - protein, 11 aa, Homo sapiens
  CDR3 for alpha chain variable domain of TCR clone 334990 (TRAV1-1, TRAJ5)
CAVRVRRALTF

SEQ ID NO: 669980 - protein, 18 aa, Homo sapiens
  CDR3 for beta chain variable domain of TCR clone 334990 (TRBV12-4, TRBJ1-2)
CASSPNPGQAGPYYGYSF

SEQ ID NO: 669981 - protein, 13 aa, Homo sapiens
  CDR3 for alpha chain variable domain of TCR clone 334991 (TRAV4, TRAJ33)
CLVGEDSNYQLIW

SEQ ID NO: 669982 - protein, 15 aa, Homo sapiens
  CDR3 for beta chain variable domain of TCR clone 334991 (TRBV6-3, TRBJ2-7)
CASSSPGTVFYEQYF

SEQ ID NO: 669983 - protein, 13 aa, Homo sapiens
  CDR3 for alpha chain variable domain of TCR clone 334992 (TRAV20, TRAJ9)
CAVPDTGGFQTIF

SEQ ID NO: 669984 - protein, 15 aa, Homo sapiens
  CDR3 for beta chain variable domain of TCR clone 334992 (TRBV27, TRBJ2-7)
CASSKAGRGGYEQYF

SEQ ID NO: 669985 - protein, 11 aa, Homo sapiens
  CDR3 for alpha chain variable domain of TCR clone 334993 (TRAV21, TRAJ34)
CAVTNTDKLIF

SEQ ID NO: 669986 - protein, 17 aa, Homo sapiens
  CDR3 for beta chain variable domain of TCR clone 334993 (TRBV20-1, TRBJ2-1)
CSARSPSGGPPTMSSPS

SEQ ID NO: 669987 - protein, 14 aa, Homo sapiens
  CDR3 for alpha chain variable domain of TCR clone 334994 (TRAV8-4, TRAJ34)
CAVSDPGDTDKLIF

SEQ ID NO: 669988 - protein, 15 aa, Homo sapiens
  CDR3 for beta chain variable domain of TCR clone 334994 (TRBV7-9, TRBJ2-7)
CASSLALAEAYEQYF

SEQ ID NO: 669989 - protein, 14 aa, Homo sapiens
  CDR3 for alpha chain variable domain of TCR clone 334995 (TRAV8-4, TRAJ8)
CAVSEDTGFQKLVF

SEQ ID NO: 669990 - protein, 12 aa, Homo sapiens
  CDR3 for beta chain variable domain of TCR clone 334995 (TRBV11-2, TRBJ2-2)
CASSLGGGELFF

SEQ ID NO: 669991 - protein, 13 aa, Homo sapiens
  CDR3 for alpha chain variable domain of TCR clone 334996 (TRAV21, TRAJ27)
CAARPGNAGKSTF

SEQ ID NO: 669992 - protein, 18 aa, Homo sapiens
  CDR3 for beta chain variable domain of TCR clone 334996 (TRBV6-6, TRBJ1-3)
CASSYSKWDSISGNTIYF

SEQ ID NO: 669993 - protein, 12 aa, Homo sapiens
  CDR3 for alpha chain variable domain of TCR clone 334997 (TRAV8-3, TRAJ43)
CAVGRTDNDMRF

SEQ ID NO: 669994 - protein, 17 aa, Homo sapiens
  CDR3 for beta chain variable domain of TCR clone 334997 (TRBV25-1, TRBJ2-7)
CASSDARVVFSSYEQYF

SEQ ID NO: 669995 - protein, 17 aa, Homo sapiens
  CDR3 for alpha chain variable domain of TCR clone 334998 (TRAV17, TRAJ28)
CATDPRRGGAASYQLTF

SEQ ID NO: 669996 - protein, 16 aa, Homo sapiens
  CDR3 for beta chain variable domain of TCR clone 334998 (TRBV25-1, TRBJ1-1)
CASSGDRDRGRIEAFF

SEQ ID NO: 669997 - protein, 11 aa, Homo sapiens
  CDR3 for alpha chain variable domain of TCR clone 334999 (TRAV8-3, TRAJ4)
FYSGGYNKLIF

SEQ ID NO: 669998 - protein, 14 aa, Homo sapiens
  CDR3 for beta chain variable domain of TCR clone 334999 (TRBV4-1, TRBJ2-7)
CASSPVARGDEQYF

SEQ ID NO: 669999 - protein, 15 aa, Homo sapiens
  CDR3 for alpha chain variable domain of TCR clone 335000 (TRAV12-3, TRAJ6)
CAMSPASGGSYIPTF

SEQ ID NO: 670000 - protein, 15 aa, Homo sapiens
  CDR3 for beta chain variable domain of TCR clone 335000 (TRBV2, TRBJ1-2)
CASSGSRTVNYGYTF

SEQ ID NO: 670001 - protein, 11 aa, Homo sapiens
  CDR3 for alpha chain variable domain of TCR clone 335001 (TRAV35, TRAJ49)
CAGSTGNQFYF

SEQ ID NO: 670002 - protein, 17 aa, Homo sapiens
  CDR3 for beta chain variable domain of TCR clone 335001 (TRBV4-1, TRBJ1-5)
CASSRTHRGPLNQPQHF

SEQ ID NO: 670003 - protein, 12 aa, Homo sapiens
  CDR3 for alpha chain variable domain of TCR clone 335002 (TRAV17, TRAJ57)
CATDGGSEELVF

SEQ ID NO: 670004 - protein, 12 aa, Homo sapiens
  CDR3 for beta chain variable domain of TCR clone 335002 (TRBV29-1, TRBJ2-2)
CSADKYTGELFF

SEQ ID NO: 670005 - protein, 12 aa, Homo sapiens
  CDR3 for alpha chain variable domain of TCR clone 335003 (TRAV29/DV5, TRAJ15)
CASNQAGTALLF

SEQ ID NO: 670006 - protein, 13 aa, Homo sapiens
  CDR3 for beta chain variable domain of TCR clone 335003 (TRBV11-2, TRBJ1-3)
CASSLEPVNTIYF

SEQ ID NO: 670007 - protein, 14 aa, Homo sapiens
  CDR3 for alpha chain variable domain of TCR clone 335004 (TRAV12-2, TRAJ49)
CAVNPRTPVTSSLL

SEQ ID NO: 670008 - protein, 19 aa, Homo sapiens
  CDR3 for beta chain variable domain of TCR clone 335004 (TRBV12-5, TRBJ2-2)
CASGLGQGTMFANTGELFF

SEQ ID NO: 670009 - protein, 14 aa, Homo sapiens
  CDR3 for alpha chain variable domain of TCR clone 335005 (TRAV13-1, TRAJ12)
CAASYMDSSYKLIF

SEQ ID NO: 670010 - protein, 13 aa, Homo sapiens
  CDR3 for beta chain variable domain of TCR clone 335005 (TRBV2, TRBJ2-5)
CARSDGIQETQYF

SEQ ID NO: 670011 - protein, 14 aa, Homo sapiens
  CDR3 for alpha chain variable domain of TCR clone 335006 (TRAV8-3, TRAJ4)
CAVGAAGGYNKLIF

SEQ ID NO: 670012 - protein, 14 aa, Homo sapiens
  CDR3 for beta chain variable domain of TCR clone 335006 (TRBV11-1, TRBJ2-7)
CASSFRQGSYEQYF

SEQ ID NO: 670013 - protein, 11 aa, Homo sapiens
  CDR3 for alpha chain variable domain of TCR clone 335007 (TRAV1-1, TRAJ30)
CAQNRDDKIIF

SEQ ID NO: 670014 - protein, 14 aa, Homo sapiens
  CDR3 for beta chain variable domain of TCR clone 335007 (TRBV7-8, TRBJ2-7)
CASSPGLADYEQSF

SEQ ID NO: 670015 - protein, 14 aa, Homo sapiens
  CDR3 for alpha chain variable domain of TCR clone 335008 (TRAV8-3, TRAJ10)
CAVGNTGGGNKLTF

SEQ ID NO: 670016 - protein, 15 aa, Homo sapiens
  CDR3 for beta chain variable domain of TCR clone 335008 (TRBV20-1, TRBJ2-7)
CSARDRVSGMDEQYF

SEQ ID NO: 670017 - protein, 16 aa, Homo sapiens
  CDR3 for alpha chain variable domain of TCR clone 335009 (TRAV20, TRAJ22)
CAVQASSSGSARQLTF

SEQ ID NO: 670018 - protein, 13 aa, Homo sapiens
  CDR3 for beta chain variable domain of TCR clone 335009 (TRBV12-4, TRBJ2-7)
CASSPTETYEQYF

SEQ ID NO: 670019 - protein, 17 aa, Homo sapiens
  CDR3 for alpha chain variable domain of TCR clone 335010 (TRAV13-1, TRAJ31)
CAPRDRLMFGDGTQLVV

SEQ ID NO: 670020 - protein, 10 aa, Homo sapiens
  CDR3 for beta chain variable domain of TCR clone 335010 (TRBV28, TRBJ1-2)
CASSSDRAVF

SEQ ID NO: 670021 - protein, 14 aa, Homo sapiens
  CDR3 for alpha chain variable domain of TCR clone 335011 (TRAV12-2, TRAJ24)
CAVTPADSWGKLQF

SEQ ID NO: 670022 - protein, 16 aa, Homo sapiens
  CDR3 for beta chain variable domain of TCR clone 335011 (TRBV7-2, TRBJ2-1)
CASSLVGGPELNEQFF

SEQ ID NO: 670023 - protein, 16 aa, Homo sapiens
  CDR3 for alpha chain variable domain of TCR clone 335012 (TRAV30, TRAJ24)
CGTEIVDADSWGKFQF

SEQ ID NO: 670024 - protein, 15 aa, Homo sapiens
  CDR3 for beta chain variable domain of TCR clone 335012 (TRBV11-1, TRBJ2-1)
CASSLLWGLGYEQFF

SEQ ID NO: 670025 - protein, 11 aa, Homo sapiens
  CDR3 for alpha chain variable domain of TCR clone 335013 (TRAV26-1, TRAJ37)
CIVRVGRKLIF

SEQ ID NO: 670026 - protein, 13 aa, Homo sapiens
  CDR3 for beta chain variable domain of TCR clone 335013 (TRBV14, TRBJ1-2)
CASSEDRRYGYSF

SEQ ID NO: 670027 - protein, 15 aa, Homo sapiens
  CDR3 for alpha chain variable domain of TCR clone 335014 (TRAV8-4, TRAJ47)
CAVSDLLGYGNKLVF

SEQ ID NO: 670028 - protein, 16 aa, Homo sapiens
  CDR3 for beta chain variable domain of TCR clone 335014 (TRBV19, TRBJ2-2)
CAISPSGGLNTGELFF

SEQ ID NO: 670029 - protein, 16 aa, Homo sapiens
  CDR3 for alpha chain variable domain of TCR clone 335015 (TRAV26-1, TRAJ53)
CIVRVAMGGSNYKLTF

SEQ ID NO: 670030 - protein, 19 aa, Homo sapiens
  CDR3 for beta chain variable domain of TCR clone 335015 (TRBV25-1, TRBJ2-2)
CAILVYRVDRGRKTGELFF

SEQ ID NO: 670031 - protein, 17 aa, Homo sapiens
  CDR3 for alpha chain variable domain of TCR clone 335016 (TRAV3, TRAJ6)
CAVRDGPRAGGSYIPTF

SEQ ID NO: 670032 - protein, 14 aa, Homo sapiens
  CDR3 for beta chain variable domain of TCR clone 335016 (TRBV7-9, TRBJ1-2)
CASSLVQINYGYTF

SEQ ID NO: 670033 - protein, 13 aa, Homo sapiens
  CDR3 for alpha chain variable domain of TCR clone 335017 (TRAV21, TRAJ10)
CAVRPGGGNKLTF

SEQ ID NO: 670034 - protein, 14 aa, Homo sapiens
  CDR3 for beta chain variable domain of TCR clone 335017 (TRBV5-4, TRBJ2-5)
CASSADAGSYEQYF

SEQ ID NO: 670035 - protein, 14 aa, Homo sapiens
  CDR3 for alpha chain variable domain of TCR clone 335018 (TRAV26-1, TRAJ45)
CIEVTGGGADGLTF

SEQ ID NO: 670036 - protein, 13 aa, Homo sapiens
  CDR3 for beta chain variable domain of TCR clone 335018 (TRBV12-4, TRBJ1-1)
CASSRPGNTEAFF

SEQ ID NO: 670037 - protein, 16 aa, Homo sapiens
  CDR3 for alpha chain variable domain of TCR clone 335019 (TRAV20, TRAJ22)
CAVRASSSGSARQLTF

SEQ ID NO: 670038 - protein, 13 aa, Homo sapiens
  CDR3 for beta chain variable domain of TCR clone 335019 (TRBV7-2, TRBJ2-5)
CASRQTSVETQYF

SEQ ID NO: 670039 - protein, 14 aa, Homo sapiens
  CDR3 for alpha chain variable domain of TCR clone 335020 (TRAV16, TRAJ31)
CALSGRNDNARLMF

SEQ ID NO: 670040 - protein, 12 aa, Homo sapiens
  CDR3 for beta chain variable domain of TCR clone 335020 (TRBV11-2, TRBJ1-2)
CASSREGDGYTF

SEQ ID NO: 670041 - protein, 16 aa, Homo sapiens
  CDR3 for alpha chain variable domain of TCR clone 335021 (TRAV23/DV6, TRAJ9)
CAASKGGNTGGFKTIF

SEQ ID NO: 670042 - protein, 11 aa, Homo sapiens
  CDR3 for beta chain variable domain of TCR clone 335021 (TRBV11-2, TRBJ2-2)
CASSLPGELFF

SEQ ID NO: 670043 - protein, 17 aa, Homo sapiens
  CDR3 for alpha chain variable domain of TCR clone 335022 (TRAV3, TRAJ42)
CAGRDRDYGGSQGNLIF

SEQ ID NO: 670044 - protein, 14 aa, Homo sapiens
  CDR3 for beta chain variable domain of TCR clone 335022 (TRBV5-4, TRBJ1-1)
CASSLDSRRDEAFF

SEQ ID NO: 670045 - protein, 17 aa, Homo sapiens
  CDR3 for alpha chain variable domain of TCR clone 335023 (TRAV3, TRAJ6)
CAVRDGPRAGGSYITTF

SEQ ID NO: 670046 - protein, 15 aa, Homo sapiens
  CDR3 for beta chain variable domain of TCR clone 335023 (TRBV9, TRBJ1-6)
CASSVAGTGDSPLHF

SEQ ID NO: 670047 - protein, 12 aa, Homo sapiens
  CDR3 for alpha chain variable domain of TCR clone 335024 (TRAV9-2, TRAJ41)
CALTNSGYALNF

SEQ ID NO: 670048 - protein, 16 aa, Homo sapiens
  CDR3 for beta chain variable domain of TCR clone 335024 (TRBV28, TRBJ2-1)
CASSSSYSGSLNEQFF

SEQ ID NO: 670049 - protein, 17 aa, Homo sapiens
  CDR3 for alpha chain variable domain of TCR clone 335025 (TRAV8-3, TRAJ42)
CAVGNPEGRRSQGNLIF

SEQ ID NO: 670050 - protein, 12 aa, Homo sapiens
  CDR3 for beta chain variable domain of TCR clone 335025 (TRBV7-9, TRBJ2-7)
CATRTDAYEQYF

SEQ ID NO: 670051 - protein, 15 aa, Homo sapiens
  CDR3 for alpha chain variable domain of TCR clone 335026 (TRAV13-2, TRAJ8)
CAENRGNTGFQKLVF

SEQ ID NO: 670052 - protein, 17 aa, Homo sapiens
  CDR3 for beta chain variable domain of TCR clone 335026 (TRBV15, TRBJ1-2)
CATSGREIDVVNYGYTF

SEQ ID NO: 670053 - protein, 12 aa, Homo sapiens
  CDR3 for alpha chain variable domain of TCR clone 335027 (TRAV23/DV6, TRAJ53)
CAASKLGSGGSN

SEQ ID NO: 670054 - protein, 14 aa, Homo sapiens
  CDR3 for beta chain variable domain of TCR clone 335027 (TRBV7-9, TRBJ2-3)
CASSLEQGTDTQYF

SEQ ID NO: 670055 - protein, 13 aa, Homo sapiens
  CDR3 for alpha chain variable domain of TCR clone 335028 (TRAV8-6, TRAJ7)
CAVSTYGNNRLAF

SEQ ID NO: 670056 - protein, 17 aa, Homo sapiens
  CDR3 for beta chain variable domain of TCR clone 335028 (TRBV5-7, TRBJ2-4)
CASSPGTGHLAKNIQYF

SEQ ID NO: 670057 - protein, 10 aa, Homo sapiens
  CDR3 for alpha chain variable domain of TCR clone 335029 (TRAV13-2, TRAJ31)
CAENNARLMF

SEQ ID NO: 670058 - protein, 16 aa, Homo sapiens
  CDR3 for beta chain variable domain of TCR clone 335029 (TRBV12-5, TRBJ2-5)
CASGPRTSGNQETQYF

SEQ ID NO: 670059 - protein, 11 aa, Homo sapiens
  CDR3 for alpha chain variable domain of TCR clone 335030 (TRAV13-2, TRAJ20)
CADSNDYKLSF

SEQ ID NO: 670060 - protein, 15 aa, Homo sapiens
  CDR3 for beta chain variable domain of TCR clone 335030 (TRBV6-1, TRBJ2-3)
CASSERGGITDTQYF

SEQ ID NO: 670061 - protein, 15 aa, Homo sapiens
  CDR3 for alpha chain variable domain of TCR clone 335031 (TRAV12-1, TRAJ37)
CVVNLPTSNTGKLIF

SEQ ID NO: 670062 - protein, 17 aa, Homo sapiens
  CDR3 for beta chain variable domain of TCR clone 335031 (TRBV7-8, TRBJ2-1)
CASSPPTGTLAYNEQFF

SEQ ID NO: 670063 - protein, 16 aa, Homo sapiens
  CDR3 for alpha chain variable domain of TCR clone 335032 (TRAV13-2, TRAJ37)
CAENIRGSSNTGKLIF

SEQ ID NO: 670064 - protein, 15 aa, Homo sapiens
  CDR3 for beta chain variable domain of TCR clone 335032 (TRBV7-2, TRBJ2-3)
CASSSAGLETDTQYF

SEQ ID NO: 670065 - protein, 15 aa, Homo sapiens
  CDR3 for alpha chain variable domain of TCR clone 335033 (TRAV12-3, TRAJ49)
CAMAVTPNTGNQFYY

SEQ ID NO: 670066 - protein, 18 aa, Homo sapiens
  CDR3 for beta chain variable domain of TCR clone 335033 (TRBV4-1, TRBJ1-5)
CASSQDPRGQGLNQPQHS

SEQ ID NO: 670067 - protein, 14 aa, Homo sapiens
  CDR3 for alpha chain variable domain of TCR clone 335034 (TRAV1-2, TRAJ8)
CAVREDTGFQKLVF

SEQ ID NO: 670068 - protein, 17 aa, Homo sapiens
  CDR3 for beta chain variable domain of TCR clone 335034 (TRBV20-1, TRBJ2-2)
CSASRSGQGGLTGELFF

SEQ ID NO: 670069 - protein, 11 aa, Homo sapiens
  CDR3 for alpha chain variable domain of TCR clone 335035 (TRAV35, TRAJ29)
CAGAGNTPLVF

SEQ ID NO: 670070 - protein, 13 aa, Homo sapiens
  CDR3 for beta chain variable domain of TCR clone 335035 (TRBV19, TRBJ2-1)
CASNGGVFSEQFF

SEQ ID NO: 670071 - protein, 14 aa, Homo sapiens
  CDR3 for alpha chain variable domain of TCR clone 335036 (TRAV29/DV5, TRAJ36)
CAARRKTGANNLFF

SEQ ID NO: 670072 - protein, 13 aa, Homo sapiens
  CDR3 for beta chain variable domain of TCR clone 335036 (TRBV12-4, TRBJ1-2)
CASSSGPNYGYTF

SEQ ID NO: 670073 - protein, 12 aa, Homo sapiens
  CDR3 for alpha chain variable domain of TCR clone 335037 (TRAV2, TRAJ9)
CAVGAGGFKTIF

SEQ ID NO: 670074 - protein, 12 aa, Homo sapiens
  CDR3 for beta chain variable domain of TCR clone 335037 (TRBV6-1, TRBJ2-7)
CASSDYTYEQYF

SEQ ID NO: 670075 - protein, 14 aa, Homo sapiens
  CDR3 for alpha chain variable domain of TCR clone 335038 (TRAV12-1, TRAJ3)
CGAARYSSASKIIF

SEQ ID NO: 670076 - protein, 16 aa, Homo sapiens
  CDR3 for beta chain variable domain of TCR clone 335038 (TRBV4-3, TRBJ2-2)
CASSHLPGSGTGELFF

SEQ ID NO: 670077 - protein, 15 aa, Homo sapiens
  CDR3 for alpha chain variable domain of TCR clone 335039 (TRAV3, TRAJ13)
CAVRDSAGGYQKVTF

SEQ ID NO: 670078 - protein, 13 aa, Homo sapiens
  CDR3 for beta chain variable domain of TCR clone 335039 (TRBV2, TRBJ2-2)
CASSKKNTGELFF

SEQ ID NO: 670079 - protein, 12 aa, Homo sapiens
  CDR3 for alpha chain variable domain of TCR clone 335040 (TRAV10, TRAJ43)
CAVVRVGNDMRF

SEQ ID NO: 670080 - protein, 15 aa, Homo sapiens
  CDR3 for beta chain variable domain of TCR clone 335040 (TRBV2, TRBJ2-7)
CASSEGLARSYEQYF

SEQ ID NO: 670081 - protein, 18 aa, Homo sapiens
  CDR3 for alpha chain variable domain of TCR clone 335041 (TRAV21, TRAJ52)
CAVRPSPAGGTSYGKLTF

SEQ ID NO: 670082 - protein, 15 aa, Homo sapiens
  CDR3 for beta chain variable domain of TCR clone 335041 (TRBV12-4, TRBJ2-5)
CAGSPPTGLQETQYF

SEQ ID NO: 670083 - protein, 14 aa, Homo sapiens
  CDR3 for alpha chain variable domain of TCR clone 335042 (TRAV21, TRAJ45)
SAVSSGGGADGLTF

SEQ ID NO: 670084 - protein, 15 aa, Homo sapiens
  CDR3 for beta chain variable domain of TCR clone 335042 (TRBV6-1, TRBJ2-4)
CASSEAVWTINIQYF

SEQ ID NO: 670085 - protein, 14 aa, Homo sapiens
  CDR3 for alpha chain variable domain of TCR clone 335043 (TRAV16, TRAJ17)
CAPRSKAAGNKLTF

SEQ ID NO: 670086 - protein, 17 aa, Homo sapiens
  CDR3 for beta chain variable domain of TCR clone 335043 (TRBV7-2, TRBJ2-3)
CASSSYSGTRRADTQYF

SEQ ID NO: 670087 - protein, 12 aa, Homo sapiens
  CDR3 for alpha chain variable domain of TCR clone 335044 (TRAV12-3, TRAJ17)
CAMTLTGNKLTF

SEQ ID NO: 670088 - protein, 16 aa, Homo sapiens
  CDR3 for beta chain variable domain of TCR clone 335044 (TRBV7-9, TRBJ2-3)
CASSFSVAGGTDTQYF

SEQ ID NO: 670089 - protein, 13 aa, Homo sapiens
  CDR3 for alpha chain variable domain of TCR clone 335045 (TRAV20, TRAJ40)
CAVRTSGTYKYIF

SEQ ID NO: 670090 - protein, 16 aa, Homo sapiens
  CDR3 for beta chain variable domain of TCR clone 335045 (TRBV10-2, TRBJ2-7)
CASSESTGASSYEQYF

SEQ ID NO: 670091 - protein, 12 aa, Homo sapiens
  CDR3 for alpha chain variable domain of TCR clone 335046 (TRAV1-1, TRAJ39)
CAVPVVGNMLTF

SEQ ID NO: 670092 - protein, 15 aa, Homo sapiens
  CDR3 for beta chain variable domain of TCR clone 335046 (TRBV7-3, TRBJ2-2)
CASIETGQGTGELFF

SEQ ID NO: 670093 - protein, 14 aa, Homo sapiens
  CDR3 for alpha chain variable domain of TCR clone 335047 (TRAV13-1, TRAJ35)
CAASKGGFGNFLHC

SEQ ID NO: 670094 - protein, 13 aa, Homo sapiens
  CDR3 for beta chain variable domain of TCR clone 335047 (TRBV7-3, TRBJ1-1)
CASSQDWGAEAFF

SEQ ID NO: 670095 - protein, 17 aa, Homo sapiens
  CDR3 for alpha chain variable domain of TCR clone 335048 (TRAV26-2, TRAJ42)
CILRDVGYGGSQGNLIF

SEQ ID NO: 670096 - protein, 16 aa, Homo sapiens
  CDR3 for beta chain variable domain of TCR clone 335048 (TRBV12-4, TRBJ2-7)
CASSLIGGKGTYEQYF

SEQ ID NO: 670097 - protein, 16 aa, Homo sapiens
  CDR3 for alpha chain variable domain of TCR clone 335049 (TRAV30, TRAJ24)
CGTEIVDADSWGKFQF

SEQ ID NO: 670098 - protein, 13 aa, Homo sapiens
  CDR3 for beta chain variable domain of TCR clone 335049 (TRBV20-1, TRBJ1-4)
CSARTPYNEKLFF

SEQ ID NO: 670099 - protein, 14 aa, Homo sapiens
  CDR3 for alpha chain variable domain of TCR clone 335050 (TRAV3, TRAJ21)
CAVESQANFNKFYF

SEQ ID NO: 670100 - protein, 12 aa, Homo sapiens
  CDR3 for beta chain variable domain of TCR clone 335050 (TRBV6-3, TRBJ2-7)
CASSLTPYEQYV

SEQ ID NO: 670101 - protein, 12 aa, Homo sapiens
  CDR3 for alpha chain variable domain of TCR clone 335051 (TRAV8-4, TRAJ13)
GVSDGGYQKVTF

SEQ ID NO: 670102 - protein, 15 aa, Homo sapiens
  CDR3 for beta chain variable domain of TCR clone 335051 (TRBV12-4, TRBJ1-1)
CASSLAVSRGAEAFF

SEQ ID NO: 670103 - protein, 13 aa, Homo sapiens
  CDR3 for alpha chain variable domain of TCR clone 335052 (TRAV36/DV7, TRAJ38)
CVANAGNNRKLIW

SEQ ID NO: 670104 - protein, 13 aa, Homo sapiens
  CDR3 for beta chain variable domain of TCR clone 335052 (TRBV20-1, TRBJ2-5)
CSARGDYHETQYF

SEQ ID NO: 670105 - protein, 13 aa, Homo sapiens
  CDR3 for alpha chain variable domain of TCR clone 335053 (TRAV26-1, TRAJ54)
CIVRVKGAQKLVF

SEQ ID NO: 670106 - protein, 14 aa, Homo sapiens
  CDR3 for beta chain variable domain of TCR clone 335053 (TRBV19, TRBJ2-1)
CASPTFVLSGEQFF

SEQ ID NO: 670107 - protein, 14 aa, Homo sapiens
  CDR3 for alpha chain variable domain of TCR clone 335054 (TRAV3, TRAJ40)
CAVRDRRGTYKYIF

SEQ ID NO: 670108 - protein, 15 aa, Homo sapiens
  CDR3 for beta chain variable domain of TCR clone 335054 (TRBV28, TRBJ2-1)
CASSIIAGGRGEQFF

SEQ ID NO: 670109 - protein, 16 aa, Homo sapiens
  CDR3 for alpha chain variable domain of TCR clone 335055 (TRAV35, TRAJ28)
CAGQKYSGAGSYQLTF

SEQ ID NO: 670110 - protein, 13 aa, Homo sapiens
  CDR3 for beta chain variable domain of TCR clone 335055 (TRBV19, TRBJ2-7)
CASSQGQVYGYTF

SEQ ID NO: 670111 - protein, 12 aa, Homo sapiens
  CDR3 for alpha chain variable domain of TCR clone 335056 (TRAV21, TRAJ33)
CAKMDSNYQLIW

SEQ ID NO: 670112 - protein, 15 aa, Homo sapiens
  CDR3 for beta chain variable domain of TCR clone 335056 (TRBV13, TRBJ1-5)
CASSFGQGGVQSQHF

SEQ ID NO: 670113 - protein, 12 aa, Homo sapiens
  CDR3 for alpha chain variable domain of TCR clone 335057 (TRAV1-1, TRAJ8)
CAGGTGFQKLVF

SEQ ID NO: 670114 - protein, 13 aa, Homo sapiens
  CDR3 for beta chain variable domain of TCR clone 335057 (TRBV7-9, TRBJ1-2)
CARSLKQNYGYTF

SEQ ID NO: 670115 - protein, 15 aa, Homo sapiens
  CDR3 for alpha chain variable domain of TCR clone 335058 (TRAV38-2/DV8, TRAJ45)
CAYWDSGGGADGLTF

SEQ ID NO: 670116 - protein, 14 aa, Homo sapiens
  CDR3 for beta chain variable domain of TCR clone 335058 (TRBV12-5, TRBJ2-5)
CASGSRTHQETQYF

SEQ ID NO: 670117 - protein, 14 aa, Homo sapiens
  CDR3 for alpha chain variable domain of TCR clone 335059 (TRAV3, TRAJ21)
CAVESQANFNKFYF

SEQ ID NO: 670118 - protein, 18 aa, Homo sapiens
  CDR3 for beta chain variable domain of TCR clone 335059 (TRBV7-9, TRBJ2-1)
CASSFAVSGTSGRNEQFF

SEQ ID NO: 670119 - protein, 15 aa, Homo sapiens
  CDR3 for alpha chain variable domain of TCR clone 335060 (TRAV27, TRAJ38)
CAARRNAGTNRKLIW

SEQ ID NO: 670120 - protein, 13 aa, Homo sapiens
  CDR3 for beta chain variable domain of TCR clone 335060 (TRBV7-3, TRBJ2-1)
CASSLDSYNEQFF

SEQ ID NO: 670121 - protein, 13 aa, Homo sapiens
  CDR3 for alpha chain variable domain of TCR clone 335061 (TRAV21, TRAJ20)
CAVGLRVDYKLSF

SEQ ID NO: 670122 - protein, 15 aa, Homo sapiens
  CDR3 for beta chain variable domain of TCR clone 335061 (TRBV28, TRBJ1-3)
CASSMGWASGNTIYF

SEQ ID NO: 670123 - protein, 14 aa, Homo sapiens
  CDR3 for alpha chain variable domain of TCR clone 335062 (TRAV17, TRAJ12)
CAILPMDSSYKLIF

SEQ ID NO: 670124 - protein, 14 aa, Homo sapiens
  CDR3 for beta chain variable domain of TCR clone 335062 (TRBV18, TRBJ2-7)
CASSPRGRAYEQYF

SEQ ID NO: 670125 - protein, 14 aa, Homo sapiens
  CDR3 for alpha chain variable domain of TCR clone 335063 (TRAV8-3, TRAJ4)
CAVGAAGGYNKLIF

SEQ ID NO: 670126 - protein, 17 aa, Homo sapiens
  CDR3 for beta chain variable domain of TCR clone 335063 (TRBV7-3, TRBJ2-2)
CASSLSGTSGGTGELFF

SEQ ID NO: 670127 - protein, 12 aa, Homo sapiens
  CDR3 for alpha chain variable domain of TCR clone 335064 (TRAV21, TRAJ23)
CAVGPQGGKLIF

SEQ ID NO: 670128 - protein, 13 aa, Homo sapiens
  CDR3 for beta chain variable domain of TCR clone 335064 (TRBV20-1, TRBJ2-7)
CSTREGAGYEQYF

SEQ ID NO: 670129 - protein, 13 aa, Homo sapiens
  CDR3 for alpha chain variable domain of TCR clone 335065 (TRAV3, TRAJ27)
CAVRPLAAGKSTF

SEQ ID NO: 670130 - protein, 13 aa, Homo sapiens
  CDR3 for beta chain variable domain of TCR clone 335065 (TRBV7-9, TRBJ2-3)
CASSPGSTETQYF

SEQ ID NO: 670131 - protein, 12 aa, Homo sapiens
  CDR3 for alpha chain variable domain of TCR clone 335066 (TRAV13-1, TRAJ21)
CAAKEGFNKFYF

SEQ ID NO: 670132 - protein, 12 aa, Homo sapiens
  CDR3 for beta chain variable domain of TCR clone 335066 (TRBV7-2, TRBJ1-5)
CASSLWSQPQHF

SEQ ID NO: 670133 - protein, 19 aa, Homo sapiens
  CDR3 for alpha chain variable domain of TCR clone 335067 (TRAV25, TRAJ20)
TATQTTDVGILPHDYKLSL

SEQ ID NO: 670134 - protein, 14 aa, Homo sapiens
  CDR3 for beta chain variable domain of TCR clone 335067 (TRBV7-6, TRBJ2-3)
CASSLGTVTDTQYF

SEQ ID NO: 670135 - protein, 14 aa, Homo sapiens
  CDR3 for alpha chain variable domain of TCR clone 335068 (TRAV23/DV6, TRAJ8)
CAASKATGFQKLVL

SEQ ID NO: 670136 - protein, 15 aa, Homo sapiens
  CDR3 for beta chain variable domain of TCR clone 335068 (TRBV28, TRBJ2-3)
CASSPDRQGANTQYF

SEQ ID NO: 670137 - protein, 14 aa, Homo sapiens
  CDR3 for alpha chain variable domain of TCR clone 335069 (TRAV12-2, TRAJ13)
CAVKKTGGYQKVTF

SEQ ID NO: 670138 - protein, 15 aa, Homo sapiens
  CDR3 for beta chain variable domain of TCR clone 335069 (TRBV27, TRBJ2-1)
CASSNGGGSSNEEFL

SEQ ID NO: 670139 - protein, 14 aa, Homo sapiens
  CDR3 for alpha chain variable domain of TCR clone 335070 (TRAV12-2, TRAJ13)
CAVKKTGGYQKFTF

SEQ ID NO: 670140 - protein, 18 aa, Homo sapiens
  CDR3 for beta chain variable domain of TCR clone 335070 (TRBV20-1, TRBJ2-3)
CSASGLAGGPGTTGTQYF

SEQ ID NO: 670141 - protein, 15 aa, Homo sapiens
  CDR3 for alpha chain variable domain of TCR clone 335071 (TRAV27, TRAJ38)
CAARRNAGNNRKLIW

SEQ ID NO: 670142 - protein, 13 aa, Homo sapiens
  CDR3 for beta chain variable domain of TCR clone 335071 (TRBV12-5, TRBJ2-3)
CASGDRPPDTQYL

SEQ ID NO: 670143 - protein, 11 aa, Homo sapiens
  CDR3 for alpha chain variable domain of TCR clone 335072 (TRAV1-2, TRAJ20)
CAVANDYTLSF

SEQ ID NO: 670144 - protein, 14 aa, Homo sapiens
  CDR3 for beta chain variable domain of TCR clone 335072 (TRBV7-9, TRBJ1-1)
CASTPLQSYTEAFF

SEQ ID NO: 670145 - protein, 16 aa, Homo sapiens
  CDR3 for alpha chain variable domain of TCR clone 335073 (TRAV16, TRAJ42)
CARKMNYGGSQGNLIF

SEQ ID NO: 670146 - protein, 14 aa, Homo sapiens
  CDR3 for beta chain variable domain of TCR clone 335073 (TRBV14, TRBJ2-3)
GQQPDDRDTDTQYF

SEQ ID NO: 670147 - protein, 17 aa, Homo sapiens
  CDR3 for alpha chain variable domain of TCR clone 335074 (TRAV20, TRAJ32)
CAVQRENYGGATNKLIF

SEQ ID NO: 670148 - protein, 15 aa, Homo sapiens
  CDR3 for beta chain variable domain of TCR clone 335074 (TRBV18, TRBJ2-1)
CASSPRGSPYNEQFF

SEQ ID NO: 670149 - protein, 12 aa, Homo sapiens
  CDR3 for alpha chain variable domain of TCR clone 335075 (TRAV27, TRAJ33)
CAGEDSNYQLIW

SEQ ID NO: 670150 - protein, 17 aa, Homo sapiens
  CDR3 for beta chain variable domain of TCR clone 335075 (TRBV7-3, TRBJ1-3)
CASSPLGRGTPGNIIYF

SEQ ID NO: 670151 - protein, 13 aa, Homo sapiens
  CDR3 for alpha chain variable domain of TCR clone 335076 (TRAV27, TRAJ49)
CAPRPYTGNQFYF

SEQ ID NO: 670152 - protein, 13 aa, Homo sapiens
  CDR3 for beta chain variable domain of TCR clone 335076 (TRBV12-4, TRBJ1-2)
CASSLRQGKGYTF

SEQ ID NO: 670153 - protein, 15 aa, Homo sapiens
  CDR3 for alpha chain variable domain of TCR clone 335077 (TRAV8-6, TRAJ4)
CAVSEKMVFGAGTRL

SEQ ID NO: 670154 - protein, 14 aa, Homo sapiens
  CDR3 for beta chain variable domain of TCR clone 335077 (TRBV20-1, TRBJ1-1)
CSAQTRIGGTEAFF

SEQ ID NO: 670155 - protein, 12 aa, Homo sapiens
  CDR3 for alpha chain variable domain of TCR clone 335078 (TRAV8-1, TRAJ40)
CAAVSGTYKYIF

SEQ ID NO: 670156 - protein, 13 aa, Homo sapiens
  CDR3 for beta chain variable domain of TCR clone 335078 (TRBV7-9, TRBJ1-2)
CASSLKQNYGYTF

SEQ ID NO: 670157 - protein, 13 aa, Homo sapiens
  CDR3 for alpha chain variable domain of TCR clone 335079 (TRAV8-6, TRAJ50)
CAVIKTSYDKVIF

SEQ ID NO: 670158 - protein, 16 aa, Homo sapiens
  CDR3 for beta chain variable domain of TCR clone 335079 (TRBV7-3, TRBJ2-2)
CASSLKRGTSSGELFF

SEQ ID NO: 670159 - protein, 13 aa, Homo sapiens
  CDR3 for alpha chain variable domain of TCR clone 335080 (TRAV8-4, TRAJ48)
RAVSLFGNEKLTF

SEQ ID NO: 670160 - protein, 15 aa, Homo sapiens
  CDR3 for beta chain variable domain of TCR clone 335080 (TRBV20-1, TRBJ2-7)
CSARKGRAESYEQYF

SEQ ID NO: 670161 - protein, 15 aa, Homo sapiens
  CDR3 for alpha chain variable domain of TCR clone 335081 (TRAV12-2, TRAJ57)
CAVSRGQGGSEKLVF

SEQ ID NO: 670162 - protein, 14 aa, Homo sapiens
  CDR3 for beta chain variable domain of TCR clone 335081 (TRBV20-1, TRBJ2-1)
CSAHPVLPYNEQFF

SEQ ID NO: 670163 - protein, 14 aa, Homo sapiens
  CDR3 for alpha chain variable domain of TCR clone 335082 (TRAV17, TRAJ33)
CATGARRSNYQLIW

SEQ ID NO: 670164 - protein, 14 aa, Homo sapiens
  CDR3 for beta chain variable domain of TCR clone 335082 (TRBV25-1, TRBJ1-4)
CASSGGGQPEKLFF

SEQ ID NO: 670165 - protein, 11 aa, Homo sapiens
  CDR3 for alpha chain variable domain of TCR clone 335083 (TRAV2, TRAJ23)
CALETRGKLIF

SEQ ID NO: 670166 - protein, 14 aa, Homo sapiens
  CDR3 for beta chain variable domain of TCR clone 335083 (TRBV2, TRBJ2-3)
CASSEGQDTDTQYF

SEQ ID NO: 670167 - protein, 18 aa, Homo sapiens
  CDR3 for alpha chain variable domain of TCR clone 335084 (TRAV21, TRAJ52)
CAVRPSPAGGTSYGKMKF

SEQ ID NO: 670168 - protein, 13 aa, Homo sapiens
  CDR3 for beta chain variable domain of TCR clone 335084 (TRBV29-1, TRBJ2-1)
CSVEGGRVNEQFF

SEQ ID NO: 670169 - protein, 12 aa, Homo sapiens
  CDR3 for alpha chain variable domain of TCR clone 335085 (TRAV12-3, TRAJ17)
CAMTLTGNKLTF

SEQ ID NO: 670170 - protein, 12 aa, Homo sapiens
  CDR3 for beta chain variable domain of TCR clone 335085 (TRBV11-2, TRBJ2-7)
CASSPPADEQYF

SEQ ID NO: 670171 - protein, 17 aa, Homo sapiens
  CDR3 for alpha chain variable domain of TCR clone 335086 (TRAV26-1, TRAJ37)
CIVRVITVSSNTGKLIF

SEQ ID NO: 670172 - protein, 19 aa, Homo sapiens
  CDR3 for beta chain variable domain of TCR clone 335086 (TRBV25-1, TRBJ2-2)
CAILVYRVDRGRKTGELFF

SEQ ID NO: 670173 - protein, 16 aa, Homo sapiens
  CDR3 for alpha chain variable domain of TCR clone 335087 (TRAV27, TRAJ13)
CAGAKSDSGGYQKVTF

SEQ ID NO: 670174 - protein, 11 aa, Homo sapiens
  CDR3 for beta chain variable domain of TCR clone 335087 (TRBV11-2, TRBJ2-2)
CASSLPGEPFF

SEQ ID NO: 670175 - protein, 14 aa, Homo sapiens
  CDR3 for alpha chain variable domain of TCR clone 335088 (TRAV1-2, TRAJ8)
CAVREDTGFQKLEF

SEQ ID NO: 670176 - protein, 15 aa, Homo sapiens
  CDR3 for beta chain variable domain of TCR clone 335088 (TRBV7-2, TRBJ2-1)
CASSPLAGEYNEQFF

SEQ ID NO: 670177 - protein, 14 aa, Homo sapiens
  CDR3 for alpha chain variable domain of TCR clone 335089 (TRAV12-1, TRAJ3)
CGAARYSGASKIIF

SEQ ID NO: 670178 - protein, 15 aa, Homo sapiens
  CDR3 for beta chain variable domain of TCR clone 335089 (TRBV7-2, TRBJ2-6)
CASSREGSGANVLTF

SEQ ID NO: 670179 - protein, 16 aa, Homo sapiens
  CDR3 for alpha chain variable domain of TCR clone 335090 (TRAV3, TRAJ10)
CAVRDMRAGGGNKLTF

SEQ ID NO: 670180 - protein, 15 aa, Homo sapiens
  CDR3 for beta chain variable domain of TCR clone 335090 (TRBV5-1, TRBJ1-4)
FAPAAWKDGNEKLFF

SEQ ID NO: 670181 - protein, 13 aa, Homo sapiens
  CDR3 for alpha chain variable domain of TCR clone 335091 (TRAV22, TRAJ26)
CAVENNYVQNFVF

SEQ ID NO: 670182 - protein, 16 aa, Homo sapiens
  CDR3 for beta chain variable domain of TCR clone 335091 (TRBV7-2, TRBJ2-6)
CASSERRASGANVLTF

SEQ ID NO: 670183 - protein, 16 aa, Homo sapiens
  CDR3 for alpha chain variable domain of TCR clone 335092 (TRAV12-3, TRAJ53)
CAMSPGSGGSNYKLTF

SEQ ID NO: 670184 - protein, 13 aa, Homo sapiens
  CDR3 for beta chain variable domain of TCR clone 335092 (TRBV19, TRBJ2-5)
CASSIPYGETQYF

SEQ ID NO: 670185 - protein, 16 aa, Homo sapiens
  CDR3 for alpha chain variable domain of TCR clone 335093 (TRAV12-3, TRAJ4)
CAMTRLFSGGYNKLSF

SEQ ID NO: 670186 - protein, 16 aa, Homo sapiens
  CDR3 for beta chain variable domain of TCR clone 335093 (TRBV27, TRBJ2-1)
CASSARLAGVYNEQFF

SEQ ID NO: 670187 - protein, 14 aa, Homo sapiens
  CDR3 for alpha chain variable domain of TCR clone 335094 (TRAV1-2, TRAJ16)
CAVYRFSDGQKLFF

SEQ ID NO: 670188 - protein, 14 aa, Homo sapiens
  CDR3 for beta chain variable domain of TCR clone 335094 (TRBV7-2, TRBJ2-7)
CASSPKTSFYEQYF

SEQ ID NO: 670189 - protein, 13 aa, Homo sapiens
  CDR3 for alpha chain variable domain of TCR clone 335095 (TRAV13-2, TRAJ13)
CEERPGGYQKVTF

SEQ ID NO: 670190 - protein, 14 aa, Homo sapiens
  CDR3 for beta chain variable domain of TCR clone 335095 (TRBV23-1, TRBJ2-5)
CASSFLRSQETQYF

SEQ ID NO: 670191 - protein, 13 aa, Homo sapiens
  CDR3 for alpha chain variable domain of TCR clone 335096 (TRAV17, TRAJ29)
CATDAFRKNTSCL

SEQ ID NO: 670192 - protein, 13 aa, Homo sapiens
  CDR3 for beta chain variable domain of TCR clone 335096 (TRBV5-7, TRBJ2-6)
CASTSSGANVLTF

SEQ ID NO: 670193 - protein, 14 aa, Homo sapiens
  CDR3 for alpha chain variable domain of TCR clone 335097 (TRAV1-2, TRAJ16)
CAVNRFSDGQKLLF

SEQ ID NO: 670194 - protein, 13 aa, Homo sapiens
  CDR3 for beta chain variable domain of TCR clone 335097 (TRBV10-3, TRBJ1-2)
CAISERDSYGYAF

SEQ ID NO: 670195 - protein, 18 aa, Homo sapiens
  CDR3 for alpha chain variable domain of TCR clone 335098 (TRAV21, TRAJ52)
CAVRPSPAGGTSYGRLTF

SEQ ID NO: 670196 - protein, 19 aa, Homo sapiens
  CDR3 for beta chain variable domain of TCR clone 335098 (TRBV25-1, TRBJ2-2)
CAILVYRVDRGRKTGELFF

SEQ ID NO: 670197 - protein, 15 aa, Homo sapiens
  CDR3 for alpha chain variable domain of TCR clone 335099 (TRAV26-1, TRAJ44)
CIARVPFVTASKLTF

SEQ ID NO: 670198 - protein, 17 aa, Homo sapiens
  CDR3 for beta chain variable domain of TCR clone 335099 (TRBV24-1, TRBJ2-4)
CATSDAEARGVRNIQYF

SEQ ID NO: 670199 - protein, 11 aa, Homo sapiens
  CDR3 for alpha chain variable domain of TCR clone 335100 (TRAV2, TRAJ13)
CASGGYQKVTF

SEQ ID NO: 670200 - protein, 15 aa, Homo sapiens
  CDR3 for beta chain variable domain of TCR clone 335100 (TRBV5-1, TRBJ2-1)
GASSPPRAPYNEQFF

SEQ ID NO: 670201 - protein, 13 aa, Homo sapiens
  CDR3 for alpha chain variable domain of TCR clone 335101 (TRAV3, TRAJ27)
CAVRPLGAAKSTF

SEQ ID NO: 670202 - protein, 14 aa, Homo sapiens
  CDR3 for beta chain variable domain of TCR clone 335101 (TRBV7-2, TRBJ1-1)
CASSFLTGTTEAFF

SEQ ID NO: 670203 - protein, 10 aa, Homo sapiens
  CDR3 for alpha chain variable domain of TCR clone 335102 (TRAV8-4, TRAJ43)
CAVSADDMRF

SEQ ID NO: 670204 - protein, 12 aa, Homo sapiens
  CDR3 for beta chain variable domain of TCR clone 335102 (TRBV28, TRBJ2-7)
CASSTPGGEQYF

SEQ ID NO: 670205 - protein, 11 aa, Homo sapiens
  CDR3 for alpha chain variable domain of TCR clone 335103 (TRAV2, TRAJ13)
CASGGYQKVTF

SEQ ID NO: 670206 - protein, 15 aa, Homo sapiens
  CDR3 for beta chain variable domain of TCR clone 335103 (TRBV7-2, TRBJ2-7)
CASSWGQGAIYEQYF

SEQ ID NO: 670207 - protein, 14 aa, Homo sapiens
  CDR3 for alpha chain variable domain of TCR clone 335104 (TRAV17, TRAJ57)
CATDPQGGSENLVF

SEQ ID NO: 670208 - protein, 14 aa, Homo sapiens
  CDR3 for beta chain variable domain of TCR clone 335104 (TRBV11-2, TRBJ2-3)
CASSLGGGANTQYF

SEQ ID NO: 670209 - protein, 19 aa, Homo sapiens
  CDR3 for alpha chain variable domain of TCR clone 335105 (TRAV13-1, TRAJ52)
CAASPYQNAGGTSYGKLTF

SEQ ID NO: 670210 - protein, 12 aa, Homo sapiens
  CDR3 for beta chain variable domain of TCR clone 335105 (TRBV11-2, TRBJ2-2)
CASSLPTGELFF

SEQ ID NO: 670211 - protein, 14 aa, Homo sapiens
  CDR3 for alpha chain variable domain of TCR clone 335106 (TRAV1-2, TRAJ16)
CAVNRFSDGQKLLF

SEQ ID NO: 670212 - protein, 14 aa, Homo sapiens
  CDR3 for beta chain variable domain of TCR clone 335106 (TRBV12-4, TRBJ2-7)
CASSLTGRAYEQYF

SEQ ID NO: 670213 - protein, 13 aa, Homo sapiens
  CDR3 for alpha chain variable domain of TCR clone 335107 (TRAV1-2, TRAJ9)
CAALNTGGFKTNF

SEQ ID NO: 670214 - protein, 15 aa, Homo sapiens
  CDR3 for beta chain variable domain of TCR clone 335107 (TRBV6-3, TRBJ2-7)
CASSSPGTVFYEQYF

SEQ ID NO: 670215 - protein, 16 aa, Homo sapiens
  CDR3 for alpha chain variable domain of TCR clone 335108 (TRAV17, TRAJ53)
CATDALSVGSNYKLTF

SEQ ID NO: 670216 - protein, 15 aa, Homo sapiens
  CDR3 for beta chain variable domain of TCR clone 335108 (TRBV20-1, TRBJ2-7)
CSARDRVSGMDEQYF

SEQ ID NO: 670217 - protein, 12 aa, Homo sapiens
  CDR3 for alpha chain variable domain of TCR clone 335109 (TRAV1-1, TRAJ39)
CAVPVVGNMLTF

SEQ ID NO: 670218 - protein, 15 aa, Homo sapiens
  CDR3 for beta chain variable domain of TCR clone 335109 (TRBV9, TRBJ1-6)
CASSVAGTGDSPLHF

SEQ ID NO: 670219 - protein, 13 aa, Homo sapiens
  CDR3 for alpha chain variable domain of TCR clone 335110 (TRAV16, TRAJ48)
CSPLNFGNEKLTF

SEQ ID NO: 670220 - protein, 11 aa, Homo sapiens
  CDR3 for beta chain variable domain of TCR clone 335110 (TRBV7-9, TRBJ2-3)
CASSPADTQYF

SEQ ID NO: 670221 - protein, 16 aa, Homo sapiens
  CDR3 for alpha chain variable domain of TCR clone 335111 (TRAV12-2, TRAJ10)
CAVNRVLTGGGNKLTF

SEQ ID NO: 670222 - protein, 14 aa, Homo sapiens
  CDR3 for beta chain variable domain of TCR clone 335111 (TRBV9, TRBJ2-1)
CASSVDLAVNEQFF

SEQ ID NO: 670223 - protein, 13 aa, Homo sapiens
  CDR3 for alpha chain variable domain of TCR clone 335112 (TRAV38-2/DV8, TRAJ34)
CAYRTWNTDKLIF

SEQ ID NO: 670224 - protein, 14 aa, Homo sapiens
  CDR3 for beta chain variable domain of TCR clone 335112 (TRBV19, TRBJ2-2)
CASSGQGIAGELFF

SEQ ID NO: 670225 - protein, 16 aa, Homo sapiens
  CDR3 for alpha chain variable domain of TCR clone 335113 (TRAV3, TRAJ5)
CAVRNLMDTRRRALTV

SEQ ID NO: 670226 - protein, 16 aa, Homo sapiens
  CDR3 for beta chain variable domain of TCR clone 335113 (TRBV4-2, TRBJ2-7)
CASSQEGLANSYEQYF

SEQ ID NO: 670227 - protein, 15 aa, Homo sapiens
  CDR3 for alpha chain variable domain of TCR clone 335114 (TRAV8-4, TRAJ8)
CAVSDLNTGFQKLLF

SEQ ID NO: 670228 - protein, 14 aa, Homo sapiens
  CDR3 for beta chain variable domain of TCR clone 335114 (TRBV7-2, TRBJ2-3)
CASSQTGSSYTQYF

SEQ ID NO: 670229 - protein, 13 aa, Homo sapiens
  CDR3 for alpha chain variable domain of TCR clone 335115 (TRAV16, TRAJ29)
CALSRRGNTPLVF

SEQ ID NO: 670230 - protein, 12 aa, Homo sapiens
  CDR3 for beta chain variable domain of TCR clone 335115 (TRBV14, TRBJ2-7)
CASSLYKDEQYF

SEQ ID NO: 670231 - protein, 19 aa, Homo sapiens
  CDR3 for alpha chain variable domain of TCR clone 335116 (TRAV9-2, TRAJ52)
CALSFSLLSGGTSYGKLTF

SEQ ID NO: 670232 - protein, 14 aa, Homo sapiens
  CDR3 for beta chain variable domain of TCR clone 335116 (TRBV7-6, TRBJ2-7)
CASILFQDSYEQYF

SEQ ID NO: 670233 - protein, 10 aa, Homo sapiens
  CDR3 for alpha chain variable domain of TCR clone 335117 (TRAV1-2, TRAJ31)
CAFFDARLMF

SEQ ID NO: 670234 - protein, 14 aa, Homo sapiens
  CDR3 for beta chain variable domain of TCR clone 335117 (TRBV20-1, TRBJ2-5)
CSAKGLAGIQTQYF

SEQ ID NO: 670235 - protein, 13 aa, Homo sapiens
  CDR3 for alpha chain variable domain of TCR clone 335118 (TRAV23/DV6, TRAJ58)
CAARLIRGSRLTF

SEQ ID NO: 670236 - protein, 13 aa, Homo sapiens
  CDR3 for beta chain variable domain of TCR clone 335118 (TRBV2, TRBJ1-6)
CADSGSYNSTLHF

SEQ ID NO: 670237 - protein, 12 aa, Homo sapiens
  CDR3 for alpha chain variable domain of TCR clone 335119 (TRAV21, TRAJ33)
CAKMDSNYQLIW

SEQ ID NO: 670238 - protein, 15 aa, Homo sapiens
  CDR3 for beta chain variable domain of TCR clone 335119 (TRBV7-3, TRBJ2-1)
CASSLSSGSFDEQFF

SEQ ID NO: 670239 - protein, 13 aa, Homo sapiens
  CDR3 for alpha chain variable domain of TCR clone 335120 (TRAV13-1, TRAJ39)
CSKYSNAGNMLTF

SEQ ID NO: 670240 - protein, 15 aa, Homo sapiens
  CDR3 for beta chain variable domain of TCR clone 335120 (TRBV20-1, TRBJ1-4)
CSAPGQGLTNEKLFF

SEQ ID NO: 670241 - protein, 15 aa, Homo sapiens
  CDR3 for alpha chain variable domain of TCR clone 335121 (TRAV12-3, TRAJ6)
CAMSETTGGSYIPTF

SEQ ID NO: 670242 - protein, 14 aa, Homo sapiens
  CDR3 for beta chain variable domain of TCR clone 335121 (TRBV9, TRBJ1-2)
CAGSVSTRSYGYTF

SEQ ID NO: 670243 - protein, 13 aa, Homo sapiens
  CDR3 for alpha chain variable domain of TCR clone 335122 (TRAV2, TRAJ29)
CAVEPSGNTPLVF

SEQ ID NO: 670244 - protein, 17 aa, Homo sapiens
  CDR3 for beta chain variable domain of TCR clone 335122 (TRBV7-8, TRBJ2-6)
CASSAGTGGAGANVLTF

SEQ ID NO: 670245 - protein, 13 aa, Homo sapiens
  CDR3 for alpha chain variable domain of TCR clone 335123 (TRAV27, TRAJ45)
CRSSGGGADGLTF

SEQ ID NO: 670246 - protein, 15 aa, Homo sapiens
  CDR3 for beta chain variable domain of TCR clone 335123 (TRBV6-6, TRBJ2-7)
CASSYSYGGSYEQYF

SEQ ID NO: 670247 - protein, 18 aa, Homo sapiens
  CDR3 for alpha chain variable domain of TCR clone 335124 (TRAV3, TRAJ17)
CAVRARRVGRSCRQQANF

SEQ ID NO: 670248 - protein, 14 aa, Homo sapiens
  CDR3 for beta chain variable domain of TCR clone 335124 (TRBV4-1, TRBJ2-2)
CASSQAVNTGELFF

SEQ ID NO: 670249 - protein, 12 aa, Homo sapiens
  CDR3 for alpha chain variable domain of TCR clone 335125 (TRAV12-3, TRAJ20)
CAMVRGDYKLSF

SEQ ID NO: 670250 - protein, 15 aa, Homo sapiens
  CDR3 for beta chain variable domain of TCR clone 335125 (TRBV6-6, TRBJ2-7)
CASSYSYGGSYEQYF

SEQ ID NO: 670251 - protein, 12 aa, Homo sapiens
  CDR3 for alpha chain variable domain of TCR clone 335126 (TRAV8-3, TRAJ26)
CAGDNYGKNFVF

SEQ ID NO: 670252 - protein, 18 aa, Homo sapiens
  CDR3 for beta chain variable domain of TCR clone 335126 (TRBV27, TRBJ2-1)
CASGNRAVGVGSKNEQFF

SEQ ID NO: 670253 - protein, 15 aa, Homo sapiens
  CDR3 for alpha chain variable domain of TCR clone 335127 (TRAV12-3, TRAJ6)
CAMSAASGGIYIPTF

SEQ ID NO: 670254 - protein, 13 aa, Homo sapiens
  CDR3 for beta chain variable domain of TCR clone 335127 (TRBV20-1, TRBJ1-2)
CSASTERIYGYTF

SEQ ID NO: 670255 - protein, 12 aa, Homo sapiens
  CDR3 for alpha chain variable domain of TCR clone 335128 (TRAV12-3, TRAJ17)
CAMTLTGNKLTF

SEQ ID NO: 670256 - protein, 13 aa, Homo sapiens
  CDR3 for beta chain variable domain of TCR clone 335128 (TRBV5-4, TRBJ2-5)
CASSPVSQETQYF

SEQ ID NO: 670257 - protein, 13 aa, Homo sapiens
  CDR3 for alpha chain variable domain of TCR clone 335129 (TRAV12-2, TRAJ40)
CREDPLRNLKYIF

SEQ ID NO: 670258 - protein, 14 aa, Homo sapiens
  CDR3 for beta chain variable domain of TCR clone 335129 (TRBV18, TRBJ2-5)
CASSPLRVQETQYF

SEQ ID NO: 670259 - protein, 11 aa, Homo sapiens
  CDR3 for alpha chain variable domain of TCR clone 335130 (TRAV1-1, TRAJ23)
CALRQGGKLIF

SEQ ID NO: 670260 - protein, 20 aa, Homo sapiens
  CDR3 for beta chain variable domain of TCR clone 335130 (TRBV7-8, TRBJ2-2)
CASSHFFPGPTIHITGELFF

SEQ ID NO: 670261 - protein, 17 aa, Homo sapiens
  CDR3 for alpha chain variable domain of TCR clone 335131 (TRAV13-1, TRAJ31)
CAPRDRLMFGDGTQLVV

SEQ ID NO: 670262 - protein, 14 aa, Homo sapiens
  CDR3 for beta chain variable domain of TCR clone 335131 (TRBV19, TRBJ2-2)
CARTVTANTGELFF

SEQ ID NO: 670263 - protein, 15 aa, Homo sapiens
  CDR3 for alpha chain variable domain of TCR clone 335132 (TRAV12-1, TRAJ9)
CVVSFGDTGGFKTIF

SEQ ID NO: 670264 - protein, 19 aa, Homo sapiens
  CDR3 for beta chain variable domain of TCR clone 335132 (TRBV25-1, TRBJ2-2)
CAILVYRVDRGRKTEELFF

SEQ ID NO: 670265 - protein, 13 aa, Homo sapiens
  CDR3 for alpha chain variable domain of TCR clone 335133 (TRAV21, TRAJ27)
CAARPGNAGKATL

SEQ ID NO: 670266 - protein, 14 aa, Homo sapiens
  CDR3 for beta chain variable domain of TCR clone 335133 (TRBV7-6, TRBJ2-3)
CASSLGTVTDTQYF

SEQ ID NO: 670267 - protein, 14 aa, Homo sapiens
  CDR3 for alpha chain variable domain of TCR clone 335134 (TRAV8-4, TRAJ5)
CAVSTDTGRRALTF

SEQ ID NO: 670268 - protein, 14 aa, Homo sapiens
  CDR3 for beta chain variable domain of TCR clone 335134 (TRBV7-2, TRBJ2-7)
CASSPKTSFYEQYF

SEQ ID NO: 670269 - protein, 15 aa, Homo sapiens
  CDR3 for alpha chain variable domain of TCR clone 335135 (TRAV8-6, TRAJ11)
CAVNFMNSGYSTLTF

SEQ ID NO: 670270 - protein, 15 aa, Homo sapiens
  CDR3 for beta chain variable domain of TCR clone 335135 (TRBV2, TRBJ2-2)
CASSRQGPNTGELFF

SEQ ID NO: 670271 - protein, 13 aa, Homo sapiens
  CDR3 for alpha chain variable domain of TCR clone 335136 (TRAV35, TRAJ42)
CAGFPGSQGNCIF

SEQ ID NO: 670272 - protein, 14 aa, Homo sapiens
  CDR3 for beta chain variable domain of TCR clone 335136 (TRBV19, TRBJ2-1)
CASPTFVLSGEQFF

SEQ ID NO: 670273 - protein, 15 aa, Homo sapiens
  CDR3 for alpha chain variable domain of TCR clone 335137 (TRAV3, TRAJ9)
CAVRARNTGGFKTIF

SEQ ID NO: 670274 - protein, 15 aa, Homo sapiens
  CDR3 for beta chain variable domain of TCR clone 335137 (TRBV29-1, TRBJ2-5)
CSVEGLAVNQETQYF

SEQ ID NO: 670275 - protein, 12 aa, Homo sapiens
  CDR3 for alpha chain variable domain of TCR clone 335138 (TRAV16, TRAJ8)
CAPLGGFQKLVS

SEQ ID NO: 670276 - protein, 15 aa, Homo sapiens
  CDR3 for beta chain variable domain of TCR clone 335138 (TRBV6-1, TRBJ1-5)
CASIPDRLGNQPQHF

SEQ ID NO: 670277 - protein, 12 aa, Homo sapiens
  CDR3 for alpha chain variable domain of TCR clone 335139 (TRAV12-3, TRAJ17)
CAMTLTGNKLTF

SEQ ID NO: 670278 - protein, 15 aa, Homo sapiens
  CDR3 for beta chain variable domain of TCR clone 335139 (TRBV12-4, TRBJ2-5)
CVSSPPTGLQETQYF

SEQ ID NO: 670279 - protein, 14 aa, Homo sapiens
  CDR3 for alpha chain variable domain of TCR clone 335140 (TRAV1-2, TRAJ16)
CAVNRFSDGQKLLF

SEQ ID NO: 670280 - protein, 13 aa, Homo sapiens
  CDR3 for beta chain variable domain of TCR clone 335140 (TRBV18, TRBJ2-5)
CASSTAGKETQYF

SEQ ID NO: 670281 - protein, 15 aa, Homo sapiens
  CDR3 for alpha chain variable domain of TCR clone 335141 (TRAV9-2, TRAJ8)
CALRGLNTGFQKLVF

SEQ ID NO: 670282 - protein, 13 aa, Homo sapiens
  CDR3 for beta chain variable domain of TCR clone 335141 (TRBV29-1, TRBJ2-3)
CSATRGGRDTQYF

SEQ ID NO: 670283 - protein, 13 aa, Homo sapiens
  CDR3 for alpha chain variable domain of TCR clone 335142 (TRAV3, TRAJ21)
CAVREPDFTKFYF

SEQ ID NO: 670284 - protein, 15 aa, Homo sapiens
  CDR3 for beta chain variable domain of TCR clone 335142 (TRBV3-1, TRBJ2-7)
CASSQAPSGSYEQYF

SEQ ID NO: 670285 - protein, 11 aa, Homo sapiens
  CDR3 for alpha chain variable domain of TCR clone 335143 (TRAV21, TRAJ48)
CAVDGNEKLTF

SEQ ID NO: 670286 - protein, 16 aa, Homo sapiens
  CDR3 for beta chain variable domain of TCR clone 335143 (TRBV12-4, TRBJ1-5)
CASSSGPRGSNQTQHL

SEQ ID NO: 670287 - protein, 15 aa, Homo sapiens
  CDR3 for alpha chain variable domain of TCR clone 335144 (TRAV12-2, TRAJ8)
CAVREENTGFQKLVF

SEQ ID NO: 670288 - protein, 14 aa, Homo sapiens
  CDR3 for beta chain variable domain of TCR clone 335144 (TRBV7-2, TRBJ2-1)
CASSLGVGYNEQFF

SEQ ID NO: 670289 - protein, 16 aa, Homo sapiens
  CDR3 for alpha chain variable domain of TCR clone 335145 (TRAV3, TRAJ37)
CAVRPHGSGNTGKLIF

SEQ ID NO: 670290 - protein, 14 aa, Homo sapiens
  CDR3 for beta chain variable domain of TCR clone 335145 (TRBV20-1, TRBJ2-1)
CSARGGSSYNEQFF

SEQ ID NO: 670291 - protein, 14 aa, Homo sapiens
  CDR3 for alpha chain variable domain of TCR clone 335146 (TRAV26-1, TRAJ38)
CIADNAGNNRKLIW

SEQ ID NO: 670292 - protein, 16 aa, Homo sapiens
  CDR3 for beta chain variable domain of TCR clone 335146 (TRBV19, TRBJ2-1)
CASSKAGPSSYNKQFF

SEQ ID NO: 670293 - protein, 16 aa, Homo sapiens
  CDR3 for alpha chain variable domain of TCR clone 335147 (TRAV16, TRAJ42)
CVLSGLLGGSQGNLIF

SEQ ID NO: 670294 - protein, 15 aa, Homo sapiens
  CDR3 for beta chain variable domain of TCR clone 335147 (TRBV5-1, TRBJ2-1)
CASSPGGLAGNEQFF

SEQ ID NO: 670295 - protein, 13 aa, Homo sapiens
  CDR3 for alpha chain variable domain of TCR clone 335148 (TRAV13-1, TRAJ5)
CAASDAGRRALTF

SEQ ID NO: 670296 - protein, 12 aa, Homo sapiens
  CDR3 for beta chain variable domain of TCR clone 335148 (TRBV28, TRBJ2-3)
CASSLYRYTQYF

SEQ ID NO: 670297 - protein, 16 aa, Homo sapiens
  CDR3 for alpha chain variable domain of TCR clone 335149 (TRAV12-3, TRAJ53)
RAMSPGSGGSNYKLTF

SEQ ID NO: 670298 - protein, 16 aa, Homo sapiens
  CDR3 for beta chain variable domain of TCR clone 335149 (TRBV7-9, TRBJ1-2)
CASSLGFSSGEDGYTF

SEQ ID NO: 670299 - protein, 14 aa, Homo sapiens
  CDR3 for alpha chain variable domain of TCR clone 335150 (TRAV12-3, TRAJ54)
CAMRGIQGAQKLVF

SEQ ID NO: 670300 - protein, 13 aa, Homo sapiens
  CDR3 for beta chain variable domain of TCR clone 335150 (TRBV19, TRBJ1-1)
CASSHPNGGEAFF

SEQ ID NO: 670301 - protein, 13 aa, Homo sapiens
  CDR3 for alpha chain variable domain of TCR clone 335151 (TRAV20, TRAJ21)
CAVEGYNFNKFYF

SEQ ID NO: 670302 - protein, 14 aa, Homo sapiens
  CDR3 for beta chain variable domain of TCR clone 335151 (TRBV3-1, TRBJ2-5)
CASSQCPDQETQYF

SEQ ID NO: 670303 - protein, 17 aa, Homo sapiens
  CDR3 for alpha chain variable domain of TCR clone 335152 (TRAV3, TRAJ38)
CAVRDCLNAGNNRKLIW

SEQ ID NO: 670304 - protein, 15 aa, Homo sapiens
  CDR3 for beta chain variable domain of TCR clone 335152 (TRBV29-1, TRBJ2-1)
CSVEGGPASYNEQFF

SEQ ID NO: 670305 - protein, 14 aa, Homo sapiens
  CDR3 for alpha chain variable domain of TCR clone 335153 (TRAV13-1, TRAJ39)
CAASYNNAGNMLTF

SEQ ID NO: 670306 - protein, 13 aa, Homo sapiens
  CDR3 for beta chain variable domain of TCR clone 335153 (TRBV24-1, TRBJ1-4)
CATNNGRSEKLFF

SEQ ID NO: 670307 - protein, 16 aa, Homo sapiens
  CDR3 for alpha chain variable domain of TCR clone 335154 (TRAV3, TRAJ10)
CAVRDMRAGGGNKLTF

SEQ ID NO: 670308 - protein, 13 aa, Homo sapiens
  CDR3 for beta chain variable domain of TCR clone 335154 (TRBV4-2, TRBJ1-1)
CSSSQAGNTEAFF

SEQ ID NO: 670309 - protein, 14 aa, Homo sapiens
  CDR3 for alpha chain variable domain of TCR clone 335155 (TRAV16, TRAJ33)
CALSAMDSNYQLTW

SEQ ID NO: 670310 - protein, 15 aa, Homo sapiens
  CDR3 for beta chain variable domain of TCR clone 335155 (TRBV9, TRBJ1-6)
CASSVAGTGDSPLHF

SEQ ID NO: 670311 - protein, 18 aa, Homo sapiens
  CDR3 for alpha chain variable domain of TCR clone 335156 (TRAV21, TRAJ52)
CAVRPSPAGGTSYGKLPF

SEQ ID NO: 670312 - protein, 17 aa, Homo sapiens
  CDR3 for beta chain variable domain of TCR clone 335156 (TRBV13, TRBJ2-3)
CASSLSRVAGVRNTQYF

SEQ ID NO: 670313 - protein, 14 aa, Homo sapiens
  CDR3 for alpha chain variable domain of TCR clone 335157 (TRAV23/DV6, TRAJ4)
CAANLAGGYNKLIF

SEQ ID NO: 670314 - protein, 11 aa, Homo sapiens
  CDR3 for beta chain variable domain of TCR clone 335157 (TRBV7-9, TRBJ2-3)
CASSPTDTQYF

SEQ ID NO: 670315 - protein, 14 aa, Homo sapiens
  CDR3 for alpha chain variable domain of TCR clone 335158 (TRAV29/DV5, TRAJ28)
CEATEGAGSYQLTF

SEQ ID NO: 670316 - protein, 13 aa, Homo sapiens
  CDR3 for beta chain variable domain of TCR clone 335158 (TRBV20-1, TRBJ1-5)
CSASGRGNQPQHF

SEQ ID NO: 670317 - protein, 14 aa, Homo sapiens
  CDR3 for alpha chain variable domain of TCR clone 335159 (TRAV3, TRAJ44)
CACTTGGTASKLTF

SEQ ID NO: 670318 - protein, 14 aa, Homo sapiens
  CDR3 for beta chain variable domain of TCR clone 335159 (TRBV20-1, TRBJ2-7)
CSAKRGRSSYEQYF

SEQ ID NO: 670319 - protein, 14 aa, Homo sapiens
  CDR3 for alpha chain variable domain of TCR clone 335160 (TRAV8-4, TRAJ12)
CAVSPMDSSYKLIF

SEQ ID NO: 670320 - protein, 15 aa, Homo sapiens
  CDR3 for beta chain variable domain of TCR clone 335160 (TRBV5-5, TRBJ2-1)
CTSSPEAETYNEQFF

SEQ ID NO: 670321 - protein, 14 aa, Homo sapiens
  CDR3 for alpha chain variable domain of TCR clone 335161 (TRAV13-1, TRAJ40)
CAARSTSGTYKYIS

SEQ ID NO: 670322 - protein, 15 aa, Homo sapiens
  CDR3 for beta chain variable domain of TCR clone 335161 (TRBV18, TRBJ1-5)
CASSETGGNNQPQHF

SEQ ID NO: 670323 - protein, 13 aa, Homo sapiens
  CDR3 for alpha chain variable domain of TCR clone 335162 (TRAV21, TRAJ11)
CAAPNSGYSTLTF

SEQ ID NO: 670324 - protein, 13 aa, Homo sapiens
  CDR3 for beta chain variable domain of TCR clone 335162 (TRBV3-1, TRBJ2-7)
CASSLRDGYEQYF

SEQ ID NO: 670325 - protein, 16 aa, Homo sapiens
  CDR3 for alpha chain variable domain of TCR clone 335163 (TRAV3, TRAJ10)
CAVRDMRAGGGNKLTF

SEQ ID NO: 670326 - protein, 15 aa, Homo sapiens
  CDR3 for beta chain variable domain of TCR clone 335163 (TRBV7-3, TRBJ2-1)
CASSLSSGSFDEQFF

SEQ ID NO: 670327 - protein, 10 aa, Homo sapiens
  CDR3 for alpha chain variable domain of TCR clone 335164 (TRAV12-2, TRAJ10)
CAAWTGVETH

SEQ ID NO: 670328 - protein, 14 aa, Homo sapiens
  CDR3 for beta chain variable domain of TCR clone 335164 (TRBV15, TRBJ2-7)
CATSRVARGYEQYF

SEQ ID NO: 670329 - protein, 15 aa, Homo sapiens
  CDR3 for alpha chain variable domain of TCR clone 335165 (TRAV8-2, TRAJ40)
CVVLGTTSGTYKYIF

SEQ ID NO: 670330 - protein, 16 aa, Homo sapiens
  CDR3 for beta chain variable domain of TCR clone 335165 (TRBV7-3, TRBJ2-1)
CASSLEGDRAYNEQFF

SEQ ID NO: 670331 - protein, 13 aa, Homo sapiens
  CDR3 for alpha chain variable domain of TCR clone 335166 (TRAV23/DV6, TRAJ34)
CAAIENNTDKLIF

SEQ ID NO: 670332 - protein, 13 aa, Homo sapiens
  CDR3 for beta chain variable domain of TCR clone 335166 (TRBV29-1, TRBJ2-7)
CSAGPSGGYEQYF

SEQ ID NO: 670333 - protein, 15 aa, Homo sapiens
  CDR3 for alpha chain variable domain of TCR clone 335167 (TRAV8-3, TRAJ40)
CSAPSLGSGTYRYIF

SEQ ID NO: 670334 - protein, 16 aa, Homo sapiens
  CDR3 for beta chain variable domain of TCR clone 335167 (TRBV7-3, TRBJ2-3)
CASSLSGYRPEDTQYF

SEQ ID NO: 670335 - protein, 12 aa, Homo sapiens
  CDR3 for alpha chain variable domain of TCR clone 335168 (TRAV12-3, TRAJ17)
CAMTLTGNKLTF

SEQ ID NO: 670336 - protein, 17 aa, Homo sapiens
  CDR3 for beta chain variable domain of TCR clone 335168 (TRBV28, TRBJ2-1)
CASSFPLTSGKANEQFF

SEQ ID NO: 670337 - protein, 13 aa, Homo sapiens
  CDR3 for alpha chain variable domain of TCR clone 335169 (TRAV12-2, TRAJ39)
CAVNNNAGNMLTF

SEQ ID NO: 670338 - protein, 12 aa, Homo sapiens
  CDR3 for beta chain variable domain of TCR clone 335169 (TRBV7-9, TRBJ2-7)
CASSIKREEQYF

SEQ ID NO: 670339 - protein, 15 aa, Homo sapiens
  CDR3 for alpha chain variable domain of TCR clone 335170 (TRAV2, TRAJ24)
CAVVRLKNSWGKLRF

SEQ ID NO: 670340 - protein, 17 aa, Homo sapiens
  CDR3 for beta chain variable domain of TCR clone 335170 (TRBV13, TRBJ2-3)
CASSLSRVAGGRNTQYF

SEQ ID NO: 670341 - protein, 20 aa, Homo sapiens
  CDR3 for alpha chain variable domain of TCR clone 335171 (TRAV26-1, TRAJ37)
CRVLLHRQINGSSNTGKLIF

SEQ ID NO: 670342 - protein, 13 aa, Homo sapiens
  CDR3 for beta chain variable domain of TCR clone 335171 (TRBV20-1, TRBJ2-7)
CSARTSGNYEQYF

SEQ ID NO: 670343 - protein, 15 aa, Homo sapiens
  CDR3 for alpha chain variable domain of TCR clone 335172 (TRAV3, TRAJ4)
CAVRDGTGGYNKLIF

SEQ ID NO: 670344 - protein, 15 aa, Homo sapiens
  CDR3 for beta chain variable domain of TCR clone 335172 (TRBV27, TRBJ2-7)
RASSPDQGRLYEQYF

SEQ ID NO: 670345 - protein, 14 aa, Homo sapiens
  CDR3 for alpha chain variable domain of TCR clone 335173 (TRAV8-3, TRAJ4)
CAVGASGGYNKLIF

SEQ ID NO: 670346 - protein, 15 aa, Homo sapiens
  CDR3 for beta chain variable domain of TCR clone 335173 (TRBV7-9, TRBJ2-2)
CASRPEGTSTGELFF

SEQ ID NO: 670347 - protein, 17 aa, Homo sapiens
  CDR3 for alpha chain variable domain of TCR clone 335174 (TRAV27, TRAJ18)
RAGLHRGRGSTLGRLYF

SEQ ID NO: 670348 - protein, 14 aa, Homo sapiens
  CDR3 for beta chain variable domain of TCR clone 335174 (TRBV20-1, TRBJ1-5)
CSARGRGSNQPQHF

SEQ ID NO: 670349 - protein, 14 aa, Homo sapiens
  CDR3 for alpha chain variable domain of TCR clone 335175 (TRAV12-3, TRAJ10)
SHLLLTGGGNKLTF

SEQ ID NO: 670350 - protein, 13 aa, Homo sapiens
  CDR3 for beta chain variable domain of TCR clone 335175 (TRBV9, TRBJ2-1)
CASSPSGGNEQFF

SEQ ID NO: 670351 - protein, 14 aa, Homo sapiens
  CDR3 for alpha chain variable domain of TCR clone 335176 (TRAV9-2, TRAJ9)
CALSLIGGGFKTIF

SEQ ID NO: 670352 - protein, 18 aa, Homo sapiens
  CDR3 for beta chain variable domain of TCR clone 335176 (TRBV28, TRBJ2-6)
CASSLAGRAVSGANDLTF

SEQ ID NO: 670353 - protein, 12 aa, Homo sapiens
  CDR3 for alpha chain variable domain of TCR clone 335177 (TRAV12-3, TRAJ42)
CAPGGSQGNLIF

SEQ ID NO: 670354 - protein, 13 aa, Homo sapiens
  CDR3 for beta chain variable domain of TCR clone 335177 (TRBV5-7, TRBJ2-6)
CARTSSGANVLTF

SEQ ID NO: 670355 - protein, 13 aa, Homo sapiens
  CDR3 for alpha chain variable domain of TCR clone 335178 (TRAV13-2, TRAJ48)
CAEMDFGNEKLTF

SEQ ID NO: 670356 - protein, 16 aa, Homo sapiens
  CDR3 for beta chain variable domain of TCR clone 335178 (TRBV4-1, TRBJ1-2)
CASSQDAGQVLYGYTF

SEQ ID NO: 670357 - protein, 15 aa, Homo sapiens
  CDR3 for alpha chain variable domain of TCR clone 335179 (TRAV13-1, TRAJ52)
SYYNAGGTSYGKLTF

SEQ ID NO: 670358 - protein, 11 aa, Homo sapiens
  CDR3 for beta chain variable domain of TCR clone 335179 (TRBV12-4, TRBJ2-2)
CARSSAGELFF

SEQ ID NO: 670359 - protein, 14 aa, Homo sapiens
  CDR3 for alpha chain variable domain of TCR clone 335180 (TRAV1-1, TRAJ27)
CAVIYNTNAGKSAF

SEQ ID NO: 670360 - protein, 13 aa, Homo sapiens
  CDR3 for beta chain variable domain of TCR clone 335180 (TRBV7-9, TRBJ1-2)
CASSLKQNYGYTF

SEQ ID NO: 670361 - protein, 16 aa, Homo sapiens
  CDR3 for alpha chain variable domain of TCR clone 335181 (TRAV3, TRAJ10)
CAVRDMRAGGGNKLTF

SEQ ID NO: 670362 - protein, 15 aa, Homo sapiens
  CDR3 for beta chain variable domain of TCR clone 335181 (TRBV5-1, TRBJ2-7)
CASSLDLTSSYEQYF

SEQ ID NO: 670363 - protein, 12 aa, Homo sapiens
  CDR3 for alpha chain variable domain of TCR clone 335182 (TRAV10, TRAJ9)
CGAYTGGFKTIF

SEQ ID NO: 670364 - protein, 18 aa, Homo sapiens
  CDR3 for beta chain variable domain of TCR clone 335182 (TRBV4-1, TRBJ2-3)
CASSHQLAGGRSTDTQYF

SEQ ID NO: 670365 - protein, 15 aa, Homo sapiens
  CDR3 for alpha chain variable domain of TCR clone 335183 (TRAV12-3, TRAJ42)
CAMITSVGSQGNLIF

SEQ ID NO: 670366 - protein, 15 aa, Homo sapiens
  CDR3 for beta chain variable domain of TCR clone 335183 (TRBV20-1, TRBJ2-3)
CSAEPLAGHGDTQYF

SEQ ID NO: 670367 - protein, 14 aa, Homo sapiens
  CDR3 for alpha chain variable domain of TCR clone 335184 (TRAV8-3, TRAJ39)
CAVGANNAGNMLTF

SEQ ID NO: 670368 - protein, 16 aa, Homo sapiens
  CDR3 for beta chain variable domain of TCR clone 335184 (TRBV2, TRBJ2-7)
CASSEPWTGPSYEQYF

SEQ ID NO: 670369 - protein, 14 aa, Homo sapiens
  CDR3 for alpha chain variable domain of TCR clone 335185 (TRAV12-1, TRAJ3)
CGAARYSSASKIIF

SEQ ID NO: 670370 - protein, 16 aa, Homo sapiens
  CDR3 for beta chain variable domain of TCR clone 335185 (TRBV4-3, TRBJ2-2)
CASSHLQGSGTRELFF

SEQ ID NO: 670371 - protein, 12 aa, Homo sapiens
  CDR3 for alpha chain variable domain of TCR clone 335186 (TRAV22, TRAJ22)
CAPGGSARQLTF

SEQ ID NO: 670372 - protein, 13 aa, Homo sapiens
  CDR3 for beta chain variable domain of TCR clone 335186 (TRBV15, TRBJ1-6)
CATSGGLNSPLNF

SEQ ID NO: 670373 - protein, 14 aa, Homo sapiens
  CDR3 for alpha chain variable domain of TCR clone 335187 (TRAV3, TRAJ17)
CDVRDAAAGNKLTF

SEQ ID NO: 670374 - protein, 15 aa, Homo sapiens
  CDR3 for beta chain variable domain of TCR clone 335187 (TRBV6-3, TRBJ2-5)
CASSLLRGDQETQYF

SEQ ID NO: 670375 - protein, 12 aa, Homo sapiens
  CDR3 for alpha chain variable domain of TCR clone 335188 (TRAV25, TRAJ35)
CAGIGFGNVLHC

SEQ ID NO: 670376 - protein, 12 aa, Homo sapiens
  CDR3 for beta chain variable domain of TCR clone 335188 (TRBV6-3, TRBJ2-7)
CASSRRGYEQYF

SEQ ID NO: 670377 - protein, 16 aa, Homo sapiens
  CDR3 for alpha chain variable domain of TCR clone 335189 (TRAV21, TRAJ37)
CALRTAGSSNTGKLIF

SEQ ID NO: 670378 - protein, 13 aa, Homo sapiens
  CDR3 for beta chain variable domain of TCR clone 335189 (TRBV7-9, TRBJ2-5)
CASLPSGRETQYF

SEQ ID NO: 670379 - protein, 20 aa, Homo sapiens
  CDR3 for alpha chain variable domain of TCR clone 335190 (TRAV21, TRAJ22)
SLVTRPPTLKSSGSARQLTF

SEQ ID NO: 670380 - protein, 16 aa, Homo sapiens
  CDR3 for beta chain variable domain of TCR clone 335190 (TRBV7-3, TRBJ2-2)
CASSLKRGTLSGELFF

SEQ ID NO: 670381 - protein, 14 aa, Homo sapiens
  CDR3 for alpha chain variable domain of TCR clone 335191 (TRAV12-2, TRAJ45)
RAVNIGGGADGLTF

SEQ ID NO: 670382 - protein, 13 aa, Homo sapiens
  CDR3 for beta chain variable domain of TCR clone 335191 (TRBV19, TRBJ2-2)
CASSIWSTGELFF

SEQ ID NO: 670383 - protein, 14 aa, Homo sapiens
  CDR3 for alpha chain variable domain of TCR clone 335192 (TRAV29/DV5, TRAJ17)
CAASGKAAGNKLTF

SEQ ID NO: 670384 - protein, 15 aa, Homo sapiens
  CDR3 for beta chain variable domain of TCR clone 335192 (TRBV7-3, TRBJ2-1)
CASSPTGGGEVEQFF

SEQ ID NO: 670385 - protein, 15 aa, Homo sapiens
  CDR3 for alpha chain variable domain of TCR clone 335193 (TRAV1-2, TRAJ12)
CADARWMDSSYKLIF

SEQ ID NO: 670386 - protein, 11 aa, Homo sapiens
  CDR3 for beta chain variable domain of TCR clone 335193 (TRBV29-1, TRBJ2-5)
CSEDRTRTQYF

SEQ ID NO: 670387 - protein, 15 aa, Homo sapiens
  CDR3 for alpha chain variable domain of TCR clone 335194 (TRAV12-2, TRAJ8)
CAVREENTGFQKLVF

SEQ ID NO: 670388 - protein, 15 aa, Homo sapiens
  CDR3 for beta chain variable domain of TCR clone 335194 (TRBV28, TRBJ2-4)
CAAGSGILLMGIQYF

SEQ ID NO: 670389 - protein, 13 aa, Homo sapiens
  CDR3 for alpha chain variable domain of TCR clone 335195 (TRAV26-2, TRAJ43)
CILRAVNNNNMRF

SEQ ID NO: 670390 - protein, 15 aa, Homo sapiens
  CDR3 for beta chain variable domain of TCR clone 335195 (TRBV7-2, TRBJ2-1)
CASTRGTGIYNEQFF

SEQ ID NO: 670391 - protein, 13 aa, Homo sapiens
  CDR3 for alpha chain variable domain of TCR clone 335196 (TRAV8-3, TRAJ36)
CAVGATRANNLSF

SEQ ID NO: 670392 - protein, 16 aa, Homo sapiens
  CDR3 for beta chain variable domain of TCR clone 335196 (TRBV20-1, TRBJ1-4)
CSAPGQGLLTNEKLFF

SEQ ID NO: 670393 - protein, 16 aa, Homo sapiens
  CDR3 for alpha chain variable domain of TCR clone 335197 (TRAV12-1, TRAJ4)
CVVNMGPVGGYNKLIF

SEQ ID NO: 670394 - protein, 17 aa, Homo sapiens
  CDR3 for beta chain variable domain of TCR clone 335197 (TRBV4-3, TRBJ2-1)
CASSQVSSGRASGEQFF

SEQ ID NO: 670395 - protein, 14 aa, Homo sapiens
  CDR3 for alpha chain variable domain of TCR clone 335198 (TRAV12-3, TRAJ58)
CAMSTKTSGTRLTF

SEQ ID NO: 670396 - protein, 12 aa, Homo sapiens
  CDR3 for beta chain variable domain of TCR clone 335198 (TRBV7-8, TRBJ2-7)
CASSLGDREQYF

SEQ ID NO: 670397 - protein, 17 aa, Homo sapiens
  CDR3 for alpha chain variable domain of TCR clone 335199 (TRAV3, TRAJ28)
CAVREAYSGAGSYQLTF

SEQ ID NO: 670398 - protein, 17 aa, Homo sapiens
  CDR3 for beta chain variable domain of TCR clone 335199 (TRBV27, TRBJ2-1)
CLWNRAVGVGSKNEQFF

SEQ ID NO: 670399 - protein, 19 aa, Homo sapiens
  CDR3 for alpha chain variable domain of TCR clone 335200 (TRAV12-1, TRAJ42)
SVMQPPTSVKGGSQGNLIF

SEQ ID NO: 670400 - protein, 18 aa, Homo sapiens
  CDR3 for beta chain variable domain of TCR clone 335200 (TRBV11-2, TRBJ2-3)
CASSLGGASRGAPNTQYF

SEQ ID NO: 670401 - protein, 15 aa, Homo sapiens
  CDR3 for alpha chain variable domain of TCR clone 335201 (TRAV23/DV6, TRAJ13)
CAAWPGGGGYQKVTF

SEQ ID NO: 670402 - protein, 17 aa, Homo sapiens
  CDR3 for beta chain variable domain of TCR clone 335201 (TRBV19, TRBJ2-7)
CASSISFHDSYPYEQYF

SEQ ID NO: 670403 - protein, 16 aa, Homo sapiens
  CDR3 for alpha chain variable domain of TCR clone 335202 (TRAV23/DV6, TRAJ9)
CAASIGGNTGGLKTIF

SEQ ID NO: 670404 - protein, 14 aa, Homo sapiens
  CDR3 for beta chain variable domain of TCR clone 335202 (TRBV6-1, TRBJ2-5)
CASSYAGGEETQYF

SEQ ID NO: 670405 - protein, 15 aa, Homo sapiens
  CDR3 for alpha chain variable domain of TCR clone 335203 (TRAV21, TRAJ40)
CAVRPQTSGTYKYNF

SEQ ID NO: 670406 - protein, 15 aa, Homo sapiens
  CDR3 for beta chain variable domain of TCR clone 335203 (TRBV5-1, TRBJ2-1)
CASSPPRAPYNEQFF

SEQ ID NO: 670407 - protein, 15 aa, Homo sapiens
  CDR3 for alpha chain variable domain of TCR clone 335204 (TRAV26-1, TRAJ38)
CIVRAEGGNNRKLIW

SEQ ID NO: 670408 - protein, 14 aa, Homo sapiens
  CDR3 for beta chain variable domain of TCR clone 335204 (TRBV7-6, TRBJ2-5)
CASSFPSGSETQYF

SEQ ID NO: 670409 - protein, 17 aa, Homo sapiens
  CDR3 for alpha chain variable domain of TCR clone 335205 (TRAV3, TRAJ6)
CAVSRRTDTGGSYRPTF

SEQ ID NO: 670410 - protein, 18 aa, Homo sapiens
  CDR3 for beta chain variable domain of TCR clone 335205 (TRBV7-2, TRBJ2-3)
CASSLETSRGRKADTQYF

SEQ ID NO: 670411 - protein, 10 aa, Homo sapiens
  CDR3 for alpha chain variable domain of TCR clone 335206 (TRAV36/DV7, TRAJ49)
CALTGNQFYF

SEQ ID NO: 670412 - protein, 15 aa, Homo sapiens
  CDR3 for beta chain variable domain of TCR clone 335206 (TRBV11-3, TRBJ2-3)
CASLKDGREGDTQYF

SEQ ID NO: 670413 - protein, 15 aa, Homo sapiens
  CDR3 for alpha chain variable domain of TCR clone 335207 (TRAV14/DV4, TRAJ33)
CAMREGRDSNYQLIW

SEQ ID NO: 670414 - protein, 15 aa, Homo sapiens
  CDR3 for beta chain variable domain of TCR clone 335207 (TRBV5-5, TRBJ1-5)
CARSSTPGSNQPQHF

SEQ ID NO: 670415 - protein, 17 aa, Homo sapiens
  CDR3 for alpha chain variable domain of TCR clone 335208 (TRAV14/DV4, TRAJ28)
CAMREVSSGAESYQLTF

SEQ ID NO: 670416 - protein, 15 aa, Homo sapiens
  CDR3 for beta chain variable domain of TCR clone 335208 (TRBV11-2, TRBJ1-6)
CASTLRETGNSPLHF

SEQ ID NO: 670417 - protein, 13 aa, Homo sapiens
  CDR3 for alpha chain variable domain of TCR clone 335209 (TRAV12-3, TRAJ6)
CAMIPGGSYIPTF

SEQ ID NO: 670418 - protein, 15 aa, Homo sapiens
  CDR3 for beta chain variable domain of TCR clone 335209 (TRBV2, TRBJ2-3)
CASSDFEKATDTQYF

SEQ ID NO: 670419 - protein, 13 aa, Homo sapiens
  CDR3 for alpha chain variable domain of TCR clone 335210 (TRAV13-2, TRAJ48)
CAEMDFGNEKLTF

SEQ ID NO: 670420 - protein, 13 aa, Homo sapiens
  CDR3 for beta chain variable domain of TCR clone 335210 (TRBV7-9, TRBJ1-2)
CASSLKQNYGYTC

SEQ ID NO: 670421 - protein, 16 aa, Homo sapiens
  CDR3 for alpha chain variable domain of TCR clone 335211 (TRAV17, TRAJ35)
CATSEGGIGFGNVLHC

SEQ ID NO: 670422 - protein, 16 aa, Homo sapiens
  CDR3 for beta chain variable domain of TCR clone 335211 (TRBV6-5, TRBJ2-7)
CASSSDPTSGFYEQYF

SEQ ID NO: 670423 - protein, 12 aa, Homo sapiens
  CDR3 for alpha chain variable domain of TCR clone 335212 (TRAV29/DV5, TRAJ43)
CAAPYNNNDIRF

SEQ ID NO: 670424 - protein, 17 aa, Homo sapiens
  CDR3 for beta chain variable domain of TCR clone 335212 (TRBV19, TRBJ2-6)
CASSTGQVVSGANVLTF

SEQ ID NO: 670425 - protein, 16 aa, Homo sapiens
  CDR3 for alpha chain variable domain of TCR clone 335213 (TRAV3, TRAJ37)
CAVRGKGSGNTGKLIF

SEQ ID NO: 670426 - protein, 15 aa, Homo sapiens
  CDR3 for beta chain variable domain of TCR clone 335213 (TRBV7-9, TRBJ2-2)
CASGPLDTFSGELFF

SEQ ID NO: 670427 - protein, 18 aa, Homo sapiens
  CDR3 for alpha chain variable domain of TCR clone 335214 (TRAV26-1, TRAJ5)
CVVRVVPPRDTGRRARTF

SEQ ID NO: 670428 - protein, 15 aa, Homo sapiens
  CDR3 for beta chain variable domain of TCR clone 335214 (TRBV7-9, TRBJ2-7)
CASSLPMGQANEQYF

SEQ ID NO: 670429 - protein, 13 aa, Homo sapiens
  CDR3 for alpha chain variable domain of TCR clone 335215 (TRAV27, TRAJ6)
CAGGTRGSYIPTF

SEQ ID NO: 670430 - protein, 13 aa, Homo sapiens
  CDR3 for beta chain variable domain of TCR clone 335215 (TRBV4-1, TRBJ2-2)
CASSQENTGVLFF

SEQ ID NO: 670431 - protein, 12 aa, Homo sapiens
  CDR3 for alpha chain variable domain of TCR clone 335216 (TRAV26-1, TRAJ48)
CIVSGGNEKVTF

SEQ ID NO: 670432 - protein, 13 aa, Homo sapiens
  CDR3 for beta chain variable domain of TCR clone 335216 (TRBV18, TRBJ2-7)
CASFRDSAYEQYF

SEQ ID NO: 670433 - protein, 14 aa, Homo sapiens
  CDR3 for alpha chain variable domain of TCR clone 335217 (TRAV1-2, TRAJ8)
CAVREDTGFQKLVV

SEQ ID NO: 670434 - protein, 14 aa, Homo sapiens
  CDR3 for beta chain variable domain of TCR clone 335217 (TRBV20-1, TRBJ1-1)
CSAQTRIGGTEAFF

SEQ ID NO: 670435 - protein, 15 aa, Homo sapiens
  CDR3 for alpha chain variable domain of TCR clone 335218 (TRAV26-1, TRAJ29)
CIVRVEGSGNTTLVL

SEQ ID NO: 670436 - protein, 14 aa, Homo sapiens
  CDR3 for beta chain variable domain of TCR clone 335218 (TRBV18, TRBJ2-5)
CASSPGVSQETQYF

SEQ ID NO: 670437 - protein, 13 aa, Homo sapiens
  CDR3 for alpha chain variable domain of TCR clone 335219 (TRAV29/DV5, TRAJ31)
CAASRNNNARLMF

SEQ ID NO: 670438 - protein, 15 aa, Homo sapiens
  CDR3 for beta chain variable domain of TCR clone 335219 (TRBV5-7, TRBJ1-2)
CASSLAWTGGYGYTF

SEQ ID NO: 670439 - protein, 15 aa, Homo sapiens
  CDR3 for alpha chain variable domain of TCR clone 335220 (TRAV26-1, TRAJ29)
CIVRVEGSGNTPLVF

SEQ ID NO: 670440 - protein, 13 aa, Homo sapiens
  CDR3 for beta chain variable domain of TCR clone 335220 (TRBV5-7, TRBJ2-5)
CASQKRPEETQYF

SEQ ID NO: 670441 - protein, 13 aa, Homo sapiens
  CDR3 for alpha chain variable domain of TCR clone 335221 (TRAV12-1, TRAJ9)
CVVLNTGGFKTIF

SEQ ID NO: 670442 - protein, 13 aa, Homo sapiens
  CDR3 for beta chain variable domain of TCR clone 335221 (TRBV20-1, TRBJ1-1)
CSARGGGNTEAFS

SEQ ID NO: 670443 - protein, 12 aa, Homo sapiens
  CDR3 for alpha chain variable domain of TCR clone 335222 (TRAV3, TRAJ20)
CAVRDGDYKLSF

SEQ ID NO: 670444 - protein, 15 aa, Homo sapiens
  CDR3 for beta chain variable domain of TCR clone 335222 (TRBV27, TRBJ2-1)
CASGNGGGSSNEQFF

SEQ ID NO: 670445 - protein, 12 aa, Homo sapiens
  CDR3 for alpha chain variable domain of TCR clone 335223 (TRAV3, TRAJ26)
CAVRDYGQNFVF

SEQ ID NO: 670446 - protein, 11 aa, Homo sapiens
  CDR3 for beta chain variable domain of TCR clone 335223 (TRBV7-8, TRBJ2-7)
CASSLSLEQYF

SEQ ID NO: 670447 - protein, 11 aa, Homo sapiens
  CDR3 for alpha chain variable domain of TCR clone 335224 (TRAV2, TRAJ13)
CASGGYQKVTF

SEQ ID NO: 670448 - protein, 15 aa, Homo sapiens
  CDR3 for beta chain variable domain of TCR clone 335224 (TRBV7-9, TRBJ1-6)
CASSSPGRGNSPLRV

SEQ ID NO: 670449 - protein, 10 aa, Homo sapiens
  CDR3 for alpha chain variable domain of TCR clone 335225 (TRAV13-1, TRAJ27)
CAALARQINL

SEQ ID NO: 670450 - protein, 13 aa, Homo sapiens
  CDR3 for beta chain variable domain of TCR clone 335225 (TRBV7-3, TRBJ1-1)
CASSQDWGAEAFF

SEQ ID NO: 670451 - protein, 14 aa, Homo sapiens
  CDR3 for alpha chain variable domain of TCR clone 335226 (TRAV17, TRAJ35)
CATDRPGLGNVLHC

SEQ ID NO: 670452 - protein, 19 aa, Homo sapiens
  CDR3 for beta chain variable domain of TCR clone 335226 (TRBV11-3, TRBJ2-2)
CASSTRPGTKTTNTGELFF

SEQ ID NO: 670453 - protein, 15 aa, Homo sapiens
  CDR3 for alpha chain variable domain of TCR clone 335227 (TRAV21, TRAJ43)
CAVRPSKAVFDDMRF

SEQ ID NO: 670454 - protein, 13 aa, Homo sapiens
  CDR3 for beta chain variable domain of TCR clone 335227 (TRBV7-9, TRBJ2-3)
CASSPGSTDTQYF

SEQ ID NO: 670455 - protein, 12 aa, Homo sapiens
  CDR3 for alpha chain variable domain of TCR clone 335228 (TRAV21, TRAJ33)
CAKMDSNYQLIW

SEQ ID NO: 670456 - protein, 18 aa, Homo sapiens
  CDR3 for beta chain variable domain of TCR clone 335228 (TRBV18, TRBJ2-3)
CASSYTSGAAGGTDTQYF

SEQ ID NO: 670457 - protein, 16 aa, Homo sapiens
  CDR3 for alpha chain variable domain of TCR clone 335229 (TRAV8-6, TRAJ39)
CAVMPMNNNAGNMLTF

SEQ ID NO: 670458 - protein, 13 aa, Homo sapiens
  CDR3 for beta chain variable domain of TCR clone 335229 (TRBV19, TRBJ1-2)
CASSVPGQDGYTF

SEQ ID NO: 670459 - protein, 12 aa, Homo sapiens
  CDR3 for alpha chain variable domain of TCR clone 335230 (TRAV12-3, TRAJ17)
GAMTLTGNKLTF

SEQ ID NO: 670460 - protein, 15 aa, Homo sapiens
  CDR3 for beta chain variable domain of TCR clone 335230 (TRBV20-1, TRBJ2-7)
CGARDRVSGMDEQYF

SEQ ID NO: 670461 - protein, 16 aa, Homo sapiens
  CDR3 for alpha chain variable domain of TCR clone 335231 (TRAV30, TRAJ24)
CGTAIVDADSWGKCQF

SEQ ID NO: 670462 - protein, 15 aa, Homo sapiens
  CDR3 for beta chain variable domain of TCR clone 335231 (TRBV18, TRBJ2-1)
CASLPDRGRDNEQFF

SEQ ID NO: 670463 - protein, 15 aa, Homo sapiens
  CDR3 for alpha chain variable domain of TCR clone 335232 (TRAV8-6, TRAJ45)
CAVSEQGGGADGLTF

SEQ ID NO: 670464 - protein, 14 aa, Homo sapiens
  CDR3 for beta chain variable domain of TCR clone 335232 (TRBV28, TRBJ2-5)
CASRGSSVWETQYF

SEQ ID NO: 670465 - protein, 12 aa, Homo sapiens
  CDR3 for alpha chain variable domain of TCR clone 335233 (TRAV8-3, TRAJ20)
CAVGANDYKLSF

SEQ ID NO: 670466 - protein, 14 aa, Homo sapiens
  CDR3 for beta chain variable domain of TCR clone 335233 (TRBV11-2, TRBJ2-7)
CASSSTGEGYEQYF

SEQ ID NO: 670467 - protein, 15 aa, Homo sapiens
  CDR3 for alpha chain variable domain of TCR clone 335234 (TRAV12-1, TRAJ44)
CVVDTPQGTASKLTF

SEQ ID NO: 670468 - protein, 12 aa, Homo sapiens
  CDR3 for beta chain variable domain of TCR clone 335234 (TRBV12-4, TRBJ2-7)
CASSLGGYEQYF

SEQ ID NO: 670469 - protein, 16 aa, Homo sapiens
  CDR3 for alpha chain variable domain of TCR clone 335235 (TRAV23/DV6, TRAJ34)
CAASGALSYNTDKLIF

SEQ ID NO: 670470 - protein, 15 aa, Homo sapiens
  CDR3 for beta chain variable domain of TCR clone 335235 (TRBV28, TRBJ2-7)
CASRPCDRFSYEQYF

SEQ ID NO: 670471 - protein, 14 aa, Homo sapiens
  CDR3 for alpha chain variable domain of TCR clone 335236 (TRAV17, TRAJ39)
CATDPNNAGNMLTF

SEQ ID NO: 670472 - protein, 15 aa, Homo sapiens
  CDR3 for beta chain variable domain of TCR clone 335236 (TRBV27, TRBJ2-7)
CASSPIVTGAYEQYF

SEQ ID NO: 670473 - protein, 12 aa, Homo sapiens
  CDR3 for alpha chain variable domain of TCR clone 335237 (TRAV3, TRAJ43)
CAVRDPNNDMRF

SEQ ID NO: 670474 - protein, 15 aa, Homo sapiens
  CDR3 for beta chain variable domain of TCR clone 335237 (TRBV27, TRBJ1-5)
RASSLGTGFDQPQHF

SEQ ID NO: 670475 - protein, 16 aa, Homo sapiens
  CDR3 for alpha chain variable domain of TCR clone 335238 (TRAV12-1, TRAJ22)
CVVNTISSGSVRQLTF

SEQ ID NO: 670476 - protein, 13 aa, Homo sapiens
  CDR3 for beta chain variable domain of TCR clone 335238 (TRBV19, TRBJ2-1)
CASNGGVFSEQFF

SEQ ID NO: 670477 - protein, 14 aa, Homo sapiens
  CDR3 for alpha chain variable domain of TCR clone 335239 (TRAV12-2, TRAJ40)
CAVKIPSGTYKYIF

SEQ ID NO: 670478 - protein, 17 aa, Homo sapiens
  CDR3 for beta chain variable domain of TCR clone 335239 (TRBV20-1, TRBJ2-1)
CSAFSGTSGSLDNEQFF

SEQ ID NO: 670479 - protein, 14 aa, Homo sapiens
  CDR3 for alpha chain variable domain of TCR clone 335240 (TRAV1-2, TRAJ8)
CAVREDTVFLKLVF

SEQ ID NO: 670480 - protein, 15 aa, Homo sapiens
  CDR3 for beta chain variable domain of TCR clone 335240 (TRBV6-3, TRBJ2-7)
CASSSPGTVFYEQYF

SEQ ID NO: 670481 - protein, 14 aa, Homo sapiens
  CDR3 for alpha chain variable domain of TCR clone 335241 (TRAV4, TRAJ9)
CLVGSGTGGFKTIF

SEQ ID NO: 670482 - protein, 15 aa, Homo sapiens
  CDR3 for beta chain variable domain of TCR clone 335241 (TRBV7-2, TRBJ2-1)
FASSLASGRVNEQFF

SEQ ID NO: 670483 - protein, 12 aa, Homo sapiens
  CDR3 for alpha chain variable domain of TCR clone 335242 (TRAV13-1, TRAJ27)
CAAHTNAGKSTF

SEQ ID NO: 670484 - protein, 14 aa, Homo sapiens
  CDR3 for beta chain variable domain of TCR clone 335242 (TRBV19, TRBJ2-1)
CASPTFVLSGVQFF

SEQ ID NO: 670485 - protein, 13 aa, Homo sapiens
  CDR3 for alpha chain variable domain of TCR clone 335243 (TRAV21, TRAJ27)
CAARPGNAGKSTF

SEQ ID NO: 670486 - protein, 15 aa, Homo sapiens
  CDR3 for beta chain variable domain of TCR clone 335243 (TRBV10-3, TRBJ1-3)
CAISDSQGAGNTIYF

SEQ ID NO: 670487 - protein, 12 aa, Homo sapiens
  CDR3 for alpha chain variable domain of TCR clone 335244 (TRAV12-2, TRAJ36)
CAAPRGANNLFF

SEQ ID NO: 670488 - protein, 12 aa, Homo sapiens
  CDR3 for beta chain variable domain of TCR clone 335244 (TRBV6-3, TRBJ2-7)
CASSLAPYEQYF

SEQ ID NO: 670489 - protein, 16 aa, Homo sapiens
  CDR3 for alpha chain variable domain of TCR clone 335245 (TRAV30, TRAJ24)
CGTEIVDADSWGKFQF

SEQ ID NO: 670490 - protein, 12 aa, Homo sapiens
  CDR3 for beta chain variable domain of TCR clone 335245 (TRBV11-2, TRBJ2-2)
CASSLPTGEVFF

SEQ ID NO: 670491 - protein, 15 aa, Homo sapiens
  CDR3 for alpha chain variable domain of TCR clone 335246 (TRAV26-1, TRAJ29)
CIVRVEGSGNTPPVC

SEQ ID NO: 670492 - protein, 14 aa, Homo sapiens
  CDR3 for beta chain variable domain of TCR clone 335246 (TRBV18, TRBJ2-5)
CASSPGVSQETQYF

SEQ ID NO: 670493 - protein, 20 aa, Homo sapiens
  CDR3 for alpha chain variable domain of TCR clone 335247 (TRAV30, TRAJ54)
SAAQSRSETQVVQGAQQLVF

SEQ ID NO: 670494 - protein, 11 aa, Homo sapiens
  CDR3 for beta chain variable domain of TCR clone 335247 (TRBV25-1, TRBJ2-4)
CQSRDQNIQYF

SEQ ID NO: 670495 - protein, 14 aa, Homo sapiens
  CDR3 for alpha chain variable domain of TCR clone 335248 (TRAV1-2, TRAJ16)
CAVNRFSDGQKLLF

SEQ ID NO: 670496 - protein, 14 aa, Homo sapiens
  CDR3 for beta chain variable domain of TCR clone 335248 (TRBV7-2, TRBJ2-7)
CASSPKTSFYVQYF

SEQ ID NO: 670497 - protein, 14 aa, Homo sapiens
  CDR3 for alpha chain variable domain of TCR clone 335249 (TRAV12-3, TRAJ10)
SHLPLTGGGNKLTF

SEQ ID NO: 670498 - protein, 12 aa, Homo sapiens
  CDR3 for beta chain variable domain of TCR clone 335249 (TRBV28, TRBJ2-1)
CASSFRGNEQFF

SEQ ID NO: 670499 - protein, 16 aa, Homo sapiens
  CDR3 for alpha chain variable domain of TCR clone 335250 (TRAV23/DV6, TRAJ9)
CAASIGGNTGGFKTIF

SEQ ID NO: 670500 - protein, 15 aa, Homo sapiens
  CDR3 for beta chain variable domain of TCR clone 335250 (TRBV12-4, TRBJ1-2)
CASSPITGGGYGYTF

SEQ ID NO: 670501 - protein, 15 aa, Homo sapiens
  CDR3 for alpha chain variable domain of TCR clone 335251 (TRAV21, TRAJ24)
CAARSSTDSWGKLQF

SEQ ID NO: 670502 - protein, 14 aa, Homo sapiens
  CDR3 for beta chain variable domain of TCR clone 335251 (TRBV11-2, TRBJ2-5)
CASSQTGGIETQYF

SEQ ID NO: 670503 - protein, 11 aa, Homo sapiens
  CDR3 for alpha chain variable domain of TCR clone 335252 (TRAV2, TRAJ13)
CSSGGYPKVTF

SEQ ID NO: 670504 - protein, 16 aa, Homo sapiens
  CDR3 for beta chain variable domain of TCR clone 335252 (TRBV6-1, TRBJ2-5)
CASSETLDRGAETQYF

SEQ ID NO: 670505 - protein, 14 aa, Homo sapiens
  CDR3 for alpha chain variable domain of TCR clone 335253 (TRAV12-2, TRAJ53)
CAVKGGGSNDKLTF

SEQ ID NO: 670506 - protein, 15 aa, Homo sapiens
  CDR3 for beta chain variable domain of TCR clone 335253 (TRBV11-2, TRBJ2-2)
CASSSDRVNAGELFF

SEQ ID NO: 670507 - protein, 13 aa, Homo sapiens
  CDR3 for alpha chain variable domain of TCR clone 335254 (TRAV12-2, TRAJ20)
CAVYSSNDYKLSF

SEQ ID NO: 670508 - protein, 14 aa, Homo sapiens
  CDR3 for beta chain variable domain of TCR clone 335254 (TRBV27, TRBJ2-5)
CQQFIPAGGETQYF

SEQ ID NO: 670509 - protein, 16 aa, Homo sapiens
  CDR3 for alpha chain variable domain of TCR clone 335255 (TRAV30, TRAJ24)
CGTEIVDADSWGKFQF

SEQ ID NO: 670510 - protein, 15 aa, Homo sapiens
  CDR3 for beta chain variable domain of TCR clone 335255 (TRBV29-1, TRBJ2-7)
CSVECFDRGSYEQYF

SEQ ID NO: 670511 - protein, 15 aa, Homo sapiens
  CDR3 for alpha chain variable domain of TCR clone 335256 (TRAV17, TRAJ45)
CATAELGGGADGLTF

SEQ ID NO: 670512 - protein, 13 aa, Homo sapiens
  CDR3 for beta chain variable domain of TCR clone 335256 (TRBV10-3, TRBJ2-7)
CASKLAVNYEQYF

SEQ ID NO: 670513 - protein, 13 aa, Homo sapiens
  CDR3 for alpha chain variable domain of TCR clone 335257 (TRAV17, TRAJ5)
CAPMDTGRRALTF

SEQ ID NO: 670514 - protein, 16 aa, Homo sapiens
  CDR3 for beta chain variable domain of TCR clone 335257 (TRBV27, TRBJ2-7)
CASSSERSDGAYEQYF

SEQ ID NO: 670515 - protein, 17 aa, Homo sapiens
  CDR3 for alpha chain variable domain of TCR clone 335258 (TRAV3, TRAJ6)
CAVRDGPRAGGSYIPTF

SEQ ID NO: 670516 - protein, 14 aa, Homo sapiens
  CDR3 for beta chain variable domain of TCR clone 335258 (TRBV7-2, TRBJ2-7)
CASSPKASSYEQYS

SEQ ID NO: 670517 - protein, 16 aa, Homo sapiens
  CDR3 for alpha chain variable domain of TCR clone 335259 (TRAV12-2, TRAJ32)
CAVNLGQGGATNNLTF

SEQ ID NO: 670518 - protein, 15 aa, Homo sapiens
  CDR3 for beta chain variable domain of TCR clone 335259 (TRBV20-1, TRBJ2-7)
CSARGPLAGGREQYF

SEQ ID NO: 670519 - protein, 18 aa, Homo sapiens
  CDR3 for alpha chain variable domain of TCR clone 335260 (TRAV8-4, TRAJ52)
CAVTRANAGGTSYGKLTF

SEQ ID NO: 670520 - protein, 16 aa, Homo sapiens
  CDR3 for beta chain variable domain of TCR clone 335260 (TRBV7-9, TRBJ1-2)
CASSLGFSSGEDGYTF

SEQ ID NO: 670521 - protein, 13 aa, Homo sapiens
  CDR3 for alpha chain variable domain of TCR clone 335261 (TRAV2, TRAJ11)
CAVEEIGNSTLTL

SEQ ID NO: 670522 - protein, 17 aa, Homo sapiens
  CDR3 for beta chain variable domain of TCR clone 335261 (TRBV7-2, TRBJ2-1)
CASSRGTSGAVGWEQFF

SEQ ID NO: 670523 - protein, 13 aa, Homo sapiens
  CDR3 for alpha chain variable domain of TCR clone 335262 (TRAV12-2, TRAJ13)
CAVTAGGYQKVTF

SEQ ID NO: 670524 - protein, 14 aa, Homo sapiens
  CDR3 for beta chain variable domain of TCR clone 335262 (TRBV2, TRBJ1-5)
CASSAGGSNQPQHF

SEQ ID NO: 670525 - protein, 11 aa, Homo sapiens
  CDR3 for alpha chain variable domain of TCR clone 335263 (TRAV2, TRAJ13)
CASGGYQKVTF

SEQ ID NO: 670526 - protein, 13 aa, Homo sapiens
  CDR3 for beta chain variable domain of TCR clone 335263 (TRBV11-2, TRBJ2-1)
CASSLDLVNEQFF

SEQ ID NO: 670527 - protein, 17 aa, Homo sapiens
  CDR3 for alpha chain variable domain of TCR clone 335264 (TRAV3, TRAJ42)
CAVRDRDYGGSQGNIIF

SEQ ID NO: 670528 - protein, 17 aa, Homo sapiens
  CDR3 for beta chain variable domain of TCR clone 335264 (TRBV7-9, TRBJ2-3)
CASSHTVAGDLTDTQYF

SEQ ID NO: 670529 - protein, 14 aa, Homo sapiens
  CDR3 for alpha chain variable domain of TCR clone 335265 (TRAV30, TRAJ26)
CGTEIVSYGQNFVF

SEQ ID NO: 670530 - protein, 13 aa, Homo sapiens
  CDR3 for beta chain variable domain of TCR clone 335265 (TRBV7-3, TRBJ1-1)
CASSQDWVAEAFF

SEQ ID NO: 670531 - protein, 14 aa, Homo sapiens
  CDR3 for alpha chain variable domain of TCR clone 335266 (TRAV12-2, TRAJ45)
YAVNSGGGADGLPF

SEQ ID NO: 670532 - protein, 18 aa, Homo sapiens
  CDR3 for beta chain variable domain of TCR clone 335266 (TRBV7-2, TRBJ2-7)
CASSLAQGLRDSSYEQYV

SEQ ID NO: 670533 - protein, 17 aa, Homo sapiens
  CDR3 for alpha chain variable domain of TCR clone 335267 (TRAV38-1, TRAJ45)
CAFMKHYMGGGAEGLTF

SEQ ID NO: 670534 - protein, 19 aa, Homo sapiens
  CDR3 for beta chain variable domain of TCR clone 335267 (TRBV6-1, TRBJ2-5)
CASSEQGRAGGLYQETQYF

SEQ ID NO: 670535 - protein, 23 aa, Homo sapiens
  CDR3 for alpha chain variable domain of TCR clone 335268 (TRAV3, TRAJ38)
CAVRDCLNAGNNHIQNPDPAVYH

SEQ ID NO: 670536 - protein, 13 aa, Homo sapiens
  CDR3 for beta chain variable domain of TCR clone 335268 (TRBV12-4, TRBJ1-2)
CASSLRQGKGYTF

SEQ ID NO: 670537 - protein, 13 aa, Homo sapiens
  CDR3 for alpha chain variable domain of TCR clone 335269 (TRAV3, TRAJ21)
CAVREPDFNQFYF

SEQ ID NO: 670538 - protein, 16 aa, Homo sapiens
  CDR3 for beta chain variable domain of TCR clone 335269 (TRBV5-1, TRBJ2-3)
CASSLGLAVYTDTQYF

SEQ ID NO: 670539 - protein, 11 aa, Homo sapiens
  CDR3 for alpha chain variable domain of TCR clone 335270 (TRAV12-1, TRAJ26)
CVVAYGQNFVL

SEQ ID NO: 670540 - protein, 13 aa, Homo sapiens
  CDR3 for beta chain variable domain of TCR clone 335270 (TRBV7-2, TRBJ2-4)
CASSREHANIQYF

SEQ ID NO: 670541 - protein, 23 aa, Homo sapiens
  CDR3 for alpha chain variable domain of TCR clone 335271 (TRAV26-1, TRAJ38)
CIADNAGNNHIQNPDPAVYQLRD

SEQ ID NO: 670542 - protein, 16 aa, Homo sapiens
  CDR3 for beta chain variable domain of TCR clone 335271 (TRBV12-4, TRBJ1-5)
CASSRPVGGSNQPQHF

SEQ ID NO: 670543 - protein, 11 aa, Homo sapiens
  CDR3 for alpha chain variable domain of TCR clone 335272 (TRAV4, TRAJ23)
CLVGRKAYLRT

SEQ ID NO: 670544 - protein, 16 aa, Homo sapiens
  CDR3 for beta chain variable domain of TCR clone 335272 (TRBV7-3, TRBJ2-2)
CASSLKRGTLSGELFF

SEQ ID NO: 670545 - protein, 14 aa, Homo sapiens
  CDR3 for alpha chain variable domain of TCR clone 335273 (TRAV13-2, TRAJ43)
CAEIPTYNNNDMLF

SEQ ID NO: 670546 - protein, 15 aa, Homo sapiens
  CDR3 for beta chain variable domain of TCR clone 335273 (TRBV7-9, TRBJ2-2)
CASGPLDTFPGELFF

SEQ ID NO: 670547 - protein, 15 aa, Homo sapiens
  CDR3 for alpha chain variable domain of TCR clone 335274 (TRAV13-2, TRAJ35)
CAESPNIGFGNVLHC

SEQ ID NO: 670548 - protein, 13 aa, Homo sapiens
  CDR3 for beta chain variable domain of TCR clone 335274 (TRBV10-2, TRBJ2-5)
CASSTLARETQFF

SEQ ID NO: 670549 - protein, 12 aa, Homo sapiens
  CDR3 for alpha chain variable domain of TCR clone 335275 (TRAV12-2, TRAJ31)
CAVNTPDARLMF

SEQ ID NO: 670550 - protein, 13 aa, Homo sapiens
  CDR3 for beta chain variable domain of TCR clone 335275 (TRBV7-9, TRBJ1-2)
CASSLEQNYGYTF

SEQ ID NO: 670551 - protein, 14 aa, Homo sapiens
  CDR3 for alpha chain variable domain of TCR clone 335276 (TRAV17, TRAJ45)
CATASGGGVDGLTF

SEQ ID NO: 670552 - protein, 13 aa, Homo sapiens
  CDR3 for beta chain variable domain of TCR clone 335276 (TRBV15, TRBJ2-7)
CATSTTGHYEQYF

SEQ ID NO: 670553 - protein, 15 aa, Homo sapiens
  CDR3 for alpha chain variable domain of TCR clone 335277 (TRAV8-3, TRAJ40)
CAAPSLGPGTYKYFF

SEQ ID NO: 670554 - protein, 16 aa, Homo sapiens
  CDR3 for beta chain variable domain of TCR clone 335277 (TRBV7-3, TRBJ2-3)
CASSLSGYRPEDTQYF

SEQ ID NO: 670555 - protein, 15 aa, Homo sapiens
  CDR3 for alpha chain variable domain of TCR clone 335278 (TRAV21, TRAJ53)
CATLNSGGSNYKLTF

SEQ ID NO: 670556 - protein, 15 aa, Homo sapiens
  CDR3 for beta chain variable domain of TCR clone 335278 (TRBV20-1, TRBJ2-7)
CSARERVSGMDEQYF

SEQ ID NO: 670557 - protein, 16 aa, Homo sapiens
  CDR3 for alpha chain variable domain of TCR clone 335279 (TRAV23/DV6, TRAJ9)
CAASIGGNTGGFKTIF

SEQ ID NO: 670558 - protein, 14 aa, Homo sapiens
  CDR3 for beta chain variable domain of TCR clone 335279 (TRBV4-1, TRBJ2-2)
CDSSQAVNTGELFF

SEQ ID NO: 670559 - protein, 12 aa, Homo sapiens
  CDR3 for alpha chain variable domain of TCR clone 335280 (TRAV13-2, TRAJ23)
CAERHSGGKLIF

SEQ ID NO: 670560 - protein, 15 aa, Homo sapiens
  CDR3 for beta chain variable domain of TCR clone 335280 (TRBV7-9, TRBJ1-6)
CASSSPGRGNSTLHF

SEQ ID NO: 670561 - protein, 15 aa, Homo sapiens
  CDR3 for alpha chain variable domain of TCR clone 335281 (TRAV12-3, TRAJ6)
CAMSATTGGSYIPTV

SEQ ID NO: 670562 - protein, 16 aa, Homo sapiens
  CDR3 for beta chain variable domain of TCR clone 335281 (TRBV20-1, TRBJ1-2)
CSASMGQGVANYGDTF

SEQ ID NO: 670563 - protein, 16 aa, Homo sapiens
  CDR3 for alpha chain variable domain of TCR clone 335282 (TRAV20, TRAJ53)
CAVQGNSGGSNYKLTF

SEQ ID NO: 670564 - protein, 16 aa, Homo sapiens
  CDR3 for beta chain variable domain of TCR clone 335282 (TRBV29-1, TRBJ2-6)
CSVEDITYSGANVLTF

SEQ ID NO: 670565 - protein, 11 aa, Homo sapiens
  CDR3 for alpha chain variable domain of TCR clone 335283 (TRAV27, TRAJ45)
CAGAQEEVLTD

SEQ ID NO: 670566 - protein, 14 aa, Homo sapiens
  CDR3 for beta chain variable domain of TCR clone 335283 (TRBV15, TRBJ1-5)
CATSREQSNQPQHF

SEQ ID NO: 670567 - protein, 13 aa, Homo sapiens
  CDR3 for alpha chain variable domain of TCR clone 335284 (TRAV23/DV6, TRAJ47)
CAASMTRGNKLDF

SEQ ID NO: 670568 - protein, 14 aa, Homo sapiens
  CDR3 for beta chain variable domain of TCR clone 335284 (TRBV7-3, TRBJ1-1)
CASSLKGGNTEAFF

SEQ ID NO: 670569 - protein, 14 aa, Homo sapiens
  CDR3 for alpha chain variable domain of TCR clone 335285 (TRAV29/DV5, TRAJ45)
CAASFRGGADGLTF

SEQ ID NO: 670570 - protein, 14 aa, Homo sapiens
  CDR3 for beta chain variable domain of TCR clone 335285 (TRBV27, TRBJ2-5)
CASSSLKGWETQYF

SEQ ID NO: 670571 - protein, 16 aa, Homo sapiens
  CDR3 for alpha chain variable domain of TCR clone 335286 (TRAV12-3, TRAJ53)
CAMSPGSGCSNHKLTF

SEQ ID NO: 670572 - protein, 11 aa, Homo sapiens
  CDR3 for beta chain variable domain of TCR clone 335286 (TRBV29-1, TRBJ2-5)
CSEDRTGTQYF

SEQ ID NO: 670573 - protein, 14 aa, Homo sapiens
  CDR3 for alpha chain variable domain of TCR clone 335287 (TRAV38-1, TRAJ40)
CALRPTPGTYKYNF

SEQ ID NO: 670574 - protein, 14 aa, Homo sapiens
  CDR3 for beta chain variable domain of TCR clone 335287 (TRBV25-1, TRBJ1-1)
CASTHLGGNTEAFF

SEQ ID NO: 670575 - protein, 15 aa, Homo sapiens
  CDR3 for alpha chain variable domain of TCR clone 335288 (TRAV3, TRAJ5)
CAVRDLDMGRRSLTF

SEQ ID NO: 670576 - protein, 13 aa, Homo sapiens
  CDR3 for beta chain variable domain of TCR clone 335288 (TRBV12-4, TRBJ2-7)
CASSPTETYEQYF

SEQ ID NO: 670577 - protein, 18 aa, Homo sapiens
  CDR3 for alpha chain variable domain of TCR clone 335289 (TRAV29/DV5, TRAJ52)
CAAGFRGAGGTSYGKLTF

SEQ ID NO: 670578 - protein, 17 aa, Homo sapiens
  CDR3 for beta chain variable domain of TCR clone 335289 (TRBV7-6, TRBJ2-1)
CASSLEIAGGSYNEQFF

SEQ ID NO: 670579 - protein, 14 aa, Homo sapiens
  CDR3 for alpha chain variable domain of TCR clone 335290 (TRAV13-1, TRAJ13)
CAASRVGGYQKVTF

SEQ ID NO: 670580 - protein, 16 aa, Homo sapiens
  CDR3 for beta chain variable domain of TCR clone 335290 (TRBV7-9, TRBJ2-1)
CASNDVAGGSYNEQFF

SEQ ID NO: 670581 - protein, 12 aa, Homo sapiens
  CDR3 for alpha chain variable domain of TCR clone 335291 (TRAV12-1, TRAJ34)
CVVAGATDKLIF

SEQ ID NO: 670582 - protein, 15 aa, Homo sapiens
  CDR3 for beta chain variable domain of TCR clone 335291 (TRBV20-1, TRBJ2-7)
CSARGLWTGVGEQYF

SEQ ID NO: 670583 - protein, 14 aa, Homo sapiens
  CDR3 for alpha chain variable domain of TCR clone 335292 (TRAV12-2, TRAJ13)
CAVKKTGGYQKVTF

SEQ ID NO: 670584 - protein, 15 aa, Homo sapiens
  CDR3 for beta chain variable domain of TCR clone 335292 (TRBV9, TRBJ2-1)
CASSLAGSSYNEQFF

SEQ ID NO: 670585 - protein, 20 aa, Homo sapiens
  CDR3 for alpha chain variable domain of TCR clone 335293 (TRAV13-1, )
CAASPMDIQNPDPAVYQLRD

SEQ ID NO: 670586 - protein, 13 aa, Homo sapiens
  CDR3 for beta chain variable domain of TCR clone 335293 (TRBV20-1, TRBJ2-2)
CSASTAGTGELFF

SEQ ID NO: 670587 - protein, 11 aa, Homo sapiens
  CDR3 for alpha chain variable domain of TCR clone 335294 (TRAV2, TRAJ13)
CASGGYQKVTF

SEQ ID NO: 670588 - protein, 18 aa, Homo sapiens
  CDR3 for beta chain variable domain of TCR clone 335294 (TRBV11-2, TRBJ2-3)
CASSLGGASWGAPNTQYF

SEQ ID NO: 670589 - protein, 15 aa, Homo sapiens
  CDR3 for alpha chain variable domain of TCR clone 335295 (TRAV38-1, TRAJ37)
CAFIFVSVNTGKLIF

SEQ ID NO: 670590 - protein, 12 aa, Homo sapiens
  CDR3 for beta chain variable domain of TCR clone 335295 (TRBV7-9, TRBJ2-7)
CASSLEGYEQYS

SEQ ID NO: 670591 - protein, 12 aa, Homo sapiens
  CDR3 for alpha chain variable domain of TCR clone 335296 (TRAV12-3, TRAJ17)
CAMTLTGNKLTF

SEQ ID NO: 670592 - protein, 15 aa, Homo sapiens
  CDR3 for beta chain variable domain of TCR clone 335296 (TRBV5-4, TRBJ2-3)
CATKSSGGALDTQYF

SEQ ID NO: 670593 - protein, 12 aa, Homo sapiens
  CDR3 for alpha chain variable domain of TCR clone 335297 (TRAV21, TRAJ15)
CCGQPGRTALIF

SEQ ID NO: 670594 - protein, 14 aa, Homo sapiens
  CDR3 for beta chain variable domain of TCR clone 335297 (TRBV27, TRBJ2-2)
CASSLGAATGELFF

SEQ ID NO: 670595 - protein, 16 aa, Homo sapiens
  CDR3 for alpha chain variable domain of TCR clone 335298 (TRAV12-2, TRAJ45)
CAVKRTPGGGADGLTF

SEQ ID NO: 670596 - protein, 12 aa, Homo sapiens
  CDR3 for beta chain variable domain of TCR clone 335298 (TRBV6-1, TRBJ2-5)
CASSEGRETQYL

SEQ ID NO: 670597 - protein, 12 aa, Homo sapiens
  CDR3 for alpha chain variable domain of TCR clone 335299 (TRAV8-2, TRAJ45)
CVQGVSADGLTF

SEQ ID NO: 670598 - protein, 15 aa, Homo sapiens
  CDR3 for beta chain variable domain of TCR clone 335299 (TRBV19, TRBJ1-1)
CASSIRRQMNTEAFF

SEQ ID NO: 670599 - protein, 14 aa, Homo sapiens
  CDR3 for alpha chain variable domain of TCR clone 335300 (TRAV13-1, TRAJ44)
CAAKATGTVSKLTF

SEQ ID NO: 670600 - protein, 15 aa, Homo sapiens
  CDR3 for beta chain variable domain of TCR clone 335300 (TRBV6-1, TRBJ2-1)
CASSELRGQYKEQFF

SEQ ID NO: 670601 - protein, 15 aa, Homo sapiens
  CDR3 for alpha chain variable domain of TCR clone 335301 (TRAV27, TRAJ38)
CAARRNAGNNRKLFW

SEQ ID NO: 670602 - protein, 15 aa, Homo sapiens
  CDR3 for beta chain variable domain of TCR clone 335301 (TRBV5-1, TRBJ2-1)
CASSPPRAPYNEQFF

SEQ ID NO: 670603 - protein, 11 aa, Homo sapiens
  CDR3 for alpha chain variable domain of TCR clone 335302 (TRAV35, TRAJ30)
CAGERDDKIIF

SEQ ID NO: 670604 - protein, 17 aa, Homo sapiens
  CDR3 for beta chain variable domain of TCR clone 335302 (TRBV11-2, TRBJ2-1)
CASSLYPPGVEYNEQFF

SEQ ID NO: 670605 - protein, 17 aa, Homo sapiens
  CDR3 for alpha chain variable domain of TCR clone 335303 (TRAV35, TRAJ47)
GLLDCRTHTEYGNKMVF

SEQ ID NO: 670606 - protein, 11 aa, Homo sapiens
  CDR3 for beta chain variable domain of TCR clone 335303 (TRBV29-1, TRBJ1-1)
CSVEVGTRTFF

SEQ ID NO: 670607 - protein, 14 aa, Homo sapiens
  CDR3 for alpha chain variable domain of TCR clone 335304 (TRAV13-1, TRAJ10)
CAASSTGGGNKLTF

SEQ ID NO: 670608 - protein, 16 aa, Homo sapiens
  CDR3 for beta chain variable domain of TCR clone 335304 (TRBV7-7, TRBJ2-1)
CASSLASGTSYNEQFF

SEQ ID NO: 670609 - protein, 12 aa, Homo sapiens
  CDR3 for alpha chain variable domain of TCR clone 335305 (TRAV1-1, TRAJ30)
CAVRGRDDKIIF

SEQ ID NO: 670610 - protein, 13 aa, Homo sapiens
  CDR3 for beta chain variable domain of TCR clone 335305 (TRBV11-3, TRBJ2-7)
CDSSLDKLYEQYF

SEQ ID NO: 670611 - protein, 13 aa, Homo sapiens
  CDR3 for alpha chain variable domain of TCR clone 335306 (TRAV8-3, TRAJ32)
CAADGGATNKLIF

SEQ ID NO: 670612 - protein, 18 aa, Homo sapiens
  CDR3 for beta chain variable domain of TCR clone 335306 (TRBV18, TRBJ2-3)
CASSYTSGAAGGTDTQYF

SEQ ID NO: 670613 - protein, 13 aa, Homo sapiens
  CDR3 for alpha chain variable domain of TCR clone 335307 (TRAV27, TRAJ43)
CAGAGNNNNDMRV

SEQ ID NO: 670614 - protein, 14 aa, Homo sapiens
  CDR3 for beta chain variable domain of TCR clone 335307 (TRBV7-2, TRBJ2-7)
CASRSQGAAYEQYF

SEQ ID NO: 670615 - protein, 21 aa, Homo sapiens
  CDR3 for alpha chain variable domain of TCR clone 335308 (TRAV1-1, TRAJ6)
CLLLLRCERLERTGGSYIPTF

SEQ ID NO: 670616 - protein, 14 aa, Homo sapiens
  CDR3 for beta chain variable domain of TCR clone 335308 (TRBV7-8, TRBJ1-2)
CASSPDSLSYGYTF

SEQ ID NO: 670617 - protein, 13 aa, Homo sapiens
  CDR3 for alpha chain variable domain of TCR clone 335309 (TRAV21, TRAJ20)
CAVSRLGDYKLSF

SEQ ID NO: 670618 - protein, 16 aa, Homo sapiens
  CDR3 for beta chain variable domain of TCR clone 335309 (TRBV6-1, TRBJ1-3)
CASVQGGVETPYILER

SEQ ID NO: 670619 - protein, 12 aa, Homo sapiens
  CDR3 for alpha chain variable domain of TCR clone 335310 (TRAV13-1, TRAJ15)
CAARQAGTALIF

SEQ ID NO: 670620 - protein, 14 aa, Homo sapiens
  CDR3 for beta chain variable domain of TCR clone 335310 (TRBV19, TRBJ2-1)
CASPTFVLSGEQFF

SEQ ID NO: 670621 - protein, 14 aa, Homo sapiens
  CDR3 for alpha chain variable domain of TCR clone 335311 (TRAV1-2, TRAJ8)
CAVREDTGFQKLVF

SEQ ID NO: 670622 - protein, 13 aa, Homo sapiens
  CDR3 for beta chain variable domain of TCR clone 335311 (TRBV12-4, TRBJ2-5)
CASSRGTEETQYF

SEQ ID NO: 670623 - protein, 10 aa, Homo sapiens
  CDR3 for alpha chain variable domain of TCR clone 335312 (TRAV16, TRAJ22)
SAMYLRHLTF

SEQ ID NO: 670624 - protein, 15 aa, Homo sapiens
  CDR3 for beta chain variable domain of TCR clone 335312 (TRBV7-9, TRBJ1-6)
CASSSPGCGNSPLHF

SEQ ID NO: 670625 - protein, 12 aa, Homo sapiens
  CDR3 for alpha chain variable domain of TCR clone 335313 (TRAV12-3, TRAJ17)
CAMTLTGNKLTF

SEQ ID NO: 670626 - protein, 16 aa, Homo sapiens
  CDR3 for beta chain variable domain of TCR clone 335313 (TRBV28, TRBJ1-5)
CASSFRGGYSNQPQHF

SEQ ID NO: 670627 - protein, 14 aa, Homo sapiens
  CDR3 for alpha chain variable domain of TCR clone 335314 (TRAV14/DV4, TRAJ58)
CAMMKETSGSRLTC

SEQ ID NO: 670628 - protein, 12 aa, Homo sapiens
  CDR3 for beta chain variable domain of TCR clone 335314 (TRBV12-4, TRBJ2-1)
CASTYVLNEQFF

SEQ ID NO: 670629 - protein, 12 aa, Homo sapiens
  CDR3 for alpha chain variable domain of TCR clone 335315 (TRAV13-2, TRAJ16)
CAASPDGQKLLF

SEQ ID NO: 670630 - protein, 12 aa, Homo sapiens
  CDR3 for beta chain variable domain of TCR clone 335315 (TRBV7-9, TRBJ2-7)
CASSIKREEQYF

SEQ ID NO: 670631 - protein, 14 aa, Homo sapiens
  CDR3 for alpha chain variable domain of TCR clone 335316 (TRAV12-2, TRAJ9)
CAVRGQTGGFKTIF

SEQ ID NO: 670632 - protein, 14 aa, Homo sapiens
  CDR3 for beta chain variable domain of TCR clone 335316 (TRBV6-1, TRBJ1-3)
CASVQGGGGNTIYF

SEQ ID NO: 670633 - protein, 19 aa, Homo sapiens
  CDR3 for alpha chain variable domain of TCR clone 335317 (TRAV2, TRAJ20)
ILQVREADAAVYRDCKLRF

SEQ ID NO: 670634 - protein, 16 aa, Homo sapiens
  CDR3 for beta chain variable domain of TCR clone 335317 (TRBV5-1, TRBJ2-5)
CASSLALLRAGETQYF

SEQ ID NO: 670635 - protein, 13 aa, Homo sapiens
  CDR3 for alpha chain variable domain of TCR clone 335318 (TRAV8-3, TRAJ43)
CAVGPDNNNDMRF

SEQ ID NO: 670636 - protein, 19 aa, Homo sapiens
  CDR3 for beta chain variable domain of TCR clone 335318 (TRBV7-2, TRBJ2-3)
CASSFLSLNWGGGTDTQYF

SEQ ID NO: 670637 - protein, 17 aa, Homo sapiens
  CDR3 for alpha chain variable domain of TCR clone 335319 (TRAV12-3, TRAJ6)
CAMSSRGGAGGGYIPTF

SEQ ID NO: 670638 - protein, 12 aa, Homo sapiens
  CDR3 for beta chain variable domain of TCR clone 335319 (TRBV12-4, TRBJ2-3)
CASSTLPDTQYF

SEQ ID NO: 670639 - protein, 16 aa, Homo sapiens
  CDR3 for alpha chain variable domain of TCR clone 335320 (TRAV8-3, TRAJ8)
CAVPRDANTGFQKLVF

SEQ ID NO: 670640 - protein, 14 aa, Homo sapiens
  CDR3 for beta chain variable domain of TCR clone 335320 (TRBV28, TRBJ1-1)
CASSESGRGTEAFF

SEQ ID NO: 670641 - protein, 16 aa, Homo sapiens
  CDR3 for alpha chain variable domain of TCR clone 335321 (TRAV3, TRAJ18)
CAVRDGRGSTLGRLYV

SEQ ID NO: 670642 - protein, 17 aa, Homo sapiens
  CDR3 for beta chain variable domain of TCR clone 335321 (TRBV5-1, TRBJ2-3)
CASSKIGLADRTDTQYF

SEQ ID NO: 670643 - protein, 12 aa, Homo sapiens
  CDR3 for alpha chain variable domain of TCR clone 335322 (TRAV12-1, TRAJ34)
CVVAGATDKLIF

SEQ ID NO: 670644 - protein, 14 aa, Homo sapiens
  CDR3 for beta chain variable domain of TCR clone 335322 (TRBV7-2, TRBJ2-7)
CASSPKTSFYEQYF

SEQ ID NO: 670645 - protein, 11 aa, Homo sapiens
  CDR3 for alpha chain variable domain of TCR clone 335323 (TRAV17, TRAJ9)
CATTGGFKTIF

SEQ ID NO: 670646 - protein, 13 aa, Homo sapiens
  CDR3 for beta chain variable domain of TCR clone 335323 (TRBV10-2, TRBJ2-7)
CASGASGGYEQYF

SEQ ID NO: 670647 - protein, 22 aa, Homo sapiens
  CDR3 for alpha chain variable domain of TCR clone 335324 (TRAV12-1, TRAJ26)
CVVNSWVTMVRILSLVPTRLSV

SEQ ID NO: 670648 - protein, 13 aa, Homo sapiens
  CDR3 for beta chain variable domain of TCR clone 335324 (TRBV10-3, TRBJ2-7)
CASKLAVNYEQYF

SEQ ID NO: 670649 - protein, 15 aa, Homo sapiens
  CDR3 for alpha chain variable domain of TCR clone 335325 (TRAV26-1, TRAJ56)
CIVRAATGANSKLTF

SEQ ID NO: 670650 - protein, 15 aa, Homo sapiens
  CDR3 for beta chain variable domain of TCR clone 335325 (TRBV27, TRBJ2-7)
CASSPQREGQREQYF

SEQ ID NO: 670651 - protein, 14 aa, Homo sapiens
  CDR3 for alpha chain variable domain of TCR clone 335326 (TRAV16, TRAJ33)
CALSAMYSNYELIW

SEQ ID NO: 670652 - protein, 16 aa, Homo sapiens
  CDR3 for beta chain variable domain of TCR clone 335326 (TRBV25-1, TRBJ2-7)
CASSELTGGGIYEQYF

SEQ ID NO: 670653 - protein, 15 aa, Homo sapiens
  CDR3 for alpha chain variable domain of TCR clone 335327 (TRAV35, TRAJ52)
CAGPRGGTSYGKLTL

SEQ ID NO: 670654 - protein, 14 aa, Homo sapiens
  CDR3 for beta chain variable domain of TCR clone 335327 (TRBV20-1, TRBJ2-7)
CSAWTALSSYEQYF

SEQ ID NO: 670655 - protein, 12 aa, Homo sapiens
  CDR3 for alpha chain variable domain of TCR clone 335328 (TRAV25, TRAJ35)
CAGIGFGNVLHS

SEQ ID NO: 670656 - protein, 15 aa, Homo sapiens
  CDR3 for beta chain variable domain of TCR clone 335328 (TRBV20-1, TRBJ2-5)
CSAPPRTGFGETQYF

SEQ ID NO: 670657 - protein, 11 aa, Homo sapiens
  CDR3 for alpha chain variable domain of TCR clone 335329 (TRAV3, TRAJ21)
CAVGNFNKFYF

SEQ ID NO: 670658 - protein, 15 aa, Homo sapiens
  CDR3 for beta chain variable domain of TCR clone 335329 (TRBV29-1, TRBJ2-7)
CSVEFFDRGSYEQYF

SEQ ID NO: 670659 - protein, 12 aa, Homo sapiens
  CDR3 for alpha chain variable domain of TCR clone 335330 (TRAV17, TRAJ21)
CALRYNFNKFYF

SEQ ID NO: 670660 - protein, 13 aa, Homo sapiens
  CDR3 for beta chain variable domain of TCR clone 335330 (TRBV24-1, TRBJ2-5)
CANSTGGTETQYF

SEQ ID NO: 670661 - protein, 18 aa, Homo sapiens
  CDR3 for alpha chain variable domain of TCR clone 335331 (TRAV26-2, TRAJ45)
CILRLWGYSGGGADGLTF

SEQ ID NO: 670662 - protein, 14 aa, Homo sapiens
  CDR3 for beta chain variable domain of TCR clone 335331 (TRBV20-1, TRBJ2-5)
CSALVPGYQETQYF

SEQ ID NO: 670663 - protein, 12 aa, Homo sapiens
  CDR3 for alpha chain variable domain of TCR clone 335332 (TRAV12-3, TRAJ20)
CAMVRGDYKLSF

SEQ ID NO: 670664 - protein, 16 aa, Homo sapiens
  CDR3 for beta chain variable domain of TCR clone 335332 (TRBV19, TRBJ2-2)
CASRSPGTGATGELFF

SEQ ID NO: 670665 - protein, 15 aa, Homo sapiens
  CDR3 for alpha chain variable domain of TCR clone 335333 (TRAV12-1, TRAJ6)
CVVTPTSGGSYIPTF

SEQ ID NO: 670666 - protein, 16 aa, Homo sapiens
  CDR3 for beta chain variable domain of TCR clone 335333 (TRBV20-1, TRBJ2-7)
CSATPWAGQASYEQYF

SEQ ID NO: 670667 - protein, 16 aa, Homo sapiens
  CDR3 for alpha chain variable domain of TCR clone 335334 (TRAV30, TRAJ24)
CGTEIVDADSWWKFQF

SEQ ID NO: 670668 - protein, 19 aa, Homo sapiens
  CDR3 for beta chain variable domain of TCR clone 335334 (TRBV25-1, TRBJ2-2)
CAILVYRVDRGRKTGELFF

SEQ ID NO: 670669 - protein, 13 aa, Homo sapiens
  CDR3 for alpha chain variable domain of TCR clone 335335 (TRAV29/DV5, TRAJ34)
CAARVDNTDKLIF

SEQ ID NO: 670670 - protein, 17 aa, Homo sapiens
  CDR3 for beta chain variable domain of TCR clone 335335 (TRBV7-2, TRBJ2-3)
CASSLEGRGTSTDTQYF

SEQ ID NO: 670671 - protein, 18 aa, Homo sapiens
  CDR3 for alpha chain variable domain of TCR clone 335336 (TRAV35, TRAJ28)
CAGHNYPLSGAGSFQLTF

SEQ ID NO: 670672 - protein, 12 aa, Homo sapiens
  CDR3 for beta chain variable domain of TCR clone 335336 (TRBV7-9, TRBJ1-1)
CASSLEGTEAFF

SEQ ID NO: 670673 - protein, 18 aa, Homo sapiens
  CDR3 for alpha chain variable domain of TCR clone 335337 (TRAV26-2, TRAJ45)
CILRVDKYSGGGADGLTF

SEQ ID NO: 670674 - protein, 13 aa, Homo sapiens
  CDR3 for beta chain variable domain of TCR clone 335337 (TRBV4-1, TRBJ2-1)
CASSQAGGDEQFF

SEQ ID NO: 670675 - protein, 15 aa, Homo sapiens
  CDR3 for alpha chain variable domain of TCR clone 335338 (TRAV3, TRAJ5)
CAVRDRKTGRRALTF

SEQ ID NO: 670676 - protein, 14 aa, Homo sapiens
  CDR3 for beta chain variable domain of TCR clone 335338 (TRBV7-2, TRBJ2-7)
CASRSQGAAYEHFF

SEQ ID NO: 670677 - protein, 12 aa, Homo sapiens
  CDR3 for alpha chain variable domain of TCR clone 335339 (TRAV13-1, TRAJ49)
CAASIRSNQFYF

SEQ ID NO: 670678 - protein, 15 aa, Homo sapiens
  CDR3 for beta chain variable domain of TCR clone 335339 (TRBV7-2, TRBJ2-7)
CASSTPGLTRGEQYF

SEQ ID NO: 670679 - protein, 13 aa, Homo sapiens
  CDR3 for alpha chain variable domain of TCR clone 335340 (TRAV21, TRAJ20)
CAVGPRFDYKLSF

SEQ ID NO: 670680 - protein, 13 aa, Homo sapiens
  CDR3 for beta chain variable domain of TCR clone 335340 (TRBV6-1, TRBJ1-1)
CASSRQGNTEAFF

SEQ ID NO: 670681 - protein, 11 aa, Homo sapiens
  CDR3 for alpha chain variable domain of TCR clone 335341 (TRAV12-1, TRAJ30)
CVVNGQDKIIF

SEQ ID NO: 670682 - protein, 16 aa, Homo sapiens
  CDR3 for beta chain variable domain of TCR clone 335341 (TRBV24-1, TRBJ2-3)
CATSDAISGITDTQYF

SEQ ID NO: 670683 - protein, 14 aa, Homo sapiens
  CDR3 for alpha chain variable domain of TCR clone 335342 (TRAV3, TRAJ21)
CAVESQANFNKFYF

SEQ ID NO: 670684 - protein, 18 aa, Homo sapiens
  CDR3 for beta chain variable domain of TCR clone 335342 (TRBV7-9, TRBJ2-1)
CASSLAVSGTSGRNEQFC

SEQ ID NO: 670685 - protein, 17 aa, Homo sapiens
  CDR3 for alpha chain variable domain of TCR clone 335343 (TRAV4, TRAJ42)
CLVGGLNYGGSQGNLIF

SEQ ID NO: 670686 - protein, 15 aa, Homo sapiens
  CDR3 for beta chain variable domain of TCR clone 335343 (TRBV19, TRBJ2-7)
CASSPAGSGEALRYF

SEQ ID NO: 670687 - protein, 13 aa, Homo sapiens
  CDR3 for alpha chain variable domain of TCR clone 335344 (TRAV21, TRAJ27)
CAARPGNGGKSTF

SEQ ID NO: 670688 - protein, 13 aa, Homo sapiens
  CDR3 for beta chain variable domain of TCR clone 335344 (TRBV18, TRBJ2-7)
CASQSGGGYEQYF

SEQ ID NO: 670689 - protein, 13 aa, Homo sapiens
  CDR3 for alpha chain variable domain of TCR clone 335345 (TRAV20, TRAJ56)
CAVHCLANSKLTF

SEQ ID NO: 670690 - protein, 15 aa, Homo sapiens
  CDR3 for beta chain variable domain of TCR clone 335345 (TRBV5-7, TRBJ1-5)
CAGSYGKLWDQPQHF

SEQ ID NO: 670691 - protein, 13 aa, Homo sapiens
  CDR3 for alpha chain variable domain of TCR clone 335346 (TRAV8-3, TRAJ42)
CARYGGSQGKLIF

SEQ ID NO: 670692 - protein, 14 aa, Homo sapiens
  CDR3 for beta chain variable domain of TCR clone 335346 (TRBV20-1, TRBJ2-1)
CSALDRGTYNEQFF

SEQ ID NO: 670693 - protein, 15 aa, Homo sapiens
  CDR3 for alpha chain variable domain of TCR clone 335347 (TRAV26-1, TRAJ39)
CIVRPGNNAGNMLTF

SEQ ID NO: 670694 - protein, 14 aa, Homo sapiens
  CDR3 for beta chain variable domain of TCR clone 335347 (TRBV4-1, TRBJ2-2)
CASSLTENTGELFF

SEQ ID NO: 670695 - protein, 13 aa, Homo sapiens
  CDR3 for alpha chain variable domain of TCR clone 335348 (TRAV21, TRAJ20)
CAVGLRVEYKLSF

SEQ ID NO: 670696 - protein, 14 aa, Homo sapiens
  CDR3 for beta chain variable domain of TCR clone 335348 (TRBV7-9, TRBJ2-1)
CASSPRDSLYEQFF

SEQ ID NO: 670697 - protein, 12 aa, Homo sapiens
  CDR3 for alpha chain variable domain of TCR clone 335349 (TRAV12-3, TRAJ20)
CAMVRGDYKLSF

SEQ ID NO: 670698 - protein, 16 aa, Homo sapiens
  CDR3 for beta chain variable domain of TCR clone 335349 (TRBV5-1, TRBJ2-7)
CASSPGLAGVIYEQYF

SEQ ID NO: 670699 - protein, 14 aa, Homo sapiens
  CDR3 for alpha chain variable domain of TCR clone 335350 (TRAV13-1, TRAJ44)
CAAKATGTASKLTL

SEQ ID NO: 670700 - protein, 13 aa, Homo sapiens
  CDR3 for beta chain variable domain of TCR clone 335350 (TRBV5-5, TRBJ1-2)
CASSFWRGEDYTF

SEQ ID NO: 670701 - protein, 10 aa, Homo sapiens
  CDR3 for alpha chain variable domain of TCR clone 335351 (TRAV23/DV6, TRAJ57)
CAASSTLSQG

SEQ ID NO: 670702 - protein, 15 aa, Homo sapiens
  CDR3 for beta chain variable domain of TCR clone 335351 (TRBV28, TRBJ2-3)
CASSPDRQGANTQYF

SEQ ID NO: 670703 - protein, 16 aa, Homo sapiens
  CDR3 for alpha chain variable domain of TCR clone 335352 (TRAV26-1, TRAJ38)
CIVRAYNAGNNRKLIW

SEQ ID NO: 670704 - protein, 13 aa, Homo sapiens
  CDR3 for beta chain variable domain of TCR clone 335352 (TRBV4-2, TRBJ2-7)
CASSRDPHDEQYF

SEQ ID NO: 670705 - protein, 18 aa, Homo sapiens
  CDR3 for alpha chain variable domain of TCR clone 335353 (TRAV1-2, TRAJ18)
CAVRDMGDRGSTLGRLNF

SEQ ID NO: 670706 - protein, 16 aa, Homo sapiens
  CDR3 for beta chain variable domain of TCR clone 335353 (TRBV29-1, TRBJ1-2)
CSAEANRDIANYGYTF

SEQ ID NO: 670707 - protein, 14 aa, Homo sapiens
  CDR3 for alpha chain variable domain of TCR clone 335354 (TRAV1-2, TRAJ16)
CAVNRFSDGQKLLF

SEQ ID NO: 670708 - protein, 11 aa, Homo sapiens
  CDR3 for beta chain variable domain of TCR clone 335354 (TRBV11-2, TRBJ2-2)
CASSLPGELFL

SEQ ID NO: 670709 - protein, 13 aa, Homo sapiens
  CDR3 for alpha chain variable domain of TCR clone 335355 (TRAV13-2, TRAJ42)
CAENGGSQGNLIF

SEQ ID NO: 670710 - protein, 14 aa, Homo sapiens
  CDR3 for beta chain variable domain of TCR clone 335355 (TRBV11-2, TRBJ2-5)
CASSRTGGIETQYF

SEQ ID NO: 670711 - protein, 22 aa, Homo sapiens
  CDR3 for alpha chain variable domain of TCR clone 335356 (TRAV39, TRAJ49)
PCMTSLPPTSGPWTNTGNQFYF

SEQ ID NO: 670712 - protein, 17 aa, Homo sapiens
  CDR3 for beta chain variable domain of TCR clone 335356 (TRBV20-1, TRBJ2-1)
CSARDRRRASSYNEQFF

SEQ ID NO: 670713 - protein, 16 aa, Homo sapiens
  CDR3 for alpha chain variable domain of TCR clone 335357 (TRAV3, TRAJ10)
CAVRDMNAGGGNKLTF

SEQ ID NO: 670714 - protein, 15 aa, Homo sapiens
  CDR3 for beta chain variable domain of TCR clone 335357 (TRBV20-1, TRBJ2-5)
CSAEGTGGLQETQYF

SEQ ID NO: 670715 - protein, 18 aa, Homo sapiens
  CDR3 for alpha chain variable domain of TCR clone 335358 (TRAV21, TRAJ52)
CAVRPSQAGGTSYGKMTF

SEQ ID NO: 670716 - protein, 17 aa, Homo sapiens
  CDR3 for beta chain variable domain of TCR clone 335358 (TRBV13, TRBJ2-3)
CASSLSRVAGGRNTQYF

SEQ ID NO: 670717 - protein, 16 aa, Homo sapiens
  CDR3 for alpha chain variable domain of TCR clone 335359 (TRAV3, TRAJ5)
CAVRNLMDTGRIALTF

SEQ ID NO: 670718 - protein, 16 aa, Homo sapiens
  CDR3 for beta chain variable domain of TCR clone 335359 (TRBV12-5, TRBJ2-5)
CASGPRTSGNQETQYF

SEQ ID NO: 670719 - protein, 17 aa, Homo sapiens
  CDR3 for alpha chain variable domain of TCR clone 335360 (TRAV17, TRAJ52)
CATDANAGGTSYGKLTF

SEQ ID NO: 670720 - protein, 11 aa, Homo sapiens
  CDR3 for beta chain variable domain of TCR clone 335360 (TRBV29-1, TRBJ2-5)
CSEDRTGTQYF

SEQ ID NO: 670721 - protein, 11 aa, Homo sapiens
  CDR3 for alpha chain variable domain of TCR clone 335361 (TRAV23/DV6, TRAJ49)
CAVAPVTSSIL

SEQ ID NO: 670722 - protein, 13 aa, Homo sapiens
  CDR3 for beta chain variable domain of TCR clone 335361 (TRBV6-1, TRBJ1-1)
CASSRQGNSEAFF

SEQ ID NO: 670723 - protein, 14 aa, Homo sapiens
  CDR3 for alpha chain variable domain of TCR clone 335362 (TRAV35, TRAJ22)
RAGLRPGSARQLTF

SEQ ID NO: 670724 - protein, 15 aa, Homo sapiens
  CDR3 for beta chain variable domain of TCR clone 335362 (TRBV12-4, TRBJ2-5)
CASSPPTGIQETQYF

SEQ ID NO: 670725 - protein, 13 aa, Homo sapiens
  CDR3 for alpha chain variable domain of TCR clone 335363 (TRAV12-3, TRAJ53)
CAMRGGSIYKLTF

SEQ ID NO: 670726 - protein, 15 aa, Homo sapiens
  CDR3 for beta chain variable domain of TCR clone 335363 (TRBV2, TRBJ2-1)
CATQARLVMIGEQFF

SEQ ID NO: 670727 - protein, 14 aa, Homo sapiens
  CDR3 for alpha chain variable domain of TCR clone 335364 (TRAV12-2, TRAJ17)
CAVNIKAAGNKLTF

SEQ ID NO: 670728 - protein, 14 aa, Homo sapiens
  CDR3 for beta chain variable domain of TCR clone 335364 (TRBV19, TRBJ2-7)
CASSIFAGTYEQYF

SEQ ID NO: 670729 - protein, 15 aa, Homo sapiens
  CDR3 for alpha chain variable domain of TCR clone 335365 (TRAV3, TRAJ4)
FAVRDGTGGYNKLIF

SEQ ID NO: 670730 - protein, 15 aa, Homo sapiens
  CDR3 for beta chain variable domain of TCR clone 335365 (TRBV20-1, TRBJ1-1)
CSASRGVTGNTEAFF

SEQ ID NO: 670731 - protein, 13 aa, Homo sapiens
  CDR3 for alpha chain variable domain of TCR clone 335366 (TRAV16, TRAJ22)
SAMLAGSARQLTF

SEQ ID NO: 670732 - protein, 18 aa, Homo sapiens
  CDR3 for beta chain variable domain of TCR clone 335366 (TRBV7-2, TRBJ2-3)
CASSLETSRDRKADTQYF

SEQ ID NO: 670733 - protein, 17 aa, Homo sapiens
  CDR3 for alpha chain variable domain of TCR clone 335367 (TRAV1-1, TRAJ11)
CAGYSTLTFGKGTMLLV

SEQ ID NO: 670734 - protein, 16 aa, Homo sapiens
  CDR3 for beta chain variable domain of TCR clone 335367 (TRBV7-2, TRBJ2-3)
CASSLVALYSTDTQYF

SEQ ID NO: 670735 - protein, 15 aa, Homo sapiens
  CDR3 for alpha chain variable domain of TCR clone 335368 (TRAV8-3, TRAJ45)
CASLYSGGGADGLTF

SEQ ID NO: 670736 - protein, 17 aa, Homo sapiens
  CDR3 for beta chain variable domain of TCR clone 335368 (TRBV7-8, TRBJ1-2)
CASSLRPLQGHLYGYTF

SEQ ID NO: 670737 - protein, 13 aa, Homo sapiens
  CDR3 for alpha chain variable domain of TCR clone 335369 (TRAV8-3, TRAJ37)
CAVGSGNTGKLIF

SEQ ID NO: 670738 - protein, 20 aa, Homo sapiens
  CDR3 for beta chain variable domain of TCR clone 335369 (TRBV7-8, TRBJ2-2)
CASSHLFPGPTIHITGELFF

SEQ ID NO: 670739 - protein, 10 aa, Homo sapiens
  CDR3 for alpha chain variable domain of TCR clone 335370 (TRAV36/DV7, TRAJ49)
CALTGNLFYF

SEQ ID NO: 670740 - protein, 14 aa, Homo sapiens
  CDR3 for beta chain variable domain of TCR clone 335370 (TRBV4-2, TRBJ2-5)
CASSQDRGRETQYF

SEQ ID NO: 670741 - protein, 13 aa, Homo sapiens
  CDR3 for alpha chain variable domain of TCR clone 335371 (TRAV12-3, TRAJ33)
CAMSVNSNYQLIW

SEQ ID NO: 670742 - protein, 12 aa, Homo sapiens
  CDR3 for beta chain variable domain of TCR clone 335371 (TRBV14, TRBJ2-7)
CASSRLKGEQYF

SEQ ID NO: 670743 - protein, 13 aa, Homo sapiens
  CDR3 for alpha chain variable domain of TCR clone 335372 (TRAV2, TRAJ20)
CAVEDPSEYKLSF

SEQ ID NO: 670744 - protein, 12 aa, Homo sapiens
  CDR3 for beta chain variable domain of TCR clone 335372 (TRBV7-9, TRBJ2-7)
CASSIKREEQYF

SEQ ID NO: 670745 - protein, 15 aa, Homo sapiens
  CDR3 for alpha chain variable domain of TCR clone 335373 (TRAV2, TRAJ32)
CAVAHYGGATNKRIF

SEQ ID NO: 670746 - protein, 15 aa, Homo sapiens
  CDR3 for beta chain variable domain of TCR clone 335373 (TRBV7-7, TRBJ2-5)
CASSQLERAEETQYF

SEQ ID NO: 670747 - protein, 11 aa, Homo sapiens
  CDR3 for alpha chain variable domain of TCR clone 335374 (TRAV2, TRAJ13)
CASGGYQKVTF

SEQ ID NO: 670748 - protein, 15 aa, Homo sapiens
  CDR3 for beta chain variable domain of TCR clone 335374 (TRBV9, TRBJ1-6)
CASSVSGTGDSPLHF

SEQ ID NO: 670749 - protein, 17 aa, Homo sapiens
  CDR3 for alpha chain variable domain of TCR clone 335375 (TRAV38-1, TRAJ28)
CAFMKPTSGAGSYQLTF

SEQ ID NO: 670750 - protein, 15 aa, Homo sapiens
  CDR3 for beta chain variable domain of TCR clone 335375 (TRBV6-3, TRBJ2-7)
CASSSPGTVFYEQYF

SEQ ID NO: 670751 - protein, 15 aa, Homo sapiens
  CDR3 for alpha chain variable domain of TCR clone 335376 (TRAV20, TRAJ39)
CAVQALLVAGNMITF

SEQ ID NO: 670752 - protein, 20 aa, Homo sapiens
  CDR3 for beta chain variable domain of TCR clone 335376 (TRBV9, TRBJ2-2)
CASSAKPGTQKGQNTGELFF

SEQ ID NO: 670753 - protein, 18 aa, Homo sapiens
  CDR3 for alpha chain variable domain of TCR clone 335377 (TRAV21, TRAJ52)
CAVRPSPAGGTSYGKLTF

SEQ ID NO: 670754 - protein, 14 aa, Homo sapiens
  CDR3 for beta chain variable domain of TCR clone 335377 (TRBV28, TRBJ1-1)
CASSSEQGYTEAFF

SEQ ID NO: 670755 - protein, 14 aa, Homo sapiens
  CDR3 for alpha chain variable domain of TCR clone 335378 (TRAV27, TRAJ37)
CAGERSSHTGKLIF

SEQ ID NO: 670756 - protein, 15 aa, Homo sapiens
  CDR3 for beta chain variable domain of TCR clone 335378 (TRBV11-3, TRBJ1-6)
CASSLDWGANSPLHF

SEQ ID NO: 670757 - protein, 12 aa, Homo sapiens
  CDR3 for alpha chain variable domain of TCR clone 335379 (TRAV17, TRAJ20)
CATDGDDYKLSF

SEQ ID NO: 670758 - protein, 18 aa, Homo sapiens
  CDR3 for beta chain variable domain of TCR clone 335379 (TRBV11-2, TRBJ2-3)
CASSLGGASRGAPNTQYF

SEQ ID NO: 670759 - protein, 14 aa, Homo sapiens
  CDR3 for alpha chain variable domain of TCR clone 335380 (TRAV27, TRAJ38)
CAGDRAGNNRKLIW

SEQ ID NO: 670760 - protein, 13 aa, Homo sapiens
  CDR3 for beta chain variable domain of TCR clone 335380 (TRBV28, TRBJ2-7)
CASKAGGVYEQYF

SEQ ID NO: 670761 - protein, 14 aa, Homo sapiens
  CDR3 for alpha chain variable domain of TCR clone 335381 (TRAV26-1, TRAJ48)
CIVRVARGNEKLTF

SEQ ID NO: 670762 - protein, 11 aa, Homo sapiens
  CDR3 for beta chain variable domain of TCR clone 335381 (TRBV29-1, TRBJ2-5)
CSEDRTGTQYF

SEQ ID NO: 670763 - protein, 14 aa, Homo sapiens
  CDR3 for alpha chain variable domain of TCR clone 335382 (TRAV1-2, TRAJ8)
CSVREVTGFQKLVF

SEQ ID NO: 670764 - protein, 14 aa, Homo sapiens
  CDR3 for beta chain variable domain of TCR clone 335382 (TRBV25-1, TRBJ1-1)
CASTHLGGNTEAFF

SEQ ID NO: 670765 - protein, 14 aa, Homo sapiens
  CDR3 for alpha chain variable domain of TCR clone 335383 (TRAV1-2, TRAJ16)
CAVNRFSDGQKLLF

SEQ ID NO: 670766 - protein, 16 aa, Homo sapiens
  CDR3 for beta chain variable domain of TCR clone 335383 (TRBV15, TRBJ2-7)
CATSRGRAGGTYEQYF

SEQ ID NO: 670767 - protein, 14 aa, Homo sapiens
  CDR3 for alpha chain variable domain of TCR clone 335384 (TRAV12-1, TRAJ17)
CVVNYKAAGNKLTF

SEQ ID NO: 670768 - protein, 14 aa, Homo sapiens
  CDR3 for beta chain variable domain of TCR clone 335384 (TRBV7-8, TRBJ2-3)
CASSLEAGTATQYF

SEQ ID NO: 670769 - protein, 14 aa, Homo sapiens
  CDR3 for alpha chain variable domain of TCR clone 335385 (TRAV9-2, TRAJ39)
CAPYIYNAGNMLTF

SEQ ID NO: 670770 - protein, 14 aa, Homo sapiens
  CDR3 for beta chain variable domain of TCR clone 335385 (TRBV7-9, TRBJ2-1)
CASSPRDSLYEQFF

SEQ ID NO: 670771 - protein, 18 aa, Homo sapiens
  CDR3 for alpha chain variable domain of TCR clone 335386 (TRAV13-1, TRAJ52)
CAASKRSAGGTSYGKLTF

SEQ ID NO: 670772 - protein, 12 aa, Homo sapiens
  CDR3 for beta chain variable domain of TCR clone 335386 (TRBV12-4, TRBJ2-7)
CASSLGGYERYF

SEQ ID NO: 670773 - protein, 15 aa, Homo sapiens
  CDR3 for alpha chain variable domain of TCR clone 335387 (TRAV17, TRAJ28)
CATVDSGAGSYQLTF

SEQ ID NO: 670774 - protein, 12 aa, Homo sapiens
  CDR3 for beta chain variable domain of TCR clone 335387 (TRBV11-2, TRBJ2-2)
RASSLGGGELFF

SEQ ID NO: 670775 - protein, 15 aa, Homo sapiens
  CDR3 for alpha chain variable domain of TCR clone 335388 (TRAV13-1, TRAJ57)
CAASNTQGGSEKLVF

SEQ ID NO: 670776 - protein, 11 aa, Homo sapiens
  CDR3 for beta chain variable domain of TCR clone 335388 (TRBV19, TRBJ1-1)
CASSIGSEAFF

SEQ ID NO: 670777 - protein, 15 aa, Homo sapiens
  CDR3 for alpha chain variable domain of TCR clone 335389 (TRAV8-2, TRAJ16)
CVVSDGFSDGQKLLF

SEQ ID NO: 670778 - protein, 15 aa, Homo sapiens
  CDR3 for beta chain variable domain of TCR clone 335389 (TRBV27, TRBJ2-5)
CASSLYPRGGETQYF

SEQ ID NO: 670779 - protein, 10 aa, Homo sapiens
  CDR3 for alpha chain variable domain of TCR clone 335390 (TRAV13-1, TRAJ30)
CAARDDKIIF

SEQ ID NO: 670780 - protein, 14 aa, Homo sapiens
  CDR3 for beta chain variable domain of TCR clone 335390 (TRBV12-4, TRBJ2-5)
CASSFGDRGGTQYF

SEQ ID NO: 670781 - protein, 14 aa, Homo sapiens
  CDR3 for alpha chain variable domain of TCR clone 335391 (TRAV8-1, TRAJ34)
CAVITTYNTDKPIL

SEQ ID NO: 670782 - protein, 14 aa, Homo sapiens
  CDR3 for beta chain variable domain of TCR clone 335391 (TRBV11-3, TRBJ1-3)
CASSHNGQGNTIYF

SEQ ID NO: 670783 - protein, 13 aa, Homo sapiens
  CDR3 for alpha chain variable domain of TCR clone 335392 (TRAV1-1, TRAJ20)
CALRGSNDYKLSF

SEQ ID NO: 670784 - protein, 15 aa, Homo sapiens
  CDR3 for beta chain variable domain of TCR clone 335392 (TRBV7-2, TRBJ2-1)
CASSSRTSREDEHFF

SEQ ID NO: 670785 - protein, 15 aa, Homo sapiens
  CDR3 for alpha chain variable domain of TCR clone 335393 (TRAV2, TRAJ9)
CDVEDRGTGGFKTIF

SEQ ID NO: 670786 - protein, 13 aa, Homo sapiens
  CDR3 for beta chain variable domain of TCR clone 335393 (TRBV20-1, TRBJ1-1)
CSARGGGNTEAFF

SEQ ID NO: 670787 - protein, 14 aa, Homo sapiens
  CDR3 for alpha chain variable domain of TCR clone 335394 (TRAV29/DV5, TRAJ44)
CAASALGTASKLTL

SEQ ID NO: 670788 - protein, 11 aa, Homo sapiens
  CDR3 for beta chain variable domain of TCR clone 335394 (TRBV29-1, TRBJ1-3)
CSVAIGNTIYF

SEQ ID NO: 670789 - protein, 14 aa, Homo sapiens
  CDR3 for alpha chain variable domain of TCR clone 335395 (TRAV12-2, TRAJ17)
CAVLFKAAGNKLTF

SEQ ID NO: 670790 - protein, 17 aa, Homo sapiens
  CDR3 for beta chain variable domain of TCR clone 335395 (TRBV11-2, TRBJ2-1)
CASSLYPPGVEYSEQFF

SEQ ID NO: 670791 - protein, 18 aa, Homo sapiens
  CDR3 for alpha chain variable domain of TCR clone 335396 (TRAV12-3, TRAJ52)
CAMSVRGAGGTSYGKLTF

SEQ ID NO: 670792 - protein, 15 aa, Homo sapiens
  CDR3 for beta chain variable domain of TCR clone 335396 (TRBV27, TRBJ1-6)
CASSCDRGLGSPLHF

SEQ ID NO: 670793 - protein, 17 aa, Homo sapiens
  CDR3 for alpha chain variable domain of TCR clone 335397 (TRAV3, TRAJ6)
CAVRDGPRAGGRYITTF

SEQ ID NO: 670794 - protein, 14 aa, Homo sapiens
  CDR3 for beta chain variable domain of TCR clone 335397 (TRBV7-2, TRBJ2-7)
CASSPKTSFYEQYF

SEQ ID NO: 670795 - protein, 13 aa, Homo sapiens
  CDR3 for alpha chain variable domain of TCR clone 335398 (TRAV8-6, TRAJ21)
CAVSPSSLNKFYF

SEQ ID NO: 670796 - protein, 14 aa, Homo sapiens
  CDR3 for beta chain variable domain of TCR clone 335398 (TRBV7-9, TRBJ2-5)
CASSLDTAQETLYF

SEQ ID NO: 670797 - protein, 15 aa, Homo sapiens
  CDR3 for alpha chain variable domain of TCR clone 335399 (TRAV35, TRAJ38)
CAGFSNAGNNRKLIW

SEQ ID NO: 670798 - protein, 15 aa, Homo sapiens
  CDR3 for beta chain variable domain of TCR clone 335399 (TRBV11-3, TRBJ2-2)
CASSYFSTGTGELFF

SEQ ID NO: 670799 - protein, 14 aa, Homo sapiens
  CDR3 for alpha chain variable domain of TCR clone 335400 (TRAV35, TRAJ39)
CAGQLGNAGNMLTF

SEQ ID NO: 670800 - protein, 16 aa, Homo sapiens
  CDR3 for beta chain variable domain of TCR clone 335400 (TRBV27, TRBJ2-2)
CASSFRGLVRTGELFF

SEQ ID NO: 670801 - protein, 14 aa, Homo sapiens
  CDR3 for alpha chain variable domain of TCR clone 335401 (TRAV13-1, TRAJ44)
CAAKAAGTASKLTF

SEQ ID NO: 670802 - protein, 13 aa, Homo sapiens
  CDR3 for beta chain variable domain of TCR clone 335401 (TRBV5-5, TRBJ1-2)
CASRFWRGEDYTF

SEQ ID NO: 670803 - protein, 12 aa, Homo sapiens
  CDR3 for alpha chain variable domain of TCR clone 335402 (TRAV26-1, TRAJ36)
CIVRVRADNLFF

SEQ ID NO: 670804 - protein, 14 aa, Homo sapiens
  CDR3 for beta chain variable domain of TCR clone 335402 (TRBV7-2, TRBJ1-2)
CASSQTGSTYGYTF

SEQ ID NO: 670805 - protein, 13 aa, Homo sapiens
  CDR3 for alpha chain variable domain of TCR clone 335403 (TRAV26-1, TRAJ54)
CIVRVKGAQKLVF

SEQ ID NO: 670806 - protein, 15 aa, Homo sapiens
  CDR3 for beta chain variable domain of TCR clone 335403 (TRBV20-1, TRBJ2-1)
CSAQPGGGPYNEQSF

SEQ ID NO: 670807 - protein, 11 aa, Homo sapiens
  CDR3 for alpha chain variable domain of TCR clone 335404 (TRAV35, TRAJ34)
CWARNTDKLIF

SEQ ID NO: 670808 - protein, 13 aa, Homo sapiens
  CDR3 for beta chain variable domain of TCR clone 335404 (TRBV19, TRBJ2-7)
CGSSIDRTYEQYF

SEQ ID NO: 670809 - protein, 11 aa, Homo sapiens
  CDR3 for alpha chain variable domain of TCR clone 335405 (TRAV12-1, TRAJ43)
CVEYDNNDMRF

SEQ ID NO: 670810 - protein, 14 aa, Homo sapiens
  CDR3 for beta chain variable domain of TCR clone 335405 (TRBV25-1, TRBJ1-1)
CASTHLGGNTEAFF

SEQ ID NO: 670811 - protein, 15 aa, Homo sapiens
  CDR3 for alpha chain variable domain of TCR clone 335406 (TRAV8-3, TRAJ20)
CAVEAKGSNDYTLSF

SEQ ID NO: 670812 - protein, 12 aa, Homo sapiens
  CDR3 for beta chain variable domain of TCR clone 335406 (TRBV7-2, TRBJ1-2)
CASRDSIYGYTF

SEQ ID NO: 670813 - protein, 12 aa, Homo sapiens
  CDR3 for alpha chain variable domain of TCR clone 335407 (TRAV13-1, TRAJ5)
CAAKAGRRALTF

SEQ ID NO: 670814 - protein, 15 aa, Homo sapiens
  CDR3 for beta chain variable domain of TCR clone 335407 (TRBV20-1, TRBJ2-7)
CSARDRVSGMDEQYF

SEQ ID NO: 670815 - protein, 14 aa, Homo sapiens
  CDR3 for alpha chain variable domain of TCR clone 335408 (TRAV1-2, TRAJ16)
CAFNRFSDGQKLLF

SEQ ID NO: 670816 - protein, 16 aa, Homo sapiens
  CDR3 for beta chain variable domain of TCR clone 335408 (TRBV11-2, TRBJ1-2)
CASSLDTGGADYGYTF

SEQ ID NO: 670817 - protein, 10 aa, Homo sapiens
  CDR3 for alpha chain variable domain of TCR clone 335409 (TRAV17, TRAJ36)
CATVAGNLFF

SEQ ID NO: 670818 - protein, 11 aa, Homo sapiens
  CDR3 for beta chain variable domain of TCR clone 335409 (TRBV29-1, TRBJ2-5)
CSEDRTGTQYF

SEQ ID NO: 670819 - protein, 12 aa, Homo sapiens
  CDR3 for alpha chain variable domain of TCR clone 335410 (TRAV21, TRAJ27)
CAPPAMQANQPL

SEQ ID NO: 670820 - protein, 13 aa, Homo sapiens
  CDR3 for beta chain variable domain of TCR clone 335410 (TRBV2, TRBJ1-1)
CARNPTGGFHAFF

SEQ ID NO: 670821 - protein, 13 aa, Homo sapiens
  CDR3 for alpha chain variable domain of TCR clone 335411 (TRAV8-3, TRAJ28)
CAVGAVGSYQLTF

SEQ ID NO: 670822 - protein, 15 aa, Homo sapiens
  CDR3 for beta chain variable domain of TCR clone 335411 (TRBV7-9, TRBJ1-5)
CASSQGHQPNKPQHC

SEQ ID NO: 670823 - protein, 12 aa, Homo sapiens
  CDR3 for alpha chain variable domain of TCR clone 335412 (TRAV1-1, TRAJ8)
CAGGTGFQKLVF

SEQ ID NO: 670824 - protein, 16 aa, Homo sapiens
  CDR3 for beta chain variable domain of TCR clone 335412 (TRBV24-1, TRBJ2-3)
CATSDPGTGATDTQYF

SEQ ID NO: 670825 - protein, 18 aa, Homo sapiens
  CDR3 for alpha chain variable domain of TCR clone 335413 (TRAV21, TRAJ52)
CAVRPSPAGGTSYGKLTF

SEQ ID NO: 670826 - protein, 14 aa, Homo sapiens
  CDR3 for beta chain variable domain of TCR clone 335413 (TRBV10-3, TRBJ1-2)
CAISAGGRVDGYTF

SEQ ID NO: 670827 - protein, 16 aa, Homo sapiens
  CDR3 for alpha chain variable domain of TCR clone 335414 (TRAV8-3, TRAJ44)
CAVVIPALPVNSPLGL

SEQ ID NO: 670828 - protein, 15 aa, Homo sapiens
  CDR3 for beta chain variable domain of TCR clone 335414 (TRBV28, TRBJ2-7)
CASSFRGQGRYEQYF

SEQ ID NO: 670829 - protein, 14 aa, Homo sapiens
  CDR3 for alpha chain variable domain of TCR clone 335415 (TRAV12-3, TRAJ54)
CAMSALQGAQKLVF

SEQ ID NO: 670830 - protein, 15 aa, Homo sapiens
  CDR3 for beta chain variable domain of TCR clone 335415 (TRBV19, TRBJ2-4)
CASSTPGIARNMQYF

SEQ ID NO: 670831 - protein, 17 aa, Homo sapiens
  CDR3 for alpha chain variable domain of TCR clone 335416 (TRAV27, TRAJ26)
CAGARVPLDNYGQNFVF

SEQ ID NO: 670832 - protein, 15 aa, Homo sapiens
  CDR3 for beta chain variable domain of TCR clone 335416 (TRBV11-2, TRBJ2-5)
CASSPRSGGLETQYF

SEQ ID NO: 670833 - protein, 10 aa, Homo sapiens
  CDR3 for alpha chain variable domain of TCR clone 335417 (TRAV21, TRAJ31)
CAVDNARLKF

SEQ ID NO: 670834 - protein, 13 aa, Homo sapiens
  CDR3 for beta chain variable domain of TCR clone 335417 (TRBV4-1, TRBJ1-1)
CASSRKMNTEAFF

SEQ ID NO: 670835 - protein, 11 aa, Homo sapiens
  CDR3 for alpha chain variable domain of TCR clone 335418 (TRAV21, TRAJ34)
CAHYNTDKLIF

SEQ ID NO: 670836 - protein, 15 aa, Homo sapiens
  CDR3 for beta chain variable domain of TCR clone 335418 (TRBV27, TRBJ2-1)
CASSNGGGSSNEQFF

SEQ ID NO: 670837 - protein, 16 aa, Homo sapiens
  CDR3 for alpha chain variable domain of TCR clone 335419 (TRAV12-2, TRAJ48)
CAVNPTSTFGNENLTF

SEQ ID NO: 670838 - protein, 12 aa, Homo sapiens
  CDR3 for beta chain variable domain of TCR clone 335419 (TRBV9, TRBJ2-3)
CASSLRAGTQYF

SEQ ID NO: 670839 - protein, 14 aa, Homo sapiens
  CDR3 for alpha chain variable domain of TCR clone 335420 (TRAV9-2, TRAJ39)
CALYIYNAGNMLTF

SEQ ID NO: 670840 - protein, 13 aa, Homo sapiens
  CDR3 for beta chain variable domain of TCR clone 335420 (TRBV7-9, TRBJ1-2)
CASSLKQNYGYAF

SEQ ID NO: 670841 - protein, 13 aa, Homo sapiens
  CDR3 for alpha chain variable domain of TCR clone 335421 (TRAV13-1, TRAJ20)
CAARVSNDYKLSF

SEQ ID NO: 670842 - protein, 12 aa, Homo sapiens
  CDR3 for beta chain variable domain of TCR clone 335421 (TRBV20-1, TRBJ2-1)
CIARLGTDEQFF

SEQ ID NO: 670843 - protein, 14 aa, Homo sapiens
  CDR3 for alpha chain variable domain of TCR clone 335422 (TRAV12-2, TRAJ5)
CAVNRSTGRRALTF

SEQ ID NO: 670844 - protein, 13 aa, Homo sapiens
  CDR3 for beta chain variable domain of TCR clone 335422 (TRBV18, TRBJ2-2)
CASSPTRGGELFF

SEQ ID NO: 670845 - protein, 13 aa, Homo sapiens
  CDR3 for alpha chain variable domain of TCR clone 335423 (TRAV21, TRAJ27)
CAARPCNAGKSTF

SEQ ID NO: 670846 - protein, 13 aa, Homo sapiens
  CDR3 for beta chain variable domain of TCR clone 335423 (TRBV19, TRBJ1-2)
CASSVPGQDGYTF

SEQ ID NO: 670847 - protein, 14 aa, Homo sapiens
  CDR3 for alpha chain variable domain of TCR clone 335424 (TRAV34, TRAJ22)
CGADTSGSARQLTF

SEQ ID NO: 670848 - protein, 16 aa, Homo sapiens
  CDR3 for beta chain variable domain of TCR clone 335424 (TRBV2, TRBJ2-3)
CASSTSVEGVTDTQYF

SEQ ID NO: 670849 - protein, 15 aa, Homo sapiens
  CDR3 for alpha chain variable domain of TCR clone 335425 (TRAV8-3, TRAJ27)
CAVGPSKTNAGKSTF

SEQ ID NO: 670850 - protein, 15 aa, Homo sapiens
  CDR3 for beta chain variable domain of TCR clone 335425 (TRBV5-1, TRBJ2-1)
CASSPARAPYNEQFF

SEQ ID NO: 670851 - protein, 12 aa, Homo sapiens
  CDR3 for alpha chain variable domain of TCR clone 335426 (TRAV17, TRAJ43)
CATDAFPADMHF

SEQ ID NO: 670852 - protein, 14 aa, Homo sapiens
  CDR3 for beta chain variable domain of TCR clone 335426 (TRBV20-1, TRBJ2-3)
CSARDGGSTDTQYF

SEQ ID NO: 670853 - protein, 13 aa, Homo sapiens
  CDR3 for alpha chain variable domain of TCR clone 335427 (TRAV8-3, TRAJ44)
CAVVPDTASKLTF

SEQ ID NO: 670854 - protein, 13 aa, Homo sapiens
  CDR3 for beta chain variable domain of TCR clone 335427 (TRBV10-3, TRBJ1-2)
CAISERDSYGYTF

SEQ ID NO: 670855 - protein, 16 aa, Homo sapiens
  CDR3 for alpha chain variable domain of TCR clone 335428 (TRAV30, TRAJ24)
CGTEIVGAESWGKFQF

SEQ ID NO: 670856 - protein, 15 aa, Homo sapiens
  CDR3 for beta chain variable domain of TCR clone 335428 (TRBV7-9, TRBJ1-4)
CASSARTGGNEKLFF

SEQ ID NO: 670857 - protein, 12 aa, Homo sapiens
  CDR3 for alpha chain variable domain of TCR clone 335429 (TRAV12-3, TRAJ4)
CAMTGAGTRLAV

SEQ ID NO: 670858 - protein, 14 aa, Homo sapiens
  CDR3 for beta chain variable domain of TCR clone 335429 (TRBV10-3, TRBJ1-1)
CAVSDTDRGVEAFF

SEQ ID NO: 670859 - protein, 15 aa, Homo sapiens
  CDR3 for alpha chain variable domain of TCR clone 335430 (TRAV26-2, TRAJ13)
CILRDLSGGYQKVTF

SEQ ID NO: 670860 - protein, 11 aa, Homo sapiens
  CDR3 for beta chain variable domain of TCR clone 335430 (TRBV7-9, TRBJ2-5)
CASSLSATQFF

SEQ ID NO: 670861 - protein, 14 aa, Homo sapiens
  CDR3 for alpha chain variable domain of TCR clone 335431 (TRAV12-1, TRAJ43)
CVVNGRSNNTDMRF

SEQ ID NO: 670862 - protein, 15 aa, Homo sapiens
  CDR3 for beta chain variable domain of TCR clone 335431 (TRBV28, TRBJ2-5)
CASSPRGPTTSGQAR

SEQ ID NO: 670863 - protein, 14 aa, Homo sapiens
  CDR3 for alpha chain variable domain of TCR clone 335432 (TRAV12-3, TRAJ10)
SHLPLPGGGNKLTF

SEQ ID NO: 670864 - protein, 17 aa, Homo sapiens
  CDR3 for beta chain variable domain of TCR clone 335432 (TRBV20-1, TRBJ2-1)
CSASSSGLAGSYNEQFF

SEQ ID NO: 670865 - protein, 14 aa, Homo sapiens
  CDR3 for alpha chain variable domain of TCR clone 335433 (TRAV12-1, TRAJ17)
CVVNYKAAGNKLTF

SEQ ID NO: 670866 - protein, 14 aa, Homo sapiens
  CDR3 for beta chain variable domain of TCR clone 335433 (TRBV7-2, TRBJ2-7)
CASRSQGAAYEQCF

SEQ ID NO: 670867 - protein, 14 aa, Homo sapiens
  CDR3 for alpha chain variable domain of TCR clone 335434 (TRAV36/DV7, TRAJ40)
CAVETTSGTYKYIF

SEQ ID NO: 670868 - protein, 12 aa, Homo sapiens
  CDR3 for beta chain variable domain of TCR clone 335434 (TRBV12-4, TRBJ1-2)
CASSFIWLHLRF

SEQ ID NO: 670869 - protein, 11 aa, Homo sapiens
  CDR3 for alpha chain variable domain of TCR clone 335435 (TRAV1-1, TRAJ23)
CAVRQGGKLIV

SEQ ID NO: 670870 - protein, 13 aa, Homo sapiens
  CDR3 for beta chain variable domain of TCR clone 335435 (TRBV15, TRBJ1-6)
CATSGGLNSPLHF

SEQ ID NO: 670871 - protein, 15 aa, Homo sapiens
  CDR3 for alpha chain variable domain of TCR clone 335436 (TRAV13-1, TRAJ44)
CAASRGGGTASKLTF

SEQ ID NO: 670872 - protein, 14 aa, Homo sapiens
  CDR3 for beta chain variable domain of TCR clone 335436 (TRBV18, TRBJ2-7)
CASSPRGGAYEQYF

SEQ ID NO: 670873 - protein, 17 aa, Homo sapiens
  CDR3 for alpha chain variable domain of TCR clone 335437 (TRAV8-4, TRAJ53)
CAVSGPRSEGSNYKLTI

SEQ ID NO: 670874 - protein, 14 aa, Homo sapiens
  CDR3 for beta chain variable domain of TCR clone 335437 (TRBV7-3, TRBJ2-1)
CASSALAGGPEQFF

SEQ ID NO: 670875 - protein, 13 aa, Homo sapiens
  CDR3 for alpha chain variable domain of TCR clone 335438 (TRAV21, TRAJ27)
CAARPGNAGKSTF

SEQ ID NO: 670876 - protein, 12 aa, Homo sapiens
  CDR3 for beta chain variable domain of TCR clone 335438 (TRBV7-3, TRBJ2-1)
CTSSFQSGPQFF

SEQ ID NO: 670877 - protein, 13 aa, Homo sapiens
  CDR3 for alpha chain variable domain of TCR clone 335439 (TRAV12-3, TRAJ33)
CAMSLNSNYQLIW

SEQ ID NO: 670878 - protein, 14 aa, Homo sapiens
  CDR3 for beta chain variable domain of TCR clone 335439 (TRBV4-2, TRBJ2-1)
CASGLDRAYNEQFF

SEQ ID NO: 670879 - protein, 12 aa, Homo sapiens
  CDR3 for alpha chain variable domain of TCR clone 335440 (TRAV8-3, TRAJ20)
CAVGATDSKLSF

SEQ ID NO: 670880 - protein, 16 aa, Homo sapiens
  CDR3 for beta chain variable domain of TCR clone 335440 (TRBV19, TRBJ2-2)
CASRSPGTGATGELFF

SEQ ID NO: 670881 - protein, 12 aa, Homo sapiens
  CDR3 for alpha chain variable domain of TCR clone 335441 (TRAV12-3, TRAJ17)
CAMTLTGNKLTF

SEQ ID NO: 670882 - protein, 15 aa, Homo sapiens
  CDR3 for beta chain variable domain of TCR clone 335441 (TRBV20-1, TRBJ2-7)
CSARDRVAGMDEQDF

SEQ ID NO: 670883 - protein, 15 aa, Homo sapiens
  CDR3 for alpha chain variable domain of TCR clone 335442 (TRAV29/DV5, TRAJ44)
CAASVGTGTASKLTF

SEQ ID NO: 670884 - protein, 16 aa, Homo sapiens
  CDR3 for beta chain variable domain of TCR clone 335442 (TRBV4-1, TRBJ1-4)
CASSQDLRRGGEKLFF

SEQ ID NO: 670885 - protein, 13 aa, Homo sapiens
  CDR3 for alpha chain variable domain of TCR clone 335443 (TRAV29/DV5, TRAJ49)
CAASTNTGNQFYF

SEQ ID NO: 670886 - protein, 12 aa, Homo sapiens
  CDR3 for beta chain variable domain of TCR clone 335443 (TRBV7-3, TRBJ2-1)
CASSFQSGPQFF

SEQ ID NO: 670887 - protein, 18 aa, Homo sapiens
  CDR3 for alpha chain variable domain of TCR clone 335444 (TRAV3, TRAJ17)
CAVRARRGGRSCRQQANF

SEQ ID NO: 670888 - protein, 13 aa, Homo sapiens
  CDR3 for beta chain variable domain of TCR clone 335444 (TRBV7-9, TRBJ1-2)
CASSLKQNYGYTF

SEQ ID NO: 670889 - protein, 14 aa, Homo sapiens
  CDR3 for alpha chain variable domain of TCR clone 335445 (TRAV3, TRAJ17)
CAVRDAAAGNKLPF

SEQ ID NO: 670890 - protein, 13 aa, Homo sapiens
  CDR3 for beta chain variable domain of TCR clone 335445 (TRBV2, TRBJ1-1)
CASSVSGYTEAFF

SEQ ID NO: 670891 - protein, 18 aa, Homo sapiens
  CDR3 for alpha chain variable domain of TCR clone 335446 (TRAV21, TRAJ52)
CAVRPSPAGGTSYGKLTV

SEQ ID NO: 670892 - protein, 13 aa, Homo sapiens
  CDR3 for beta chain variable domain of TCR clone 335446 (TRBV29-1, TRBJ2-2)
CSVYREDTGELFF

SEQ ID NO: 670893 - protein, 12 aa, Homo sapiens
  CDR3 for alpha chain variable domain of TCR clone 335447 (TRAV25, TRAJ48)
CAGDFGNEKLTF

SEQ ID NO: 670894 - protein, 12 aa, Homo sapiens
  CDR3 for beta chain variable domain of TCR clone 335447 (TRBV2, TRBJ2-5)
CASKEYGETQFF

SEQ ID NO: 670895 - protein, 16 aa, Homo sapiens
  CDR3 for alpha chain variable domain of TCR clone 335448 (TRAV30, TRAJ24)
CGTEIVDADSWGKFQF

SEQ ID NO: 670896 - protein, 14 aa, Homo sapiens
  CDR3 for beta chain variable domain of TCR clone 335448 (TRBV28, TRBJ1-1)
CASSPRTRWAEAFF

SEQ ID NO: 670897 - protein, 16 aa, Homo sapiens
  CDR3 for alpha chain variable domain of TCR clone 335449 (TRAV30, TRAJ24)
CGAEIVDADSWGKFQF

SEQ ID NO: 670898 - protein, 18 aa, Homo sapiens
  CDR3 for beta chain variable domain of TCR clone 335449 (TRBV11-2, TRBJ2-3)
CASSLGGASRGAPNTQYF

SEQ ID NO: 670899 - protein, 14 aa, Homo sapiens
  CDR3 for alpha chain variable domain of TCR clone 335450 (TRAV1-1, TRAJ5)
CAVRDGAGRRALTF

SEQ ID NO: 670900 - protein, 14 aa, Homo sapiens
  CDR3 for beta chain variable domain of TCR clone 335450 (TRBV28, TRBJ2-1)
CASSYYTAYNEQFS

SEQ ID NO: 670901 - protein, 12 aa, Homo sapiens
  CDR3 for alpha chain variable domain of TCR clone 335451 (TRAV3, TRAJ31)
CAVRPRCPSLMF

SEQ ID NO: 670902 - protein, 17 aa, Homo sapiens
  CDR3 for beta chain variable domain of TCR clone 335451 (TRBV7-9, TRBJ1-5)
CASSASQGGYSNQPQHF

SEQ ID NO: 670903 - protein, 13 aa, Homo sapiens
  CDR3 for alpha chain variable domain of TCR clone 335452 (TRAV2, TRAJ35)
CAPRVGFGTVLHC

SEQ ID NO: 670904 - protein, 15 aa, Homo sapiens
  CDR3 for beta chain variable domain of TCR clone 335452 (TRBV6-3, TRBJ2-7)
CASSSPGTVFYEQYF

SEQ ID NO: 670905 - protein, 12 aa, Homo sapiens
  CDR3 for alpha chain variable domain of TCR clone 335453 (TRAV17, TRAJ12)
CATLRSSYKLIF

SEQ ID NO: 670906 - protein, 14 aa, Homo sapiens
  CDR3 for beta chain variable domain of TCR clone 335453 (TRBV19, TRBJ2-1)
CARGARSFQWEQLF

SEQ ID NO: 670907 - protein, 17 aa, Homo sapiens
  CDR3 for alpha chain variable domain of TCR clone 335454 (TRAV3, TRAJ12)
CAVRDGGRMDSSFKLIF

SEQ ID NO: 670908 - protein, 13 aa, Homo sapiens
  CDR3 for beta chain variable domain of TCR clone 335454 (TRBV15, TRBJ1-6)
CATSGGLNSPLHF

SEQ ID NO: 670909 - protein, 15 aa, Homo sapiens
  CDR3 for alpha chain variable domain of TCR clone 335455 (TRAV3, TRAJ5)
CAVRPLGHGQESTYF

SEQ ID NO: 670910 - protein, 16 aa, Homo sapiens
  CDR3 for beta chain variable domain of TCR clone 335455 (TRBV3-1, TRBJ2-7)
CASSQGVGKGSSEQYF

SEQ ID NO: 670911 - protein, 14 aa, Homo sapiens
  CDR3 for alpha chain variable domain of TCR clone 335456 (TRAV8-6, TRAJ20)
CAVSDRRVRDKLSF

SEQ ID NO: 670912 - protein, 14 aa, Homo sapiens
  CDR3 for beta chain variable domain of TCR clone 335456 (TRBV7-2, TRBJ2-7)
CASRSQGAAYEQYF

SEQ ID NO: 670913 - protein, 15 aa, Homo sapiens
  CDR3 for alpha chain variable domain of TCR clone 335457 (TRAV1-2, TRAJ28)
CAVQYSGAWSYQLTF

SEQ ID NO: 670914 - protein, 13 aa, Homo sapiens
  CDR3 for beta chain variable domain of TCR clone 335457 (TRBV20-1, TRBJ2-7)
CSATHTSGYERYF

SEQ ID NO: 670915 - protein, 15 aa, Homo sapiens
  CDR3 for alpha chain variable domain of TCR clone 335458 (TRAV20, TRAJ43)
CAVRAGKRSNNDMRF

SEQ ID NO: 670916 - protein, 14 aa, Homo sapiens
  CDR3 for beta chain variable domain of TCR clone 335458 (TRBV27, TRBJ2-1)
CASRHLGGGKEQFF

SEQ ID NO: 670917 - protein, 16 aa, Homo sapiens
  CDR3 for alpha chain variable domain of TCR clone 335459 (TRAV30, TRAJ26)
CGTESVGDNYGQNFVF

SEQ ID NO: 670918 - protein, 16 aa, Homo sapiens
  CDR3 for beta chain variable domain of TCR clone 335459 (TRBV20-1, TRBJ1-4)
CSAPGQGLLTNEKLFF

SEQ ID NO: 670919 - protein, 11 aa, Homo sapiens
  CDR3 for alpha chain variable domain of TCR clone 335460 (TRAV12-3, TRAJ49)
CAANTGNLFYF

SEQ ID NO: 670920 - protein, 12 aa, Homo sapiens
  CDR3 for beta chain variable domain of TCR clone 335460 (TRBV6-3, TRBJ2-7)
CASSEPGFEQYF

SEQ ID NO: 670921 - protein, 15 aa, Homo sapiens
  CDR3 for alpha chain variable domain of TCR clone 335461 (TRAV26-1, TRAJ40)
CIVRVTTSGTYKFIF

SEQ ID NO: 670922 - protein, 12 aa, Homo sapiens
  CDR3 for beta chain variable domain of TCR clone 335461 (TRBV7-9, TRBJ1-4)
CASSTDREKLFF

SEQ ID NO: 670923 - protein, 16 aa, Homo sapiens
  CDR3 for alpha chain variable domain of TCR clone 335462 (TRAV14/DV4, TRAJ53)
CAMREGGGGSTYKLTF

SEQ ID NO: 670924 - protein, 14 aa, Homo sapiens
  CDR3 for beta chain variable domain of TCR clone 335462 (TRBV5-8, TRBJ2-3)
CASSLGQGTDTQYF

SEQ ID NO: 670925 - protein, 11 aa, Homo sapiens
  CDR3 for alpha chain variable domain of TCR clone 335463 (TRAV2, TRAJ13)
CASGGYQKVTF

SEQ ID NO: 670926 - protein, 15 aa, Homo sapiens
  CDR3 for beta chain variable domain of TCR clone 335463 (TRBV7-2, TRBJ2-6)
CASSREGSGANVLTF

SEQ ID NO: 670927 - protein, 14 aa, Homo sapiens
  CDR3 for alpha chain variable domain of TCR clone 335464 (TRAV8-4, TRAJ39)
CAVSEGNAGNMLTF

SEQ ID NO: 670928 - protein, 14 aa, Homo sapiens
  CDR3 for beta chain variable domain of TCR clone 335464 (TRBV20-1, TRBJ2-3)
CSARGGTSTDTQYF

SEQ ID NO: 670929 - protein, 11 aa, Homo sapiens
  CDR3 for alpha chain variable domain of TCR clone 335465 (TRAV3, TRAJ21)
CAVGNFNKFYF

SEQ ID NO: 670930 - protein, 15 aa, Homo sapiens
  CDR3 for beta chain variable domain of TCR clone 335465 (TRBV5-1, TRBJ2-1)
CASSMVANSYNEQFF

SEQ ID NO: 670931 - protein, 10 aa, Homo sapiens
  CDR3 for alpha chain variable domain of TCR clone 335466 (TRAV36/DV7, TRAJ48)
CAVGNEKLTF

SEQ ID NO: 670932 - protein, 14 aa, Homo sapiens
  CDR3 for beta chain variable domain of TCR clone 335466 (TRBV7-2, TRBJ2-7)
CASSPKTSFCEQYF

SEQ ID NO: 670933 - protein, 15 aa, Homo sapiens
  CDR3 for alpha chain variable domain of TCR clone 335467 (TRAV8-3, TRAJ45)
CAASYSGGGAGGLTF

SEQ ID NO: 670934 - protein, 13 aa, Homo sapiens
  CDR3 for beta chain variable domain of TCR clone 335467 (TRBV10-3, TRBJ2-7)
CASKLAVNYEQYF

SEQ ID NO: 670935 - protein, 16 aa, Homo sapiens
  CDR3 for alpha chain variable domain of TCR clone 335468 (TRAV30, TRAJ24)
CGTELVDAASWGKFQF

SEQ ID NO: 670936 - protein, 14 aa, Homo sapiens
  CDR3 for beta chain variable domain of TCR clone 335468 (TRBV12-5, TRBJ2-5)
CASGSRTQQETQYF

SEQ ID NO: 670937 - protein, 16 aa, Homo sapiens
  CDR3 for alpha chain variable domain of TCR clone 335469 (TRAV17, TRAJ53)
CATDALSGGSNYKLTF

SEQ ID NO: 670938 - protein, 12 aa, Homo sapiens
  CDR3 for beta chain variable domain of TCR clone 335469 (TRBV5-1, TRBJ2-7)
CASSFRGYEQYC

SEQ ID NO: 670939 - protein, 14 aa, Homo sapiens
  CDR3 for alpha chain variable domain of TCR clone 335470 (TRAV16, TRAJ8)
CALLMNTGFQKLVF

SEQ ID NO: 670940 - protein, 15 aa, Homo sapiens
  CDR3 for beta chain variable domain of TCR clone 335470 (TRBV6-3, TRBJ2-7)
CASSSPGTVFYEQYF

SEQ ID NO: 670941 - protein, 14 aa, Homo sapiens
  CDR3 for alpha chain variable domain of TCR clone 335471 (TRAV38-1, TRAJ45)
CAYYSGGGADGLTF

SEQ ID NO: 670942 - protein, 16 aa, Homo sapiens
  CDR3 for beta chain variable domain of TCR clone 335471 (TRBV11-2, TRBJ2-7)
CASSPTTGGVSYEQYF

SEQ ID NO: 670943 - protein, 13 aa, Homo sapiens
  CDR3 for alpha chain variable domain of TCR clone 335472 (TRAV17, TRAJ9)
CATDYTGRFKTIF

SEQ ID NO: 670944 - protein, 16 aa, Homo sapiens
  CDR3 for beta chain variable domain of TCR clone 335472 (TRBV7-7, TRBJ2-1)
CASSLASGTSYNEQFF

SEQ ID NO: 670945 - protein, 15 aa, Homo sapiens
  CDR3 for alpha chain variable domain of TCR clone 335473 (TRAV8-3, TRAJ13)
CAVAPNSGGYQKVTF

SEQ ID NO: 670946 - protein, 13 aa, Homo sapiens
  CDR3 for beta chain variable domain of TCR clone 335473 (TRBV24-1, TRBJ2-2)
CATSDWSTGELLF

SEQ ID NO: 670947 - protein, 16 aa, Homo sapiens
  CDR3 for alpha chain variable domain of TCR clone 335474 (TRAV1-2, TRAJ10)
CAVRGVLTGGGNKLTF

SEQ ID NO: 670948 - protein, 14 aa, Homo sapiens
  CDR3 for beta chain variable domain of TCR clone 335474 (TRBV7-8, TRBJ2-3)
CASSVAGGTDTQYF

SEQ ID NO: 670949 - protein, 16 aa, Homo sapiens
  CDR3 for alpha chain variable domain of TCR clone 335475 (TRAV12-2, TRAJ43)
CAGDDMRFGAGTRLTV

SEQ ID NO: 670950 - protein, 16 aa, Homo sapiens
  CDR3 for beta chain variable domain of TCR clone 335475 (TRBV2, TRBJ2-4)
CASSEAPGGEQNTQYF

SEQ ID NO: 670951 - protein, 14 aa, Homo sapiens
  CDR3 for alpha chain variable domain of TCR clone 335476 (TRAV12-3, TRAJ42)
CAMNYGGSQGNLIF

SEQ ID NO: 670952 - protein, 15 aa, Homo sapiens
  CDR3 for beta chain variable domain of TCR clone 335476 (TRBV5-7, TRBJ1-5)
CASSYDKLWDQPQHF

SEQ ID NO: 670953 - protein, 11 aa, Homo sapiens
  CDR3 for alpha chain variable domain of TCR clone 335477 (TRAV1-2, TRAJ11)
CAVRGYSTLTF

SEQ ID NO: 670954 - protein, 14 aa, Homo sapiens
  CDR3 for beta chain variable domain of TCR clone 335477 (TRBV7-6, TRBJ2-3)
CASSLGTVTDTQYF

SEQ ID NO: 670955 - protein, 16 aa, Homo sapiens
  CDR3 for alpha chain variable domain of TCR clone 335478 (TRAV1-2, TRAJ10)
CAVRGVITGGGNKLTF

SEQ ID NO: 670956 - protein, 12 aa, Homo sapiens
  CDR3 for beta chain variable domain of TCR clone 335478 (TRBV7-8, TRBJ2-7)
CASSLGDRERYF

SEQ ID NO: 670957 - protein, 11 aa, Homo sapiens
  CDR3 for alpha chain variable domain of TCR clone 335479 (TRAV3, TRAJ21)
CAVGNFNKFYF

SEQ ID NO: 670958 - protein, 15 aa, Homo sapiens
  CDR3 for beta chain variable domain of TCR clone 335479 (TRBV27, TRBJ2-3)
CASSLGLAATDTQYF

SEQ ID NO: 670959 - protein, 18 aa, Homo sapiens
  CDR3 for alpha chain variable domain of TCR clone 335480 (TRAV21, TRAJ52)
CAVRPSPAGGTSYGKLTF

SEQ ID NO: 670960 - protein, 16 aa, Homo sapiens
  CDR3 for beta chain variable domain of TCR clone 335480 (TRBV28, TRBJ2-1)
CASSSSYSGSLNEQFF

SEQ ID NO: 670961 - protein, 12 aa, Homo sapiens
  CDR3 for alpha chain variable domain of TCR clone 335481 (TRAV3, TRAJ20)
CAVRDPDYKLSF

SEQ ID NO: 670962 - protein, 15 aa, Homo sapiens
  CDR3 for beta chain variable domain of TCR clone 335481 (TRBV7-9, TRBJ1-4)
CASSARTGGNEKLFF

SEQ ID NO: 670963 - protein, 13 aa, Homo sapiens
  CDR3 for alpha chain variable domain of TCR clone 335482 (TRAV12-3, TRAJ33)
CAMSVNSNYQLIW

SEQ ID NO: 670964 - protein, 17 aa, Homo sapiens
  CDR3 for beta chain variable domain of TCR clone 335482 (TRBV5-4, TRBJ2-1)
CASSSAGGRGPYNEQFF

SEQ ID NO: 670965 - protein, 17 aa, Homo sapiens
  CDR3 for alpha chain variable domain of TCR clone 335483 (TRAV29/DV5, TRAJ44)
QCTSVQPFTGTASKLTF

SEQ ID NO: 670966 - protein, 15 aa, Homo sapiens
  CDR3 for beta chain variable domain of TCR clone 335483 (TRBV4-1, TRBJ1-6)
CASSAGQGYNSPLHF

SEQ ID NO: 670967 - protein, 16 aa, Homo sapiens
  CDR3 for alpha chain variable domain of TCR clone 335484 (TRAV30, TRAJ24)
CGTEIVDAESWGKFQF

SEQ ID NO: 670968 - protein, 15 aa, Homo sapiens
  CDR3 for beta chain variable domain of TCR clone 335484 (TRBV18, TRBJ2-1)
CASLPDRGRDNEQFF

SEQ ID NO: 670969 - protein, 16 aa, Homo sapiens
  CDR3 for alpha chain variable domain of TCR clone 335485 (TRAV22, TRAJ45)
CAVERGKRGGADGLTF

SEQ ID NO: 670970 - protein, 16 aa, Homo sapiens
  CDR3 for beta chain variable domain of TCR clone 335485 (TRBV27, TRBJ2-2)
CASSLRPGGAPGELFF

SEQ ID NO: 670971 - protein, 13 aa, Homo sapiens
  CDR3 for alpha chain variable domain of TCR clone 335486 (TRAV12-3, TRAJ7)
CAMSASGNNRLAF

SEQ ID NO: 670972 - protein, 14 aa, Homo sapiens
  CDR3 for beta chain variable domain of TCR clone 335486 (TRBV12-5, TRBJ2-5)
CASGSRTHQETQYF

SEQ ID NO: 670973 - protein, 14 aa, Homo sapiens
  CDR3 for alpha chain variable domain of TCR clone 335487 (TRAV12-2, TRAJ40)
CAVKIPSGTYKYIF

SEQ ID NO: 670974 - protein, 20 aa, Homo sapiens
  CDR3 for beta chain variable domain of TCR clone 335487 (TRBV28, TRBJ2-1)
CASTPIVRSPGRAGGNEQFF

SEQ ID NO: 670975 - protein, 16 aa, Homo sapiens
  CDR3 for alpha chain variable domain of TCR clone 335488 (TRAV30, TRAJ24)
CGTEIVDADSWGKFQF

SEQ ID NO: 670976 - protein, 13 aa, Homo sapiens
  CDR3 for beta chain variable domain of TCR clone 335488 (TRBV29-1, TRBJ2-3)
CSVGPRGTDTQYF

SEQ ID NO: 670977 - protein, 13 aa, Homo sapiens
  CDR3 for alpha chain variable domain of TCR clone 335489 (TRAV8-3, TRAJ36)
CAVGAPGANNLFF

SEQ ID NO: 670978 - protein, 19 aa, Homo sapiens
  CDR3 for beta chain variable domain of TCR clone 335489 (TRBV25-1, TRBJ2-2)
CAILVYRVDRGRKTGELFF

SEQ ID NO: 670979 - protein, 13 aa, Homo sapiens
  CDR3 for alpha chain variable domain of TCR clone 335490 (TRAV20, TRAJ40)
CAVPLSGTYKYSF

SEQ ID NO: 670980 - protein, 13 aa, Homo sapiens
  CDR3 for beta chain variable domain of TCR clone 335490 (TRBV15, TRBJ2-5)
CATSQIGEETQYF

SEQ ID NO: 670981 - protein, 13 aa, Homo sapiens
  CDR3 for alpha chain variable domain of TCR clone 335491 (TRAV26-1, TRAJ48)
CIVRVVGDEKLTF

SEQ ID NO: 670982 - protein, 19 aa, Homo sapiens
  CDR3 for beta chain variable domain of TCR clone 335491 (TRBV11-3, TRBJ2-2)
CASSTRPGAKTRNTGELFF

SEQ ID NO: 670983 - protein, 17 aa, Homo sapiens
  CDR3 for alpha chain variable domain of TCR clone 335492 (TRAV3, TRAJ42)
CAVRDRDYGGSQGNLIF

SEQ ID NO: 670984 - protein, 16 aa, Homo sapiens
  CDR3 for beta chain variable domain of TCR clone 335492 (TRBV7-9, TRBJ2-1)
CASSPVLASGTVEQFF

SEQ ID NO: 670985 - protein, 13 aa, Homo sapiens
  CDR3 for alpha chain variable domain of TCR clone 335493 (TRAV41, TRAJ48)
SVPVNFGNEKLTF

SEQ ID NO: 670986 - protein, 15 aa, Homo sapiens
  CDR3 for beta chain variable domain of TCR clone 335493 (TRBV4-1, TRBJ1-4)
CASSDTGGTNEKLFF

SEQ ID NO: 670987 - protein, 13 aa, Homo sapiens
  CDR3 for alpha chain variable domain of TCR clone 335494 (TRAV12-2, TRAJ3)
CAFQYSSASKIIF

SEQ ID NO: 670988 - protein, 11 aa, Homo sapiens
  CDR3 for beta chain variable domain of TCR clone 335494 (TRBV20-1, TRBJ2-3)
CSGTSSTTQYL

SEQ ID NO: 670989 - protein, 11 aa, Homo sapiens
  CDR3 for alpha chain variable domain of TCR clone 335495 (TRAV1-2, TRAJ20)
CAVANDYKLSF

SEQ ID NO: 670990 - protein, 13 aa, Homo sapiens
  CDR3 for beta chain variable domain of TCR clone 335495 (TRBV7-2, TRBJ2-2)
CASSSVRAGELFF

SEQ ID NO: 670991 - protein, 14 aa, Homo sapiens
  CDR3 for alpha chain variable domain of TCR clone 335496 (TRAV16, TRAJ42)
CALLAGGSQGNRIF

SEQ ID NO: 670992 - protein, 13 aa, Homo sapiens
  CDR3 for beta chain variable domain of TCR clone 335496 (TRBV7-9, TRBJ1-2)
CASSLKQNYGYTF

SEQ ID NO: 670993 - protein, 12 aa, Homo sapiens
  CDR3 for alpha chain variable domain of TCR clone 335497 (TRAV25, TRAJ38)
CAGTGNNRKLIW

SEQ ID NO: 670994 - protein, 12 aa, Homo sapiens
  CDR3 for beta chain variable domain of TCR clone 335497 (TRBV12-4, TRBJ2-7)
CASSLGGYEQYF

SEQ ID NO: 670995 - protein, 13 aa, Homo sapiens
  CDR3 for alpha chain variable domain of TCR clone 335498 (TRAV17, TRAJ9)
CATDYTGGFKTIF

SEQ ID NO: 670996 - protein, 15 aa, Homo sapiens
  CDR3 for beta chain variable domain of TCR clone 335498 (TRBV6-5, TRBJ2-1)
CASRGDFDSYNEQFF

SEQ ID NO: 670997 - protein, 16 aa, Homo sapiens
  CDR3 for alpha chain variable domain of TCR clone 335499 (TRAV20, TRAJ53)
CAVQGNSGGSNYKLTF

SEQ ID NO: 670998 - protein, 16 aa, Homo sapiens
  CDR3 for beta chain variable domain of TCR clone 335499 (TRBV19, TRBJ2-1)
CASSKAGPSSYNEQFF

SEQ ID NO: 670999 - protein, 13 aa, Homo sapiens
  CDR3 for alpha chain variable domain of TCR clone 335500 (TRAV2, TRAJ10)
CAVESGGGNKLTF

SEQ ID NO: 671000 - protein, 16 aa, Homo sapiens
  CDR3 for beta chain variable domain of TCR clone 335500 (TRBV27, TRBJ2-1)
CASSSTGQGMNNEQFF

SEQ ID NO: 671001 - protein, 13 aa, Homo sapiens
  CDR3 for alpha chain variable domain of TCR clone 335501 (TRAV13-1, TRAJ37)
CAAVSGNTGKLIF

SEQ ID NO: 671002 - protein, 17 aa, Homo sapiens
  CDR3 for beta chain variable domain of TCR clone 335501 (TRBV10-2, TRBJ1-6)
CASSENRGSSYNSALHF

SEQ ID NO: 671003 - protein, 16 aa, Homo sapiens
  CDR3 for alpha chain variable domain of TCR clone 335502 (TRAV16, TRAJ4)
CALSCMFSGGYNKLIF

SEQ ID NO: 671004 - protein, 15 aa, Homo sapiens
  CDR3 for beta chain variable domain of TCR clone 335502 (TRBV9, TRBJ1-6)
CASSVAGTGDSPLHF

SEQ ID NO: 671005 - protein, 11 aa, Homo sapiens
  CDR3 for alpha chain variable domain of TCR clone 335503 (TRAV2, TRAJ13)
CASGGYQKVTF

SEQ ID NO: 671006 - protein, 12 aa, Homo sapiens
  CDR3 for beta chain variable domain of TCR clone 335503 (TRBV11-2, TRBJ2-4)
CASSSASGSEYF

SEQ ID NO: 671007 - protein, 15 aa, Homo sapiens
  CDR3 for alpha chain variable domain of TCR clone 335504 (TRAV4, TRAJ39)
CLVGPNNNAGNMLTF

SEQ ID NO: 671008 - protein, 14 aa, Homo sapiens
  CDR3 for beta chain variable domain of TCR clone 335504 (TRBV19, TRBJ2-1)
CASPTFVLSGELFF

SEQ ID NO: 671009 - protein, 13 aa, Homo sapiens
  CDR3 for alpha chain variable domain of TCR clone 335505 (TRAV3, TRAJ4)
CAVRDGGYNKLSF

SEQ ID NO: 671010 - protein, 15 aa, Homo sapiens
  CDR3 for beta chain variable domain of TCR clone 335505 (TRBV5-1, TRBJ2-1)
CASSPPRAPYNEQFF

SEQ ID NO: 671011 - protein, 13 aa, Homo sapiens
  CDR3 for alpha chain variable domain of TCR clone 335506 (TRAV12-2, TRAJ26)
CAVTNNYGQNFVF

SEQ ID NO: 671012 - protein, 13 aa, Homo sapiens
  CDR3 for beta chain variable domain of TCR clone 335506 (TRBV5-4, TRBJ1-1)
CASSVDLGTEAFF

SEQ ID NO: 671013 - protein, 15 aa, Homo sapiens
  CDR3 for alpha chain variable domain of TCR clone 335507 (TRAV27, TRAJ38)
CAARRNAGNNRKLIW

SEQ ID NO: 671014 - protein, 14 aa, Homo sapiens
  CDR3 for beta chain variable domain of TCR clone 335507 (TRBV20-1, TRBJ2-5)
CSALVPGYQETQYS

SEQ ID NO: 671015 - protein, 13 aa, Homo sapiens
  CDR3 for alpha chain variable domain of TCR clone 335508 (TRAV12-1, TRAJ26)
CVVRRNYGQNFVF

SEQ ID NO: 671016 - protein, 12 aa, Homo sapiens
  CDR3 for beta chain variable domain of TCR clone 335508 (TRBV7-8, TRBJ2-7)
CASSLGDREQYF

SEQ ID NO: 671017 - protein, 16 aa, Homo sapiens
  CDR3 for alpha chain variable domain of TCR clone 335509 (TRAV26-1, TRAJ37)
CIVRGDGSGNTGKLVF

SEQ ID NO: 671018 - protein, 17 aa, Homo sapiens
  CDR3 for beta chain variable domain of TCR clone 335509 (TRBV4-1, TRBJ2-7)
CASSRDPLWVRGGEQYF

SEQ ID NO: 671019 - protein, 12 aa, Homo sapiens
  CDR3 for alpha chain variable domain of TCR clone 335510 (TRAV2, TRAJ31)
CAVEDNNARLMF

SEQ ID NO: 671020 - protein, 12 aa, Homo sapiens
  CDR3 for beta chain variable domain of TCR clone 335510 (TRBV11-2, TRBJ2-2)
CASSLGAGELFF

SEQ ID NO: 671021 - protein, 15 aa, Homo sapiens
  CDR3 for alpha chain variable domain of TCR clone 335511 (TRAV17, TRAJ40)
CASKDIFGTGTRLKV

SEQ ID NO: 671022 - protein, 17 aa, Homo sapiens
  CDR3 for beta chain variable domain of TCR clone 335511 (TRBV11-2, TRBJ2-4)
CASSFLALGGAGDIQYF

SEQ ID NO: 671023 - protein, 12 aa, Homo sapiens
  CDR3 for alpha chain variable domain of TCR clone 335512 (TRAV29/DV5, TRAJ15)
CASNQAGTALIF

SEQ ID NO: 671024 - protein, 14 aa, Homo sapiens
  CDR3 for beta chain variable domain of TCR clone 335512 (TRBV11-2, TRBJ2-2)
CQQLDRVNAGELFF

SEQ ID NO: 671025 - protein, 15 aa, Homo sapiens
  CDR3 for alpha chain variable domain of TCR clone 335513 (TRAV12-2, TRAJ43)
CAFDMRFGAGTRLTG

SEQ ID NO: 671026 - protein, 17 aa, Homo sapiens
  CDR3 for beta chain variable domain of TCR clone 335513 (TRBV13, TRBJ2-3)
CASSLSRVAGGRNTQYF

SEQ ID NO: 671027 - protein, 14 aa, Homo sapiens
  CDR3 for alpha chain variable domain of TCR clone 335514 (TRAV13-1, TRAJ24)
CAASPADSWGKFQF

SEQ ID NO: 671028 - protein, 17 aa, Homo sapiens
  CDR3 for beta chain variable domain of TCR clone 335514 (TRBV7-7, TRBJ2-2)
CASSSVPAGGEIGELFF

SEQ ID NO: 671029 - protein, 16 aa, Homo sapiens
  CDR3 for alpha chain variable domain of TCR clone 335515 (TRAV30, TRAJ24)
CGTEIVDADSWGKFQL

SEQ ID NO: 671030 - protein, 12 aa, Homo sapiens
  CDR3 for beta chain variable domain of TCR clone 335515 (TRBV11-2, TRBJ2-1)
CASSPGNNEQFF

SEQ ID NO: 671031 - protein, 15 aa, Homo sapiens
  CDR3 for alpha chain variable domain of TCR clone 335516 (TRAV13-1, TRAJ44)
CAASRNTGTASKLTF

SEQ ID NO: 671032 - protein, 16 aa, Homo sapiens
  CDR3 for beta chain variable domain of TCR clone 335516 (TRBV7-3, TRBJ2-2)
CASSLKRGTLSGQLFF

SEQ ID NO: 671033 - protein, 17 aa, Homo sapiens
  CDR3 for alpha chain variable domain of TCR clone 335517 (TRAV26-2, TRAJ40)
DAAVSRGNDGGTYKYIF

SEQ ID NO: 671034 - protein, 13 aa, Homo sapiens
  CDR3 for beta chain variable domain of TCR clone 335517 (TRBV7-2, TRBJ2-3)
CASRRGGIDTQYF

SEQ ID NO: 671035 - protein, 14 aa, Homo sapiens
  CDR3 for alpha chain variable domain of TCR clone 335518 (TRAV9-2, TRAJ39)
CALYIYNAGNMLTF

SEQ ID NO: 671036 - protein, 17 aa, Homo sapiens
  CDR3 for beta chain variable domain of TCR clone 335518 (TRBV7-3, TRBJ1-2)
CASSFPQGNDGELWLHL

SEQ ID NO: 671037 - protein, 13 aa, Homo sapiens
  CDR3 for alpha chain variable domain of TCR clone 335519 (TRAV27, TRAJ56)
CAGKPGATSKLTF

SEQ ID NO: 671038 - protein, 15 aa, Homo sapiens
  CDR3 for beta chain variable domain of TCR clone 335519 (TRBV6-1, TRBJ2-3)
CASSERWDSTDTQYF

SEQ ID NO: 671039 - protein, 10 aa, Homo sapiens
  CDR3 for alpha chain variable domain of TCR clone 335520 (TRAV26-2, TRAJ49)
CILLGNQFYF

SEQ ID NO: 671040 - protein, 13 aa, Homo sapiens
  CDR3 for beta chain variable domain of TCR clone 335520 (TRBV20-1, TRBJ2-7)
CSADPRATYEQYF

SEQ ID NO: 671041 - protein, 12 aa, Homo sapiens
  CDR3 for alpha chain variable domain of TCR clone 335521 (TRAV12-3, TRAJ5)
CAMDTDRRALTF

SEQ ID NO: 671042 - protein, 13 aa, Homo sapiens
  CDR3 for beta chain variable domain of TCR clone 335521 (TRBV7-7, TRBJ2-2)
CASSLTSAGELFF

SEQ ID NO: 671043 - protein, 14 aa, Homo sapiens
  CDR3 for alpha chain variable domain of TCR clone 335522 (TRAV8-3, TRAJ39)
CAVGANNAGNMLTF

SEQ ID NO: 671044 - protein, 14 aa, Homo sapiens
  CDR3 for beta chain variable domain of TCR clone 335522 (TRBV7-2, TRBJ2-7)
CASSPKTSFYEQYF

SEQ ID NO: 671045 - protein, 16 aa, Homo sapiens
  CDR3 for alpha chain variable domain of TCR clone 335523 (TRAV35, TRAJ28)
CSGQRYSGAGSYQLTF

SEQ ID NO: 671046 - protein, 14 aa, Homo sapiens
  CDR3 for beta chain variable domain of TCR clone 335523 (TRBV18, TRBJ2-7)
CASSPRGGAYEQYF

SEQ ID NO: 671047 - protein, 16 aa, Homo sapiens
  CDR3 for alpha chain variable domain of TCR clone 335524 (TRAV20, TRAJ22)
CAVQASSSGSARQLTF

SEQ ID NO: 671048 - protein, 16 aa, Homo sapiens
  CDR3 for beta chain variable domain of TCR clone 335524 (TRBV20-1, TRBJ1-5)
CSASSGTGYSNQPQHF

SEQ ID NO: 671049 - protein, 12 aa, Homo sapiens
  CDR3 for alpha chain variable domain of TCR clone 335525 (TRAV38-1, TRAJ47)
CAFETYGNKLVF

SEQ ID NO: 671050 - protein, 14 aa, Homo sapiens
  CDR3 for beta chain variable domain of TCR clone 335525 (TRBV7-2, TRBJ2-7)
CASSPKTSFYEQYF

SEQ ID NO: 671051 - protein, 11 aa, Homo sapiens
  CDR3 for alpha chain variable domain of TCR clone 335526 (TRAV17, TRAJ9)
CGFTGGFKTIF

SEQ ID NO: 671052 - protein, 14 aa, Homo sapiens
  CDR3 for beta chain variable domain of TCR clone 335526 (TRBV4-1, TRBJ2-7)
CASSPVAGGDEQYF

SEQ ID NO: 671053 - protein, 14 aa, Homo sapiens
  CDR3 for alpha chain variable domain of TCR clone 335527 (TRAV8-3, TRAJ10)
CAVGNAGGGNKLTF

SEQ ID NO: 671054 - protein, 16 aa, Homo sapiens
  CDR3 for beta chain variable domain of TCR clone 335527 (TRBV11-2, TRBJ1-2)
CASSLDTGGADYGYYF

SEQ ID NO: 671055 - protein, 15 aa, Homo sapiens
  CDR3 for alpha chain variable domain of TCR clone 335528 (TRAV13-2, TRAJ52)
CRESRGGTSYGKLTF

SEQ ID NO: 671056 - protein, 17 aa, Homo sapiens
  CDR3 for beta chain variable domain of TCR clone 335528 (TRBV7-8, TRBJ2-6)
CASSAGTGGAGANVLTF

SEQ ID NO: 671057 - protein, 12 aa, Homo sapiens
  CDR3 for alpha chain variable domain of TCR clone 335529 (TRAV12-3, TRAJ40)
CAMTSGTYKYIF

SEQ ID NO: 671058 - protein, 13 aa, Homo sapiens
  CDR3 for beta chain variable domain of TCR clone 335529 (TRBV12-4, TRBJ2-7)
CASSPTETYEQYF

SEQ ID NO: 671059 - protein, 14 aa, Homo sapiens
  CDR3 for alpha chain variable domain of TCR clone 335530 (TRAV29/DV5, TRAJ12)
CAATRMDSSSKLIF

SEQ ID NO: 671060 - protein, 13 aa, Homo sapiens
  CDR3 for beta chain variable domain of TCR clone 335530 (TRBV7-2, TRBJ2-5)
CASSYWTGETQYF

SEQ ID NO: 671061 - protein, 14 aa, Homo sapiens
  CDR3 for alpha chain variable domain of TCR clone 335531 (TRAV26-2, TRAJ38)
CILYNAGNNRKLIW

SEQ ID NO: 671062 - protein, 16 aa, Homo sapiens
  CDR3 for beta chain variable domain of TCR clone 335531 (TRBV12-4, TRBJ1-5)
CASSRPVGGSNQPQHF

SEQ ID NO: 671063 - protein, 22 aa, Homo sapiens
  CDR3 for alpha chain variable domain of TCR clone 335532 (TRAV2, TRAJ9)
CAVRIGVEASKLSLEQEQDYLL

SEQ ID NO: 671064 - protein, 14 aa, Homo sapiens
  CDR3 for beta chain variable domain of TCR clone 335532 (TRBV7-3, TRBJ2-1)
CASSLAGGTNEQFF

SEQ ID NO: 671065 - protein, 11 aa, Homo sapiens
  CDR3 for alpha chain variable domain of TCR clone 335533 (TRAV17, TRAJ9)
CGFTGGFKTIF

SEQ ID NO: 671066 - protein, 16 aa, Homo sapiens
  CDR3 for beta chain variable domain of TCR clone 335533 (TRBV4-3, TRBJ2-2)
CASSHLQGSGTGELFF

SEQ ID NO: 671067 - protein, 14 aa, Homo sapiens
  CDR3 for alpha chain variable domain of TCR clone 335534 (TRAV35, TRAJ50)
CAGHRKTSYDKVIF

SEQ ID NO: 671068 - protein, 15 aa, Homo sapiens
  CDR3 for beta chain variable domain of TCR clone 335534 (TRBV6-3, TRBJ2-7)
CASSSPVTVFYEQYF

SEQ ID NO: 671069 - protein, 14 aa, Homo sapiens
  CDR3 for alpha chain variable domain of TCR clone 335535 (TRAV13-1, TRAJ39)
CAASKNNADNMLTF

SEQ ID NO: 671070 - protein, 15 aa, Homo sapiens
  CDR3 for beta chain variable domain of TCR clone 335535 (TRBV7-9, TRBJ1-6)
CASSSPGRGNSPLHF

SEQ ID NO: 671071 - protein, 15 aa, Homo sapiens
  CDR3 for alpha chain variable domain of TCR clone 335536 (TRAV3, TRAJ47)
CAVRDIGEYGNKLVF

SEQ ID NO: 671072 - protein, 14 aa, Homo sapiens
  CDR3 for beta chain variable domain of TCR clone 335536 (TRBV12-5, TRBJ2-5)
CASGSRTHQETQYF

SEQ ID NO: 671073 - protein, 14 aa, Homo sapiens
  CDR3 for alpha chain variable domain of TCR clone 335537 (TRAV3, TRAJ7)
CAVREEEREQQTRF

SEQ ID NO: 671074 - protein, 12 aa, Homo sapiens
  CDR3 for beta chain variable domain of TCR clone 335537 (TRBV6-3, TRBJ2-7)
CASSLTPYEQYC

SEQ ID NO: 671075 - protein, 13 aa, Homo sapiens
  CDR3 for alpha chain variable domain of TCR clone 335538 (TRAV2, TRAJ29)
CAAGNSGNTPLVF

SEQ ID NO: 671076 - protein, 15 aa, Homo sapiens
  CDR3 for beta chain variable domain of TCR clone 335538 (TRBV7-6, TRBJ2-5)
CASSKPTGPQETQYF

SEQ ID NO: 671077 - protein, 14 aa, Homo sapiens
  CDR3 for alpha chain variable domain of TCR clone 335539 (TRAV30, TRAJ33)
CGTVAPRSNYQLIW

SEQ ID NO: 671078 - protein, 14 aa, Homo sapiens
  CDR3 for beta chain variable domain of TCR clone 335539 (TRBV7-2, TRBJ2-3)
CASSQTGSSYTQYF

SEQ ID NO: 671079 - protein, 13 aa, Homo sapiens
  CDR3 for alpha chain variable domain of TCR clone 335540 (TRAV21, TRAJ47)
CAVSGLYGNKLVF

SEQ ID NO: 671080 - protein, 13 aa, Homo sapiens
  CDR3 for beta chain variable domain of TCR clone 335540 (TRBV7-9, TRBJ1-2)
CATSLKQNYGYTF

SEQ ID NO: 671081 - protein, 14 aa, Homo sapiens
  CDR3 for alpha chain variable domain of TCR clone 335541 (TRAV9-2, TRAJ39)
CALYIYNAGNMLTF

SEQ ID NO: 671082 - protein, 12 aa, Homo sapiens
  CDR3 for beta chain variable domain of TCR clone 335541 (TRBV18, TRBJ2-7)
CASSLDSYEQYF

SEQ ID NO: 671083 - protein, 17 aa, Homo sapiens
  CDR3 for alpha chain variable domain of TCR clone 335542 (TRAV13-1, TRAJ31)
CAPRYRLMFGDGTQLVV

SEQ ID NO: 671084 - protein, 12 aa, Homo sapiens
  CDR3 for beta chain variable domain of TCR clone 335542 (TRBV7-9, TRBJ2-7)
YASSLEGYEQYF

SEQ ID NO: 671085 - protein, 11 aa, Homo sapiens
  CDR3 for alpha chain variable domain of TCR clone 335543 (TRAV2, TRAJ13)
CASGGYQKVTF

SEQ ID NO: 671086 - protein, 16 aa, Homo sapiens
  CDR3 for beta chain variable domain of TCR clone 335543 (TRBV7-3, TRBJ2-2)
CASSLKRGALSGELFF

SEQ ID NO: 671087 - protein, 13 aa, Homo sapiens
  CDR3 for alpha chain variable domain of TCR clone 335544 (TRAV21, TRAJ27)
CAARPGKCRQINP

SEQ ID NO: 671088 - protein, 20 aa, Homo sapiens
  CDR3 for beta chain variable domain of TCR clone 335544 (TRBV7-8, TRBJ2-2)
CASSHLFPGPTIHITGELFF

SEQ ID NO: 671089 - protein, 13 aa, Homo sapiens
  CDR3 for alpha chain variable domain of TCR clone 335545 (TRAV13-1, TRAJ10)
CAATAGGGNKLTV

SEQ ID NO: 671090 - protein, 12 aa, Homo sapiens
  CDR3 for beta chain variable domain of TCR clone 335545 (TRBV7-3, TRBJ2-1)
CASSFQSGTQFF

SEQ ID NO: 671091 - protein, 11 aa, Homo sapiens
  CDR3 for alpha chain variable domain of TCR clone 335546 (TRAV3, TRAJ21)
CAVGNFNKFYF

SEQ ID NO: 671092 - protein, 15 aa, Homo sapiens
  CDR3 for beta chain variable domain of TCR clone 335546 (TRBV28, TRBJ2-1)
CASSIIAGGKSEQFF

SEQ ID NO: 671093 - protein, 17 aa, Homo sapiens
  CDR3 for alpha chain variable domain of TCR clone 335547 (TRAV3, TRAJ42)
CAVRDRDYGGSQGNLIF

SEQ ID NO: 671094 - protein, 14 aa, Homo sapiens
  CDR3 for beta chain variable domain of TCR clone 335547 (TRBV12-5, TRBJ2-5)
CASGPRTHQETQYF

SEQ ID NO: 671095 - protein, 14 aa, Homo sapiens
  CDR3 for alpha chain variable domain of TCR clone 335548 (TRAV35, TRAJ50)
CAGHRKTSYDKVIF

SEQ ID NO: 671096 - protein, 17 aa, Homo sapiens
  CDR3 for beta chain variable domain of TCR clone 335548 (TRBV7-8, TRBJ2-6)
CASSTGTGGAGANVLTF

SEQ ID NO: 671097 - protein, 13 aa, Homo sapiens
  CDR3 for alpha chain variable domain of TCR clone 335549 (TRAV12-2, TRAJ10)
CAVPTGGGNKLTF

SEQ ID NO: 671098 - protein, 16 aa, Homo sapiens
  CDR3 for beta chain variable domain of TCR clone 335549 (TRBV7-2, TRBJ1-2)
CASSSNQDRRGHGYTF

SEQ ID NO: 671099 - protein, 11 aa, Homo sapiens
  CDR3 for alpha chain variable domain of TCR clone 335550 (TRAV8-2, TRAJ45)
AAEYSADGLTF

SEQ ID NO: 671100 - protein, 13 aa, Homo sapiens
  CDR3 for beta chain variable domain of TCR clone 335550 (TRBV7-3, TRBJ2-1)
CASSPVAYNEQLF

SEQ ID NO: 671101 - protein, 14 aa, Homo sapiens
  CDR3 for alpha chain variable domain of TCR clone 335551 (TRAV21, TRAJ45)
CAVVSGGGADGLTF

SEQ ID NO: 671102 - protein, 14 aa, Homo sapiens
  CDR3 for beta chain variable domain of TCR clone 335551 (TRBV20-1, TRBJ2-3)
CSALGPEGADTQYF

SEQ ID NO: 671103 - protein, 13 aa, Homo sapiens
  CDR3 for alpha chain variable domain of TCR clone 335552 (TRAV13-2, TRAJ53)
CAENMGSNYKLTF

SEQ ID NO: 671104 - protein, 13 aa, Homo sapiens
  CDR3 for beta chain variable domain of TCR clone 335552 (TRBV4-1, TRBJ2-2)
CASSQETTGELFF

SEQ ID NO: 671105 - protein, 17 aa, Homo sapiens
  CDR3 for alpha chain variable domain of TCR clone 335553 (TRAV38-1, TRAJ28)
CAFMKPTSGAGSYQLTF

SEQ ID NO: 671106 - protein, 15 aa, Homo sapiens
  CDR3 for beta chain variable domain of TCR clone 335553 (TRBV5-1, TRBJ2-4)
GASSLGGGGSYMQYF

SEQ ID NO: 671107 - protein, 15 aa, Homo sapiens
  CDR3 for alpha chain variable domain of TCR clone 335554 (TRAV12-2, TRAJ53)
CAVTGGGGSNYKLTF

SEQ ID NO: 671108 - protein, 13 aa, Homo sapiens
  CDR3 for beta chain variable domain of TCR clone 335554 (TRBV3-1, TRBJ1-1)
CASSPGVITEAFF

SEQ ID NO: 671109 - protein, 14 aa, Homo sapiens
  CDR3 for alpha chain variable domain of TCR clone 335555 (TRAV12-1, TRAJ13)
CVVIDSGGYQKVTF

SEQ ID NO: 671110 - protein, 15 aa, Homo sapiens
  CDR3 for beta chain variable domain of TCR clone 335555 (TRBV7-9, TRBJ2-1)
CASSLGLAGGTEQFF

SEQ ID NO: 671111 - protein, 14 aa, Homo sapiens
  CDR3 for alpha chain variable domain of TCR clone 335556 (TRAV3, TRAJ3)
CCERPWSSASKIIF

SEQ ID NO: 671112 - protein, 13 aa, Homo sapiens
  CDR3 for beta chain variable domain of TCR clone 335556 (TRBV9, TRBJ2-5)
CASSPAGLGTQYF

SEQ ID NO: 671113 - protein, 14 aa, Homo sapiens
  CDR3 for alpha chain variable domain of TCR clone 335557 (TRAV20, TRAJ56)
WAVQFGGANSKLTF

SEQ ID NO: 671114 - protein, 14 aa, Homo sapiens
  CDR3 for beta chain variable domain of TCR clone 335557 (TRBV20-1, TRBJ2-7)
CSAKRGRSSYEQYF

SEQ ID NO: 671115 - protein, 10 aa, Homo sapiens
  CDR3 for alpha chain variable domain of TCR clone 335558 (TRAV25, TRAJ40)
CGVGLRNLQI

SEQ ID NO: 671116 - protein, 14 aa, Homo sapiens
  CDR3 for beta chain variable domain of TCR clone 335558 (TRBV7-2, TRBJ2-7)
CASRSQGAAYEQYF

SEQ ID NO: 671117 - protein, 18 aa, Homo sapiens
  CDR3 for alpha chain variable domain of TCR clone 335559 (TRAV9-2, TRAJ52)
CALSRHNAGGTSYGKLTF

SEQ ID NO: 671118 - protein, 14 aa, Homo sapiens
  CDR3 for beta chain variable domain of TCR clone 335559 (TRBV10-2, TRBJ1-5)
CASSSTGRNQPQHF

SEQ ID NO: 671119 - protein, 15 aa, Homo sapiens
  CDR3 for alpha chain variable domain of TCR clone 335560 (TRAV4, TRAJ39)
CLVGPNNNAGNMLTF

SEQ ID NO: 671120 - protein, 15 aa, Homo sapiens
  CDR3 for beta chain variable domain of TCR clone 335560 (TRBV12-4, TRBJ2-5)
CASSPPTGLQETQYF

SEQ ID NO: 671121 - protein, 13 aa, Homo sapiens
  CDR3 for alpha chain variable domain of TCR clone 335561 (TRAV12-2, TRAJ40)
CVVPTSGTYKYIF

SEQ ID NO: 671122 - protein, 18 aa, Homo sapiens
  CDR3 for beta chain variable domain of TCR clone 335561 (TRBV7-6, TRBJ2-1)
CASSPRTSGMSSYNEQFF

SEQ ID NO: 671123 - protein, 20 aa, Homo sapiens
  CDR3 for alpha chain variable domain of TCR clone 335562 (TRAV25, TRAJ21)
TATQTTDVGTYPLSFNKFYF

SEQ ID NO: 671124 - protein, 13 aa, Homo sapiens
  CDR3 for beta chain variable domain of TCR clone 335562 (TRBV7-2, TRBJ2-5)
CASSQTSVETQYF

SEQ ID NO: 671125 - protein, 14 aa, Homo sapiens
  CDR3 for alpha chain variable domain of TCR clone 335563 (TRAV16, TRAJ32)
CALKSGGATNKLIF

SEQ ID NO: 671126 - protein, 13 aa, Homo sapiens
  CDR3 for beta chain variable domain of TCR clone 335563 (TRBV15, TRBJ1-6)
CATSGDLNSPLHF

SEQ ID NO: 671127 - protein, 12 aa, Homo sapiens
  CDR3 for alpha chain variable domain of TCR clone 335564 (TRAV12-3, TRAJ17)
CAITLTGNKLTF

SEQ ID NO: 671128 - protein, 15 aa, Homo sapiens
  CDR3 for beta chain variable domain of TCR clone 335564 (TRBV20-1, TRBJ2-7)
CSARDRDSGMDEQYF

SEQ ID NO: 671129 - protein, 14 aa, Homo sapiens
  CDR3 for alpha chain variable domain of TCR clone 335565 (TRAV8-3, TRAJ27)
CAGGRNTNAGKSTF

SEQ ID NO: 671130 - protein, 15 aa, Homo sapiens
  CDR3 for beta chain variable domain of TCR clone 335565 (TRBV11-3, TRBJ2-5)
CGSSLRGRVQETQYF

SEQ ID NO: 671131 - protein, 10 aa, Homo sapiens
  CDR3 for alpha chain variable domain of TCR clone 335566 (TRAV17, TRAJ36)
CATVAGNLFF

SEQ ID NO: 671132 - protein, 13 aa, Homo sapiens
  CDR3 for beta chain variable domain of TCR clone 335566 (TRBV7-3, TRBJ1-1)
CASSQDWGAEAFF

SEQ ID NO: 671133 - protein, 15 aa, Homo sapiens
  CDR3 for alpha chain variable domain of TCR clone 335567 (TRAV8-3, TRAJ45)
WASSYSGGGADGLTF

SEQ ID NO: 671134 - protein, 13 aa, Homo sapiens
  CDR3 for beta chain variable domain of TCR clone 335567 (TRBV4-2, TRBJ1-1)
CASSQAGNTEAFF

SEQ ID NO: 671135 - protein, 13 aa, Homo sapiens
  CDR3 for alpha chain variable domain of TCR clone 335568 (TRAV26-1, TRAJ31)
CIVRGDGNARLMF

SEQ ID NO: 671136 - protein, 17 aa, Homo sapiens
  CDR3 for beta chain variable domain of TCR clone 335568 (TRBV11-2, TRBJ2-1)
CASSLYPPGVEYNEQFF

SEQ ID NO: 671137 - protein, 18 aa, Homo sapiens
  CDR3 for alpha chain variable domain of TCR clone 335569 (TRAV21, TRAJ52)
CAVRPSPAGGTSYGKLTF

SEQ ID NO: 671138 - protein, 15 aa, Homo sapiens
  CDR3 for beta chain variable domain of TCR clone 335569 (TRBV7-6, TRBJ2-5)
CASSKPTGPQETQYF

SEQ ID NO: 671139 - protein, 13 aa, Homo sapiens
  CDR3 for alpha chain variable domain of TCR clone 335570 (TRAV12-3, TRAJ57)
CAMVGTGSEKLVF

SEQ ID NO: 671140 - protein, 15 aa, Homo sapiens
  CDR3 for beta chain variable domain of TCR clone 335570 (TRBV7-2, TRBJ1-3)
CASSWGGITGNTIYF

SEQ ID NO: 671141 - protein, 14 aa, Homo sapiens
  CDR3 for alpha chain variable domain of TCR clone 335571 (TRAV17, TRAJ57)
CATDPQGGSEKLVF

SEQ ID NO: 671142 - protein, 15 aa, Homo sapiens
  CDR3 for beta chain variable domain of TCR clone 335571 (TRBV12-4, TRBJ1-5)
CASTRGSGFGQPQHF

SEQ ID NO: 671143 - protein, 10 aa, Homo sapiens
  CDR3 for alpha chain variable domain of TCR clone 335572 (TRAV26-1, TRAJ40)
CIAGTYKYIF

SEQ ID NO: 671144 - protein, 16 aa, Homo sapiens
  CDR3 for beta chain variable domain of TCR clone 335572 (TRBV10-3, TRBJ2-1)
CAISGVGDGGGGEQFF

SEQ ID NO: 671145 - protein, 15 aa, Homo sapiens
  CDR3 for alpha chain variable domain of TCR clone 335573 (TRAV3, TRAJ27)
CAVRGFTPIQANQPL

SEQ ID NO: 671146 - protein, 12 aa, Homo sapiens
  CDR3 for beta chain variable domain of TCR clone 335573 (TRBV11-2, TRBJ2-2)
CASSLGGGELFF

SEQ ID NO: 671147 - protein, 12 aa, Homo sapiens
  CDR3 for alpha chain variable domain of TCR clone 335574 (TRAV20, TRAJ36)
CAQVTGANNLFF

SEQ ID NO: 671148 - protein, 15 aa, Homo sapiens
  CDR3 for beta chain variable domain of TCR clone 335574 (TRBV11-3, TRBJ2-5)
CASSDTSGGIETQYF

SEQ ID NO: 671149 - protein, 14 aa, Homo sapiens
  CDR3 for alpha chain variable domain of TCR clone 335575 (TRAV26-1, TRAJ34)
CIVRVAYNTDKPIL

SEQ ID NO: 671150 - protein, 15 aa, Homo sapiens
  CDR3 for beta chain variable domain of TCR clone 335575 (TRBV20-1, TRBJ2-7)
CSARVPAAYFYEQYF

SEQ ID NO: 671151 - protein, 14 aa, Homo sapiens
  CDR3 for alpha chain variable domain of TCR clone 335576 (TRAV38-1, TRAJ45)
CASHSGGGADGLTF

SEQ ID NO: 671152 - protein, 15 aa, Homo sapiens
  CDR3 for beta chain variable domain of TCR clone 335576 (TRBV10-2, TRBJ2-6)
CASSEQGTGDNVLTF

SEQ ID NO: 671153 - protein, 14 aa, Homo sapiens
  CDR3 for alpha chain variable domain of TCR clone 335577 (TRAV13-1, TRAJ9)
CAASALTEGFKTIF

SEQ ID NO: 671154 - protein, 13 aa, Homo sapiens
  CDR3 for beta chain variable domain of TCR clone 335577 (TRBV20-1, TRBJ1-1)
CSAGTVGNAEAFF

SEQ ID NO: 671155 - protein, 11 aa, Homo sapiens
  CDR3 for alpha chain variable domain of TCR clone 335578 (TRAV13-1, TRAJ39)
CSSHAGNMLTF

SEQ ID NO: 671156 - protein, 13 aa, Homo sapiens
  CDR3 for beta chain variable domain of TCR clone 335578 (TRBV11-2, TRBJ1-5)
CQQLRQGRQPQHF

SEQ ID NO: 671157 - protein, 17 aa, Homo sapiens
  CDR3 for alpha chain variable domain of TCR clone 335579 (TRAV4, TRAJ18)
FLVGERAVGSTLGRLYF

SEQ ID NO: 671158 - protein, 14 aa, Homo sapiens
  CDR3 for beta chain variable domain of TCR clone 335579 (TRBV6-5, TRBJ1-2)
CASSYDGTGGGYTF

SEQ ID NO: 671159 - protein, 16 aa, Homo sapiens
  CDR3 for alpha chain variable domain of TCR clone 335580 (TRAV30, TRAJ24)
CGTEIVDADNWGKFQF

SEQ ID NO: 671160 - protein, 14 aa, Homo sapiens
  CDR3 for beta chain variable domain of TCR clone 335580 (TRBV12-5, TRBJ2-5)
CASGSRRHQETQYF

SEQ ID NO: 671161 - protein, 14 aa, Homo sapiens
  CDR3 for alpha chain variable domain of TCR clone 335581 (TRAV20, TRAJ22)
CAVALGGSARQLTF

SEQ ID NO: 671162 - protein, 13 aa, Homo sapiens
  CDR3 for beta chain variable domain of TCR clone 335581 (TRBV7-3, TRBJ1-1)
CASSQDWGAEAFF

SEQ ID NO: 671163 - protein, 14 aa, Homo sapiens
  CDR3 for alpha chain variable domain of TCR clone 335582 (TRAV20, TRAJ36)
CAVQAGTGANNLFF

SEQ ID NO: 671164 - protein, 15 aa, Homo sapiens
  CDR3 for beta chain variable domain of TCR clone 335582 (TRBV5-1, TRBJ2-1)
GATSPPRAPYNEQFF

SEQ ID NO: 671165 - protein, 15 aa, Homo sapiens
  CDR3 for alpha chain variable domain of TCR clone 335583 (TRAV3, TRAJ3)
CAVRDMSSSSSKIIF

SEQ ID NO: 671166 - protein, 13 aa, Homo sapiens
  CDR3 for beta chain variable domain of TCR clone 335583 (TRBV10-3, TRBJ2-7)
CASKLAVNYEQYF

SEQ ID NO: 671167 - protein, 14 aa, Homo sapiens
  CDR3 for alpha chain variable domain of TCR clone 335584 (TRAV2, TRAJ29)
CAVTPPSGNTPLVF

SEQ ID NO: 671168 - protein, 13 aa, Homo sapiens
  CDR3 for beta chain variable domain of TCR clone 335584 (TRBV11-2, TRBJ2-1)
CASSLGLAGGLFF

SEQ ID NO: 671169 - protein, 11 aa, Homo sapiens
  CDR3 for alpha chain variable domain of TCR clone 335585 (TRAV35, TRAJ22)
CAGPGVGQLTF

SEQ ID NO: 671170 - protein, 16 aa, Homo sapiens
  CDR3 for beta chain variable domain of TCR clone 335585 (TRBV7-2, TRBJ2-3)
CASSLVALYSTDTQYF

SEQ ID NO: 671171 - protein, 11 aa, Homo sapiens
  CDR3 for alpha chain variable domain of TCR clone 335586 (TRAV3, TRAJ21)
CAVGNFNKFYF

SEQ ID NO: 671172 - protein, 15 aa, Homo sapiens
  CDR3 for beta chain variable domain of TCR clone 335586 (TRBV5-1, TRBJ2-1)
CASSLVANSYNEQVF

SEQ ID NO: 671173 - protein, 13 aa, Homo sapiens
  CDR3 for alpha chain variable domain of TCR clone 335587 (TRAV26-2, TRAJ37)
RIRGSSNTGKLIF

SEQ ID NO: 671174 - protein, 16 aa, Homo sapiens
  CDR3 for beta chain variable domain of TCR clone 335587 (TRBV7-2, TRBJ2-5)
CASSPGGARRGETQYF

SEQ ID NO: 671175 - protein, 13 aa, Homo sapiens
  CDR3 for alpha chain variable domain of TCR clone 335588 (TRAV35, TRAJ21)
CAGQLSNFNKFYF

SEQ ID NO: 671176 - protein, 16 aa, Homo sapiens
  CDR3 for beta chain variable domain of TCR clone 335588 (TRBV4-3, TRBJ2-2)
CASSHLQGSGTGELVC

SEQ ID NO: 671177 - protein, 13 aa, Homo sapiens
  CDR3 for alpha chain variable domain of TCR clone 335589 (TRAV23/DV6, TRAJ47)
CAASMTRGNKLVF

SEQ ID NO: 671178 - protein, 13 aa, Homo sapiens
  CDR3 for beta chain variable domain of TCR clone 335589 (TRBV7-8, TRBJ2-7)
CASSLTGGREQYF

SEQ ID NO: 671179 - protein, 15 aa, Homo sapiens
  CDR3 for alpha chain variable domain of TCR clone 335590 (TRAV27, TRAJ38)
CAASRNAGNNRKLIW

SEQ ID NO: 671180 - protein, 13 aa, Homo sapiens
  CDR3 for beta chain variable domain of TCR clone 335590 (TRBV12-5, TRBJ2-3)
CASGERQSDTQYF

SEQ ID NO: 671181 - protein, 11 aa, Homo sapiens
  CDR3 for alpha chain variable domain of TCR clone 335591 (TRAV3, TRAJ21)
CAVGNFNKFYF

SEQ ID NO: 671182 - protein, 15 aa, Homo sapiens
  CDR3 for beta chain variable domain of TCR clone 335591 (TRBV28, TRBJ2-4)
CAAGSGTLLMGIQYF

SEQ ID NO: 671183 - protein, 14 aa, Homo sapiens
  CDR3 for alpha chain variable domain of TCR clone 335592 (TRAV13-1, TRAJ40)
CAAGMTSGTYKYIF

SEQ ID NO: 671184 - protein, 15 aa, Homo sapiens
  CDR3 for beta chain variable domain of TCR clone 335592 (TRBV7-3, TRBJ2-1)
CASSPTVGGEVEQFF

SEQ ID NO: 671185 - protein, 16 aa, Homo sapiens
  CDR3 for alpha chain variable domain of TCR clone 335593 (TRAV12-3, TRAJ20)
CAMDKLSFGAGTTVTV

SEQ ID NO: 671186 - protein, 15 aa, Homo sapiens
  CDR3 for beta chain variable domain of TCR clone 335593 (TRBV5-1, TRBJ2-1)
CASSPPRAPYNEQFF

SEQ ID NO: 671187 - protein, 17 aa, Homo sapiens
  CDR3 for alpha chain variable domain of TCR clone 335594 (TRAV3, TRAJ42)
CAVRDRDYGGRQGNLIF

SEQ ID NO: 671188 - protein, 15 aa, Homo sapiens
  CDR3 for beta chain variable domain of TCR clone 335594 (TRBV6-3, TRBJ2-7)
CASSSPGTVFYEQYF

SEQ ID NO: 671189 - protein, 12 aa, Homo sapiens
  CDR3 for alpha chain variable domain of TCR clone 335595 (TRAV12-2, TRAJ10)
WGVTGGGNKLTF

SEQ ID NO: 671190 - protein, 13 aa, Homo sapiens
  CDR3 for beta chain variable domain of TCR clone 335595 (TRBV7-6, TRBJ2-1)
CQQLGGGADEQFF

SEQ ID NO: 671191 - protein, 10 aa, Homo sapiens
  CDR3 for alpha chain variable domain of TCR clone 335596 (TRAV12-1, TRAJ43)
CVVHNNDMRF

SEQ ID NO: 671192 - protein, 14 aa, Homo sapiens
  CDR3 for beta chain variable domain of TCR clone 335596 (TRBV19, TRBJ2-5)
CASSMTGQQETQYF

SEQ ID NO: 671193 - protein, 16 aa, Homo sapiens
  CDR3 for alpha chain variable domain of TCR clone 335597 (TRAV12-3, TRAJ56)
CAMSPGHTGANSKLTF

SEQ ID NO: 671194 - protein, 15 aa, Homo sapiens
  CDR3 for beta chain variable domain of TCR clone 335597 (TRBV2, TRBJ2-3)
CASSDFEKATDTQYF

SEQ ID NO: 671195 - protein, 14 aa, Homo sapiens
  CDR3 for alpha chain variable domain of TCR clone 335598 (TRAV26-2, TRAJ21)
CILKGKLQQILLWI

SEQ ID NO: 671196 - protein, 14 aa, Homo sapiens
  CDR3 for beta chain variable domain of TCR clone 335598 (TRBV7-9, TRBJ1-1)
CASTPLQSYTEAFF

SEQ ID NO: 671197 - protein, 11 aa, Homo sapiens
  CDR3 for alpha chain variable domain of TCR clone 335599 (TRAV21, TRAJ11)
CAVNGYSTLTF

SEQ ID NO: 671198 - protein, 14 aa, Homo sapiens
  CDR3 for beta chain variable domain of TCR clone 335599 (TRBV19, TRBJ2-2)
CASSGQGIAGELFF

SEQ ID NO: 671199 - protein, 14 aa, Homo sapiens
  CDR3 for alpha chain variable domain of TCR clone 335600 (TRAV3, TRAJ21)
CAVESQANFNKFYF

SEQ ID NO: 671200 - protein, 13 aa, Homo sapiens
  CDR3 for beta chain variable domain of TCR clone 335600 (TRBV28, TRBJ2-7)
CASTPGLAGEQYF

SEQ ID NO: 671201 - protein, 15 aa, Homo sapiens
  CDR3 for alpha chain variable domain of TCR clone 335601 (TRAV21, TRAJ57)
CAVIITQGGSGKLVF

SEQ ID NO: 671202 - protein, 14 aa, Homo sapiens
  CDR3 for beta chain variable domain of TCR clone 335601 (TRBV5-1, TRBJ2-2)
CASSLIWIPGELFF

SEQ ID NO: 671203 - protein, 13 aa, Homo sapiens
  CDR3 for alpha chain variable domain of TCR clone 335602 (TRAV17, TRAJ15)
CATDARAGTALIL

SEQ ID NO: 671204 - protein, 17 aa, Homo sapiens
  CDR3 for beta chain variable domain of TCR clone 335602 (TRBV11-2, TRBJ2-1)
CASSLYPPGVEYNEQFF

SEQ ID NO: 671205 - protein, 14 aa, Homo sapiens
  CDR3 for alpha chain variable domain of TCR clone 335603 (TRAV12-2, TRAJ44)
CDVNPAGTASKLTF

SEQ ID NO: 671206 - protein, 15 aa, Homo sapiens
  CDR3 for beta chain variable domain of TCR clone 335603 (TRBV28, TRBJ2-7)
CASSVRQVSSYEQYF

SEQ ID NO: 671207 - protein, 12 aa, Homo sapiens
  CDR3 for alpha chain variable domain of TCR clone 335604 (TRAV12-2, TRAJ20)
CAVRPSDYKLSF

SEQ ID NO: 671208 - protein, 14 aa, Homo sapiens
  CDR3 for beta chain variable domain of TCR clone 335604 (TRBV6-1, TRBJ2-7)
CASNRARPDYEQCF

SEQ ID NO: 671209 - protein, 13 aa, Homo sapiens
  CDR3 for alpha chain variable domain of TCR clone 335605 (TRAV8-3, TRAJ48)
CAVVRFGNEKLTF

SEQ ID NO: 671210 - protein, 16 aa, Homo sapiens
  CDR3 for beta chain variable domain of TCR clone 335605 (TRBV20-1, TRBJ2-5)
FSARDFASGIQETQYF

SEQ ID NO: 671211 - protein, 15 aa, Homo sapiens
  CDR3 for alpha chain variable domain of TCR clone 335606 (TRAV12-1, TRAJ45)
CVILSGGGGADGLTF

SEQ ID NO: 671212 - protein, 14 aa, Homo sapiens
  CDR3 for beta chain variable domain of TCR clone 335606 (TRBV11-2, TRBJ2-5)
CASSRTGGIETQYF

SEQ ID NO: 671213 - protein, 12 aa, Homo sapiens
  CDR3 for alpha chain variable domain of TCR clone 335607 (TRAV17, TRAJ20)
CATDSNDYNLSF

SEQ ID NO: 671214 - protein, 17 aa, Homo sapiens
  CDR3 for beta chain variable domain of TCR clone 335607 (TRBV5-1, TRBJ2-2)
CASSLAGLSGGTGELFF

SEQ ID NO: 671215 - protein, 13 aa, Homo sapiens
  CDR3 for alpha chain variable domain of TCR clone 335608 (TRAV12-1, TRAJ16)
CVVNGPDGQTLLF

SEQ ID NO: 671216 - protein, 13 aa, Homo sapiens
  CDR3 for beta chain variable domain of TCR clone 335608 (TRBV2, TRBJ1-1)
CARNPTGGFHAVF

SEQ ID NO: 671217 - protein, 12 aa, Homo sapiens
  CDR3 for alpha chain variable domain of TCR clone 335609 (TRAV8-3, TRAJ20)
CAVDFNDYKLSF

SEQ ID NO: 671218 - protein, 13 aa, Homo sapiens
  CDR3 for beta chain variable domain of TCR clone 335609 (TRBV27, TRBJ2-3)
CASSLSRTDTQYF

SEQ ID NO: 671219 - protein, 15 aa, Homo sapiens
  CDR3 for alpha chain variable domain of TCR clone 335610 (TRAV13-1, TRAJ17)
CAASIERAAGNKLTF

SEQ ID NO: 671220 - protein, 13 aa, Homo sapiens
  CDR3 for beta chain variable domain of TCR clone 335610 (TRBV20-1, TRBJ1-1)
CSARVGGNTEAFF

SEQ ID NO: 671221 - protein, 14 aa, Homo sapiens
  CDR3 for alpha chain variable domain of TCR clone 335611 (TRAV1-2, TRAJ16)
CAVNRFSDGQKRLF

SEQ ID NO: 671222 - protein, 13 aa, Homo sapiens
  CDR3 for beta chain variable domain of TCR clone 335611 (TRBV20-1, TRBJ1-1)
CSARLGQGTEAFF

SEQ ID NO: 671223 - protein, 12 aa, Homo sapiens
  CDR3 for alpha chain variable domain of TCR clone 335612 (TRAV29/DV5, TRAJ41)
CAAISSGYALNF

SEQ ID NO: 671224 - protein, 13 aa, Homo sapiens
  CDR3 for beta chain variable domain of TCR clone 335612 (TRBV15, TRBJ1-2)
CATSMTANYGYTF

SEQ ID NO: 671225 - protein, 14 aa, Homo sapiens
  CDR3 for alpha chain variable domain of TCR clone 335613 (TRAV3, TRAJ21)
CALGRGSTNFTLDL

SEQ ID NO: 671226 - protein, 14 aa, Homo sapiens
  CDR3 for beta chain variable domain of TCR clone 335613 (TRBV4-1, TRBJ2-2)
CASSQAVNTGELFF

SEQ ID NO: 671227 - protein, 14 aa, Homo sapiens
  CDR3 for alpha chain variable domain of TCR clone 335614 (TRAV12-1, TRAJ9)
CVVNIINGGFKTIF

SEQ ID NO: 671228 - protein, 17 aa, Homo sapiens
  CDR3 for beta chain variable domain of TCR clone 335614 (TRBV9, TRBJ2-1)
CASSVEPTGMARDEQFF

SEQ ID NO: 671229 - protein, 13 aa, Homo sapiens
  CDR3 for alpha chain variable domain of TCR clone 335615 (TRAV29/DV5, TRAJ49)
CAASTNTVNQFYF

SEQ ID NO: 671230 - protein, 13 aa, Homo sapiens
  CDR3 for beta chain variable domain of TCR clone 335615 (TRBV7-2, TRBJ1-4)
CASSLAGLEKLFF

SEQ ID NO: 671231 - protein, 12 aa, Homo sapiens
  CDR3 for alpha chain variable domain of TCR clone 335616 (TRAV35, TRAJ49)
CAGWNTGNQFYF

SEQ ID NO: 671232 - protein, 12 aa, Homo sapiens
  CDR3 for beta chain variable domain of TCR clone 335616 (TRBV7-9, TRBJ2-7)
CASSIKREEQYF

SEQ ID NO: 671233 - protein, 15 aa, Homo sapiens
  CDR3 for alpha chain variable domain of TCR clone 335617 (TRAV40, TRAJ45)
CLLGDLGGGADGLTF

SEQ ID NO: 671234 - protein, 15 aa, Homo sapiens
  CDR3 for beta chain variable domain of TCR clone 335617 (TRBV7-9, TRBJ1-6)
CASSSATADNSPLHF

SEQ ID NO: 671235 - protein, 13 aa, Homo sapiens
  CDR3 for alpha chain variable domain of TCR clone 335618 (TRAV20, TRAJ20)
CAVRWVRDYNLSF

SEQ ID NO: 671236 - protein, 14 aa, Homo sapiens
  CDR3 for beta chain variable domain of TCR clone 335618 (TRBV19, TRBJ2-2)
CASTVTANTGELFF

SEQ ID NO: 671237 - protein, 15 aa, Homo sapiens
  CDR3 for alpha chain variable domain of TCR clone 335619 (TRAV13-1, TRAJ17)
CAASIERAAGNKLTY

SEQ ID NO: 671238 - protein, 14 aa, Homo sapiens
  CDR3 for beta chain variable domain of TCR clone 335619 (TRBV7-9, TRBJ2-1)
CASSPRDSLYEQFF

SEQ ID NO: 671239 - protein, 13 aa, Homo sapiens
  CDR3 for alpha chain variable domain of TCR clone 335620 (TRAV35, TRAJ44)
CAGLSGTASKLTF

SEQ ID NO: 671240 - protein, 17 aa, Homo sapiens
  CDR3 for beta chain variable domain of TCR clone 335620 (TRBV7-8, TRBJ1-2)
CTSSLRPLQGHLYGYTF

SEQ ID NO: 671241 - protein, 17 aa, Homo sapiens
  CDR3 for alpha chain variable domain of TCR clone 335621 (TRAV4, TRAJ13)
CLVGVQGSSGGYQKVTF

SEQ ID NO: 671242 - protein, 11 aa, Homo sapiens
  CDR3 for beta chain variable domain of TCR clone 335621 (TRBV11-2, TRBJ2-2)
CASSLPGELFF

SEQ ID NO: 671243 - protein, 14 aa, Homo sapiens
  CDR3 for alpha chain variable domain of TCR clone 335622 (TRAV12-2, TRAJ13)
CAVKTTGGYQKVTF

SEQ ID NO: 671244 - protein, 15 aa, Homo sapiens
  CDR3 for beta chain variable domain of TCR clone 335622 (TRBV7-2, TRBJ2-1)
CASSSGLAGGNEQFF

SEQ ID NO: 671245 - protein, 17 aa, Homo sapiens
  CDR3 for alpha chain variable domain of TCR clone 335623 (TRAV14/DV4, TRAJ4)
CAMREASGRGGYNKLIF

SEQ ID NO: 671246 - protein, 14 aa, Homo sapiens
  CDR3 for beta chain variable domain of TCR clone 335623 (TRBV19, TRBJ2-7)
CASSRGQGAIEQYF

SEQ ID NO: 671247 - protein, 13 aa, Homo sapiens
  CDR3 for alpha chain variable domain of TCR clone 335624 (TRAV13-1, TRAJ39)
CSKYSNAGNMLTF

SEQ ID NO: 671248 - protein, 16 aa, Homo sapiens
  CDR3 for beta chain variable domain of TCR clone 335624 (TRBV20-1, TRBJ1-4)
CRAPGQGLLTNEKLFF

SEQ ID NO: 671249 - protein, 15 aa, Homo sapiens
  CDR3 for alpha chain variable domain of TCR clone 335625 (TRAV12-3, TRAJ6)
RAMSATTGGSYIPTF

SEQ ID NO: 671250 - protein, 16 aa, Homo sapiens
  CDR3 for beta chain variable domain of TCR clone 335625 (TRBV20-1, TRBJ1-2)
CSASMGQGVANYGDAF

SEQ ID NO: 671251 - protein, 13 aa, Homo sapiens
  CDR3 for alpha chain variable domain of TCR clone 335626 (TRAV2, TRAJ40)
CAVVTSGTYKYVF

SEQ ID NO: 671252 - protein, 17 aa, Homo sapiens
  CDR3 for beta chain variable domain of TCR clone 335626 (TRBV7-3, TRBJ2-3)
CASRLMKRMRGADTQYF

SEQ ID NO: 671253 - protein, 15 aa, Homo sapiens
  CDR3 for alpha chain variable domain of TCR clone 335627 (TRAV3, TRAJ4)
CAVRDGTGGYNKLIF

SEQ ID NO: 671254 - protein, 16 aa, Homo sapiens
  CDR3 for beta chain variable domain of TCR clone 335627 (TRBV29-1, TRBJ2-7)
CSVEVVGTSGSYEQYF

SEQ ID NO: 671255 - protein, 14 aa, Homo sapiens
  CDR3 for alpha chain variable domain of TCR clone 335628 (TRAV12-2, TRAJ44)
CAVNPAGTASKLTF

SEQ ID NO: 671256 - protein, 15 aa, Homo sapiens
  CDR3 for beta chain variable domain of TCR clone 335628 (TRBV20-1, TRBJ2-1)
CSASSAGSSYNEQFF

SEQ ID NO: 671257 - protein, 14 aa, Homo sapiens
  CDR3 for alpha chain variable domain of TCR clone 335629 (TRAV13-1, TRAJ44)
CAAKATGTASKLTF

SEQ ID NO: 671258 - protein, 16 aa, Homo sapiens
  CDR3 for beta chain variable domain of TCR clone 335629 (TRBV7-3, TRBJ2-3)
CQSLMKRMRGADTQYF

SEQ ID NO: 671259 - protein, 12 aa, Homo sapiens
  CDR3 for alpha chain variable domain of TCR clone 335630 (TRAV12-1, TRAJ40)
CVFYSGTYKYIF

SEQ ID NO: 671260 - protein, 13 aa, Homo sapiens
  CDR3 for beta chain variable domain of TCR clone 335630 (TRBV19, TRBJ1-1)
CASSMSRAVEAFF

SEQ ID NO: 671261 - protein, 23 aa, Homo sapiens
  CDR3 for alpha chain variable domain of TCR clone 335631 (TRAV26-1, TRAJ38)
CIADNAGNNHIQNPYPAVYQLRD

SEQ ID NO: 671262 - protein, 15 aa, Homo sapiens
  CDR3 for beta chain variable domain of TCR clone 335631 (TRBV27, TRBJ2-1)
CASSNGGGSSNEQFF

SEQ ID NO: 671263 - protein, 12 aa, Homo sapiens
  CDR3 for alpha chain variable domain of TCR clone 335632 (TRAV20, TRAJ20)
CAVRFNDYKLSF

SEQ ID NO: 671264 - protein, 14 aa, Homo sapiens
  CDR3 for beta chain variable domain of TCR clone 335632 (TRBV20-1, TRBJ2-1)
CSAQIGGSANEQFI

SEQ ID NO: 671265 - protein, 14 aa, Homo sapiens
  CDR3 for alpha chain variable domain of TCR clone 335633 (TRAV34, TRAJ44)
CGADGTGTASKLTF

SEQ ID NO: 671266 - protein, 20 aa, Homo sapiens
  CDR3 for beta chain variable domain of TCR clone 335633 (TRBV7-8, TRBJ2-2)
CASSHLFPGPTIHITGELFF

SEQ ID NO: 671267 - protein, 16 aa, Homo sapiens
  CDR3 for alpha chain variable domain of TCR clone 335634 (TRAV26-1, TRAJ41)
CIVRVAVANSGYALNF

SEQ ID NO: 671268 - protein, 15 aa, Homo sapiens
  CDR3 for beta chain variable domain of TCR clone 335634 (TRBV5-1, TRBJ2-1)
CASSPPRAPYNEQFF

SEQ ID NO: 671269 - protein, 11 aa, Homo sapiens
  CDR3 for alpha chain variable domain of TCR clone 335635 (TRAV17, TRAJ9)
CATTGGFKTIF

SEQ ID NO: 671270 - protein, 14 aa, Homo sapiens
  CDR3 for beta chain variable domain of TCR clone 335635 (TRBV7-9, TRBJ2-2)
CASSGLADTGRLFF

SEQ ID NO: 671271 - protein, 11 aa, Homo sapiens
  CDR3 for alpha chain variable domain of TCR clone 335636 (TRAV12-3, TRAJ27)
CAMANAGKSTF

SEQ ID NO: 671272 - protein, 19 aa, Homo sapiens
  CDR3 for beta chain variable domain of TCR clone 335636 (TRBV18, TRBJ1-3)
CASSPLSRTGMSSGNTIYF

SEQ ID NO: 671273 - protein, 14 aa, Homo sapiens
  CDR3 for alpha chain variable domain of TCR clone 335637 (TRAV22, TRAJ6)
CAGVGPGGSYIPTF

SEQ ID NO: 671274 - protein, 17 aa, Homo sapiens
  CDR3 for beta chain variable domain of TCR clone 335637 (TRBV13, TRBJ2-3)
CASSLSRVAGGRNTQYF

SEQ ID NO: 671275 - protein, 18 aa, Homo sapiens
  CDR3 for alpha chain variable domain of TCR clone 335638 (TRAV2, TRAJ37)
CCLLLCFDFTSNTGKLIF

SEQ ID NO: 671276 - protein, 15 aa, Homo sapiens
  CDR3 for beta chain variable domain of TCR clone 335638 (TRBV20-1, TRBJ1-1)
CSASRGVTGNTEAFF

SEQ ID NO: 671277 - protein, 14 aa, Homo sapiens
  CDR3 for alpha chain variable domain of TCR clone 335639 (TRAV12-3, TRAJ9)
CAMSVETGGFKTIF

SEQ ID NO: 671278 - protein, 14 aa, Homo sapiens
  CDR3 for beta chain variable domain of TCR clone 335639 (TRBV7-2, TRBJ2-5)
CASRSQGAAYEQYF

SEQ ID NO: 671279 - protein, 15 aa, Homo sapiens
  CDR3 for alpha chain variable domain of TCR clone 335640 (TRAV12-3, TRAJ6)
CAMSATSGGSYIPTF

SEQ ID NO: 671280 - protein, 14 aa, Homo sapiens
  CDR3 for beta chain variable domain of TCR clone 335640 (TRBV5-5, TRBJ1-2)
CASSLDPYNYGYTF

SEQ ID NO: 671281 - protein, 13 aa, Homo sapiens
  CDR3 for alpha chain variable domain of TCR clone 335641 (TRAV8-6, TRAJ32)
CAVSDRATNKLIF

SEQ ID NO: 671282 - protein, 14 aa, Homo sapiens
  CDR3 for beta chain variable domain of TCR clone 335641 (TRBV7-3, TRBJ2-1)
CASSLAGGTNEQFF

SEQ ID NO: 671283 - protein, 12 aa, Homo sapiens
  CDR3 for alpha chain variable domain of TCR clone 335642 (TRAV1-1, TRAJ43)
CAPRVSSKDMRF

SEQ ID NO: 671284 - protein, 15 aa, Homo sapiens
  CDR3 for beta chain variable domain of TCR clone 335642 (TRBV5-1, TRBJ2-7)
CASSLGDFTTYEQYF

SEQ ID NO: 671285 - protein, 18 aa, Homo sapiens
  CDR3 for alpha chain variable domain of TCR clone 335643 (TRAV20, TRAJ4)
CAVQPYYMFPGGYNKLIF

SEQ ID NO: 671286 - protein, 13 aa, Homo sapiens
  CDR3 for beta chain variable domain of TCR clone 335643 (TRBV19, TRBJ2-3)
CATWDKITDTQYF

SEQ ID NO: 671287 - protein, 12 aa, Homo sapiens
  CDR3 for alpha chain variable domain of TCR clone 335644 (TRAV1-1, TRAJ22)
CAATDSWGKLQF

SEQ ID NO: 671288 - protein, 14 aa, Homo sapiens
  CDR3 for beta chain variable domain of TCR clone 335644 (TRBV7-8, TRBJ1-2)
CASSPDSLSYGYTF

SEQ ID NO: 671289 - protein, 15 aa, Homo sapiens
  CDR3 for alpha chain variable domain of TCR clone 335645 (TRAV2, TRAJ15)
CAVEDRGQAGTALIF

SEQ ID NO: 671290 - protein, 13 aa, Homo sapiens
  CDR3 for beta chain variable domain of TCR clone 335645 (TRBV12-4, TRBJ2-5)
CASSLVGSRTQYF

SEQ ID NO: 671291 - protein, 13 aa, Homo sapiens
  CDR3 for alpha chain variable domain of TCR clone 335646 (TRAV3, TRAJ31)
CAVREGNNARLMF

SEQ ID NO: 671292 - protein, 15 aa, Homo sapiens
  CDR3 for beta chain variable domain of TCR clone 335646 (TRBV6-1, TRBJ1-1)
CARRTPGQLNTEAFF

SEQ ID NO: 671293 - protein, 11 aa, Homo sapiens
  CDR3 for alpha chain variable domain of TCR clone 335647 (TRAV12-2, TRAJ31)
CAILNNARLMF

SEQ ID NO: 671294 - protein, 13 aa, Homo sapiens
  CDR3 for beta chain variable domain of TCR clone 335647 (TRBV7-2, TRBJ2-2)
CASSLAVTGELFF

SEQ ID NO: 671295 - protein, 13 aa, Homo sapiens
  CDR3 for alpha chain variable domain of TCR clone 335648 (TRAV1-2, TRAJ9)
CAALNTGGFKTIF

SEQ ID NO: 671296 - protein, 16 aa, Homo sapiens
  CDR3 for beta chain variable domain of TCR clone 335648 (TRBV5-1, TRBJ1-4)
CASSLDRVGDNEKLFF

SEQ ID NO: 671297 - protein, 14 aa, Homo sapiens
  CDR3 for alpha chain variable domain of TCR clone 335649 (TRAV9-2, TRAJ39)
CALYIYNAGNMLTF

SEQ ID NO: 671298 - protein, 12 aa, Homo sapiens
  CDR3 for beta chain variable domain of TCR clone 335649 (TRBV7-2, TRBJ1-6)
CASSLSSSPLHF

SEQ ID NO: 671299 - protein, 16 aa, Homo sapiens
  CDR3 for alpha chain variable domain of TCR clone 335650 (TRAV14/DV4, TRAJ53)
CAMREGGGGSNYKLTF

SEQ ID NO: 671300 - protein, 16 aa, Homo sapiens
  CDR3 for beta chain variable domain of TCR clone 335650 (TRBV12-4, TRBJ1-5)
CASSRPVGGSNQAQHF

SEQ ID NO: 671301 - protein, 13 aa, Homo sapiens
  CDR3 for alpha chain variable domain of TCR clone 335651 (TRAV21, TRAJ27)
CAARPGNAGKSTF

SEQ ID NO: 671302 - protein, 15 aa, Homo sapiens
  CDR3 for beta chain variable domain of TCR clone 335651 (TRBV6-3, TRBJ2-7)
CASSSTGTVFYEQYF

SEQ ID NO: 671303 - protein, 10 aa, Homo sapiens
  CDR3 for alpha chain variable domain of TCR clone 335652 (TRAV1-2, TRAJ31)
CAFFDARLMF

SEQ ID NO: 671304 - protein, 15 aa, Homo sapiens
  CDR3 for beta chain variable domain of TCR clone 335652 (TRBV4-2, TRBJ1-1)
CASSQQGAGDTEAFF

SEQ ID NO: 671305 - protein, 16 aa, Homo sapiens
  CDR3 for alpha chain variable domain of TCR clone 335653 (TRAV1-2, TRAJ10)
CAVRGVLTGGGNKLTF

SEQ ID NO: 671306 - protein, 15 aa, Homo sapiens
  CDR3 for beta chain variable domain of TCR clone 335653 (TRBV9, TRBJ2-1)
CQQRRWRGNYNEQFF

SEQ ID NO: 671307 - protein, 16 aa, Homo sapiens
  CDR3 for alpha chain variable domain of TCR clone 335654 (TRAV16, TRAJ4)
CALSRMFSGGYNKLIF

SEQ ID NO: 671308 - protein, 18 aa, Homo sapiens
  CDR3 for beta chain variable domain of TCR clone 335654 (TRBV19, TRBJ2-6)
CASSADRAGSSGANVLTF

SEQ ID NO: 671309 - protein, 15 aa, Homo sapiens
  CDR3 for alpha chain variable domain of TCR clone 335655 (TRAV17, TRAJ16)
CATALRFSDGRKLLF

SEQ ID NO: 671310 - protein, 14 aa, Homo sapiens
  CDR3 for beta chain variable domain of TCR clone 335655 (TRBV18, TRBJ2-7)
CASSPRGGSYEQYF

SEQ ID NO: 671311 - protein, 14 aa, Homo sapiens
  CDR3 for alpha chain variable domain of TCR clone 335656 (TRAV6, TRAJ6)
CALPTSGGSYIPTF

SEQ ID NO: 671312 - protein, 13 aa, Homo sapiens
  CDR3 for beta chain variable domain of TCR clone 335656 (TRBV20-1, TRBJ1-1)
CSAPLGGGTEAFF

SEQ ID NO: 671313 - protein, 12 aa, Homo sapiens
  CDR3 for alpha chain variable domain of TCR clone 335657 (TRAV12-1, TRAJ5)
CVVNTGRRALTF

SEQ ID NO: 671314 - protein, 16 aa, Homo sapiens
  CDR3 for beta chain variable domain of TCR clone 335657 (TRBV2, TRBJ2-5)
CASSTLRDRDRETQYF

SEQ ID NO: 671315 - protein, 14 aa, Homo sapiens
  CDR3 for alpha chain variable domain of TCR clone 335658 (TRAV12-2, TRAJ13)
CAVKKTGGNQKVTF

SEQ ID NO: 671316 - protein, 13 aa, Homo sapiens
  CDR3 for beta chain variable domain of TCR clone 335658 (TRBV15, TRBJ1-6)
CATSGGLNSPLHF

SEQ ID NO: 671317 - protein, 14 aa, Homo sapiens
  CDR3 for alpha chain variable domain of TCR clone 335659 (TRAV36/DV7, TRAJ40)
CAVETTSGTYKYIF

SEQ ID NO: 671318 - protein, 13 aa, Homo sapiens
  CDR3 for beta chain variable domain of TCR clone 335659 (TRBV10-3, TRBJ2-5)
CAMTSGAGETQDC

SEQ ID NO: 671319 - protein, 12 aa, Homo sapiens
  CDR3 for alpha chain variable domain of TCR clone 335660 (TRAV1-1, TRAJ8)
CSGGTGFQKLAF

SEQ ID NO: 671320 - protein, 15 aa, Homo sapiens
  CDR3 for beta chain variable domain of TCR clone 335660 (TRBV7-9, TRBJ1-4)
CASSRTGGFNEKLFF

SEQ ID NO: 671321 - protein, 18 aa, Homo sapiens
  CDR3 for alpha chain variable domain of TCR clone 335661 (TRAV13-1, TRAJ52)
CAAKNPNAGGTSYGKLTF

SEQ ID NO: 671322 - protein, 14 aa, Homo sapiens
  CDR3 for beta chain variable domain of TCR clone 335661 (TRBV7-2, TRBJ1-6)
CASSLQGANSPLHF

SEQ ID NO: 671323 - protein, 15 aa, Homo sapiens
  CDR3 for alpha chain variable domain of TCR clone 335662 (TRAV36/DV7, TRAJ53)
CAVEGSGGSNYKLTF

SEQ ID NO: 671324 - protein, 12 aa, Homo sapiens
  CDR3 for beta chain variable domain of TCR clone 335662 (TRBV28, TRBJ2-3)
CASSLYRDTQYF

SEQ ID NO: 671325 - protein, 10 aa, Homo sapiens
  CDR3 for alpha chain variable domain of TCR clone 335663 (TRAV16, TRAJ26)
CALSGSEFCL

SEQ ID NO: 671326 - protein, 12 aa, Homo sapiens
  CDR3 for beta chain variable domain of TCR clone 335663 (TRBV11-2, TRBJ2-1)
CASSLGNNEQFF

SEQ ID NO: 671327 - protein, 16 aa, Homo sapiens
  CDR3 for alpha chain variable domain of TCR clone 335664 (TRAV30, TRAJ24)
RGTEIVDADSWGKFQF

SEQ ID NO: 671328 - protein, 17 aa, Homo sapiens
  CDR3 for beta chain variable domain of TCR clone 335664 (TRBV20-1, TRBJ2-1)
CSAPPRLAGTRYNEQFF

SEQ ID NO: 671329 - protein, 14 aa, Homo sapiens
  CDR3 for alpha chain variable domain of TCR clone 335665 (TRAV4, TRAJ11)
CLVGEYSGYSTLTF

SEQ ID NO: 671330 - protein, 14 aa, Homo sapiens
  CDR3 for beta chain variable domain of TCR clone 335665 (TRBV28, TRBJ2-7)
CASSLRARGNEQYF

SEQ ID NO: 671331 - protein, 15 aa, Homo sapiens
  CDR3 for alpha chain variable domain of TCR clone 335666 (TRAV23/DV6, TRAJ17)
CARGSCRQQANLWRR

SEQ ID NO: 671332 - protein, 14 aa, Homo sapiens
  CDR3 for beta chain variable domain of TCR clone 335666 (TRBV7-2, TRBJ1-2)
CASSQTGSTYGYTF

SEQ ID NO: 671333 - protein, 13 aa, Homo sapiens
  CDR3 for alpha chain variable domain of TCR clone 335667 (TRAV3, TRAJ27)
CAVRPLGAGKSTF

SEQ ID NO: 671334 - protein, 13 aa, Homo sapiens
  CDR3 for beta chain variable domain of TCR clone 335667 (TRBV29-1, TRBJ1-1)
CSVGDSRNTEAFF

SEQ ID NO: 671335 - protein, 15 aa, Homo sapiens
  CDR3 for alpha chain variable domain of TCR clone 335668 (TRAV27, TRAJ50)
CAGVGRGTSFDKVIF

SEQ ID NO: 671336 - protein, 14 aa, Homo sapiens
  CDR3 for beta chain variable domain of TCR clone 335668 (TRBV7-2, TRBJ1-1)
CASSFYDLNTEAFF

SEQ ID NO: 671337 - protein, 15 aa, Homo sapiens
  CDR3 for alpha chain variable domain of TCR clone 335669 (TRAV25, TRAJ53)
CAATGGGGSNYNLTF

SEQ ID NO: 671338 - protein, 15 aa, Homo sapiens
  CDR3 for beta chain variable domain of TCR clone 335669 (TRBV5-1, TRBJ2-7)
CASSLNGGPAREQYF

SEQ ID NO: 671339 - protein, 15 aa, Homo sapiens
  CDR3 for alpha chain variable domain of TCR clone 335670 (TRAV35, TRAJ52)
CAGPRGGTSYGKLTF

SEQ ID NO: 671340 - protein, 10 aa, Homo sapiens
  CDR3 for beta chain variable domain of TCR clone 335670 (TRBV20-1, TRBJ2-7)
TALSSYEQYF

SEQ ID NO: 671341 - protein, 15 aa, Homo sapiens
  CDR3 for alpha chain variable domain of TCR clone 335671 (TRAV3, TRAJ13)
CAVRDIGGGYQKVTF

SEQ ID NO: 671342 - protein, 15 aa, Homo sapiens
  CDR3 for beta chain variable domain of TCR clone 335671 (TRBV5-1, TRBJ2-3)
CASSVTSGSTDTQYF

SEQ ID NO: 671343 - protein, 16 aa, Homo sapiens
  CDR3 for alpha chain variable domain of TCR clone 335672 (TRAV13-1, TRAJ10)
CAAGYIITGGGNKLTF

SEQ ID NO: 671344 - protein, 15 aa, Homo sapiens
  CDR3 for beta chain variable domain of TCR clone 335672 (TRBV12-4, TRBJ2-7)
CASSQTGAISYEQYF

SEQ ID NO: 671345 - protein, 12 aa, Homo sapiens
  CDR3 for alpha chain variable domain of TCR clone 335673 (TRAV21, TRAJ3)
CCFYSSASQISF

SEQ ID NO: 671346 - protein, 16 aa, Homo sapiens
  CDR3 for beta chain variable domain of TCR clone 335673 (TRBV19, TRBJ2-1)
CASSKAGPSSYNEQFF

SEQ ID NO: 671347 - protein, 10 aa, Homo sapiens
  CDR3 for alpha chain variable domain of TCR clone 335674 (TRAV26-2, TRAJ49)
CILLGNQFYF

SEQ ID NO: 671348 - protein, 12 aa, Homo sapiens
  CDR3 for beta chain variable domain of TCR clone 335674 (TRBV20-1, TRBJ2-7)
QSDPGATYEQYF

SEQ ID NO: 671349 - protein, 14 aa, Homo sapiens
  CDR3 for alpha chain variable domain of TCR clone 335675 (TRAV1-2, TRAJ16)
CAVNRFSDGQKLLF

SEQ ID NO: 671350 - protein, 20 aa, Homo sapiens
  CDR3 for beta chain variable domain of TCR clone 335675 (TRBV28, TRBJ2-1)
CASTHIGRSPGLAGGNEQFF

SEQ ID NO: 671351 - protein, 17 aa, Homo sapiens
  CDR3 for alpha chain variable domain of TCR clone 335676 (TRAV3, TRAJ6)
CAVRDGPRAGGSYIPTF

SEQ ID NO: 671352 - protein, 13 aa, Homo sapiens
  CDR3 for beta chain variable domain of TCR clone 335676 (TRBV20-1, TRBJ2-1)
CSASTGTSIEQFF

SEQ ID NO: 671353 - protein, 13 aa, Homo sapiens
  CDR3 for alpha chain variable domain of TCR clone 335677 (TRAV21, TRAJ57)
CAVTQGGSEKLVF

SEQ ID NO: 671354 - protein, 15 aa, Homo sapiens
  CDR3 for beta chain variable domain of TCR clone 335677 (TRBV5-1, TRBJ1-1)
CASSSTKGTNTEAFF

SEQ ID NO: 671355 - protein, 15 aa, Homo sapiens
  CDR3 for alpha chain variable domain of TCR clone 335678 (TRAV20, TRAJ53)
CAVQASGGSNYKLTF

SEQ ID NO: 671356 - protein, 15 aa, Homo sapiens
  CDR3 for beta chain variable domain of TCR clone 335678 (TRBV20-1, TRBJ1-5)
CSAFKNGQRNQPQHF

SEQ ID NO: 671357 - protein, 16 aa, Homo sapiens
  CDR3 for alpha chain variable domain of TCR clone 335679 (TRAV8-3, TRAJ13)
CAVGAYPSGGYQKVTF

SEQ ID NO: 671358 - protein, 14 aa, Homo sapiens
  CDR3 for beta chain variable domain of TCR clone 335679 (TRBV18, TRBJ2-5)
CASSPGVSQETQYF

SEQ ID NO: 671359 - protein, 14 aa, Homo sapiens
  CDR3 for alpha chain variable domain of TCR clone 335680 (TRAV26-1, TRAJ38)
CIADNAGSNRKLIW

SEQ ID NO: 671360 - protein, 17 aa, Homo sapiens
  CDR3 for beta chain variable domain of TCR clone 335680 (TRBV7-9, TRBJ2-3)
CASSPTVAGDLTDTQYF

SEQ ID NO: 671361 - protein, 10 aa, Homo sapiens
  CDR3 for alpha chain variable domain of TCR clone 335681 (TRAV38-2/DV8, TRAJ21)
CAYRSDKFYF

SEQ ID NO: 671362 - protein, 12 aa, Homo sapiens
  CDR3 for beta chain variable domain of TCR clone 335681 (TRBV11-3, TRBJ2-3)
CASSLWEDTQYF

SEQ ID NO: 671363 - protein, 16 aa, Homo sapiens
  CDR3 for alpha chain variable domain of TCR clone 335682 (TRAV23/DV6, TRAJ52)
CAARPSGCTSYGKLTF

SEQ ID NO: 671364 - protein, 14 aa, Homo sapiens
  CDR3 for beta chain variable domain of TCR clone 335682 (TRBV20-1, TRBJ2-3)
CSARDASSTDTQYF

SEQ ID NO: 671365 - protein, 15 aa, Homo sapiens
  CDR3 for alpha chain variable domain of TCR clone 335683 (TRAV3, TRAJ22)
CAVRDRGGFARQLTF

SEQ ID NO: 671366 - protein, 13 aa, Homo sapiens
  CDR3 for beta chain variable domain of TCR clone 335683 (TRBV7-9, TRBJ1-2)
CASSLKQNYGYTF

SEQ ID NO: 671367 - protein, 14 aa, Homo sapiens
  CDR3 for alpha chain variable domain of TCR clone 335684 (TRAV1-2, TRAJ8)
CAVREDAGFQKLVF

SEQ ID NO: 671368 - protein, 12 aa, Homo sapiens
  CDR3 for beta chain variable domain of TCR clone 335684 (TRBV11-2, TRBJ2-2)
CASSLGGGELFF

SEQ ID NO: 671369 - protein, 16 aa, Homo sapiens
  CDR3 for alpha chain variable domain of TCR clone 335685 (TRAV3, TRAJ37)
CAVRGKGSGNTGKLIF

SEQ ID NO: 671370 - protein, 12 aa, Homo sapiens
  CDR3 for beta chain variable domain of TCR clone 335685 (TRBV4-1, TRBJ2-3)
CASSQGTDTQYF

SEQ ID NO: 671371 - protein, 14 aa, Homo sapiens
  CDR3 for alpha chain variable domain of TCR clone 335686 (TRAV12-2, TRAJ40)
CAVKIPSGTYKYIF

SEQ ID NO: 671372 - protein, 18 aa, Homo sapiens
  CDR3 for beta chain variable domain of TCR clone 335686 (TRBV20-1, TRBJ2-6)
CSAETTATHGSGANVLTF

SEQ ID NO: 671373 - protein, 12 aa, Homo sapiens
  CDR3 for alpha chain variable domain of TCR clone 335687 (TRAV17, TRAJ39)
CATGAAGDMLAF

SEQ ID NO: 671374 - protein, 14 aa, Homo sapiens
  CDR3 for beta chain variable domain of TCR clone 335687 (TRBV7-9, TRBJ1-2)
CASSRQGANYGYTF

SEQ ID NO: 671375 - protein, 16 aa, Homo sapiens
  CDR3 for alpha chain variable domain of TCR clone 335688 (TRAV3, TRAJ37)
CAVRGRGSVNTGKLIF

SEQ ID NO: 671376 - protein, 15 aa, Homo sapiens
  CDR3 for beta chain variable domain of TCR clone 335688 (TRBV7-9, TRBJ1-6)
CASSSPGRGNSPLHF

SEQ ID NO: 671377 - protein, 13 aa, Homo sapiens
  CDR3 for alpha chain variable domain of TCR clone 335689 (TRAV21, TRAJ20)
CAVGLRVDYKLSF

SEQ ID NO: 671378 - protein, 13 aa, Homo sapiens
  CDR3 for beta chain variable domain of TCR clone 335689 (TRBV4-1, TRBJ2-5)
CASSQGHRETQYF

SEQ ID NO: 671379 - protein, 16 aa, Homo sapiens
  CDR3 for alpha chain variable domain of TCR clone 335690 (TRAV3, TRAJ21)
CAVRDIERGNLNKFYL

SEQ ID NO: 671380 - protein, 13 aa, Homo sapiens
  CDR3 for beta chain variable domain of TCR clone 335690 (TRBV27, TRBJ2-7)
CASSLTTGYEQYF

SEQ ID NO: 671381 - protein, 11 aa, Homo sapiens
  CDR3 for alpha chain variable domain of TCR clone 335691 (TRAV2, TRAJ13)
CASGGYQKVTF

SEQ ID NO: 671382 - protein, 16 aa, Homo sapiens
  CDR3 for beta chain variable domain of TCR clone 335691 (TRBV6-1, TRBJ2-5)
CASSDTLDRGAETQFF

SEQ ID NO: 671383 - protein, 15 aa, Homo sapiens
  CDR3 for alpha chain variable domain of TCR clone 335692 (TRAV25, TRAJ52)
CAGRPGGTSYGKLTF

SEQ ID NO: 671384 - protein, 13 aa, Homo sapiens
  CDR3 for beta chain variable domain of TCR clone 335692 (TRBV9, TRBJ2-7)
CASSASDSYEQYF

SEQ ID NO: 671385 - protein, 12 aa, Homo sapiens
  CDR3 for alpha chain variable domain of TCR clone 335693 (TRAV13-1, TRAJ49)
CAESIRSNQFYF

SEQ ID NO: 671386 - protein, 14 aa, Homo sapiens
  CDR3 for beta chain variable domain of TCR clone 335693 (TRBV7-2, TRBJ2-1)
CASSPGLAGNEQFF

SEQ ID NO: 671387 - protein, 16 aa, Homo sapiens
  CDR3 for alpha chain variable domain of TCR clone 335694 (TRAV17, TRAJ52)
CATSNAGGTSYGKLTF

SEQ ID NO: 671388 - protein, 11 aa, Homo sapiens
  CDR3 for beta chain variable domain of TCR clone 335694 (TRBV19, TRBJ1-1)
CASSIGSEAFF

SEQ ID NO: 671389 - protein, 14 aa, Homo sapiens
  CDR3 for alpha chain variable domain of TCR clone 335695 (TRAV35, TRAJ22)
CAGLRPGSARQLTF

SEQ ID NO: 671390 - protein, 17 aa, Homo sapiens
  CDR3 for beta chain variable domain of TCR clone 335695 (TRBV24-1, TRBJ2-1)
CATSDVSTSGTYNEQCF

SEQ ID NO: 671391 - protein, 15 aa, Homo sapiens
  CDR3 for alpha chain variable domain of TCR clone 335696 (TRAV17, TRAJ57)
CATGTSQGGSEKLVF

SEQ ID NO: 671392 - protein, 16 aa, Homo sapiens
  CDR3 for beta chain variable domain of TCR clone 335696 (TRBV12-4, TRBJ1-5)
CASSRPVGGSNQHQHF

SEQ ID NO: 671393 - protein, 13 aa, Homo sapiens
  CDR3 for alpha chain variable domain of TCR clone 335697 (TRAV13-2, TRAJ49)
CAETLHGGNQFYF

SEQ ID NO: 671394 - protein, 16 aa, Homo sapiens
  CDR3 for beta chain variable domain of TCR clone 335697 (TRBV7-7, TRBJ2-1)
CASSLASGTSYNEQFF

SEQ ID NO: 671395 - protein, 16 aa, Homo sapiens
  CDR3 for alpha chain variable domain of TCR clone 335698 (TRAV3, TRAJ37)
CAVRGKGSGNTGKLIF

SEQ ID NO: 671396 - protein, 15 aa, Homo sapiens
  CDR3 for beta chain variable domain of TCR clone 335698 (TRBV7-9, TRBJ2-2)
CTSGPLDTFPGELFF

SEQ ID NO: 671397 - protein, 12 aa, Homo sapiens
  CDR3 for alpha chain variable domain of TCR clone 335699 (TRAV27, TRAJ20)
CAGASNDYKLSF

SEQ ID NO: 671398 - protein, 12 aa, Homo sapiens
  CDR3 for beta chain variable domain of TCR clone 335699 (TRBV11-2, TRBJ2-2)
CASSLGGGELFF

SEQ ID NO: 671399 - protein, 13 aa, Homo sapiens
  CDR3 for alpha chain variable domain of TCR clone 335700 (TRAV36/DV7, TRAJ37)
CAVFSSNTGKLIF

SEQ ID NO: 671400 - protein, 13 aa, Homo sapiens
  CDR3 for beta chain variable domain of TCR clone 335700 (TRBV11-2, TRBJ2-5)
CASSFSSQETQYF

SEQ ID NO: 671401 - protein, 13 aa, Homo sapiens
  CDR3 for alpha chain variable domain of TCR clone 335701 (TRAV8-1, TRAJ9)
CAVNSVGGFKTIF

SEQ ID NO: 671402 - protein, 14 aa, Homo sapiens
  CDR3 for beta chain variable domain of TCR clone 335701 (TRBV19, TRBJ2-7)
CASSIFAGTYEQYF

SEQ ID NO: 671403 - protein, 14 aa, Homo sapiens
  CDR3 for alpha chain variable domain of TCR clone 335702 (TRAV8-1, TRAJ24)
CAVNAADSWGTLPF

SEQ ID NO: 671404 - protein, 16 aa, Homo sapiens
  CDR3 for beta chain variable domain of TCR clone 335702 (TRBV4-3, TRBJ2-1)
CASSPALDRGVNEQFF

SEQ ID NO: 671405 - protein, 14 aa, Homo sapiens
  CDR3 for alpha chain variable domain of TCR clone 335703 (TRAV20, TRAJ56)
CAVQFGGANSKLTF

SEQ ID NO: 671406 - protein, 14 aa, Homo sapiens
  CDR3 for beta chain variable domain of TCR clone 335703 (TRBV20-1, TRBJ2-7)
SSAKRGRSSYEQYF

SEQ ID NO: 671407 - protein, 20 aa, Homo sapiens
  CDR3 for alpha chain variable domain of TCR clone 335704 (TRAV12-1, TRAJ42)
SSVIQPPTFVKGGSQGNLIF

SEQ ID NO: 671408 - protein, 18 aa, Homo sapiens
  CDR3 for beta chain variable domain of TCR clone 335704 (TRBV11-2, TRBJ2-3)
CASSLGGASRGAPNTQYF

SEQ ID NO: 671409 - protein, 14 aa, Homo sapiens
  CDR3 for alpha chain variable domain of TCR clone 335705 (TRAV1-2, TRAJ16)
CAVNRFSDGQKMLF

SEQ ID NO: 671410 - protein, 16 aa, Homo sapiens
  CDR3 for beta chain variable domain of TCR clone 335705 (TRBV7-3, TRBJ2-2)
CASSLKRGTLSGELFF

SEQ ID NO: 671411 - protein, 12 aa, Homo sapiens
  CDR3 for alpha chain variable domain of TCR clone 335706 (TRAV27, TRAJ35)
CAGADFGNVLHC

SEQ ID NO: 671412 - protein, 15 aa, Homo sapiens
  CDR3 for beta chain variable domain of TCR clone 335706 (TRBV6-1, TRBJ2-1)
CQHFKTGELLNEQFF

SEQ ID NO: 671413 - protein, 14 aa, Homo sapiens
  CDR3 for alpha chain variable domain of TCR clone 335707 (TRAV1-2, TRAJ37)
CAVRSKSKTGKLIF

SEQ ID NO: 671414 - protein, 14 aa, Homo sapiens
  CDR3 for beta chain variable domain of TCR clone 335707 (TRBV6-3, TRBJ1-2)
CASSEGGGSYGYTF

SEQ ID NO: 671415 - protein, 14 aa, Homo sapiens
  CDR3 for alpha chain variable domain of TCR clone 335708 (TRAV29/DV5, TRAJ36)
CAARRKTGANNLFF

SEQ ID NO: 671416 - protein, 13 aa, Homo sapiens
  CDR3 for beta chain variable domain of TCR clone 335708 (TRBV7-2, TRBJ2-5)
CASSQTSVETQHF

SEQ ID NO: 671417 - protein, 17 aa, Homo sapiens
  CDR3 for alpha chain variable domain of TCR clone 335709 (TRAV3, TRAJ6)
CAVRDGPRAGGSYIPTF

SEQ ID NO: 671418 - protein, 16 aa, Homo sapiens
  CDR3 for beta chain variable domain of TCR clone 335709 (TRBV11-2, TRBJ2-3)
CASSLGVSGGQDTQYF

SEQ ID NO: 671419 - protein, 13 aa, Homo sapiens
  CDR3 for alpha chain variable domain of TCR clone 335710 (TRAV38-2/DV8, TRAJ35)
CAQRRGFGNVLHC

SEQ ID NO: 671420 - protein, 16 aa, Homo sapiens
  CDR3 for beta chain variable domain of TCR clone 335710 (TRBV7-3, TRBJ2-1)
CASSLEGYRSYNEQFF

SEQ ID NO: 671421 - protein, 14 aa, Homo sapiens
  CDR3 for alpha chain variable domain of TCR clone 335711 (TRAV9-2, TRAJ36)
CALPWRTGANNLFF

SEQ ID NO: 671422 - protein, 15 aa, Homo sapiens
  CDR3 for beta chain variable domain of TCR clone 335711 (TRBV7-2, TRBJ2-1)
CASSLVAGGHNEQFF

SEQ ID NO: 671423 - protein, 12 aa, Homo sapiens
  CDR3 for alpha chain variable domain of TCR clone 335712 (TRAV35, TRAJ39)
LAPNNAGNMLTF

SEQ ID NO: 671424 - protein, 13 aa, Homo sapiens
  CDR3 for beta chain variable domain of TCR clone 335712 (TRBV19, TRBJ1-3)
CASSLSLGNTIYF

SEQ ID NO: 671425 - protein, 12 aa, Homo sapiens
  CDR3 for alpha chain variable domain of TCR clone 335713 (TRAV2, TRAJ9)
CAVGSGGFKTIF

SEQ ID NO: 671426 - protein, 16 aa, Homo sapiens
  CDR3 for beta chain variable domain of TCR clone 335713 (TRBV28, TRBJ2-7)
CASSFPDRRLTYEQYF

SEQ ID NO: 671427 - protein, 14 aa, Homo sapiens
  CDR3 for alpha chain variable domain of TCR clone 335714 (TRAV8-4, TRAJ9)
CAVRINTGGFKTIF

SEQ ID NO: 671428 - protein, 16 aa, Homo sapiens
  CDR3 for beta chain variable domain of TCR clone 335714 (TRBV19, TRBJ2-2)
CASSCPGQGLAGELFF

SEQ ID NO: 671429 - protein, 17 aa, Homo sapiens
  CDR3 for alpha chain variable domain of TCR clone 335715 (TRAV8-6, TRAJ58)
CAVSSWLGETSGSRLTF

SEQ ID NO: 671430 - protein, 15 aa, Homo sapiens
  CDR3 for beta chain variable domain of TCR clone 335715 (TRBV20-1, TRBJ2-7)
CSARDRVSGMDEQYF

SEQ ID NO: 671431 - protein, 14 aa, Homo sapiens
  CDR3 for alpha chain variable domain of TCR clone 335716 (TRAV8-1, TRAJ39)
CAVKDNNAGNMLTF

SEQ ID NO: 671432 - protein, 14 aa, Homo sapiens
  CDR3 for beta chain variable domain of TCR clone 335716 (TRBV28, TRBJ2-1)
CASSPSTGYNEQFF

SEQ ID NO: 671433 - protein, 15 aa, Homo sapiens
  CDR3 for alpha chain variable domain of TCR clone 335717 (TRAV8-3, TRAJ45)
CASSYSGGGADGLTF

SEQ ID NO: 671434 - protein, 18 aa, Homo sapiens
  CDR3 for beta chain variable domain of TCR clone 335717 (TRBV18, TRBJ1-3)
CASSPGGGAGPSGNTLYF

SEQ ID NO: 671435 - protein, 14 aa, Homo sapiens
  CDR3 for alpha chain variable domain of TCR clone 335718 (TRAV12-3, TRAJ45)
CARALEGGSEKLIF

SEQ ID NO: 671436 - protein, 13 aa, Homo sapiens
  CDR3 for beta chain variable domain of TCR clone 335718 (TRBV7-9, TRBJ1-2)
CASSLKQNYGYTF

SEQ ID NO: 671437 - protein, 14 aa, Homo sapiens
  CDR3 for alpha chain variable domain of TCR clone 335719 (TRAV12-2, TRAJ6)
CASKWGGGSYIPTS

SEQ ID NO: 671438 - protein, 13 aa, Homo sapiens
  CDR3 for beta chain variable domain of TCR clone 335719 (TRBV2, TRBJ1-1)
CASSEGGNTEAFF

SEQ ID NO: 671439 - protein, 15 aa, Homo sapiens
  CDR3 for alpha chain variable domain of TCR clone 335720 (TRAV17, TRAJ57)
CATGPSQGGSEKLVF

SEQ ID NO: 671440 - protein, 15 aa, Homo sapiens
  CDR3 for beta chain variable domain of TCR clone 335720 (TRBV4-2, TRBJ2-1)
CASSQEGSGGNEQFF

SEQ ID NO: 671441 - protein, 11 aa, Homo sapiens
  CDR3 for alpha chain variable domain of TCR clone 335721 (TRAV2, TRAJ13)
CASGGYQKVTF

SEQ ID NO: 671442 - protein, 14 aa, Homo sapiens
  CDR3 for beta chain variable domain of TCR clone 335721 (TRBV19, TRBJ2-1)
CASPTFVLSGEQVF

SEQ ID NO: 671443 - protein, 13 aa, Homo sapiens
  CDR3 for alpha chain variable domain of TCR clone 335722 (TRAV36/DV7, TRAJ54)
CAVLIQGAQKLVL

SEQ ID NO: 671444 - protein, 13 aa, Homo sapiens
  CDR3 for beta chain variable domain of TCR clone 335722 (TRBV29-1, TRBJ2-4)
CSVGEGTKNIQYF

SEQ ID NO: 671445 - protein, 14 aa, Homo sapiens
  CDR3 for alpha chain variable domain of TCR clone 335723 (TRAV8-6, TRAJ5)
CAVSVDTGRRALTF

SEQ ID NO: 671446 - protein, 11 aa, Homo sapiens
  CDR3 for beta chain variable domain of TCR clone 335723 (TRBV7-3, TRBJ2-5)
CASSLIETQYF

SEQ ID NO: 671447 - protein, 17 aa, Homo sapiens
  CDR3 for alpha chain variable domain of TCR clone 335724 (TRAV26-1, TRAJ37)
CIVRVITVSSNTGKLIF

SEQ ID NO: 671448 - protein, 17 aa, Homo sapiens
  CDR3 for beta chain variable domain of TCR clone 335724 (TRBV12-4, TRBJ2-2)
CASSLGVGRGGTGELFF

SEQ ID NO: 671449 - protein, 16 aa, Homo sapiens
  CDR3 for alpha chain variable domain of TCR clone 335725 (TRAV25, TRAJ53)
CAGPKGSGGSNYKLTF

SEQ ID NO: 671450 - protein, 16 aa, Homo sapiens
  CDR3 for beta chain variable domain of TCR clone 335725 (TRBV15, TRBJ2-7)
RATSRDRGRRRGEQYF

SEQ ID NO: 671451 - protein, 16 aa, Homo sapiens
  CDR3 for alpha chain variable domain of TCR clone 335726 (TRAV26-1, TRAJ23)
CIVRPHGNNKGGKLIF

SEQ ID NO: 671452 - protein, 13 aa, Homo sapiens
  CDR3 for beta chain variable domain of TCR clone 335726 (TRBV27, TRBJ2-7)
CASSLTTGYEQYF

SEQ ID NO: 671453 - protein, 14 aa, Homo sapiens
  CDR3 for alpha chain variable domain of TCR clone 335727 (TRAV12-2, TRAJ54)
CAVNRRQGAQKLVF

SEQ ID NO: 671454 - protein, 15 aa, Homo sapiens
  CDR3 for beta chain variable domain of TCR clone 335727 (TRBV12-4, TRBJ2-5)
CASSPPTGLQETQYF

SEQ ID NO: 671455 - protein, 14 aa, Homo sapiens
  CDR3 for alpha chain variable domain of TCR clone 335728 (TRAV8-3, TRAJ20)
CAVGPRGNYYKLSF

SEQ ID NO: 671456 - protein, 11 aa, Homo sapiens
  CDR3 for beta chain variable domain of TCR clone 335728 (TRBV10-3, TRBJ2-2)
CATKGTGELFF

SEQ ID NO: 671457 - protein, 16 aa, Homo sapiens
  CDR3 for alpha chain variable domain of TCR clone 335729 (TRAV17, TRAJ35)
CATAEGGIGFGNVLHC

SEQ ID NO: 671458 - protein, 16 aa, Homo sapiens
  CDR3 for beta chain variable domain of TCR clone 335729 (TRBV6-5, TRBJ2-7)
CDSSSDPTSGFYEQYF

SEQ ID NO: 671459 - protein, 12 aa, Homo sapiens
  CDR3 for alpha chain variable domain of TCR clone 335730 (TRAV12-2, TRAJ36)
CAAPRRANNLFF

SEQ ID NO: 671460 - protein, 15 aa, Homo sapiens
  CDR3 for beta chain variable domain of TCR clone 335730 (TRBV11-2, TRBJ1-3)
CASSLDGTVGNTIYF

SEQ ID NO: 671461 - protein, 11 aa, Homo sapiens
  CDR3 for alpha chain variable domain of TCR clone 335731 (TRAV17, TRAJ36)
CAPTGANNLFF

SEQ ID NO: 671462 - protein, 17 aa, Homo sapiens
  CDR3 for beta chain variable domain of TCR clone 335731 (TRBV7-2, TRBJ2-7)
CAGSLGTGTSGRYEQYF

SEQ ID NO: 671463 - protein, 13 aa, Homo sapiens
  CDR3 for alpha chain variable domain of TCR clone 335732 (TRAV8-1, TRAJ30)
CAAIMNRDDKIIF

SEQ ID NO: 671464 - protein, 14 aa, Homo sapiens
  CDR3 for beta chain variable domain of TCR clone 335732 (TRBV7-2, TRBJ1-6)
CASSLQGANSPLHF

SEQ ID NO: 671465 - protein, 13 aa, Homo sapiens
  CDR3 for alpha chain variable domain of TCR clone 335733 (TRAV12-2, TRAJ10)
CAVPTGGGNKLTF

SEQ ID NO: 671466 - protein, 14 aa, Homo sapiens
  CDR3 for beta chain variable domain of TCR clone 335733 (TRBV13, TRBJ2-7)
CASSLKGASYEQYF

SEQ ID NO: 671467 - protein, 13 aa, Homo sapiens
  CDR3 for alpha chain variable domain of TCR clone 335734 (TRAV13-2, TRAJ5)
CAGMDTGRRALTF

SEQ ID NO: 671468 - protein, 12 aa, Homo sapiens
  CDR3 for beta chain variable domain of TCR clone 335734 (TRBV28, TRBJ2-7)
CASSFSSYEQYF

SEQ ID NO: 671469 - protein, 14 aa, Homo sapiens
  CDR3 for alpha chain variable domain of TCR clone 335735 (TRAV1-2, TRAJ13)
CAVKHSGGYQKVTF

SEQ ID NO: 671470 - protein, 12 aa, Homo sapiens
  CDR3 for beta chain variable domain of TCR clone 335735 (TRBV7-3, TRBJ2-5)
CASSFPGGTQYF

SEQ ID NO: 671471 - protein, 14 aa, Homo sapiens
  CDR3 for alpha chain variable domain of TCR clone 335736 (TRAV1-2, TRAJ8)
CAVREDTGFQKLVF

SEQ ID NO: 671472 - protein, 12 aa, Homo sapiens
  CDR3 for beta chain variable domain of TCR clone 335736 (TRBV24-1, TRBJ2-3)
CATSDSTDTQYF

SEQ ID NO: 671473 - protein, 13 aa, Homo sapiens
  CDR3 for alpha chain variable domain of TCR clone 335737 (TRAV27, TRAJ41)
CAGEGNSGYAINF

SEQ ID NO: 671474 - protein, 14 aa, Homo sapiens
  CDR3 for beta chain variable domain of TCR clone 335737 (TRBV25-1, TRBJ1-1)
CASTHLGGNTEAFF

SEQ ID NO: 671475 - protein, 14 aa, Homo sapiens
  CDR3 for alpha chain variable domain of TCR clone 335738 (TRAV2, TRAJ3)
CAVDRYSSASKLIF

SEQ ID NO: 671476 - protein, 11 aa, Homo sapiens
  CDR3 for beta chain variable domain of TCR clone 335738 (TRBV29-1, TRBJ2-5)
CSEDRTGTQYF

SEQ ID NO: 671477 - protein, 16 aa, Homo sapiens
  CDR3 for alpha chain variable domain of TCR clone 335739 (TRAV1-2, TRAJ18)
CAVRVERGSSLGRLYF

SEQ ID NO: 671478 - protein, 16 aa, Homo sapiens
  CDR3 for beta chain variable domain of TCR clone 335739 (TRBV20-1, TRBJ2-7)
CSASTSGRLSSYEQYF

SEQ ID NO: 671479 - protein, 14 aa, Homo sapiens
  CDR3 for alpha chain variable domain of TCR clone 335740 (TRAV12-2, TRAJ13)
CAVNPSGGYQKVTF

SEQ ID NO: 671480 - protein, 16 aa, Homo sapiens
  CDR3 for beta chain variable domain of TCR clone 335740 (TRBV5-1, TRBJ1-1)
CASSSGGNSLNTEAFF

SEQ ID NO: 671481 - protein, 14 aa, Homo sapiens
  CDR3 for alpha chain variable domain of TCR clone 335741 (TRAV12-3, TRAJ6)
CAMSATGGSYIPTF

SEQ ID NO: 671482 - protein, 13 aa, Homo sapiens
  CDR3 for beta chain variable domain of TCR clone 335741 (TRBV7-2, TRBJ1-1)
CASNLKGAKVAFF

SEQ ID NO: 671483 - protein, 14 aa, Homo sapiens
  CDR3 for alpha chain variable domain of TCR clone 335742 (TRAV26-1, TRAJ38)
CIADNAGNNRKLIL

SEQ ID NO: 671484 - protein, 17 aa, Homo sapiens
  CDR3 for beta chain variable domain of TCR clone 335742 (TRBV13, TRBJ2-3)
CASSLSRVAGGRNTQYF

SEQ ID NO: 671485 - protein, 19 aa, Homo sapiens
  CDR3 for alpha chain variable domain of TCR clone 335743 (TRAV2, TRAJ20)
ILQVREADAAVYRDCKLSF

SEQ ID NO: 671486 - protein, 12 aa, Homo sapiens
  CDR3 for beta chain variable domain of TCR clone 335743 (TRBV11-2, TRBJ2-2)
CASSLGGGELVF

SEQ ID NO: 671487 - protein, 15 aa, Homo sapiens
  CDR3 for alpha chain variable domain of TCR clone 335744 (TRAV21, TRAJ53)
CATLNSGGSNYKLTF

SEQ ID NO: 671488 - protein, 16 aa, Homo sapiens
  CDR3 for beta chain variable domain of TCR clone 335744 (TRBV5-5, TRBJ2-3)
CASTIRGTSCPRYAVF

SEQ ID NO: 671489 - protein, 13 aa, Homo sapiens
  CDR3 for alpha chain variable domain of TCR clone 335745 (TRAV13-2, TRAJ48)
CAEMDFGNEKLTF

SEQ ID NO: 671490 - protein, 13 aa, Homo sapiens
  CDR3 for beta chain variable domain of TCR clone 335745 (TRBV7-9, TRBJ1-2)
CASSSKQNYGYTF

SEQ ID NO: 671491 - protein, 16 aa, Homo sapiens
  CDR3 for alpha chain variable domain of TCR clone 335746 (TRAV3, TRAJ10)
CALRDMRAGGGNKLTF

SEQ ID NO: 671492 - protein, 15 aa, Homo sapiens
  CDR3 for beta chain variable domain of TCR clone 335746 (TRBV2, TRBJ2-7)
CASSEGLARSYEQYF

SEQ ID NO: 671493 - protein, 14 aa, Homo sapiens
  CDR3 for alpha chain variable domain of TCR clone 335747 (TRAV12-3, TRAJ22)
CAMSLFGSARQLTF

SEQ ID NO: 671494 - protein, 11 aa, Homo sapiens
  CDR3 for beta chain variable domain of TCR clone 335747 (TRBV11-2, TRBJ2-2)
CSSLGGGELFF

SEQ ID NO: 671495 - protein, 12 aa, Homo sapiens
  CDR3 for alpha chain variable domain of TCR clone 335748 (TRAV3, TRAJ39)
CAVIEWSNMLTF

SEQ ID NO: 671496 - protein, 14 aa, Homo sapiens
  CDR3 for beta chain variable domain of TCR clone 335748 (TRBV18, TRBJ2-3)
CASSLGGGSDTQYF

SEQ ID NO: 671497 - protein, 10 aa, Homo sapiens
  CDR3 for alpha chain variable domain of TCR clone 335749 (TRAV8-3, TRAJ18)
CCGRSTEAQP

SEQ ID NO: 671498 - protein, 12 aa, Homo sapiens
  CDR3 for beta chain variable domain of TCR clone 335749 (TRBV28, TRBJ2-6)
CAIQAGANVLTF

SEQ ID NO: 671499 - protein, 12 aa, Homo sapiens
  CDR3 for alpha chain variable domain of TCR clone 335750 (TRAV4, TRAJ26)
CLVGDYGQNFVF

SEQ ID NO: 671500 - protein, 16 aa, Homo sapiens
  CDR3 for beta chain variable domain of TCR clone 335750 (TRBV7-2, TRBJ1-2)
CASSANQDRRGHGYTF

SEQ ID NO: 671501 - protein, 14 aa, Homo sapiens
  CDR3 for alpha chain variable domain of TCR clone 335751 (TRAV14/DV4, TRAJ32)
SNVLPLTPTHKLIF

SEQ ID NO: 671502 - protein, 13 aa, Homo sapiens
  CDR3 for beta chain variable domain of TCR clone 335751 (TRBV9, TRBJ2-1)
CASSPSGGSEQFF

SEQ ID NO: 671503 - protein, 16 aa, Homo sapiens
  CDR3 for alpha chain variable domain of TCR clone 335752 (TRAV8-3, TRAJ13)
CAVGAYPSGGYQKVTF

SEQ ID NO: 671504 - protein, 15 aa, Homo sapiens
  CDR3 for beta chain variable domain of TCR clone 335752 (TRBV19, TRBJ1-5)
CASSIVWADNQPQHL

SEQ ID NO: 671505 - protein, 17 aa, Homo sapiens
  CDR3 for alpha chain variable domain of TCR clone 335753 (TRAV17, TRAJ52)
CATERTSGGTSYGKLTF

SEQ ID NO: 671506 - protein, 15 aa, Homo sapiens
  CDR3 for beta chain variable domain of TCR clone 335753 (TRBV5-1, TRBJ2-1)
CASSLVANSYNEQFF

SEQ ID NO: 671507 - protein, 15 aa, Homo sapiens
  CDR3 for alpha chain variable domain of TCR clone 335754 (TRAV12-3, TRAJ47)
CAMSALVEYGNKLVF

SEQ ID NO: 671508 - protein, 17 aa, Homo sapiens
  CDR3 for beta chain variable domain of TCR clone 335754 (TRBV4-2, TRBJ1-1)
CASTQFGGGSGNTEAFF

SEQ ID NO: 671509 - protein, 13 aa, Homo sapiens
  CDR3 for alpha chain variable domain of TCR clone 335755 (TRAV3, TRAJ21)
CAVREPDFNNFYF

SEQ ID NO: 671510 - protein, 15 aa, Homo sapiens
  CDR3 for beta chain variable domain of TCR clone 335755 (TRBV2, TRBJ2-1)
CASSELAGGYNEQFF

SEQ ID NO: 671511 - protein, 16 aa, Homo sapiens
  CDR3 for alpha chain variable domain of TCR clone 335756 (TRAV17, TRAJ22)
CATGPISSGSARQLTF

SEQ ID NO: 671512 - protein, 14 aa, Homo sapiens
  CDR3 for beta chain variable domain of TCR clone 335756 (TRBV19, TRBJ2-3)
CASSAPRGTDTQYF

SEQ ID NO: 671513 - protein, 16 aa, Homo sapiens
  CDR3 for alpha chain variable domain of TCR clone 335757 (TRAV13-1, TRAJ48)
CSKYRESNFGNEQLTF

SEQ ID NO: 671514 - protein, 17 aa, Homo sapiens
  CDR3 for beta chain variable domain of TCR clone 335757 (TRBV28, TRBJ2-1)
CASSAARQALTYNEQFF

SEQ ID NO: 671515 - protein, 18 aa, Homo sapiens
  CDR3 for alpha chain variable domain of TCR clone 335758 (TRAV13-1, TRAJ52)
CAASKRSAGGTSYGKLTF

SEQ ID NO: 671516 - protein, 13 aa, Homo sapiens
  CDR3 for beta chain variable domain of TCR clone 335758 (TRBV7-3, TRBJ2-7)
CASSSGANYEQYF

SEQ ID NO: 671517 - protein, 13 aa, Homo sapiens
  CDR3 for alpha chain variable domain of TCR clone 335759 (TRAV27, TRAJ42)
CAGARGSQGNLIF

SEQ ID NO: 671518 - protein, 14 aa, Homo sapiens
  CDR3 for beta chain variable domain of TCR clone 335759 (TRBV20-1, TRBJ1-1)
CSAQTRSGGTEAFF

SEQ ID NO: 671519 - protein, 23 aa, Homo sapiens
  CDR3 for alpha chain variable domain of TCR clone 335760 (TRAV26-1, TRAJ38)
CIADNAGNNHIQNPDPAVYQLRD

SEQ ID NO: 671520 - protein, 16 aa, Homo sapiens
  CDR3 for beta chain variable domain of TCR clone 335760 (TRBV7-9, TRBJ1-2)
CASSLGFYSGEDGYTF

SEQ ID NO: 671521 - protein, 14 aa, Homo sapiens
  CDR3 for alpha chain variable domain of TCR clone 335761 (TRAV34, TRAJ22)
CGPDTSGSARQLTF

SEQ ID NO: 671522 - protein, 16 aa, Homo sapiens
  CDR3 for beta chain variable domain of TCR clone 335761 (TRBV2, TRBJ2-3)
CQHRGAPRRWTDTQYF

SEQ ID NO: 671523 - protein, 14 aa, Homo sapiens
  CDR3 for alpha chain variable domain of TCR clone 335762 (TRAV34, TRAJ22)
CGADTSGSARRLTF

SEQ ID NO: 671524 - protein, 15 aa, Homo sapiens
  CDR3 for beta chain variable domain of TCR clone 335762 (TRBV5-1, TRBJ2-1)
CASSPPRAPYNEQFF

SEQ ID NO: 671525 - protein, 12 aa, Homo sapiens
  CDR3 for alpha chain variable domain of TCR clone 335763 (TRAV12-3, TRAJ17)
CAMTPTGHKLTF

SEQ ID NO: 671526 - protein, 15 aa, Homo sapiens
  CDR3 for beta chain variable domain of TCR clone 335763 (TRBV20-1, TRBJ2-7)
CSARDRVSGMDEQYF

SEQ ID NO: 671527 - protein, 13 aa, Homo sapiens
  CDR3 for alpha chain variable domain of TCR clone 335764 (TRAV20, TRAJ26)
CAVPTSYGQNFVF

SEQ ID NO: 671528 - protein, 16 aa, Homo sapiens
  CDR3 for beta chain variable domain of TCR clone 335764 (TRBV28, TRBJ2-7)
CASSSPQGRGVYEQYF

SEQ ID NO: 671529 - protein, 14 aa, Homo sapiens
  CDR3 for alpha chain variable domain of TCR clone 335765 (TRAV12-2, TRAJ17)
CAALFKAPGNKLTF

SEQ ID NO: 671530 - protein, 16 aa, Homo sapiens
  CDR3 for beta chain variable domain of TCR clone 335765 (TRBV20-1, TRBJ2-2)
CCASASGIPGAGELFF

SEQ ID NO: 671531 - protein, 13 aa, Homo sapiens
  CDR3 for alpha chain variable domain of TCR clone 335766 (TRAV21, TRAJ20)
CAVGLRVDYKLSF

SEQ ID NO: 671532 - protein, 16 aa, Homo sapiens
  CDR3 for beta chain variable domain of TCR clone 335766 (TRBV7-7, TRBJ2-1)
CASSLASGTSYNEQFF

SEQ ID NO: 671533 - protein, 14 aa, Homo sapiens
  CDR3 for alpha chain variable domain of TCR clone 335767 (TRAV1-2, TRAJ16)
CAVNRFSDGQKLLF

SEQ ID NO: 671534 - protein, 14 aa, Homo sapiens
  CDR3 for beta chain variable domain of TCR clone 335767 (TRBV9, TRBJ2-7)
CACSVGVGSYEQYF

SEQ ID NO: 671535 - protein, 12 aa, Homo sapiens
  CDR3 for alpha chain variable domain of TCR clone 335768 (TRAV12-3, TRAJ40)
CAMSSGTYKYIF

SEQ ID NO: 671536 - protein, 16 aa, Homo sapiens
  CDR3 for beta chain variable domain of TCR clone 335768 (TRBV7-3, TRBJ2-2)
CASSFLPSGYTGELFF

SEQ ID NO: 671537 - protein, 16 aa, Homo sapiens
  CDR3 for alpha chain variable domain of TCR clone 335769 (TRAV41, TRAJ33)
CAARPLGVDSNYQLIW

SEQ ID NO: 671538 - protein, 17 aa, Homo sapiens
  CDR3 for beta chain variable domain of TCR clone 335769 (TRBV28, TRBJ2-7)
CASSPGLAGGDSSEQYF

SEQ ID NO: 671539 - protein, 13 aa, Homo sapiens
  CDR3 for alpha chain variable domain of TCR clone 335770 (TRAV23/DV6, TRAJ5)
CAARAAGRRALTF

SEQ ID NO: 671540 - protein, 14 aa, Homo sapiens
  CDR3 for beta chain variable domain of TCR clone 335770 (TRBV7-2, TRBJ2-7)
CASSPKTSFYEQYF

SEQ ID NO: 671541 - protein, 15 aa, Homo sapiens
  CDR3 for alpha chain variable domain of TCR clone 335771 (TRAV3, TRAJ15)
CAVRQANQAGTALIF

SEQ ID NO: 671542 - protein, 14 aa, Homo sapiens
  CDR3 for beta chain variable domain of TCR clone 335771 (TRBV4-1, TRBJ2-2)
CASSQAVNTGELFF

SEQ ID NO: 671543 - protein, 16 aa, Homo sapiens
  CDR3 for alpha chain variable domain of TCR clone 335772 (TRAV21, TRAJ58)
CAVSGDRETSGSRLTF

SEQ ID NO: 671544 - protein, 12 aa, Homo sapiens
  CDR3 for beta chain variable domain of TCR clone 335772 (TRBV19, TRBJ2-3)
CASAGGADTQYF

SEQ ID NO: 671545 - protein, 17 aa, Homo sapiens
  CDR3 for alpha chain variable domain of TCR clone 335773 (TRAV3, TRAJ12)
CAVRDGGRMDSSYKLIF

SEQ ID NO: 671546 - protein, 14 aa, Homo sapiens
  CDR3 for beta chain variable domain of TCR clone 335773 (TRBV7-9, TRBJ1-2)
CDSSRQGANYGYTF

SEQ ID NO: 671547 - protein, 13 aa, Homo sapiens
  CDR3 for alpha chain variable domain of TCR clone 335774 (TRAV13-1, TRAJ39)
CSKYSDAGNMLTF

SEQ ID NO: 671548 - protein, 16 aa, Homo sapiens
  CDR3 for beta chain variable domain of TCR clone 335774 (TRBV20-1, TRBJ1-4)
CSAPGQGLLANEKLFF

SEQ ID NO: 671549 - protein, 16 aa, Homo sapiens
  CDR3 for alpha chain variable domain of TCR clone 335775 (TRAV8-4, TRAJ52)
CAAANAGGTSYGKLTF

SEQ ID NO: 671550 - protein, 14 aa, Homo sapiens
  CDR3 for beta chain variable domain of TCR clone 335775 (TRBV7-2, TRBJ2-7)
CASSLYPGRYEQYF

SEQ ID NO: 671551 - protein, 15 aa, Homo sapiens
  CDR3 for alpha chain variable domain of TCR clone 335776 (TRAV3, TRAJ5)
CAVRDLDTGRRALTF

SEQ ID NO: 671552 - protein, 14 aa, Homo sapiens
  CDR3 for beta chain variable domain of TCR clone 335776 (TRBV12-4, TRBJ1-1)
CASSLRSSGTEAFF

SEQ ID NO: 671553 - protein, 13 aa, Homo sapiens
  CDR3 for alpha chain variable domain of TCR clone 335777 (TRAV27, TRAJ8)
CAGGPTGFQKLVF

SEQ ID NO: 671554 - protein, 18 aa, Homo sapiens
  CDR3 for beta chain variable domain of TCR clone 335777 (TRBV15, TRBJ2-3)
CATSRDGARSWDTDTQYF

SEQ ID NO: 671555 - protein, 14 aa, Homo sapiens
  CDR3 for alpha chain variable domain of TCR clone 335778 (TRAV17, TRAJ22)
CATSPSGSAMQLTF

SEQ ID NO: 671556 - protein, 15 aa, Homo sapiens
  CDR3 for beta chain variable domain of TCR clone 335778 (TRBV4-1, TRBJ2-5)
CASSQWDLYQEAQYF

SEQ ID NO: 671557 - protein, 12 aa, Homo sapiens
  CDR3 for alpha chain variable domain of TCR clone 335779 (TRAV23/DV6, TRAJ30)
CAASKGDDKIIF

SEQ ID NO: 671558 - protein, 17 aa, Homo sapiens
  CDR3 for beta chain variable domain of TCR clone 335779 (TRBV13, TRBJ2-3)
FASSLSRVAGGRNTQYF

SEQ ID NO: 671559 - protein, 15 aa, Homo sapiens
  CDR3 for alpha chain variable domain of TCR clone 335780 (TRAV12-2, TRAJ53)
CAVNGGGGSNYKLTF

SEQ ID NO: 671560 - protein, 17 aa, Homo sapiens
  CDR3 for beta chain variable domain of TCR clone 335780 (TRBV7-3, TRBJ2-3)
CASRLMKRMRGADTQYF

SEQ ID NO: 671561 - protein, 13 aa, Homo sapiens
  CDR3 for alpha chain variable domain of TCR clone 335781 (TRAV3, TRAJ20)
CAVRSLNDYKLSF

SEQ ID NO: 671562 - protein, 15 aa, Homo sapiens
  CDR3 for beta chain variable domain of TCR clone 335781 (TRBV7-2, TRBJ1-1)
CASSPQGGANTEAFF

SEQ ID NO: 671563 - protein, 13 aa, Homo sapiens
  CDR3 for alpha chain variable domain of TCR clone 335782 (TRAV35, TRAJ43)
CAGYPYNNNDIRF

SEQ ID NO: 671564 - protein, 15 aa, Homo sapiens
  CDR3 for beta chain variable domain of TCR clone 335782 (TRBV25-1, TRBJ1-4)
CASSKRIATNKKLFF

SEQ ID NO: 671565 - protein, 17 aa, Homo sapiens
  CDR3 for alpha chain variable domain of TCR clone 335783 (TRAV3, TRAJ6)
CAVRDGPRAGGSYIPTF

SEQ ID NO: 671566 - protein, 14 aa, Homo sapiens
  CDR3 for beta chain variable domain of TCR clone 335783 (TRBV7-2, TRBJ2-7)
CASSPKTGFYDQYF

SEQ ID NO: 671567 - protein, 15 aa, Homo sapiens
  CDR3 for alpha chain variable domain of TCR clone 335784 (TRAV12-2, TRAJ53)
CAVNGGGGSDYKLTF

SEQ ID NO: 671568 - protein, 14 aa, Homo sapiens
  CDR3 for beta chain variable domain of TCR clone 335784 (TRBV25-1, TRBJ1-1)
CASTHLGGNTEAFF

SEQ ID NO: 671569 - protein, 15 aa, Homo sapiens
  CDR3 for alpha chain variable domain of TCR clone 335785 (TRAV3, TRAJ4)
CAVRDGTGGYNKLIF

SEQ ID NO: 671570 - protein, 16 aa, Homo sapiens
  CDR3 for beta chain variable domain of TCR clone 335785 (TRBV27, TRBJ2-2)
CASSSSGVWNTGELFF

SEQ ID NO: 671571 - protein, 13 aa, Homo sapiens
  CDR3 for alpha chain variable domain of TCR clone 335786 (TRAV27, TRAJ45)
CRSSGGGADGLTF

SEQ ID NO: 671572 - protein, 16 aa, Homo sapiens
  CDR3 for beta chain variable domain of TCR clone 335786 (TRBV28, TRBJ1-4)
CASSSRTGAANEKLFF

SEQ ID NO: 671573 - protein, 14 aa, Homo sapiens
  CDR3 for alpha chain variable domain of TCR clone 335787 (TRAV8-3, TRAJ39)
CAVGAWGAGNMLTL

SEQ ID NO: 671574 - protein, 16 aa, Homo sapiens
  CDR3 for beta chain variable domain of TCR clone 335787 (TRBV7-2, TRBJ1-3)
CASSSGRVLSGNTIYF

SEQ ID NO: 671575 - protein, 14 aa, Homo sapiens
  CDR3 for alpha chain variable domain of TCR clone 335788 (TRAV13-1, TRAJ9)
CSASALTGGFKTIF

SEQ ID NO: 671576 - protein, 16 aa, Homo sapiens
  CDR3 for beta chain variable domain of TCR clone 335788 (TRBV7-8, TRBJ2-4)
CASSAERTLAKNSQYF

SEQ ID NO: 671577 - protein, 16 aa, Homo sapiens
  CDR3 for alpha chain variable domain of TCR clone 335789 (TRAV30, TRAJ24)
GGTEIVDADSWGKFQF

SEQ ID NO: 671578 - protein, 14 aa, Homo sapiens
  CDR3 for beta chain variable domain of TCR clone 335789 (TRBV12-5, TRBJ2-5)
CASGSRTHQATQYF

SEQ ID NO: 671579 - protein, 14 aa, Homo sapiens
  CDR3 for alpha chain variable domain of TCR clone 335790 (TRAV26-1, TRAJ54)
CIVRRTQGAQKLVF

SEQ ID NO: 671580 - protein, 13 aa, Homo sapiens
  CDR3 for beta chain variable domain of TCR clone 335790 (TRBV12-5, TRBJ2-3)
CASGDRQSDTQYF

SEQ ID NO: 671581 - protein, 13 aa, Homo sapiens
  CDR3 for alpha chain variable domain of TCR clone 335791 (TRAV20, TRAJ21)
CAVEGYNFNKFYF

SEQ ID NO: 671582 - protein, 14 aa, Homo sapiens
  CDR3 for beta chain variable domain of TCR clone 335791 (TRBV12-5, TRBJ2-5)
CASGSRTHQETQHF

SEQ ID NO: 671583 - protein, 11 aa, Homo sapiens
  CDR3 for alpha chain variable domain of TCR clone 335792 (TRAV12-2, TRAJ6)
CAVNVSRKLHT

SEQ ID NO: 671584 - protein, 14 aa, Homo sapiens
  CDR3 for beta chain variable domain of TCR clone 335792 (TRBV19, TRBJ2-1)
CARGARSFQWEQFF

SEQ ID NO: 671585 - protein, 13 aa, Homo sapiens
  CDR3 for alpha chain variable domain of TCR clone 335793 (TRAV27, TRAJ6)
CAGGTRGSYIPTF

SEQ ID NO: 671586 - protein, 14 aa, Homo sapiens
  CDR3 for beta chain variable domain of TCR clone 335793 (TRBV5-5, TRBJ1-5)
CASSGQGVDQPQHF

SEQ ID NO: 671587 - protein, 12 aa, Homo sapiens
  CDR3 for alpha chain variable domain of TCR clone 335794 (TRAV21, TRAJ33)
CAKMDSNYQLIW

SEQ ID NO: 671588 - protein, 15 aa, Homo sapiens
  CDR3 for beta chain variable domain of TCR clone 335794 (TRBV20-1, TRBJ1-1)
CSASRGVTGNTEAFF

SEQ ID NO: 671589 - protein, 12 aa, Homo sapiens
  CDR3 for alpha chain variable domain of TCR clone 335795 (TRAV3, TRAJ20)
CAVRDPDYKLSF

SEQ ID NO: 671590 - protein, 15 aa, Homo sapiens
  CDR3 for beta chain variable domain of TCR clone 335795 (TRBV19, TRBJ1-2)
CASSMGQALNYGYTF

SEQ ID NO: 671591 - protein, 17 aa, Homo sapiens
  CDR3 for alpha chain variable domain of TCR clone 335796 (TRAV3, TRAJ6)
CAVRDGPRAGGSYIPTS

SEQ ID NO: 671592 - protein, 16 aa, Homo sapiens
  CDR3 for beta chain variable domain of TCR clone 335796 (TRBV13, TRBJ2-2)
CASSPRTGEHTGELFF

SEQ ID NO: 671593 - protein, 12 aa, Homo sapiens
  CDR3 for alpha chain variable domain of TCR clone 335797 (TRAV27, TRAJ21)
CAGVRQLQQILL

SEQ ID NO: 671594 - protein, 13 aa, Homo sapiens
  CDR3 for beta chain variable domain of TCR clone 335797 (TRBV10-3, TRBJ2-7)
CASKLAVNYEQYF

SEQ ID NO: 671595 - protein, 14 aa, Homo sapiens
  CDR3 for alpha chain variable domain of TCR clone 335798 (TRAV17, TRAJ32)
CATDPGGATNKLIF

SEQ ID NO: 671596 - protein, 16 aa, Homo sapiens
  CDR3 for beta chain variable domain of TCR clone 335798 (TRBV7-2, TRBJ2-5)
CASSSKWLSGQETQYF

SEQ ID NO: 671597 - protein, 12 aa, Homo sapiens
  CDR3 for alpha chain variable domain of TCR clone 335799 (TRAV12-3, TRAJ41)
CAISYSGDALNF

SEQ ID NO: 671598 - protein, 13 aa, Homo sapiens
  CDR3 for beta chain variable domain of TCR clone 335799 (TRBV7-3, TRBJ2-1)
CASSLDSYNEQFF

SEQ ID NO: 671599 - protein, 12 aa, Homo sapiens
  CDR3 for alpha chain variable domain of TCR clone 335800 (TRAV8-3, TRAJ34)
WASGYNTDKLIF

SEQ ID NO: 671600 - protein, 13 aa, Homo sapiens
  CDR3 for beta chain variable domain of TCR clone 335800 (TRBV6-4, TRBJ2-3)
CASSVSWADTQYF

SEQ ID NO: 671601 - protein, 13 aa, Homo sapiens
  CDR3 for alpha chain variable domain of TCR clone 335801 (TRAV17, TRAJ54)
CATVIQGSQKLVF

SEQ ID NO: 671602 - protein, 15 aa, Homo sapiens
  CDR3 for beta chain variable domain of TCR clone 335801 (TRBV13, TRBJ2-1)
CASSLLSGLNNEQFF

SEQ ID NO: 671603 - protein, 13 aa, Homo sapiens
  CDR3 for alpha chain variable domain of TCR clone 335802 (TRAV17, TRAJ9)
CATDGTGGFKTLF

SEQ ID NO: 671604 - protein, 17 aa, Homo sapiens
  CDR3 for beta chain variable domain of TCR clone 335802 (TRBV6-5, TRBJ2-7)
CASSYSFWGQGSYEQYF

SEQ ID NO: 671605 - protein, 13 aa, Homo sapiens
  CDR3 for alpha chain variable domain of TCR clone 335803 (TRAV3, TRAJ33)
CAVRDRSNYQLTW

SEQ ID NO: 671606 - protein, 16 aa, Homo sapiens
  CDR3 for beta chain variable domain of TCR clone 335803 (TRBV4-2, TRBJ2-7)
CTSSQDRGTSSYEQYF

SEQ ID NO: 671607 - protein, 11 aa, Homo sapiens
  CDR3 for alpha chain variable domain of TCR clone 335804 (TRAV13-2, TRAJ26)
CAEIPGQNFVF

SEQ ID NO: 671608 - protein, 19 aa, Homo sapiens
  CDR3 for beta chain variable domain of TCR clone 335804 (TRBV19, TRBJ2-2)
CASTRPGRAGGRVTGELFF

SEQ ID NO: 671609 - protein, 13 aa, Homo sapiens
  CDR3 for alpha chain variable domain of TCR clone 335805 (TRAV12-1, TRAJ47)
CVVNMEYGNKLVF

SEQ ID NO: 671610 - protein, 12 aa, Homo sapiens
  CDR3 for beta chain variable domain of TCR clone 335805 (TRBV14, TRBJ2-7)
CASSLYKDEQYF

SEQ ID NO: 671611 - protein, 14 aa, Homo sapiens
  CDR3 for alpha chain variable domain of TCR clone 335806 (TRAV25, TRAJ35)
CARRMEGFGNVLNC

SEQ ID NO: 671612 - protein, 13 aa, Homo sapiens
  CDR3 for beta chain variable domain of TCR clone 335806 (TRBV7-2, TRBJ1-4)
CASSLAGLEKLFF

SEQ ID NO: 671613 - protein, 14 aa, Homo sapiens
  CDR3 for alpha chain variable domain of TCR clone 335807 (TRAV12-3, TRAJ10)
CAIILTGGGNKLTF

SEQ ID NO: 671614 - protein, 13 aa, Homo sapiens
  CDR3 for beta chain variable domain of TCR clone 335807 (TRBV7-2, TRBJ1-1)
CASNLKGAKVAFF

SEQ ID NO: 671615 - protein, 14 aa, Homo sapiens
  CDR3 for alpha chain variable domain of TCR clone 335808 (TRAV1-2, TRAJ8)
CAVREDTGVQKLVF

SEQ ID NO: 671616 - protein, 16 aa, Homo sapiens
  CDR3 for beta chain variable domain of TCR clone 335808 (TRBV12-5, TRBJ2-5)
CASGPRTSGNQETQYF

SEQ ID NO: 671617 - protein, 13 aa, Homo sapiens
  CDR3 for alpha chain variable domain of TCR clone 335809 (TRAV12-2, TRAJ20)
CAVYPSNDYKLSF

SEQ ID NO: 671618 - protein, 14 aa, Homo sapiens
  CDR3 for beta chain variable domain of TCR clone 335809 (TRBV27, TRBJ2-5)
CQQFIPAGGRDQYF

SEQ ID NO: 671619 - protein, 10 aa, Homo sapiens
  CDR3 for alpha chain variable domain of TCR clone 335810 (TRAV30, TRAJ48)
CGIGNEKLTF

SEQ ID NO: 671620 - protein, 13 aa, Homo sapiens
  CDR3 for beta chain variable domain of TCR clone 335810 (TRBV27, TRBJ2-7)
CASSLTTGYEQYF

SEQ ID NO: 671621 - protein, 10 aa, Homo sapiens
  CDR3 for alpha chain variable domain of TCR clone 335811 (TRAV1-2, TRAJ20)
CAVTDYKLSV

SEQ ID NO: 671622 - protein, 15 aa, Homo sapiens
  CDR3 for beta chain variable domain of TCR clone 335811 (TRBV7-2, TRBJ2-7)
CASSLVSSGSYEQYF

SEQ ID NO: 671623 - protein, 13 aa, Homo sapiens
  CDR3 for alpha chain variable domain of TCR clone 335812 (TRAV8-6, TRAJ8)
CAVSNTGFQKLVF

SEQ ID NO: 671624 - protein, 14 aa, Homo sapiens
  CDR3 for beta chain variable domain of TCR clone 335812 (TRBV19, TRBJ2-7)
CASTVQGRPYEQYF

SEQ ID NO: 671625 - protein, 14 aa, Homo sapiens
  CDR3 for alpha chain variable domain of TCR clone 335813 (TRAV13-1, TRAJ44)
CAAKATGTASQLTF

SEQ ID NO: 671626 - protein, 22 aa, Homo sapiens
  CDR3 for beta chain variable domain of TCR clone 335813 (TRBV19, TRBJ2-1)
CASSVRDRVTGTSGRIYNEQFF

SEQ ID NO: 671627 - protein, 14 aa, Homo sapiens
  CDR3 for alpha chain variable domain of TCR clone 335814 (TRAV26-1, TRAJ38)
CIADNAGKNRKLIW

SEQ ID NO: 671628 - protein, 13 aa, Homo sapiens
  CDR3 for beta chain variable domain of TCR clone 335814 (TRBV15, TRBJ1-6)
CATSGGLNSPLHF

SEQ ID NO: 671629 - protein, 12 aa, Homo sapiens
  CDR3 for alpha chain variable domain of TCR clone 335815 (TRAV21, TRAJ13)
PGPSGVYQKVTF

SEQ ID NO: 671630 - protein, 17 aa, Homo sapiens
  CDR3 for beta chain variable domain of TCR clone 335815 (TRBV5-1, TRBJ2-1)
CASSLGQISFSCNEQFF

SEQ ID NO: 671631 - protein, 15 aa, Homo sapiens
  CDR3 for alpha chain variable domain of TCR clone 335816 (TRAV3, TRAJ17)
CAVSPKEAAGNKLTF

SEQ ID NO: 671632 - protein, 12 aa, Homo sapiens
  CDR3 for beta chain variable domain of TCR clone 335816 (TRBV7-9, TRBJ1-6)
CASSVMTSPLHF

SEQ ID NO: 671633 - protein, 14 aa, Homo sapiens
  CDR3 for alpha chain variable domain of TCR clone 335817 (TRAV9-2, TRAJ39)
CALYIYNAGNMLTF

SEQ ID NO: 671634 - protein, 17 aa, Homo sapiens
  CDR3 for beta chain variable domain of TCR clone 335817 (TRBV5-5, TRBJ1-1)
CASSLRFRGLMNTEAFV

SEQ ID NO: 671635 - protein, 14 aa, Homo sapiens
  CDR3 for alpha chain variable domain of TCR clone 335818 (TRAV12-1, TRAJ30)
CVVNIGGRDDKIIF

SEQ ID NO: 671636 - protein, 15 aa, Homo sapiens
  CDR3 for beta chain variable domain of TCR clone 335818 (TRBV12-5, TRBJ2-1)
CIFVLVVGQGNEQFF

SEQ ID NO: 671637 - protein, 13 aa, Homo sapiens
  CDR3 for alpha chain variable domain of TCR clone 335819 (TRAV13-1, TRAJ12)
CAASTDSSYKLIF

SEQ ID NO: 671638 - protein, 16 aa, Homo sapiens
  CDR3 for beta chain variable domain of TCR clone 335819 (TRBV15, TRBJ2-1)
CATSRERLARAYEQFF

SEQ ID NO: 671639 - protein, 14 aa, Homo sapiens
  CDR3 for alpha chain variable domain of TCR clone 335820 (TRAV12-3, TRAJ10)
SHLPLTGGGNKVTF

SEQ ID NO: 671640 - protein, 16 aa, Homo sapiens
  CDR3 for beta chain variable domain of TCR clone 335820 (TRBV5-4, TRBJ2-3)
CASQQPGAGGADTQYF

SEQ ID NO: 671641 - protein, 13 aa, Homo sapiens
  CDR3 for alpha chain variable domain of TCR clone 335821 (TRAV12-1, TRAJ43)
CVVSHHNNNDMRF

SEQ ID NO: 671642 - protein, 15 aa, Homo sapiens
  CDR3 for beta chain variable domain of TCR clone 335821 (TRBV9, TRBJ2-1)
CASSLAGSSYNEQFF

SEQ ID NO: 671643 - protein, 12 aa, Homo sapiens
  CDR3 for alpha chain variable domain of TCR clone 335822 (TRAV17, TRAJ30)
CATDARDDKIIF

SEQ ID NO: 671644 - protein, 15 aa, Homo sapiens
  CDR3 for beta chain variable domain of TCR clone 335822 (TRBV4-1, TRBJ2-1)
CACSQGGELYNEQFF

SEQ ID NO: 671645 - protein, 14 aa, Homo sapiens
  CDR3 for alpha chain variable domain of TCR clone 335823 (TRAV1-2, TRAJ8)
CAVREDAGFQKLVF

SEQ ID NO: 671646 - protein, 15 aa, Homo sapiens
  CDR3 for beta chain variable domain of TCR clone 335823 (TRBV7-2, TRBJ2-2)
CASRRPGQNTGELFF

SEQ ID NO: 671647 - protein, 12 aa, Homo sapiens
  CDR3 for alpha chain variable domain of TCR clone 335824 (TRAV17, TRAJ49)
CATVTTGNPFYF

SEQ ID NO: 671648 - protein, 18 aa, Homo sapiens
  CDR3 for beta chain variable domain of TCR clone 335824 (TRBV11-2, TRBJ2-6)
CDSSLNPFLGTGANVLTF

SEQ ID NO: 671649 - protein, 13 aa, Homo sapiens
  CDR3 for alpha chain variable domain of TCR clone 335825 (TRAV8-3, TRAJ4)
WVFYSGGYNKLMF

SEQ ID NO: 671650 - protein, 14 aa, Homo sapiens
  CDR3 for beta chain variable domain of TCR clone 335825 (TRBV7-9, TRBJ2-3)
CASSLEDGTDTQYF

SEQ ID NO: 671651 - protein, 15 aa, Homo sapiens
  CDR3 for alpha chain variable domain of TCR clone 335826 (TRAV17, TRAJ56)
CATDANTGANSKLTF

SEQ ID NO: 671652 - protein, 14 aa, Homo sapiens
  CDR3 for beta chain variable domain of TCR clone 335826 (TRBV18, TRBJ2-7)
CASSPRGGAYEQYF

SEQ ID NO: 671653 - protein, 13 aa, Homo sapiens
  CDR3 for alpha chain variable domain of TCR clone 335827 (TRAV8-3, TRAJ44)
CAVVPGTASQLTF

SEQ ID NO: 671654 - protein, 14 aa, Homo sapiens
  CDR3 for beta chain variable domain of TCR clone 335827 (TRBV9, TRBJ2-4)
CASSPSGTSGFQYF

SEQ ID NO: 671655 - protein, 14 aa, Homo sapiens
  CDR3 for alpha chain variable domain of TCR clone 335828 (TRAV8-2, TRAJ23)
CVVSDDNQGGKLIF

SEQ ID NO: 671656 - protein, 16 aa, Homo sapiens
  CDR3 for beta chain variable domain of TCR clone 335828 (TRBV7-2, TRBJ2-7)
CASSLEAGGPWYEQYF

SEQ ID NO: 671657 - protein, 12 aa, Homo sapiens
  CDR3 for alpha chain variable domain of TCR clone 335829 (TRAV12-3, TRAJ17)
CAMTLTGNKLTF

SEQ ID NO: 671658 - protein, 15 aa, Homo sapiens
  CDR3 for beta chain variable domain of TCR clone 335829 (TRBV20-1, TRBJ2-7)
CSARDRVSGMDEQCC

SEQ ID NO: 671659 - protein, 11 aa, Homo sapiens
  CDR3 for alpha chain variable domain of TCR clone 335830 (TRAV12-2, )
CAVASLATTIS

SEQ ID NO: 671660 - protein, 16 aa, Homo sapiens
  CDR3 for beta chain variable domain of TCR clone 335830 (TRBV5-1, TRBJ2-2)
CASSSRTGGQTGELFF

SEQ ID NO: 671661 - protein, 12 aa, Homo sapiens
  CDR3 for alpha chain variable domain of TCR clone 335831 (TRAV8-3, TRAJ26)
CASDNYGQNFVF

SEQ ID NO: 671662 - protein, 11 aa, Homo sapiens
  CDR3 for beta chain variable domain of TCR clone 335831 (TRBV19, TRBJ1-1)
CASSIGSEAFF

SEQ ID NO: 671663 - protein, 16 aa, Homo sapiens
  CDR3 for alpha chain variable domain of TCR clone 335832 (TRAV1-1, TRAJ22)
CAVNDALSGSARQLTF

SEQ ID NO: 671664 - protein, 14 aa, Homo sapiens
  CDR3 for beta chain variable domain of TCR clone 335832 (TRBV6-1, TRBJ1-3)
CASVQGGGGNTIYF

SEQ ID NO: 671665 - protein, 14 aa, Homo sapiens
  CDR3 for alpha chain variable domain of TCR clone 335833 (TRAV13-1, TRAJ35)
CAASKGGFGNVLHC

SEQ ID NO: 671666 - protein, 16 aa, Homo sapiens
  CDR3 for beta chain variable domain of TCR clone 335833 (TRBV2, TRBJ1-4)
CASNLLQGVTNEKLFF

SEQ ID NO: 671667 - protein, 10 aa, Homo sapiens
  CDR3 for alpha chain variable domain of TCR clone 335834 (TRAV2, TRAJ34)
CAVVNDKLIF

SEQ ID NO: 671668 - protein, 12 aa, Homo sapiens
  CDR3 for beta chain variable domain of TCR clone 335834 (TRBV7-9, TRBJ1-4)
CASSTDREKLFF

SEQ ID NO: 671669 - protein, 15 aa, Homo sapiens
  CDR3 for alpha chain variable domain of TCR clone 335835 (TRAV16, TRAJ17)
CALSGNKAVGNKLTF

SEQ ID NO: 671670 - protein, 16 aa, Homo sapiens
  CDR3 for beta chain variable domain of TCR clone 335835 (TRBV7-6, TRBJ1-6)
CASSSLPAGEYSPLHF

SEQ ID NO: 671671 - protein, 13 aa, Homo sapiens
  CDR3 for alpha chain variable domain of TCR clone 335836 (TRAV38-1, TRAJ42)
CDRWGGSQGNLIF

SEQ ID NO: 671672 - protein, 13 aa, Homo sapiens
  CDR3 for beta chain variable domain of TCR clone 335836 (TRBV14, TRBJ1-2)
CASSEDRRYGYTF

SEQ ID NO: 671673 - protein, 11 aa, Homo sapiens
  CDR3 for alpha chain variable domain of TCR clone 335837 (TRAV35, TRAJ30)
CAGPGDYKIIF

SEQ ID NO: 671674 - protein, 18 aa, Homo sapiens
  CDR3 for beta chain variable domain of TCR clone 335837 (TRBV7-6, TRBJ2-1)
CASSPRTSGMSSYNEQFF

SEQ ID NO: 671675 - protein, 11 aa, Homo sapiens
  CDR3 for alpha chain variable domain of TCR clone 335838 (TRAV13-2, TRAJ20)
CAYSNDYKLSF

SEQ ID NO: 671676 - protein, 15 aa, Homo sapiens
  CDR3 for beta chain variable domain of TCR clone 335838 (TRBV4-1, TRBJ1-4)
CASSDTGGTNEKLFF

SEQ ID NO: 671677 - protein, 12 aa, Homo sapiens
  CDR3 for alpha chain variable domain of TCR clone 335839 (TRAV12-1, TRAJ20)
CVAHFNDYKLSF

SEQ ID NO: 671678 - protein, 14 aa, Homo sapiens
  CDR3 for beta chain variable domain of TCR clone 335839 (TRBV3-1, TRBJ2-2)
CASSLPDNTGELIF

SEQ ID NO: 671679 - protein, 13 aa, Homo sapiens
  CDR3 for alpha chain variable domain of TCR clone 335840 (TRAV23/DV6, TRAJ31)
CAARRGNTARLMF

SEQ ID NO: 671680 - protein, 15 aa, Homo sapiens
  CDR3 for beta chain variable domain of TCR clone 335840 (TRBV5-4, TRBJ2-3)
CASSLAGRVTDTQYF

SEQ ID NO: 671681 - protein, 16 aa, Homo sapiens
  CDR3 for alpha chain variable domain of TCR clone 335841 (TRAV12-3, TRAJ53)
CAMSPGSGGSNYKLTF

SEQ ID NO: 671682 - protein, 13 aa, Homo sapiens
  CDR3 for beta chain variable domain of TCR clone 335841 (TRBV10-3, TRBJ2-7)
CAYKLAVNYEQYF

SEQ ID NO: 671683 - protein, 15 aa, Homo sapiens
  CDR3 for alpha chain variable domain of TCR clone 335842 (TRAV12-1, TRAJ10)
CVVNKLTGGGNKLTF

SEQ ID NO: 671684 - protein, 17 aa, Homo sapiens
  CDR3 for beta chain variable domain of TCR clone 335842 (TRBV5-1, TRBJ1-6)
CASSPSLQGSDNSRLHF

SEQ ID NO: 671685 - protein, 17 aa, Homo sapiens
  CDR3 for alpha chain variable domain of TCR clone 335843 (TRAV13-1, TRAJ31)
CAPRDRRMFGDGTQLVV

SEQ ID NO: 671686 - protein, 12 aa, Homo sapiens
  CDR3 for beta chain variable domain of TCR clone 335843 (TRBV7-9, TRBJ2-7)
CASSLEGYEQHF

SEQ ID NO: 671687 - protein, 14 aa, Homo sapiens
  CDR3 for alpha chain variable domain of TCR clone 335844 (TRAV8-3, TRAJ10)
CAVGNAGGGNKLTF

SEQ ID NO: 671688 - protein, 13 aa, Homo sapiens
  CDR3 for beta chain variable domain of TCR clone 335844 (TRBV19, TRBJ2-7)
CASSIDGTYEQYF

SEQ ID NO: 671689 - protein, 15 aa, Homo sapiens
  CDR3 for alpha chain variable domain of TCR clone 335845 (TRAV35, TRAJ38)
CAGFSNAGNNRKLIW

SEQ ID NO: 671690 - protein, 18 aa, Homo sapiens
  CDR3 for beta chain variable domain of TCR clone 335845 (TRBV3-1, TRBJ1-2)
CASSQGVIGWNGDYGYTF

SEQ ID NO: 671691 - protein, 15 aa, Homo sapiens
  CDR3 for alpha chain variable domain of TCR clone 335846 (TRAV26-1, TRAJ38)
CIVRAEGGNNRKLIW

SEQ ID NO: 671692 - protein, 14 aa, Homo sapiens
  CDR3 for beta chain variable domain of TCR clone 335846 (TRBV7-6, TRBJ2-5)
CASSSPSGAETQYF

SEQ ID NO: 671693 - protein, 14 aa, Homo sapiens
  CDR3 for alpha chain variable domain of TCR clone 335847 (TRAV23/DV6, TRAJ4)
CAANLSGGYKKLIF

SEQ ID NO: 671694 - protein, 17 aa, Homo sapiens
  CDR3 for beta chain variable domain of TCR clone 335847 (TRBV4-1, TRBJ1-3)
CASSPQRGIRFGNTIYF

SEQ ID NO: 671695 - protein, 12 aa, Homo sapiens
  CDR3 for alpha chain variable domain of TCR clone 335848 (TRAV21, TRAJ11)
CAATSGYSTLTF

SEQ ID NO: 671696 - protein, 13 aa, Homo sapiens
  CDR3 for beta chain variable domain of TCR clone 335848 (TRBV12-4, TRBJ2-5)
CASSPGTEETQYF

SEQ ID NO: 671697 - protein, 15 aa, Homo sapiens
  CDR3 for alpha chain variable domain of TCR clone 335849 (TRAV8-3, TRAJ45)
CAVEGSGGGADGLTF

SEQ ID NO: 671698 - protein, 16 aa, Homo sapiens
  CDR3 for beta chain variable domain of TCR clone 335849 (TRBV6-5, TRBJ2-6)
FASSYPLSSGANVLTF

SEQ ID NO: 671699 - protein, 14 aa, Homo sapiens
  CDR3 for alpha chain variable domain of TCR clone 335850 (TRAV12-2, TRAJ17)
CAVLFKAAVNKLTF

SEQ ID NO: 671700 - protein, 14 aa, Homo sapiens
  CDR3 for beta chain variable domain of TCR clone 335850 (TRBV19, TRBJ2-1)
CASPTFVLSGEQFF

SEQ ID NO: 671701 - protein, 22 aa, Homo sapiens
  CDR3 for alpha chain variable domain of TCR clone 335851 (TRAV8-3, TRAJ32)
CAVEVVLQTSSSLELALCLLSS

SEQ ID NO: 671702 - protein, 15 aa, Homo sapiens
  CDR3 for beta chain variable domain of TCR clone 335851 (TRBV7-8, TRBJ2-7)
CASSPGGRGFYEQYF

SEQ ID NO: 671703 - protein, 16 aa, Homo sapiens
  CDR3 for alpha chain variable domain of TCR clone 335852 (TRAV26-1, )
CIDIQNPDHAVYQLRD

SEQ ID NO: 671704 - protein, 19 aa, Homo sapiens
  CDR3 for beta chain variable domain of TCR clone 335852 (TRBV19, TRBJ2-5)
CASSIGQVTDFFLGETQYF

SEQ ID NO: 671705 - protein, 11 aa, Homo sapiens
  CDR3 for alpha chain variable domain of TCR clone 335853 (TRAV2, TRAJ13)
CASGGYQKVTF

SEQ ID NO: 671706 - protein, 17 aa, Homo sapiens
  CDR3 for beta chain variable domain of TCR clone 335853 (TRBV20-1, TRBJ2-2)
GSASGSGQGGLTGELFF

SEQ ID NO: 671707 - protein, 16 aa, Homo sapiens
  CDR3 for alpha chain variable domain of TCR clone 335854 (TRAV26-1, TRAJ22)
CIVSLNFFWFCKATDL

SEQ ID NO: 671708 - protein, 15 aa, Homo sapiens
  CDR3 for beta chain variable domain of TCR clone 335854 (TRBV4-2, TRBJ1-2)
CASSQRTGGRDGHTF

SEQ ID NO: 671709 - protein, 13 aa, Homo sapiens
  CDR3 for alpha chain variable domain of TCR clone 335855 (TRAV26-1, TRAJ30)
CIVRVESNDKIIF

SEQ ID NO: 671710 - protein, 17 aa, Homo sapiens
  CDR3 for beta chain variable domain of TCR clone 335855 (TRBV20-1, TRBJ2-2)
CSASGSGQGGLTGELFF

SEQ ID NO: 671711 - protein, 15 aa, Homo sapiens
  CDR3 for alpha chain variable domain of TCR clone 335856 (TRAV8-3, TRAJ23)
CAVGDRYNQGGKLIF

SEQ ID NO: 671712 - protein, 20 aa, Homo sapiens
  CDR3 for beta chain variable domain of TCR clone 335856 (TRBV7-8, TRBJ2-2)
CARSHLFPGPTIHITGELFF

SEQ ID NO: 671713 - protein, 12 aa, Homo sapiens
  CDR3 for alpha chain variable domain of TCR clone 335857 (TRAV12-3, TRAJ17)
CAMTLTGNKLTL

SEQ ID NO: 671714 - protein, 15 aa, Homo sapiens
  CDR3 for beta chain variable domain of TCR clone 335857 (TRBV20-1, TRBJ2-7)
CSARDRFSGMDEQYF

SEQ ID NO: 671715 - protein, 10 aa, Homo sapiens
  CDR3 for alpha chain variable domain of TCR clone 335858 (TRAV17, TRAJ9)
CTTGGFKTIF

SEQ ID NO: 671716 - protein, 14 aa, Homo sapiens
  CDR3 for beta chain variable domain of TCR clone 335858 (TRBV7-9, TRBJ2-2)
CASSGLADTGELFF

SEQ ID NO: 671717 - protein, 13 aa, Homo sapiens
  CDR3 for alpha chain variable domain of TCR clone 335859 (TRAV12-1, TRAJ29)
CVVYTSGNTPLVF

SEQ ID NO: 671718 - protein, 14 aa, Homo sapiens
  CDR3 for beta chain variable domain of TCR clone 335859 (TRBV12-4, TRBJ2-3)
CASSSVPSTDTQYF

SEQ ID NO: 671719 - protein, 13 aa, Homo sapiens
  CDR3 for alpha chain variable domain of TCR clone 335860 (TRAV12-3, TRAJ53)
CAMLGGSNYKLTF

SEQ ID NO: 671720 - protein, 13 aa, Homo sapiens
  CDR3 for beta chain variable domain of TCR clone 335860 (TRBV18, TRBJ2-5)
CASSLQGQETQYF

SEQ ID NO: 671721 - protein, 12 aa, Homo sapiens
  CDR3 for alpha chain variable domain of TCR clone 335861 (TRAV25, TRAJ16)
CAGQQDGQKLVF

SEQ ID NO: 671722 - protein, 16 aa, Homo sapiens
  CDR3 for beta chain variable domain of TCR clone 335861 (TRBV19, TRBJ2-1)
CASSIQAGGSYNEQFF

SEQ ID NO: 671723 - protein, 21 aa, Homo sapiens
  CDR3 for alpha chain variable domain of TCR clone 335862 (TRAV25, TRAJ39)
CADARIIMQATCSPLEGDKVN

SEQ ID NO: 671724 - protein, 12 aa, Homo sapiens
  CDR3 for beta chain variable domain of TCR clone 335862 (TRBV7-8, TRBJ2-7)
CASSLGDREQYF

SEQ ID NO: 671725 - protein, 17 aa, Homo sapiens
  CDR3 for alpha chain variable domain of TCR clone 335863 (TRAV26-1, TRAJ41)
CCVLLHRQDQFRYALNF

SEQ ID NO: 671726 - protein, 13 aa, Homo sapiens
  CDR3 for beta chain variable domain of TCR clone 335863 (TRBV20-1, TRBJ1-5)
CSATAAGGQPQHF

SEQ ID NO: 671727 - protein, 18 aa, Homo sapiens
  CDR3 for alpha chain variable domain of TCR clone 335864 (TRAV8-3, TRAJ6)
CAVVAEHQEESTYLPLEE

SEQ ID NO: 671728 - protein, 14 aa, Homo sapiens
  CDR3 for beta chain variable domain of TCR clone 335864 (TRBV6-6, TRBJ2-7)
CASSDSGAGYEQYF

SEQ ID NO: 671729 - protein, 14 aa, Homo sapiens
  CDR3 for alpha chain variable domain of TCR clone 335865 (TRAV17, TRAJ39)
CATDPVRAGNMLTL

SEQ ID NO: 671730 - protein, 13 aa, Homo sapiens
  CDR3 for beta chain variable domain of TCR clone 335865 (TRBV19, TRBJ1-2)
CASSVPGQDGYTF

SEQ ID NO: 671731 - protein, 15 aa, Homo sapiens
  CDR3 for alpha chain variable domain of TCR clone 335866 (TRAV38-1, TRAJ37)
CAFIHGSGNIGKLIF

SEQ ID NO: 671732 - protein, 14 aa, Homo sapiens
  CDR3 for beta chain variable domain of TCR clone 335866 (TRBV29-1, TRBJ2-5)
CSVETSGSGETQYF

SEQ ID NO: 671733 - protein, 14 aa, Homo sapiens
  CDR3 for alpha chain variable domain of TCR clone 335867 (TRAV17, TRAJ40)
CATALTSGTYKYIF

SEQ ID NO: 671734 - protein, 15 aa, Homo sapiens
  CDR3 for beta chain variable domain of TCR clone 335867 (TRBV7-2, TRBJ2-3)
CASSLVVRGPDTQYF

SEQ ID NO: 671735 - protein, 13 aa, Homo sapiens
  CDR3 for alpha chain variable domain of TCR clone 335868 (TRAV8-6, TRAJ20)
CAVSFSNDYKLSF

SEQ ID NO: 671736 - protein, 12 aa, Homo sapiens
  CDR3 for beta chain variable domain of TCR clone 335868 (TRBV7-8, TRBJ2-7)
CASSLGDREQYF

SEQ ID NO: 671737 - protein, 15 aa, Homo sapiens
  CDR3 for alpha chain variable domain of TCR clone 335869 (TRAV8-6, TRAJ4)
CAVRLFSGGYNKLIF

SEQ ID NO: 671738 - protein, 13 aa, Homo sapiens
  CDR3 for beta chain variable domain of TCR clone 335869 (TRBV7-2, TRBJ2-3)
CASSTDNLDTQYF

SEQ ID NO: 671739 - protein, 16 aa, Homo sapiens
  CDR3 for alpha chain variable domain of TCR clone 335870 (TRAV30, TRAJ24)
CGTEIVDADSWGKFQF

SEQ ID NO: 671740 - protein, 17 aa, Homo sapiens
  CDR3 for beta chain variable domain of TCR clone 335870 (TRBV7-8, TRBJ2-6)
CASSAGTWGAGANVLTF

SEQ ID NO: 671741 - protein, 18 aa, Homo sapiens
  CDR3 for alpha chain variable domain of TCR clone 335871 (TRAV26-2, TRAJ54)
CILRDVEVGIQGAQKLVF

SEQ ID NO: 671742 - protein, 15 aa, Homo sapiens
  CDR3 for beta chain variable domain of TCR clone 335871 (TRBV5-1, TRBJ2-7)
CASSLNGGPAREQYF

SEQ ID NO: 671743 - protein, 15 aa, Homo sapiens
  CDR3 for alpha chain variable domain of TCR clone 335872 (TRAV8-4, TRAJ29)
CAVSEDFRGNTTLVF

SEQ ID NO: 671744 - protein, 12 aa, Homo sapiens
  CDR3 for beta chain variable domain of TCR clone 335872 (TRBV14, TRBJ2-7)
CASSSLKGEQYI

SEQ ID NO: 671745 - protein, 13 aa, Homo sapiens
  CDR3 for alpha chain variable domain of TCR clone 335873 (TRAV12-2, TRAJ20)
CAVYPSNDYKLSF

SEQ ID NO: 671746 - protein, 15 aa, Homo sapiens
  CDR3 for beta chain variable domain of TCR clone 335873 (TRBV5-1, TRBJ1-3)
CASSLEGGSGNTIYF

SEQ ID NO: 671747 - protein, 14 aa, Homo sapiens
  CDR3 for alpha chain variable domain of TCR clone 335874 (TRAV12-1, TRAJ17)
CVVNYRAAGNKLTL

SEQ ID NO: 671748 - protein, 17 aa, Homo sapiens
  CDR3 for beta chain variable domain of TCR clone 335874 (TRBV20-1, TRBJ2-1)
CSASSSGLAGSYNEQFF

SEQ ID NO: 671749 - protein, 14 aa, Homo sapiens
  CDR3 for alpha chain variable domain of TCR clone 335875 (TRAV1-2, TRAJ8)
CAVREDTGFQKLVF

SEQ ID NO: 671750 - protein, 17 aa, Homo sapiens
  CDR3 for beta chain variable domain of TCR clone 335875 (TRBV5-1, TRBJ2-5)
CASSFNPGRGDQETQYF

SEQ ID NO: 671751 - protein, 14 aa, Homo sapiens
  CDR3 for alpha chain variable domain of TCR clone 335876 (TRAV12-3, TRAJ10)
SHLPLTGGGNKLTF

SEQ ID NO: 671752 - protein, 15 aa, Homo sapiens
  CDR3 for beta chain variable domain of TCR clone 335876 (TRBV18, TRBJ2-6)
CASSPSYAGASVLTF

SEQ ID NO: 671753 - protein, 14 aa, Homo sapiens
  CDR3 for alpha chain variable domain of TCR clone 335877 (TRAV1-2, TRAJ8)
CAVREDTCFQKLVF

SEQ ID NO: 671754 - protein, 15 aa, Homo sapiens
  CDR3 for beta chain variable domain of TCR clone 335877 (TRBV12-4, TRBJ2-5)
CASSPPTGLQETQYF

SEQ ID NO: 671755 - protein, 14 aa, Homo sapiens
  CDR3 for alpha chain variable domain of TCR clone 335878 (TRAV38-1, TRAJ45)
CAYYSGGGADGLTF

SEQ ID NO: 671756 - protein, 15 aa, Homo sapiens
  CDR3 for beta chain variable domain of TCR clone 335878 (TRBV4-1, TRBJ2-7)
CASSQQGQGFDEQYF

SEQ ID NO: 671757 - protein, 14 aa, Homo sapiens
  CDR3 for alpha chain variable domain of TCR clone 335879 (TRAV3, TRAJ9)
CTLRLNTGGFKTIF

SEQ ID NO: 671758 - protein, 15 aa, Homo sapiens
  CDR3 for beta chain variable domain of TCR clone 335879 (TRBV7-2, TRBJ2-1)
CASSLASGRVNEQFF

SEQ ID NO: 671759 - protein, 17 aa, Homo sapiens
  CDR3 for alpha chain variable domain of TCR clone 335880 (TRAV9-2, TRAJ45)
CALSGYYSGGGADGLTF

SEQ ID NO: 671760 - protein, 17 aa, Homo sapiens
  CDR3 for beta chain variable domain of TCR clone 335880 (TRBV28, TRBJ2-5)
CASSTPEGDALQETQYF

SEQ ID NO: 671761 - protein, 12 aa, Homo sapiens
  CDR3 for alpha chain variable domain of TCR clone 335881 (TRAV12-3, TRAJ17)
CAMTLTGNKLTF

SEQ ID NO: 671762 - protein, 15 aa, Homo sapiens
  CDR3 for beta chain variable domain of TCR clone 335881 (TRBV5-7, TRBJ1-5)
CASSYGKLWDQTQHF

SEQ ID NO: 671763 - protein, 12 aa, Homo sapiens
  CDR3 for alpha chain variable domain of TCR clone 335882 (TRAV27, TRAJ33)
CAGDGSNYQLIW

SEQ ID NO: 671764 - protein, 13 aa, Homo sapiens
  CDR3 for beta chain variable domain of TCR clone 335882 (TRBV15, TRBJ1-6)
CATSGGLDSPLHF

SEQ ID NO: 671765 - protein, 16 aa, Homo sapiens
  CDR3 for alpha chain variable domain of TCR clone 335883 (TRAV3, TRAJ37)
CAVRGKGSGNTGNIIF

SEQ ID NO: 671766 - protein, 13 aa, Homo sapiens
  CDR3 for beta chain variable domain of TCR clone 335883 (TRBV7-2, TRBJ2-2)
CASSSVRAGELFF

SEQ ID NO: 671767 - protein, 13 aa, Homo sapiens
  CDR3 for alpha chain variable domain of TCR clone 335884 (TRAV27, TRAJ3)
ASLRGSSASKIIF

SEQ ID NO: 671768 - protein, 17 aa, Homo sapiens
  CDR3 for beta chain variable domain of TCR clone 335884 (TRBV28, TRBJ1-3)
CASSMAGPLETPYILER

SEQ ID NO: 671769 - protein, 15 aa, Homo sapiens
  CDR3 for alpha chain variable domain of TCR clone 335885 (TRAV12-3, TRAJ52)
CNGGAGGTSYGKLTF

SEQ ID NO: 671770 - protein, 12 aa, Homo sapiens
  CDR3 for beta chain variable domain of TCR clone 335885 (TRBV12-5, TRBJ2-5)
CASGQGVETQYF

SEQ ID NO: 671771 - protein, 12 aa, Homo sapiens
  CDR3 for alpha chain variable domain of TCR clone 335886 (TRAV17, TRAJ49)
CATVTTGNQFYF

SEQ ID NO: 671772 - protein, 16 aa, Homo sapiens
  CDR3 for beta chain variable domain of TCR clone 335886 (TRBV7-3, TRBJ2-2)
CASSLKRGTLSEELFF

SEQ ID NO: 671773 - protein, 13 aa, Homo sapiens
  CDR3 for alpha chain variable domain of TCR clone 335887 (TRAV8-6, TRAJ21)
CAVSPSSPNKSYF

SEQ ID NO: 671774 - protein, 14 aa, Homo sapiens
  CDR3 for beta chain variable domain of TCR clone 335887 (TRBV7-9, TRBJ2-5)
CASSLDTAQETQYF

SEQ ID NO: 671775 - protein, 11 aa, Homo sapiens
  CDR3 for alpha chain variable domain of TCR clone 335888 (TRAV21, TRAJ39)
LLVNAGNVLTF

SEQ ID NO: 671776 - protein, 13 aa, Homo sapiens
  CDR3 for beta chain variable domain of TCR clone 335888 (TRBV12-5, TRBJ2-3)
CASGDRQSDTQYF

SEQ ID NO: 671777 - protein, 14 aa, Homo sapiens
  CDR3 for alpha chain variable domain of TCR clone 335889 (TRAV20, TRAJ42)
CSVQAGGSQGNPIF

SEQ ID NO: 671778 - protein, 14 aa, Homo sapiens
  CDR3 for beta chain variable domain of TCR clone 335889 (TRBV28, TRBJ1-2)
CASRIQGANYGYTF

SEQ ID NO: 671779 - protein, 13 aa, Homo sapiens
  CDR3 for alpha chain variable domain of TCR clone 335890 (TRAV13-1, TRAJ11)
CAASKEGYSTLTF

SEQ ID NO: 671780 - protein, 21 aa, Homo sapiens
  CDR3 for beta chain variable domain of TCR clone 335890 (TRBV23-1, TRBJ2-5)
CARPPPGQGPGGDPVLRARHA

SEQ ID NO: 671781 - protein, 14 aa, Homo sapiens
  CDR3 for alpha chain variable domain of TCR clone 335891 (TRAV16, TRAJ39)
CSLSKNNAGNMLTF

SEQ ID NO: 671782 - protein, 16 aa, Homo sapiens
  CDR3 for beta chain variable domain of TCR clone 335891 (TRBV6-6, TRBJ2-1)
CASSYSFSGSYNEQFF

SEQ ID NO: 671783 - protein, 11 aa, Homo sapiens
  CDR3 for alpha chain variable domain of TCR clone 335892 (TRAV12-3, TRAJ43)
CAVSVSNDMRF

SEQ ID NO: 671784 - protein, 14 aa, Homo sapiens
  CDR3 for beta chain variable domain of TCR clone 335892 (TRBV7-2, TRBJ2-7)
CASRSQGAAYEQYF

SEQ ID NO: 671785 - protein, 16 aa, Homo sapiens
  CDR3 for alpha chain variable domain of TCR clone 335893 (TRAV38-2/DV8, TRAJ45)
CAYRGNSGGGADGLTF

SEQ ID NO: 671786 - protein, 14 aa, Homo sapiens
  CDR3 for beta chain variable domain of TCR clone 335893 (TRBV7-2, TRBJ2-7)
CASRSQGAAYEQYF

SEQ ID NO: 671787 - protein, 13 aa, Homo sapiens
  CDR3 for alpha chain variable domain of TCR clone 335894 (TRAV29/DV5, TRAJ47)
CAASEEYGNKLVF

SEQ ID NO: 671788 - protein, 13 aa, Homo sapiens
  CDR3 for beta chain variable domain of TCR clone 335894 (TRBV4-1, TRBJ2-2)
CASSQENTGELFF

SEQ ID NO: 671789 - protein, 14 aa, Homo sapiens
  CDR3 for alpha chain variable domain of TCR clone 335895 (TRAV2, TRAJ22)
CAVGRGGSARQLTF

SEQ ID NO: 671790 - protein, 12 aa, Homo sapiens
  CDR3 for beta chain variable domain of TCR clone 335895 (TRBV19, TRBJ2-1)
RASSMQNTEQFF

SEQ ID NO: 671791 - protein, 17 aa, Homo sapiens
  CDR3 for alpha chain variable domain of TCR clone 335896 (TRAV26-1, TRAJ28)
CVVRALYSGAGSYQLTF

SEQ ID NO: 671792 - protein, 12 aa, Homo sapiens
  CDR3 for beta chain variable domain of TCR clone 335896 (TRBV12-4, TRBJ2-1)
CASRQTENEQFF

SEQ ID NO: 671793 - protein, 11 aa, Homo sapiens
  CDR3 for alpha chain variable domain of TCR clone 335897 (TRAV23/DV6, TRAJ58)
CAARLLRGETS

SEQ ID NO: 671794 - protein, 14 aa, Homo sapiens
  CDR3 for beta chain variable domain of TCR clone 335897 (TRBV3-1, TRBJ2-2)
CASSLPDNTGELFF

SEQ ID NO: 671795 - protein, 15 aa, Homo sapiens
  CDR3 for alpha chain variable domain of TCR clone 335898 (TRAV29/DV5, TRAJ57)
CAASERSSGNTPLVF

SEQ ID NO: 671796 - protein, 17 aa, Homo sapiens
  CDR3 for beta chain variable domain of TCR clone 335898 (TRBV4-1, TRBJ1-4)
CASSQEGPRGVEEKLFF

SEQ ID NO: 671797 - protein, 11 aa, Homo sapiens
  CDR3 for alpha chain variable domain of TCR clone 335899 (TRAV12-3, TRAJ43)
CAMGVSNDMRF

SEQ ID NO: 671798 - protein, 16 aa, Homo sapiens
  CDR3 for beta chain variable domain of TCR clone 335899 (TRBV20-1, TRBJ2-1)
CSARDSLGAVYNEQFF

SEQ ID NO: 671799 - protein, 14 aa, Homo sapiens
  CDR3 for alpha chain variable domain of TCR clone 335900 (TRAV13-1, TRAJ4)
CAATLHSGYNKLIF

SEQ ID NO: 671800 - protein, 14 aa, Homo sapiens
  CDR3 for beta chain variable domain of TCR clone 335900 (TRBV19, TRBJ2-1)
CASPTFVLSGEQFF

SEQ ID NO: 671801 - protein, 15 aa, Homo sapiens
  CDR3 for alpha chain variable domain of TCR clone 335901 (TRAV12-2, TRAJ57)
CSVGRGQGGSEKLVF

SEQ ID NO: 671802 - protein, 14 aa, Homo sapiens
  CDR3 for beta chain variable domain of TCR clone 335901 (TRBV20-1, TRBJ2-1)
CSAHPGLPYNEQFF

SEQ ID NO: 671803 - protein, 16 aa, Homo sapiens
  CDR3 for alpha chain variable domain of TCR clone 335902 (TRAV3, TRAJ10)
CAVRAMNAGGGNKLTF

SEQ ID NO: 671804 - protein, 16 aa, Homo sapiens
  CDR3 for beta chain variable domain of TCR clone 335902 (TRBV6-3, TRBJ1-2)
CASSYSRRASNYGYTF

SEQ ID NO: 671805 - protein, 15 aa, Homo sapiens
  CDR3 for alpha chain variable domain of TCR clone 335903 (TRAV25, TRAJ53)
CPTSNSGGSNYKLTF

SEQ ID NO: 671806 - protein, 12 aa, Homo sapiens
  CDR3 for beta chain variable domain of TCR clone 335903 (TRBV12-4, TRBJ2-7)
CASSLGGHEQYF

SEQ ID NO: 671807 - protein, 14 aa, Homo sapiens
  CDR3 for alpha chain variable domain of TCR clone 335904 (TRAV35, TRAJ42)
CAGRYGGSQGNLIF

SEQ ID NO: 671808 - protein, 15 aa, Homo sapiens
  CDR3 for beta chain variable domain of TCR clone 335904 (TRBV7-9, TRBJ2-1)
CASSLGWGKANEQFF

SEQ ID NO: 671809 - protein, 13 aa, Homo sapiens
  CDR3 for alpha chain variable domain of TCR clone 335905 (TRAV12-1, TRAJ6)
CVVYPGGSYIPTF

SEQ ID NO: 671810 - protein, 14 aa, Homo sapiens
  CDR3 for beta chain variable domain of TCR clone 335905 (TRBV19, TRBJ2-1)
CASPTFVLSGEQFF

SEQ ID NO: 671811 - protein, 16 aa, Homo sapiens
  CDR3 for alpha chain variable domain of TCR clone 335906 (TRAV12-1, TRAJ48)
CVVNMVSNFGNEKLTF

SEQ ID NO: 671812 - protein, 18 aa, Homo sapiens
  CDR3 for beta chain variable domain of TCR clone 335906 (TRBV11-2, TRBJ2-6)
CASSLNPFLGTGANALTF

SEQ ID NO: 671813 - protein, 15 aa, Homo sapiens
  CDR3 for alpha chain variable domain of TCR clone 335907 (TRAV3, TRAJ22)
CAVRDRGGSARQLSF

SEQ ID NO: 671814 - protein, 14 aa, Homo sapiens
  CDR3 for beta chain variable domain of TCR clone 335907 (TRBV20-1, TRBJ2-5)
CSALVPGYQETQYF

SEQ ID NO: 671815 - protein, 14 aa, Homo sapiens
  CDR3 for alpha chain variable domain of TCR clone 335908 (TRAV17, TRAJ39)
CATDPVRAGNMLTF

SEQ ID NO: 671816 - protein, 18 aa, Homo sapiens
  CDR3 for beta chain variable domain of TCR clone 335908 (TRBV12-4, TRBJ2-2)
CASSLVAGTRGRTGELFF

SEQ ID NO: 671817 - protein, 13 aa, Homo sapiens
  CDR3 for alpha chain variable domain of TCR clone 335909 (TRAV13-1, TRAJ28)
CAANEAGSYQLTF

SEQ ID NO: 671818 - protein, 12 aa, Homo sapiens
  CDR3 for beta chain variable domain of TCR clone 335909 (TRBV6-3, TRBJ2-7)
CASSLTPYEQYF

SEQ ID NO: 671819 - protein, 16 aa, Homo sapiens
  CDR3 for alpha chain variable domain of TCR clone 335910 (TRAV30, TRAJ24)
CGTEIVDADSWGKFQF

SEQ ID NO: 671820 - protein, 16 aa, Homo sapiens
  CDR3 for beta chain variable domain of TCR clone 335910 (TRBV7-8, TRBJ2-2)
CASSLARTGVTGELFF

SEQ ID NO: 671821 - protein, 14 aa, Homo sapiens
  CDR3 for alpha chain variable domain of TCR clone 335911 (TRAV30, TRAJ33)
CGTVAPCSNYQLIW

SEQ ID NO: 671822 - protein, 14 aa, Homo sapiens
  CDR3 for beta chain variable domain of TCR clone 335911 (TRBV19, TRBJ2-1)
CASPTFVLSGEQFF

SEQ ID NO: 671823 - protein, 10 aa, Homo sapiens
  CDR3 for alpha chain variable domain of TCR clone 335912 (TRAV8-4, TRAJ43)
CAVSADDMRF

SEQ ID NO: 671824 - protein, 17 aa, Homo sapiens
  CDR3 for beta chain variable domain of TCR clone 335912 (TRBV28, TRBJ2-7)
CASSQLGAGATSSTSGR

SEQ ID NO: 671825 - protein, 17 aa, Homo sapiens
  CDR3 for alpha chain variable domain of TCR clone 335913 (TRAV29/DV5, TRAJ45)
CAASLMYSGGGADGLTF

SEQ ID NO: 671826 - protein, 11 aa, Homo sapiens
  CDR3 for beta chain variable domain of TCR clone 335913 (TRBV19, TRBJ1-1)
CASSIGSEAFF

SEQ ID NO: 671827 - protein, 17 aa, Homo sapiens
  CDR3 for alpha chain variable domain of TCR clone 335914 (TRAV36/DV7, TRAJ52)
CAVAQRAGGTSSGKLTF

SEQ ID NO: 671828 - protein, 14 aa, Homo sapiens
  CDR3 for beta chain variable domain of TCR clone 335914 (TRBV19, TRBJ2-1)
CASPTFVLSGEQFF

SEQ ID NO: 671829 - protein, 15 aa, Homo sapiens
  CDR3 for alpha chain variable domain of TCR clone 335915 (TRAV2, TRAJ9)
CAMEDRGTGGFKTIF

SEQ ID NO: 671830 - protein, 13 aa, Homo sapiens
  CDR3 for beta chain variable domain of TCR clone 335915 (TRBV19, TRBJ1-2)
CASSVPGQDGYTF

SEQ ID NO: 671831 - protein, 15 aa, Homo sapiens
  CDR3 for alpha chain variable domain of TCR clone 335916 (TRAV2, TRAJ9)
CAVEDRGTGGFKTIF

SEQ ID NO: 671832 - protein, 12 aa, Homo sapiens
  CDR3 for beta chain variable domain of TCR clone 335916 (TRBV7-2, TRBJ1-5)
CASSLWSQPQHF

SEQ ID NO: 671833 - protein, 11 aa, Homo sapiens
  CDR3 for alpha chain variable domain of TCR clone 335917 (TRAV12-2, TRAJ39)
CAVNNMLTFGG

SEQ ID NO: 671834 - protein, 16 aa, Homo sapiens
  CDR3 for beta chain variable domain of TCR clone 335917 (TRBV5-3, TRBJ2-2)
CARSFGTGTNTGELLF

SEQ ID NO: 671835 - protein, 12 aa, Homo sapiens
  CDR3 for alpha chain variable domain of TCR clone 335918 (TRAV23/DV6, TRAJ30)
CAASKGDDKIIF

SEQ ID NO: 671836 - protein, 18 aa, Homo sapiens
  CDR3 for beta chain variable domain of TCR clone 335918 (TRBV10-3, TRBJ2-3)
FAISESRVGPMRGDTQYF

SEQ ID NO: 671837 - protein, 16 aa, Homo sapiens
  CDR3 for alpha chain variable domain of TCR clone 335919 (TRAV30, TRAJ24)
CGTEIVDADSWGKFQF

SEQ ID NO: 671838 - protein, 15 aa, Homo sapiens
  CDR3 for beta chain variable domain of TCR clone 335919 (TRBV6-3, TRBJ2-4)
CASSYVPGTGAPQYF

SEQ ID NO: 671839 - protein, 14 aa, Homo sapiens
  CDR3 for alpha chain variable domain of TCR clone 335920 (TRAV12-2, TRAJ40)
CAVKIPSGTYKYIF

SEQ ID NO: 671840 - protein, 17 aa, Homo sapiens
  CDR3 for beta chain variable domain of TCR clone 335920 (TRBV20-1, TRBJ2-1)
CSAFSVTSGSLYNEQFF

SEQ ID NO: 671841 - protein, 11 aa, Homo sapiens
  CDR3 for alpha chain variable domain of TCR clone 335921 (TRAV12-3, TRAJ43)
CAMSVSNDMGF

SEQ ID NO: 671842 - protein, 13 aa, Homo sapiens
  CDR3 for beta chain variable domain of TCR clone 335921 (TRBV20-1, TRBJ1-1)
CSAPLGGGTEAFF

SEQ ID NO: 671843 - protein, 19 aa, Homo sapiens
  CDR3 for alpha chain variable domain of TCR clone 335922 (TRAV17, TRAJ9)
CGFTEASKLSLEQEQDYLL

SEQ ID NO: 671844 - protein, 14 aa, Homo sapiens
  CDR3 for beta chain variable domain of TCR clone 335922 (TRBV7-9, TRBJ2-2)
CASSLVQDTGELFF

SEQ ID NO: 671845 - protein, 16 aa, Homo sapiens
  CDR3 for alpha chain variable domain of TCR clone 335923 (TRAV30, TRAJ24)
CGTETVDADSWGKFQF

SEQ ID NO: 671846 - protein, 14 aa, Homo sapiens
  CDR3 for beta chain variable domain of TCR clone 335923 (TRBV12-5, TRBJ2-5)
CASCSRTHQETQYF

SEQ ID NO: 671847 - protein, 13 aa, Homo sapiens
  CDR3 for alpha chain variable domain of TCR clone 335924 (TRAV3, TRAJ27)
YAVTNTNAGKSTF

SEQ ID NO: 671848 - protein, 16 aa, Homo sapiens
  CDR3 for beta chain variable domain of TCR clone 335924 (TRBV7-9, TRBJ1-2)
CASSLGFSSGEDGYTF

SEQ ID NO: 671849 - protein, 16 aa, Homo sapiens
  CDR3 for alpha chain variable domain of TCR clone 335925 (TRAV16, TRAJ4)
CALSRMFSGGYNKPIF

SEQ ID NO: 671850 - protein, 14 aa, Homo sapiens
  CDR3 for beta chain variable domain of TCR clone 335925 (TRBV4-1, TRBJ2-2)
CASSQAVNTGELFF

SEQ ID NO: 671851 - protein, 13 aa, Homo sapiens
  CDR3 for alpha chain variable domain of TCR clone 335926 (TRAV1-2, TRAJ9)
CAALNTGGFKTIF

SEQ ID NO: 671852 - protein, 15 aa, Homo sapiens
  CDR3 for beta chain variable domain of TCR clone 335926 (TRBV5-1, TRBJ2-1)
CASSPPRAPYNEQFF

SEQ ID NO: 671853 - protein, 14 aa, Homo sapiens
  CDR3 for alpha chain variable domain of TCR clone 335927 (TRAV13-1, TRAJ8)
CAASEDTGFQTLVF

SEQ ID NO: 671854 - protein, 13 aa, Homo sapiens
  CDR3 for beta chain variable domain of TCR clone 335927 (TRBV19, TRBJ1-5)
CASSTRRDQPQHF

SEQ ID NO: 671855 - protein, 16 aa, Homo sapiens
  CDR3 for alpha chain variable domain of TCR clone 335928 (TRAV2, TRAJ4)
CAVEDRVSVGYNKLMF

SEQ ID NO: 671856 - protein, 13 aa, Homo sapiens
  CDR3 for beta chain variable domain of TCR clone 335928 (TRBV7-7, TRBJ2-5)
CASSRSGQETQYF

SEQ ID NO: 671857 - protein, 13 aa, Homo sapiens
  CDR3 for alpha chain variable domain of TCR clone 335929 (TRAV1-2, TRAJ9)
CAALNTGGFKTIF

SEQ ID NO: 671858 - protein, 15 aa, Homo sapiens
  CDR3 for beta chain variable domain of TCR clone 335929 (TRBV11-3, TRBJ2-7)
CASSPRDRNPYEQYF

SEQ ID NO: 671859 - protein, 11 aa, Homo sapiens
  CDR3 for alpha chain variable domain of TCR clone 335930 (TRAV4, TRAJ31)
CLVGDNARLMF

SEQ ID NO: 671860 - protein, 16 aa, Homo sapiens
  CDR3 for beta chain variable domain of TCR clone 335930 (TRBV7-2, TRBJ2-5)
CASSSKWLSDQETQYF

SEQ ID NO: 671861 - protein, 20 aa, Homo sapiens
  CDR3 for alpha chain variable domain of TCR clone 335931 (TRAV12-1, TRAJ42)
SSVIQPPTSVKGGSQGNLIF

SEQ ID NO: 671862 - protein, 14 aa, Homo sapiens
  CDR3 for beta chain variable domain of TCR clone 335931 (TRBV13, TRBJ2-5)
CASSLGPRGETQYF

SEQ ID NO: 671863 - protein, 13 aa, Homo sapiens
  CDR3 for alpha chain variable domain of TCR clone 335932 (TRAV8-6, TRAJ34)
CAVSDQGTDKLIF

SEQ ID NO: 671864 - protein, 14 aa, Homo sapiens
  CDR3 for beta chain variable domain of TCR clone 335932 (TRBV7-2, TRBJ2-2)
CASRGQGAAGELFF

SEQ ID NO: 671865 - protein, 13 aa, Homo sapiens
  CDR3 for alpha chain variable domain of TCR clone 335933 (TRAV1-2, TRAJ9)
CAALNTGGFNTIF

SEQ ID NO: 671866 - protein, 13 aa, Homo sapiens
  CDR3 for beta chain variable domain of TCR clone 335933 (TRBV19, TRBJ1-2)
CASCVPGQDGYTF

SEQ ID NO: 671867 - protein, 13 aa, Homo sapiens
  CDR3 for alpha chain variable domain of TCR clone 335934 (TRAV1-2, TRAJ9)
CAALHTGGFKTIF

SEQ ID NO: 671868 - protein, 12 aa, Homo sapiens
  CDR3 for beta chain variable domain of TCR clone 335934 (TRBV11-3, TRBJ1-1)
CASSHRQGEAFF

SEQ ID NO: 671869 - protein, 15 aa, Homo sapiens
  CDR3 for alpha chain variable domain of TCR clone 335935 (TRAV23/DV6, TRAJ13)
CAAWPGGGGYQKVTF

SEQ ID NO: 671870 - protein, 17 aa, Homo sapiens
  CDR3 for beta chain variable domain of TCR clone 335935 (TRBV19, TRBJ2-7)
CASSISFYNSYPYEQYF

SEQ ID NO: 671871 - protein, 15 aa, Homo sapiens
  CDR3 for alpha chain variable domain of TCR clone 335936 (TRAV3, TRAJ22)
FAVRDRGGSARQLTF

SEQ ID NO: 671872 - protein, 16 aa, Homo sapiens
  CDR3 for beta chain variable domain of TCR clone 335936 (TRBV11-2, TRBJ2-1)
CASALGSYSHHNEQFF

SEQ ID NO: 671873 - protein, 13 aa, Homo sapiens
  CDR3 for alpha chain variable domain of TCR clone 335937 (TRAV29/DV5, TRAJ31)
CAASRNNNARLMF

SEQ ID NO: 671874 - protein, 15 aa, Homo sapiens
  CDR3 for beta chain variable domain of TCR clone 335937 (TRBV7-2, TRBJ2-4)
GASSRGHATFSTSAP

SEQ ID NO: 671875 - protein, 13 aa, Homo sapiens
  CDR3 for alpha chain variable domain of TCR clone 335938 (TRAV2, TRAJ40)
CAVVTSGTYKYIF

SEQ ID NO: 671876 - protein, 20 aa, Homo sapiens
  CDR3 for beta chain variable domain of TCR clone 335938 (TRBV6-4, TRBJ2-7)
CASSDSSVSGQVPTSYEQYF

SEQ ID NO: 671877 - protein, 17 aa, Homo sapiens
  CDR3 for alpha chain variable domain of TCR clone 335939 (TRAV3, TRAJ12)
CAVRDGGRMDCSYKLIF

SEQ ID NO: 671878 - protein, 16 aa, Homo sapiens
  CDR3 for beta chain variable domain of TCR clone 335939 (TRBV9, TRBJ2-2)
CASSAMGKGNTGELFF

SEQ ID NO: 671879 - protein, 13 aa, Homo sapiens
  CDR3 for alpha chain variable domain of TCR clone 335940 (TRAV27, TRAJ42)
CAGARGSPGNLIF

SEQ ID NO: 671880 - protein, 16 aa, Homo sapiens
  CDR3 for beta chain variable domain of TCR clone 335940 (TRBV10-3, TRBJ2-6)
CAISTSGDLGANVLTF

SEQ ID NO: 671881 - protein, 13 aa, Homo sapiens
  CDR3 for alpha chain variable domain of TCR clone 335941 (TRAV1-1, TRAJ9)
CAAKNTGGFKTIF

SEQ ID NO: 671882 - protein, 13 aa, Homo sapiens
  CDR3 for beta chain variable domain of TCR clone 335941 (TRBV7-6, TRBJ1-2)
CQQQVDRDYGYTF

SEQ ID NO: 671883 - protein, 14 aa, Homo sapiens
  CDR3 for alpha chain variable domain of TCR clone 335942 (TRAV13-1, TRAJ35)
CAASKGGFGNVLHC

SEQ ID NO: 671884 - protein, 15 aa, Homo sapiens
  CDR3 for beta chain variable domain of TCR clone 335942 (TRBV7-9, TRBJ1-6)
CASSSPGRGNSPLDF

SEQ ID NO: 671885 - protein, 16 aa, Homo sapiens
  CDR3 for alpha chain variable domain of TCR clone 335943 (TRAV12-3, TRAJ53)
CAMSPGSGGSNYKLTF

SEQ ID NO: 671886 - protein, 14 aa, Homo sapiens
  CDR3 for beta chain variable domain of TCR clone 335943 (TRBV4-2, TRBJ2-1)
CASVLDRAYNEQFF

SEQ ID NO: 671887 - protein, 11 aa, Homo sapiens
  CDR3 for alpha chain variable domain of TCR clone 335944 (TRAV1-2, TRAJ40)
CSVPGTYKYIF

SEQ ID NO: 671888 - protein, 13 aa, Homo sapiens
  CDR3 for beta chain variable domain of TCR clone 335944 (TRBV27, TRBJ1-4)
CASSLMGDEKLFF

SEQ ID NO: 671889 - protein, 13 aa, Homo sapiens
  CDR3 for alpha chain variable domain of TCR clone 335945 (TRAV21, TRAJ23)
CAVVANQGGKLIF

SEQ ID NO: 671890 - protein, 16 aa, Homo sapiens
  CDR3 for beta chain variable domain of TCR clone 335945 (TRBV5-5, TRBJ1-2)
CASSPTWGRGFYGYTF

SEQ ID NO: 671891 - protein, 14 aa, Homo sapiens
  CDR3 for alpha chain variable domain of TCR clone 335946 (TRAV16, TRAJ17)
CTPRIKAAGNKLTF

SEQ ID NO: 671892 - protein, 17 aa, Homo sapiens
  CDR3 for beta chain variable domain of TCR clone 335946 (TRBV7-2, TRBJ2-3)
CASSSYSGTRRADTQYF

SEQ ID NO: 671893 - protein, 13 aa, Homo sapiens
  CDR3 for alpha chain variable domain of TCR clone 335947 (TRAV12-2, TRAJ52)
CAVSGTSYGQLTF

SEQ ID NO: 671894 - protein, 17 aa, Homo sapiens
  CDR3 for beta chain variable domain of TCR clone 335947 (TRBV11-2, TRBJ2-1)
CASSLYPPGVEYNEQFF

SEQ ID NO: 671895 - protein, 14 aa, Homo sapiens
  CDR3 for alpha chain variable domain of TCR clone 335948 (TRAV13-1, TRAJ35)
CAASKGGFGNVLHC

SEQ ID NO: 671896 - protein, 16 aa, Homo sapiens
  CDR3 for beta chain variable domain of TCR clone 335948 (TRBV3-1, TRBJ2-5)
CASSPGQFNGFGTQYF

SEQ ID NO: 671897 - protein, 12 aa, Homo sapiens
  CDR3 for alpha chain variable domain of TCR clone 335949 (TRAV13-2, TRAJ8)
CAPWLGFQKLVF

SEQ ID NO: 671898 - protein, 13 aa, Homo sapiens
  CDR3 for beta chain variable domain of TCR clone 335949 (TRBV12-4, TRBJ1-5)
CASSPDRAQPQYF

SEQ ID NO: 671899 - protein, 23 aa, Homo sapiens
  CDR3 for alpha chain variable domain of TCR clone 335950 (TRAV26-1, TRAJ38)
CIADNAGNNHIQNPAPAVYQLRD

SEQ ID NO: 671900 - protein, 13 aa, Homo sapiens
  CDR3 for beta chain variable domain of TCR clone 335950 (TRBV5-4, TRBJ1-1)
CASSVDLGTEAFF

SEQ ID NO: 671901 - protein, 14 aa, Homo sapiens
  CDR3 for alpha chain variable domain of TCR clone 335951 (TRAV13-1, TRAJ24)
CAASRTDSWGKLQF

SEQ ID NO: 671902 - protein, 14 aa, Homo sapiens
  CDR3 for beta chain variable domain of TCR clone 335951 (TRBV7-3, TRBJ2-1)
CASSTSGGWDEQFF

SEQ ID NO: 671903 - protein, 13 aa, Homo sapiens
  CDR3 for alpha chain variable domain of TCR clone 335952 (TRAV13-1, TRAJ20)
CAARVSNDYKLSF

SEQ ID NO: 671904 - protein, 14 aa, Homo sapiens
  CDR3 for beta chain variable domain of TCR clone 335952 (TRBV7-9, TRBJ2-2)
CASSLVQDTGELFF

SEQ ID NO: 671905 - protein, 16 aa, Homo sapiens
  CDR3 for alpha chain variable domain of TCR clone 335953 (TRAV3, TRAJ10)
CAVRDMWAGGGNKLTF

SEQ ID NO: 671906 - protein, 14 aa, Homo sapiens
  CDR3 for beta chain variable domain of TCR clone 335953 (TRBV25-1, TRBJ1-1)
CASTHLGGNTEAFF

SEQ ID NO: 671907 - protein, 15 aa, Homo sapiens
  CDR3 for alpha chain variable domain of TCR clone 335954 (TRAV26-1, TRAJ29)
CIVRVAGSGNPPLVF

SEQ ID NO: 671908 - protein, 15 aa, Homo sapiens
  CDR3 for beta chain variable domain of TCR clone 335954 (TRBV7-9, TRBJ1-5)
CASSQGHQPNQPQHF

SEQ ID NO: 671909 - protein, 17 aa, Homo sapiens
  CDR3 for alpha chain variable domain of TCR clone 335955 (TRAV26-1, TRAJ28)
CIVRVPDSGAGSYQLTF

SEQ ID NO: 671910 - protein, 17 aa, Homo sapiens
  CDR3 for beta chain variable domain of TCR clone 335955 (TRBV28, TRBJ2-7)
CASSPVPAGGKSYEQYF

SEQ ID NO: 671911 - protein, 12 aa, Homo sapiens
  CDR3 for alpha chain variable domain of TCR clone 335956 (TRAV12-3, TRAJ17)
CAMTLTGNKLTF

SEQ ID NO: 671912 - protein, 14 aa, Homo sapiens
  CDR3 for beta chain variable domain of TCR clone 335956 (TRBV11-2, TRBJ2-7)
CASSPSTTSYEQYF

SEQ ID NO: 671913 - protein, 14 aa, Homo sapiens
  CDR3 for alpha chain variable domain of TCR clone 335957 (TRAV1-2, TRAJ8)
CAVREDTGFQKLVF

SEQ ID NO: 671914 - protein, 15 aa, Homo sapiens
  CDR3 for beta chain variable domain of TCR clone 335957 (TRBV7-2, TRBJ2-3)
CASTPTSGETDTQYF

SEQ ID NO: 671915 - protein, 15 aa, Homo sapiens
  CDR3 for alpha chain variable domain of TCR clone 335958 (TRAV13-1, TRAJ17)
CAASIERAAGNKLTF

SEQ ID NO: 671916 - protein, 14 aa, Homo sapiens
  CDR3 for beta chain variable domain of TCR clone 335958 (TRBV7-3, TRBJ1-1)
CASSLGTGYTEAFF

SEQ ID NO: 671917 - protein, 18 aa, Homo sapiens
  CDR3 for alpha chain variable domain of TCR clone 335959 (TRAV26-1, TRAJ39)
CCVLLHRLHNNAGNMLTF

SEQ ID NO: 671918 - protein, 15 aa, Homo sapiens
  CDR3 for beta chain variable domain of TCR clone 335959 (TRBV19, TRBJ2-4)
CASSLTGLTKNIQYF

SEQ ID NO: 671919 - protein, 10 aa, Homo sapiens
  CDR3 for alpha chain variable domain of TCR clone 335960 (TRAV12-2, TRAJ27)
CGANAGKSTF

SEQ ID NO: 671920 - protein, 14 aa, Homo sapiens
  CDR3 for beta chain variable domain of TCR clone 335960 (TRBV19, TRBJ2-1)
CASPTFVLSGEQFF

SEQ ID NO: 671921 - protein, 16 aa, Homo sapiens
  CDR3 for alpha chain variable domain of TCR clone 335961 (TRAV8-4, TRAJ52)
CAVSDPGGTSYGKLTF

SEQ ID NO: 671922 - protein, 15 aa, Homo sapiens
  CDR3 for beta chain variable domain of TCR clone 335961 (TRBV12-4, TRBJ2-5)
CASSPPTGLQETQYF

SEQ ID NO: 671923 - protein, 14 aa, Homo sapiens
  CDR3 for alpha chain variable domain of TCR clone 335962 (TRAV17, TRAJ16)
YATADFSDGQKLLF

SEQ ID NO: 671924 - protein, 12 aa, Homo sapiens
  CDR3 for beta chain variable domain of TCR clone 335962 (TRBV24-1, TRBJ1-1)
CATLYPDTEAFF

SEQ ID NO: 671925 - protein, 14 aa, Homo sapiens
  CDR3 for alpha chain variable domain of TCR clone 335963 (TRAV3, TRAJ33)
CAVRDMDSIYQLIW

SEQ ID NO: 671926 - protein, 19 aa, Homo sapiens
  CDR3 for beta chain variable domain of TCR clone 335963 (TRBV7-3, TRBJ1-2)
CASSFPQGNDGELWLHLRF

SEQ ID NO: 671927 - protein, 14 aa, Homo sapiens
  CDR3 for alpha chain variable domain of TCR clone 335964 (TRAV12-3, TRAJ10)
SHLRLTGGGNKLTF

SEQ ID NO: 671928 - protein, 12 aa, Homo sapiens
  CDR3 for beta chain variable domain of TCR clone 335964 (TRBV7-9, TRBJ2-7)
CASSIKREEQYF

SEQ ID NO: 671929 - protein, 15 aa, Homo sapiens
  CDR3 for alpha chain variable domain of TCR clone 335965 (TRAV29/DV5, TRAJ29)
CAARERSSGNTPLVF

SEQ ID NO: 671930 - protein, 17 aa, Homo sapiens
  CDR3 for beta chain variable domain of TCR clone 335965 (TRBV4-1, TRBJ1-4)
CASSQEGPRGVEEKLFF

SEQ ID NO: 671931 - protein, 13 aa, Homo sapiens
  CDR3 for alpha chain variable domain of TCR clone 335966 (TRAV1-1, TRAJ9)
CAAKNTGGFKTIF

SEQ ID NO: 671932 - protein, 14 aa, Homo sapiens
  CDR3 for beta chain variable domain of TCR clone 335966 (TRBV20-1, TRBJ2-1)
CSAQIGESANEQFF

SEQ ID NO: 671933 - protein, 13 aa, Homo sapiens
  CDR3 for alpha chain variable domain of TCR clone 335967 (TRAV26-1, TRAJ40)
CIVRVEGTYKYIF

SEQ ID NO: 671934 - protein, 15 aa, Homo sapiens
  CDR3 for beta chain variable domain of TCR clone 335967 (TRBV12-4, TRBJ1-2)
CASSLANRDGQAYTF

SEQ ID NO: 671935 - protein, 12 aa, Homo sapiens
  CDR3 for alpha chain variable domain of TCR clone 335968 (TRAV25, TRAJ11)
CAGASGYSTLTF

SEQ ID NO: 671936 - protein, 16 aa, Homo sapiens
  CDR3 for beta chain variable domain of TCR clone 335968 (TRBV7-2, TRBJ2-1)
CASSLGRTSGDNEQFF

SEQ ID NO: 671937 - protein, 18 aa, Homo sapiens
  CDR3 for alpha chain variable domain of TCR clone 335969 (TRAV26-1, TRAJ5)
CIVRVVPPRDTGRRALTF

SEQ ID NO: 671938 - protein, 15 aa, Homo sapiens
  CDR3 for beta chain variable domain of TCR clone 335969 (TRBV7-9, TRBJ2-7)
CASSLTMGQANEQYF

SEQ ID NO: 671939 - protein, 13 aa, Homo sapiens
  CDR3 for alpha chain variable domain of TCR clone 335970 (TRAV17, TRAJ34)
GATDLYNTDNLIF

SEQ ID NO: 671940 - protein, 15 aa, Homo sapiens
  CDR3 for beta chain variable domain of TCR clone 335970 (TRBV20-1, TRBJ2-3)
CSATGTSGFTDTQYF

SEQ ID NO: 671941 - protein, 15 aa, Homo sapiens
  CDR3 for alpha chain variable domain of TCR clone 335971 (TRAV20, TRAJ10)
CAVQAGTGGGNKLTF

SEQ ID NO: 671942 - protein, 15 aa, Homo sapiens
  CDR3 for beta chain variable domain of TCR clone 335971 (TRBV5-1, TRBJ2-7)
CASSLSGGPAREQYF

SEQ ID NO: 671943 - protein, 11 aa, Homo sapiens
  CDR3 for alpha chain variable domain of TCR clone 335972 (TRAV13-1, TRAJ44)
PQTGTASKLTF

SEQ ID NO: 671944 - protein, 16 aa, Homo sapiens
  CDR3 for beta chain variable domain of TCR clone 335972 (TRBV7-3, TRBJ2-2)
CASSLKRGTLSGELFF

SEQ ID NO: 671945 - protein, 11 aa, Homo sapiens
  CDR3 for alpha chain variable domain of TCR clone 335973 (TRAV12-1, TRAJ15)
CVVNAGTALIL

SEQ ID NO: 671946 - protein, 16 aa, Homo sapiens
  CDR3 for beta chain variable domain of TCR clone 335973 (TRBV28, TRBJ2-1)
CASSSRVRDSYNEQFF

SEQ ID NO: 671947 - protein, 13 aa, Homo sapiens
  CDR3 for alpha chain variable domain of TCR clone 335974 (TRAV8-4, TRAJ42)
CAVKEGSQGNLIF

SEQ ID NO: 671948 - protein, 12 aa, Homo sapiens
  CDR3 for beta chain variable domain of TCR clone 335974 (TRBV11-2, TRBJ2-2)
CASSLPTGELFF

SEQ ID NO: 671949 - protein, 16 aa, Homo sapiens
  CDR3 for alpha chain variable domain of TCR clone 335975 (TRAV30, TRAJ24)
CGTEIVDADSWGKFQL

SEQ ID NO: 671950 - protein, 13 aa, Homo sapiens
  CDR3 for beta chain variable domain of TCR clone 335975 (TRBV10-3, TRBJ2-7)
CASKLAVNYEQYF

SEQ ID NO: 671951 - protein, 13 aa, Homo sapiens
  CDR3 for alpha chain variable domain of TCR clone 335976 (TRAV17, TRAJ29)
CATFGSGNTPLVF

SEQ ID NO: 671952 - protein, 11 aa, Homo sapiens
  CDR3 for beta chain variable domain of TCR clone 335976 (TRBV29-1, TRBJ2-5)
CSEDRTGTQYF

SEQ ID NO: 671953 - protein, 14 aa, Homo sapiens
  CDR3 for alpha chain variable domain of TCR clone 335977 (TRAV23/DV6, TRAJ13)
CAASDSGGYQKVTF

SEQ ID NO: 671954 - protein, 16 aa, Homo sapiens
  CDR3 for beta chain variable domain of TCR clone 335977 (TRBV4-1, TRBJ2-3)
CASSQSTSGAEDTQYF

SEQ ID NO: 671955 - protein, 16 aa, Homo sapiens
  CDR3 for alpha chain variable domain of TCR clone 335978 (TRAV38-1, TRAJ32)
RAFMPFLCVATNKLIF

SEQ ID NO: 671956 - protein, 13 aa, Homo sapiens
  CDR3 for beta chain variable domain of TCR clone 335978 (TRBV7-9, TRBJ2-7)
CASSFAGAYEQYF

SEQ ID NO: 671957 - protein, 14 aa, Homo sapiens
  CDR3 for alpha chain variable domain of TCR clone 335979 (TRAV16, TRAJ17)
CAPRIKAAGNKLTF

SEQ ID NO: 671958 - protein, 15 aa, Homo sapiens
  CDR3 for beta chain variable domain of TCR clone 335979 (TRBV19, TRBJ2-7)
CASSIGGGLVNEQYF

SEQ ID NO: 671959 - protein, 14 aa, Homo sapiens
  CDR3 for alpha chain variable domain of TCR clone 335980 (TRAV8-4, TRAJ5)
CAVSTDTGRRALTF

SEQ ID NO: 671960 - protein, 13 aa, Homo sapiens
  CDR3 for beta chain variable domain of TCR clone 335980 (TRBV4-2, TRBJ1-1)
CASSQAGNTEAFF

SEQ ID NO: 671961 - protein, 15 aa, Homo sapiens
  CDR3 for alpha chain variable domain of TCR clone 335981 (TRAV1-1, TRAJ24)
CALSGGTDSWGKFQS

SEQ ID NO: 671962 - protein, 16 aa, Homo sapiens
  CDR3 for beta chain variable domain of TCR clone 335981 (TRBV2, TRBJ2-7)
CASSEPWTGPSYEQYF

SEQ ID NO: 671963 - protein, 15 aa, Homo sapiens
  CDR3 for alpha chain variable domain of TCR clone 335982 (TRAV16, TRAJ17)
CALSGNKAAGNKLTF

SEQ ID NO: 671964 - protein, 14 aa, Homo sapiens
  CDR3 for beta chain variable domain of TCR clone 335982 (TRBV25-1, TRBJ1-1)
CASTHLGGNTEAFF

SEQ ID NO: 671965 - protein, 16 aa, Homo sapiens
  CDR3 for alpha chain variable domain of TCR clone 335983 (TRAV3, TRAJ10)
CAVRDMGAGGGNKLTF

SEQ ID NO: 671966 - protein, 15 aa, Homo sapiens
  CDR3 for beta chain variable domain of TCR clone 335983 (TRBV15, TRBJ1-5)
CATSTTGVVNQPQHF

SEQ ID NO: 671967 - protein, 14 aa, Homo sapiens
  CDR3 for alpha chain variable domain of TCR clone 335984 (TRAV29/DV5, TRAJ36)
CAARRKTGANTLFF

SEQ ID NO: 671968 - protein, 14 aa, Homo sapiens
  CDR3 for beta chain variable domain of TCR clone 335984 (TRBV12-5, TRBJ2-5)
CASGSRTHQETQHF

SEQ ID NO: 671969 - protein, 14 aa, Homo sapiens
  CDR3 for alpha chain variable domain of TCR clone 335985 (TRAV14/DV4, TRAJ26)
CAMREGTYGQNFVF

SEQ ID NO: 671970 - protein, 15 aa, Homo sapiens
  CDR3 for beta chain variable domain of TCR clone 335985 (TRBV5-1, TRBJ1-1)
CASSLGEGENTEAFF

SEQ ID NO: 671971 - protein, 11 aa, Homo sapiens
  CDR3 for alpha chain variable domain of TCR clone 335986 (TRAV3, TRAJ17)
PRGAAANKLTF

SEQ ID NO: 671972 - protein, 16 aa, Homo sapiens
  CDR3 for beta chain variable domain of TCR clone 335986 (TRBV7-6, TRBJ2-1)
CASSAPGPSSYNEQFF

SEQ ID NO: 671973 - protein, 11 aa, Homo sapiens
  CDR3 for alpha chain variable domain of TCR clone 335987 (TRAV3, TRAJ21)
CAVGNFNKFYF

SEQ ID NO: 671974 - protein, 13 aa, Homo sapiens
  CDR3 for beta chain variable domain of TCR clone 335987 (TRBV7-9, TRBJ2-1)
CASSLDVGNEQFF

SEQ ID NO: 671975 - protein, 13 aa, Homo sapiens
  CDR3 for alpha chain variable domain of TCR clone 335988 (TRAV24, TRAJ44)
CALLTGTTSKLTF

SEQ ID NO: 671976 - protein, 16 aa, Homo sapiens
  CDR3 for beta chain variable domain of TCR clone 335988 (TRBV2, TRBJ2-3)
CASSTSVEGVTDTQYF

SEQ ID NO: 671977 - protein, 15 aa, Homo sapiens
  CDR3 for alpha chain variable domain of TCR clone 335989 (TRAV8-1, TRAJ6)
CAVNAGAGGSYIPTF

SEQ ID NO: 671978 - protein, 14 aa, Homo sapiens
  CDR3 for beta chain variable domain of TCR clone 335989 (TRBV25-1, TRBJ1-6)
CASSLSADISLLHF

SEQ ID NO: 671979 - protein, 17 aa, Homo sapiens
  CDR3 for alpha chain variable domain of TCR clone 335990 (TRAV13-1, TRAJ52)
CAASSGAGGTSYGKLTF

SEQ ID NO: 671980 - protein, 19 aa, Homo sapiens
  CDR3 for beta chain variable domain of TCR clone 335990 (TRBV7-2, TRBJ2-3)
CASSFLSRNWGGGTDTQYF

SEQ ID NO: 671981 - protein, 16 aa, Homo sapiens
  CDR3 for alpha chain variable domain of TCR clone 335991 (TRAV36/DV7, TRAJ41)
CAGDDLNSNSGYALNF

SEQ ID NO: 671982 - protein, 14 aa, Homo sapiens
  CDR3 for beta chain variable domain of TCR clone 335991 (TRBV6-3, TRBJ2-5)
CASSYSLREKTQYF

SEQ ID NO: 671983 - protein, 15 aa, Homo sapiens
  CDR3 for alpha chain variable domain of TCR clone 335992 (TRAV12-2, TRAJ43)
CAFDMRFGAGTRLTV

SEQ ID NO: 671984 - protein, 17 aa, Homo sapiens
  CDR3 for beta chain variable domain of TCR clone 335992 (TRBV19, TRBJ2-6)
CASSTGQVVSGANVLAF

SEQ ID NO: 671985 - protein, 13 aa, Homo sapiens
  CDR3 for alpha chain variable domain of TCR clone 335993 (TRAV8-2, TRAJ15)
CVVSGPGRNCSDL

SEQ ID NO: 671986 - protein, 13 aa, Homo sapiens
  CDR3 for beta chain variable domain of TCR clone 335993 (TRBV10-3, TRBJ2-7)
CASKLAVNYEQYF

SEQ ID NO: 671987 - protein, 16 aa, Homo sapiens
  CDR3 for alpha chain variable domain of TCR clone 335994 (TRAV39, TRAJ32)
CAVDMDYGGATHKLIF

SEQ ID NO: 671988 - protein, 14 aa, Homo sapiens
  CDR3 for beta chain variable domain of TCR clone 335994 (TRBV9, TRBJ2-4)
CASSPSGTSGFQYF

SEQ ID NO: 671989 - protein, 11 aa, Homo sapiens
  CDR3 for alpha chain variable domain of TCR clone 335995 (TRAV12-2, TRAJ49)
CAVTGGNQVYF

SEQ ID NO: 671990 - protein, 13 aa, Homo sapiens
  CDR3 for beta chain variable domain of TCR clone 335995 (TRBV19, TRBJ1-2)
CASSISEDYGYTF

SEQ ID NO: 671991 - protein, 13 aa, Homo sapiens
  CDR3 for alpha chain variable domain of TCR clone 335996 (TRAV27, TRAJ17)
CAGAATARNKLTF

SEQ ID NO: 671992 - protein, 15 aa, Homo sapiens
  CDR3 for beta chain variable domain of TCR clone 335996 (TRBV5-1, TRBJ2-3)
CASRNQAGSTDTQYF

SEQ ID NO: 671993 - protein, 21 aa, Homo sapiens
  CDR3 for alpha chain variable domain of TCR clone 335997 (TRAV3, TRAJ37)
CAETTWLWQHRQTNLWARDNF

SEQ ID NO: 671994 - protein, 16 aa, Homo sapiens
  CDR3 for beta chain variable domain of TCR clone 335997 (TRBV9, TRBJ1-2)
CASSVEEKVSPYGYTF

SEQ ID NO: 671995 - protein, 12 aa, Homo sapiens
  CDR3 for alpha chain variable domain of TCR clone 335998 (TRAV1-2, TRAJ33)
CAALDSNYQLIW

SEQ ID NO: 671996 - protein, 14 aa, Homo sapiens
  CDR3 for beta chain variable domain of TCR clone 335998 (TRBV7-2, TRBJ2-7)
CASGTKTSFYEQYF

SEQ ID NO: 671997 - protein, 17 aa, Homo sapiens
  CDR3 for alpha chain variable domain of TCR clone 335999 (TRAV12-2, TRAJ39)
CAVNNMPTFGGGTRLMV

SEQ ID NO: 671998 - protein, 16 aa, Homo sapiens
  CDR3 for beta chain variable domain of TCR clone 335999 (TRBV5-3, TRBJ2-2)
CARSFGTGTNTGELFF

SEQ ID NO: 671999 - protein, 14 aa, Homo sapiens
  CDR3 for alpha chain variable domain of TCR clone 336000 (TRAV13-1, TRAJ35)
CAASKGGFGNVLHC

SEQ ID NO: 672000 - protein, 13 aa, Homo sapiens
  CDR3 for beta chain variable domain of TCR clone 336000 (TRBV7-3, TRBJ1-1)
CASSQDWGAEVFF

SEQ ID NO: 672001 - protein, 10 aa, Homo sapiens
  CDR3 for alpha chain variable domain of TCR clone 336001 (TRAV1-2, TRAJ23)
CAAWAGKLIF

SEQ ID NO: 672002 - protein, 16 aa, Homo sapiens
  CDR3 for beta chain variable domain of TCR clone 336001 (TRBV6-5, TRBJ2-3)
CASRFHRGAGSDTQYF

SEQ ID NO: 672003 - protein, 12 aa, Homo sapiens
  CDR3 for alpha chain variable domain of TCR clone 336002 (TRAV12-3, TRAJ20)
CAMVRGGYKLSF

SEQ ID NO: 672004 - protein, 13 aa, Homo sapiens
  CDR3 for beta chain variable domain of TCR clone 336002 (TRBV23-1, TRBJ1-4)
CASRGKFNETLFF

SEQ ID NO: 672005 - protein, 15 aa, Homo sapiens
  CDR3 for alpha chain variable domain of TCR clone 336003 (TRAV14/DV4, TRAJ33)
CAMREGRDSNYQLIW

SEQ ID NO: 672006 - protein, 16 aa, Homo sapiens
  CDR3 for beta chain variable domain of TCR clone 336003 (TRBV12-5, TRBJ2-5)
CASGTRTSGNQETQYF

SEQ ID NO: 672007 - protein, 13 aa, Homo sapiens
  CDR3 for alpha chain variable domain of TCR clone 336004 (TRAV3, TRAJ21)
CAVREPDFNKFYF

SEQ ID NO: 672008 - protein, 13 aa, Homo sapiens
  CDR3 for beta chain variable domain of TCR clone 336004 (TRBV9, TRBJ1-1)
CQQRRGGGTEAFF

SEQ ID NO: 672009 - protein, 12 aa, Homo sapiens
  CDR3 for alpha chain variable domain of TCR clone 336005 (TRAV17, TRAJ20)
CATDSNDYKLSF

SEQ ID NO: 672010 - protein, 11 aa, Homo sapiens
  CDR3 for beta chain variable domain of TCR clone 336005 (TRBV4-1, TRBJ2-2)
CASEHTGELFF

SEQ ID NO: 672011 - protein, 11 aa, Homo sapiens
  CDR3 for alpha chain variable domain of TCR clone 336006 (TRAV30, TRAJ23)
CGTEIAGKLIF

SEQ ID NO: 672012 - protein, 16 aa, Homo sapiens
  CDR3 for beta chain variable domain of TCR clone 336006 (TRBV7-2, TRBJ2-7)
YASTSQAASGGYEQYF

SEQ ID NO: 672013 - protein, 17 aa, Homo sapiens
  CDR3 for alpha chain variable domain of TCR clone 336007 (TRAV3, TRAJ6)
CAVREGPRAGGSYIPTF

SEQ ID NO: 672014 - protein, 15 aa, Homo sapiens
  CDR3 for beta chain variable domain of TCR clone 336007 (TRBV7-2, TRBJ2-1)
CASSSGLAGGNEQFF

SEQ ID NO: 672015 - protein, 12 aa, Homo sapiens
  CDR3 for alpha chain variable domain of TCR clone 336008 (TRAV4, TRAJ26)
CLVGDYGQNFVF

SEQ ID NO: 672016 - protein, 13 aa, Homo sapiens
  CDR3 for beta chain variable domain of TCR clone 336008 (TRBV27, TRBJ2-7)
CASSFVSSYEQYF

SEQ ID NO: 672017 - protein, 12 aa, Homo sapiens
  CDR3 for alpha chain variable domain of TCR clone 336009 (TRAV27, TRAJ42)
CAGGGSQGNLIF

SEQ ID NO: 672018 - protein, 13 aa, Homo sapiens
  CDR3 for beta chain variable domain of TCR clone 336009 (TRBV19, TRBJ2-7)
CASSIRSAYEQYF

SEQ ID NO: 672019 - protein, 15 aa, Homo sapiens
  CDR3 for alpha chain variable domain of TCR clone 336010 (TRAV27, TRAJ38)
CAARRNAGNNRKLIW

SEQ ID NO: 672020 - protein, 13 aa, Homo sapiens
  CDR3 for beta chain variable domain of TCR clone 336010 (TRBV12-5, TRBJ2-3)
CASGDRQSDTQYI

SEQ ID NO: 672021 - protein, 13 aa, Homo sapiens
  CDR3 for alpha chain variable domain of TCR clone 336011 (TRAV8-4, TRAJ26)
CAVSSSMVRILSM

SEQ ID NO: 672022 - protein, 14 aa, Homo sapiens
  CDR3 for beta chain variable domain of TCR clone 336011 (TRBV18, TRBJ2-5)
CASSPRASSETQYF

SEQ ID NO: 672023 - protein, 20 aa, Homo sapiens
  CDR3 for alpha chain variable domain of TCR clone 336012 (TRAV12-3, TRAJ17)
SPVIQPPTSAMTLTGNKLTF

SEQ ID NO: 672024 - protein, 15 aa, Homo sapiens
  CDR3 for beta chain variable domain of TCR clone 336012 (TRBV2, TRBJ2-1)
CASSELAGSYNEQFF

SEQ ID NO: 672025 - protein, 11 aa, Homo sapiens
  CDR3 for alpha chain variable domain of TCR clone 336013 (TRAV13-1, TRAJ39)
CASHAGNMLTF

SEQ ID NO: 672026 - protein, 14 aa, Homo sapiens
  CDR3 for beta chain variable domain of TCR clone 336013 (TRBV11-2, TRBJ1-5)
CASSLYRGRQPQHF

SEQ ID NO: 672027 - protein, 15 aa, Homo sapiens
  CDR3 for alpha chain variable domain of TCR clone 336014 (TRAV21, TRAJ52)
CAVRGGGTSSGKLTF

SEQ ID NO: 672028 - protein, 13 aa, Homo sapiens
  CDR3 for beta chain variable domain of TCR clone 336014 (TRBV6-5, TRBJ2-5)
CATAPSPQETQYF

SEQ ID NO: 672029 - protein, 11 aa, Homo sapiens
  CDR3 for alpha chain variable domain of TCR clone 336015 (TRAV26-1, TRAJ37)
CIVRVGRKLIL

SEQ ID NO: 672030 - protein, 17 aa, Homo sapiens
  CDR3 for beta chain variable domain of TCR clone 336015 (TRBV7-7, TRBJ2-2)
CASSSVPAGGEIGELYF

SEQ ID NO: 672031 - protein, 10 aa, Homo sapiens
  CDR3 for alpha chain variable domain of TCR clone 336016 (TRAV12-1, TRAJ43)
CVVHNNDMRF

SEQ ID NO: 672032 - protein, 13 aa, Homo sapiens
  CDR3 for beta chain variable domain of TCR clone 336016 (TRBV4-2, TRBJ1-1)
CASSQAGNTEAFF

SEQ ID NO: 672033 - protein, 17 aa, Homo sapiens
  CDR3 for alpha chain variable domain of TCR clone 336017 (TRAV21, TRAJ52)
CAVGVNAGCTSYGKLTF

SEQ ID NO: 672034 - protein, 13 aa, Homo sapiens
  CDR3 for beta chain variable domain of TCR clone 336017 (TRBV5-1, TRBJ1-2)
CASSFQGNYGYTF

SEQ ID NO: 672035 - protein, 16 aa, Homo sapiens
  CDR3 for alpha chain variable domain of TCR clone 336018 (TRAV38-1, TRAJ45)
CAFMKGSGGGADGITF

SEQ ID NO: 672036 - protein, 15 aa, Homo sapiens
  CDR3 for beta chain variable domain of TCR clone 336018 (TRBV20-1, TRBJ2-7)
CSAREGRDSLYEQYF

SEQ ID NO: 672037 - protein, 11 aa, Homo sapiens
  CDR3 for alpha chain variable domain of TCR clone 336019 (TRAV21, TRAJ34)
CAVTNTDKLIF

SEQ ID NO: 672038 - protein, 17 aa, Homo sapiens
  CDR3 for beta chain variable domain of TCR clone 336019 (TRBV13, TRBJ2-3)
CASSSLGTSGLTDTQYF

SEQ ID NO: 672039 - protein, 13 aa, Homo sapiens
  CDR3 for alpha chain variable domain of TCR clone 336020 (TRAV2, TRAJ40)
CAVVSSGTYKYVF

SEQ ID NO: 672040 - protein, 15 aa, Homo sapiens
  CDR3 for beta chain variable domain of TCR clone 336020 (TRBV11-3, TRBJ2-3)
CASLKDGREGDTQYF

SEQ ID NO: 672041 - protein, 14 aa, Homo sapiens
  CDR3 for alpha chain variable domain of TCR clone 336021 (TRAV17, TRAJ22)
CATSPSGSARQLIF

SEQ ID NO: 672042 - protein, 14 aa, Homo sapiens
  CDR3 for beta chain variable domain of TCR clone 336021 (TRBV7-9, TRBJ2-7)
CASSLSQGSYEQYF

SEQ ID NO: 672043 - protein, 11 aa, Homo sapiens
  CDR3 for alpha chain variable domain of TCR clone 336022 (TRAV2, TRAJ13)
CASGGYQKVTF

SEQ ID NO: 672044 - protein, 17 aa, Homo sapiens
  CDR3 for beta chain variable domain of TCR clone 336022 (TRBV13, TRBJ2-3)
CASSSLGTSGLTDTQYF

SEQ ID NO: 672045 - protein, 14 aa, Homo sapiens
  CDR3 for alpha chain variable domain of TCR clone 336023 (TRAV12-3, TRAJ56)
CAMSVTGANSNLTF

SEQ ID NO: 672046 - protein, 17 aa, Homo sapiens
  CDR3 for beta chain variable domain of TCR clone 336023 (TRBV20-1, TRBJ2-3)
CSASLLGRGGSADTQYF

SEQ ID NO: 672047 - protein, 18 aa, Homo sapiens
  CDR3 for alpha chain variable domain of TCR clone 336024 (TRAV12-3, TRAJ52)
CSMSVGGAGGTSYGKLTF

SEQ ID NO: 672048 - protein, 15 aa, Homo sapiens
  CDR3 for beta chain variable domain of TCR clone 336024 (TRBV27, TRBJ1-6)
CASSFDRGLGSALHF

SEQ ID NO: 672049 - protein, 12 aa, Homo sapiens
  CDR3 for alpha chain variable domain of TCR clone 336025 (TRAV8-4, TRAJ43)
CAVSVNNNDMRF

SEQ ID NO: 672050 - protein, 15 aa, Homo sapiens
  CDR3 for beta chain variable domain of TCR clone 336025 (TRBV20-1, TRBJ2-7)
CSARDRVSGMDEQYF

SEQ ID NO: 672051 - protein, 13 aa, Homo sapiens
  CDR3 for alpha chain variable domain of TCR clone 336026 (TRAV8-1, TRAJ13)
CAVSKGGYQKVTF

SEQ ID NO: 672052 - protein, 18 aa, Homo sapiens
  CDR3 for beta chain variable domain of TCR clone 336026 (TRBV11-2, TRBJ2-7)
CASSWRTVQTWQSYEQYF

SEQ ID NO: 672053 - protein, 12 aa, Homo sapiens
  CDR3 for alpha chain variable domain of TCR clone 336027 (TRAV16, TRAJ10)
CSRTGGGNKLTF

SEQ ID NO: 672054 - protein, 16 aa, Homo sapiens
  CDR3 for beta chain variable domain of TCR clone 336027 (TRBV20-1, TRBJ1-4)
CSAPEQGLLTNEKLFF

SEQ ID NO: 672055 - protein, 12 aa, Homo sapiens
  CDR3 for alpha chain variable domain of TCR clone 336028 (TRAV8-3, TRAJ26)
CAGDNYVQNFFF

SEQ ID NO: 672056 - protein, 15 aa, Homo sapiens
  CDR3 for beta chain variable domain of TCR clone 336028 (TRBV9, TRBJ2-1)
CASSLAGSSYSEQFF

SEQ ID NO: 672057 - protein, 17 aa, Homo sapiens
  CDR3 for alpha chain variable domain of TCR clone 336029 (TRAV26-1, TRAJ58)
CIVRVGAEETSGSRLTF

SEQ ID NO: 672058 - protein, 18 aa, Homo sapiens
  CDR3 for beta chain variable domain of TCR clone 336029 (TRBV5-1, TRBJ1-6)
CASSVGGGYGERNSPLHF

SEQ ID NO: 672059 - protein, 13 aa, Homo sapiens
  CDR3 for alpha chain variable domain of TCR clone 336030 (TRAV13-2, TRAJ48)
CAEMDFGNEKLTF

SEQ ID NO: 672060 - protein, 13 aa, Homo sapiens
  CDR3 for beta chain variable domain of TCR clone 336030 (TRBV7-9, TRBJ2-7)
CASSFAGAYEQYF

SEQ ID NO: 672061 - protein, 13 aa, Homo sapiens
  CDR3 for alpha chain variable domain of TCR clone 336031 (TRAV20, TRAJ49)
CAVQARTGNQFYF

SEQ ID NO: 672062 - protein, 11 aa, Homo sapiens
  CDR3 for beta chain variable domain of TCR clone 336031 (TRBV29-1, TRBJ2-5)
CSEDRTGTQYF

SEQ ID NO: 672063 - protein, 15 aa, Homo sapiens
  CDR3 for alpha chain variable domain of TCR clone 336032 (TRAV4, TRAJ39)
CLVGPDNNAGNMLTF

SEQ ID NO: 672064 - protein, 12 aa, Homo sapiens
  CDR3 for beta chain variable domain of TCR clone 336032 (TRBV12-4, TRBJ2-7)
CASNPGGGEQYF

SEQ ID NO: 672065 - protein, 14 aa, Homo sapiens
  CDR3 for alpha chain variable domain of TCR clone 336033 (TRAV26-1, TRAJ48)
CIVRVGFGNEKLTF

SEQ ID NO: 672066 - protein, 14 aa, Homo sapiens
  CDR3 for beta chain variable domain of TCR clone 336033 (TRBV19, TRBJ2-1)
CASPTFVLGGEQFF

SEQ ID NO: 672067 - protein, 14 aa, Homo sapiens
  CDR3 for alpha chain variable domain of TCR clone 336034 (TRAV12-1, TRAJ24)
CVVRSTDSWGKFQF

SEQ ID NO: 672068 - protein, 14 aa, Homo sapiens
  CDR3 for beta chain variable domain of TCR clone 336034 (TRBV11-3, TRBJ2-1)
CASSATTSGSIQFF

SEQ ID NO: 672069 - protein, 11 aa, Homo sapiens
  CDR3 for alpha chain variable domain of TCR clone 336035 (TRAV2, TRAJ33)
CAVDSNYQLSW

SEQ ID NO: 672070 - protein, 14 aa, Homo sapiens
  CDR3 for beta chain variable domain of TCR clone 336035 (TRBV11-2, TRBJ2-3)
CASSRLARTDTQYF

SEQ ID NO: 672071 - protein, 13 aa, Homo sapiens
  CDR3 for alpha chain variable domain of TCR clone 336036 (TRAV8-4, TRAJ10)
CAAFTGGGNKLTF

SEQ ID NO: 672072 - protein, 12 aa, Homo sapiens
  CDR3 for beta chain variable domain of TCR clone 336036 (TRBV3-1, TRBJ2-1)
CASSQGASGQFF

SEQ ID NO: 672073 - protein, 16 aa, Homo sapiens
  CDR3 for alpha chain variable domain of TCR clone 336037 (TRAV25, TRAJ24)
CAPRRGTTDSWGKLQF

SEQ ID NO: 672074 - protein, 14 aa, Homo sapiens
  CDR3 for beta chain variable domain of TCR clone 336037 (TRBV6-6, TRBJ1-5)
CASSYGPANQPQHF

SEQ ID NO: 672075 - protein, 10 aa, Homo sapiens
  CDR3 for alpha chain variable domain of TCR clone 336038 (TRAV23/DV6, TRAJ43)
CAAAVAALEL

SEQ ID NO: 672076 - protein, 13 aa, Homo sapiens
  CDR3 for beta chain variable domain of TCR clone 336038 (TRBV12-4, TRBJ1-2)
CASSLRQGKGYTF

SEQ ID NO: 672077 - protein, 16 aa, Homo sapiens
  CDR3 for alpha chain variable domain of TCR clone 336039 (TRAV3, TRAJ37)
CAVRVRGSGNTGKLIF

SEQ ID NO: 672078 - protein, 13 aa, Homo sapiens
  CDR3 for beta chain variable domain of TCR clone 336039 (TRBV7-9, TRBJ1-2)
CASSLKQNCGDTF

SEQ ID NO: 672079 - protein, 16 aa, Homo sapiens
  CDR3 for alpha chain variable domain of TCR clone 336040 (TRAV26-1, TRAJ23)
CIVRVHPYNQGGKPIF

SEQ ID NO: 672080 - protein, 13 aa, Homo sapiens
  CDR3 for beta chain variable domain of TCR clone 336040 (TRBV20-1, TRBJ2-5)
CSARGDYQETQYF

SEQ ID NO: 672081 - protein, 16 aa, Homo sapiens
  CDR3 for alpha chain variable domain of TCR clone 336041 (TRAV1-2, TRAJ10)
CAVRGVLTGGGNKLTF

SEQ ID NO: 672082 - protein, 15 aa, Homo sapiens
  CDR3 for beta chain variable domain of TCR clone 336041 (TRBV5-1, TRBJ1-2)
CASSPGDRGSYGYTF

SEQ ID NO: 672083 - protein, 16 aa, Homo sapiens
  CDR3 for alpha chain variable domain of TCR clone 336042 (TRAV30, TRAJ24)
CGTEIVDADSWGKFQS

SEQ ID NO: 672084 - protein, 16 aa, Homo sapiens
  CDR3 for beta chain variable domain of TCR clone 336042 (TRBV7-8, TRBJ2-4)
CASSAERTLAKNIQYF

SEQ ID NO: 672085 - protein, 10 aa, Homo sapiens
  CDR3 for alpha chain variable domain of TCR clone 336043 (TRAV1-2, TRAJ23)
CAGQGGKLIL

SEQ ID NO: 672086 - protein, 12 aa, Homo sapiens
  CDR3 for beta chain variable domain of TCR clone 336043 (TRBV14, TRBJ2-5)
CASSQLKETQYF

SEQ ID NO: 672087 - protein, 13 aa, Homo sapiens
  CDR3 for alpha chain variable domain of TCR clone 336044 (TRAV27, TRAJ6)
CAGGTRGSYIPTF

SEQ ID NO: 672088 - protein, 13 aa, Homo sapiens
  CDR3 for beta chain variable domain of TCR clone 336044 (TRBV19, TRBJ2-7)
CASRKAGGSEQYF

SEQ ID NO: 672089 - protein, 17 aa, Homo sapiens
  CDR3 for alpha chain variable domain of TCR clone 336045 (TRAV3, TRAJ12)
CDVRDGGRMDSSYKLIF

SEQ ID NO: 672090 - protein, 13 aa, Homo sapiens
  CDR3 for beta chain variable domain of TCR clone 336045 (TRBV7-3, TRBJ1-1)
CASSQDWGAEAFF

SEQ ID NO: 672091 - protein, 11 aa, Homo sapiens
  CDR3 for alpha chain variable domain of TCR clone 336046 (TRAV27, TRAJ16)
CRFSDGQKLLF

SEQ ID NO: 672092 - protein, 14 aa, Homo sapiens
  CDR3 for beta chain variable domain of TCR clone 336046 (TRBV7-3, TRBJ2-1)
CASSLARGTNEQFF

SEQ ID NO: 672093 - protein, 18 aa, Homo sapiens
  CDR3 for alpha chain variable domain of TCR clone 336047 (TRAV21, TRAJ52)
CAVRPSPAGGTSYGKLTF

SEQ ID NO: 672094 - protein, 12 aa, Homo sapiens
  CDR3 for beta chain variable domain of TCR clone 336047 (TRBV7-8, TRBJ2-4)
CASSLGGNIQYF

SEQ ID NO: 672095 - protein, 10 aa, Homo sapiens
  CDR3 for alpha chain variable domain of TCR clone 336048 (TRAV25, TRAJ20)
CAVNDYKLSF

SEQ ID NO: 672096 - protein, 18 aa, Homo sapiens
  CDR3 for beta chain variable domain of TCR clone 336048 (TRBV20-1, TRBJ2-6)
CSAETTPTHGSGANDLSF

SEQ ID NO: 672097 - protein, 15 aa, Homo sapiens
  CDR3 for alpha chain variable domain of TCR clone 336049 (TRAV4, TRAJ8)
CLVGEQHTGFQKLVF

SEQ ID NO: 672098 - protein, 15 aa, Homo sapiens
  CDR3 for beta chain variable domain of TCR clone 336049 (TRBV7-9, TRBJ2-5)
CAGSNRDYLQETQYF

SEQ ID NO: 672099 - protein, 16 aa, Homo sapiens
  CDR3 for alpha chain variable domain of TCR clone 336050 (TRAV16, TRAJ4)
CALSRMFSGGYNKLIF

SEQ ID NO: 672100 - protein, 16 aa, Homo sapiens
  CDR3 for beta chain variable domain of TCR clone 336050 (TRBV12-4, TRBJ1-5)
CASSRPVGGSNHPQHF

SEQ ID NO: 672101 - protein, 16 aa, Homo sapiens
  CDR3 for alpha chain variable domain of TCR clone 336051 (TRAV3, TRAJ32)
CAVRDIGGGATNKLIF

SEQ ID NO: 672102 - protein, 11 aa, Homo sapiens
  CDR3 for beta chain variable domain of TCR clone 336051 (TRBV12-4, TRBJ2-1)
CASSRLNEQFF

SEQ ID NO: 672103 - protein, 14 aa, Homo sapiens
  CDR3 for alpha chain variable domain of TCR clone 336052 (TRAV1-2, TRAJ8)
CAVREDTGFQKLVF

SEQ ID NO: 672104 - protein, 13 aa, Homo sapiens
  CDR3 for beta chain variable domain of TCR clone 336052 (TRBV20-1, TRBJ1-1)
CSARGGGNTQPFF

SEQ ID NO: 672105 - protein, 13 aa, Homo sapiens
  CDR3 for alpha chain variable domain of TCR clone 336053 (TRAV8-3, TRAJ28)
CAVGAVGSYQLTC

SEQ ID NO: 672106 - protein, 13 aa, Homo sapiens
  CDR3 for beta chain variable domain of TCR clone 336053 (TRBV7-9, TRBJ1-2)
CASSLKQNYGYTF

SEQ ID NO: 672107 - protein, 13 aa, Homo sapiens
  CDR3 for alpha chain variable domain of TCR clone 336054 (TRAV29/DV5, TRAJ31)
CAASRNNNARLMF

SEQ ID NO: 672108 - protein, 15 aa, Homo sapiens
  CDR3 for beta chain variable domain of TCR clone 336054 (TRBV5-1, TRBJ2-3)
CASSLGQGGGDTQYF

SEQ ID NO: 672109 - protein, 15 aa, Homo sapiens
  CDR3 for alpha chain variable domain of TCR clone 336055 (TRAV13-1, TRAJ32)
CAASNGWWCYKQAHL

SEQ ID NO: 672110 - protein, 15 aa, Homo sapiens
  CDR3 for beta chain variable domain of TCR clone 336055 (TRBV15, TRBJ1-4)
CATSRDIGSYEKLFF

SEQ ID NO: 672111 - protein, 12 aa, Homo sapiens
  CDR3 for alpha chain variable domain of TCR clone 336056 (TRAV12-3, TRAJ17)
CAMTLTGNKLTF

SEQ ID NO: 672112 - protein, 16 aa, Homo sapiens
  CDR3 for beta chain variable domain of TCR clone 336056 (TRBV13, TRBJ2-2)
CASSPRTGEHTGELFL

SEQ ID NO: 672113 - protein, 12 aa, Homo sapiens
  CDR3 for alpha chain variable domain of TCR clone 336057 (TRAV12-2, TRAJ8)
CAVNTGFQKLVF

SEQ ID NO: 672114 - protein, 15 aa, Homo sapiens
  CDR3 for beta chain variable domain of TCR clone 336057 (TRBV7-8, TRBJ1-5)
CASSLARRGLEPQHF

SEQ ID NO: 672115 - protein, 15 aa, Homo sapiens
  CDR3 for alpha chain variable domain of TCR clone 336058 (TRAV20, TRAJ53)
CAVQASGGSNYKLTF

SEQ ID NO: 672116 - protein, 12 aa, Homo sapiens
  CDR3 for beta chain variable domain of TCR clone 336058 (TRBV7-6, TRBJ2-5)
CASSLSHETQYF

SEQ ID NO: 672117 - protein, 10 aa, Homo sapiens
  CDR3 for alpha chain variable domain of TCR clone 336059 (TRAV27, TRAJ49)
CVVPVTRSIL

SEQ ID NO: 672118 - protein, 16 aa, Homo sapiens
  CDR3 for beta chain variable domain of TCR clone 336059 (TRBV7-3, TRBJ2-1)
CASSKPLAGGYNEQFF

SEQ ID NO: 672119 - protein, 13 aa, Homo sapiens
  CDR3 for alpha chain variable domain of TCR clone 336060 (TRAV12-2, TRAJ10)
CAVPTGGGNKLTF

SEQ ID NO: 672120 - protein, 13 aa, Homo sapiens
  CDR3 for beta chain variable domain of TCR clone 336060 (TRBV7-3, TRBJ2-5)
CASSFRGGETQYF

SEQ ID NO: 672121 - protein, 13 aa, Homo sapiens
  CDR3 for alpha chain variable domain of TCR clone 336061 (TRAV8-3, TRAJ20)
CAVGRPNDYKLSF

SEQ ID NO: 672122 - protein, 17 aa, Homo sapiens
  CDR3 for beta chain variable domain of TCR clone 336061 (TRBV13, TRBJ2-3)
CASSLSRVAGGRNTQYF

SEQ ID NO: 672123 - protein, 13 aa, Homo sapiens
  CDR3 for alpha chain variable domain of TCR clone 336062 (TRAV21, TRAJ27)
CAARPGNAGKSTF

SEQ ID NO: 672124 - protein, 15 aa, Homo sapiens
  CDR3 for beta chain variable domain of TCR clone 336062 (TRBV6-6, TRBJ2-5)
CASSPGGGLEETQYF

SEQ ID NO: 672125 - protein, 17 aa, Homo sapiens
  CDR3 for alpha chain variable domain of TCR clone 336063 (TRAV3, TRAJ42)
CAVRDRDYGGSQGDLIF

SEQ ID NO: 672126 - protein, 15 aa, Homo sapiens
  CDR3 for beta chain variable domain of TCR clone 336063 (TRBV6-6, TRBJ2-7)
CASSYSYGGSCEQYF

SEQ ID NO: 672127 - protein, 11 aa, Homo sapiens
  CDR3 for alpha chain variable domain of TCR clone 336064 (TRAV17, TRAJ9)
CATTGGFKTIF

SEQ ID NO: 672128 - protein, 11 aa, Homo sapiens
  CDR3 for beta chain variable domain of TCR clone 336064 (TRBV7-6, TRBJ2-5)
CASSFQETQYF

SEQ ID NO: 672129 - protein, 10 aa, Homo sapiens
  CDR3 for alpha chain variable domain of TCR clone 336065 (TRAV2, TRAJ34)
CAVVNDKLIF

SEQ ID NO: 672130 - protein, 16 aa, Homo sapiens
  CDR3 for beta chain variable domain of TCR clone 336065 (TRBV7-3, TRBJ2-1)
CASSLEGYRSYNEQFF

SEQ ID NO: 672131 - protein, 15 aa, Homo sapiens
  CDR3 for alpha chain variable domain of TCR clone 336066 (TRAV38-2/DV8, TRAJ45)
CAYWDSGGGADGLTF

SEQ ID NO: 672132 - protein, 18 aa, Homo sapiens
  CDR3 for beta chain variable domain of TCR clone 336066 (TRBV11-2, TRBJ2-3)
CASSVGGASRGAPNTQYF

SEQ ID NO: 672133 - protein, 13 aa, Homo sapiens
  CDR3 for alpha chain variable domain of TCR clone 336067 (TRAV3, TRAJ15)
CAVRDQAGTALIF

SEQ ID NO: 672134 - protein, 15 aa, Homo sapiens
  CDR3 for beta chain variable domain of TCR clone 336067 (TRBV11-1, TRBJ2-7)
CASSLNYGSSYEQYF

SEQ ID NO: 672135 - protein, 17 aa, Homo sapiens
  CDR3 for alpha chain variable domain of TCR clone 336068 (TRAV23/DV6, TRAJ57)
CAASSTLSQGGSEKLVF

SEQ ID NO: 672136 - protein, 13 aa, Homo sapiens
  CDR3 for beta chain variable domain of TCR clone 336068 (TRBV29-1, TRBJ2-3)
CSATRGGRDTQYF

SEQ ID NO: 672137 - protein, 14 aa, Homo sapiens
  CDR3 for alpha chain variable domain of TCR clone 336069 (TRAV12-2, TRAJ45)
CAVYSGGCADGLTF

SEQ ID NO: 672138 - protein, 14 aa, Homo sapiens
  CDR3 for beta chain variable domain of TCR clone 336069 (TRBV6-5, TRBJ1-2)
CASTRGGGSDGYAF

SEQ ID NO: 672139 - protein, 14 aa, Homo sapiens
  CDR3 for alpha chain variable domain of TCR clone 336070 (TRAV8-3, TRAJ4)
CAVGAAGGYNKLIF

SEQ ID NO: 672140 - protein, 14 aa, Homo sapiens
  CDR3 for beta chain variable domain of TCR clone 336070 (TRBV12-5, TRBJ2-5)
CDSGSRTHQETQYF

SEQ ID NO: 672141 - protein, 11 aa, Homo sapiens
  CDR3 for alpha chain variable domain of TCR clone 336071 (TRAV4, TRAJ23)
CLVAPGGKLSF

SEQ ID NO: 672142 - protein, 15 aa, Homo sapiens
  CDR3 for beta chain variable domain of TCR clone 336071 (TRBV7-2, TRBJ2-1)
CASSFQADEYNEQFL

SEQ ID NO: 672143 - protein, 15 aa, Homo sapiens
  CDR3 for alpha chain variable domain of TCR clone 336072 (TRAV16, TRAJ12)
CSKWPLRDSSYKLIF

SEQ ID NO: 672144 - protein, 17 aa, Homo sapiens
  CDR3 for beta chain variable domain of TCR clone 336072 (TRBV19, TRBJ1-5)
CASNPNRGPGSNQPQHF

SEQ ID NO: 672145 - protein, 16 aa, Homo sapiens
  CDR3 for alpha chain variable domain of TCR clone 336073 (TRAV21, TRAJ33)
CAVSPASMDSNYQLIW

SEQ ID NO: 672146 - protein, 17 aa, Homo sapiens
  CDR3 for beta chain variable domain of TCR clone 336073 (TRBV2, TRBJ1-4)
CASGKRELTRGEEKLFF

SEQ ID NO: 672147 - protein, 16 aa, Homo sapiens
  CDR3 for alpha chain variable domain of TCR clone 336074 (TRAV1-2, TRAJ10)
CAVRGVLTGGGNKLTF

SEQ ID NO: 672148 - protein, 13 aa, Homo sapiens
  CDR3 for beta chain variable domain of TCR clone 336074 (TRBV20-1, TRBJ1-6)
CSAPLGGGSPLHF

SEQ ID NO: 672149 - protein, 16 aa, Homo sapiens
  CDR3 for alpha chain variable domain of TCR clone 336075 (TRAV1-2, TRAJ10)
CAVRGVLTGGGNKLTF

SEQ ID NO: 672150 - protein, 13 aa, Homo sapiens
  CDR3 for beta chain variable domain of TCR clone 336075 (TRBV5-7, TRBJ1-2)
CASSLIRAPGYTF

SEQ ID NO: 672151 - protein, 14 aa, Homo sapiens
  CDR3 for alpha chain variable domain of TCR clone 336076 (TRAV12-1, TRAJ30)
CVPTGTNRDDNIIF

SEQ ID NO: 672152 - protein, 11 aa, Homo sapiens
  CDR3 for beta chain variable domain of TCR clone 336076 (TRBV4-1, TRBJ2-2)
CASEHTGELFF

SEQ ID NO: 672153 - protein, 14 aa, Homo sapiens
  CDR3 for alpha chain variable domain of TCR clone 336077 (TRAV1-2, TRAJ8)
CAVREDTGFQKLVF

SEQ ID NO: 672154 - protein, 17 aa, Homo sapiens
  CDR3 for beta chain variable domain of TCR clone 336077 (TRBV13, TRBJ2-3)
CASSPSRVAGGRNTQYF

SEQ ID NO: 672155 - protein, 15 aa, Homo sapiens
  CDR3 for alpha chain variable domain of TCR clone 336078 (TRAV35, TRAJ50)
CAGQLRKTSYDKVIF

SEQ ID NO: 672156 - protein, 12 aa, Homo sapiens
  CDR3 for beta chain variable domain of TCR clone 336078 (TRBV5-1, TRBJ2-5)
CASSLGLETHYF

SEQ ID NO: 672157 - protein, 11 aa, Homo sapiens
  CDR3 for alpha chain variable domain of TCR clone 336079 (TRAV12-1, TRAJ15)
CVVNAGTALIF

SEQ ID NO: 672158 - protein, 16 aa, Homo sapiens
  CDR3 for beta chain variable domain of TCR clone 336079 (TRBV19, TRBJ2-1)
CASSRGGGSSYNEQFF

SEQ ID NO: 672159 - protein, 14 aa, Homo sapiens
  CDR3 for alpha chain variable domain of TCR clone 336080 (TRAV8-3, TRAJ27)
CAGGRNTNAGKSTF

SEQ ID NO: 672160 - protein, 14 aa, Homo sapiens
  CDR3 for beta chain variable domain of TCR clone 336080 (TRBV11-3, TRBJ2-7)
CASSPKTSFYEQYF

SEQ ID NO: 672161 - protein, 14 aa, Homo sapiens
  CDR3 for alpha chain variable domain of TCR clone 336081 (TRAV29/DV5, TRAJ49)
CAASAQNTGNQFYF

SEQ ID NO: 672162 - protein, 17 aa, Homo sapiens
  CDR3 for beta chain variable domain of TCR clone 336081 (TRBV20-1, TRBJ2-3)
CSADVGGYGSSTDTQYF

SEQ ID NO: 672163 - protein, 16 aa, Homo sapiens
  CDR3 for alpha chain variable domain of TCR clone 336082 (TRAV12-1, TRAJ8)
CVVNGRGNTGFQKLVF

SEQ ID NO: 672164 - protein, 15 aa, Homo sapiens
  CDR3 for beta chain variable domain of TCR clone 336082 (TRBV6-1, TRBJ1-2)
CASNPGRGGSYGDTF

SEQ ID NO: 672165 - protein, 15 aa, Homo sapiens
  CDR3 for alpha chain variable domain of TCR clone 336083 (TRAV14/DV4, TRAJ26)
CAMREGQNCGQNFVF

SEQ ID NO: 672166 - protein, 13 aa, Homo sapiens
  CDR3 for beta chain variable domain of TCR clone 336083 (TRBV24-1, TRBJ2-2)
CATSDWSTGELFF

SEQ ID NO: 672167 - protein, 12 aa, Homo sapiens
  CDR3 for alpha chain variable domain of TCR clone 336084 (TRAV3, TRAJ43)
CAVRDPNNDMRF

SEQ ID NO: 672168 - protein, 15 aa, Homo sapiens
  CDR3 for beta chain variable domain of TCR clone 336084 (TRBV6-1, TRBJ2-4)
CASSEAVWTINIQYF

SEQ ID NO: 672169 - protein, 12 aa, Homo sapiens
  CDR3 for alpha chain variable domain of TCR clone 336085 (TRAV25, TRAJ11)
CAGYSGYSTLTF

SEQ ID NO: 672170 - protein, 13 aa, Homo sapiens
  CDR3 for beta chain variable domain of TCR clone 336085 (TRBV7-9, TRBJ1-2)
CGSSLKQNYGYTF

SEQ ID NO: 672171 - protein, 14 aa, Homo sapiens
  CDR3 for alpha chain variable domain of TCR clone 336086 (TRAV35, TRAJ33)
CAGSSQDSNYQLIW

SEQ ID NO: 672172 - protein, 17 aa, Homo sapiens
  CDR3 for beta chain variable domain of TCR clone 336086 (TRBV20-1, TRBJ2-1)
CSAPPRLAGTRYNEQFF

SEQ ID NO: 672173 - protein, 13 aa, Homo sapiens
  CDR3 for alpha chain variable domain of TCR clone 336087 (TRAV13-1, TRAJ21)
CAASIYNFKKFYF

SEQ ID NO: 672174 - protein, 13 aa, Homo sapiens
  CDR3 for beta chain variable domain of TCR clone 336087 (TRBV27, TRBJ1-4)
CASSVMGDEKLFF

SEQ ID NO: 672175 - protein, 15 aa, Homo sapiens
  CDR3 for alpha chain variable domain of TCR clone 336088 (TRAV3, TRAJ24)
CAVRAKMTAGGNCSL

SEQ ID NO: 672176 - protein, 14 aa, Homo sapiens
  CDR3 for beta chain variable domain of TCR clone 336088 (TRBV7-2, TRBJ2-3)
CASSQTGSSYTQYF

SEQ ID NO: 672177 - protein, 13 aa, Homo sapiens
  CDR3 for alpha chain variable domain of TCR clone 336089 (TRAV12-2, TRAJ40)
CAVKLTGTYKYIF

SEQ ID NO: 672178 - protein, 15 aa, Homo sapiens
  CDR3 for beta chain variable domain of TCR clone 336089 (TRBV12-4, TRBJ1-2)
CASSPITGGGYGYTF

SEQ ID NO: 672179 - protein, 14 aa, Homo sapiens
  CDR3 for alpha chain variable domain of TCR clone 336090 (TRAV16, TRAJ32)
CALKSGGATNKLIF

SEQ ID NO: 672180 - protein, 14 aa, Homo sapiens
  CDR3 for beta chain variable domain of TCR clone 336090 (TRBV7-8, TRBJ2-3)
CASSLEAGTDTQYL

SEQ ID NO: 672181 - protein, 16 aa, Homo sapiens
  CDR3 for alpha chain variable domain of TCR clone 336091 (TRAV16, TRAJ42)
CALSGHYGGSQGNLIF

SEQ ID NO: 672182 - protein, 14 aa, Homo sapiens
  CDR3 for beta chain variable domain of TCR clone 336091 (TRBV3-1, TRBJ2-5)
CASSQAVRQETQYF

SEQ ID NO: 672183 - protein, 11 aa, Homo sapiens
  CDR3 for alpha chain variable domain of TCR clone 336092 (TRAV1-1, TRAJ23)
CAVRQGAKLIF

SEQ ID NO: 672184 - protein, 13 aa, Homo sapiens
  CDR3 for beta chain variable domain of TCR clone 336092 (TRBV7-3, TRBJ1-1)
CASSQDWGAEAFF

SEQ ID NO: 672185 - protein, 14 aa, Homo sapiens
  CDR3 for alpha chain variable domain of TCR clone 336093 (TRAV9-2, TRAJ39)
CALYIYNAGNMLTF

SEQ ID NO: 672186 - protein, 14 aa, Homo sapiens
  CDR3 for beta chain variable domain of TCR clone 336093 (TRBV7-2, TRBJ2-7)
CARGLRWEVNEQYF

SEQ ID NO: 672187 - protein, 10 aa, Homo sapiens
  CDR3 for alpha chain variable domain of TCR clone 336094 (TRAV13-1, TRAJ30)
CVARDDKIIF

SEQ ID NO: 672188 - protein, 15 aa, Homo sapiens
  CDR3 for beta chain variable domain of TCR clone 336094 (TRBV7-9, TRBJ1-2)
CASSLDREPNYGYTF

SEQ ID NO: 672189 - protein, 14 aa, Homo sapiens
  CDR3 for alpha chain variable domain of TCR clone 336095 (TRAV2, TRAJ3)
CAVRPYSRASKIIF

SEQ ID NO: 672190 - protein, 17 aa, Homo sapiens
  CDR3 for beta chain variable domain of TCR clone 336095 (TRBV7-6, TRBJ2-5)
CASSSPQAGDPSETQYF

SEQ ID NO: 672191 - protein, 12 aa, Homo sapiens
  CDR3 for alpha chain variable domain of TCR clone 336096 (TRAV10, TRAJ31)
CVVRAHRARLMF

SEQ ID NO: 672192 - protein, 13 aa, Homo sapiens
  CDR3 for beta chain variable domain of TCR clone 336096 (TRBV14, TRBJ2-7)
CASSQDRRYEQYF

SEQ ID NO: 672193 - protein, 17 aa, Homo sapiens
  CDR3 for alpha chain variable domain of TCR clone 336097 (TRAV3, TRAJ6)
CAVRDGPRAGGGYIPTL

SEQ ID NO: 672194 - protein, 13 aa, Homo sapiens
  CDR3 for beta chain variable domain of TCR clone 336097 (TRBV20-1, TRBJ1-6)
CSAPLGVGSPLHF

SEQ ID NO: 672195 - protein, 12 aa, Homo sapiens
  CDR3 for alpha chain variable domain of TCR clone 336098 (TRAV12-2, TRAJ10)
WGVTGGGNKLPF

SEQ ID NO: 672196 - protein, 14 aa, Homo sapiens
  CDR3 for beta chain variable domain of TCR clone 336098 (TRBV19, TRBJ2-3)
CASSAPRGTDTQYF

SEQ ID NO: 672197 - protein, 14 aa, Homo sapiens
  CDR3 for alpha chain variable domain of TCR clone 336099 (TRAV25, TRAJ22)
CAVRSSGSARQLTF

SEQ ID NO: 672198 - protein, 15 aa, Homo sapiens
  CDR3 for beta chain variable domain of TCR clone 336099 (TRBV5-5, TRBJ2-7)
CASSLAAPLSYEQYF

SEQ ID NO: 672199 - protein, 15 aa, Homo sapiens
  CDR3 for alpha chain variable domain of TCR clone 336100 (TRAV26-1, TRAJ12)
IASSELMDSSYKLIF

SEQ ID NO: 672200 - protein, 17 aa, Homo sapiens
  CDR3 for beta chain variable domain of TCR clone 336100 (TRBV7-9, TRBJ2-3)
CASSPTVAGDLTDTQYF

SEQ ID NO: 672201 - protein, 14 aa, Homo sapiens
  CDR3 for alpha chain variable domain of TCR clone 336101 (TRAV2, TRAJ37)
CAVDFTSNTGKLIF

SEQ ID NO: 672202 - protein, 15 aa, Homo sapiens
  CDR3 for beta chain variable domain of TCR clone 336101 (TRBV20-1, TRBJ1-1)
CSASRGVSGNTEAFF

SEQ ID NO: 672203 - protein, 14 aa, Homo sapiens
  CDR3 for alpha chain variable domain of TCR clone 336102 (TRAV16, TRAJ33)
CALSDMDSNYQLIW

SEQ ID NO: 672204 - protein, 16 aa, Homo sapiens
  CDR3 for beta chain variable domain of TCR clone 336102 (TRBV11-2, TRBJ2-1)
CQQLIPPGVEYNDQFF

SEQ ID NO: 672205 - protein, 13 aa, Homo sapiens
  CDR3 for alpha chain variable domain of TCR clone 336103 (TRAV2, TRAJ22)
CAVDSGSARQLTF

SEQ ID NO: 672206 - protein, 15 aa, Homo sapiens
  CDR3 for beta chain variable domain of TCR clone 336103 (TRBV7-9, TRBJ1-5)
CASSQGHQPNQPQHF

SEQ ID NO: 672207 - protein, 12 aa, Homo sapiens
  CDR3 for alpha chain variable domain of TCR clone 336104 (TRAV13-1, TRAJ21)
CAAKEGFNKFYF

SEQ ID NO: 672208 - protein, 16 aa, Homo sapiens
  CDR3 for beta chain variable domain of TCR clone 336104 (TRBV5-4, TRBJ2-3)
CASPQPGAGGADTQYF

SEQ ID NO: 672209 - protein, 14 aa, Homo sapiens
  CDR3 for alpha chain variable domain of TCR clone 336105 (TRAV9-2, TRAJ39)
CALYIYNAGNMLTF

SEQ ID NO: 672210 - protein, 18 aa, Homo sapiens
  CDR3 for beta chain variable domain of TCR clone 336105 (TRBV7-9, TRBJ2-7)
CASSLQPRAGSTSSTSGR

SEQ ID NO: 672211 - protein, 15 aa, Homo sapiens
  CDR3 for alpha chain variable domain of TCR clone 336106 (TRAV3, TRAJ5)
CAVRALDTGRRALTL

SEQ ID NO: 672212 - protein, 13 aa, Homo sapiens
  CDR3 for beta chain variable domain of TCR clone 336106 (TRBV12-4, TRBJ2-7)
CASSPTETYEQYF

SEQ ID NO: 672213 - protein, 14 aa, Homo sapiens
  CDR3 for alpha chain variable domain of TCR clone 336107 (TRAV38-1, TRAJ35)
CAFLTIGFGIVLHC

SEQ ID NO: 672214 - protein, 17 aa, Homo sapiens
  CDR3 for beta chain variable domain of TCR clone 336107 (TRBV28, TRBJ1-1)
CASSGDLRTESNTEAFF

SEQ ID NO: 672215 - protein, 15 aa, Homo sapiens
  CDR3 for alpha chain variable domain of TCR clone 336108 (TRAV4, TRAJ39)
CLVGPNNNAGNMLTF

SEQ ID NO: 672216 - protein, 14 aa, Homo sapiens
  CDR3 for beta chain variable domain of TCR clone 336108 (TRBV2, TRBJ2-5)
CASSEVLAQETQYF

SEQ ID NO: 672217 - protein, 15 aa, Homo sapiens
  CDR3 for alpha chain variable domain of TCR clone 336109 (TRAV17, TRAJ10)
CATVLLTGGGNKLTL

SEQ ID NO: 672218 - protein, 13 aa, Homo sapiens
  CDR3 for beta chain variable domain of TCR clone 336109 (TRBV12-5, TRBJ2-3)
RASGDRQSDTQYF

SEQ ID NO: 672219 - protein, 12 aa, Homo sapiens
  CDR3 for alpha chain variable domain of TCR clone 336110 (TRAV22, TRAJ22)
CAPGGSARQLTF

SEQ ID NO: 672220 - protein, 15 aa, Homo sapiens
  CDR3 for beta chain variable domain of TCR clone 336110 (TRBV7-2, TRBJ2-1)
CASSSGLAGGNEQFF

SEQ ID NO: 672221 - protein, 13 aa, Homo sapiens
  CDR3 for alpha chain variable domain of TCR clone 336111 (TRAV35, TRAJ37)
CAWSSGNTGKLIF

SEQ ID NO: 672222 - protein, 16 aa, Homo sapiens
  CDR3 for beta chain variable domain of TCR clone 336111 (TRBV10-3, TRBJ2-1)
CAISLTSGNSYNEQFF

SEQ ID NO: 672223 - protein, 15 aa, Homo sapiens
  CDR3 for alpha chain variable domain of TCR clone 336112 (TRAV8-3, TRAJ40)
CAAPSLGSGTYKYIF

SEQ ID NO: 672224 - protein, 16 aa, Homo sapiens
  CDR3 for beta chain variable domain of TCR clone 336112 (TRBV7-3, TRBJ2-3)
CASSLSGYRPEDTRYF

SEQ ID NO: 672225 - protein, 14 aa, Homo sapiens
  CDR3 for alpha chain variable domain of TCR clone 336113 (TRAV1-2, TRAJ16)
CAVNRFSDGQKLLF

SEQ ID NO: 672226 - protein, 13 aa, Homo sapiens
  CDR3 for beta chain variable domain of TCR clone 336113 (TRBV9, TRBJ1-4)
CASSVPGNEKLFF

SEQ ID NO: 672227 - protein, 12 aa, Homo sapiens
  CDR3 for alpha chain variable domain of TCR clone 336114 (TRAV16, TRAJ10)
CSRTGGGNKLTF

SEQ ID NO: 672228 - protein, 15 aa, Homo sapiens
  CDR3 for beta chain variable domain of TCR clone 336114 (TRBV19, TRBJ2-7)
CASRPTPGLSIEQYF

SEQ ID NO: 672229 - protein, 12 aa, Homo sapiens
  CDR3 for alpha chain variable domain of TCR clone 336115 (TRAV12-1, TRAJ49)
CVGLQHRKPVLF

SEQ ID NO: 672230 - protein, 14 aa, Homo sapiens
  CDR3 for beta chain variable domain of TCR clone 336115 (TRBV12-4, TRBJ1-2)
CASSNLRGNYGYAF

SEQ ID NO: 672231 - protein, 15 aa, Homo sapiens
  CDR3 for alpha chain variable domain of TCR clone 336116 (TRAV38-1, TRAJ57)
CAFMDSQGGSKKLVF

SEQ ID NO: 672232 - protein, 16 aa, Homo sapiens
  CDR3 for beta chain variable domain of TCR clone 336116 (TRBV10-3, TRBJ2-1)
CAIRGGGRVDYNEQFF

SEQ ID NO: 672233 - protein, 14 aa, Homo sapiens
  CDR3 for alpha chain variable domain of TCR clone 336117 (TRAV1-2, TRAJ16)
CAFNRFSDGQKLLF

SEQ ID NO: 672234 - protein, 12 aa, Homo sapiens
  CDR3 for beta chain variable domain of TCR clone 336117 (TRBV7-9, TRBJ2-7)
CASSLEGYEQYF

SEQ ID NO: 672235 - protein, 13 aa, Homo sapiens
  CDR3 for alpha chain variable domain of TCR clone 336118 (TRAV2, TRAJ24)
CAVTADSWGKSQF

SEQ ID NO: 672236 - protein, 14 aa, Homo sapiens
  CDR3 for beta chain variable domain of TCR clone 336118 (TRBV13, TRBJ2-5)
CASSLGREQETQYF

SEQ ID NO: 672237 - protein, 15 aa, Homo sapiens
  CDR3 for alpha chain variable domain of TCR clone 336119 (TRAV1-2, TRAJ28)
CAVQYSGAGSYQLTF

SEQ ID NO: 672238 - protein, 13 aa, Homo sapiens
  CDR3 for beta chain variable domain of TCR clone 336119 (TRBV20-1, TRBJ2-7)
CSANHTSGYEQYF

SEQ ID NO: 672239 - protein, 14 aa, Homo sapiens
  CDR3 for alpha chain variable domain of TCR clone 336120 (TRAV8-3, TRAJ4)
CAVGASGGYNKLIF

SEQ ID NO: 672240 - protein, 14 aa, Homo sapiens
  CDR3 for beta chain variable domain of TCR clone 336120 (TRBV2, TRBJ2-7)
CASSPGQGTYEQYF

SEQ ID NO: 672241 - protein, 14 aa, Homo sapiens
  CDR3 for alpha chain variable domain of TCR clone 336121 (TRAV13-1, TRAJ35)
CAASKGGFGNVLHC

SEQ ID NO: 672242 - protein, 13 aa, Homo sapiens
  CDR3 for beta chain variable domain of TCR clone 336121 (TRBV7-3, TRBJ2-1)
CASSPVAYNEQFF

SEQ ID NO: 672243 - protein, 14 aa, Homo sapiens
  CDR3 for alpha chain variable domain of TCR clone 336122 (TRAV23/DV6, TRAJ6)
CAASRSGGSYITTF

SEQ ID NO: 672244 - protein, 17 aa, Homo sapiens
  CDR3 for beta chain variable domain of TCR clone 336122 (TRBV20-1, TRBJ2-1)
CSASASGLAGSYNEQFF

SEQ ID NO: 672245 - protein, 13 aa, Homo sapiens
  CDR3 for alpha chain variable domain of TCR clone 336123 (TRAV8-3, TRAJ43)
CAVGPDNNNDMRF

SEQ ID NO: 672246 - protein, 14 aa, Homo sapiens
  CDR3 for beta chain variable domain of TCR clone 336123 (TRBV19, TRBJ2-1)
CASPTFVLSCEQFF

SEQ ID NO: 672247 - protein, 14 aa, Homo sapiens
  CDR3 for alpha chain variable domain of TCR clone 336124 (TRAV26-1, TRAJ40)
CIVRVARGTYKYIF

SEQ ID NO: 672248 - protein, 14 aa, Homo sapiens
  CDR3 for beta chain variable domain of TCR clone 336124 (TRBV25-1, TRBJ1-1)
CASTHLGGNTEAFY

SEQ ID NO: 672249 - protein, 14 aa, Homo sapiens
  CDR3 for alpha chain variable domain of TCR clone 336125 (TRAV13-1, TRAJ40)
CAASMTSGTYKYNF

SEQ ID NO: 672250 - protein, 18 aa, Homo sapiens
  CDR3 for beta chain variable domain of TCR clone 336125 (TRBV20-1, TRBJ2-3)
CSASGLAGGPGTTDTQYF

SEQ ID NO: 672251 - protein, 12 aa, Homo sapiens
  CDR3 for alpha chain variable domain of TCR clone 336126 (TRAV6, TRAJ9)
CALHTVGFKTIF

SEQ ID NO: 672252 - protein, 14 aa, Homo sapiens
  CDR3 for beta chain variable domain of TCR clone 336126 (TRBV7-9, TRBJ2-1)
CASSQGQAEEEQFF

SEQ ID NO: 672253 - protein, 19 aa, Homo sapiens
  CDR3 for alpha chain variable domain of TCR clone 336127 (TRAV26-1, TRAJ52)
CIVRAHRNAGGNSYGKLTF

SEQ ID NO: 672254 - protein, 15 aa, Homo sapiens
  CDR3 for beta chain variable domain of TCR clone 336127 (TRBV29-1, TRBJ2-1)
CSGRDRKSSYNEQFF

SEQ ID NO: 672255 - protein, 13 aa, Homo sapiens
  CDR3 for alpha chain variable domain of TCR clone 336128 (TRAV12-3, TRAJ9)
CAMRNTGGFKTIF

SEQ ID NO: 672256 - protein, 16 aa, Homo sapiens
  CDR3 for beta chain variable domain of TCR clone 336128 (TRBV4-3, TRBJ2-2)
CASSHLQGSGTGELFF

SEQ ID NO: 672257 - protein, 14 aa, Homo sapiens
  CDR3 for alpha chain variable domain of TCR clone 336129 (TRAV13-2, TRAJ43)
CAEIPTYNNNDMRF

SEQ ID NO: 672258 - protein, 13 aa, Homo sapiens
  CDR3 for beta chain variable domain of TCR clone 336129 (TRBV20-1, TRBJ1-1)
CSARGGGNTEAFF

SEQ ID NO: 672259 - protein, 16 aa, Homo sapiens
  CDR3 for alpha chain variable domain of TCR clone 336130 (TRAV2, TRAJ32)
LSTPPSQGGATNKLIF

SEQ ID NO: 672260 - protein, 12 aa, Homo sapiens
  CDR3 for beta chain variable domain of TCR clone 336130 (TRBV20-1, TRBJ2-7)
CSAITPTKEQYF

SEQ ID NO: 672261 - protein, 13 aa, Homo sapiens
  CDR3 for alpha chain variable domain of TCR clone 336131 (TRAV13-1, TRAJ6)
CAASSGGSYIPTF

SEQ ID NO: 672262 - protein, 15 aa, Homo sapiens
  CDR3 for beta chain variable domain of TCR clone 336131 (TRBV12-4, TRBJ2-5)
CASSPPTGLQATQYF

SEQ ID NO: 672263 - protein, 13 aa, Homo sapiens
  CDR3 for alpha chain variable domain of TCR clone 336132 (TRAV26-1, TRAJ30)
CIVRALRDDKIIF

SEQ ID NO: 672264 - protein, 12 aa, Homo sapiens
  CDR3 for beta chain variable domain of TCR clone 336132 (TRBV29-1, TRBJ2-5)
CSTRPPGETQYF

SEQ ID NO: 672265 - protein, 12 aa, Homo sapiens
  CDR3 for alpha chain variable domain of TCR clone 336133 (TRAV3, TRAJ26)
CAVRDYGQNIFF

SEQ ID NO: 672266 - protein, 16 aa, Homo sapiens
  CDR3 for beta chain variable domain of TCR clone 336133 (TRBV11-2, TRBJ1-2)
CASSPSGREANYGYTF

SEQ ID NO: 672267 - protein, 12 aa, Homo sapiens
  CDR3 for alpha chain variable domain of TCR clone 336134 (TRAV16, TRAJ49)
CALSGTGNQFYF

SEQ ID NO: 672268 - protein, 17 aa, Homo sapiens
  CDR3 for beta chain variable domain of TCR clone 336134 (TRBV13, TRBJ2-3)
CASSLSRVAGGRNTQYF

SEQ ID NO: 672269 - protein, 14 aa, Homo sapiens
  CDR3 for alpha chain variable domain of TCR clone 336135 (TRAV12-2, TRAJ13)
CAVKKTVGYQKVTF

SEQ ID NO: 672270 - protein, 16 aa, Homo sapiens
  CDR3 for beta chain variable domain of TCR clone 336135 (TRBV4-2, TRBJ2-4)
CASSQELRRAKNIQYF

SEQ ID NO: 672271 - protein, 14 aa, Homo sapiens
  CDR3 for alpha chain variable domain of TCR clone 336136 (TRAV29/DV5, TRAJ44)
CAAFLVGTASKLTF

SEQ ID NO: 672272 - protein, 15 aa, Homo sapiens
  CDR3 for beta chain variable domain of TCR clone 336136 (TRBV7-3, TRBJ2-2)
CASSETGQGTGELFV

SEQ ID NO: 672273 - protein, 11 aa, Homo sapiens
  CDR3 for alpha chain variable domain of TCR clone 336137 (TRAV3, TRAJ21)
FSVGNFNKFYF

SEQ ID NO: 672274 - protein, 17 aa, Homo sapiens
  CDR3 for beta chain variable domain of TCR clone 336137 (TRBV13, TRBJ2-3)
CTSSLSRVAGGRNTQYF

SEQ ID NO: 672275 - protein, 13 aa, Homo sapiens
  CDR3 for alpha chain variable domain of TCR clone 336138 (TRAV35, TRAJ43)
CAGYPYNNNDMRF

SEQ ID NO: 672276 - protein, 15 aa, Homo sapiens
  CDR3 for beta chain variable domain of TCR clone 336138 (TRBV7-2, TRBJ2-1)
CASSLASGRVNEQFF

SEQ ID NO: 672277 - protein, 12 aa, Homo sapiens
  CDR3 for alpha chain variable domain of TCR clone 336139 (TRAV3, TRAJ31)
CAVRDGNARLMF

SEQ ID NO: 672278 - protein, 18 aa, Homo sapiens
  CDR3 for beta chain variable domain of TCR clone 336139 (TRBV7-2, TRBJ2-3)
CASSLNREGSGITDTQYF

SEQ ID NO: 672279 - protein, 15 aa, Homo sapiens
  CDR3 for alpha chain variable domain of TCR clone 336140 (TRAV8-3, TRAJ29)
CAVGVGDSGNTPLVF

SEQ ID NO: 672280 - protein, 13 aa, Homo sapiens
  CDR3 for beta chain variable domain of TCR clone 336140 (TRBV10-3, TRBJ2-7)
CASKLAVNYEQYF

SEQ ID NO: 672281 - protein, 13 aa, Homo sapiens
  CDR3 for alpha chain variable domain of TCR clone 336141 (TRAV2, TRAJ21)
CAVEDLNFNKFSF

SEQ ID NO: 672282 - protein, 15 aa, Homo sapiens
  CDR3 for beta chain variable domain of TCR clone 336141 (TRBV28, TRBJ2-5)
CASSPGQGSIETQYF

SEQ ID NO: 672283 - protein, 16 aa, Homo sapiens
  CDR3 for alpha chain variable domain of TCR clone 336142 (TRAV30, TRAJ24)
CGTEIVDADSWGKFQF

SEQ ID NO: 672284 - protein, 14 aa, Homo sapiens
  CDR3 for beta chain variable domain of TCR clone 336142 (TRBV12-5, TRBJ2-5)
CAGGSRTHQETHYF

SEQ ID NO: 672285 - protein, 13 aa, Homo sapiens
  CDR3 for alpha chain variable domain of TCR clone 336143 (TRAV20, TRAJ31)
CAVQAIGGARLMF

SEQ ID NO: 672286 - protein, 15 aa, Homo sapiens
  CDR3 for beta chain variable domain of TCR clone 336143 (TRBV4-1, TRBJ1-1)
CASSYSGTGGTEAFF

SEQ ID NO: 672287 - protein, 16 aa, Homo sapiens
  CDR3 for alpha chain variable domain of TCR clone 336144 (TRAV30, TRAJ24)
CGTEIVDADSWGEFQF

SEQ ID NO: 672288 - protein, 14 aa, Homo sapiens
  CDR3 for beta chain variable domain of TCR clone 336144 (TRBV12-5, TRBJ2-5)
CASGSRTHQESQYF

SEQ ID NO: 672289 - protein, 14 aa, Homo sapiens
  CDR3 for alpha chain variable domain of TCR clone 336145 (TRAV12-2, TRAJ40)
CAVKIPSGTYKYIF

SEQ ID NO: 672290 - protein, 13 aa, Homo sapiens
  CDR3 for beta chain variable domain of TCR clone 336145 (TRBV20-1, TRBJ1-3)
CSARVQGMDTIYY

SEQ ID NO: 672291 - protein, 14 aa, Homo sapiens
  CDR3 for alpha chain variable domain of TCR clone 336146 (TRAV16, TRAJ37)
CALDISGNIGKLIF

SEQ ID NO: 672292 - protein, 14 aa, Homo sapiens
  CDR3 for beta chain variable domain of TCR clone 336146 (TRBV7-6, TRBJ2-7)
CASSFRQGADEQYF

SEQ ID NO: 672293 - protein, 13 aa, Homo sapiens
  CDR3 for alpha chain variable domain of TCR clone 336147 (TRAV27, TRAJ45)
CRSSGGGADGLTF

SEQ ID NO: 672294 - protein, 17 aa, Homo sapiens
  CDR3 for beta chain variable domain of TCR clone 336147 (TRBV11-2, TRBJ2-1)
CASSLYPPGVEYNEQIF

SEQ ID NO: 672295 - protein, 15 aa, Homo sapiens
  CDR3 for alpha chain variable domain of TCR clone 336148 (TRAV13-1, TRAJ5)
CAVYIRDTGRRGLTF

SEQ ID NO: 672296 - protein, 16 aa, Homo sapiens
  CDR3 for beta chain variable domain of TCR clone 336148 (TRBV12-4, TRBJ2-1)
CASTEQGMDRSNEQFF

SEQ ID NO: 672297 - protein, 17 aa, Homo sapiens
  CDR3 for alpha chain variable domain of TCR clone 336149 (TRAV3, TRAJ6)
CAVRDGPRAGGSYIPTF

SEQ ID NO: 672298 - protein, 14 aa, Homo sapiens
  CDR3 for beta chain variable domain of TCR clone 336149 (TRBV7-7, TRBJ2-7)
CASSPKTSFYEQYF

SEQ ID NO: 672299 - protein, 12 aa, Homo sapiens
  CDR3 for alpha chain variable domain of TCR clone 336150 (TRAV17, TRAJ53)
CAFGGSNYKLTF

SEQ ID NO: 672300 - protein, 16 aa, Homo sapiens
  CDR3 for beta chain variable domain of TCR clone 336150 (TRBV11-2, TRBJ2-4)
CASSQVGRGGLDIQYF

SEQ ID NO: 672301 - protein, 13 aa, Homo sapiens
  CDR3 for alpha chain variable domain of TCR clone 336151 (TRAV17, TRAJ4)
CATKSGGYNKLIF

SEQ ID NO: 672302 - protein, 14 aa, Homo sapiens
  CDR3 for beta chain variable domain of TCR clone 336151 (TRBV20-1, TRBJ1-5)
CSARDDWGNQPQHF

SEQ ID NO: 672303 - protein, 13 aa, Homo sapiens
  CDR3 for alpha chain variable domain of TCR clone 336152 (TRAV13-2, TRAJ21)
CAENLYNFNKFYF

SEQ ID NO: 672304 - protein, 16 aa, Homo sapiens
  CDR3 for beta chain variable domain of TCR clone 336152 (TRBV2, TRBJ2-4)
CASSEAPGGEQNMQYF

SEQ ID NO: 672305 - protein, 15 aa, Homo sapiens
  CDR3 for alpha chain variable domain of TCR clone 336153 (TRAV29/DV5, TRAJ24)
CAASGATDSWGKFQF

SEQ ID NO: 672306 - protein, 14 aa, Homo sapiens
  CDR3 for beta chain variable domain of TCR clone 336153 (TRBV4-1, TRBJ2-2)
CASSQAVNTGELFF

SEQ ID NO: 672307 - protein, 13 aa, Homo sapiens
  CDR3 for alpha chain variable domain of TCR clone 336154 (TRAV12-1, TRAJ34)
CVVTRYNTGKLIF

SEQ ID NO: 672308 - protein, 13 aa, Homo sapiens
  CDR3 for beta chain variable domain of TCR clone 336154 (TRBV28, TRBJ2-7)
CASKAGGVYEQYF

SEQ ID NO: 672309 - protein, 11 aa, Homo sapiens
  CDR3 for alpha chain variable domain of TCR clone 336155 (TRAV17, TRAJ31)
CATDRTARLMF

SEQ ID NO: 672310 - protein, 13 aa, Homo sapiens
  CDR3 for beta chain variable domain of TCR clone 336155 (TRBV7-2, TRBJ1-6)
CASSLKFDSPLHF

SEQ ID NO: 672311 - protein, 19 aa, Homo sapiens
  CDR3 for alpha chain variable domain of TCR clone 336156 (TRAV26-1, TRAJ52)
CIVREHRNAGGTCYGKLTF

SEQ ID NO: 672312 - protein, 15 aa, Homo sapiens
  CDR3 for beta chain variable domain of TCR clone 336156 (TRBV29-1, TRBJ2-1)
CSGRDRKSSYNEQFF

SEQ ID NO: 672313 - protein, 15 aa, Homo sapiens
  CDR3 for alpha chain variable domain of TCR clone 336157 (TRAV3, TRAJ9)
CAVSARNTGGFKTIF

SEQ ID NO: 672314 - protein, 12 aa, Homo sapiens
  CDR3 for beta chain variable domain of TCR clone 336157 (TRBV11-2, TRBJ2-7)
CASSLPTYEQYF

SEQ ID NO: 672315 - protein, 15 aa, Homo sapiens
  CDR3 for alpha chain variable domain of TCR clone 336158 (TRAV1-2, TRAJ12)
CAVIPEVDSSYKLIF

SEQ ID NO: 672316 - protein, 12 aa, Homo sapiens
  CDR3 for beta chain variable domain of TCR clone 336158 (TRBV11-3, TRBJ2-2)
CASSLPTGDLFF

SEQ ID NO: 672317 - protein, 14 aa, Homo sapiens
  CDR3 for alpha chain variable domain of TCR clone 336159 (TRAV26-1, TRAJ45)
CIEVTGGGADGRTF

SEQ ID NO: 672318 - protein, 12 aa, Homo sapiens
  CDR3 for beta chain variable domain of TCR clone 336159 (TRBV12-4, TRBJ2-7)
CASSLGGYEQYF

SEQ ID NO: 672319 - protein, 13 aa, Homo sapiens
  CDR3 for alpha chain variable domain of TCR clone 336160 (TRAV8-3, TRAJ6)
CAVGSGGSYIPTF

SEQ ID NO: 672320 - protein, 14 aa, Homo sapiens
  CDR3 for beta chain variable domain of TCR clone 336160 (TRBV11-2, TRBJ1-1)
CASSTQRGRNGAFF

SEQ ID NO: 672321 - protein, 16 aa, Homo sapiens
  CDR3 for alpha chain variable domain of TCR clone 336161 (TRAV3, TRAJ37)
CAVRGKGSGNTGKLIF

SEQ ID NO: 672322 - protein, 15 aa, Homo sapiens
  CDR3 for beta chain variable domain of TCR clone 336161 (TRBV7-2, TRBJ1-2)
CASSPRAGWNYGYTF

SEQ ID NO: 672323 - protein, 15 aa, Homo sapiens
  CDR3 for alpha chain variable domain of TCR clone 336162 (TRAV26-1, TRAJ29)
CIVRVGGSGNTHLVF

SEQ ID NO: 672324 - protein, 14 aa, Homo sapiens
  CDR3 for beta chain variable domain of TCR clone 336162 (TRBV18, TRBJ2-5)
CASSPGVSQETQYF

SEQ ID NO: 672325 - protein, 18 aa, Homo sapiens
  CDR3 for alpha chain variable domain of TCR clone 336163 (TRAV12-2, )
CAVEDIQNADPAVYQLRD

SEQ ID NO: 672326 - protein, 16 aa, Homo sapiens
  CDR3 for beta chain variable domain of TCR clone 336163 (TRBV6-1, TRBJ1-2)
CASSGAWQGRSHGYTF

SEQ ID NO: 672327 - protein, 14 aa, Homo sapiens
  CDR3 for alpha chain variable domain of TCR clone 336164 (TRAV8-6, TRAJ49)
GAVSVRYTGNQFYF

SEQ ID NO: 672328 - protein, 19 aa, Homo sapiens
  CDR3 for beta chain variable domain of TCR clone 336164 (TRBV28, TRBJ2-1)
CASSFSIRGSGRTRYEQFF

SEQ ID NO: 672329 - protein, 13 aa, Homo sapiens
  CDR3 for alpha chain variable domain of TCR clone 336165 (TRAV8-2, TRAJ29)
CALPGAGNTPLVF

SEQ ID NO: 672330 - protein, 12 aa, Homo sapiens
  CDR3 for beta chain variable domain of TCR clone 336165 (TRBV24-1, TRBJ1-1)
CATLYPDNEAFF

SEQ ID NO: 672331 - protein, 13 aa, Homo sapiens
  CDR3 for alpha chain variable domain of TCR clone 336166 (TRAV12-2, TRAJ42)
CAVKRGIQGNLIF

SEQ ID NO: 672332 - protein, 16 aa, Homo sapiens
  CDR3 for beta chain variable domain of TCR clone 336166 (TRBV9, TRBJ2-2)
CASSAMGKGNTGELFF

SEQ ID NO: 672333 - protein, 14 aa, Homo sapiens
  CDR3 for alpha chain variable domain of TCR clone 336167 (TRAV8-3, TRAJ35)
CAVVPQGFGNVLHC

SEQ ID NO: 672334 - protein, 15 aa, Homo sapiens
  CDR3 for beta chain variable domain of TCR clone 336167 (TRBV5-7, TRBJ2-7)
CASSGGRPVPYEQYF

SEQ ID NO: 672335 - protein, 16 aa, Homo sapiens
  CDR3 for alpha chain variable domain of TCR clone 336168 (TRAV3, TRAJ37)
CAVRPHGSGNTGKLIF

SEQ ID NO: 672336 - protein, 13 aa, Homo sapiens
  CDR3 for beta chain variable domain of TCR clone 336168 (TRBV9, TRBJ1-2)
CASSVEEKVSPYG

SEQ ID NO: 672337 - protein, 16 aa, Homo sapiens
  CDR3 for alpha chain variable domain of TCR clone 336169 (TRAV20, TRAJ38)
CAVQASNAGNNRKLIW

SEQ ID NO: 672338 - protein, 14 aa, Homo sapiens
  CDR3 for beta chain variable domain of TCR clone 336169 (TRBV12-4, TRBJ1-3)
CASTLTGAGNTIYF

SEQ ID NO: 672339 - protein, 13 aa, Homo sapiens
  CDR3 for alpha chain variable domain of TCR clone 336170 (TRAV2, TRAJ29)
CAAQNSGNTPLVF

SEQ ID NO: 672340 - protein, 12 aa, Homo sapiens
  CDR3 for beta chain variable domain of TCR clone 336170 (TRBV5-1, TRBJ2-5)
CASSLGLETQYF

SEQ ID NO: 672341 - protein, 15 aa, Homo sapiens
  CDR3 for alpha chain variable domain of TCR clone 336171 (TRAV38-1, TRAJ37)
CAFIFGPGNPGKLIF

SEQ ID NO: 672342 - protein, 12 aa, Homo sapiens
  CDR3 for beta chain variable domain of TCR clone 336171 (TRBV7-9, TRBJ2-7)
CASSLEGYEQYF

SEQ ID NO: 672343 - protein, 16 aa, Homo sapiens
  CDR3 for alpha chain variable domain of TCR clone 336172 (TRAV26-1, TRAJ45)
CIVEKYSGGGADGLTF

SEQ ID NO: 672344 - protein, 12 aa, Homo sapiens
  CDR3 for beta chain variable domain of TCR clone 336172 (TRBV7-9, TRBJ1-2)
CASSLGHYGYTF

SEQ ID NO: 672345 - protein, 15 aa, Homo sapiens
  CDR3 for alpha chain variable domain of TCR clone 336173 (TRAV23/DV6, TRAJ37)
CAAGEGSSKTGKLIL

SEQ ID NO: 672346 - protein, 15 aa, Homo sapiens
  CDR3 for beta chain variable domain of TCR clone 336173 (TRBV28, TRBJ2-1)
CASSIIAGGRSEQFF

SEQ ID NO: 672347 - protein, 12 aa, Homo sapiens
  CDR3 for alpha chain variable domain of TCR clone 336174 (TRAV16, TRAJ10)
CSRTGGGNKLTF

SEQ ID NO: 672348 - protein, 17 aa, Homo sapiens
  CDR3 for beta chain variable domain of TCR clone 336174 (TRBV18, TRBJ1-5)
CASSPTMGQGTNQPQHF

SEQ ID NO: 672349 - protein, 12 aa, Homo sapiens
  CDR3 for alpha chain variable domain of TCR clone 336175 (TRAV27, TRAJ35)
CAGADFGNVLHC

SEQ ID NO: 672350 - protein, 16 aa, Homo sapiens
  CDR3 for beta chain variable domain of TCR clone 336175 (TRBV6-1, TRBJ2-1)
CASILRQGCSYNEQFF

SEQ ID NO: 672351 - protein, 17 aa, Homo sapiens
  CDR3 for alpha chain variable domain of TCR clone 336176 (TRAV23/DV6, TRAJ57)
CAASSTLSQGGSEKLVF

SEQ ID NO: 672352 - protein, 16 aa, Homo sapiens
  CDR3 for beta chain variable domain of TCR clone 336176 (TRBV25-1, TRBJ1-1)
CASTHLGGNTEAFLDK

SEQ ID NO: 672353 - protein, 14 aa, Homo sapiens
  CDR3 for alpha chain variable domain of TCR clone 336177 (TRAV12-3, TRAJ12)
CASVRMDSSYKLIL

SEQ ID NO: 672354 - protein, 15 aa, Homo sapiens
  CDR3 for beta chain variable domain of TCR clone 336177 (TRBV27, TRBJ2-7)
CASIPPGQGTYEQYF

SEQ ID NO: 672355 - protein, 14 aa, Homo sapiens
  CDR3 for alpha chain variable domain of TCR clone 336178 (TRAV8-1, TRAJ24)
CAVNAADSGGKLQF

SEQ ID NO: 672356 - protein, 16 aa, Homo sapiens
  CDR3 for beta chain variable domain of TCR clone 336178 (TRBV4-3, TRBJ2-1)
CASSPALDRGVNEQLF

SEQ ID NO: 672357 - protein, 14 aa, Homo sapiens
  CDR3 for alpha chain variable domain of TCR clone 336179 (TRAV12-3, TRAJ54)
CAMRGIQGAQKLVF

SEQ ID NO: 672358 - protein, 15 aa, Homo sapiens
  CDR3 for beta chain variable domain of TCR clone 336179 (TRBV12-4, TRBJ1-5)
CASSFEGWGNQPQHF

SEQ ID NO: 672359 - protein, 12 aa, Homo sapiens
  CDR3 for alpha chain variable domain of TCR clone 336180 (TRAV1-2, TRAJ17)
CAVRAAGNKLTF

SEQ ID NO: 672360 - protein, 12 aa, Homo sapiens
  CDR3 for beta chain variable domain of TCR clone 336180 (TRBV11-2, TRBJ2-2)
CASSLGGGELFF

SEQ ID NO: 672361 - protein, 16 aa, Homo sapiens
  CDR3 for alpha chain variable domain of TCR clone 336181 (TRAV3, TRAJ37)
CAVRPHGSGNTGKLIF

SEQ ID NO: 672362 - protein, 15 aa, Homo sapiens
  CDR3 for beta chain variable domain of TCR clone 336181 (TRBV7-3, TRBJ2-2)
CASKANGANTGELFF

SEQ ID NO: 672363 - protein, 13 aa, Homo sapiens
  CDR3 for alpha chain variable domain of TCR clone 336182 (TRAV8-4, TRAJ10)
CAAFTVGGNKLTF

SEQ ID NO: 672364 - protein, 13 aa, Homo sapiens
  CDR3 for beta chain variable domain of TCR clone 336182 (TRBV7-9, TRBJ1-2)
CASSLKQNYGYTF

SEQ ID NO: 672365 - protein, 16 aa, Homo sapiens
  CDR3 for alpha chain variable domain of TCR clone 336183 (TRAV26-1, TRAJ52)
CIVSNAWGTSYGKLTF

SEQ ID NO: 672366 - protein, 15 aa, Homo sapiens
  CDR3 for beta chain variable domain of TCR clone 336183 (TRBV7-3, TRBJ2-1)
CASSPTGGGEVEQFF

SEQ ID NO: 672367 - protein, 14 aa, Homo sapiens
  CDR3 for alpha chain variable domain of TCR clone 336184 (TRAV1-2, TRAJ16)
CAVNRFSDCQKLLF

SEQ ID NO: 672368 - protein, 16 aa, Homo sapiens
  CDR3 for beta chain variable domain of TCR clone 336184 (TRBV2, TRBJ2-3)
CASSTSVEGVTDTQYF

SEQ ID NO: 672369 - protein, 15 aa, Homo sapiens
  CDR3 for alpha chain variable domain of TCR clone 336185 (TRAV2, TRAJ24)
CAVVRLKNSWGKLQF

SEQ ID NO: 672370 - protein, 16 aa, Homo sapiens
  CDR3 for beta chain variable domain of TCR clone 336185 (TRBV7-7, TRBJ2-3)
CASSPGAGGSTDTQYF

SEQ ID NO: 672371 - protein, 14 aa, Homo sapiens
  CDR3 for alpha chain variable domain of TCR clone 336186 (TRAV3, TRAJ16)
CCERLKSDGQKLLF

SEQ ID NO: 672372 - protein, 15 aa, Homo sapiens
  CDR3 for beta chain variable domain of TCR clone 336186 (TRBV11-2, TRBJ2-2)
CASSSDRVNAGELFF

SEQ ID NO: 672373 - protein, 11 aa, Homo sapiens
  CDR3 for alpha chain variable domain of TCR clone 336187 (TRAV2, TRAJ13)
CASGGYQKVTF

SEQ ID NO: 672374 - protein, 11 aa, Homo sapiens
  CDR3 for beta chain variable domain of TCR clone 336187 (TRBV10-3, TRBJ2-7)
CAISEGLEQYF

SEQ ID NO: 672375 - protein, 15 aa, Homo sapiens
  CDR3 for alpha chain variable domain of TCR clone 336188 (TRAV12-3, TRAJ11)
CAMSEENSGYSTLTL

SEQ ID NO: 672376 - protein, 13 aa, Homo sapiens
  CDR3 for beta chain variable domain of TCR clone 336188 (TRBV12-4, TRBJ2-1)
CASSFHSGSEQFF

SEQ ID NO: 672377 - protein, 14 aa, Homo sapiens
  CDR3 for alpha chain variable domain of TCR clone 336189 (TRAV12-2, TRAJ17)
CAVLFKAAGNKLTF

SEQ ID NO: 672378 - protein, 14 aa, Homo sapiens
  CDR3 for beta chain variable domain of TCR clone 336189 (TRBV15, TRBJ1-2)
CATSRDFDREGYTF

SEQ ID NO: 672379 - protein, 11 aa, Homo sapiens
  CDR3 for alpha chain variable domain of TCR clone 336190 (TRAV17, TRAJ21)
CATGNFNKFYF

SEQ ID NO: 672380 - protein, 17 aa, Homo sapiens
  CDR3 for beta chain variable domain of TCR clone 336190 (TRBV11-2, TRBJ2-1)
CASSLYPPGVEYNEQFF

SEQ ID NO: 672381 - protein, 14 aa, Homo sapiens
  CDR3 for alpha chain variable domain of TCR clone 336191 (TRAV1-2, TRAJ16)
CAVNRFSDGQKLLF

SEQ ID NO: 672382 - protein, 15 aa, Homo sapiens
  CDR3 for beta chain variable domain of TCR clone 336191 (TRBV5-1, TRBJ2-2)
CASSLAAGGSGELFF

SEQ ID NO: 672383 - protein, 15 aa, Homo sapiens
  CDR3 for alpha chain variable domain of TCR clone 336192 (TRAV23/DV6, TRAJ58)
CAARLLRGETSCSRL

SEQ ID NO: 672384 - protein, 13 aa, Homo sapiens
  CDR3 for beta chain variable domain of TCR clone 336192 (TRBV6-4, TRBJ1-5)
CASSADLNQPQHF

SEQ ID NO: 672385 - protein, 12 aa, Homo sapiens
  CDR3 for alpha chain variable domain of TCR clone 336193 (TRAV26-1, TRAJ35)
CIGLSFGNVLHC

SEQ ID NO: 672386 - protein, 17 aa, Homo sapiens
  CDR3 for beta chain variable domain of TCR clone 336193 (TRBV5-7, TRBJ2-1)
CASSSYWGLAGRNEQFF

SEQ ID NO: 672387 - protein, 16 aa, Homo sapiens
  CDR3 for alpha chain variable domain of TCR clone 336194 (TRAV8-3, TRAJ8)
CAVPRDWNTGFQKLVF

SEQ ID NO: 672388 - protein, 14 aa, Homo sapiens
  CDR3 for beta chain variable domain of TCR clone 336194 (TRBV4-1, TRBJ2-2)
CASSQAVNTGELFF

SEQ ID NO: 672389 - protein, 14 aa, Homo sapiens
  CDR3 for alpha chain variable domain of TCR clone 336195 (TRAV13-2, TRAJ11)
CRESSYSGYSTLTF

SEQ ID NO: 672390 - protein, 14 aa, Homo sapiens
  CDR3 for beta chain variable domain of TCR clone 336195 (TRBV20-1, TRBJ2-3)
CSARVSGFTDTQYF

SEQ ID NO: 672391 - protein, 14 aa, Homo sapiens
  CDR3 for alpha chain variable domain of TCR clone 336196 (TRAV26-1, TRAJ38)
CIADNAGNNRKLIW

SEQ ID NO: 672392 - protein, 14 aa, Homo sapiens
  CDR3 for beta chain variable domain of TCR clone 336196 (TRBV7-9, TRBJ2-1)
CASRPTGLRNEQFF

SEQ ID NO: 672393 - protein, 14 aa, Homo sapiens
  CDR3 for alpha chain variable domain of TCR clone 336197 (TRAV4, TRAJ11)
CLVGEYSGYSTLTF

SEQ ID NO: 672394 - protein, 14 aa, Homo sapiens
  CDR3 for beta chain variable domain of TCR clone 336197 (TRBV7-2, TRBJ1-1)
CASSFLTGTTEAFF

SEQ ID NO: 672395 - protein, 23 aa, Homo sapiens
  CDR3 for alpha chain variable domain of TCR clone 336198 (TRAV26-1, TRAJ38)
CIADNAGNNHIQNPDPAVYQMRD

SEQ ID NO: 672396 - protein, 17 aa, Homo sapiens
  CDR3 for beta chain variable domain of TCR clone 336198 (TRBV11-2, TRBJ2-6)
CASSQRDIFSGANVLTF

SEQ ID NO: 672397 - protein, 14 aa, Homo sapiens
  CDR3 for alpha chain variable domain of TCR clone 336199 (TRAV12-2, TRAJ40)
CAVKIPSGTHKYIF

SEQ ID NO: 672398 - protein, 11 aa, Homo sapiens
  CDR3 for beta chain variable domain of TCR clone 336199 (TRBV6-3, TRBJ2-3)
CATGQADTQYF

SEQ ID NO: 672399 - protein, 16 aa, Homo sapiens
  CDR3 for alpha chain variable domain of TCR clone 336200 (TRAV4, TRAJ42)
CLVGPIYGGSQGNLIF

SEQ ID NO: 672400 - protein, 13 aa, Homo sapiens
  CDR3 for beta chain variable domain of TCR clone 336200 (TRBV11-2, TRBJ2-7)
CASRPLGSYEQYF

SEQ ID NO: 672401 - protein, 14 aa, Homo sapiens
  CDR3 for alpha chain variable domain of TCR clone 336201 (TRAV9-2, TRAJ24)
CALNPRGSWGKLQV

SEQ ID NO: 672402 - protein, 15 aa, Homo sapiens
  CDR3 for beta chain variable domain of TCR clone 336201 (TRBV7-2, TRBJ2-3)
CASSSTGLETDTQYF

SEQ ID NO: 672403 - protein, 12 aa, Homo sapiens
  CDR3 for alpha chain variable domain of TCR clone 336202 (TRAV12-3, TRAJ17)
CAMTLTGNKRTF

SEQ ID NO: 672404 - protein, 16 aa, Homo sapiens
  CDR3 for beta chain variable domain of TCR clone 336202 (TRBV9, TRBJ2-1)
CASSVGGGGNYNEQFF

SEQ ID NO: 672405 - protein, 21 aa, Homo sapiens
  CDR3 for alpha chain variable domain of TCR clone 336203 (TRAV12-1, TRAJ37)
CVVNGGLWQYRQTNLWARDNF

SEQ ID NO: 672406 - protein, 12 aa, Homo sapiens
  CDR3 for beta chain variable domain of TCR clone 336203 (TRBV20-1, TRBJ1-2)
CSAPGFNYGYTF

SEQ ID NO: 672407 - protein, 11 aa, Homo sapiens
  CDR3 for alpha chain variable domain of TCR clone 336204 (TRAV2, TRAJ33)
CAVESNYQLIW

SEQ ID NO: 672408 - protein, 14 aa, Homo sapiens
  CDR3 for beta chain variable domain of TCR clone 336204 (TRBV5-1, TRBJ2-2)
CASSLGGGSGELFF

SEQ ID NO: 672409 - protein, 11 aa, Homo sapiens
  CDR3 for alpha chain variable domain of TCR clone 336205 (TRAV12-1, TRAJ34)
CVVNKGRELIF

SEQ ID NO: 672410 - protein, 11 aa, Homo sapiens
  CDR3 for beta chain variable domain of TCR clone 336205 (TRBV2, TRBJ2-1)
CYGPPGNEQFF

SEQ ID NO: 672411 - protein, 13 aa, Homo sapiens
  CDR3 for alpha chain variable domain of TCR clone 336206 (TRAV12-1, TRAJ21)
CVVTLYNFNKFYF

SEQ ID NO: 672412 - protein, 20 aa, Homo sapiens
  CDR3 for beta chain variable domain of TCR clone 336206 (TRBV7-8, TRBJ2-1)
CASSLAHRLAGVRSYNKQFF

SEQ ID NO: 672413 - protein, 15 aa, Homo sapiens
  CDR3 for alpha chain variable domain of TCR clone 336207 (TRAV36/DV7, TRAJ54)
CAVEKPVQGAQKLVF

SEQ ID NO: 672414 - protein, 15 aa, Homo sapiens
  CDR3 for beta chain variable domain of TCR clone 336207 (TRBV6-3, TRBJ2-7)
CASSSPGTVFYEQYF

SEQ ID NO: 672415 - protein, 16 aa, Homo sapiens
  CDR3 for alpha chain variable domain of TCR clone 336208 (TRAV30, TRAJ24)
CGTEIVDADSWGKFQF

SEQ ID NO: 672416 - protein, 18 aa, Homo sapiens
  CDR3 for beta chain variable domain of TCR clone 336208 (TRBV12-5, TRBJ2-5)
CASGSRTHQDPVLRARHA

SEQ ID NO: 672417 - protein, 17 aa, Homo sapiens
  CDR3 for alpha chain variable domain of TCR clone 336209 (TRAV13-1, TRAJ31)
CAPRDRLMFGDGTQLVV

SEQ ID NO: 672418 - protein, 11 aa, Homo sapiens
  CDR3 for beta chain variable domain of TCR clone 336209 (TRBV7-9, TRBJ2-7)
CSSLEGYEQYF

SEQ ID NO: 672419 - protein, 13 aa, Homo sapiens
  CDR3 for alpha chain variable domain of TCR clone 336210 (TRAV21, TRAJ27)
CAARPGNAGKSTF

SEQ ID NO: 672420 - protein, 15 aa, Homo sapiens
  CDR3 for beta chain variable domain of TCR clone 336210 (TRBV5-1, TRBJ2-1)
CASSPPRAPYNQQFF

SEQ ID NO: 672421 - protein, 14 aa, Homo sapiens
  CDR3 for alpha chain variable domain of TCR clone 336211 (TRAV1-2, TRAJ22)
CAAVPGGSARQLTF

SEQ ID NO: 672422 - protein, 11 aa, Homo sapiens
  CDR3 for beta chain variable domain of TCR clone 336211 (TRBV11-2, TRBJ2-2)
CASSLPGELFF

SEQ ID NO: 672423 - protein, 13 aa, Homo sapiens
  CDR3 for alpha chain variable domain of TCR clone 336212 (TRAV12-1, TRAJ20)
CVVNVPNVYKLSF

SEQ ID NO: 672424 - protein, 12 aa, Homo sapiens
  CDR3 for beta chain variable domain of TCR clone 336212 (TRBV11-2, TRBJ2-1)
CASSVQREGQFF

SEQ ID NO: 672425 - protein, 14 aa, Homo sapiens
  CDR3 for alpha chain variable domain of TCR clone 336213 (TRAV27, TRAJ15)
CAGFDNQAGIALIF

SEQ ID NO: 672426 - protein, 11 aa, Homo sapiens
  CDR3 for beta chain variable domain of TCR clone 336213 (TRBV29-1, TRBJ1-1)
CIVEVGTRTFF

SEQ ID NO: 672427 - protein, 14 aa, Homo sapiens
  CDR3 for alpha chain variable domain of TCR clone 336214 (TRAV2, TRAJ34)
CAVERNTTSSSLGL

SEQ ID NO: 672428 - protein, 14 aa, Homo sapiens
  CDR3 for beta chain variable domain of TCR clone 336214 (TRBV7-9, TRBJ2-1)
CASSDNSGYNEQFF

SEQ ID NO: 672429 - protein, 18 aa, Homo sapiens
  CDR3 for alpha chain variable domain of TCR clone 336215 (TRAV16, TRAJ52)
CALSGVDAGGTSYGKLTF

SEQ ID NO: 672430 - protein, 12 aa, Homo sapiens
  CDR3 for beta chain variable domain of TCR clone 336215 (TRBV7-9, TRBJ2-7)
CASSLEGYEQYF

SEQ ID NO: 672431 - protein, 14 aa, Homo sapiens
  CDR3 for alpha chain variable domain of TCR clone 336216 (TRAV12-2, TRAJ13)
CAVKKTGGYQKVTI

SEQ ID NO: 672432 - protein, 12 aa, Homo sapiens
  CDR3 for beta chain variable domain of TCR clone 336216 (TRBV5-6, TRBJ2-7)
CASSLGRYEQYF

SEQ ID NO: 672433 - protein, 14 aa, Homo sapiens
  CDR3 for alpha chain variable domain of TCR clone 336217 (TRAV20, TRAJ56)
CAVQFGGANSKLTF

SEQ ID NO: 672434 - protein, 14 aa, Homo sapiens
  CDR3 for beta chain variable domain of TCR clone 336217 (TRBV20-1, TRBJ2-7)
CSAKRGRSSYEEYF

SEQ ID NO: 672435 - protein, 17 aa, Homo sapiens
  CDR3 for alpha chain variable domain of TCR clone 336218 (TRAV38-2/DV8, TRAJ38)
CAYRSARGGGNNRKLIW

SEQ ID NO: 672436 - protein, 13 aa, Homo sapiens
  CDR3 for beta chain variable domain of TCR clone 336218 (TRBV6-5, TRBJ2-1)
CASRGRVGNEQFF

SEQ ID NO: 672437 - protein, 15 aa, Homo sapiens
  CDR3 for alpha chain variable domain of TCR clone 336219 (TRAV12-3, TRAJ6)
CAMSATTGGSYIPTF

SEQ ID NO: 672438 - protein, 15 aa, Homo sapiens
  CDR3 for beta chain variable domain of TCR clone 336219 (TRBV7-2, TRBJ2-5)
CASSGILAGAETQYY

SEQ ID NO: 672439 - protein, 11 aa, Homo sapiens
  CDR3 for alpha chain variable domain of TCR clone 336220 (TRAV4, TRAJ31)
CLVGLNARLMF

SEQ ID NO: 672440 - protein, 15 aa, Homo sapiens
  CDR3 for beta chain variable domain of TCR clone 336220 (TRBV11-2, TRBJ1-6)
CASTLRGTGNSPLHF

SEQ ID NO: 672441 - protein, 18 aa, Homo sapiens
  CDR3 for alpha chain variable domain of TCR clone 336221 (TRAV26-2, TRAJ54)
RILRDVEVGIQGAQKLVF

SEQ ID NO: 672442 - protein, 16 aa, Homo sapiens
  CDR3 for beta chain variable domain of TCR clone 336221 (TRBV6-1, TRBJ2-5)
CASSETLDRGAETQYF

SEQ ID NO: 672443 - protein, 14 aa, Homo sapiens
  CDR3 for alpha chain variable domain of TCR clone 336222 (TRAV2, TRAJ37)
CAVDFTSNTGKLIF

SEQ ID NO: 672444 - protein, 14 aa, Homo sapiens
  CDR3 for beta chain variable domain of TCR clone 336222 (TRBV7-9, TRBJ2-7)
CASSPSGGQNEQYF

SEQ ID NO: 672445 - protein, 14 aa, Homo sapiens
  CDR3 for alpha chain variable domain of TCR clone 336223 (TRAV12-2, TRAJ17)
YAVNIKAAGNKLTF

SEQ ID NO: 672446 - protein, 16 aa, Homo sapiens
  CDR3 for beta chain variable domain of TCR clone 336223 (TRBV20-1, TRBJ2-6)
CSASSQGYDGANVLTF

SEQ ID NO: 672447 - protein, 13 aa, Homo sapiens
  CDR3 for alpha chain variable domain of TCR clone 336224 (TRAV8-4, TRAJ30)
CAVSVNREDKIIF

SEQ ID NO: 672448 - protein, 13 aa, Homo sapiens
  CDR3 for beta chain variable domain of TCR clone 336224 (TRBV3-1, TRBJ2-2)
CASLARGSGGLFF

SEQ ID NO: 672449 - protein, 14 aa, Homo sapiens
  CDR3 for alpha chain variable domain of TCR clone 336225 (TRAV26-1, TRAJ34)
CIVRESYNTDKLIF

SEQ ID NO: 672450 - protein, 13 aa, Homo sapiens
  CDR3 for beta chain variable domain of TCR clone 336225 (TRBV19, TRBJ2-1)
CANSRGVYNEQFF

SEQ ID NO: 672451 - protein, 14 aa, Homo sapiens
  CDR3 for alpha chain variable domain of TCR clone 336226 (TRAV1-2, TRAJ8)
CAVREDTGFQKLVF

SEQ ID NO: 672452 - protein, 12 aa, Homo sapiens
  CDR3 for beta chain variable domain of TCR clone 336226 (TRBV7-8, TRBJ2-7)
CASSVGDREQYF

SEQ ID NO: 672453 - protein, 12 aa, Homo sapiens
  CDR3 for alpha chain variable domain of TCR clone 336227 (TRAV16, TRAJ10)
CSRTGGGNKLTF

SEQ ID NO: 672454 - protein, 13 aa, Homo sapiens
  CDR3 for beta chain variable domain of TCR clone 336227 (TRBV7-3, TRBJ1-1)
CASRQDWGAEAFF

SEQ ID NO: 672455 - protein, 11 aa, Homo sapiens
  CDR3 for alpha chain variable domain of TCR clone 336228 (TRAV13-1, TRAJ52)
CAAILVLMLVV

SEQ ID NO: 672456 - protein, 14 aa, Homo sapiens
  CDR3 for beta chain variable domain of TCR clone 336228 (TRBV12-5, TRBJ2-5)
CASGSRTHQETQYF

SEQ ID NO: 672457 - protein, 14 aa, Homo sapiens
  CDR3 for alpha chain variable domain of TCR clone 336229 (TRAV3, TRAJ37)
CAVKESCNTGKLIF

SEQ ID NO: 672458 - protein, 12 aa, Homo sapiens
  CDR3 for beta chain variable domain of TCR clone 336229 (TRBV7-8, TRBJ2-7)
CASSLGDREQYF

SEQ ID NO: 672459 - protein, 15 aa, Homo sapiens
  CDR3 for alpha chain variable domain of TCR clone 336230 (TRAV8-3, TRAJ15)
CAVGAANQAGTAPIF

SEQ ID NO: 672460 - protein, 14 aa, Homo sapiens
  CDR3 for beta chain variable domain of TCR clone 336230 (TRBV20-1, TRBJ2-1)
CSPNDEASYNEQFF

SEQ ID NO: 672461 - protein, 14 aa, Homo sapiens
  CDR3 for alpha chain variable domain of TCR clone 336231 (TRAV1-2, TRAJ16)
CAVNRFSDGQKLLF

SEQ ID NO: 672462 - protein, 18 aa, Homo sapiens
  CDR3 for beta chain variable domain of TCR clone 336231 (TRBV20-1, TRBJ2-6)
CSAESTPTHGSGANDLTF

SEQ ID NO: 672463 - protein, 18 aa, Homo sapiens
  CDR3 for alpha chain variable domain of TCR clone 336232 (TRAV29/DV5, TRAJ52)
CAAGFRGAGGTSYGKLTF

SEQ ID NO: 672464 - protein, 13 aa, Homo sapiens
  CDR3 for beta chain variable domain of TCR clone 336232 (TRBV4-1, TRBJ2-2)
CASSQENTGELFF

SEQ ID NO: 672465 - protein, 15 aa, Homo sapiens
  CDR3 for alpha chain variable domain of TCR clone 336233 (TRAV8-6, TRAJ37)
CAVIFSSGNTGKLIF

SEQ ID NO: 672466 - protein, 15 aa, Homo sapiens
  CDR3 for beta chain variable domain of TCR clone 336233 (TRBV25-1, TRBJ2-4)
CASSETESANNIQYF

SEQ ID NO: 672467 - protein, 15 aa, Homo sapiens
  CDR3 for alpha chain variable domain of TCR clone 336234 (TRAV27, TRAJ38)
CAGRFNAGNNRKLIW

SEQ ID NO: 672468 - protein, 15 aa, Homo sapiens
  CDR3 for beta chain variable domain of TCR clone 336234 (TRBV18, TRBJ2-7)
CASSPSSTGNYEQYF

SEQ ID NO: 672469 - protein, 20 aa, Homo sapiens
  CDR3 for alpha chain variable domain of TCR clone 336235 (TRAV4, TRAJ29)
CCVLLPRGCVPFSGNTPLVF

SEQ ID NO: 672470 - protein, 14 aa, Homo sapiens
  CDR3 for beta chain variable domain of TCR clone 336235 (TRBV10-3, TRBJ1-2)
CAIRAGTGDYGYTF

SEQ ID NO: 672471 - protein, 16 aa, Homo sapiens
  CDR3 for alpha chain variable domain of TCR clone 336236 (TRAV14/DV4, TRAJ54)
CAMREGRIQGAQKLVF

SEQ ID NO: 672472 - protein, 19 aa, Homo sapiens
  CDR3 for beta chain variable domain of TCR clone 336236 (TRBV7-2, TRBJ2-3)
CASSFRSRNWGGGTDTQYF

SEQ ID NO: 672473 - protein, 17 aa, Homo sapiens
  CDR3 for alpha chain variable domain of TCR clone 336237 (TRAV3, TRAJ42)
CAVRDRDYGGSQGNLIF

SEQ ID NO: 672474 - protein, 14 aa, Homo sapiens
  CDR3 for beta chain variable domain of TCR clone 336237 (TRBV7-2, TRBJ2-5)
CASSPRVSSETQYF

SEQ ID NO: 672475 - protein, 16 aa, Homo sapiens
  CDR3 for alpha chain variable domain of TCR clone 336238 (TRAV20, TRAJ10)
CAVLRGLTGGGNKLTF

SEQ ID NO: 672476 - protein, 14 aa, Homo sapiens
  CDR3 for beta chain variable domain of TCR clone 336238 (TRBV19, TRBJ1-5)
CASRAPDSFRSQHY

SEQ ID NO: 672477 - protein, 17 aa, Homo sapiens
  CDR3 for alpha chain variable domain of TCR clone 336239 (TRAV3, TRAJ6)
CAVRDDPRARRSYIPTF

SEQ ID NO: 672478 - protein, 14 aa, Homo sapiens
  CDR3 for beta chain variable domain of TCR clone 336239 (TRBV7-2, TRBJ2-7)
CASSPKTSFYEQYF

SEQ ID NO: 672479 - protein, 14 aa, Homo sapiens
  CDR3 for alpha chain variable domain of TCR clone 336240 (TRAV12-2, TRAJ11)
CAVRKNSGYSTLTF

SEQ ID NO: 672480 - protein, 15 aa, Homo sapiens
  CDR3 for beta chain variable domain of TCR clone 336240 (TRBV20-1, TRBJ2-7)
CSARGRVSGMDEQYF

SEQ ID NO: 672481 - protein, 18 aa, Homo sapiens
  CDR3 for alpha chain variable domain of TCR clone 336241 (TRAV17, TRAJ45)
CATSLDLYSGEGADGLTF

SEQ ID NO: 672482 - protein, 15 aa, Homo sapiens
  CDR3 for beta chain variable domain of TCR clone 336241 (TRBV11-2, TRBJ2-1)
CASSKNRGLIYEQFF

SEQ ID NO: 672483 - protein, 14 aa, Homo sapiens
  CDR3 for alpha chain variable domain of TCR clone 336242 (TRAV1-2, TRAJ8)
CAVREDTGFKKLVF

SEQ ID NO: 672484 - protein, 12 aa, Homo sapiens
  CDR3 for beta chain variable domain of TCR clone 336242 (TRBV11-2, TRBJ2-2)
CASSLGGGELFF

SEQ ID NO: 672485 - protein, 14 aa, Homo sapiens
  CDR3 for alpha chain variable domain of TCR clone 336243 (TRAV16, TRAJ57)
CVLSGQGGSEKLVF

SEQ ID NO: 672486 - protein, 13 aa, Homo sapiens
  CDR3 for beta chain variable domain of TCR clone 336243 (TRBV5-4, TRBJ2-1)
CASSLQGPREQFF

SEQ ID NO: 672487 - protein, 12 aa, Homo sapiens
  CDR3 for alpha chain variable domain of TCR clone 336244 (TRAV2, TRAJ9)
CAVGAGGFKTIF

SEQ ID NO: 672488 - protein, 16 aa, Homo sapiens
  CDR3 for beta chain variable domain of TCR clone 336244 (TRBV20-1, TRBJ1-2)
CSASMGQGVANYGYTF

SEQ ID NO: 672489 - protein, 12 aa, Homo sapiens
  CDR3 for alpha chain variable domain of TCR clone 336245 (TRAV21, TRAJ3)
CCFYSSASKIIF

SEQ ID NO: 672490 - protein, 15 aa, Homo sapiens
  CDR3 for beta chain variable domain of TCR clone 336245 (TRBV5-1, TRBJ2-5)
CASSFKGGDQETQYF

SEQ ID NO: 672491 - protein, 13 aa, Homo sapiens
  CDR3 for alpha chain variable domain of TCR clone 336246 (TRAV4, TRAJ42)
CLVGGGSQGNLIF

SEQ ID NO: 672492 - protein, 15 aa, Homo sapiens
  CDR3 for beta chain variable domain of TCR clone 336246 (TRBV11-1, TRBJ2-7)
CASSLNYGASYEQYF

SEQ ID NO: 672493 - protein, 17 aa, Homo sapiens
  CDR3 for alpha chain variable domain of TCR clone 336247 (TRAV13-1, TRAJ52)
CAASSGAGGTSYGKLTF

SEQ ID NO: 672494 - protein, 13 aa, Homo sapiens
  CDR3 for beta chain variable domain of TCR clone 336247 (TRBV14, TRBJ1-1)
CAGSQEAGTEAFF

SEQ ID NO: 672495 - protein, 13 aa, Homo sapiens
  CDR3 for alpha chain variable domain of TCR clone 336248 (TRAV2, TRAJ29)
CAAGNSGNTPLVF

SEQ ID NO: 672496 - protein, 14 aa, Homo sapiens
  CDR3 for beta chain variable domain of TCR clone 336248 (TRBV27, TRBJ2-2)
CASSLGAATGELFF

SEQ ID NO: 672497 - protein, 14 aa, Homo sapiens
  CDR3 for alpha chain variable domain of TCR clone 336249 (TRAV9-2, TRAJ39)
CALYIYNAGDMLTF

SEQ ID NO: 672498 - protein, 13 aa, Homo sapiens
  CDR3 for beta chain variable domain of TCR clone 336249 (TRBV7-2, TRBJ2-3)
CASSSDWTDTQYF

SEQ ID NO: 672499 - protein, 12 aa, Homo sapiens
  CDR3 for alpha chain variable domain of TCR clone 336250 (TRAV16, TRAJ43)
CSNGDGNNDMRF

SEQ ID NO: 672500 - protein, 13 aa, Homo sapiens
  CDR3 for beta chain variable domain of TCR clone 336250 (TRBV3-1, TRBJ2-2)
CASRQTNTGELFF

SEQ ID NO: 672501 - protein, 18 aa, Homo sapiens
  CDR3 for alpha chain variable domain of TCR clone 336251 (TRAV13-1, TRAJ52)
CAASKRSAGGTSYGKLTF

SEQ ID NO: 672502 - protein, 13 aa, Homo sapiens
  CDR3 for beta chain variable domain of TCR clone 336251 (TRBV12-4, TRBJ1-2)
CASSLRQGKGYVF

SEQ ID NO: 672503 - protein, 15 aa, Homo sapiens
  CDR3 for alpha chain variable domain of TCR clone 336252 (TRAV16, TRAJ17)
CALSGNKAAGNKLTF

SEQ ID NO: 672504 - protein, 16 aa, Homo sapiens
  CDR3 for beta chain variable domain of TCR clone 336252 (TRBV7-7, TRBJ1-6)
CASSSLPAGEYSPLHF

SEQ ID NO: 672505 - protein, 16 aa, Homo sapiens
  CDR3 for alpha chain variable domain of TCR clone 336253 (TRAV35, TRAJ28)
RAGQRYSGAGSYQLTF

SEQ ID NO: 672506 - protein, 13 aa, Homo sapiens
  CDR3 for beta chain variable domain of TCR clone 336253 (TRBV19, TRBJ1-2)
CASSQGQVYGYTF

SEQ ID NO: 672507 - protein, 11 aa, Homo sapiens
  CDR3 for alpha chain variable domain of TCR clone 336254 (TRAV2, TRAJ21)
CAVFNFNKFYF

SEQ ID NO: 672508 - protein, 19 aa, Homo sapiens
  CDR3 for beta chain variable domain of TCR clone 336254 (TRBV19, TRBJ2-5)
CASSIGQVTDFFLGETQYF

SEQ ID NO: 672509 - protein, 14 aa, Homo sapiens
  CDR3 for alpha chain variable domain of TCR clone 336255 (TRAV12-1, TRAJ17)
CVMNPKAAGNKLTF

SEQ ID NO: 672510 - protein, 15 aa, Homo sapiens
  CDR3 for beta chain variable domain of TCR clone 336255 (TRBV5-1, TRBJ2-5)
CASSLGLAEQETQYF

SEQ ID NO: 672511 - protein, 15 aa, Homo sapiens
  CDR3 for alpha chain variable domain of TCR clone 336256 (TRAV16, TRAJ52)
CSKCSWCTSYGKLTF

SEQ ID NO: 672512 - protein, 15 aa, Homo sapiens
  CDR3 for beta chain variable domain of TCR clone 336256 (TRBV7-9, TRBJ1-6)
CASSSPGRGNSPLHF

SEQ ID NO: 672513 - protein, 16 aa, Homo sapiens
  CDR3 for alpha chain variable domain of TCR clone 336257 (TRAV21, TRAJ45)
CAVSWGSGGGADGLTV

SEQ ID NO: 672514 - protein, 14 aa, Homo sapiens
  CDR3 for beta chain variable domain of TCR clone 336257 (TRBV4-2, TRBJ1-2)
CASSPGGSNYGYTF

SEQ ID NO: 672515 - protein, 12 aa, Homo sapiens
  CDR3 for alpha chain variable domain of TCR clone 336258 (TRAV8-3, TRAJ26)
CAGDNYGQNFVS

SEQ ID NO: 672516 - protein, 12 aa, Homo sapiens
  CDR3 for beta chain variable domain of TCR clone 336258 (TRBV7-9, TRBJ2-7)
CASRTGFDEQYF

SEQ ID NO: 672517 - protein, 10 aa, Homo sapiens
  CDR3 for alpha chain variable domain of TCR clone 336259 (TRAV13-1, TRAJ22)
CAASRRQLTF

SEQ ID NO: 672518 - protein, 13 aa, Homo sapiens
  CDR3 for beta chain variable domain of TCR clone 336259 (TRBV10-3, TRBJ2-7)
CASKLAVNYEQYF

SEQ ID NO: 672519 - protein, 13 aa, Homo sapiens
  CDR3 for alpha chain variable domain of TCR clone 336260 (TRAV13-2, TRAJ53)
CAENMGSNYKLTF

SEQ ID NO: 672520 - protein, 11 aa, Homo sapiens
  CDR3 for beta chain variable domain of TCR clone 336260 (TRBV10-2, TRBJ2-2)
CASSASTSRCR

SEQ ID NO: 672521 - protein, 12 aa, Homo sapiens
  CDR3 for alpha chain variable domain of TCR clone 336261 (TRAV3, TRAJ20)
WAVRDGDYKLSF

SEQ ID NO: 672522 - protein, 13 aa, Homo sapiens
  CDR3 for beta chain variable domain of TCR clone 336261 (TRBV11-2, TRBJ2-5)
CASSFSSQETQYF

SEQ ID NO: 672523 - protein, 14 aa, Homo sapiens
  CDR3 for alpha chain variable domain of TCR clone 336262 (TRAV3, TRAJ40)
CAVRDRRGTYKYIF

SEQ ID NO: 672524 - protein, 14 aa, Homo sapiens
  CDR3 for beta chain variable domain of TCR clone 336262 (TRBV4-2, TRBJ2-1)
CASGLDRAYNEQFF

SEQ ID NO: 672525 - protein, 14 aa, Homo sapiens
  CDR3 for alpha chain variable domain of TCR clone 336263 (TRAV23/DV6, TRAJ13)
CAASDTGGYQKVTF

SEQ ID NO: 672526 - protein, 16 aa, Homo sapiens
  CDR3 for beta chain variable domain of TCR clone 336263 (TRBV5-1, TRBJ1-3)
CASSPWAPSSGNTIYF

SEQ ID NO: 672527 - protein, 14 aa, Homo sapiens
  CDR3 for alpha chain variable domain of TCR clone 336264 (TRAV12-2, TRAJ40)
CAVKIPSGTYNYIF

SEQ ID NO: 672528 - protein, 14 aa, Homo sapiens
  CDR3 for beta chain variable domain of TCR clone 336264 (TRBV20-1, TRBJ1-1)
CSAQTRIGGTEAFS

SEQ ID NO: 672529 - protein, 13 aa, Homo sapiens
  CDR3 for alpha chain variable domain of TCR clone 336265 (TRAV16, TRAJ28)
CAPTGAGSYQLTF

SEQ ID NO: 672530 - protein, 12 aa, Homo sapiens
  CDR3 for beta chain variable domain of TCR clone 336265 (TRBV7-8, TRBJ2-7)
CASSLGDREQYF

SEQ ID NO: 672531 - protein, 13 aa, Homo sapiens
  CDR3 for alpha chain variable domain of TCR clone 336266 (TRAV2, TRAJ15)
CAVASQPGTALIF

SEQ ID NO: 672532 - protein, 14 aa, Homo sapiens
  CDR3 for beta chain variable domain of TCR clone 336266 (TRBV25-1, TRBJ1-1)
CASTHLGGNTEAFF

SEQ ID NO: 672533 - protein, 13 aa, Homo sapiens
  CDR3 for alpha chain variable domain of TCR clone 336267 (TRAV12-3, TRAJ7)
CAMTPYGTNRLAF

SEQ ID NO: 672534 - protein, 14 aa, Homo sapiens
  CDR3 for beta chain variable domain of TCR clone 336267 (TRBV19, TRBJ2-1)
CASPTFVLSGEQFF

SEQ ID NO: 672535 - protein, 13 aa, Homo sapiens
  CDR3 for alpha chain variable domain of TCR clone 336268 (TRAV2, TRAJ29)
CAAGNSGNTPLVF

SEQ ID NO: 672536 - protein, 13 aa, Homo sapiens
  CDR3 for beta chain variable domain of TCR clone 336268 (TRBV7-9, TRBJ1-6)
CASSLASLSPLHF

SEQ ID NO: 672537 - protein, 13 aa, Homo sapiens
  CDR3 for alpha chain variable domain of TCR clone 336269 (TRAV27, TRAJ41)
CAGEGNSGYALNF

SEQ ID NO: 672538 - protein, 15 aa, Homo sapiens
  CDR3 for beta chain variable domain of TCR clone 336269 (TRBV20-1, TRBJ2-2)
CSARDTRLNTGELFF

SEQ ID NO: 672539 - protein, 14 aa, Homo sapiens
  CDR3 for alpha chain variable domain of TCR clone 336270 (TRAV23/DV6, TRAJ8)
CAASKATGFQKLVF

SEQ ID NO: 672540 - protein, 15 aa, Homo sapiens
  CDR3 for beta chain variable domain of TCR clone 336270 (TRBV28, TRBJ2-3)
CASNPDQQGANTQYF

SEQ ID NO: 672541 - protein, 12 aa, Homo sapiens
  CDR3 for alpha chain variable domain of TCR clone 336271 (TRAV20, TRAJ56)
CAVTGANSKLTF

SEQ ID NO: 672542 - protein, 14 aa, Homo sapiens
  CDR3 for beta chain variable domain of TCR clone 336271 (TRBV20-1, TRBJ2-5)
CSDLVPGYQETQYF

SEQ ID NO: 672543 - protein, 16 aa, Homo sapiens
  CDR3 for alpha chain variable domain of TCR clone 336272 (TRAV30, TRAJ24)
CGPEIVDADSWGKFQF

SEQ ID NO: 672544 - protein, 15 aa, Homo sapiens
  CDR3 for beta chain variable domain of TCR clone 336272 (TRBV5-1, TRBJ2-2)
CASSSQGGNTGELFF

SEQ ID NO: 672545 - protein, 18 aa, Homo sapiens
  CDR3 for alpha chain variable domain of TCR clone 336273 (TRAV21, TRAJ53)
CAVKGGENSGGSYYKLTF

SEQ ID NO: 672546 - protein, 14 aa, Homo sapiens
  CDR3 for beta chain variable domain of TCR clone 336273 (TRBV11-3, TRBJ1-5)
LTGDRLYYNQPQHF

SEQ ID NO: 672547 - protein, 11 aa, Homo sapiens
  CDR3 for alpha chain variable domain of TCR clone 336274 (TRAV21, TRAJ31)
CAVRNNARLTF

SEQ ID NO: 672548 - protein, 15 aa, Homo sapiens
  CDR3 for beta chain variable domain of TCR clone 336274 (TRBV20-1, TRBJ2-7)
CSARDRVSGMDEQYF

SEQ ID NO: 672549 - protein, 19 aa, Homo sapiens
  CDR3 for alpha chain variable domain of TCR clone 336275 (TRAV2, TRAJ20)
ILQVREADASVYRDCKLSF

SEQ ID NO: 672550 - protein, 12 aa, Homo sapiens
  CDR3 for beta chain variable domain of TCR clone 336275 (TRBV11-2, TRBJ2-2)
CASSLGGGELFF

SEQ ID NO: 672551 - protein, 12 aa, Homo sapiens
  CDR3 for alpha chain variable domain of TCR clone 336276 (TRAV12-1, TRAJ40)
CGVYSGTYKYTF

SEQ ID NO: 672552 - protein, 18 aa, Homo sapiens
  CDR3 for beta chain variable domain of TCR clone 336276 (TRBV11-2, TRBJ2-3)
CASSLGGASRGAPNTQYF

SEQ ID NO: 672553 - protein, 16 aa, Homo sapiens
  CDR3 for alpha chain variable domain of TCR clone 336277 (TRAV30, TRAJ24)
CGTEIVDADSWGKFQF

SEQ ID NO: 672554 - protein, 14 aa, Homo sapiens
  CDR3 for beta chain variable domain of TCR clone 336277 (TRBV13, TRBJ2-5)
CASSLGRGQETQYF

SEQ ID NO: 672555 - protein, 14 aa, Homo sapiens
  CDR3 for alpha chain variable domain of TCR clone 336278 (TRAV26-1, TRAJ34)
CIVRVAYNTDKLIF

SEQ ID NO: 672556 - protein, 12 aa, Homo sapiens
  CDR3 for beta chain variable domain of TCR clone 336278 (TRBV7-8, TRBJ1-1)
CASSSLGGEAFF

SEQ ID NO: 672557 - protein, 14 aa, Homo sapiens
  CDR3 for alpha chain variable domain of TCR clone 336279 (TRAV3, TRAJ22)
CVVRDYGSARQLTC

SEQ ID NO: 672558 - protein, 13 aa, Homo sapiens
  CDR3 for beta chain variable domain of TCR clone 336279 (TRBV11-2, TRBJ2-5)
CASGHGAKETQYF

SEQ ID NO: 672559 - protein, 17 aa, Homo sapiens
  CDR3 for alpha chain variable domain of TCR clone 336280 (TRAV3, TRAJ6)
CSVRDGPRAGGSYIPTF

SEQ ID NO: 672560 - protein, 15 aa, Homo sapiens
  CDR3 for beta chain variable domain of TCR clone 336280 (TRBV4-1, TRBJ1-4)
CASSDTGGTNEKLFF

SEQ ID NO: 672561 - protein, 13 aa, Homo sapiens
  CDR3 for alpha chain variable domain of TCR clone 336281 (TRAV30, TRAJ24)
RGTVTDSWGKLQF

SEQ ID NO: 672562 - protein, 15 aa, Homo sapiens
  CDR3 for beta chain variable domain of TCR clone 336281 (TRBV25-1, TRBJ1-4)
CASSPGDSTNEKLFF

SEQ ID NO: 672563 - protein, 15 aa, Homo sapiens
  CDR3 for alpha chain variable domain of TCR clone 336282 (TRAV1-2, TRAJ32)
CAVRGYGGATKKLIF

SEQ ID NO: 672564 - protein, 15 aa, Homo sapiens
  CDR3 for beta chain variable domain of TCR clone 336282 (TRBV25-1, TRBJ2-5)
CASSDTGTHQETQYF

SEQ ID NO: 672565 - protein, 11 aa, Homo sapiens
  CDR3 for alpha chain variable domain of TCR clone 336283 (TRAV2, TRAJ33)
CAVDSNYQLIW

SEQ ID NO: 672566 - protein, 14 aa, Homo sapiens
  CDR3 for beta chain variable domain of TCR clone 336283 (TRBV7-9, TRBJ2-2)
CASSLVQDTGELFF

SEQ ID NO: 672567 - protein, 14 aa, Homo sapiens
  CDR3 for alpha chain variable domain of TCR clone 336284 (TRAV20, TRAJ10)
CAVRVEGGGNKLTF

SEQ ID NO: 672568 - protein, 18 aa, Homo sapiens
  CDR3 for beta chain variable domain of TCR clone 336284 (TRBV24-1, TRBJ2-1)
CANSDLMFLGRGVHEQFF

SEQ ID NO: 672569 - protein, 20 aa, Homo sapiens
  CDR3 for alpha chain variable domain of TCR clone 336285 (TRAV14/DV4, TRAJ22)
CSMREGPFSISSGSARQLTF

SEQ ID NO: 672570 - protein, 13 aa, Homo sapiens
  CDR3 for beta chain variable domain of TCR clone 336285 (TRBV4-2, TRBJ2-3)
CASSQDWQHTQYF

SEQ ID NO: 672571 - protein, 13 aa, Homo sapiens
  CDR3 for alpha chain variable domain of TCR clone 336286 (TRAV38-1, TRAJ42)
CARWGGSQGNLIF

SEQ ID NO: 672572 - protein, 17 aa, Homo sapiens
  CDR3 for beta chain variable domain of TCR clone 336286 (TRBV20-1, TRBJ2-1)
CSARDPRAGVWDNEQSF

SEQ ID NO: 672573 - protein, 13 aa, Homo sapiens
  CDR3 for alpha chain variable domain of TCR clone 336287 (TRAV35, TRAJ36)
CAGPRIGANNLFF

SEQ ID NO: 672574 - protein, 13 aa, Homo sapiens
  CDR3 for beta chain variable domain of TCR clone 336287 (TRBV27, TRBJ1-6)
CASRWTGYSPLHF

SEQ ID NO: 672575 - protein, 16 aa, Homo sapiens
  CDR3 for alpha chain variable domain of TCR clone 336288 (TRAV12-1, TRAJ12)
CVVNTLLMDSSYKLIF

SEQ ID NO: 672576 - protein, 14 aa, Homo sapiens
  CDR3 for beta chain variable domain of TCR clone 336288 (TRBV15, TRBJ2-3)
CATRSGTSTDTQYF

SEQ ID NO: 672577 - protein, 10 aa, Homo sapiens
  CDR3 for alpha chain variable domain of TCR clone 336289 (TRAV12-2, TRAJ22)
CAVNETQLTF

SEQ ID NO: 672578 - protein, 15 aa, Homo sapiens
  CDR3 for beta chain variable domain of TCR clone 336289 (TRBV6-3, TRBJ2-3)
CASSTRTFYTDTQYF

SEQ ID NO: 672579 - protein, 12 aa, Homo sapiens
  CDR3 for alpha chain variable domain of TCR clone 336290 (TRAV27, TRAJ42)
CAGGGSQGHLIF

SEQ ID NO: 672580 - protein, 13 aa, Homo sapiens
  CDR3 for beta chain variable domain of TCR clone 336290 (TRBV19, TRBJ2-7)
CASSIRSSYEQYF

SEQ ID NO: 672581 - protein, 13 aa, Homo sapiens
  CDR3 for alpha chain variable domain of TCR clone 336291 (TRAV1-2, TRAJ16)
CAVNRFSDGQAAL

SEQ ID NO: 672582 - protein, 14 aa, Homo sapiens
  CDR3 for beta chain variable domain of TCR clone 336291 (TRBV19, TRBJ2-1)
CASPTFVLSGEQFF

SEQ ID NO: 672583 - protein, 12 aa, Homo sapiens
  CDR3 for alpha chain variable domain of TCR clone 336292 (TRAV8-4, TRAJ31)
CAVSDSNARLMF

SEQ ID NO: 672584 - protein, 15 aa, Homo sapiens
  CDR3 for beta chain variable domain of TCR clone 336292 (TRBV27, TRBJ2-7)
CASRFWGQGAHEQYF

SEQ ID NO: 672585 - protein, 12 aa, Homo sapiens
  CDR3 for alpha chain variable domain of TCR clone 336293 (TRAV12-3, TRAJ17)
CAMTLTGNKLTF

SEQ ID NO: 672586 - protein, 18 aa, Homo sapiens
  CDR3 for beta chain variable domain of TCR clone 336293 (TRBV4-1, TRBJ2-3)
CASSHQLAGGRSTDTQYF

SEQ ID NO: 672587 - protein, 10 aa, Homo sapiens
  CDR3 for alpha chain variable domain of TCR clone 336294 (TRAV36/DV7, TRAJ48)
CAVGNEKLTF

SEQ ID NO: 672588 - protein, 15 aa, Homo sapiens
  CDR3 for beta chain variable domain of TCR clone 336294 (TRBV19, TRBJ2-7)
CASSIGRTFSYEQYF

SEQ ID NO: 672589 - protein, 13 aa, Homo sapiens
  CDR3 for alpha chain variable domain of TCR clone 336295 (TRAV2, TRAJ16)
CCERGSDGQKLLF

SEQ ID NO: 672590 - protein, 12 aa, Homo sapiens
  CDR3 for beta chain variable domain of TCR clone 336295 (TRBV6-5, TRBJ2-7)
CASYIYGYEQYF

SEQ ID NO: 672591 - protein, 11 aa, Homo sapiens
  CDR3 for alpha chain variable domain of TCR clone 336296 (TRAV2, TRAJ13)
CASGGYQKVTF

SEQ ID NO: 672592 - protein, 16 aa, Homo sapiens
  CDR3 for beta chain variable domain of TCR clone 336296 (TRBV6-1, TRBJ1-6)
CASSPRSGGANSPLHF

SEQ ID NO: 672593 - protein, 13 aa, Homo sapiens
  CDR3 for alpha chain variable domain of TCR clone 336297 (TRAV20, TRAJ37)
CAGCSSNTGKLIF

SEQ ID NO: 672594 - protein, 16 aa, Homo sapiens
  CDR3 for beta chain variable domain of TCR clone 336297 (TRBV12-4, TRBJ2-2)
CASSLKRGTLSGELFF

SEQ ID NO: 672595 - protein, 15 aa, Homo sapiens
  CDR3 for alpha chain variable domain of TCR clone 336298 (TRAV12-2, TRAJ50)
CAVNGLETSYDKVIF

SEQ ID NO: 672596 - protein, 16 aa, Homo sapiens
  CDR3 for beta chain variable domain of TCR clone 336298 (TRBV5-4, TRBJ2-3)
CASQQPGAGGADTQYV

SEQ ID NO: 672597 - protein, 14 aa, Homo sapiens
  CDR3 for alpha chain variable domain of TCR clone 336299 (TRAV12-3, TRAJ10)
SHLPLTGGGNKLTF

SEQ ID NO: 672598 - protein, 11 aa, Homo sapiens
  CDR3 for beta chain variable domain of TCR clone 336299 (TRBV7-2, TRBJ2-7)
CASSSGLWQYF

SEQ ID NO: 672599 - protein, 14 aa, Homo sapiens
  CDR3 for alpha chain variable domain of TCR clone 336300 (TRAV1-1, TRAJ27)
CAVIYNTNAGKSTF

SEQ ID NO: 672600 - protein, 15 aa, Homo sapiens
  CDR3 for beta chain variable domain of TCR clone 336300 (TRBV7-6, TRBJ2-1)
CASSSLAGEGNEQFF

SEQ ID NO: 672601 - protein, 14 aa, Homo sapiens
  CDR3 for alpha chain variable domain of TCR clone 336301 (TRAV13-1, TRAJ24)
CAASRTDSWGKLQF

SEQ ID NO: 672602 - protein, 14 aa, Homo sapiens
  CDR3 for beta chain variable domain of TCR clone 336301 (TRBV18, TRBJ2-7)
CASSPRGGAYEQYF

SEQ ID NO: 672603 - protein, 19 aa, Homo sapiens
  CDR3 for alpha chain variable domain of TCR clone 336302 (TRAV1-2, TRAJ26)
CLLPLCCERPDNYGQNFVF

SEQ ID NO: 672604 - protein, 16 aa, Homo sapiens
  CDR3 for beta chain variable domain of TCR clone 336302 (TRBV6-4, TRBJ1-2)
CASSEAVGDPNYGYTF

SEQ ID NO: 672605 - protein, 14 aa, Homo sapiens
  CDR3 for alpha chain variable domain of TCR clone 336303 (TRAV13-1, TRAJ8)
CAASEDTVFQKLVF

SEQ ID NO: 672606 - protein, 13 aa, Homo sapiens
  CDR3 for beta chain variable domain of TCR clone 336303 (TRBV19, TRBJ1-5)
CASSTRRDQPQHF

SEQ ID NO: 672607 - protein, 11 aa, Homo sapiens
  CDR3 for alpha chain variable domain of TCR clone 336304 (TRAV12-2, TRAJ33)
CAVTSNYQLLR

SEQ ID NO: 672608 - protein, 14 aa, Homo sapiens
  CDR3 for beta chain variable domain of TCR clone 336304 (TRBV28, TRBJ2-2)
CASRIRSGTGELFF

SEQ ID NO: 672609 - protein, 13 aa, Homo sapiens
  CDR3 for alpha chain variable domain of TCR clone 336305 (TRAV1-2, TRAJ9)
CAALNTGGFKTIF

SEQ ID NO: 672610 - protein, 15 aa, Homo sapiens
  CDR3 for beta chain variable domain of TCR clone 336305 (TRBV6-1, TRBJ2-4)
CASSEAVWTINIQYF

SEQ ID NO: 672611 - protein, 12 aa, Homo sapiens
  CDR3 for alpha chain variable domain of TCR clone 336306 (TRAV12-2, TRAJ10)
WGVTGGGNKLTF

SEQ ID NO: 672612 - protein, 20 aa, Homo sapiens
  CDR3 for beta chain variable domain of TCR clone 336306 (TRBV19, TRBJ2-1)
CASSISRTVNSTRLNNEQFF

SEQ ID NO: 672613 - protein, 18 aa, Homo sapiens
  CDR3 for alpha chain variable domain of TCR clone 336307 (TRAV21, TRAJ52)
CAVRPSPAGGTSYGKLIF

SEQ ID NO: 672614 - protein, 14 aa, Homo sapiens
  CDR3 for beta chain variable domain of TCR clone 336307 (TRBV7-3, TRBJ2-1)
CASSLAGGTNEQFF

SEQ ID NO: 672615 - protein, 20 aa, Homo sapiens
  CDR3 for alpha chain variable domain of TCR clone 336308 (TRAV26-1, TRAJ52)
CCVLLHRPSAGGTSYGKLTF

SEQ ID NO: 672616 - protein, 14 aa, Homo sapiens
  CDR3 for beta chain variable domain of TCR clone 336308 (TRBV7-2, TRBJ1-4)
CASSRSKTNEKLFF

SEQ ID NO: 672617 - protein, 17 aa, Homo sapiens
  CDR3 for alpha chain variable domain of TCR clone 336309 (TRAV3, TRAJ6)
CAVRDGPRAGGSYLPTF

SEQ ID NO: 672618 - protein, 14 aa, Homo sapiens
  CDR3 for beta chain variable domain of TCR clone 336309 (TRBV7-2, TRBJ2-7)
CASSPKASFYEQYF

SEQ ID NO: 672619 - protein, 14 aa, Homo sapiens
  CDR3 for alpha chain variable domain of TCR clone 336310 (TRAV20, TRAJ13)
CAVQVSGGYQKVTF

SEQ ID NO: 672620 - protein, 13 aa, Homo sapiens
  CDR3 for beta chain variable domain of TCR clone 336310 (TRBV7-2, TRBJ2-2)
CASSLAVTGELFF

SEQ ID NO: 672621 - protein, 15 aa, Homo sapiens
  CDR3 for alpha chain variable domain of TCR clone 336311 (TRAV8-3, TRAJ9)
CAVEDRGTGGFKTIF

SEQ ID NO: 672622 - protein, 16 aa, Homo sapiens
  CDR3 for beta chain variable domain of TCR clone 336311 (TRBV24-1, TRBJ2-3)
CATSDPGTGATDSQYF

SEQ ID NO: 672623 - protein, 13 aa, Homo sapiens
  CDR3 for alpha chain variable domain of TCR clone 336312 (TRAV17, TRAJ9)
CATALNGGFKTIF

SEQ ID NO: 672624 - protein, 16 aa, Homo sapiens
  CDR3 for beta chain variable domain of TCR clone 336312 (TRBV15, TRBJ2-1)
CATSRNLAGGYNEQFF

SEQ ID NO: 672625 - protein, 14 aa, Homo sapiens
  CDR3 for alpha chain variable domain of TCR clone 336313 (TRAV1-2, TRAJ16)
CAVNRFSDGQKLLF

SEQ ID NO: 672626 - protein, 18 aa, Homo sapiens
  CDR3 for beta chain variable domain of TCR clone 336313 (TRBV4-1, TRBJ2-3)
CASSHQRAGGRSTDTQYF

SEQ ID NO: 672627 - protein, 16 aa, Homo sapiens
  CDR3 for alpha chain variable domain of TCR clone 336314 (TRAV12-3, TRAJ53)
CAMSPGSGGSNYKLTF

SEQ ID NO: 672628 - protein, 14 aa, Homo sapiens
  CDR3 for beta chain variable domain of TCR clone 336314 (TRBV6-3, TRBJ1-1)
CASRYTGESTEAFF

SEQ ID NO: 672629 - protein, 14 aa, Homo sapiens
  CDR3 for alpha chain variable domain of TCR clone 336315 (TRAV1-2, TRAJ8)
CAVREDAGFQKLVF

SEQ ID NO: 672630 - protein, 15 aa, Homo sapiens
  CDR3 for beta chain variable domain of TCR clone 336315 (TRBV7-3, TRBJ2-2)
CASSETGQGTGELFF

SEQ ID NO: 672631 - protein, 14 aa, Homo sapiens
  CDR3 for alpha chain variable domain of TCR clone 336316 (TRAV21, TRAJ15)
CAVSLNQAGTAVIF

SEQ ID NO: 672632 - protein, 11 aa, Homo sapiens
  CDR3 for beta chain variable domain of TCR clone 336316 (TRBV20-1, TRBJ2-7)
CSARTSYEQYF

SEQ ID NO: 672633 - protein, 13 aa, Homo sapiens
  CDR3 for alpha chain variable domain of TCR clone 336317 (TRAV8-3, TRAJ48)
CAVVPFGNEKLTF

SEQ ID NO: 672634 - protein, 17 aa, Homo sapiens
  CDR3 for beta chain variable domain of TCR clone 336317 (TRBV28, TRBJ2-7)
CASSPLRGRRWKGGQYF

SEQ ID NO: 672635 - protein, 12 aa, Homo sapiens
  CDR3 for alpha chain variable domain of TCR clone 336318 (TRAV16, TRAJ49)
CALNEGGSQFYF

SEQ ID NO: 672636 - protein, 14 aa, Homo sapiens
  CDR3 for beta chain variable domain of TCR clone 336318 (TRBV7-9, TRBJ2-1)
CASRPTGLRNEQFF

SEQ ID NO: 672637 - protein, 13 aa, Homo sapiens
  CDR3 for alpha chain variable domain of TCR clone 336319 (TRAV17, TRAJ9)
CATDYTGGFKTIF

SEQ ID NO: 672638 - protein, 15 aa, Homo sapiens
  CDR3 for beta chain variable domain of TCR clone 336319 (TRBV10-3, TRBJ2-3)
CAISLTSGGTDTQYF

SEQ ID NO: 672639 - protein, 13 aa, Homo sapiens
  CDR3 for alpha chain variable domain of TCR clone 336320 (TRAV20, TRAJ21)
CAVEGYNFNKFYF

SEQ ID NO: 672640 - protein, 13 aa, Homo sapiens
  CDR3 for beta chain variable domain of TCR clone 336320 (TRBV4-1, TRBJ2-1)
CASSQVNEYEQFF

SEQ ID NO: 672641 - protein, 15 aa, Homo sapiens
  CDR3 for alpha chain variable domain of TCR clone 336321 (TRAV34, TRAJ38)
CGADFTPGNNRKLIW

SEQ ID NO: 672642 - protein, 17 aa, Homo sapiens
  CDR3 for beta chain variable domain of TCR clone 336321 (TRBV6-3, TRBJ2-2)
CASSYAGQGINTGELFF

SEQ ID NO: 672643 - protein, 11 aa, Homo sapiens
  CDR3 for alpha chain variable domain of TCR clone 336322 (TRAV2, TRAJ33)
CAVDSNYQLIW

SEQ ID NO: 672644 - protein, 14 aa, Homo sapiens
  CDR3 for beta chain variable domain of TCR clone 336322 (TRBV5-1, TRBJ2-7)
CASSRGESLYEQYF

SEQ ID NO: 672645 - protein, 11 aa, Homo sapiens
  CDR3 for alpha chain variable domain of TCR clone 336323 (TRAV2, TRAJ13)
CASGGYKKVTF

SEQ ID NO: 672646 - protein, 15 aa, Homo sapiens
  CDR3 for beta chain variable domain of TCR clone 336323 (TRBV11-2, TRBJ2-2)
CASSSDRVNAGELFF

SEQ ID NO: 672647 - protein, 18 aa, Homo sapiens
  CDR3 for alpha chain variable domain of TCR clone 336324 (TRAV21, TRAJ52)
CAVRPSPAGGTSYRELTF

SEQ ID NO: 672648 - protein, 13 aa, Homo sapiens
  CDR3 for beta chain variable domain of TCR clone 336324 (TRBV10-3, TRBJ2-7)
CASKLAVNYEQYF

SEQ ID NO: 672649 - protein, 12 aa, Homo sapiens
  CDR3 for alpha chain variable domain of TCR clone 336325 (TRAV8-3, TRAJ20)
CAVGGGDCKLSF

SEQ ID NO: 672650 - protein, 14 aa, Homo sapiens
  CDR3 for beta chain variable domain of TCR clone 336325 (TRBV5-1, TRBJ2-7)
CASSRGESLYEQYF

SEQ ID NO: 672651 - protein, 13 aa, Homo sapiens
  CDR3 for alpha chain variable domain of TCR clone 336326 (TRAV2, TRAJ29)
CAAQNSGNTPLVF

SEQ ID NO: 672652 - protein, 17 aa, Homo sapiens
  CDR3 for beta chain variable domain of TCR clone 336326 (TRBV11-2, TRBJ2-1)
CASSLYPPGVEYNEQFF

SEQ ID NO: 672653 - protein, 12 aa, Homo sapiens
  CDR3 for alpha chain variable domain of TCR clone 336327 (TRAV29/DV5, TRAJ49)
CAATDTGNPFYF

SEQ ID NO: 672654 - protein, 15 aa, Homo sapiens
  CDR3 for beta chain variable domain of TCR clone 336327 (TRBV19, TRBJ2-2)
CASRQTGADTGELFF

SEQ ID NO: 672655 - protein, 14 aa, Homo sapiens
  CDR3 for alpha chain variable domain of TCR clone 336328 (TRAV3, TRAJ9)
CAVRGHTGGFKTIF

SEQ ID NO: 672656 - protein, 14 aa, Homo sapiens
  CDR3 for beta chain variable domain of TCR clone 336328 (TRBV15, TRBJ2-1)
CATSGVEDYNEQFF

SEQ ID NO: 672657 - protein, 14 aa, Homo sapiens
  CDR3 for alpha chain variable domain of TCR clone 336329 (TRAV12-2, TRAJ44)
CAVNPAGTASKITF

SEQ ID NO: 672658 - protein, 13 aa, Homo sapiens
  CDR3 for beta chain variable domain of TCR clone 336329 (TRBV20-1, TRBJ1-6)
CSAPVGVGSPLHF

SEQ ID NO: 672659 - protein, 12 aa, Homo sapiens
  CDR3 for alpha chain variable domain of TCR clone 336330 (TRAV1-2, TRAJ33)
CAALDSNYQFIW

SEQ ID NO: 672660 - protein, 13 aa, Homo sapiens
  CDR3 for beta chain variable domain of TCR clone 336330 (TRBV19, TRBJ2-7)
CASRKAGGSEQYF

SEQ ID NO: 672661 - protein, 11 aa, Homo sapiens
  CDR3 for alpha chain variable domain of TCR clone 336331 (TRAV12-1, TRAJ30)
CVVNGQDKIIF

SEQ ID NO: 672662 - protein, 16 aa, Homo sapiens
  CDR3 for beta chain variable domain of TCR clone 336331 (TRBV19, TRBJ2-1)
CASSKAGPSSYNEQFF

SEQ ID NO: 672663 - protein, 13 aa, Homo sapiens
  CDR3 for alpha chain variable domain of TCR clone 336332 (TRAV2, TRAJ40)
CAVVTSGTYKSII

SEQ ID NO: 672664 - protein, 14 aa, Homo sapiens
  CDR3 for beta chain variable domain of TCR clone 336332 (TRBV19, TRBJ2-1)
CASPTFVLSGEQFF

SEQ ID NO: 672665 - protein, 18 aa, Homo sapiens
  CDR3 for alpha chain variable domain of TCR clone 336333 (TRAV13-1, TRAJ52)
CAASKRSAGGTSYGKLTF

SEQ ID NO: 672666 - protein, 13 aa, Homo sapiens
  CDR3 for beta chain variable domain of TCR clone 336333 (TRBV7-2, TRBJ2-7)
CASSSPSGSKQYF

SEQ ID NO: 672667 - protein, 15 aa, Homo sapiens
  CDR3 for alpha chain variable domain of TCR clone 336334 (TRAV3, TRAJ3)
CAVRDRRSSASKIIF

SEQ ID NO: 672668 - protein, 15 aa, Homo sapiens
  CDR3 for beta chain variable domain of TCR clone 336334 (TRBV11-2, TRBJ2-1)
CASSKSRGLIYEQFF

SEQ ID NO: 672669 - protein, 12 aa, Homo sapiens
  CDR3 for alpha chain variable domain of TCR clone 336335 (TRAV12-3, TRAJ17)
CAMTLTGNKLTF

SEQ ID NO: 672670 - protein, 16 aa, Homo sapiens
  CDR3 for beta chain variable domain of TCR clone 336335 (TRBV7-2, TRBJ1-4)
CASSLAQRTTNEKLFF

SEQ ID NO: 672671 - protein, 13 aa, Homo sapiens
  CDR3 for alpha chain variable domain of TCR clone 336336 (TRAV30, TRAJ24)
CGTVTDSWGKLQF

SEQ ID NO: 672672 - protein, 15 aa, Homo sapiens
  CDR3 for beta chain variable domain of TCR clone 336336 (TRBV25-1, TRBJ1-4)
CASSPRDSTNEKLFF

SEQ ID NO: 672673 - protein, 15 aa, Homo sapiens
  CDR3 for alpha chain variable domain of TCR clone 336337 (TRAV1-2, TRAJ28)
CAVQYSGARSYQLTF

SEQ ID NO: 672674 - protein, 15 aa, Homo sapiens
  CDR3 for beta chain variable domain of TCR clone 336337 (TRBV9, TRBJ1-6)
CASSVAGTGDSPLHF

SEQ ID NO: 672675 - protein, 12 aa, Homo sapiens
  CDR3 for alpha chain variable domain of TCR clone 336338 (TRAV26-1, TRAJ36)
CIVIVRADNLFF

SEQ ID NO: 672676 - protein, 14 aa, Homo sapiens
  CDR3 for beta chain variable domain of TCR clone 336338 (TRBV14, TRBJ2-3)
CASSRKLAADTQYF

SEQ ID NO: 672677 - protein, 16 aa, Homo sapiens
  CDR3 for alpha chain variable domain of TCR clone 336339 (TRAV14/DV4, TRAJ15)
CGMREGPAQAGTALIF

SEQ ID NO: 672678 - protein, 12 aa, Homo sapiens
  CDR3 for beta chain variable domain of TCR clone 336339 (TRBV28, TRBJ2-6)
CAIQAGANVLTF

SEQ ID NO: 672679 - protein, 15 aa, Homo sapiens
  CDR3 for alpha chain variable domain of TCR clone 336340 (TRAV38-1, TRAJ28)
CAFWGVGAGSYQLTV

SEQ ID NO: 672680 - protein, 15 aa, Homo sapiens
  CDR3 for beta chain variable domain of TCR clone 336340 (TRBV12-4, TRBJ2-2)
CASSPQPGSTGELFF

SEQ ID NO: 672681 - protein, 16 aa, Homo sapiens
  CDR3 for alpha chain variable domain of TCR clone 336341 (TRAV23/DV6, TRAJ9)
CAASIGGNTGGSQTIF

SEQ ID NO: 672682 - protein, 14 aa, Homo sapiens
  CDR3 for beta chain variable domain of TCR clone 336341 (TRBV9, TRBJ2-7)
CASSVGVGSYEQYF

SEQ ID NO: 672683 - protein, 14 aa, Homo sapiens
  CDR3 for alpha chain variable domain of TCR clone 336342 (TRAV27, TRAJ36)
CAGPPKRGANNLFF

SEQ ID NO: 672684 - protein, 13 aa, Homo sapiens
  CDR3 for beta chain variable domain of TCR clone 336342 (TRBV4-1, TRBJ2-1)
CASSQEVQYEQFF

SEQ ID NO: 672685 - protein, 14 aa, Homo sapiens
  CDR3 for alpha chain variable domain of TCR clone 336343 (TRAV8-6, TRAJ12)
CAVKAADSSYKLIF

SEQ ID NO: 672686 - protein, 13 aa, Homo sapiens
  CDR3 for beta chain variable domain of TCR clone 336343 (TRBV4-2, TRBJ1-1)
CASSQAGNTEAFF

SEQ ID NO: 672687 - protein, 13 aa, Homo sapiens
  CDR3 for alpha chain variable domain of TCR clone 336344 (TRAV36/DV7, TRAJ49)
CAGDSNTGNQFYF

SEQ ID NO: 672688 - protein, 14 aa, Homo sapiens
  CDR3 for beta chain variable domain of TCR clone 336344 (TRBV25-1, TRBJ2-5)
CASSESTGRETQYF

SEQ ID NO: 672689 - protein, 17 aa, Homo sapiens
  CDR3 for alpha chain variable domain of TCR clone 336345 (TRAV26-1, TRAJ53)
CIVRVDDSGGSNYKLTF

SEQ ID NO: 672690 - protein, 14 aa, Homo sapiens
  CDR3 for beta chain variable domain of TCR clone 336345 (TRBV6-1, TRBJ1-5)
CASRDRGLSQPQHF

SEQ ID NO: 672691 - protein, 15 aa, Homo sapiens
  CDR3 for alpha chain variable domain of TCR clone 336346 (TRAV8-3, TRAJ6)
CAVGPLGGGSYIPTF

SEQ ID NO: 672692 - protein, 15 aa, Homo sapiens
  CDR3 for beta chain variable domain of TCR clone 336346 (TRBV27, TRBJ1-6)
CASSFDRGLGSPLHF

SEQ ID NO: 672693 - protein, 14 aa, Homo sapiens
  CDR3 for alpha chain variable domain of TCR clone 336347 (TRAV12-2, TRAJ40)
CAVKIPSGTYKYIF

SEQ ID NO: 672694 - protein, 14 aa, Homo sapiens
  CDR3 for beta chain variable domain of TCR clone 336347 (TRBV4-2, TRBJ2-1)
CASGLDGAYNEQFF

SEQ ID NO: 672695 - protein, 14 aa, Homo sapiens
  CDR3 for alpha chain variable domain of TCR clone 336348 (TRAV26-1, TRAJ34)
CIVRVAYNTDKLIF

SEQ ID NO: 672696 - protein, 16 aa, Homo sapiens
  CDR3 for beta chain variable domain of TCR clone 336348 (TRBV27, TRBJ2-2)
CASSSSGVSNTGELFF

SEQ ID NO: 672697 - protein, 13 aa, Homo sapiens
  CDR3 for alpha chain variable domain of TCR clone 336349 (TRAV27, TRAJ45)
CRSSGGGADGLTF

SEQ ID NO: 672698 - protein, 16 aa, Homo sapiens
  CDR3 for beta chain variable domain of TCR clone 336349 (TRBV4-1, TRBJ2-7)
CASSQDPTGYSYEQYF

SEQ ID NO: 672699 - protein, 16 aa, Homo sapiens
  CDR3 for alpha chain variable domain of TCR clone 336350 (TRAV3, TRAJ37)
CALRDSGSGNTVKLIF

SEQ ID NO: 672700 - protein, 12 aa, Homo sapiens
  CDR3 for beta chain variable domain of TCR clone 336350 (TRBV7-2, TRBJ2-5)
CSSSVYQENQYF

SEQ ID NO: 672701 - protein, 16 aa, Homo sapiens
  CDR3 for alpha chain variable domain of TCR clone 336351 (TRAV30, TRAJ24)
CGTEIVDADSWGKFQF

SEQ ID NO: 672702 - protein, 15 aa, Homo sapiens
  CDR3 for beta chain variable domain of TCR clone 336351 (TRBV5-1, TRBJ1-1)
CASSSTTGTNTDAFF

SEQ ID NO: 672703 - protein, 12 aa, Homo sapiens
  CDR3 for alpha chain variable domain of TCR clone 336352 (TRAV12-3, TRAJ40)
CAVSSGTYKYIF

SEQ ID NO: 672704 - protein, 14 aa, Homo sapiens
  CDR3 for beta chain variable domain of TCR clone 336352 (TRBV7-8, TRBJ2-7)
CASSPRDRVYEQYF

SEQ ID NO: 672705 - protein, 15 aa, Homo sapiens
  CDR3 for alpha chain variable domain of TCR clone 336353 (TRAV14/DV4, TRAJ10)
CAMRELTGGGNKLTF

SEQ ID NO: 672706 - protein, 17 aa, Homo sapiens
  CDR3 for beta chain variable domain of TCR clone 336353 (TRBV11-2, TRBJ2-1)
CASSLYPPGVEYNEQFF

SEQ ID NO: 672707 - protein, 12 aa, Homo sapiens
  CDR3 for alpha chain variable domain of TCR clone 336354 (TRAV12-3, TRAJ17)
CAMTLTGDKLTF

SEQ ID NO: 672708 - protein, 20 aa, Homo sapiens
  CDR3 for beta chain variable domain of TCR clone 336354 (TRBV19, TRBJ2-1)
CASSISRTVTSTRLNNEQFF

SEQ ID NO: 672709 - protein, 18 aa, Homo sapiens
  CDR3 for alpha chain variable domain of TCR clone 336355 (TRAV26-2, TRAJ54)
CILRDVEVEIQGAQKLVF

SEQ ID NO: 672710 - protein, 17 aa, Homo sapiens
  CDR3 for beta chain variable domain of TCR clone 336355 (TRBV20-1, TRBJ1-5)
CSASLGPGQGGNQPQHF

SEQ ID NO: 672711 - protein, 16 aa, Homo sapiens
  CDR3 for alpha chain variable domain of TCR clone 336356 (TRAV3, TRAJ10)
CAVRDMRAGGGNKLTI

SEQ ID NO: 672712 - protein, 14 aa, Homo sapiens
  CDR3 for beta chain variable domain of TCR clone 336356 (TRBV7-2, TRBJ1-4)
CASSVVEGGEKLFF

SEQ ID NO: 672713 - protein, 16 aa, Homo sapiens
  CDR3 for alpha chain variable domain of TCR clone 336357 (TRAV16, TRAJ52)
CALSADGGTSYGKLTF

SEQ ID NO: 672714 - protein, 17 aa, Homo sapiens
  CDR3 for beta chain variable domain of TCR clone 336357 (TRBV11-2, TRBJ2-1)
CASSLYPPGVEYNEQFF

SEQ ID NO: 672715 - protein, 14 aa, Homo sapiens
  CDR3 for alpha chain variable domain of TCR clone 336358 (TRAV2, TRAJ9)
CAVEDRSGGFKTIF

SEQ ID NO: 672716 - protein, 13 aa, Homo sapiens
  CDR3 for beta chain variable domain of TCR clone 336358 (TRBV3-1, TRBJ1-1)
CASSQRWSTEAFF

SEQ ID NO: 672717 - protein, 12 aa, Homo sapiens
  CDR3 for alpha chain variable domain of TCR clone 336359 (TRAV12-3, TRAJ48)
CAMRIGNEKLTF

SEQ ID NO: 672718 - protein, 12 aa, Homo sapiens
  CDR3 for beta chain variable domain of TCR clone 336359 (TRBV13, TRBJ2-7)
CASSLQAYEQYV

SEQ ID NO: 672719 - protein, 10 aa, Homo sapiens
  CDR3 for alpha chain variable domain of TCR clone 336360 (TRAV12-2, TRAJ52)
CAANRWWYEL

SEQ ID NO: 672720 - protein, 13 aa, Homo sapiens
  CDR3 for beta chain variable domain of TCR clone 336360 (TRBV15, TRBJ2-7)
CATSTTGHYEQYF

SEQ ID NO: 672721 - protein, 13 aa, Homo sapiens
  CDR3 for alpha chain variable domain of TCR clone 336361 (TRAV13-2, TRAJ48)
CAEMDFGNEKLTF

SEQ ID NO: 672722 - protein, 15 aa, Homo sapiens
  CDR3 for beta chain variable domain of TCR clone 336361 (TRBV7-3, TRBJ2-1)
CASSQRGGSLIEQFF

SEQ ID NO: 672723 - protein, 14 aa, Homo sapiens
  CDR3 for alpha chain variable domain of TCR clone 336362 (TRAV12-2, TRAJ13)
CAVKKTGGYQKATF

SEQ ID NO: 672724 - protein, 13 aa, Homo sapiens
  CDR3 for beta chain variable domain of TCR clone 336362 (TRBV10-3, TRBJ2-7)
CASKLAVNYEQYF

SEQ ID NO: 672725 - protein, 15 aa, Homo sapiens
  CDR3 for alpha chain variable domain of TCR clone 336363 (TRAV13-1, TRAJ57)
CAASNTQGGCEKLVF

SEQ ID NO: 672726 - protein, 16 aa, Homo sapiens
  CDR3 for beta chain variable domain of TCR clone 336363 (TRBV19, TRBJ2-1)
CASSKAGPSSHNEQFF

SEQ ID NO: 672727 - protein, 19 aa, Homo sapiens
  CDR3 for alpha chain variable domain of TCR clone 336364 (TRAV13-1, TRAJ52)
CAASSSPNAGGTSYGKLTF

SEQ ID NO: 672728 - protein, 15 aa, Homo sapiens
  CDR3 for beta chain variable domain of TCR clone 336364 (TRBV9, TRBJ1-6)
CASSTGGGVDSPLYF

SEQ ID NO: 672729 - protein, 13 aa, Homo sapiens
  CDR3 for alpha chain variable domain of TCR clone 336365 (TRAV21, TRAJ15)
CAVANQAGTALIF

SEQ ID NO: 672730 - protein, 14 aa, Homo sapiens
  CDR3 for beta chain variable domain of TCR clone 336365 (TRBV27, TRBJ2-2)
CASSLGAATGELFF

SEQ ID NO: 672731 - protein, 13 aa, Homo sapiens
  CDR3 for alpha chain variable domain of TCR clone 336366 (TRAV8-3, TRAJ28)
CAVGAVGSYQLTF

SEQ ID NO: 672732 - protein, 16 aa, Homo sapiens
  CDR3 for beta chain variable domain of TCR clone 336366 (TRBV28, TRBJ2-7)
CASSSGTSGRGYEQYF

SEQ ID NO: 672733 - protein, 14 aa, Homo sapiens
  CDR3 for alpha chain variable domain of TCR clone 336367 (TRAV14/DV4, TRAJ49)
CAMREGVNGNQFYL

SEQ ID NO: 672734 - protein, 14 aa, Homo sapiens
  CDR3 for beta chain variable domain of TCR clone 336367 (TRBV5-1, TRBJ1-5)
CASSLESGSRPQHF

SEQ ID NO: 672735 - protein, 14 aa, Homo sapiens
  CDR3 for alpha chain variable domain of TCR clone 336368 (TRAV12-2, TRAJ13)
CAVKKTGGYQKVTF

SEQ ID NO: 672736 - protein, 13 aa, Homo sapiens
  CDR3 for beta chain variable domain of TCR clone 336368 (TRBV2, TRBJ1-2)
CASTWTGEDGYTF

SEQ ID NO: 672737 - protein, 17 aa, Homo sapiens
  CDR3 for alpha chain variable domain of TCR clone 336369 (TRAV27, TRAJ26)
CAGARAPLDNYGQNFVF

SEQ ID NO: 672738 - protein, 15 aa, Homo sapiens
  CDR3 for beta chain variable domain of TCR clone 336369 (TRBV11-2, TRBJ2-5)
CASSPRAGGLETQYF

SEQ ID NO: 672739 - protein, 16 aa, Homo sapiens
  CDR3 for alpha chain variable domain of TCR clone 336370 (TRAV22, TRAJ45)
CAVERGKRGGADGLTF

SEQ ID NO: 672740 - protein, 13 aa, Homo sapiens
  CDR3 for beta chain variable domain of TCR clone 336370 (TRBV13, TRBJ1-1)
CASSLSIGAEAFF

SEQ ID NO: 672741 - protein, 17 aa, Homo sapiens
  CDR3 for alpha chain variable domain of TCR clone 336371 (TRAV3, TRAJ6)
CAVRDGPRAGGSYIPTF

SEQ ID NO: 672742 - protein, 14 aa, Homo sapiens
  CDR3 for beta chain variable domain of TCR clone 336371 (TRBV18, TRBJ2-7)
CAISPRGGAYEQYF

SEQ ID NO: 672743 - protein, 16 aa, Homo sapiens
  CDR3 for alpha chain variable domain of TCR clone 336372 (TRAV3, TRAJ10)
CAVRDRRAGGGNKLNF

SEQ ID NO: 672744 - protein, 13 aa, Homo sapiens
  CDR3 for beta chain variable domain of TCR clone 336372 (TRBV6-1, TRBJ1-1)
CASSRQGNTEAFF

SEQ ID NO: 672745 - protein, 16 aa, Homo sapiens
  CDR3 for alpha chain variable domain of TCR clone 336373 (TRAV30, TRAJ24)
CGTEIVDADSWGKFQF

SEQ ID NO: 672746 - protein, 13 aa, Homo sapiens
  CDR3 for beta chain variable domain of TCR clone 336373 (TRBV20-1, TRBJ1-1)
CSARLGQGTEAFF

SEQ ID NO: 672747 - protein, 14 aa, Homo sapiens
  CDR3 for alpha chain variable domain of TCR clone 336374 (TRAV26-1, TRAJ38)
CIADNAGNNRKMIW

SEQ ID NO: 672748 - protein, 13 aa, Homo sapiens
  CDR3 for beta chain variable domain of TCR clone 336374 (TRBV4-1, TRBJ2-7)
CASSQGQAYEQYF

SEQ ID NO: 672749 - protein, 13 aa, Homo sapiens
  CDR3 for alpha chain variable domain of TCR clone 336375 (TRAV2, TRAJ40)
CAVATSGTYKYIF

SEQ ID NO: 672750 - protein, 16 aa, Homo sapiens
  CDR3 for beta chain variable domain of TCR clone 336375 (TRBV29-1, TRBJ1-2)
CSVEANRDIANYGYTF

SEQ ID NO: 672751 - protein, 10 aa, Homo sapiens
  CDR3 for alpha chain variable domain of TCR clone 336376 (TRAV23/DV6, TRAJ57)
CAASSTLSQG

SEQ ID NO: 672752 - protein, 13 aa, Homo sapiens
  CDR3 for beta chain variable domain of TCR clone 336376 (TRBV20-1, TRBJ2-7)
CSAPGLADYEQYF

SEQ ID NO: 672753 - protein, 15 aa, Homo sapiens
  CDR3 for alpha chain variable domain of TCR clone 336377 (TRAV26-1, TRAJ48)
CIIRVGDFGNEKLTF

SEQ ID NO: 672754 - protein, 16 aa, Homo sapiens
  CDR3 for beta chain variable domain of TCR clone 336377 (TRBV4-1, TRBJ2-3)
CASSQRAGGLTDTQYF

SEQ ID NO: 672755 - protein, 11 aa, Homo sapiens
  CDR3 for alpha chain variable domain of TCR clone 336378 (TRAV2, TRAJ13)
CASGGYQKVTS

SEQ ID NO: 672756 - protein, 13 aa, Homo sapiens
  CDR3 for beta chain variable domain of TCR clone 336378 (TRBV12-4, TRBJ2-2)
CASSITGSGELFF

SEQ ID NO: 672757 - protein, 12 aa, Homo sapiens
  CDR3 for alpha chain variable domain of TCR clone 336379 (TRAV16, TRAJ8)
CAPLGGFQKLVF

SEQ ID NO: 672758 - protein, 19 aa, Homo sapiens
  CDR3 for beta chain variable domain of TCR clone 336379 (TRBV7-2, TRBJ2-3)
CASSFLSRNWGGGTDTQYF

SEQ ID NO: 672759 - protein, 13 aa, Homo sapiens
  CDR3 for alpha chain variable domain of TCR clone 336380 (TRAV12-1, TRAJ53)
CVVNAESNYKLTF

SEQ ID NO: 672760 - protein, 16 aa, Homo sapiens
  CDR3 for beta chain variable domain of TCR clone 336380 (TRBV5-4, TRBJ2-3)
CASQQPGAGGADTQYF

SEQ ID NO: 672761 - protein, 14 aa, Homo sapiens
  CDR3 for alpha chain variable domain of TCR clone 336381 (TRAV1-2, TRAJ16)
CAVNRFSDGQKLLF

SEQ ID NO: 672762 - protein, 13 aa, Homo sapiens
  CDR3 for beta chain variable domain of TCR clone 336381 (TRBV29-1, TRBJ1-1)
CSVGYSRNTEAFF

SEQ ID NO: 672763 - protein, 19 aa, Homo sapiens
  CDR3 for alpha chain variable domain of TCR clone 336382 (TRAV17, TRAJ40)
TASRAADTASYFCASKYTF

SEQ ID NO: 672764 - protein, 17 aa, Homo sapiens
  CDR3 for beta chain variable domain of TCR clone 336382 (TRBV11-2, TRBJ2-4)
CASSFLALGGAGDIQYF

SEQ ID NO: 672765 - protein, 16 aa, Homo sapiens
  CDR3 for alpha chain variable domain of TCR clone 336383 (TRAV3, TRAJ21)
CAVRDIERGNFNKFYF

SEQ ID NO: 672766 - protein, 16 aa, Homo sapiens
  CDR3 for beta chain variable domain of TCR clone 336383 (TRBV2, TRBJ2-1)
CASSANPRDWQAEQFF

SEQ ID NO: 672767 - protein, 13 aa, Homo sapiens
  CDR3 for alpha chain variable domain of TCR clone 336384 (TRAV21, TRAJ27)
CAALTPMQANQPL

SEQ ID NO: 672768 - protein, 16 aa, Homo sapiens
  CDR3 for beta chain variable domain of TCR clone 336384 (TRBV7-3, TRBJ2-2)
CASSLKRGTLSGELFF

SEQ ID NO: 672769 - protein, 10 aa, Homo sapiens
  CDR3 for alpha chain variable domain of TCR clone 336385 (TRAV12-3, TRAJ18)
CAMSAEAQPW

SEQ ID NO: 672770 - protein, 13 aa, Homo sapiens
  CDR3 for beta chain variable domain of TCR clone 336385 (TRBV15, TRBJ1-6)
CATSGGLNSPLRF

SEQ ID NO: 672771 - protein, 11 aa, Homo sapiens
  CDR3 for alpha chain variable domain of TCR clone 336386 (TRAV2, TRAJ33)
CAVESNYQLSW

SEQ ID NO: 672772 - protein, 15 aa, Homo sapiens
  CDR3 for beta chain variable domain of TCR clone 336386 (TRBV19, TRBJ1-1)
CASTSGQIQNTEAFF

SEQ ID NO: 672773 - protein, 14 aa, Homo sapiens
  CDR3 for alpha chain variable domain of TCR clone 336387 (TRAV26-1, TRAJ21)
CIVRVVYNFNKFYF

SEQ ID NO: 672774 - protein, 14 aa, Homo sapiens
  CDR3 for beta chain variable domain of TCR clone 336387 (TRBV28, TRBJ2-5)
CASSLYRGTETQYF

SEQ ID NO: 672775 - protein, 14 aa, Homo sapiens
  CDR3 for alpha chain variable domain of TCR clone 336388 (TRAV12-3, TRAJ10)
SHLPLTGGGNKLTF

SEQ ID NO: 672776 - protein, 16 aa, Homo sapiens
  CDR3 for beta chain variable domain of TCR clone 336388 (TRBV2, TRBJ2-7)
CASSEPWTGPSYEQYF

SEQ ID NO: 672777 - protein, 14 aa, Homo sapiens
  CDR3 for alpha chain variable domain of TCR clone 336389 (TRAV27, TRAJ22)
CAGLPSGSARQLTF

SEQ ID NO: 672778 - protein, 16 aa, Homo sapiens
  CDR3 for beta chain variable domain of TCR clone 336389 (TRBV4-1, TRBJ2-7)
CASRPSGGGADNEQYF

SEQ ID NO: 672779 - protein, 15 aa, Homo sapiens
  CDR3 for alpha chain variable domain of TCR clone 336390 (TRAV26-1, TRAJ29)
CIVRVEGSGNTPLVF

SEQ ID NO: 672780 - protein, 17 aa, Homo sapiens
  CDR3 for beta chain variable domain of TCR clone 336390 (TRBV11-1, TRBJ2-7)
CASSLTGSFGLDYEQYF

SEQ ID NO: 672781 - protein, 14 aa, Homo sapiens
  CDR3 for alpha chain variable domain of TCR clone 336391 (TRAV27, TRAJ40)
CAGSLLRGTYKYII

SEQ ID NO: 672782 - protein, 15 aa, Homo sapiens
  CDR3 for beta chain variable domain of TCR clone 336391 (TRBV6-3, TRBJ1-4)
CASSSPGQENEKLFF

SEQ ID NO: 672783 - protein, 11 aa, Homo sapiens
  CDR3 for alpha chain variable domain of TCR clone 336392 (TRAV13-2, TRAJ20)
CADSNDYKLSF

SEQ ID NO: 672784 - protein, 16 aa, Homo sapiens
  CDR3 for beta chain variable domain of TCR clone 336392 (TRBV7-3, TRBJ2-2)
CASSLKRGTLSGELFF

SEQ ID NO: 672785 - protein, 16 aa, Homo sapiens
  CDR3 for alpha chain variable domain of TCR clone 336393 (TRAV21, TRAJ52)
CAVNNAGGTSYGKLTF

SEQ ID NO: 672786 - protein, 15 aa, Homo sapiens
  CDR3 for beta chain variable domain of TCR clone 336393 (TRBV18, TRBJ2-2)
CASTPGQGGTGELFF

SEQ ID NO: 672787 - protein, 14 aa, Homo sapiens
  CDR3 for alpha chain variable domain of TCR clone 336394 (TRAV12-2, TRAJ45)
CAVNIGGGADGLTF

SEQ ID NO: 672788 - protein, 13 aa, Homo sapiens
  CDR3 for beta chain variable domain of TCR clone 336394 (TRBV19, TRBJ2-2)
CASSICSTGELFF

SEQ ID NO: 672789 - protein, 12 aa, Homo sapiens
  CDR3 for alpha chain variable domain of TCR clone 336395 (TRAV36/DV7, TRAJ40)
CAVGTGTYRYIF

SEQ ID NO: 672790 - protein, 17 aa, Homo sapiens
  CDR3 for beta chain variable domain of TCR clone 336395 (TRBV20-1, TRBJ2-1)
CSASSSGLAGSYNEQFF

SEQ ID NO: 672791 - protein, 17 aa, Homo sapiens
  CDR3 for alpha chain variable domain of TCR clone 336396 (TRAV3, TRAJ42)
CAVRDRDYGGSQGNFTF

SEQ ID NO: 672792 - protein, 15 aa, Homo sapiens
  CDR3 for beta chain variable domain of TCR clone 336396 (TRBV6-6, TRBJ2-7)
CASSYSYGGSYEQYF

SEQ ID NO: 672793 - protein, 12 aa, Homo sapiens
  CDR3 for alpha chain variable domain of TCR clone 336397 (TRAV13-1, TRAJ15)
CAASQAGTALIF

SEQ ID NO: 672794 - protein, 13 aa, Homo sapiens
  CDR3 for beta chain variable domain of TCR clone 336397 (TRBV10-3, TRBJ1-2)
CAISERDSYGYTF

SEQ ID NO: 672795 - protein, 14 aa, Homo sapiens
  CDR3 for alpha chain variable domain of TCR clone 336398 (TRAV12-2, TRAJ40)
CAVKTPSGTYKYIF

SEQ ID NO: 672796 - protein, 15 aa, Homo sapiens
  CDR3 for beta chain variable domain of TCR clone 336398 (TRBV20-1, TRBJ2-7)
CSARDRVSGMDEQYF

SEQ ID NO: 672797 - protein, 14 aa, Homo sapiens
  CDR3 for alpha chain variable domain of TCR clone 336399 (TRAV8-4, TRAJ15)
CAVTIREAGTALIF

SEQ ID NO: 672798 - protein, 16 aa, Homo sapiens
  CDR3 for beta chain variable domain of TCR clone 336399 (TRBV7-2, TRBJ1-2)
CASSSNQDRRGHGYTF

SEQ ID NO: 672799 - protein, 14 aa, Homo sapiens
  CDR3 for alpha chain variable domain of TCR clone 336400 (TRAV35, TRAJ33)
CAGSSQDSNYQLIW

SEQ ID NO: 672800 - protein, 17 aa, Homo sapiens
  CDR3 for beta chain variable domain of TCR clone 336400 (TRBV4-1, TRBJ2-3)
CASSQGYVSGGTDTQYF

SEQ ID NO: 672801 - protein, 13 aa, Homo sapiens
  CDR3 for alpha chain variable domain of TCR clone 336401 (TRAV39, TRAJ49)
CAVDRNTGNHFYF

SEQ ID NO: 672802 - protein, 14 aa, Homo sapiens
  CDR3 for beta chain variable domain of TCR clone 336401 (TRBV4-1, TRBJ1-1)
CASSRSGQSFEAFF

SEQ ID NO: 672803 - protein, 13 aa, Homo sapiens
  CDR3 for alpha chain variable domain of TCR clone 336402 (TRAV13-1, TRAJ21)
CAASIYNFNKFYF

SEQ ID NO: 672804 - protein, 14 aa, Homo sapiens
  CDR3 for beta chain variable domain of TCR clone 336402 (TRBV5-7, TRBJ2-1)
CASSSVANYNEQFF

SEQ ID NO: 672805 - protein, 10 aa, Homo sapiens
  CDR3 for alpha chain variable domain of TCR clone 336403 (TRAV1-2, TRAJ34)
CAVNTDKLIF

SEQ ID NO: 672806 - protein, 18 aa, Homo sapiens
  CDR3 for beta chain variable domain of TCR clone 336403 (TRBV7-9, TRBJ2-7)
CASSLTTSGRRTWYEQYF

SEQ ID NO: 672807 - protein, 14 aa, Homo sapiens
  CDR3 for alpha chain variable domain of TCR clone 336404 (TRAV1-2, TRAJ8)
CAVREDTGFQKLGF

SEQ ID NO: 672808 - protein, 14 aa, Homo sapiens
  CDR3 for beta chain variable domain of TCR clone 336404 (TRBV19, TRBJ2-1)
CASPTFVLSGEQFF

SEQ ID NO: 672809 - protein, 12 aa, Homo sapiens
  CDR3 for alpha chain variable domain of TCR clone 336405 (TRAV16, TRAJ10)
CSRTGGGNKLAF

SEQ ID NO: 672810 - protein, 12 aa, Homo sapiens
  CDR3 for beta chain variable domain of TCR clone 336405 (TRBV11-3, TRBJ1-1)
CASSHRQGEAFF

SEQ ID NO: 672811 - protein, 14 aa, Homo sapiens
  CDR3 for alpha chain variable domain of TCR clone 336406 (TRAV4, TRAJ20)
CLVGDFNNDYKLSF

SEQ ID NO: 672812 - protein, 15 aa, Homo sapiens
  CDR3 for beta chain variable domain of TCR clone 336406 (TRBV9, TRBJ1-6)
CASSVAGTGDSPLHF

SEQ ID NO: 672813 - protein, 14 aa, Homo sapiens
  CDR3 for alpha chain variable domain of TCR clone 336407 (TRAV9-2, TRAJ36)
CALPWRTGANNLFF

SEQ ID NO: 672814 - protein, 14 aa, Homo sapiens
  CDR3 for beta chain variable domain of TCR clone 336407 (TRBV2, TRBJ1-2)
CASSELQVNYGYTV

SEQ ID NO: 672815 - protein, 14 aa, Homo sapiens
  CDR3 for alpha chain variable domain of TCR clone 336408 (TRAV12-1, TRAJ17)
CVVNYKSACNKLTF

SEQ ID NO: 672816 - protein, 17 aa, Homo sapiens
  CDR3 for beta chain variable domain of TCR clone 336408 (TRBV11-2, TRBJ2-1)
CASSLYPPGVEYNEQFF

SEQ ID NO: 672817 - protein, 13 aa, Homo sapiens
  CDR3 for alpha chain variable domain of TCR clone 336409 (TRAV13-2, TRAJ21)
CAERLYNFNKFYF

SEQ ID NO: 672818 - protein, 15 aa, Homo sapiens
  CDR3 for beta chain variable domain of TCR clone 336409 (TRBV11-2, TRBJ2-1)
CASSLTSGGYNEQFF

SEQ ID NO: 672819 - protein, 12 aa, Homo sapiens
  CDR3 for alpha chain variable domain of TCR clone 336410 (TRAV8-4, TRAJ43)
CAVSVNNNDMRF

SEQ ID NO: 672820 - protein, 16 aa, Homo sapiens
  CDR3 for beta chain variable domain of TCR clone 336410 (TRBV7-2, TRBJ1-4)
CASSLAPGRRDEKLFF

SEQ ID NO: 672821 - protein, 14 aa, Homo sapiens
  CDR3 for alpha chain variable domain of TCR clone 336411 (TRAV13-1, TRAJ35)
CAASKGGFGNVLHC

SEQ ID NO: 672822 - protein, 14 aa, Homo sapiens
  CDR3 for beta chain variable domain of TCR clone 336411 (TRBV2, TRBJ2-1)
CASRTGSSYNEQFF

SEQ ID NO: 672823 - protein, 10 aa, Homo sapiens
  CDR3 for alpha chain variable domain of TCR clone 336412 (TRAV12-3, TRAJ49)
CAMNDDQFYF

SEQ ID NO: 672824 - protein, 16 aa, Homo sapiens
  CDR3 for beta chain variable domain of TCR clone 336412 (TRBV27, TRBJ2-2)
CASRFRGLVRTGELFF

SEQ ID NO: 672825 - protein, 18 aa, Homo sapiens
  CDR3 for alpha chain variable domain of TCR clone 336413 (TRAV21, TRAJ52)
CAVRPSPAGGTSKGKLTF

SEQ ID NO: 672826 - protein, 17 aa, Homo sapiens
  CDR3 for beta chain variable domain of TCR clone 336413 (TRBV13, TRBJ2-3)
CASSLSRVAGGRNTQYF

SEQ ID NO: 672827 - protein, 12 aa, Homo sapiens
  CDR3 for alpha chain variable domain of TCR clone 336414 (TRAV25, TRAJ20)
CAGRSNDYKLSF

SEQ ID NO: 672828 - protein, 15 aa, Homo sapiens
  CDR3 for beta chain variable domain of TCR clone 336414 (TRBV7-6, TRBJ2-7)
CANSGRRDTFGEQYF

SEQ ID NO: 672829 - protein, 16 aa, Homo sapiens
  CDR3 for alpha chain variable domain of TCR clone 336415 (TRAV3, TRAJ21)
CAVRDIERGNFNKFYF

SEQ ID NO: 672830 - protein, 14 aa, Homo sapiens
  CDR3 for beta chain variable domain of TCR clone 336415 (TRBV14, TRBJ2-1)
CASSQVQGRGEQFF

SEQ ID NO: 672831 - protein, 13 aa, Homo sapiens
  CDR3 for alpha chain variable domain of TCR clone 336416 (TRAV21, TRAJ15)
CAVANQAGTALIF

SEQ ID NO: 672832 - protein, 13 aa, Homo sapiens
  CDR3 for beta chain variable domain of TCR clone 336416 (TRBV2, TRBJ2-7)
CASSQGQDYEQYF

SEQ ID NO: 672833 - protein, 13 aa, Homo sapiens
  CDR3 for alpha chain variable domain of TCR clone 336417 (TRAV26-1, TRAJ48)
CIVRVVGDEKLTF

SEQ ID NO: 672834 - protein, 14 aa, Homo sapiens
  CDR3 for beta chain variable domain of TCR clone 336417 (TRBV12-5, TRBJ2-5)
CASGSRTHQQTQYF

SEQ ID NO: 672835 - protein, 13 aa, Homo sapiens
  CDR3 for alpha chain variable domain of TCR clone 336418 (TRAV13-1, TRAJ6)
CAASRGGSYIPTF

SEQ ID NO: 672836 - protein, 15 aa, Homo sapiens
  CDR3 for beta chain variable domain of TCR clone 336418 (TRBV25-1, TRBJ2-5)
CASIDTGTHQETQYF

SEQ ID NO: 672837 - protein, 15 aa, Homo sapiens
  CDR3 for alpha chain variable domain of TCR clone 336419 (TRAV17, TRAJ57)
CTTGPSQGGSEKLVF

SEQ ID NO: 672838 - protein, 16 aa, Homo sapiens
  CDR3 for beta chain variable domain of TCR clone 336419 (TRBV12-4, TRBJ1-5)
CASSRPVGGSKQTQHF

SEQ ID NO: 672839 - protein, 13 aa, Homo sapiens
  CDR3 for alpha chain variable domain of TCR clone 336420 (TRAV1-2, TRAJ20)
CAVPRSNDYKLSF

SEQ ID NO: 672840 - protein, 14 aa, Homo sapiens
  CDR3 for beta chain variable domain of TCR clone 336420 (TRBV20-1, TRBJ2-7)
CSARYGTTYYEQYV

SEQ ID NO: 672841 - protein, 13 aa, Homo sapiens
  CDR3 for alpha chain variable domain of TCR clone 336421 (TRAV29/DV5, TRAJ49)
CAVSTNTGNQFYF

SEQ ID NO: 672842 - protein, 11 aa, Homo sapiens
  CDR3 for beta chain variable domain of TCR clone 336421 (TRBV6-1, TRBJ2-1)
CASISSNEQFF

SEQ ID NO: 672843 - protein, 13 aa, Homo sapiens
  CDR3 for alpha chain variable domain of TCR clone 336422 (TRAV29/DV5, TRAJ40)
CAASEAGTYKYIS

SEQ ID NO: 672844 - protein, 18 aa, Homo sapiens
  CDR3 for beta chain variable domain of TCR clone 336422 (TRBV14, TRBJ2-1)
CASSQEYGGAYLRGEQFL

SEQ ID NO: 672845 - protein, 14 aa, Homo sapiens
  CDR3 for alpha chain variable domain of TCR clone 336423 (TRAV12-2, TRAJ13)
CAVKKTGGYLKVTF

SEQ ID NO: 672846 - protein, 15 aa, Homo sapiens
  CDR3 for beta chain variable domain of TCR clone 336423 (TRBV20-1, TRBJ1-1)
CSASWDRFLNTEAFF

SEQ ID NO: 672847 - protein, 15 aa, Homo sapiens
  CDR3 for alpha chain variable domain of TCR clone 336424 (TRAV26-1, TRAJ56)
CIVSVDNGANSKLTF

SEQ ID NO: 672848 - protein, 15 aa, Homo sapiens
  CDR3 for beta chain variable domain of TCR clone 336424 (TRBV20-1, TRBJ2-7)
CSARDPTEVGHEQYF

SEQ ID NO: 672849 - protein, 16 aa, Homo sapiens
  CDR3 for alpha chain variable domain of TCR clone 336425 (TRAV13-1, TRAJ48)
CAASIFGNFGNVKLTF

SEQ ID NO: 672850 - protein, 13 aa, Homo sapiens
  CDR3 for beta chain variable domain of TCR clone 336425 (TRBV7-7, TRBJ2-3)
CASSLSRADTQYF

SEQ ID NO: 672851 - protein, 11 aa, Homo sapiens
  CDR3 for alpha chain variable domain of TCR clone 336426 (TRAV2, TRAJ13)
CASGGYQKVTF

SEQ ID NO: 672852 - protein, 16 aa, Homo sapiens
  CDR3 for beta chain variable domain of TCR clone 336426 (TRBV19, TRBJ2-1)
CASSRGGGSSYNEQFF

SEQ ID NO: 672853 - protein, 13 aa, Homo sapiens
  CDR3 for alpha chain variable domain of TCR clone 336427 (TRAV4, TRAJ42)
CLVGGGSQGNLIF

SEQ ID NO: 672854 - protein, 15 aa, Homo sapiens
  CDR3 for beta chain variable domain of TCR clone 336427 (TRBV7-3, TRBJ2-1)
CASSPTGGGEVEQFF

SEQ ID NO: 672855 - protein, 12 aa, Homo sapiens
  CDR3 for alpha chain variable domain of TCR clone 336428 (TRAV21, TRAJ27)
CAANTNAGKSTF

SEQ ID NO: 672856 - protein, 13 aa, Homo sapiens
  CDR3 for beta chain variable domain of TCR clone 336428 (TRBV6-4, TRBJ1-5)
CASSADLNQPQHF

SEQ ID NO: 672857 - protein, 14 aa, Homo sapiens
  CDR3 for alpha chain variable domain of TCR clone 336429 (TRAV1-2, TRAJ8)
CAVREDTGFQKLVF

SEQ ID NO: 672858 - protein, 14 aa, Homo sapiens
  CDR3 for beta chain variable domain of TCR clone 336429 (TRBV13, TRBJ2-5)
CASSLGTAQETQYF

SEQ ID NO: 672859 - protein, 17 aa, Homo sapiens
  CDR3 for alpha chain variable domain of TCR clone 336430 (TRAV3, TRAJ38)
CAVRDCLNAGNNRKLIW

SEQ ID NO: 672860 - protein, 13 aa, Homo sapiens
  CDR3 for beta chain variable domain of TCR clone 336430 (TRBV23-1, TRBJ1-4)
CSSRGKFNEKLFF

SEQ ID NO: 672861 - protein, 15 aa, Homo sapiens
  CDR3 for alpha chain variable domain of TCR clone 336431 (TRAV8-1, TRAJ37)
CAVKKGSGNKGKLIF

SEQ ID NO: 672862 - protein, 17 aa, Homo sapiens
  CDR3 for beta chain variable domain of TCR clone 336431 (TRBV12-4, TRBJ1-1)
CASSLSGFRTMNTEAFF

SEQ ID NO: 672863 - protein, 12 aa, Homo sapiens
  CDR3 for alpha chain variable domain of TCR clone 336432 (TRAV3, TRAJ20)
CAVRDPDYQLSF

SEQ ID NO: 672864 - protein, 11 aa, Homo sapiens
  CDR3 for beta chain variable domain of TCR clone 336432 (TRBV28, TRBJ2-5)
CASSLKETQYF

SEQ ID NO: 672865 - protein, 20 aa, Homo sapiens
  CDR3 for alpha chain variable domain of TCR clone 336433 (TRAV12-1, TRAJ42)
SSVIQPPTSVTGGSQGNLIF

SEQ ID NO: 672866 - protein, 18 aa, Homo sapiens
  CDR3 for beta chain variable domain of TCR clone 336433 (TRBV11-2, TRBJ2-3)
CASRLGGASRGAPNTQYF

SEQ ID NO: 672867 - protein, 14 aa, Homo sapiens
  CDR3 for alpha chain variable domain of TCR clone 336434 (TRAV13-1, TRAJ5)
CAAHPDTGRRALTF

SEQ ID NO: 672868 - protein, 13 aa, Homo sapiens
  CDR3 for beta chain variable domain of TCR clone 336434 (TRBV10-3, TRBJ1-2)
CAISERDSYGYTF

SEQ ID NO: 672869 - protein, 14 aa, Homo sapiens
  CDR3 for alpha chain variable domain of TCR clone 336435 (TRAV9-2, TRAJ39)
CALYIYNAGNMLTF

SEQ ID NO: 672870 - protein, 16 aa, Homo sapiens
  CDR3 for beta chain variable domain of TCR clone 336435 (TRBV6-1, TRBJ1-3)
CASVQGGVETPCILER

SEQ ID NO: 672871 - protein, 17 aa, Homo sapiens
  CDR3 for alpha chain variable domain of TCR clone 336436 (TRAV13-1, TRAJ52)
CAAGRNAGGTSYGKLTF

SEQ ID NO: 672872 - protein, 14 aa, Homo sapiens
  CDR3 for beta chain variable domain of TCR clone 336436 (TRBV27, TRBJ1-1)
CASSLLSGLSEAFF

SEQ ID NO: 672873 - protein, 13 aa, Homo sapiens
  CDR3 for alpha chain variable domain of TCR clone 336437 (TRAV13-2, TRAJ48)
CAEMDFGNEKLTF

SEQ ID NO: 672874 - protein, 16 aa, Homo sapiens
  CDR3 for beta chain variable domain of TCR clone 336437 (TRBV5-1, TRBJ2-7)
CASRPSFSNNPYEQYF

SEQ ID NO: 672875 - protein, 21 aa, Homo sapiens
  CDR3 for alpha chain variable domain of TCR clone 336438 (TRAV1-1, TRAJ6)
CLLLLRCETLERTGGSYIPTF

SEQ ID NO: 672876 - protein, 14 aa, Homo sapiens
  CDR3 for beta chain variable domain of TCR clone 336438 (TRBV7-2, TRBJ2-5)
CASSLSGGGETQYF

SEQ ID NO: 672877 - protein, 14 aa, Homo sapiens
  CDR3 for alpha chain variable domain of TCR clone 336439 (TRAV8-3, TRAJ31)
CAVGRGHNNARLMF

SEQ ID NO: 672878 - protein, 15 aa, Homo sapiens
  CDR3 for beta chain variable domain of TCR clone 336439 (TRBV7-2, TRBJ2-2)
CASSLAGGLTGELFF

SEQ ID NO: 672879 - protein, 12 aa, Homo sapiens
  CDR3 for alpha chain variable domain of TCR clone 336440 (TRAV12-1, TRAJ40)
CVVYSGTYKYIF

SEQ ID NO: 672880 - protein, 15 aa, Homo sapiens
  CDR3 for beta chain variable domain of TCR clone 336440 (TRBV7-9, TRBJ1-6)
CASSSPGRGSSPLHF

SEQ ID NO: 672881 - protein, 17 aa, Homo sapiens
  CDR3 for alpha chain variable domain of TCR clone 336441 (TRAV38-1, TRAJ28)
CAFMKPTSGAGSYQLTF

SEQ ID NO: 672882 - protein, 17 aa, Homo sapiens
  CDR3 for beta chain variable domain of TCR clone 336441 (TRBV11-2, TRBJ2-1)
CASSLYPPGVEYNEQFF

SEQ ID NO: 672883 - protein, 14 aa, Homo sapiens
  CDR3 for alpha chain variable domain of TCR clone 336442 (TRAV27, TRAJ13)
CRSSNSGGYQKVTF

SEQ ID NO: 672884 - protein, 16 aa, Homo sapiens
  CDR3 for beta chain variable domain of TCR clone 336442 (TRBV7-6, TRBJ2-1)
CVAVPAAWGGADEQFF

SEQ ID NO: 672885 - protein, 17 aa, Homo sapiens
  CDR3 for alpha chain variable domain of TCR clone 336443 (TRAV21, TRAJ41)
CAVREFRVCTQLRQRRL

SEQ ID NO: 672886 - protein, 15 aa, Homo sapiens
  CDR3 for beta chain variable domain of TCR clone 336443 (TRBV18, TRBJ1-5)
CASSPQARSNQPQHF

SEQ ID NO: 672887 - protein, 15 aa, Homo sapiens
  CDR3 for alpha chain variable domain of TCR clone 336444 (TRAV13-1, TRAJ43)
CAASGGFGAGTRLTV

SEQ ID NO: 672888 - protein, 18 aa, Homo sapiens
  CDR3 for beta chain variable domain of TCR clone 336444 (TRBV11-2, TRBJ1-6)
CASSLAVQGLALNSPLHF

SEQ ID NO: 672889 - protein, 15 aa, Homo sapiens
  CDR3 for alpha chain variable domain of TCR clone 336445 (TRAV25, TRAJ52)
CAGRPGGTSYGKLTF

SEQ ID NO: 672890 - protein, 17 aa, Homo sapiens
  CDR3 for beta chain variable domain of TCR clone 336445 (TRBV7-8, TRBJ2-6)
CASSAGTGGAGGNVLTF

SEQ ID NO: 672891 - protein, 13 aa, Homo sapiens
  CDR3 for alpha chain variable domain of TCR clone 336446 (TRAV34, TRAJ33)
CGADMNSNYQLLW

SEQ ID NO: 672892 - protein, 16 aa, Homo sapiens
  CDR3 for beta chain variable domain of TCR clone 336446 (TRBV20-1, TRBJ2-1)
CSASLAGGPGYNEQFF

SEQ ID NO: 672893 - protein, 11 aa, Homo sapiens
  CDR3 for alpha chain variable domain of TCR clone 336447 (TRAV35, TRAJ34)
CWARNTDKLIF

SEQ ID NO: 672894 - protein, 14 aa, Homo sapiens
  CDR3 for beta chain variable domain of TCR clone 336447 (TRBV5-1, TRBJ2-7)
CASSRGESLYEQFF

SEQ ID NO: 672895 - protein, 14 aa, Homo sapiens
  CDR3 for alpha chain variable domain of TCR clone 336448 (TRAV26-1, TRAJ38)
CIADNAGYNRKLIW

SEQ ID NO: 672896 - protein, 13 aa, Homo sapiens
  CDR3 for beta chain variable domain of TCR clone 336448 (TRBV20-1, TRBJ1-1)
CSARGGGNTEAFF

SEQ ID NO: 672897 - protein, 17 aa, Homo sapiens
  CDR3 for alpha chain variable domain of TCR clone 336449 (TRAV3, TRAJ6)
CAVGDGPRAGGSYIPPF

SEQ ID NO: 672898 - protein, 14 aa, Homo sapiens
  CDR3 for beta chain variable domain of TCR clone 336449 (TRBV7-2, TRBJ2-7)
CASSPKTSFYEQYF

SEQ ID NO: 672899 - protein, 13 aa, Homo sapiens
  CDR3 for alpha chain variable domain of TCR clone 336450 (TRAV2, TRAJ15)
CAVASQAGTALIF

SEQ ID NO: 672900 - protein, 16 aa, Homo sapiens
  CDR3 for beta chain variable domain of TCR clone 336450 (TRBV5-1, TRBJ1-1)
CASSSGGISLNTEAFF

SEQ ID NO: 672901 - protein, 15 aa, Homo sapiens
  CDR3 for alpha chain variable domain of TCR clone 336451 (TRAV30, TRAJ32)
CGTEILGGAKNKLIF

SEQ ID NO: 672902 - protein, 13 aa, Homo sapiens
  CDR3 for beta chain variable domain of TCR clone 336451 (TRBV6-3, TRBJ2-7)
CASSFSGGYEQYF

SEQ ID NO: 672903 - protein, 12 aa, Homo sapiens
  CDR3 for alpha chain variable domain of TCR clone 336452 (TRAV12-1, TRAJ40)
CVVYSGTYKYIF

SEQ ID NO: 672904 - protein, 13 aa, Homo sapiens
  CDR3 for beta chain variable domain of TCR clone 336452 (TRBV10-3, TRBJ2-7)
CASKLAVNFEQYF

SEQ ID NO: 672905 - protein, 11 aa, Homo sapiens
  CDR3 for alpha chain variable domain of TCR clone 336453 (TRAV3, TRAJ21)
CAVGNLNKFYF

SEQ ID NO: 672906 - protein, 16 aa, Homo sapiens
  CDR3 for beta chain variable domain of TCR clone 336453 (TRBV19, TRBJ2-1)
SASSKAGPSSYNEQFF

SEQ ID NO: 672907 - protein, 13 aa, Homo sapiens
  CDR3 for alpha chain variable domain of TCR clone 336454 (TRAV14/DV4, TRAJ15)
CAMRDQAGTALIF

SEQ ID NO: 672908 - protein, 14 aa, Homo sapiens
  CDR3 for beta chain variable domain of TCR clone 336454 (TRBV2, TRBJ2-3)
CASARDFPADTRYF

SEQ ID NO: 672909 - protein, 16 aa, Homo sapiens
  CDR3 for alpha chain variable domain of TCR clone 336455 (TRAV12-3, TRAJ53)
CAMSPGSGGSNYKLTF

SEQ ID NO: 672910 - protein, 13 aa, Homo sapiens
  CDR3 for beta chain variable domain of TCR clone 336455 (TRBV27, TRBJ2-1)
CASSLGRIWGQFF

SEQ ID NO: 672911 - protein, 15 aa, Homo sapiens
  CDR3 for alpha chain variable domain of TCR clone 336456 (TRAV23/DV6, TRAJ57)
CAASSTRSQGGSEKL

SEQ ID NO: 672912 - protein, 14 aa, Homo sapiens
  CDR3 for beta chain variable domain of TCR clone 336456 (TRBV25-1, TRBJ1-1)
CASTHLGGNTEAFF

SEQ ID NO: 672913 - protein, 13 aa, Homo sapiens
  CDR3 for alpha chain variable domain of TCR clone 336457 (TRAV12-1, TRAJ34)
CVVTGYNTDKLIF

SEQ ID NO: 672914 - protein, 13 aa, Homo sapiens
  CDR3 for beta chain variable domain of TCR clone 336457 (TRBV28, TRBJ2-7)
SASKAGGVYEQYF

SEQ ID NO: 672915 - protein, 12 aa, Homo sapiens
  CDR3 for alpha chain variable domain of TCR clone 336458 (TRAV13-1, TRAJ11)
CAADSGYSTLTF

SEQ ID NO: 672916 - protein, 15 aa, Homo sapiens
  CDR3 for beta chain variable domain of TCR clone 336458 (TRBV28, TRBJ2-3)
CAPTFRDWSTDTQYF

SEQ ID NO: 672917 - protein, 14 aa, Homo sapiens
  CDR3 for alpha chain variable domain of TCR clone 336459 (TRAV26-1, TRAJ45)
CIEVTGGGADGLTF

SEQ ID NO: 672918 - protein, 13 aa, Homo sapiens
  CDR3 for beta chain variable domain of TCR clone 336459 (TRBV7-6, TRBJ1-2)
CAISLVADYGYTF

SEQ ID NO: 672919 - protein, 15 aa, Homo sapiens
  CDR3 for alpha chain variable domain of TCR clone 336460 (TRAV35, TRAJ50)
CAGHLRKTSYDKVIF

SEQ ID NO: 672920 - protein, 12 aa, Homo sapiens
  CDR3 for beta chain variable domain of TCR clone 336460 (TRBV5-1, TRBJ2-5)
CASSLGLETQYF

SEQ ID NO: 672921 - protein, 16 aa, Homo sapiens
  CDR3 for alpha chain variable domain of TCR clone 336461 (TRAV3, TRAJ10)
CAVRDMRAGGGNKLTF

SEQ ID NO: 672922 - protein, 15 aa, Homo sapiens
  CDR3 for beta chain variable domain of TCR clone 336461 (TRBV12-4, TRBJ2-5)
CASSLSGAFQETQYF

SEQ ID NO: 672923 - protein, 14 aa, Homo sapiens
  CDR3 for alpha chain variable domain of TCR clone 336462 (TRAV1-2, TRAJ16)
CAVNRFSDGQKLLF

SEQ ID NO: 672924 - protein, 16 aa, Homo sapiens
  CDR3 for beta chain variable domain of TCR clone 336462 (TRBV19, TRBJ2-1)
CASSKAGPSSYNEQIF

SEQ ID NO: 672925 - protein, 14 aa, Homo sapiens
  CDR3 for alpha chain variable domain of TCR clone 336463 (TRAV1-2, TRAJ16)
CAVNRFSDGQKLLF

SEQ ID NO: 672926 - protein, 13 aa, Homo sapiens
  CDR3 for beta chain variable domain of TCR clone 336463 (TRBV12-4, TRBJ1-2)
CASSLRQGKGYAF

SEQ ID NO: 672927 - protein, 14 aa, Homo sapiens
  CDR3 for alpha chain variable domain of TCR clone 336464 (TRAV3, TRAJ6)
CAVRDWGGSYIPTF

SEQ ID NO: 672928 - protein, 15 aa, Homo sapiens
  CDR3 for beta chain variable domain of TCR clone 336464 (TRBV7-2, TRBJ2-1)
CASTHGTGIYNEQFF

SEQ ID NO: 672929 - protein, 19 aa, Homo sapiens
  CDR3 for alpha chain variable domain of TCR clone 336465 (TRAV1-2, TRAJ26)
CLLPLCCERPDNYGQNFVF

SEQ ID NO: 672930 - protein, 15 aa, Homo sapiens
  CDR3 for beta chain variable domain of TCR clone 336465 (TRBV9, TRBJ1-6)
CASSVAGTGHSPLHF

SEQ ID NO: 672931 - protein, 12 aa, Homo sapiens
  CDR3 for alpha chain variable domain of TCR clone 336466 (TRAV12-3, TRAJ17)
CAMTLTGNKLTF

SEQ ID NO: 672932 - protein, 12 aa, Homo sapiens
  CDR3 for beta chain variable domain of TCR clone 336466 (TRBV20-1, TRBJ2-7)
CSARDRPYEQYF

SEQ ID NO: 672933 - protein, 14 aa, Homo sapiens
  CDR3 for alpha chain variable domain of TCR clone 336467 (TRAV29/DV5, TRAJ36)
CSARRKTGANNLFF

SEQ ID NO: 672934 - protein, 13 aa, Homo sapiens
  CDR3 for beta chain variable domain of TCR clone 336467 (TRBV15, TRBJ1-2)
CATSMTANYGYTF

SEQ ID NO: 672935 - protein, 14 aa, Homo sapiens
  CDR3 for alpha chain variable domain of TCR clone 336468 (TRAV8-4, TRAJ13)
CAVTLSGGYQKVTF

SEQ ID NO: 672936 - protein, 17 aa, Homo sapiens
  CDR3 for beta chain variable domain of TCR clone 336468 (TRBV20-1, TRBJ1-5)
CSASLSPGQGGNQPQHF

SEQ ID NO: 672937 - protein, 21 aa, Homo sapiens
  CDR3 for alpha chain variable domain of TCR clone 336469 (TRAV8-4, TRAJ38)
CARLNAGNNHIQNPAPAVYQL

SEQ ID NO: 672938 - protein, 14 aa, Homo sapiens
  CDR3 for beta chain variable domain of TCR clone 336469 (TRBV7-8, TRBJ2-3)
CASSLEAGTDTQYF

SEQ ID NO: 672939 - protein, 13 aa, Homo sapiens
  CDR3 for alpha chain variable domain of TCR clone 336470 (TRAV29/DV5, TRAJ31)
CAASRNNNPRLMF

SEQ ID NO: 672940 - protein, 16 aa, Homo sapiens
  CDR3 for beta chain variable domain of TCR clone 336470 (TRBV7-2, TRBJ2-6)
CASSERRASGANVLTF

SEQ ID NO: 672941 - protein, 14 aa, Homo sapiens
  CDR3 for alpha chain variable domain of TCR clone 336471 (TRAV12-1, TRAJ9)
CVVNRRTGGFKTIF

SEQ ID NO: 672942 - protein, 14 aa, Homo sapiens
  CDR3 for beta chain variable domain of TCR clone 336471 (TRBV7-3, TRBJ1-1)
CASSLGTGYTEAFF

SEQ ID NO: 672943 - protein, 12 aa, Homo sapiens
  CDR3 for alpha chain variable domain of TCR clone 336472 (TRAV12-3, TRAJ5)
CAMDTGRRALTF

SEQ ID NO: 672944 - protein, 13 aa, Homo sapiens
  CDR3 for beta chain variable domain of TCR clone 336472 (TRBV7-7, TRBJ2-2)
CPSSLTSAGELFF

SEQ ID NO: 672945 - protein, 12 aa, Homo sapiens
  CDR3 for alpha chain variable domain of TCR clone 336473 (TRAV4, TRAJ26)
CLVGDYGQNFVF

SEQ ID NO: 672946 - protein, 16 aa, Homo sapiens
  CDR3 for beta chain variable domain of TCR clone 336473 (TRBV7-2, TRBJ1-2)
CASISNQDRRGHGYTF

SEQ ID NO: 672947 - protein, 16 aa, Homo sapiens
  CDR3 for alpha chain variable domain of TCR clone 336474 (TRAV3, TRAJ37)
CAVRPHGSCNTGKLIF

SEQ ID NO: 672948 - protein, 11 aa, Homo sapiens
  CDR3 for beta chain variable domain of TCR clone 336474 (TRBV10-3, TRBJ2-7)
CAISEGLEQYF

SEQ ID NO: 672949 - protein, 12 aa, Homo sapiens
  CDR3 for alpha chain variable domain of TCR clone 336475 (TRAV21, TRAJ39)
CAADNAGHMLTF

SEQ ID NO: 672950 - protein, 13 aa, Homo sapiens
  CDR3 for beta chain variable domain of TCR clone 336475 (TRBV12-4, TRBJ1-1)
CASSPGTGFEAFF

SEQ ID NO: 672951 - protein, 15 aa, Homo sapiens
  CDR3 for alpha chain variable domain of TCR clone 336476 (TRAV4, TRAJ39)
CLVGPNNNAGNMLPF

SEQ ID NO: 672952 - protein, 14 aa, Homo sapiens
  CDR3 for beta chain variable domain of TCR clone 336476 (TRBV27, TRBJ2-2)
CASSLGAATGELFF

SEQ ID NO: 672953 - protein, 18 aa, Homo sapiens
  CDR3 for alpha chain variable domain of TCR clone 336477 (TRAV29/DV5, TRAJ52)
CAAGFRVAGGTSYGKLTF

SEQ ID NO: 672954 - protein, 14 aa, Homo sapiens
  CDR3 for beta chain variable domain of TCR clone 336477 (TRBV20-1, TRBJ2-7)
CSAKRGRSSYEQYF

SEQ ID NO: 672955 - protein, 16 aa, Homo sapiens
  CDR3 for alpha chain variable domain of TCR clone 336478 (TRAV4, TRAJ22)
CLVGDLYSGSARQLTF

SEQ ID NO: 672956 - protein, 15 aa, Homo sapiens
  CDR3 for beta chain variable domain of TCR clone 336478 (TRBV3-1, TRBJ2-2)
CASSQDWTRAGELFF

SEQ ID NO: 672957 - protein, 12 aa, Homo sapiens
  CDR3 for alpha chain variable domain of TCR clone 336479 (TRAV21, TRAJ33)
CAKMDSNYQLIS

SEQ ID NO: 672958 - protein, 14 aa, Homo sapiens
  CDR3 for beta chain variable domain of TCR clone 336479 (TRBV2, TRBJ2-7)
CASSLTSGGYEQYF

SEQ ID NO: 672959 - protein, 12 aa, Homo sapiens
  CDR3 for alpha chain variable domain of TCR clone 336480 (TRAV13-2, TRAJ39)
CAESRPGNMLTF

SEQ ID NO: 672960 - protein, 15 aa, Homo sapiens
  CDR3 for beta chain variable domain of TCR clone 336480 (TRBV27, TRBJ2-1)
CASSNGGGSSNEQFF

SEQ ID NO: 672961 - protein, 16 aa, Homo sapiens
  CDR3 for alpha chain variable domain of TCR clone 336481 (TRAV27, TRAJ52)
CAGAGAGGTSYGQLTF

SEQ ID NO: 672962 - protein, 17 aa, Homo sapiens
  CDR3 for beta chain variable domain of TCR clone 336481 (TRBV24-1, TRBJ2-3)
CATSDLPSGEDTDTQYF

SEQ ID NO: 672963 - protein, 14 aa, Homo sapiens
  CDR3 for alpha chain variable domain of TCR clone 336482 (TRAV16, TRAJ57)
CALPTQGGSEKLVF

SEQ ID NO: 672964 - protein, 18 aa, Homo sapiens
  CDR3 for beta chain variable domain of TCR clone 336482 (TRBV28, TRBJ1-3)
CTSVPAGGGHLSGNTIYF

SEQ ID NO: 672965 - protein, 12 aa, Homo sapiens
  CDR3 for alpha chain variable domain of TCR clone 336483 (TRAV12-3, TRAJ3)
CAIDSSASKIIF

SEQ ID NO: 672966 - protein, 17 aa, Homo sapiens
  CDR3 for beta chain variable domain of TCR clone 336483 (TRBV7-9, TRBJ2-3)
CASSLEEAGGYPDTQYF

SEQ ID NO: 672967 - protein, 15 aa, Homo sapiens
  CDR3 for alpha chain variable domain of TCR clone 336484 (TRAV3, TRAJ22)
CAVRDRGGSARQLTF

SEQ ID NO: 672968 - protein, 15 aa, Homo sapiens
  CDR3 for beta chain variable domain of TCR clone 336484 (TRBV5-5, TRBJ1-4)
CASSLVVRSNEKLFF

SEQ ID NO: 672969 - protein, 15 aa, Homo sapiens
  CDR3 for alpha chain variable domain of TCR clone 336485 (TRAV26-1, TRAJ22)
CIVRVSFWFCKATDL

SEQ ID NO: 672970 - protein, 14 aa, Homo sapiens
  CDR3 for beta chain variable domain of TCR clone 336485 (TRBV11-2, TRBJ2-7)
CASSLGAGAYEQYF

SEQ ID NO: 672971 - protein, 14 aa, Homo sapiens
  CDR3 for alpha chain variable domain of TCR clone 336486 (TRAV16, TRAJ13)
CALRRSRGYQKVTF

SEQ ID NO: 672972 - protein, 14 aa, Homo sapiens
  CDR3 for beta chain variable domain of TCR clone 336486 (TRBV2, TRBJ2-7)
CASTVGRSSYEQYF

SEQ ID NO: 672973 - protein, 17 aa, Homo sapiens
  CDR3 for alpha chain variable domain of TCR clone 336487 (TRAV26-1, TRAJ58)
CIVRVGAEETSGSRLTF

SEQ ID NO: 672974 - protein, 16 aa, Homo sapiens
  CDR3 for beta chain variable domain of TCR clone 336487 (TRBV4-3, TRBJ2-7)
CASSPRTSGRSYEQYF

SEQ ID NO: 672975 - protein, 15 aa, Homo sapiens
  CDR3 for alpha chain variable domain of TCR clone 336488 (TRAV23/DV6, TRAJ12)
CAAIDMGAMDSSYKL

SEQ ID NO: 672976 - protein, 12 aa, Homo sapiens
  CDR3 for beta chain variable domain of TCR clone 336488 (TRBV10-3, TRBJ2-2)
CAIRENTGELFF

SEQ ID NO: 672977 - protein, 16 aa, Homo sapiens
  CDR3 for alpha chain variable domain of TCR clone 336489 (TRAV20, TRAJ17)
CAVQARWESCRQQANF

SEQ ID NO: 672978 - protein, 14 aa, Homo sapiens
  CDR3 for beta chain variable domain of TCR clone 336489 (TRBV7-9, TRBJ2-5)
CASSLAFGQETQYF

SEQ ID NO: 672979 - protein, 15 aa, Homo sapiens
  CDR3 for alpha chain variable domain of TCR clone 336490 (TRAV2, TRAJ13)
CPTPSYSGGYQKVTF

SEQ ID NO: 672980 - protein, 14 aa, Homo sapiens
  CDR3 for beta chain variable domain of TCR clone 336490 (TRBV4-2, TRBJ2-1)
CASGLDRAYNEQFF

SEQ ID NO: 672981 - protein, 14 aa, Homo sapiens
  CDR3 for alpha chain variable domain of TCR clone 336491 (TRAV12-2, TRAJ13)
CAVKKTGGYQKVTF

SEQ ID NO: 672982 - protein, 14 aa, Homo sapiens
  CDR3 for beta chain variable domain of TCR clone 336491 (TRBV20-1, TRBJ2-7)
CSARRSGSSYEQYF

SEQ ID NO: 672983 - protein, 11 aa, Homo sapiens
  CDR3 for alpha chain variable domain of TCR clone 336492 (TRAV8-4, TRAJ48)
SETFGNEKLTF

SEQ ID NO: 672984 - protein, 14 aa, Homo sapiens
  CDR3 for beta chain variable domain of TCR clone 336492 (TRBV13, TRBJ2-7)
CASSLKGASYEQYF

SEQ ID NO: 672985 - protein, 14 aa, Homo sapiens
  CDR3 for alpha chain variable domain of TCR clone 336493 (TRAV13-1, TRAJ35)
CAASKGGFGNVLHC

SEQ ID NO: 672986 - protein, 19 aa, Homo sapiens
  CDR3 for beta chain variable domain of TCR clone 336493 (TRBV2, TRBJ2-7)
CASSDDETSGRANDYEQYF

SEQ ID NO: 672987 - protein, 15 aa, Homo sapiens
  CDR3 for alpha chain variable domain of TCR clone 336494 (TRAV13-1, TRAJ42)
CAASELWRKPRKSHL

SEQ ID NO: 672988 - protein, 15 aa, Homo sapiens
  CDR3 for beta chain variable domain of TCR clone 336494 (TRBV20-1, TRBJ2-1)
CNASSAGSSYNEQFF

SEQ ID NO: 672989 - protein, 12 aa, Homo sapiens
  CDR3 for alpha chain variable domain of TCR clone 336495 (TRAV21, TRAJ13)
PGPSGDYQKVTF

SEQ ID NO: 672990 - protein, 15 aa, Homo sapiens
  CDR3 for beta chain variable domain of TCR clone 336495 (TRBV7-9, TRBJ1-6)
CASSSPGRGNSPLHF

SEQ ID NO: 672991 - protein, 15 aa, Homo sapiens
  CDR3 for alpha chain variable domain of TCR clone 336496 (TRAV8-4, TRAJ6)
CAVSAPSGGSYIPTF

SEQ ID NO: 672992 - protein, 15 aa, Homo sapiens
  CDR3 for beta chain variable domain of TCR clone 336496 (TRBV7-3, TRBJ2-2)
CASKADGANTGELFF

SEQ ID NO: 672993 - protein, 13 aa, Homo sapiens
  CDR3 for alpha chain variable domain of TCR clone 336497 (TRAV26-1, TRAJ48)
FIVRVVGDEKLTF

SEQ ID NO: 672994 - protein, 19 aa, Homo sapiens
  CDR3 for beta chain variable domain of TCR clone 336497 (TRBV11-3, TRBJ2-2)
CDSSTRPGAKTTNTGELFF

SEQ ID NO: 672995 - protein, 13 aa, Homo sapiens
  CDR3 for alpha chain variable domain of TCR clone 336498 (TRAV20, TRAJ37)
CAGCSSSTGKLIF

SEQ ID NO: 672996 - protein, 11 aa, Homo sapiens
  CDR3 for beta chain variable domain of TCR clone 336498 (TRBV12-4, TRBJ2-3)
CASTATDTQFF

SEQ ID NO: 672997 - protein, 16 aa, Homo sapiens
  CDR3 for alpha chain variable domain of TCR clone 336499 (TRAV30, TRAJ24)
CGTEIVDADSWGKFPF

SEQ ID NO: 672998 - protein, 15 aa, Homo sapiens
  CDR3 for beta chain variable domain of TCR clone 336499 (TRBV15, TRBJ1-5)
CATSRDPVSNQPQHF

SEQ ID NO: 672999 - protein, 15 aa, Homo sapiens
  CDR3 for alpha chain variable domain of TCR clone 336500 (TRAV17, TRAJ57)
CATGPSQGGSEKLVF

SEQ ID NO: 673000 - protein, 14 aa, Homo sapiens
  CDR3 for beta chain variable domain of TCR clone 336500 (TRBV18, TRBJ2-3)
CASSGLADTETQYF

SEQ ID NO: 673001 - protein, 20 aa, Homo sapiens
  CDR3 for alpha chain variable domain of TCR clone 336501 (TRAV12-3, TRAJ41)
SLFIRDSQPSDSATPEALNF

SEQ ID NO: 673002 - protein, 13 aa, Homo sapiens
  CDR3 for beta chain variable domain of TCR clone 336501 (TRBV7-6, TRBJ1-2)
CASSLVADYGYTF

SEQ ID NO: 673003 - protein, 15 aa, Homo sapiens
  CDR3 for alpha chain variable domain of TCR clone 336502 (TRAV26-2, TRAJ21)
CILSNTTSTNFTLYL

SEQ ID NO: 673004 - protein, 16 aa, Homo sapiens
  CDR3 for beta chain variable domain of TCR clone 336502 (TRBV4-2, TRBJ2-6)
CASSQARSSGANVLTF

SEQ ID NO: 673005 - protein, 14 aa, Homo sapiens
  CDR3 for alpha chain variable domain of TCR clone 336503 (TRAV12-2, TRAJ13)
CAVKKTGGYQKVTF

SEQ ID NO: 673006 - protein, 13 aa, Homo sapiens
  CDR3 for beta chain variable domain of TCR clone 336503 (TRBV20-1, TRBJ1-1)
CSARLGQGTEAYF

SEQ ID NO: 673007 - protein, 12 aa, Homo sapiens
  CDR3 for alpha chain variable domain of TCR clone 336504 (TRAV2, TRAJ26)
CAGSPGRLWSAF

SEQ ID NO: 673008 - protein, 17 aa, Homo sapiens
  CDR3 for beta chain variable domain of TCR clone 336504 (TRBV11-2, TRBJ2-1)
CASSLYPPGVEYNEQFF

SEQ ID NO: 673009 - protein, 19 aa, Homo sapiens
  CDR3 for alpha chain variable domain of TCR clone 336505 (TRAV1-2, TRAJ18)
CLLPLCCGRRGSTLGRLYF

SEQ ID NO: 673010 - protein, 15 aa, Homo sapiens
  CDR3 for beta chain variable domain of TCR clone 336505 (TRBV20-1, TRBJ2-1)
CSAEGGLLAGDEQFF

SEQ ID NO: 673011 - protein, 13 aa, Homo sapiens
  CDR3 for alpha chain variable domain of TCR clone 336506 (TRAV8-3, TRAJ36)
CAVGATGANNLFF

SEQ ID NO: 673012 - protein, 16 aa, Homo sapiens
  CDR3 for beta chain variable domain of TCR clone 336506 (TRBV19, TRBJ2-1)
CASSKAGPSSYNEQFF

SEQ ID NO: 673013 - protein, 13 aa, Homo sapiens
  CDR3 for alpha chain variable domain of TCR clone 336507 (TRAV2, TRAJ40)
CALVTSGTYKYIF

SEQ ID NO: 673014 - protein, 13 aa, Homo sapiens
  CDR3 for beta chain variable domain of TCR clone 336507 (TRBV10-2, TRBJ2-7)
CASGTSGGYEQYF

SEQ ID NO: 673015 - protein, 16 aa, Homo sapiens
  CDR3 for alpha chain variable domain of TCR clone 336508 (TRAV17, TRAJ28)
CATDEYSEAGSYQLTF

SEQ ID NO: 673016 - protein, 13 aa, Homo sapiens
  CDR3 for beta chain variable domain of TCR clone 336508 (TRBV7-9, TRBJ1-2)
CASRTGPNYGYTF

SEQ ID NO: 673017 - protein, 13 aa, Homo sapiens
  CDR3 for alpha chain variable domain of TCR clone 336509 (TRAV27, TRAJ6)
CAGGTRGSYIPTF

SEQ ID NO: 673018 - protein, 15 aa, Homo sapiens
  CDR3 for beta chain variable domain of TCR clone 336509 (TRBV5-5, TRBJ2-7)
CASSLAAPLYYEQYF

SEQ ID NO: 673019 - protein, 17 aa, Homo sapiens
  CDR3 for alpha chain variable domain of TCR clone 336510 (TRAV3, TRAJ38)
CAVRDCLNAGNNRKLIW

SEQ ID NO: 673020 - protein, 14 aa, Homo sapiens
  CDR3 for beta chain variable domain of TCR clone 336510 (TRBV5-5, TRBJ1-5)
CASSGQGVDKPQHF

SEQ ID NO: 673021 - protein, 13 aa, Homo sapiens
  CDR3 for alpha chain variable domain of TCR clone 336511 (TRAV2, TRAJ27)
CAVEAPMQANQPL

SEQ ID NO: 673022 - protein, 11 aa, Homo sapiens
  CDR3 for beta chain variable domain of TCR clone 336511 (TRBV11-2, TRBJ2-2)
CASSLPGELFF

SEQ ID NO: 673023 - protein, 13 aa, Homo sapiens
  CDR3 for alpha chain variable domain of TCR clone 336512 (TRAV17, TRAJ22)
CAHHSGSARQLTF

SEQ ID NO: 673024 - protein, 15 aa, Homo sapiens
  CDR3 for beta chain variable domain of TCR clone 336512 (TRBV5-1, TRBJ2-7)
CASSLNGGPAREQYF

SEQ ID NO: 673025 - protein, 10 aa, Homo sapiens
  CDR3 for alpha chain variable domain of TCR clone 336513 (TRAV8-6, TRAJ26)
CGGDGQNFVF

SEQ ID NO: 673026 - protein, 14 aa, Homo sapiens
  CDR3 for beta chain variable domain of TCR clone 336513 (TRBV7-2, TRBJ2-7)
CASRSQGAAYEQYF

SEQ ID NO: 673027 - protein, 15 aa, Homo sapiens
  CDR3 for alpha chain variable domain of TCR clone 336514 (TRAV17, TRAJ57)
CATGPSQGGSEKLVF

SEQ ID NO: 673028 - protein, 14 aa, Homo sapiens
  CDR3 for beta chain variable domain of TCR clone 336514 (TRBV20-1, TRBJ2-1)
CSAQIGGSANEQFF

SEQ ID NO: 673029 - protein, 15 aa, Homo sapiens
  CDR3 for alpha chain variable domain of TCR clone 336515 (TRAV8-3, TRAJ45)
CASSYSGGGADGLTF

SEQ ID NO: 673030 - protein, 11 aa, Homo sapiens
  CDR3 for beta chain variable domain of TCR clone 336515 (TRBV7-9, TRBJ2-2)
CASSGFGGANT

SEQ ID NO: 673031 - protein, 13 aa, Homo sapiens
  CDR3 for alpha chain variable domain of TCR clone 336516 (TRAV21, TRAJ20)
CAVGLRVDYKLSF

SEQ ID NO: 673032 - protein, 13 aa, Homo sapiens
  CDR3 for beta chain variable domain of TCR clone 336516 (TRBV12-5, TRBJ1-2)
CASGVRTGNGYTF

SEQ ID NO: 673033 - protein, 10 aa, Homo sapiens
  CDR3 for alpha chain variable domain of TCR clone 336517 (TRAV1-2, TRAJ18)
CAVRGEAQPW

SEQ ID NO: 673034 - protein, 13 aa, Homo sapiens
  CDR3 for beta chain variable domain of TCR clone 336517 (TRBV13, TRBJ2-5)
CASSPEVGETQYF

SEQ ID NO: 673035 - protein, 12 aa, Homo sapiens
  CDR3 for alpha chain variable domain of TCR clone 336518 (TRAV8-3, TRAJ20)
CAVGANDYKLGF

SEQ ID NO: 673036 - protein, 14 aa, Homo sapiens
  CDR3 for beta chain variable domain of TCR clone 336518 (TRBV12-5, TRBJ2-5)
CASGSRTHQETQYF

SEQ ID NO: 673037 - protein, 17 aa, Homo sapiens
  CDR3 for alpha chain variable domain of TCR clone 336519 (TRAV3, TRAJ12)
CAVRDGGRMDSSYKLIF

SEQ ID NO: 673038 - protein, 13 aa, Homo sapiens
  CDR3 for beta chain variable domain of TCR clone 336519 (TRBV15, TRBJ1-6)
CATSGGPNSPLHF

SEQ ID NO: 673039 - protein, 16 aa, Homo sapiens
  CDR3 for alpha chain variable domain of TCR clone 336520 (TRAV12-2, TRAJ40)
CAVIRGGTSGTYKYIF

SEQ ID NO: 673040 - protein, 16 aa, Homo sapiens
  CDR3 for beta chain variable domain of TCR clone 336520 (TRBV7-9, TRBJ2-1)
CASSLVSGSSNNEQFF

SEQ ID NO: 673041 - protein, 14 aa, Homo sapiens
  CDR3 for alpha chain variable domain of TCR clone 336521 (TRAV35, TRAJ33)
CAGSSQDSNYQLIW

SEQ ID NO: 673042 - protein, 16 aa, Homo sapiens
  CDR3 for beta chain variable domain of TCR clone 336521 (TRBV7-9, TRBJ2-1)
CASSDVAGGSYNEQFF

SEQ ID NO: 673043 - protein, 15 aa, Homo sapiens
  CDR3 for alpha chain variable domain of TCR clone 336522 (TRAV26-1, TRAJ29)
CIVRVEGSGNTHLVL

SEQ ID NO: 673044 - protein, 14 aa, Homo sapiens
  CDR3 for beta chain variable domain of TCR clone 336522 (TRBV18, TRBJ2-5)
CASSPGVSQETQYF

SEQ ID NO: 673045 - protein, 15 aa, Homo sapiens
  CDR3 for alpha chain variable domain of TCR clone 336523 (TRAV12-3, TRAJ6)
CAMSATTGGSYIPTF

SEQ ID NO: 673046 - protein, 16 aa, Homo sapiens
  CDR3 for beta chain variable domain of TCR clone 336523 (TRBV20-1, TRBJ1-2)
GSASTGQGVANYSYTF

SEQ ID NO: 673047 - protein, 14 aa, Homo sapiens
  CDR3 for alpha chain variable domain of TCR clone 336524 (TRAV35, TRAJ44)
CAGRNTGTASKLTF

SEQ ID NO: 673048 - protein, 16 aa, Homo sapiens
  CDR3 for beta chain variable domain of TCR clone 336524 (TRBV19, TRBJ2-6)
CASSMSGLSGANVLTF

SEQ ID NO: 673049 - protein, 14 aa, Homo sapiens
  CDR3 for alpha chain variable domain of TCR clone 336525 (TRAV1-2, TRAJ16)
CAVNRCSDGQKLLF

SEQ ID NO: 673050 - protein, 15 aa, Homo sapiens
  CDR3 for beta chain variable domain of TCR clone 336525 (TRBV19, TRBJ1-5)
CASSIVWADNQPQHF

SEQ ID NO: 673051 - protein, 13 aa, Homo sapiens
  CDR3 for alpha chain variable domain of TCR clone 336526 (TRAV38-1, TRAJ42)
CARWGGSQGNSIF

SEQ ID NO: 673052 - protein, 10 aa, Homo sapiens
  CDR3 for beta chain variable domain of TCR clone 336526 (TRBV2, TRBJ2-5)
CASSAATQYF

SEQ ID NO: 673053 - protein, 14 aa, Homo sapiens
  CDR3 for alpha chain variable domain of TCR clone 336527 (TRAV12-2, TRAJ13)
CSVNPSRGYQKVTF

SEQ ID NO: 673054 - protein, 14 aa, Homo sapiens
  CDR3 for beta chain variable domain of TCR clone 336527 (TRBV12-4, TRBJ1-1)
CASSLGTGGTEAFF

SEQ ID NO: 673055 - protein, 14 aa, Homo sapiens
  CDR3 for alpha chain variable domain of TCR clone 336528 (TRAV12-2, TRAJ9)
CAVNMEGGGFKTIF

SEQ ID NO: 673056 - protein, 14 aa, Homo sapiens
  CDR3 for beta chain variable domain of TCR clone 336528 (TRBV27, TRBJ2-5)
CASSSRKGWETQYF

SEQ ID NO: 673057 - protein, 14 aa, Homo sapiens
  CDR3 for alpha chain variable domain of TCR clone 336529 (TRAV8-1, TRAJ4)
CAVPFSGGYNKLIF

SEQ ID NO: 673058 - protein, 15 aa, Homo sapiens
  CDR3 for beta chain variable domain of TCR clone 336529 (TRBV5-5, TRBJ1-5)
CASSLKGGGEQPQHF

SEQ ID NO: 673059 - protein, 14 aa, Homo sapiens
  CDR3 for alpha chain variable domain of TCR clone 336530 (TRAV1-2, TRAJ8)
CAVREDTGFQQLVF

SEQ ID NO: 673060 - protein, 16 aa, Homo sapiens
  CDR3 for beta chain variable domain of TCR clone 336530 (TRBV19, TRBJ1-1)
CASSPTRFWPGTEAFF

SEQ ID NO: 673061 - protein, 12 aa, Homo sapiens
  CDR3 for alpha chain variable domain of TCR clone 336531 (TRAV14/DV4, TRAJ44)
CNERGPESKLTF

SEQ ID NO: 673062 - protein, 12 aa, Homo sapiens
  CDR3 for beta chain variable domain of TCR clone 336531 (TRBV11-2, TRBJ2-2)
CASSLGGGELFF

SEQ ID NO: 673063 - protein, 15 aa, Homo sapiens
  CDR3 for alpha chain variable domain of TCR clone 336532 (TRAV3, TRAJ32)
CAVRDPGGATNKLIF

SEQ ID NO: 673064 - protein, 14 aa, Homo sapiens
  CDR3 for beta chain variable domain of TCR clone 336532 (TRBV9, TRBJ1-2)
CASSVKGDNYDYTF

SEQ ID NO: 673065 - protein, 16 aa, Homo sapiens
  CDR3 for alpha chain variable domain of TCR clone 336533 (TRAV30, TRAJ24)
CGTEIVDADSWGNFQF

SEQ ID NO: 673066 - protein, 12 aa, Homo sapiens
  CDR3 for beta chain variable domain of TCR clone 336533 (TRBV11-2, TRBJ2-2)
CASSLPTGELFF

SEQ ID NO: 673067 - protein, 13 aa, Homo sapiens
  CDR3 for alpha chain variable domain of TCR clone 336534 (TRAV12-3, TRAJ33)
CAMSVNSNYQLTW

SEQ ID NO: 673068 - protein, 16 aa, Homo sapiens
  CDR3 for beta chain variable domain of TCR clone 336534 (TRBV13, TRBJ2-5)
CASSLRTGGSWETQYF

SEQ ID NO: 673069 - protein, 17 aa, Homo sapiens
  CDR3 for alpha chain variable domain of TCR clone 336535 (TRAV3, TRAJ6)
CAVRDGARAGGSDIPTF

SEQ ID NO: 673070 - protein, 14 aa, Homo sapiens
  CDR3 for beta chain variable domain of TCR clone 336535 (TRBV7-2, TRBJ2-7)
CASSPKTSFYEQYF

SEQ ID NO: 673071 - protein, 14 aa, Homo sapiens
  CDR3 for alpha chain variable domain of TCR clone 336536 (TRAV8-3, TRAJ31)
CAVGRGLNNARLMF

SEQ ID NO: 673072 - protein, 15 aa, Homo sapiens
  CDR3 for beta chain variable domain of TCR clone 336536 (TRBV7-2, TRBJ2-2)
CASTLAGGLTGELFF

SEQ ID NO: 673073 - protein, 14 aa, Homo sapiens
  CDR3 for alpha chain variable domain of TCR clone 336537 (TRAV1-2, TRAJ16)
CAVNRFSGGQKLLF

SEQ ID NO: 673074 - protein, 13 aa, Homo sapiens
  CDR3 for beta chain variable domain of TCR clone 336537 (TRBV7-7, TRBJ2-2)
CASSLTSAGELFF

SEQ ID NO: 673075 - protein, 12 aa, Homo sapiens
  CDR3 for alpha chain variable domain of TCR clone 336538 (TRAV16, TRAJ56)
CAPTGANSKLTF

SEQ ID NO: 673076 - protein, 14 aa, Homo sapiens
  CDR3 for beta chain variable domain of TCR clone 336538 (TRBV6-1, TRBJ1-3)
CASVQGVGGNTIYF

SEQ ID NO: 673077 - protein, 14 aa, Homo sapiens
  CDR3 for alpha chain variable domain of TCR clone 336539 (TRAV12-2, TRAJ52)
CRCAGGTSYGELTF

SEQ ID NO: 673078 - protein, 13 aa, Homo sapiens
  CDR3 for beta chain variable domain of TCR clone 336539 (TRBV11-2, TRBJ2-1)
CASSLRLTHEQFF

SEQ ID NO: 673079 - protein, 19 aa, Homo sapiens
  CDR3 for alpha chain variable domain of TCR clone 336540 (TRAV25, TRAJ20)
TATQTTDVGILPHDYKLSF

SEQ ID NO: 673080 - protein, 17 aa, Homo sapiens
  CDR3 for beta chain variable domain of TCR clone 336540 (TRBV4-3, TRBJ2-1)
CASSQFSSGRAAGEQFF

SEQ ID NO: 673081 - protein, 17 aa, Homo sapiens
  CDR3 for alpha chain variable domain of TCR clone 336541 (TRAV35, TRAJ28)
CAGLQVYSEAGSYQLTF

SEQ ID NO: 673082 - protein, 15 aa, Homo sapiens
  CDR3 for beta chain variable domain of TCR clone 336541 (TRBV2, TRBJ1-2)
CASSEIGGANYGYTF

SEQ ID NO: 673083 - protein, 15 aa, Homo sapiens
  CDR3 for alpha chain variable domain of TCR clone 336542 (TRAV4, TRAJ39)
CLVGPDNNAGNMLTF

SEQ ID NO: 673084 - protein, 14 aa, Homo sapiens
  CDR3 for beta chain variable domain of TCR clone 336542 (TRBV11-2, TRBJ2-5)
CASSRTGGIETQYF

SEQ ID NO: 673085 - protein, 14 aa, Homo sapiens
  CDR3 for alpha chain variable domain of TCR clone 336543 (TRAV1-2, TRAJ16)
CAVNRFSDGQKLLF

SEQ ID NO: 673086 - protein, 13 aa, Homo sapiens
  CDR3 for beta chain variable domain of TCR clone 336543 (TRBV6-6, TRBJ2-7)
CASSSSGSYEQYF

SEQ ID NO: 673087 - protein, 13 aa, Homo sapiens
  CDR3 for alpha chain variable domain of TCR clone 336544 (TRAV3, TRAJ21)
CAVREPDFNKFSF

SEQ ID NO: 673088 - protein, 16 aa, Homo sapiens
  CDR3 for beta chain variable domain of TCR clone 336544 (TRBV27, TRBJ2-2)
CASSFRGLVRTGELFF

SEQ ID NO: 673089 - protein, 14 aa, Homo sapiens
  CDR3 for alpha chain variable domain of TCR clone 336545 (TRAV17, TRAJ39)
CATDPVRAGNMLTF

SEQ ID NO: 673090 - protein, 16 aa, Homo sapiens
  CDR3 for beta chain variable domain of TCR clone 336545 (TRBV20-1, TRBJ1-2)
CSASMGQGVANYGYTF

SEQ ID NO: 673091 - protein, 11 aa, Homo sapiens
  CDR3 for alpha chain variable domain of TCR clone 336546 (TRAV3, TRAJ21)
CAVGNFNKFYF

SEQ ID NO: 673092 - protein, 15 aa, Homo sapiens
  CDR3 for beta chain variable domain of TCR clone 336546 (TRBV19, TRBJ2-7)
CASRPTPGLSIEQYF

SEQ ID NO: 673093 - protein, 14 aa, Homo sapiens
  CDR3 for alpha chain variable domain of TCR clone 336547 (TRAV3, TRAJ27)
CAVRDDTNAGKSTF

SEQ ID NO: 673094 - protein, 13 aa, Homo sapiens
  CDR3 for beta chain variable domain of TCR clone 336547 (TRBV5-5, TRBJ1-5)
CASSLGIGGDQHF

SEQ ID NO: 673095 - protein, 13 aa, Homo sapiens
  CDR3 for alpha chain variable domain of TCR clone 336548 (TRAV9-2, TRAJ53)
CALSGGSNYKLTF

SEQ ID NO: 673096 - protein, 19 aa, Homo sapiens
  CDR3 for beta chain variable domain of TCR clone 336548 (TRBV7-8, TRBJ2-1)
CASSLTSGRARGSYNEQFF

SEQ ID NO: 673097 - protein, 11 aa, Homo sapiens
  CDR3 for alpha chain variable domain of TCR clone 336549 (TRAV17, TRAJ9)
CATTGGFKTIF

SEQ ID NO: 673098 - protein, 13 aa, Homo sapiens
  CDR3 for beta chain variable domain of TCR clone 336549 (TRBV20-1, TRBJ1-1)
CSATLGGGTEAFF

SEQ ID NO: 673099 - protein, 16 aa, Homo sapiens
  CDR3 for alpha chain variable domain of TCR clone 336550 (TRAV30, TRAJ24)
CGTEIVDADSWGKFQF

SEQ ID NO: 673100 - protein, 14 aa, Homo sapiens
  CDR3 for beta chain variable domain of TCR clone 336550 (TRBV19, TRBJ1-5)
CASNSYGTHQPQHF

SEQ ID NO: 673101 - protein, 16 aa, Homo sapiens
  CDR3 for alpha chain variable domain of TCR clone 336551 (TRAV26-1, TRAJ36)
CIVRATGRSGANNLFF

SEQ ID NO: 673102 - protein, 14 aa, Homo sapiens
  CDR3 for beta chain variable domain of TCR clone 336551 (TRBV25-1, TRBJ2-1)
CASSKTGGYNEQFF

SEQ ID NO: 673103 - protein, 19 aa, Homo sapiens
  CDR3 for alpha chain variable domain of TCR clone 336552 (TRAV8-3, TRAJ8)
LSTSVLWDPMNTGFQKLVF

SEQ ID NO: 673104 - protein, 13 aa, Homo sapiens
  CDR3 for beta chain variable domain of TCR clone 336552 (TRBV7-3, TRBJ1-1)
CASSQDWGAEAFF

SEQ ID NO: 673105 - protein, 13 aa, Homo sapiens
  CDR3 for alpha chain variable domain of TCR clone 336553 (TRAV2, TRAJ40)
GAVVTSGTYKYIF

SEQ ID NO: 673106 - protein, 16 aa, Homo sapiens
  CDR3 for beta chain variable domain of TCR clone 336553 (TRBV19, TRBJ2-2)
CASRSPGTGATGELFF

SEQ ID NO: 673107 - protein, 13 aa, Homo sapiens
  CDR3 for alpha chain variable domain of TCR clone 336554 (TRAV26-1, TRAJ40)
CIFRVEGTYKYIF

SEQ ID NO: 673108 - protein, 15 aa, Homo sapiens
  CDR3 for beta chain variable domain of TCR clone 336554 (TRBV12-4, TRBJ1-2)
CASSLAHRDGQAYTF

SEQ ID NO: 673109 - protein, 13 aa, Homo sapiens
  CDR3 for alpha chain variable domain of TCR clone 336555 (TRAV1-2, TRAJ9)
SAALNTGGFKTIF

SEQ ID NO: 673110 - protein, 12 aa, Homo sapiens
  CDR3 for beta chain variable domain of TCR clone 336555 (TRBV7-9, TRBJ2-3)
CASSHRTDTQYF

SEQ ID NO: 673111 - protein, 13 aa, Homo sapiens
  CDR3 for alpha chain variable domain of TCR clone 336556 (TRAV13-1, TRAJ39)
CSKYSNAGNMLTF

SEQ ID NO: 673112 - protein, 18 aa, Homo sapiens
  CDR3 for beta chain variable domain of TCR clone 336556 (TRBV10-2, TRBJ2-2)
CVSAPAVHRQADAGELFF

SEQ ID NO: 673113 - protein, 14 aa, Homo sapiens
  CDR3 for alpha chain variable domain of TCR clone 336557 (TRAV25, TRAJ52)
CRTSGGTSYGKLTF

SEQ ID NO: 673114 - protein, 13 aa, Homo sapiens
  CDR3 for beta chain variable domain of TCR clone 336557 (TRBV6-5, TRBJ2-5)
CASSPQGGETQYF

SEQ ID NO: 673115 - protein, 13 aa, Homo sapiens
  CDR3 for alpha chain variable domain of TCR clone 336558 (TRAV13-2, TRAJ48)
CAEMAFGNEKLTF

SEQ ID NO: 673116 - protein, 15 aa, Homo sapiens
  CDR3 for beta chain variable domain of TCR clone 336558 (TRBV7-9, TRBJ1-6)
CASSSPGRGDSPLHF

SEQ ID NO: 673117 - protein, 11 aa, Homo sapiens
  CDR3 for alpha chain variable domain of TCR clone 336559 (TRAV1-1, TRAJ23)
CAVRQGGKLIF

SEQ ID NO: 673118 - protein, 10 aa, Homo sapiens
  CDR3 for beta chain variable domain of TCR clone 336559 (TRBV11-2, TRBJ1-6)
CASSLVFATG

SEQ ID NO: 673119 - protein, 13 aa, Homo sapiens
  CDR3 for alpha chain variable domain of TCR clone 336560 (TRAV12-1, TRAJ31)
CVVVPNNNARLMF

SEQ ID NO: 673120 - protein, 15 aa, Homo sapiens
  CDR3 for beta chain variable domain of TCR clone 336560 (TRBV19, TRBJ1-2)
CASNLGGETPYGDTF

SEQ ID NO: 673121 - protein, 16 aa, Homo sapiens
  CDR3 for alpha chain variable domain of TCR clone 336561 (TRAV3, TRAJ10)
CAVRDMRAGGGNKLTF

SEQ ID NO: 673122 - protein, 16 aa, Homo sapiens
  CDR3 for beta chain variable domain of TCR clone 336561 (TRBV2, TRBJ2-5)
CASSETQGVGEETQYF

SEQ ID NO: 673123 - protein, 17 aa, Homo sapiens
  CDR3 for alpha chain variable domain of TCR clone 336562 (TRAV13-1, TRAJ31)
CAPRDRLMFGDGTQLVV

SEQ ID NO: 673124 - protein, 15 aa, Homo sapiens
  CDR3 for beta chain variable domain of TCR clone 336562 (TRBV11-3, TRBJ2-2)
CASSPSGSVTGELFF

SEQ ID NO: 673125 - protein, 14 aa, Homo sapiens
  CDR3 for alpha chain variable domain of TCR clone 336563 (TRAV27, TRAJ44)
CAASFTGTASKLPF

SEQ ID NO: 673126 - protein, 13 aa, Homo sapiens
  CDR3 for beta chain variable domain of TCR clone 336563 (TRBV27, TRBJ2-3)
CATSRGGLYTQYF

SEQ ID NO: 673127 - protein, 17 aa, Homo sapiens
  CDR3 for alpha chain variable domain of TCR clone 336564 (TRAV23/DV6, TRAJ12)
CAAIDLGAMHSSYKLIF

SEQ ID NO: 673128 - protein, 12 aa, Homo sapiens
  CDR3 for beta chain variable domain of TCR clone 336564 (TRBV10-3, TRBJ2-2)
CAIRENTGELFF

SEQ ID NO: 673129 - protein, 14 aa, Homo sapiens
  CDR3 for alpha chain variable domain of TCR clone 336565 (TRAV20, TRAJ56)
CAVEFGGANSKLTF

SEQ ID NO: 673130 - protein, 14 aa, Homo sapiens
  CDR3 for beta chain variable domain of TCR clone 336565 (TRBV20-1, TRBJ2-7)
CSAKRGRSSYEQYF

SEQ ID NO: 673131 - protein, 20 aa, Homo sapiens
  CDR3 for alpha chain variable domain of TCR clone 336566 (TRAV12-3, TRAJ41)
SLFIRDSPPSDSATPEALNF

SEQ ID NO: 673132 - protein, 14 aa, Homo sapiens
  CDR3 for beta chain variable domain of TCR clone 336566 (TRBV6-6, TRBJ2-7)
CASSDSGAGYEQYF

SEQ ID NO: 673133 - protein, 17 aa, Homo sapiens
  CDR3 for alpha chain variable domain of TCR clone 336567 (TRAV3, TRAJ6)
CAVRDGPRAGGSDIPTF

SEQ ID NO: 673134 - protein, 17 aa, Homo sapiens
  CDR3 for beta chain variable domain of TCR clone 336567 (TRBV11-2, TRBJ2-1)
CASSLYPPGVEYNEQFF

SEQ ID NO: 673135 - protein, 17 aa, Homo sapiens
  CDR3 for alpha chain variable domain of TCR clone 336568 (TRAV3, TRAJ6)
CAVRDGPRAGGSYRPTF

SEQ ID NO: 673136 - protein, 13 aa, Homo sapiens
  CDR3 for beta chain variable domain of TCR clone 336568 (TRBV4-1, TRBJ2-2)
CASSQENTGELFF

SEQ ID NO: 673137 - protein, 17 aa, Homo sapiens
  CDR3 for alpha chain variable domain of TCR clone 336569 (TRAV26-1, TRAJ53)
CIVRVDHSGGSNYKLTF

SEQ ID NO: 673138 - protein, 15 aa, Homo sapiens
  CDR3 for beta chain variable domain of TCR clone 336569 (TRBV20-1, TRBJ2-7)
CSARVPAAYFYEQYF

SEQ ID NO: 673139 - protein, 11 aa, Homo sapiens
  CDR3 for alpha chain variable domain of TCR clone 336570 (TRAV1-2, TRAJ8)
FAVSSFQKLVF

SEQ ID NO: 673140 - protein, 16 aa, Homo sapiens
  CDR3 for beta chain variable domain of TCR clone 336570 (TRBV7-3, TRBJ2-2)
CASSLKRGTLSGELFF

SEQ ID NO: 673141 - protein, 13 aa, Homo sapiens
  CDR3 for alpha chain variable domain of TCR clone 336571 (TRAV26-1, TRAJ40)
CLVATSGTYKYIF

SEQ ID NO: 673142 - protein, 16 aa, Homo sapiens
  CDR3 for beta chain variable domain of TCR clone 336571 (TRBV7-2, TRBJ2-2)
CASSLYRGPNTGELFF

SEQ ID NO: 673143 - protein, 15 aa, Homo sapiens
  CDR3 for alpha chain variable domain of TCR clone 336572 (TRAV17, TRAJ35)
LATAFVIGFGNVLHF

SEQ ID NO: 673144 - protein, 15 aa, Homo sapiens
  CDR3 for beta chain variable domain of TCR clone 336572 (TRBV7-9, TRBJ2-7)
CASSLALAEAYEQYF

SEQ ID NO: 673145 - protein, 16 aa, Homo sapiens
  CDR3 for alpha chain variable domain of TCR clone 336573 (TRAV3, TRAJ10)
CAVRDMRAGGGNKLTF

SEQ ID NO: 673146 - protein, 14 aa, Homo sapiens
  CDR3 for beta chain variable domain of TCR clone 336573 (TRBV20-1, TRBJ2-1)
CSAHPGLPYNEQFF

SEQ ID NO: 673147 - protein, 16 aa, Homo sapiens
  CDR3 for alpha chain variable domain of TCR clone 336574 (TRAV26-1, TRAJ36)
CIVRAIGRSWANNLFF

SEQ ID NO: 673148 - protein, 14 aa, Homo sapiens
  CDR3 for beta chain variable domain of TCR clone 336574 (TRBV25-1, TRBJ2-1)
CASSKTGGYNEQFF

SEQ ID NO: 673149 - protein, 11 aa, Homo sapiens
  CDR3 for alpha chain variable domain of TCR clone 336575 (TRAV27, TRAJ20)
CAGADDYKLSF

SEQ ID NO: 673150 - protein, 15 aa, Homo sapiens
  CDR3 for beta chain variable domain of TCR clone 336575 (TRBV11-3, TRBJ2-3)
CASLKDGREGDTQYF

SEQ ID NO: 673151 - protein, 16 aa, Homo sapiens
  CDR3 for alpha chain variable domain of TCR clone 336576 (TRAV17, TRAJ52)
CATSNAGGTSYRKLAF

SEQ ID NO: 673152 - protein, 13 aa, Homo sapiens
  CDR3 for beta chain variable domain of TCR clone 336576 (TRBV27, TRBJ1-6)
CASSLVLVSPLHF

SEQ ID NO: 673153 - protein, 14 aa, Homo sapiens
  CDR3 for alpha chain variable domain of TCR clone 336577 (TRAV29/DV5, TRAJ22)
CAASDSGFARQLTF

SEQ ID NO: 673154 - protein, 15 aa, Homo sapiens
  CDR3 for beta chain variable domain of TCR clone 336577 (TRBV7-9, TRBJ1-1)
CASSLLEQGGTEAFF

SEQ ID NO: 673155 - protein, 14 aa, Homo sapiens
  CDR3 for alpha chain variable domain of TCR clone 336578 (TRAV8-3, TRAJ37)
CAVGSAGNTGKLIF

SEQ ID NO: 673156 - protein, 15 aa, Homo sapiens
  CDR3 for beta chain variable domain of TCR clone 336578 (TRBV11-2, TRBJ1-3)
CASSLSPLVRDTIYF

SEQ ID NO: 673157 - protein, 12 aa, Homo sapiens
  CDR3 for alpha chain variable domain of TCR clone 336579 (TRAV36/DV7, TRAJ40)
CAVGTGTYNYIF

SEQ ID NO: 673158 - protein, 14 aa, Homo sapiens
  CDR3 for beta chain variable domain of TCR clone 336579 (TRBV19, TRBJ2-3)
CASSIDLGGDTQYF

SEQ ID NO: 673159 - protein, 16 aa, Homo sapiens
  CDR3 for alpha chain variable domain of TCR clone 336580 (TRAV1-2, TRAJ10)
CAVRGVLTGGGNKLTF

SEQ ID NO: 673160 - protein, 16 aa, Homo sapiens
  CDR3 for beta chain variable domain of TCR clone 336580 (TRBV12-5, TRBJ2-5)
CASGPRTSGNKETQYF

SEQ ID NO: 673161 - protein, 17 aa, Homo sapiens
  CDR3 for alpha chain variable domain of TCR clone 336581 (TRAV26-1, TRAJ37)
CIVRVITVSSNTGKLIF

SEQ ID NO: 673162 - protein, 16 aa, Homo sapiens
  CDR3 for beta chain variable domain of TCR clone 336581 (TRBV18, TRBJ2-3)
CASSPGGLASTDTQYF

SEQ ID NO: 673163 - protein, 15 aa, Homo sapiens
  CDR3 for alpha chain variable domain of TCR clone 336582 (TRAV21, TRAJ53)
CATLNRGGSNYKLTF

SEQ ID NO: 673164 - protein, 16 aa, Homo sapiens
  CDR3 for beta chain variable domain of TCR clone 336582 (TRBV20-1, TRBJ1-2)
CSASMGQGVANYGYTF

SEQ ID NO: 673165 - protein, 15 aa, Homo sapiens
  CDR3 for alpha chain variable domain of TCR clone 336583 (TRAV38-1, TRAJ37)
CAVIFGSGYTGKLIF

SEQ ID NO: 673166 - protein, 16 aa, Homo sapiens
  CDR3 for beta chain variable domain of TCR clone 336583 (TRBV6-1, TRBJ2-3)
CASSEVIGQGTDTQYF

SEQ ID NO: 673167 - protein, 18 aa, Homo sapiens
  CDR3 for alpha chain variable domain of TCR clone 336584 (TRAV21, TRAJ52)
CAVRPSPAGGTSYGKLTF

SEQ ID NO: 673168 - protein, 17 aa, Homo sapiens
  CDR3 for beta chain variable domain of TCR clone 336584 (TRBV13, TRBJ2-3)
CASSLARVAGGRNTQYC

SEQ ID NO: 673169 - protein, 18 aa, Homo sapiens
  CDR3 for alpha chain variable domain of TCR clone 336585 (TRAV13-1, TRAJ52)
CAASKRSAGGTSYGKLTF

SEQ ID NO: 673170 - protein, 16 aa, Homo sapiens
  CDR3 for beta chain variable domain of TCR clone 336585 (TRBV11-2, TRBJ2-2)
CASSLRTGNLIGELFF

SEQ ID NO: 673171 - protein, 17 aa, Homo sapiens
  CDR3 for alpha chain variable domain of TCR clone 336586 (TRAV36/DV7, TRAJ52)
CAVAQRAGDTSYGKLTF

SEQ ID NO: 673172 - protein, 12 aa, Homo sapiens
  CDR3 for beta chain variable domain of TCR clone 336586 (TRBV11-2, TRBJ2-2)
CAISLGGGELFF

SEQ ID NO: 673173 - protein, 14 aa, Homo sapiens
  CDR3 for alpha chain variable domain of TCR clone 336587 (TRAV35, TRAJ22)
CAGLRPGSARQLTF

SEQ ID NO: 673174 - protein, 16 aa, Homo sapiens
  CDR3 for beta chain variable domain of TCR clone 336587 (TRBV6-5, TRBJ2-7)
CASSSDPTSGFYEQYF

SEQ ID NO: 673175 - protein, 14 aa, Homo sapiens
  CDR3 for alpha chain variable domain of TCR clone 336588 (TRAV1-2, TRAJ8)
CAVRADTGLQKLVF

SEQ ID NO: 673176 - protein, 14 aa, Homo sapiens
  CDR3 for beta chain variable domain of TCR clone 336588 (TRBV7-9, TRBJ1-1)
CASSLGGANTEAFF

SEQ ID NO: 673177 - protein, 14 aa, Homo sapiens
  CDR3 for alpha chain variable domain of TCR clone 336589 (TRAV2, TRAJ9)
CAVEDRSEGFKTIF

SEQ ID NO: 673178 - protein, 13 aa, Homo sapiens
  CDR3 for beta chain variable domain of TCR clone 336589 (TRBV7-3, TRBJ2-5)
CASSFRGGETQYF

SEQ ID NO: 673179 - protein, 14 aa, Homo sapiens
  CDR3 for alpha chain variable domain of TCR clone 336590 (TRAV1-2, TRAJ8)
CAVREDTGFQKLVF

SEQ ID NO: 673180 - protein, 17 aa, Homo sapiens
  CDR3 for beta chain variable domain of TCR clone 336590 (TRBV7-2, TRBJ2-3)
SASSLEARGTSTDTQYF

SEQ ID NO: 673181 - protein, 16 aa, Homo sapiens
  CDR3 for alpha chain variable domain of TCR clone 336591 (TRAV30, TRAJ24)
CGTEIVDADSWGKFQC

SEQ ID NO: 673182 - protein, 13 aa, Homo sapiens
  CDR3 for beta chain variable domain of TCR clone 336591 (TRBV10-3, TRBJ1-2)
CAISERDSYGYTF

SEQ ID NO: 673183 - protein, 13 aa, Homo sapiens
  CDR3 for alpha chain variable domain of TCR clone 336592 (TRAV17, TRAJ5)
CALHGTGRRALTF

SEQ ID NO: 673184 - protein, 15 aa, Homo sapiens
  CDR3 for beta chain variable domain of TCR clone 336592 (TRBV6-1, TRBJ1-5)
CASSELREGNQPQHF

SEQ ID NO: 673185 - protein, 11 aa, Homo sapiens
  CDR3 for alpha chain variable domain of TCR clone 336593 (TRAV1-2, TRAJ20)
CAVANDYKLSF

SEQ ID NO: 673186 - protein, 12 aa, Homo sapiens
  CDR3 for beta chain variable domain of TCR clone 336593 (TRBV7-8, TRBJ2-7)
CASSLGDREQYF

SEQ ID NO: 673187 - protein, 11 aa, Homo sapiens
  CDR3 for alpha chain variable domain of TCR clone 336594 (TRAV3, TRAJ21)
CAVGNFNKFYF

SEQ ID NO: 673188 - protein, 13 aa, Homo sapiens
  CDR3 for beta chain variable domain of TCR clone 336594 (TRBV7-9, TRBJ1-2)
CAISSKQNYGYTF

SEQ ID NO: 673189 - protein, 13 aa, Homo sapiens
  CDR3 for alpha chain variable domain of TCR clone 336595 (TRAV8-3, TRAJ28)
CAVGAVGSYQLTF

SEQ ID NO: 673190 - protein, 12 aa, Homo sapiens
  CDR3 for beta chain variable domain of TCR clone 336595 (TRBV12-4, TRBJ2-7)
CASSLGGYEQYF

SEQ ID NO: 673191 - protein, 13 aa, Homo sapiens
  CDR3 for alpha chain variable domain of TCR clone 336596 (TRAV13-2, TRAJ48)
CAEMDFGNGKLTF

SEQ ID NO: 673192 - protein, 13 aa, Homo sapiens
  CDR3 for beta chain variable domain of TCR clone 336596 (TRBV13, TRBJ2-5)
CASSPEVGETQYF

SEQ ID NO: 673193 - protein, 14 aa, Homo sapiens
  CDR3 for alpha chain variable domain of TCR clone 336597 (TRAV13-1, TRAJ44)
CATKATGTASKLTF

SEQ ID NO: 673194 - protein, 16 aa, Homo sapiens
  CDR3 for beta chain variable domain of TCR clone 336597 (TRBV7-9, TRBJ2-6)
CASSLKGPLRANVLTF

SEQ ID NO: 673195 - protein, 13 aa, Homo sapiens
  CDR3 for alpha chain variable domain of TCR clone 336598 (TRAV21, TRAJ57)
CAVTQGGSEKLVF

SEQ ID NO: 673196 - protein, 16 aa, Homo sapiens
  CDR3 for beta chain variable domain of TCR clone 336598 (TRBV7-3, TRBJ2-1)
CASSKPLAGGYNEQFF

SEQ ID NO: 673197 - protein, 14 aa, Homo sapiens
  CDR3 for alpha chain variable domain of TCR clone 336599 (TRAV13-1, TRAJ35)
CAASKGGFGNVLHC

SEQ ID NO: 673198 - protein, 13 aa, Homo sapiens
  CDR3 for beta chain variable domain of TCR clone 336599 (TRBV20-1, TRBJ2-1)
CSATGLAGDEQFF

SEQ ID NO: 673199 - protein, 18 aa, Homo sapiens
  CDR3 for alpha chain variable domain of TCR clone 336600 (TRAV12-2, )
CAVEDIQNPDPAGYQLRD

SEQ ID NO: 673200 - protein, 11 aa, Homo sapiens
  CDR3 for beta chain variable domain of TCR clone 336600 (TRBV25-1, TRBJ2-1)
CATTRISEQFF

SEQ ID NO: 673201 - protein, 15 aa, Homo sapiens
  CDR3 for alpha chain variable domain of TCR clone 336601 (TRAV26-1, TRAJ29)
CTVRVEGSGNPPLVF

SEQ ID NO: 673202 - protein, 14 aa, Homo sapiens
  CDR3 for beta chain variable domain of TCR clone 336601 (TRBV18, TRBJ2-5)
CASSPGVSQETQYF

SEQ ID NO: 673203 - protein, 13 aa, Homo sapiens
  CDR3 for alpha chain variable domain of TCR clone 336602 (TRAV3, TRAJ43)
CAVKARNNNDMRF

SEQ ID NO: 673204 - protein, 16 aa, Homo sapiens
  CDR3 for beta chain variable domain of TCR clone 336602 (TRBV7-9, TRBJ2-3)
CASSVSVAGGTDTQYF

SEQ ID NO: 673205 - protein, 15 aa, Homo sapiens
  CDR3 for alpha chain variable domain of TCR clone 336603 (TRAV12-1, TRAJ23)
CVVIVYNQGGKLIRT

SEQ ID NO: 673206 - protein, 15 aa, Homo sapiens
  CDR3 for beta chain variable domain of TCR clone 336603 (TRBV20-1, TRBJ1-5)
CSAKPPGQGPQPQHF

SEQ ID NO: 673207 - protein, 12 aa, Homo sapiens
  CDR3 for alpha chain variable domain of TCR clone 336604 (TRAV17, TRAJ12)
CATLRSSYKLIF

SEQ ID NO: 673208 - protein, 16 aa, Homo sapiens
  CDR3 for beta chain variable domain of TCR clone 336604 (TRBV28, TRBJ2-2)
CASSLEGGSNTGELFF

SEQ ID NO: 673209 - protein, 14 aa, Homo sapiens
  CDR3 for alpha chain variable domain of TCR clone 336605 (TRAV12-2, TRAJ40)
CAVKIPSGTYKYIF

SEQ ID NO: 673210 - protein, 17 aa, Homo sapiens
  CDR3 for beta chain variable domain of TCR clone 336605 (TRBV11-2, TRBJ2-1)
CASSLYPPEVEYNEQFF

SEQ ID NO: 673211 - protein, 12 aa, Homo sapiens
  CDR3 for alpha chain variable domain of TCR clone 336606 (TRAV8-1, TRAJ26)
CAVNNYGQNFVF

SEQ ID NO: 673212 - protein, 15 aa, Homo sapiens
  CDR3 for beta chain variable domain of TCR clone 336606 (TRBV20-1, TRBJ1-1)
CSASWDRVLNTEAFF

SEQ ID NO: 673213 - protein, 13 aa, Homo sapiens
  CDR3 for alpha chain variable domain of TCR clone 336607 (TRAV21, TRAJ10)
CAMTGGGGNKLTF

SEQ ID NO: 673214 - protein, 14 aa, Homo sapiens
  CDR3 for beta chain variable domain of TCR clone 336607 (TRBV13, TRBJ2-5)
CASSLGRGQETQYC

SEQ ID NO: 673215 - protein, 14 aa, Homo sapiens
  CDR3 for alpha chain variable domain of TCR clone 336608 (TRAV8-4, TRAJ13)
CAVTLSGCYQKVTF

SEQ ID NO: 673216 - protein, 14 aa, Homo sapiens
  CDR3 for beta chain variable domain of TCR clone 336608 (TRBV7-2, TRBJ1-2)
CASSQTGSTYGYTF

SEQ ID NO: 673217 - protein, 13 aa, Homo sapiens
  CDR3 for alpha chain variable domain of TCR clone 336609 (TRAV13-1, TRAJ21)
CAASVYNFNKFYF

SEQ ID NO: 673218 - protein, 12 aa, Homo sapiens
  CDR3 for beta chain variable domain of TCR clone 336609 (TRBV11-2, TRBJ2-1)
CASSPGNNEQFF

SEQ ID NO: 673219 - protein, 14 aa, Homo sapiens
  CDR3 for alpha chain variable domain of TCR clone 336610 (TRAV12-3, TRAJ10)
SHLPLTGVGNKLTF

SEQ ID NO: 673220 - protein, 14 aa, Homo sapiens
  CDR3 for beta chain variable domain of TCR clone 336610 (TRBV12-5, TRBJ2-5)
CASGSRTHQETQYF

SEQ ID NO: 673221 - protein, 13 aa, Homo sapiens
  CDR3 for alpha chain variable domain of TCR clone 336611 (TRAV8-1, TRAJ39)
CAGLNNAGNMLTF

SEQ ID NO: 673222 - protein, 14 aa, Homo sapiens
  CDR3 for beta chain variable domain of TCR clone 336611 (TRBV7-3, TRBJ2-1)
CASSLSGSYNEQFF

SEQ ID NO: 673223 - protein, 14 aa, Homo sapiens
  CDR3 for alpha chain variable domain of TCR clone 336612 (TRAV13-1, TRAJ9)
CAASRPSGGFKTIF

SEQ ID NO: 673224 - protein, 17 aa, Homo sapiens
  CDR3 for beta chain variable domain of TCR clone 336612 (TRBV13, TRBJ2-3)
CASSLSRVAGGRNTQYF

SEQ ID NO: 673225 - protein, 14 aa, Homo sapiens
  CDR3 for alpha chain variable domain of TCR clone 336613 (TRAV2, TRAJ37)
CAVDFTSNTGKLIF

SEQ ID NO: 673226 - protein, 15 aa, Homo sapiens
  CDR3 for beta chain variable domain of TCR clone 336613 (TRBV20-1, TRBJ1-1)
CSGSRGVTGNTEAFF

SEQ ID NO: 673227 - protein, 15 aa, Homo sapiens
  CDR3 for alpha chain variable domain of TCR clone 336614 (TRAV26-1, TRAJ29)
CIVRVEGSGNTPLVF

SEQ ID NO: 673228 - protein, 15 aa, Homo sapiens
  CDR3 for beta chain variable domain of TCR clone 336614 (TRBV7-9, TRBJ1-5)
CASSQGHQPNQTQRF

SEQ ID NO: 673229 - protein, 16 aa, Homo sapiens
  CDR3 for alpha chain variable domain of TCR clone 336615 (TRAV13-1, TRAJ48)
CAASIFSNFGNEKLTF

SEQ ID NO: 673230 - protein, 14 aa, Homo sapiens
  CDR3 for beta chain variable domain of TCR clone 336615 (TRBV7-3, TRBJ1-1)
CASSLKGGNTEAFF

SEQ ID NO: 673231 - protein, 12 aa, Homo sapiens
  CDR3 for alpha chain variable domain of TCR clone 336616 (TRAV1-1, TRAJ9)
CAVDTGGFKTIF

SEQ ID NO: 673232 - protein, 12 aa, Homo sapiens
  CDR3 for beta chain variable domain of TCR clone 336616 (TRBV11-2, TRBJ2-2)
CASSLGGGELFF

SEQ ID NO: 673233 - protein, 14 aa, Homo sapiens
  CDR3 for alpha chain variable domain of TCR clone 336617 (TRAV1-2, TRAJ16)
CAVNRFSDGQELLF

SEQ ID NO: 673234 - protein, 12 aa, Homo sapiens
  CDR3 for beta chain variable domain of TCR clone 336617 (TRBV28, TRBJ2-6)
CAIQAGANVLTF

SEQ ID NO: 673235 - protein, 11 aa, Homo sapiens
  CDR3 for alpha chain variable domain of TCR clone 336618 (TRAV3, TRAJ21)
CAVGNFNKFYF

SEQ ID NO: 673236 - protein, 13 aa, Homo sapiens
  CDR3 for beta chain variable domain of TCR clone 336618 (TRBV20-1, TRBJ1-5)
CSASGRGNQPQHF

SEQ ID NO: 673237 - protein, 13 aa, Homo sapiens
  CDR3 for alpha chain variable domain of TCR clone 336619 (TRAV12-2, TRAJ20)
CAVYPSNDYKLSL

SEQ ID NO: 673238 - protein, 14 aa, Homo sapiens
  CDR3 for beta chain variable domain of TCR clone 336619 (TRBV27, TRBJ2-5)
CQQFIPAGGRDQYF

SEQ ID NO: 673239 - protein, 21 aa, Homo sapiens
  CDR3 for alpha chain variable domain of TCR clone 336620 (TRAV12-1, TRAJ32)
SSVIQTPTSMNYGGATNKLIF

SEQ ID NO: 673240 - protein, 18 aa, Homo sapiens
  CDR3 for beta chain variable domain of TCR clone 336620 (TRBV20-1, TRBJ2-3)
CSASGLAGGPGTTDTQYF

SEQ ID NO: 673241 - protein, 18 aa, Homo sapiens
  CDR3 for alpha chain variable domain of TCR clone 336621 (TRAV1-2, TRAJ18)
CAVRDMGDGGSTLGRLYF

SEQ ID NO: 673242 - protein, 16 aa, Homo sapiens
  CDR3 for beta chain variable domain of TCR clone 336621 (TRBV29-1, TRBJ1-2)
CSVEANRDIANYGYTF

SEQ ID NO: 673243 - protein, 14 aa, Homo sapiens
  CDR3 for alpha chain variable domain of TCR clone 336622 (TRAV12-2, TRAJ13)
CAVKKTGGYQKVTF

SEQ ID NO: 673244 - protein, 16 aa, Homo sapiens
  CDR3 for beta chain variable domain of TCR clone 336622 (TRBV20-1, TRBJ1-4)
CSAPGQGLLANEKLFF

SEQ ID NO: 673245 - protein, 13 aa, Homo sapiens
  CDR3 for alpha chain variable domain of TCR clone 336623 (TRAV3, TRAJ21)
CAVGNFTNFTLDL

SEQ ID NO: 673246 - protein, 16 aa, Homo sapiens
  CDR3 for beta chain variable domain of TCR clone 336623 (TRBV19, TRBJ2-1)
CASSKAGPSSYNEQFF

SEQ ID NO: 673247 - protein, 13 aa, Homo sapiens
  CDR3 for alpha chain variable domain of TCR clone 336624 (TRAV8-3, TRAJ48)
CAVVPFGNEKLTF

SEQ ID NO: 673248 - protein, 12 aa, Homo sapiens
  CDR3 for beta chain variable domain of TCR clone 336624 (TRBV20-1, TRBJ2-1)
CSARLGTDEEFF

SEQ ID NO: 673249 - protein, 14 aa, Homo sapiens
  CDR3 for alpha chain variable domain of TCR clone 336625 (TRAV12-3, TRAJ42)
CAMNYGGSQGNLTF

SEQ ID NO: 673250 - protein, 15 aa, Homo sapiens
  CDR3 for beta chain variable domain of TCR clone 336625 (TRBV5-7, TRBJ1-5)
CASSYGKLWDQPQDF

SEQ ID NO: 673251 - protein, 14 aa, Homo sapiens
  CDR3 for alpha chain variable domain of TCR clone 336626 (TRAV3, TRAJ37)
CAVKESGNTGKLIF

SEQ ID NO: 673252 - protein, 14 aa, Homo sapiens
  CDR3 for beta chain variable domain of TCR clone 336626 (TRBV2, TRBJ1-5)
CASSENRGGQPQRF

SEQ ID NO: 673253 - protein, 14 aa, Homo sapiens
  CDR3 for alpha chain variable domain of TCR clone 336627 (TRAV12-3, TRAJ10)
SHLPLAGGGNKLTF

SEQ ID NO: 673254 - protein, 15 aa, Homo sapiens
  CDR3 for beta chain variable domain of TCR clone 336627 (TRBV7-9, TRBJ1-6)
CASSSPGRGNSPLHF

SEQ ID NO: 673255 - protein, 13 aa, Homo sapiens
  CDR3 for alpha chain variable domain of TCR clone 336628 (TRAV2, TRAJ29)
CAAQNSGNTPLVF

SEQ ID NO: 673256 - protein, 12 aa, Homo sapiens
  CDR3 for beta chain variable domain of TCR clone 336628 (TRBV7-3, TRBJ2-1)
CASSFINNEQFF

SEQ ID NO: 673257 - protein, 14 aa, Homo sapiens
  CDR3 for alpha chain variable domain of TCR clone 336629 (TRAV26-1, TRAJ22)
CIVRVYGSARQLTF

SEQ ID NO: 673258 - protein, 17 aa, Homo sapiens
  CDR3 for beta chain variable domain of TCR clone 336629 (TRBV7-3, TRBJ2-3)
CASSPGGLAGFGYTQYF

SEQ ID NO: 673259 - protein, 16 aa, Homo sapiens
  CDR3 for alpha chain variable domain of TCR clone 336630 (TRAV8-3, TRAJ4)
CAVGARGSGGYTKLIF

SEQ ID NO: 673260 - protein, 16 aa, Homo sapiens
  CDR3 for beta chain variable domain of TCR clone 336630 (TRBV4-3, TRBJ2-5)
CASSQDSIQLQETQYF

SEQ ID NO: 673261 - protein, 14 aa, Homo sapiens
  CDR3 for alpha chain variable domain of TCR clone 336631 (TRAV12-3, TRAJ10)
SHLPLTGGANKLTF

SEQ ID NO: 673262 - protein, 15 aa, Homo sapiens
  CDR3 for beta chain variable domain of TCR clone 336631 (TRBV7-9, TRBJ1-6)
CASSSPGRGNSPLHF

SEQ ID NO: 673263 - protein, 13 aa, Homo sapiens
  CDR3 for alpha chain variable domain of TCR clone 336632 (TRAV27, TRAJ29)
CAGAHSGNTPLVF

SEQ ID NO: 673264 - protein, 14 aa, Homo sapiens
  CDR3 for beta chain variable domain of TCR clone 336632 (TRBV7-9, TRBJ2-1)
CASSIGQGAGEQYF

SEQ ID NO: 673265 - protein, 14 aa, Homo sapiens
  CDR3 for alpha chain variable domain of TCR clone 336633 (TRAV13-1, TRAJ35)
CAASKGGFGNALHC

SEQ ID NO: 673266 - protein, 13 aa, Homo sapiens
  CDR3 for beta chain variable domain of TCR clone 336633 (TRBV12-4, TRBJ1-2)
CASSSGPNYGYTF

SEQ ID NO: 673267 - protein, 13 aa, Homo sapiens
  CDR3 for alpha chain variable domain of TCR clone 336634 (TRAV3, TRAJ20)
CCEAFCNDYKLSF

SEQ ID NO: 673268 - protein, 14 aa, Homo sapiens
  CDR3 for beta chain variable domain of TCR clone 336634 (TRBV4-2, TRBJ2-1)
CASSRSGGGNEQFF

SEQ ID NO: 673269 - protein, 10 aa, Homo sapiens
  CDR3 for alpha chain variable domain of TCR clone 336635 (TRAV30, TRAJ48)
CGIGNEKLTF

SEQ ID NO: 673270 - protein, 17 aa, Homo sapiens
  CDR3 for beta chain variable domain of TCR clone 336635 (TRBV20-1, TRBJ2-2)
CSASGSGQGGLTGELFF

SEQ ID NO: 673271 - protein, 14 aa, Homo sapiens
  CDR3 for alpha chain variable domain of TCR clone 336636 (TRAV35, TRAJ48)
CAGQRDFGNEKLTF

SEQ ID NO: 673272 - protein, 13 aa, Homo sapiens
  CDR3 for beta chain variable domain of TCR clone 336636 (TRBV4-1, TRBJ2-2)
CASSQENTGDLFS

SEQ ID NO: 673273 - protein, 12 aa, Homo sapiens
  CDR3 for alpha chain variable domain of TCR clone 336637 (TRAV12-2, TRAJ10)
WGVTGGGNKLTF

SEQ ID NO: 673274 - protein, 12 aa, Homo sapiens
  CDR3 for beta chain variable domain of TCR clone 336637 (TRBV11-2, TRBJ2-2)
CASSPGGGELFF

SEQ ID NO: 673275 - protein, 13 aa, Homo sapiens
  CDR3 for alpha chain variable domain of TCR clone 336638 (TRAV29/DV5, TRAJ31)
CAASRNNNARLMC

SEQ ID NO: 673276 - protein, 12 aa, Homo sapiens
  CDR3 for beta chain variable domain of TCR clone 336638 (TRBV14, TRBJ1-1)
CASSQLKGLAFF

SEQ ID NO: 673277 - protein, 15 aa, Homo sapiens
  CDR3 for alpha chain variable domain of TCR clone 336639 (TRAV12-2, TRAJ53)
CAVNGGGGSNYKLPF

SEQ ID NO: 673278 - protein, 12 aa, Homo sapiens
  CDR3 for beta chain variable domain of TCR clone 336639 (TRBV11-2, TRBJ2-2)
CASSLPTGELFF

SEQ ID NO: 673279 - protein, 11 aa, Homo sapiens
  CDR3 for alpha chain variable domain of TCR clone 336640 (TRAV1-1, TRAJ23)
CAVRQGGKLIF

SEQ ID NO: 673280 - protein, 17 aa, Homo sapiens
  CDR3 for beta chain variable domain of TCR clone 336640 (TRBV7-8, TRBJ2-3)
CASSLMKRMRGADTQYF

SEQ ID NO: 673281 - protein, 14 aa, Homo sapiens
  CDR3 for alpha chain variable domain of TCR clone 336641 (TRAV12-2, TRAJ45)
CALPERGGADGLTF

SEQ ID NO: 673282 - protein, 14 aa, Homo sapiens
  CDR3 for beta chain variable domain of TCR clone 336641 (TRBV18, TRBJ1-5)
CASSPGNSNQPRHF

SEQ ID NO: 673283 - protein, 13 aa, Homo sapiens
  CDR3 for alpha chain variable domain of TCR clone 336642 (TRAV12-3, TRAJ40)
CAMSDSGTYKYIF

SEQ ID NO: 673284 - protein, 14 aa, Homo sapiens
  CDR3 for beta chain variable domain of TCR clone 336642 (TRBV7-2, TRBJ1-5)
CASSPQGAGQPQHF

SEQ ID NO: 673285 - protein, 13 aa, Homo sapiens
  CDR3 for alpha chain variable domain of TCR clone 336643 (TRAV8-3, TRAJ48)
CAVVPFGNEKLTF

SEQ ID NO: 673286 - protein, 15 aa, Homo sapiens
  CDR3 for beta chain variable domain of TCR clone 336643 (TRBV11-2, TRBJ2-1)
CASSSPYTRYNEQFF

SEQ ID NO: 673287 - protein, 15 aa, Homo sapiens
  CDR3 for alpha chain variable domain of TCR clone 336644 (TRAV12-2, TRAJ53)
CAVNGGGGSNYKLPF

SEQ ID NO: 673288 - protein, 18 aa, Homo sapiens
  CDR3 for beta chain variable domain of TCR clone 336644 (TRBV25-1, TRBJ1-2)
CASSGLQNGQGLIFGYTF

SEQ ID NO: 673289 - protein, 17 aa, Homo sapiens
  CDR3 for alpha chain variable domain of TCR clone 336645 (TRAV3, TRAJ28)
CAVREAYSGAGSHKLTF

SEQ ID NO: 673290 - protein, 18 aa, Homo sapiens
  CDR3 for beta chain variable domain of TCR clone 336645 (TRBV27, TRBJ2-1)
CASGNRAVGVGSKNEQFF

SEQ ID NO: 673291 - protein, 13 aa, Homo sapiens
  CDR3 for alpha chain variable domain of TCR clone 336646 (TRAV8-3, TRAJ36)
CAVVATGANKLFF

SEQ ID NO: 673292 - protein, 13 aa, Homo sapiens
  CDR3 for beta chain variable domain of TCR clone 336646 (TRBV12-4, TRBJ1-2)
CASSLRQGKGYTF

SEQ ID NO: 673293 - protein, 14 aa, Homo sapiens
  CDR3 for alpha chain variable domain of TCR clone 336647 (TRAV8-3, TRAJ44)
CAVGTTGTASKLTF

SEQ ID NO: 673294 - protein, 15 aa, Homo sapiens
  CDR3 for beta chain variable domain of TCR clone 336647 (TRBV28, TRBJ2-7)
CASSSRGQGRYEQYF

SEQ ID NO: 673295 - protein, 16 aa, Homo sapiens
  CDR3 for alpha chain variable domain of TCR clone 336648 (TRAV13-1, TRAJ15)
CAANGGPVRAGTALIF

SEQ ID NO: 673296 - protein, 13 aa, Homo sapiens
  CDR3 for beta chain variable domain of TCR clone 336648 (TRBV20-1, TRBJ2-3)
CSSTSGSRDTQYF

SEQ ID NO: 673297 - protein, 13 aa, Homo sapiens
  CDR3 for alpha chain variable domain of TCR clone 336649 (TRAV17, TRAJ40)
CATRPSGTYKYIF

SEQ ID NO: 673298 - protein, 16 aa, Homo sapiens
  CDR3 for beta chain variable domain of TCR clone 336649 (TRBV19, TRBJ2-5)
CASSIGTIGSQETQYF

SEQ ID NO: 673299 - protein, 22 aa, Homo sapiens
  CDR3 for alpha chain variable domain of TCR clone 336650 (TRAV8-6, TRAJ21)
HLRKPTVHISDTAEYFWHKFYF

SEQ ID NO: 673300 - protein, 15 aa, Homo sapiens
  CDR3 for beta chain variable domain of TCR clone 336650 (TRBV12-4, TRBJ2-7)
CASSQTGAISYEQYF

SEQ ID NO: 673301 - protein, 14 aa, Homo sapiens
  CDR3 for alpha chain variable domain of TCR clone 336651 (TRAV8-3, TRAJ4)
CAVGASGGYNKLIF

SEQ ID NO: 673302 - protein, 11 aa, Homo sapiens
  CDR3 for beta chain variable domain of TCR clone 336651 (TRBV19, TRBJ1-2)
CASSISSGYTF

SEQ ID NO: 673303 - protein, 18 aa, Homo sapiens
  CDR3 for alpha chain variable domain of TCR clone 336652 (TRAV13-1, TRAJ52)
CAAKNPNAGGTSYGKLIF

SEQ ID NO: 673304 - protein, 13 aa, Homo sapiens
  CDR3 for beta chain variable domain of TCR clone 336652 (TRBV20-1, TRBJ1-1)
CSARGGGNTEAFF

SEQ ID NO: 673305 - protein, 15 aa, Homo sapiens
  CDR3 for alpha chain variable domain of TCR clone 336653 (TRAV8-4, TRAJ40)
CAVSSITSGTYKYLF

SEQ ID NO: 673306 - protein, 13 aa, Homo sapiens
  CDR3 for beta chain variable domain of TCR clone 336653 (TRBV2, TRBJ2-1)
CATSRGTDNEQFF

SEQ ID NO: 673307 - protein, 11 aa, Homo sapiens
  CDR3 for alpha chain variable domain of TCR clone 336654 (TRAV4, TRAJ31)
CLVGDNARLMF

SEQ ID NO: 673308 - protein, 16 aa, Homo sapiens
  CDR3 for beta chain variable domain of TCR clone 336654 (TRBV7-3, TRBJ2-1)
CASSLEGYRSYNEQFF

SEQ ID NO: 673309 - protein, 11 aa, Homo sapiens
  CDR3 for alpha chain variable domain of TCR clone 336655 (TRAV12-2, TRAJ23)
CAVDQGGKLIF

SEQ ID NO: 673310 - protein, 19 aa, Homo sapiens
  CDR3 for beta chain variable domain of TCR clone 336655 (TRBV25-1, TRBJ2-2)
CAILVYRVDRGRKTGELFF

SEQ ID NO: 673311 - protein, 10 aa, Homo sapiens
  CDR3 for alpha chain variable domain of TCR clone 336656 (TRAV12-3, TRAJ49)
CAKNDDQFYF

SEQ ID NO: 673312 - protein, 13 aa, Homo sapiens
  CDR3 for beta chain variable domain of TCR clone 336656 (TRBV12-4, TRBJ1-1)
CASSPGTGFEAFF

SEQ ID NO: 673313 - protein, 14 aa, Homo sapiens
  CDR3 for alpha chain variable domain of TCR clone 336657 (TRAV38-1, TRAJ45)
CAYYSGGGADGLTF

SEQ ID NO: 673314 - protein, 14 aa, Homo sapiens
  CDR3 for beta chain variable domain of TCR clone 336657 (TRBV4-1, TRBJ2-2)
CASSQAVNTGELFF

SEQ ID NO: 673315 - protein, 16 aa, Homo sapiens
  CDR3 for alpha chain variable domain of TCR clone 336658 (TRAV3, TRAJ10)
CAVRDRRAGGGNKLTF

SEQ ID NO: 673316 - protein, 13 aa, Homo sapiens
  CDR3 for beta chain variable domain of TCR clone 336658 (TRBV6-1, TRBJ1-1)
CASSRQGNTEAFF

SEQ ID NO: 673317 - protein, 15 aa, Homo sapiens
  CDR3 for alpha chain variable domain of TCR clone 336659 (TRAV8-6, TRAJ10)
CAVSDQAGGGNKLTF

SEQ ID NO: 673318 - protein, 15 aa, Homo sapiens
  CDR3 for beta chain variable domain of TCR clone 336659 (TRBV11-3, TRBJ2-3)
CASLKDGREGDTQYF

SEQ ID NO: 673319 - protein, 15 aa, Homo sapiens
  CDR3 for alpha chain variable domain of TCR clone 336660 (TRAV25, TRAJ52)
CAGTSGGTSYGKLTF

SEQ ID NO: 673320 - protein, 12 aa, Homo sapiens
  CDR3 for beta chain variable domain of TCR clone 336660 (TRBV11-2, TRBJ2-2)
CATSLGGGELFF

SEQ ID NO: 673321 - protein, 16 aa, Homo sapiens
  CDR3 for alpha chain variable domain of TCR clone 336661 (TRAV30, TRAJ24)
CGTEIVDADSWGRFQF

SEQ ID NO: 673322 - protein, 16 aa, Homo sapiens
  CDR3 for beta chain variable domain of TCR clone 336661 (TRBV28, TRBJ2-7)
CASSLFFETGGPEQYF

SEQ ID NO: 673323 - protein, 20 aa, Homo sapiens
  CDR3 for alpha chain variable domain of TCR clone 336662 (TRAV25, TRAJ21)
TATQTTDVGTYPLSFNKFYF

SEQ ID NO: 673324 - protein, 14 aa, Homo sapiens
  CDR3 for beta chain variable domain of TCR clone 336662 (TRBV5-1, TRBJ2-7)
CASSSGESLYEQYF

SEQ ID NO: 673325 - protein, 14 aa, Homo sapiens
  CDR3 for alpha chain variable domain of TCR clone 336663 (TRAV26-1, TRAJ39)
CIVRCSRAGNMLTF

SEQ ID NO: 673326 - protein, 10 aa, Homo sapiens
  CDR3 for beta chain variable domain of TCR clone 336663 (TRBV25-1, TRBJ1-1)
PTWGNTEAFF

SEQ ID NO: 673327 - protein, 19 aa, Homo sapiens
  CDR3 for alpha chain variable domain of TCR clone 336664 (TRAV1-2, TRAJ26)
CLLPLCCERPDNYGQNFVF

SEQ ID NO: 673328 - protein, 18 aa, Homo sapiens
  CDR3 for beta chain variable domain of TCR clone 336664 (TRBV4-1, TRBJ1-5)
CASSQDPRGQGLNQPQHF

SEQ ID NO: 673329 - protein, 14 aa, Homo sapiens
  CDR3 for alpha chain variable domain of TCR clone 336665 (TRAV1-2, TRAJ16)
CAVNRFSDGQKLLF

SEQ ID NO: 673330 - protein, 16 aa, Homo sapiens
  CDR3 for beta chain variable domain of TCR clone 336665 (TRBV4-1, TRBJ1-1)
CASSQDAGIGNTEAFF

SEQ ID NO: 673331 - protein, 13 aa, Homo sapiens
  CDR3 for alpha chain variable domain of TCR clone 336666 (TRAV27, TRAJ6)
CAGGTRGSYIPTF

SEQ ID NO: 673332 - protein, 13 aa, Homo sapiens
  CDR3 for beta chain variable domain of TCR clone 336666 (TRBV4-1, TRBJ2-2)
CASSQENTGERFF

SEQ ID NO: 673333 - protein, 15 aa, Homo sapiens
  CDR3 for alpha chain variable domain of TCR clone 336667 (TRAV29/DV5, TRAJ57)
CAASLLRSGSEKLVF

SEQ ID NO: 673334 - protein, 15 aa, Homo sapiens
  CDR3 for beta chain variable domain of TCR clone 336667 (TRBV5-1, TRBJ1-3)
CASSLEGGSGNTIYF

SEQ ID NO: 673335 - protein, 14 aa, Homo sapiens
  CDR3 for alpha chain variable domain of TCR clone 336668 (TRAV2, TRAJ9)
CAVEDRSGGFKTIF

SEQ ID NO: 673336 - protein, 14 aa, Homo sapiens
  CDR3 for beta chain variable domain of TCR clone 336668 (TRBV27, TRBJ2-5)
CASSSLKGWETQFF

SEQ ID NO: 673337 - protein, 10 aa, Homo sapiens
  CDR3 for alpha chain variable domain of TCR clone 336669 (TRAV25, TRAJ20)
CAVNDDKLSF

SEQ ID NO: 673338 - protein, 18 aa, Homo sapiens
  CDR3 for beta chain variable domain of TCR clone 336669 (TRBV20-1, TRBJ2-6)
CSAETTPTHGSGANVLTF

SEQ ID NO: 673339 - protein, 14 aa, Homo sapiens
  CDR3 for alpha chain variable domain of TCR clone 336670 (TRAV36/DV7, TRAJ57)
FAVGFPGGSEKLVF

SEQ ID NO: 673340 - protein, 12 aa, Homo sapiens
  CDR3 for beta chain variable domain of TCR clone 336670 (TRBV19, TRBJ2-7)
CASTSGTYEQYF

SEQ ID NO: 673341 - protein, 14 aa, Homo sapiens
  CDR3 for alpha chain variable domain of TCR clone 336671 (TRAV20, TRAJ16)
CAVQENSDGQKLPF

SEQ ID NO: 673342 - protein, 13 aa, Homo sapiens
  CDR3 for beta chain variable domain of TCR clone 336671 (TRBV27, TRBJ2-3)
CASSSLAGDTQYF

SEQ ID NO: 673343 - protein, 17 aa, Homo sapiens
  CDR3 for alpha chain variable domain of TCR clone 336672 (TRAV8-2, )
CVISRTLTLPCTSWETL

SEQ ID NO: 673344 - protein, 13 aa, Homo sapiens
  CDR3 for beta chain variable domain of TCR clone 336672 (TRBV27, TRBJ1-1)
CASSLSIGAEAFF

SEQ ID NO: 673345 - protein, 17 aa, Homo sapiens
  CDR3 for alpha chain variable domain of TCR clone 336673 (TRAV4, TRAJ42)
CLVGVLNYGGSQGNLIF

SEQ ID NO: 673346 - protein, 17 aa, Homo sapiens
  CDR3 for beta chain variable domain of TCR clone 336673 (TRBV7-9, TRBJ2-3)
CASSPTVAGDLTDTQYF

SEQ ID NO: 673347 - protein, 13 aa, Homo sapiens
  CDR3 for alpha chain variable domain of TCR clone 336674 (TRAV8-3, TRAJ40)
CAVGAQYLRNLQI

SEQ ID NO: 673348 - protein, 15 aa, Homo sapiens
  CDR3 for beta chain variable domain of TCR clone 336674 (TRBV11-2, TRBJ2-1)
CASSLGTSGLNEQFF

SEQ ID NO: 673349 - protein, 17 aa, Homo sapiens
  CDR3 for alpha chain variable domain of TCR clone 336675 (TRAV3, TRAJ6)
CAVRDGPRAGGSYIPTF

SEQ ID NO: 673350 - protein, 15 aa, Homo sapiens
  CDR3 for beta chain variable domain of TCR clone 336675 (TRBV13, TRBJ2-1)
CASSLLSGLNNEQFF

SEQ ID NO: 673351 - protein, 18 aa, Homo sapiens
  CDR3 for alpha chain variable domain of TCR clone 336676 (TRAV21, TRAJ52)
CAVRPSPAGGTSYGKLTF

SEQ ID NO: 673352 - protein, 15 aa, Homo sapiens
  CDR3 for beta chain variable domain of TCR clone 336676 (TRBV27, TRBJ2-1)
CASSLARGAYNEQFF

SEQ ID NO: 673353 - protein, 15 aa, Homo sapiens
  CDR3 for alpha chain variable domain of TCR clone 336677 (TRAV8-3, TRAJ27)
CAVGPSKTNAGKSTF

SEQ ID NO: 673354 - protein, 12 aa, Homo sapiens
  CDR3 for beta chain variable domain of TCR clone 336677 (TRBV18, TRBJ2-5)
CASSPSKETQYF

SEQ ID NO: 673355 - protein, 12 aa, Homo sapiens
  CDR3 for alpha chain variable domain of TCR clone 336678 (TRAV21, TRAJ31)
CAVWGNNARLMF

SEQ ID NO: 673356 - protein, 16 aa, Homo sapiens
  CDR3 for beta chain variable domain of TCR clone 336678 (TRBV27, TRBJ2-5)
CAGSYGPGGQKETQYF

SEQ ID NO: 673357 - protein, 11 aa, Homo sapiens
  CDR3 for alpha chain variable domain of TCR clone 336679 (TRAV1-2, TRAJ23)
CAGQGKAYLRT

SEQ ID NO: 673358 - protein, 14 aa, Homo sapiens
  CDR3 for beta chain variable domain of TCR clone 336679 (TRBV6-1, TRBJ1-3)
CASVQGGGGNTIYF

SEQ ID NO: 673359 - protein, 12 aa, Homo sapiens
  CDR3 for alpha chain variable domain of TCR clone 336680 (TRAV13-1, TRAJ21)
CAAKEGFNKFYF

SEQ ID NO: 673360 - protein, 16 aa, Homo sapiens
  CDR3 for beta chain variable domain of TCR clone 336680 (TRBV5-4, TRBJ2-3)
SASQQPGAGGADTQYF

SEQ ID NO: 673361 - protein, 15 aa, Homo sapiens
  CDR3 for alpha chain variable domain of TCR clone 336681 (TRAV12-1, TRAJ8)
CVVNVENTGFQKLVF

SEQ ID NO: 673362 - protein, 16 aa, Homo sapiens
  CDR3 for beta chain variable domain of TCR clone 336681 (TRBV7-2, TRBJ2-7)
CARSLEAGGPWYEQYF

SEQ ID NO: 673363 - protein, 15 aa, Homo sapiens
  CDR3 for alpha chain variable domain of TCR clone 336682 (TRAV8-6, TRAJ8)
CAVSDWNTGFQKLVF

SEQ ID NO: 673364 - protein, 15 aa, Homo sapiens
  CDR3 for beta chain variable domain of TCR clone 336682 (TRBV7-9, TRBJ1-5)
CASSQGHQPNQPQHF

SEQ ID NO: 673365 - protein, 12 aa, Homo sapiens
  CDR3 for alpha chain variable domain of TCR clone 336683 (TRAV1-1, TRAJ9)
CAVDTGGFKTIF

SEQ ID NO: 673366 - protein, 11 aa, Homo sapiens
  CDR3 for beta chain variable domain of TCR clone 336683 (TRBV19, TRBJ1-1)
CASSIGSEAFF

SEQ ID NO: 673367 - protein, 14 aa, Homo sapiens
  CDR3 for alpha chain variable domain of TCR clone 336684 (TRAV17, TRAJ57)
CATDPQGGAEKLVV

SEQ ID NO: 673368 - protein, 13 aa, Homo sapiens
  CDR3 for beta chain variable domain of TCR clone 336684 (TRBV28, TRBJ2-7)
CASTPGLAGEQYF

SEQ ID NO: 673369 - protein, 13 aa, Homo sapiens
  CDR3 for alpha chain variable domain of TCR clone 336685 (TRAV17, TRAJ21)
CATDGGNFNKFYF

SEQ ID NO: 673370 - protein, 13 aa, Homo sapiens
  CDR3 for beta chain variable domain of TCR clone 336685 (TRBV11-3, TRBJ1-1)
CASTGSLNPEAFF

SEQ ID NO: 673371 - protein, 16 aa, Homo sapiens
  CDR3 for alpha chain variable domain of TCR clone 336686 (TRAV12-3, TRAJ53)
CAMSPGSGGSNYKLTF

SEQ ID NO: 673372 - protein, 12 aa, Homo sapiens
  CDR3 for beta chain variable domain of TCR clone 336686 (TRBV12-4, TRBJ2-1)
CASSLVRVEQFF

SEQ ID NO: 673373 - protein, 14 aa, Homo sapiens
  CDR3 for alpha chain variable domain of TCR clone 336687 (TRAV16, TRAJ33)
CALSAMDSNYQLIW

SEQ ID NO: 673374 - protein, 14 aa, Homo sapiens
  CDR3 for beta chain variable domain of TCR clone 336687 (TRBV4-2, TRBJ2-1)
CASGLDRAYNKQFF

SEQ ID NO: 673375 - protein, 13 aa, Homo sapiens
  CDR3 for alpha chain variable domain of TCR clone 336688 (TRAV13-1, TRAJ8)
CAASIRGFQKLVF

SEQ ID NO: 673376 - protein, 14 aa, Homo sapiens
  CDR3 for beta chain variable domain of TCR clone 336688 (TRBV7-2, TRBJ2-1)
CASSLGQGRNEQFF

SEQ ID NO: 673377 - protein, 14 aa, Homo sapiens
  CDR3 for alpha chain variable domain of TCR clone 336689 (TRAV29/DV5, TRAJ36)
CAARRNTGANNLCF

SEQ ID NO: 673378 - protein, 12 aa, Homo sapiens
  CDR3 for beta chain variable domain of TCR clone 336689 (TRBV12-5, TRBJ2-5)
CASGQGVETQYF

SEQ ID NO: 673379 - protein, 13 aa, Homo sapiens
  CDR3 for alpha chain variable domain of TCR clone 336690 (TRAV3, TRAJ33)
CALRDRSNYQLIW

SEQ ID NO: 673380 - protein, 16 aa, Homo sapiens
  CDR3 for beta chain variable domain of TCR clone 336690 (TRBV4-2, TRBJ2-7)
CASSQDRGTSSYEQYF

SEQ ID NO: 673381 - protein, 16 aa, Homo sapiens
  CDR3 for alpha chain variable domain of TCR clone 336691 (TRAV29/DV5, TRAJ54)
CAARAPLIQGAQKLVF

SEQ ID NO: 673382 - protein, 14 aa, Homo sapiens
  CDR3 for beta chain variable domain of TCR clone 336691 (TRBV19, TRBJ2-1)
CASPTFVLSGEQFF

SEQ ID NO: 673383 - protein, 21 aa, Homo sapiens
  CDR3 for alpha chain variable domain of TCR clone 336692 (TRAV3, TRAJ37)
CAVRGKGSGNTGTNLWARDNF

SEQ ID NO: 673384 - protein, 13 aa, Homo sapiens
  CDR3 for beta chain variable domain of TCR clone 336692 (TRBV7-2, TRBJ2-2)
CASSSVRAGELFF

SEQ ID NO: 673385 - protein, 14 aa, Homo sapiens
  CDR3 for alpha chain variable domain of TCR clone 336693 (TRAV12-3, TRAJ10)
SHLPLTGGGNKLTF

SEQ ID NO: 673386 - protein, 14 aa, Homo sapiens
  CDR3 for beta chain variable domain of TCR clone 336693 (TRBV5-5, TRBJ1-5)
CASSGQGVDQPQHF

SEQ ID NO: 673387 - protein, 12 aa, Homo sapiens
  CDR3 for alpha chain variable domain of TCR clone 336694 (TRAV2, TRAJ10)
CASTGVGNKLTF

SEQ ID NO: 673388 - protein, 13 aa, Homo sapiens
  CDR3 for beta chain variable domain of TCR clone 336694 (TRBV7-2, TRBJ2-2)
CQQRTGAAGELFF

SEQ ID NO: 673389 - protein, 17 aa, Homo sapiens
  CDR3 for alpha chain variable domain of TCR clone 336695 (TRAV3, TRAJ42)
CAVRDRDYGGSQGNRIF

SEQ ID NO: 673390 - protein, 20 aa, Homo sapiens
  CDR3 for beta chain variable domain of TCR clone 336695 (TRBV28, TRBJ2-1)
CASTPIGRSPGLAGGNEQFF

SEQ ID NO: 673391 - protein, 15 aa, Homo sapiens
  CDR3 for alpha chain variable domain of TCR clone 336696 (TRAV26-1, TRAJ48)
CIVRVGDFGNEKLTF

SEQ ID NO: 673392 - protein, 16 aa, Homo sapiens
  CDR3 for beta chain variable domain of TCR clone 336696 (TRBV4-1, TRBJ2-3)
CASSQRAGGLTDTLYF

SEQ ID NO: 673393 - protein, 13 aa, Homo sapiens
  CDR3 for alpha chain variable domain of TCR clone 336697 (TRAV13-2, TRAJ13)
CAERPGGYQKVTF

SEQ ID NO: 673394 - protein, 14 aa, Homo sapiens
  CDR3 for beta chain variable domain of TCR clone 336697 (TRBV4-2, TRBJ2-1)
CASGLDRAYNEQFF

SEQ ID NO: 673395 - protein, 14 aa, Homo sapiens
  CDR3 for alpha chain variable domain of TCR clone 336698 (TRAV1-2, TRAJ16)
CAVNRFSGGQKLLF

SEQ ID NO: 673396 - protein, 15 aa, Homo sapiens
  CDR3 for beta chain variable domain of TCR clone 336698 (TRBV5-1, TRBJ2-7)
CASSLNPAGSYEQYF

SEQ ID NO: 673397 - protein, 13 aa, Homo sapiens
  CDR3 for alpha chain variable domain of TCR clone 336699 (TRAV26-2, TRAJ43)
CILRSVNNNDMRF

SEQ ID NO: 673398 - protein, 13 aa, Homo sapiens
  CDR3 for beta chain variable domain of TCR clone 336699 (TRBV14, TRBJ2-1)
CASSQDRRNEQFF

SEQ ID NO: 673399 - protein, 14 aa, Homo sapiens
  CDR3 for alpha chain variable domain of TCR clone 336700 (TRAV35, TRAJ50)
CAGHRKTSYDKVIF

SEQ ID NO: 673400 - protein, 14 aa, Homo sapiens
  CDR3 for beta chain variable domain of TCR clone 336700 (TRBV27, TRBJ2-2)
CASRPGVNTGELFF

SEQ ID NO: 673401 - protein, 13 aa, Homo sapiens
  CDR3 for alpha chain variable domain of TCR clone 336701 (TRAV27, TRAJ27)
CAGKDTNAGKSTF

SEQ ID NO: 673402 - protein, 16 aa, Homo sapiens
  CDR3 for beta chain variable domain of TCR clone 336701 (TRBV15, TRBJ1-2)
CATSRGPRTGGGGYTF

SEQ ID NO: 673403 - protein, 16 aa, Homo sapiens
  CDR3 for alpha chain variable domain of TCR clone 336702 (TRAV16, TRAJ4)
CARRRMFSGGYNKLIF

SEQ ID NO: 673404 - protein, 16 aa, Homo sapiens
  CDR3 for beta chain variable domain of TCR clone 336702 (TRBV24-1, TRBJ2-3)
CATSDPGTGATDTQYF

SEQ ID NO: 673405 - protein, 15 aa, Homo sapiens
  CDR3 for alpha chain variable domain of TCR clone 336703 (TRAV8-6, TRAJ26)
CAVSDQSPGGQNFVF

SEQ ID NO: 673406 - protein, 13 aa, Homo sapiens
  CDR3 for beta chain variable domain of TCR clone 336703 (TRBV27, TRBJ2-7)
CASSLRHRYEQCF

SEQ ID NO: 673407 - protein, 10 aa, Homo sapiens
  CDR3 for alpha chain variable domain of TCR clone 336704 (TRAV3, TRAJ3)
CAVVQQCFQD

SEQ ID NO: 673408 - protein, 14 aa, Homo sapiens
  CDR3 for beta chain variable domain of TCR clone 336704 (TRBV19, TRBJ2-1)
CASPTFVLSGEQFF

SEQ ID NO: 673409 - protein, 14 aa, Homo sapiens
  CDR3 for alpha chain variable domain of TCR clone 336705 (TRAV26-1, TRAJ38)
CIADNAGNNRKLIL

SEQ ID NO: 673410 - protein, 14 aa, Homo sapiens
  CDR3 for beta chain variable domain of TCR clone 336705 (TRBV7-3, TRBJ1-1)
CASSLKGGNTEAFF

SEQ ID NO: 673411 - protein, 14 aa, Homo sapiens
  CDR3 for alpha chain variable domain of TCR clone 336706 (TRAV38-1, TRAJ29)
CAFITPSGNTPLFF

SEQ ID NO: 673412 - protein, 13 aa, Homo sapiens
  CDR3 for beta chain variable domain of TCR clone 336706 (TRBV27, TRBJ2-7)
CASSLTTGYEQYF

SEQ ID NO: 673413 - protein, 10 aa, Homo sapiens
  CDR3 for alpha chain variable domain of TCR clone 336707 (TRAV25, TRAJ34)
CAENTDKLIF

SEQ ID NO: 673414 - protein, 19 aa, Homo sapiens
  CDR3 for beta chain variable domain of TCR clone 336707 (TRBV25-1, TRBJ2-2)
CAILVYRVDRGRKTGELFF

SEQ ID NO: 673415 - protein, 16 aa, Homo sapiens
  CDR3 for alpha chain variable domain of TCR clone 336708 (TRAV3, TRAJ23)
CAVKIGIYNQGGKLIF

SEQ ID NO: 673416 - protein, 14 aa, Homo sapiens
  CDR3 for beta chain variable domain of TCR clone 336708 (TRBV12-5, TRBJ2-5)
CASGSRTHQETQYF

SEQ ID NO: 673417 - protein, 14 aa, Homo sapiens
  CDR3 for alpha chain variable domain of TCR clone 336709 (TRAV2, TRAJ9)
CAMDPNTGGFKTIF

SEQ ID NO: 673418 - protein, 13 aa, Homo sapiens
  CDR3 for beta chain variable domain of TCR clone 336709 (TRBV20-1, TRBJ2-1)
CSASTGTSNEQFF

SEQ ID NO: 673419 - protein, 11 aa, Homo sapiens
  CDR3 for alpha chain variable domain of TCR clone 336710 (TRAV3, TRAJ17)
PRGAEGNKLTF

SEQ ID NO: 673420 - protein, 16 aa, Homo sapiens
  CDR3 for beta chain variable domain of TCR clone 336710 (TRBV7-6, TRBJ2-1)
CASSSPGPSSYNEQFF

SEQ ID NO: 673421 - protein, 16 aa, Homo sapiens
  CDR3 for alpha chain variable domain of TCR clone 336711 (TRAV8-6, TRAJ28)
CAVTSKPGAGSYQLTF

SEQ ID NO: 673422 - protein, 16 aa, Homo sapiens
  CDR3 for beta chain variable domain of TCR clone 336711 (TRBV12-4, TRBJ2-5)
CASSWRPSGDLETQNF

SEQ ID NO: 673423 - protein, 16 aa, Homo sapiens
  CDR3 for alpha chain variable domain of TCR clone 336712 (TRAV1-1, TRAJ45)
CAVRAYSGGGADVLTF

SEQ ID NO: 673424 - protein, 13 aa, Homo sapiens
  CDR3 for beta chain variable domain of TCR clone 336712 (TRBV20-1, TRBJ1-2)
CSARGTADYGYTF

SEQ ID NO: 673425 - protein, 12 aa, Homo sapiens
  CDR3 for alpha chain variable domain of TCR clone 336713 (TRAV20, TRAJ39)
CAVGNAGNMLTF

SEQ ID NO: 673426 - protein, 16 aa, Homo sapiens
  CDR3 for beta chain variable domain of TCR clone 336713 (TRBV15, TRBJ1-2)
CATSRGPRTGGGRYTF

SEQ ID NO: 673427 - protein, 13 aa, Homo sapiens
  CDR3 for alpha chain variable domain of TCR clone 336714 (TRAV26-1, TRAJ30)
CIGRVESNDKIIF

SEQ ID NO: 673428 - protein, 17 aa, Homo sapiens
  CDR3 for beta chain variable domain of TCR clone 336714 (TRBV13, TRBJ2-3)
CASSLSRVAGGRNTQYF

SEQ ID NO: 673429 - protein, 12 aa, Homo sapiens
  CDR3 for alpha chain variable domain of TCR clone 336715 (TRAV23/DV6, TRAJ31)
CAARRNGARLMF

SEQ ID NO: 673430 - protein, 13 aa, Homo sapiens
  CDR3 for beta chain variable domain of TCR clone 336715 (TRBV28, TRBJ2-7)
CASKAGGVYEQYF

SEQ ID NO: 673431 - protein, 12 aa, Homo sapiens
  CDR3 for alpha chain variable domain of TCR clone 336716 (TRAV12-3, TRAJ17)
CARTLTGDKLTF

SEQ ID NO: 673432 - protein, 15 aa, Homo sapiens
  CDR3 for beta chain variable domain of TCR clone 336716 (TRBV20-1, TRBJ2-7)
CSARDRVAGMDEQYF

SEQ ID NO: 673433 - protein, 15 aa, Homo sapiens
  CDR3 for alpha chain variable domain of TCR clone 336717 (TRAV12-1, TRAJ44)
CVVFVNTGTASKLTF

SEQ ID NO: 673434 - protein, 16 aa, Homo sapiens
  CDR3 for beta chain variable domain of TCR clone 336717 (TRBV20-1, TRBJ2-5)
CSPGGTSGGYMETQFF

SEQ ID NO: 673435 - protein, 12 aa, Homo sapiens
  CDR3 for alpha chain variable domain of TCR clone 336718 (TRAV12-3, TRAJ17)
CAMTLTANKLTF

SEQ ID NO: 673436 - protein, 15 aa, Homo sapiens
  CDR3 for beta chain variable domain of TCR clone 336718 (TRBV20-1, TRBJ2-7)
CSARDWVSGMDEQYF

SEQ ID NO: 673437 - protein, 11 aa, Homo sapiens
  CDR3 for alpha chain variable domain of TCR clone 336719 (TRAV1-2, TRAJ31)
CAVNNNARLMF

SEQ ID NO: 673438 - protein, 13 aa, Homo sapiens
  CDR3 for beta chain variable domain of TCR clone 336719 (TRBV11-2, TRBJ2-7)
CASSTSRSLEQYF

SEQ ID NO: 673439 - protein, 12 aa, Homo sapiens
  CDR3 for alpha chain variable domain of TCR clone 336720 (TRAV12-3, TRAJ42)
CAPGESQGNLIF

SEQ ID NO: 673440 - protein, 13 aa, Homo sapiens
  CDR3 for beta chain variable domain of TCR clone 336720 (TRBV5-7, TRBJ2-6)
CASTSSGANVLTF

SEQ ID NO: 673441 - protein, 12 aa, Homo sapiens
  CDR3 for alpha chain variable domain of TCR clone 336721 (TRAV21, TRAJ37)
CCELCNTGKLIF

SEQ ID NO: 673442 - protein, 13 aa, Homo sapiens
  CDR3 for beta chain variable domain of TCR clone 336721 (TRBV7-6, TRBJ2-3)
CASSLRSDNTQYF

SEQ ID NO: 673443 - protein, 12 aa, Homo sapiens
  CDR3 for alpha chain variable domain of TCR clone 336722 (TRAV20, TRAJ39)
CAVGNAGNMLTF

SEQ ID NO: 673444 - protein, 11 aa, Homo sapiens
  CDR3 for beta chain variable domain of TCR clone 336722 (TRBV29-1, TRBJ2-5)
CSEDRTGTQYF

SEQ ID NO: 673445 - protein, 10 aa, Homo sapiens
  CDR3 for alpha chain variable domain of TCR clone 336723 (TRAV13-1, TRAJ52)
CAAKTPMLVV

SEQ ID NO: 673446 - protein, 14 aa, Homo sapiens
  CDR3 for beta chain variable domain of TCR clone 336723 (TRBV7-3, TRBJ2-1)
CASSLAGGTNEQFF

SEQ ID NO: 673447 - protein, 15 aa, Homo sapiens
  CDR3 for alpha chain variable domain of TCR clone 336724 (TRAV12-1, TRAJ44)
CVADLPTGTARKLTF

SEQ ID NO: 673448 - protein, 13 aa, Homo sapiens
  CDR3 for beta chain variable domain of TCR clone 336724 (TRBV6-5, TRBJ2-5)
CSSSPQGGETQYF

SEQ ID NO: 673449 - protein, 13 aa, Homo sapiens
  CDR3 for alpha chain variable domain of TCR clone 336725 (TRAV25, TRAJ12)
CAGGMDSSYKLSF

SEQ ID NO: 673450 - protein, 12 aa, Homo sapiens
  CDR3 for beta chain variable domain of TCR clone 336725 (TRBV28, TRBJ2-6)
CAIQAGANVLTF

SEQ ID NO: 673451 - protein, 13 aa, Homo sapiens
  CDR3 for alpha chain variable domain of TCR clone 336726 (TRAV4, TRAJ42)
CLVGGGSQGNLIF

SEQ ID NO: 673452 - protein, 12 aa, Homo sapiens
  CDR3 for beta chain variable domain of TCR clone 336726 (TRBV7-8, TRBJ2-7)
CASSLGDREQYF

SEQ ID NO: 673453 - protein, 13 aa, Homo sapiens
  CDR3 for alpha chain variable domain of TCR clone 336727 (TRAV26-2, TRAJ43)
CILRAVSNNYMRF

SEQ ID NO: 673454 - protein, 15 aa, Homo sapiens
  CDR3 for beta chain variable domain of TCR clone 336727 (TRBV7-2, TRBJ2-1)
CASTHGTGIYNEQFF

SEQ ID NO: 673455 - protein, 14 aa, Homo sapiens
  CDR3 for alpha chain variable domain of TCR clone 336728 (TRAV26-1, TRAJ5)
CIVRVRFNRRALIF

SEQ ID NO: 673456 - protein, 17 aa, Homo sapiens
  CDR3 for beta chain variable domain of TCR clone 336728 (TRBV29-1, TRBJ2-3)
CSVEVLAGETSTDTQYF

SEQ ID NO: 673457 - protein, 14 aa, Homo sapiens
  CDR3 for alpha chain variable domain of TCR clone 336729 (TRAV23/DV6, TRAJ27)
CAASRDTNAGKSTF

SEQ ID NO: 673458 - protein, 13 aa, Homo sapiens
  CDR3 for beta chain variable domain of TCR clone 336729 (TRBV20-1, TRBJ1-5)
CSASGRGNQAQHF

SEQ ID NO: 673459 - protein, 13 aa, Homo sapiens
  CDR3 for alpha chain variable domain of TCR clone 336730 (TRAV36/DV7, TRAJ29)
CAVEPSGNTPLVF

SEQ ID NO: 673460 - protein, 18 aa, Homo sapiens
  CDR3 for beta chain variable domain of TCR clone 336730 (TRBV20-1, TRBJ2-3)
CSASGLAGGPVTTDTQYF

SEQ ID NO: 673461 - protein, 13 aa, Homo sapiens
  CDR3 for alpha chain variable domain of TCR clone 336731 (TRAV26-1, TRAJ33)
CIVRVEGNYQLIW

SEQ ID NO: 673462 - protein, 16 aa, Homo sapiens
  CDR3 for beta chain variable domain of TCR clone 336731 (TRBV15, TRBJ2-7)
CATSRDLGRRRGEQYF

SEQ ID NO: 673463 - protein, 14 aa, Homo sapiens
  CDR3 for alpha chain variable domain of TCR clone 336732 (TRAV9-2, TRAJ39)
CALYIYNAGNMLTF

SEQ ID NO: 673464 - protein, 15 aa, Homo sapiens
  CDR3 for beta chain variable domain of TCR clone 336732 (TRBV28, TRBJ1-3)
CASSMGWASGNTIYF

SEQ ID NO: 673465 - protein, 14 aa, Homo sapiens
  CDR3 for alpha chain variable domain of TCR clone 336733 (TRAV29/DV5, TRAJ36)
CAARRKTGANNLFF

SEQ ID NO: 673466 - protein, 13 aa, Homo sapiens
  CDR3 for beta chain variable domain of TCR clone 336733 (TRBV12-4, TRBJ1-1)
CASSPGIGFEAFF

SEQ ID NO: 673467 - protein, 13 aa, Homo sapiens
  CDR3 for alpha chain variable domain of TCR clone 336734 (TRAV8-3, TRAJ28)
CAVGAVGSYQLPF

SEQ ID NO: 673468 - protein, 13 aa, Homo sapiens
  CDR3 for beta chain variable domain of TCR clone 336734 (TRBV7-7, TRBJ2-3)
CASSLSRADTQYF

SEQ ID NO: 673469 - protein, 11 aa, Homo sapiens
  CDR3 for alpha chain variable domain of TCR clone 336735 (TRAV2, TRAJ13)
RASGGYQKVTF

SEQ ID NO: 673470 - protein, 16 aa, Homo sapiens
  CDR3 for beta chain variable domain of TCR clone 336735 (TRBV6-1, TRBJ2-5)
CASSDTLDRGAETQYF

SEQ ID NO: 673471 - protein, 10 aa, Homo sapiens
  CDR3 for alpha chain variable domain of TCR clone 336736 (TRAV30, TRAJ48)
CGIGNEKFTF

SEQ ID NO: 673472 - protein, 14 aa, Homo sapiens
  CDR3 for beta chain variable domain of TCR clone 336736 (TRBV7-6, TRBJ2-3)
CASSVAGGTDTQYF

SEQ ID NO: 673473 - protein, 18 aa, Homo sapiens
  CDR3 for alpha chain variable domain of TCR clone 336737 (TRAV20, TRAJ4)
CAVQPYYMFSGGYNKLIF

SEQ ID NO: 673474 - protein, 13 aa, Homo sapiens
  CDR3 for beta chain variable domain of TCR clone 336737 (TRBV7-7, TRBJ1-1)
CASSLGANTEAFF

SEQ ID NO: 673475 - protein, 17 aa, Homo sapiens
  CDR3 for alpha chain variable domain of TCR clone 336738 (TRAV3, TRAJ42)
CAVRDRDYGGSQGNLIF

SEQ ID NO: 673476 - protein, 15 aa, Homo sapiens
  CDR3 for beta chain variable domain of TCR clone 336738 (TRBV7-9, TRBJ1-5)
CASSQGHKPNQPQHF

SEQ ID NO: 673477 - protein, 13 aa, Homo sapiens
  CDR3 for alpha chain variable domain of TCR clone 336739 (TRAV3, TRAJ27)
CAVRPLGAGKSTF

SEQ ID NO: 673478 - protein, 17 aa, Homo sapiens
  CDR3 for beta chain variable domain of TCR clone 336739 (TRBV19, TRBJ2-2)
CASSRNPGGFGTGELFF

SEQ ID NO: 673479 - protein, 16 aa, Homo sapiens
  CDR3 for alpha chain variable domain of TCR clone 336740 (TRAV3, TRAJ21)
CAVRDIERGNFNKFYF

SEQ ID NO: 673480 - protein, 16 aa, Homo sapiens
  CDR3 for beta chain variable domain of TCR clone 336740 (TRBV27, TRBJ2-2)
CASSSSGVSNTGELFF

SEQ ID NO: 673481 - protein, 15 aa, Homo sapiens
  CDR3 for alpha chain variable domain of TCR clone 336741 (TRAV17, TRAJ22)
CATVAPSGSATQLTF

SEQ ID NO: 673482 - protein, 15 aa, Homo sapiens
  CDR3 for beta chain variable domain of TCR clone 336741 (TRBV27, TRBJ1-6)
CASSFDRGLGSPLHF

SEQ ID NO: 673483 - protein, 14 aa, Homo sapiens
  CDR3 for alpha chain variable domain of TCR clone 336742 (TRAV26-1, TRAJ38)
CIADNAGNNRKLIW

SEQ ID NO: 673484 - protein, 13 aa, Homo sapiens
  CDR3 for beta chain variable domain of TCR clone 336742 (TRBV20-1, TRBJ2-1)
CSARSSPRDEQFF

SEQ ID NO: 673485 - protein, 14 aa, Homo sapiens
  CDR3 for alpha chain variable domain of TCR clone 336743 (TRAV21, TRAJ37)
CPRPGPGNTGKLIF

SEQ ID NO: 673486 - protein, 16 aa, Homo sapiens
  CDR3 for beta chain variable domain of TCR clone 336743 (TRBV6-6, TRBJ2-3)
CASSYSHAGSTDTQYC

SEQ ID NO: 673487 - protein, 14 aa, Homo sapiens
  CDR3 for alpha chain variable domain of TCR clone 336744 (TRAV12-3, TRAJ6)
CAMSATGGSYIPTF

SEQ ID NO: 673488 - protein, 16 aa, Homo sapiens
  CDR3 for beta chain variable domain of TCR clone 336744 (TRBV4-2, TRBJ2-1)
CASSPRAGQGANEQYF

SEQ ID NO: 673489 - protein, 16 aa, Homo sapiens
  CDR3 for alpha chain variable domain of TCR clone 336745 (TRAV8-1, TRAJ42)
CAVTSRYGGSQGNLIF

SEQ ID NO: 673490 - protein, 12 aa, Homo sapiens
  CDR3 for beta chain variable domain of TCR clone 336745 (TRBV6-3, TRBJ2-7)
CASSLGRRGLYF

SEQ ID NO: 673491 - protein, 14 aa, Homo sapiens
  CDR3 for alpha chain variable domain of TCR clone 336746 (TRAV12-2, TRAJ17)
CAVLFQDAGNKLTF

SEQ ID NO: 673492 - protein, 17 aa, Homo sapiens
  CDR3 for beta chain variable domain of TCR clone 336746 (TRBV20-1, TRBJ2-2)
CSASGSGQGGLTGELFF

SEQ ID NO: 673493 - protein, 15 aa, Homo sapiens
  CDR3 for alpha chain variable domain of TCR clone 336747 (TRAV17, TRAJ35)
CATAFVIGFGNVLHC

SEQ ID NO: 673494 - protein, 16 aa, Homo sapiens
  CDR3 for beta chain variable domain of TCR clone 336747 (TRBV18, TRBJ2-7)
CASSPRSQGISYEQYF

SEQ ID NO: 673495 - protein, 11 aa, Homo sapiens
  CDR3 for alpha chain variable domain of TCR clone 336748 (TRAV3, TRAJ21)
CAVGNFNKFYF

SEQ ID NO: 673496 - protein, 16 aa, Homo sapiens
  CDR3 for beta chain variable domain of TCR clone 336748 (TRBV19, TRBJ2-1)
CASSKAGPSSYHEQLF

SEQ ID NO: 673497 - protein, 16 aa, Homo sapiens
  CDR3 for alpha chain variable domain of TCR clone 336749 (TRAV17, TRAJ9)
CATGEWGGTGGFKTIF

SEQ ID NO: 673498 - protein, 12 aa, Homo sapiens
  CDR3 for beta chain variable domain of TCR clone 336749 (TRBV5-7, TRBJ1-1)
CASSLGRGKAFF

SEQ ID NO: 673499 - protein, 14 aa, Homo sapiens
  CDR3 for alpha chain variable domain of TCR clone 336750 (TRAV12-1, TRAJ3)
CGAARYSSASKIIF

SEQ ID NO: 673500 - protein, 16 aa, Homo sapiens
  CDR3 for beta chain variable domain of TCR clone 336750 (TRBV4-3, TRBJ2-2)
CASSNLQGSGTGELFF

SEQ ID NO: 673501 - protein, 13 aa, Homo sapiens
  CDR3 for alpha chain variable domain of TCR clone 336751 (TRAV21, TRAJ20)
CAVGVFADYKPSF

SEQ ID NO: 673502 - protein, 14 aa, Homo sapiens
  CDR3 for beta chain variable domain of TCR clone 336751 (TRBV4-2, TRBJ1-4)
CASSPSSGNEKLFF

SEQ ID NO: 673503 - protein, 15 aa, Homo sapiens
  CDR3 for alpha chain variable domain of TCR clone 336752 (TRAV12-1, TRAJ44)
CVVFVNTGTASKLTF

SEQ ID NO: 673504 - protein, 14 aa, Homo sapiens
  CDR3 for beta chain variable domain of TCR clone 336752 (TRBV5-5, TRBJ1-5)
CASSGQGVDQPQHF

SEQ ID NO: 673505 - protein, 18 aa, Homo sapiens
  CDR3 for alpha chain variable domain of TCR clone 336753 (TRAV21, TRAJ52)
CAVRPSPAGGTSYGKLTF

SEQ ID NO: 673506 - protein, 16 aa, Homo sapiens
  CDR3 for beta chain variable domain of TCR clone 336753 (TRBV13, TRBJ2-3)
CASSQSTSGAEDTQYF

SEQ ID NO: 673507 - protein, 17 aa, Homo sapiens
  CDR3 for alpha chain variable domain of TCR clone 336754 (TRAV12-2, TRAJ39)
CAVNNMLTFGGGTRLMV

SEQ ID NO: 673508 - protein, 16 aa, Homo sapiens
  CDR3 for beta chain variable domain of TCR clone 336754 (TRBV5-3, TRBJ2-2)
CVRSFGTGTNTGELFF

SEQ ID NO: 673509 - protein, 14 aa, Homo sapiens
  CDR3 for alpha chain variable domain of TCR clone 336755 (TRAV12-1, TRAJ3)
CGAARYSSASKIIF

SEQ ID NO: 673510 - protein, 14 aa, Homo sapiens
  CDR3 for beta chain variable domain of TCR clone 336755 (TRBV7-2, TRBJ2-6)
CQQQRRLGANVLTF

SEQ ID NO: 673511 - protein, 17 aa, Homo sapiens
  CDR3 for alpha chain variable domain of TCR clone 336756 (TRAV26-1, TRAJ11)
CIVRVSQSNSGYSTLTF

SEQ ID NO: 673512 - protein, 15 aa, Homo sapiens
  CDR3 for beta chain variable domain of TCR clone 336756 (TRBV27, TRBJ2-5)
CASSLIPSGGETQYF

SEQ ID NO: 673513 - protein, 14 aa, Homo sapiens
  CDR3 for alpha chain variable domain of TCR clone 336757 (TRAV1-2, TRAJ16)
SAVNRFSDGQKLLF

SEQ ID NO: 673514 - protein, 14 aa, Homo sapiens
  CDR3 for beta chain variable domain of TCR clone 336757 (TRBV7-2, TRBJ2-2)
CASRGQGAAGELFF

SEQ ID NO: 673515 - protein, 15 aa, Homo sapiens
  CDR3 for alpha chain variable domain of TCR clone 336758 (TRAV21, TRAJ24)
CAALSSTDSWGKLQF

SEQ ID NO: 673516 - protein, 11 aa, Homo sapiens
  CDR3 for beta chain variable domain of TCR clone 336758 (TRBV11-2, TRBJ2-2)
CASSLPGELFF

SEQ ID NO: 673517 - protein, 13 aa, Homo sapiens
  CDR3 for alpha chain variable domain of TCR clone 336759 (TRAV12-1, TRAJ26)
CVGRRNYGQNFVF

SEQ ID NO: 673518 - protein, 14 aa, Homo sapiens
  CDR3 for beta chain variable domain of TCR clone 336759 (TRBV6-3, TRBJ1-1)
CASRYTGESTEAFF

SEQ ID NO: 673519 - protein, 19 aa, Homo sapiens
  CDR3 for alpha chain variable domain of TCR clone 336760 (TRAV35, TRAJ22)
CAGQLATVDASGSARQLTF

SEQ ID NO: 673520 - protein, 13 aa, Homo sapiens
  CDR3 for beta chain variable domain of TCR clone 336760 (TRBV4-1, TRBJ1-1)
CASSRKMNTEAFF

SEQ ID NO: 673521 - protein, 14 aa, Homo sapiens
  CDR3 for alpha chain variable domain of TCR clone 336761 (TRAV12-1, TRAJ42)
CVVIYGGSQGNLTF

SEQ ID NO: 673522 - protein, 17 aa, Homo sapiens
  CDR3 for beta chain variable domain of TCR clone 336761 (TRBV3-1, TRBJ2-6)
CASSPNTGPAGANVLTF

SEQ ID NO: 673523 - protein, 15 aa, Homo sapiens
  CDR3 for alpha chain variable domain of TCR clone 336762 (TRAV25, TRAJ53)
CAATGGGGSNYKLTF

SEQ ID NO: 673524 - protein, 11 aa, Homo sapiens
  CDR3 for beta chain variable domain of TCR clone 336762 (TRBV11-3, TRBJ2-2)
CASSSGGELFF

SEQ ID NO: 673525 - protein, 11 aa, Homo sapiens
  CDR3 for alpha chain variable domain of TCR clone 336763 (TRAV22, TRAJ29)
CGGSGNTPLVF

SEQ ID NO: 673526 - protein, 13 aa, Homo sapiens
  CDR3 for beta chain variable domain of TCR clone 336763 (TRBV4-2, TRBJ1-1)
CASSQAGNTEAFF

SEQ ID NO: 673527 - protein, 17 aa, Homo sapiens
  CDR3 for alpha chain variable domain of TCR clone 336764 (TRAV3, TRAJ12)
CAVRDGGRMDSSYKLIY

SEQ ID NO: 673528 - protein, 13 aa, Homo sapiens
  CDR3 for beta chain variable domain of TCR clone 336764 (TRBV20-1, TRBJ1-1)
CSAPLGGGTEAFF

SEQ ID NO: 673529 - protein, 18 aa, Homo sapiens
  CDR3 for alpha chain variable domain of TCR clone 336765 (TRAV26-1, TRAJ37)
CIVRVDMHGSSNTGKLIF

SEQ ID NO: 673530 - protein, 15 aa, Homo sapiens
  CDR3 for beta chain variable domain of TCR clone 336765 (TRBV20-1, TRBJ2-7)
CSARVLASPLYKQYF

SEQ ID NO: 673531 - protein, 13 aa, Homo sapiens
  CDR3 for alpha chain variable domain of TCR clone 336766 (TRAV12-3, TRAJ10)
HLPLTGGGNKLTF

SEQ ID NO: 673532 - protein, 15 aa, Homo sapiens
  CDR3 for beta chain variable domain of TCR clone 336766 (TRBV7-9, TRBJ1-6)
CASSSPGRGNSPLHF

SEQ ID NO: 673533 - protein, 12 aa, Homo sapiens
  CDR3 for alpha chain variable domain of TCR clone 336767 (TRAV21, TRAJ13)
PGPSGGYQKVTF

SEQ ID NO: 673534 - protein, 14 aa, Homo sapiens
  CDR3 for beta chain variable domain of TCR clone 336767 (TRBV20-1, TRBJ2-7)
CSAKGRKGAYEQYF

SEQ ID NO: 673535 - protein, 15 aa, Homo sapiens
  CDR3 for alpha chain variable domain of TCR clone 336768 (TRAV13-1, TRAJ18)
CAASGGGPTLGRLYF

SEQ ID NO: 673536 - protein, 13 aa, Homo sapiens
  CDR3 for beta chain variable domain of TCR clone 336768 (TRBV18, TRBJ2-1)
CASGLASNNEQFF

SEQ ID NO: 673537 - protein, 15 aa, Homo sapiens
  CDR3 for alpha chain variable domain of TCR clone 336769 (TRAV3, TRAJ22)
CAVRDRGGFARKLTF

SEQ ID NO: 673538 - protein, 14 aa, Homo sapiens
  CDR3 for beta chain variable domain of TCR clone 336769 (TRBV19, TRBJ2-1)
CASPTFVLSGEQFF

SEQ ID NO: 673539 - protein, 12 aa, Homo sapiens
  CDR3 for alpha chain variable domain of TCR clone 336770 (TRAV20, TRAJ20)
CAVRFNDYKISF

SEQ ID NO: 673540 - protein, 14 aa, Homo sapiens
  CDR3 for beta chain variable domain of TCR clone 336770 (TRBV20-1, TRBJ2-1)
CSAQIGGSANEQFF

SEQ ID NO: 673541 - protein, 15 aa, Homo sapiens
  CDR3 for alpha chain variable domain of TCR clone 336771 (TRAV3, TRAJ22)
CAVRDRGGSASQLTF

SEQ ID NO: 673542 - protein, 17 aa, Homo sapiens
  CDR3 for beta chain variable domain of TCR clone 336771 (TRBV28, TRBJ2-5)
CASSTPEGDALQETQYF

SEQ ID NO: 673543 - protein, 14 aa, Homo sapiens
  CDR3 for alpha chain variable domain of TCR clone 336772 (TRAV2, TRAJ9)
CAVEDRSGGFKTIF

SEQ ID NO: 673544 - protein, 11 aa, Homo sapiens
  CDR3 for beta chain variable domain of TCR clone 336772 (TRBV7-9, TRBJ2-5)
CASSVGETQYF

SEQ ID NO: 673545 - protein, 13 aa, Homo sapiens
  CDR3 for alpha chain variable domain of TCR clone 336773 (TRAV23/DV6, TRAJ44)
CRINTGTASKLTF

SEQ ID NO: 673546 - protein, 14 aa, Homo sapiens
  CDR3 for beta chain variable domain of TCR clone 336773 (TRBV2, TRBJ2-1)
CASSEALDGNEQFF

SEQ ID NO: 673547 - protein, 13 aa, Homo sapiens
  CDR3 for alpha chain variable domain of TCR clone 336774 (TRAV6, TRAJ16)
CALDDSDGQKLLF

SEQ ID NO: 673548 - protein, 16 aa, Homo sapiens
  CDR3 for beta chain variable domain of TCR clone 336774 (TRBV12-4, TRBJ1-6)
CASNLQGKVSPLHLGT

SEQ ID NO: 673549 - protein, 15 aa, Homo sapiens
  CDR3 for alpha chain variable domain of TCR clone 336775 (TRAV13-2, TRAJ50)
CAEEPLKNSYDKVIF

SEQ ID NO: 673550 - protein, 15 aa, Homo sapiens
  CDR3 for beta chain variable domain of TCR clone 336775 (TRBV20-1, TRBJ1-5)
CSARGSVDSNQPQHF

SEQ ID NO: 673551 - protein, 14 aa, Homo sapiens
  CDR3 for alpha chain variable domain of TCR clone 336776 (TRAV26-1, TRAJ34)
CIVRVAYNTDKLIF

SEQ ID NO: 673552 - protein, 15 aa, Homo sapiens
  CDR3 for beta chain variable domain of TCR clone 336776 (TRBV7-9, TRBJ1-4)
CASSRTRGFNEKLFF

SEQ ID NO: 673553 - protein, 11 aa, Homo sapiens
  CDR3 for alpha chain variable domain of TCR clone 336777 (TRAV29/DV5, TRAJ49)
CAAVPVNQFYF

SEQ ID NO: 673554 - protein, 17 aa, Homo sapiens
  CDR3 for beta chain variable domain of TCR clone 336777 (TRBV4-2, TRBJ1-1)
CASTQFGGGSGNTEAFF

SEQ ID NO: 673555 - protein, 15 aa, Homo sapiens
  CDR3 for alpha chain variable domain of TCR clone 336778 (TRAV21, TRAJ56)
CAVTKYTGANSKLTF

SEQ ID NO: 673556 - protein, 14 aa, Homo sapiens
  CDR3 for beta chain variable domain of TCR clone 336778 (TRBV20-1, TRBJ2-3)
CSARVRGSTDTQNF

SEQ ID NO: 673557 - protein, 13 aa, Homo sapiens
  CDR3 for alpha chain variable domain of TCR clone 336779 (TRAV13-1, TRAJ29)
CAATISGNTPLVF

SEQ ID NO: 673558 - protein, 14 aa, Homo sapiens
  CDR3 for beta chain variable domain of TCR clone 336779 (TRBV7-8, TRBJ2-3)
CASSFKSSTDTQYF

SEQ ID NO: 673559 - protein, 14 aa, Homo sapiens
  CDR3 for alpha chain variable domain of TCR clone 336780 (TRAV1-2, TRAJ29)
CAVRELTSATPLVF

SEQ ID NO: 673560 - protein, 15 aa, Homo sapiens
  CDR3 for beta chain variable domain of TCR clone 336780 (TRBV7-3, TRBJ1-1)
CASSPRADRNTEAFF

SEQ ID NO: 673561 - protein, 12 aa, Homo sapiens
  CDR3 for alpha chain variable domain of TCR clone 336781 (TRAV30, TRAJ20)
CGTESNDNKLSF

SEQ ID NO: 673562 - protein, 15 aa, Homo sapiens
  CDR3 for beta chain variable domain of TCR clone 336781 (TRBV20-1, TRBJ2-7)
CSARDRVSGMDEQYF

SEQ ID NO: 673563 - protein, 10 aa, Homo sapiens
  CDR3 for alpha chain variable domain of TCR clone 336782 (TRAV12-1, TRAJ20)
CVVNPRKLSF

SEQ ID NO: 673564 - protein, 14 aa, Homo sapiens
  CDR3 for beta chain variable domain of TCR clone 336782 (TRBV2, TRBJ1-5)
CASSENRGGQPQHF

SEQ ID NO: 673565 - protein, 14 aa, Homo sapiens
  CDR3 for alpha chain variable domain of TCR clone 336783 (TRAV8-3, TRAJ17)
CAVGAQTAGNKLTF

SEQ ID NO: 673566 - protein, 14 aa, Homo sapiens
  CDR3 for beta chain variable domain of TCR clone 336783 (TRBV4-1, TRBJ2-2)
CASSQAVNTGELFF

SEQ ID NO: 673567 - protein, 17 aa, Homo sapiens
  CDR3 for alpha chain variable domain of TCR clone 336784 (TRAV3, TRAJ12)
CAVRDGGSMDSSYKLIF

SEQ ID NO: 673568 - protein, 16 aa, Homo sapiens
  CDR3 for beta chain variable domain of TCR clone 336784 (TRBV9, TRBJ2-2)
CASSAMGKGNTGELFF

SEQ ID NO: 673569 - protein, 13 aa, Homo sapiens
  CDR3 for alpha chain variable domain of TCR clone 336785 (TRAV12-3, TRAJ13)
CAMGSGGYQKVTF

SEQ ID NO: 673570 - protein, 13 aa, Homo sapiens
  CDR3 for beta chain variable domain of TCR clone 336785 (TRBV20-1, TRBJ1-1)
CSAPPGGHTEAFF

SEQ ID NO: 673571 - protein, 12 aa, Homo sapiens
  CDR3 for alpha chain variable domain of TCR clone 336786 (TRAV8-3, TRAJ26)
CAGDNYGQNFVF

SEQ ID NO: 673572 - protein, 12 aa, Homo sapiens
  CDR3 for beta chain variable domain of TCR clone 336786 (TRBV20-1, TRBJ1-1)
QCSTWGCTEAFF

SEQ ID NO: 673573 - protein, 14 aa, Homo sapiens
  CDR3 for alpha chain variable domain of TCR clone 336787 (TRAV8-3, TRAJ35)
CAVVPQGFGNVLHC

SEQ ID NO: 673574 - protein, 15 aa, Homo sapiens
  CDR3 for beta chain variable domain of TCR clone 336787 (TRBV7-2, TRBJ2-1)
CASSLVAGGHNEQFF

SEQ ID NO: 673575 - protein, 12 aa, Homo sapiens
  CDR3 for alpha chain variable domain of TCR clone 336788 (TRAV1-2, TRAJ26)
CAVRYYGQNFVF

SEQ ID NO: 673576 - protein, 17 aa, Homo sapiens
  CDR3 for beta chain variable domain of TCR clone 336788 (TRBV13, TRBJ2-3)
CASSLSRVAGGRNTQYF

SEQ ID NO: 673577 - protein, 14 aa, Homo sapiens
  CDR3 for alpha chain variable domain of TCR clone 336789 (TRAV9-2, TRAJ39)
CALYIYNAGNMLTF

SEQ ID NO: 673578 - protein, 13 aa, Homo sapiens
  CDR3 for beta chain variable domain of TCR clone 336789 (TRBV24-1, TRBJ2-1)
CATSAGPYNEQFF

SEQ ID NO: 673579 - protein, 16 aa, Homo sapiens
  CDR3 for alpha chain variable domain of TCR clone 336790 (TRAV1-2, TRAJ10)
CAVGGLLTGGGNKLTF

SEQ ID NO: 673580 - protein, 12 aa, Homo sapiens
  CDR3 for beta chain variable domain of TCR clone 336790 (TRBV7-8, TRBJ2-7)
CASSLGDREQYF

SEQ ID NO: 673581 - protein, 15 aa, Homo sapiens
  CDR3 for alpha chain variable domain of TCR clone 336791 (TRAV19, TRAJ23)
CALSEGRNQGGKLIF

SEQ ID NO: 673582 - protein, 16 aa, Homo sapiens
  CDR3 for beta chain variable domain of TCR clone 336791 (TRBV7-2, TRBJ2-7)
CASSLDVSGGAYEQYF

SEQ ID NO: 673583 - protein, 15 aa, Homo sapiens
  CDR3 for alpha chain variable domain of TCR clone 336792 (TRAV3, TRAJ22)
CAVRDRGGFARQLTF

SEQ ID NO: 673584 - protein, 16 aa, Homo sapiens
  CDR3 for beta chain variable domain of TCR clone 336792 (TRBV5-4, TRBJ2-3)
CASQQPGAGGSDTQYF

SEQ ID NO: 673585 - protein, 16 aa, Homo sapiens
  CDR3 for alpha chain variable domain of TCR clone 336793 (TRAV8-3, TRAJ48)
CAVGLISNFGNEKLTF

SEQ ID NO: 673586 - protein, 13 aa, Homo sapiens
  CDR3 for beta chain variable domain of TCR clone 336793 (TRBV20-1, TRBJ1-5)
CSASWGRSQTQHF

SEQ ID NO: 673587 - protein, 13 aa, Homo sapiens
  CDR3 for alpha chain variable domain of TCR clone 336794 (TRAV21, TRAJ49)
CAVRQSTGNQFYF

SEQ ID NO: 673588 - protein, 15 aa, Homo sapiens
  CDR3 for beta chain variable domain of TCR clone 336794 (TRBV11-2, TRBJ1-2)
CASSLEGVQRNGYTF

SEQ ID NO: 673589 - protein, 16 aa, Homo sapiens
  CDR3 for alpha chain variable domain of TCR clone 336795 (TRAV3, TRAJ10)
CAVRDMRAGGGNKLTF

SEQ ID NO: 673590 - protein, 15 aa, Homo sapiens
  CDR3 for beta chain variable domain of TCR clone 336795 (TRBV9, TRBJ1-6)
CASSVAGTGDSPLNF

SEQ ID NO: 673591 - protein, 12 aa, Homo sapiens
  CDR3 for alpha chain variable domain of TCR clone 336796 (TRAV1-2, TRAJ33)
CAALDSNSQLIW

SEQ ID NO: 673592 - protein, 17 aa, Homo sapiens
  CDR3 for beta chain variable domain of TCR clone 336796 (TRBV25-1, TRBJ1-2)
CASSEFGSATTNYGYTF

SEQ ID NO: 673593 - protein, 11 aa, Homo sapiens
  CDR3 for alpha chain variable domain of TCR clone 336797 (TRAV27, TRAJ52)
CAGPSYGKLTF

SEQ ID NO: 673594 - protein, 16 aa, Homo sapiens
  CDR3 for beta chain variable domain of TCR clone 336797 (TRBV7-3, TRBJ2-2)
CASSLKRGTLSGELFF

SEQ ID NO: 673595 - protein, 13 aa, Homo sapiens
  CDR3 for alpha chain variable domain of TCR clone 336798 (TRAV38-2/DV8, TRAJ57)
CAYTQGGSEKLVF

SEQ ID NO: 673596 - protein, 13 aa, Homo sapiens
  CDR3 for beta chain variable domain of TCR clone 336798 (TRBV7-2, TRBJ2-5)
CASSQTSVETQYF

SEQ ID NO: 673597 - protein, 14 aa, Homo sapiens
  CDR3 for alpha chain variable domain of TCR clone 336799 (TRAV12-2, TRAJ13)
CAGKKTGGYQKVTF

SEQ ID NO: 673598 - protein, 15 aa, Homo sapiens
  CDR3 for beta chain variable domain of TCR clone 336799 (TRBV20-1, TRBJ2-7)
CSARDRVSGMDEQYF

SEQ ID NO: 673599 - protein, 13 aa, Homo sapiens
  CDR3 for alpha chain variable domain of TCR clone 336800 (TRAV27, TRAJ41)
CAGEGNSGYALNF

SEQ ID NO: 673600 - protein, 13 aa, Homo sapiens
  CDR3 for beta chain variable domain of TCR clone 336800 (TRBV7-2, TRBJ1-4)
CASSLAGLEKLFF

SEQ ID NO: 673601 - protein, 14 aa, Homo sapiens
  CDR3 for alpha chain variable domain of TCR clone 336801 (TRAV1-2, TRAJ8)
CAVREDTGFQKLVF

SEQ ID NO: 673602 - protein, 13 aa, Homo sapiens
  CDR3 for beta chain variable domain of TCR clone 336801 (TRBV25-1, TRBJ2-5)
CASSPPARGEEYF

SEQ ID NO: 673603 - protein, 13 aa, Homo sapiens
  CDR3 for alpha chain variable domain of TCR clone 336802 (TRAV8-3, TRAJ43)
CAVVPYNNNDMRF

SEQ ID NO: 673604 - protein, 14 aa, Homo sapiens
  CDR3 for beta chain variable domain of TCR clone 336802 (TRBV2, TRBJ2-3)
CASSEGQNTDTQYF

SEQ ID NO: 673605 - protein, 17 aa, Homo sapiens
  CDR3 for alpha chain variable domain of TCR clone 336803 (TRAV2, TRAJ22)
ILQVREGDAAEQRQLTF

SEQ ID NO: 673606 - protein, 16 aa, Homo sapiens
  CDR3 for beta chain variable domain of TCR clone 336803 (TRBV2, TRBJ2-5)
CASSETQGVGEETQYF

SEQ ID NO: 673607 - protein, 13 aa, Homo sapiens
  CDR3 for alpha chain variable domain of TCR clone 336804 (TRAV12-1, TRAJ33)
CGDAPDSNYQLIW

SEQ ID NO: 673608 - protein, 15 aa, Homo sapiens
  CDR3 for beta chain variable domain of TCR clone 336804 (TRBV12-4, TRBJ2-1)
CASSNGGGSSNEQFF

SEQ ID NO: 673609 - protein, 14 aa, Homo sapiens
  CDR3 for alpha chain variable domain of TCR clone 336805 (TRAV9-2, TRAJ39)
CALYIYNAGNMLTF

SEQ ID NO: 673610 - protein, 16 aa, Homo sapiens
  CDR3 for beta chain variable domain of TCR clone 336805 (TRBV5-1, TRBJ2-2)
CASSFGDRPNTGELFF

SEQ ID NO: 673611 - protein, 13 aa, Homo sapiens
  CDR3 for alpha chain variable domain of TCR clone 336806 (TRAV2, TRAJ20)
CAVEDPSEYKLSF

SEQ ID NO: 673612 - protein, 15 aa, Homo sapiens
  CDR3 for beta chain variable domain of TCR clone 336806 (TRBV19, TRBJ1-6)
CASSTQGAVGSPLHF

SEQ ID NO: 673613 - protein, 12 aa, Homo sapiens
  CDR3 for alpha chain variable domain of TCR clone 336807 (TRAV13-1, TRAJ49)
CAASPMGNQFYF

SEQ ID NO: 673614 - protein, 12 aa, Homo sapiens
  CDR3 for beta chain variable domain of TCR clone 336807 (TRBV7-9, TRBJ2-7)
CASSIKREEQYF

SEQ ID NO: 673615 - protein, 16 aa, Homo sapiens
  CDR3 for alpha chain variable domain of TCR clone 336808 (TRAV12-3, TRAJ53)
CAMSPGSGGSNYKLTF

SEQ ID NO: 673616 - protein, 16 aa, Homo sapiens
  CDR3 for beta chain variable domain of TCR clone 336808 (TRBV7-9, TRBJ1-2)
CASSLGFSSGDDGYTF

SEQ ID NO: 673617 - protein, 15 aa, Homo sapiens
  CDR3 for alpha chain variable domain of TCR clone 336809 (TRAV2, TRAJ11)
CAVVDPNSGYSTLTF

SEQ ID NO: 673618 - protein, 15 aa, Homo sapiens
  CDR3 for beta chain variable domain of TCR clone 336809 (TRBV20-1, TRBJ2-7)
CSARDRVSGMDEQYF

SEQ ID NO: 673619 - protein, 10 aa, Homo sapiens
  CDR3 for alpha chain variable domain of TCR clone 336810 (TRAV26-1, TRAJ22)
CIVSLNFFWF

SEQ ID NO: 673620 - protein, 15 aa, Homo sapiens
  CDR3 for beta chain variable domain of TCR clone 336810 (TRBV4-2, TRBJ1-2)
YASSQRTGGRDGYTF

SEQ ID NO: 673621 - protein, 10 aa, Homo sapiens
  CDR3 for alpha chain variable domain of TCR clone 336811 (TRAV1-2, TRAJ31)
CAFFRCQTHI

SEQ ID NO: 673622 - protein, 13 aa, Homo sapiens
  CDR3 for beta chain variable domain of TCR clone 336811 (TRBV7-9, TRBJ1-2)
CASSLKQNYGYTF

SEQ ID NO: 673623 - protein, 12 aa, Homo sapiens
  CDR3 for alpha chain variable domain of TCR clone 336812 (TRAV26-1, TRAJ39)
CAVGNAGNMLTF

SEQ ID NO: 673624 - protein, 16 aa, Homo sapiens
  CDR3 for beta chain variable domain of TCR clone 336812 (TRBV15, TRBJ1-2)
CATSRGPRTGGGGYTF

SEQ ID NO: 673625 - protein, 22 aa, Homo sapiens
  CDR3 for alpha chain variable domain of TCR clone 336813 (TRAV13-1, TRAJ35)
CAASKGGFGNVLHCGSCTQVIF

SEQ ID NO: 673626 - protein, 13 aa, Homo sapiens
  CDR3 for beta chain variable domain of TCR clone 336813 (TRBV7-3, TRBJ1-1)
CASSQDWGAEAFF

SEQ ID NO: 673627 - protein, 15 aa, Homo sapiens
  CDR3 for alpha chain variable domain of TCR clone 336814 (TRAV26-1, TRAJ56)
CIVREHTGANSKLTF

SEQ ID NO: 673628 - protein, 15 aa, Homo sapiens
  CDR3 for beta chain variable domain of TCR clone 336814 (TRBV5-1, TRBJ2-7)
CASSLNPAGSYEQYF

SEQ ID NO: 673629 - protein, 14 aa, Homo sapiens
  CDR3 for alpha chain variable domain of TCR clone 336815 (TRAV1-2, TRAJ16)
CAVNRFSDGPKLLF

SEQ ID NO: 673630 - protein, 15 aa, Homo sapiens
  CDR3 for beta chain variable domain of TCR clone 336815 (TRBV7-2, TRBJ2-2)
CASSSLTGGTGELFF

SEQ ID NO: 673631 - protein, 11 aa, Homo sapiens
  CDR3 for alpha chain variable domain of TCR clone 336816 (TRAV12-2, TRAJ23)
CARGRGGKLIF

SEQ ID NO: 673632 - protein, 14 aa, Homo sapiens
  CDR3 for beta chain variable domain of TCR clone 336816 (TRBV28, TRBJ2-5)
CASSRGDRAETQYF

SEQ ID NO: 673633 - protein, 16 aa, Homo sapiens
  CDR3 for alpha chain variable domain of TCR clone 336817 (TRAV30, TRAJ24)
CGTEIVDADSWGKFLF

SEQ ID NO: 673634 - protein, 14 aa, Homo sapiens
  CDR3 for beta chain variable domain of TCR clone 336817 (TRBV7-8, TRBJ2-3)
CASSLEAGTDTQYF

SEQ ID NO: 673635 - protein, 15 aa, Homo sapiens
  CDR3 for alpha chain variable domain of TCR clone 336818 (TRAV3, TRAJ5)
CAVRDLDTGRRALTF

SEQ ID NO: 673636 - protein, 13 aa, Homo sapiens
  CDR3 for beta chain variable domain of TCR clone 336818 (TRBV3-1, TRBJ1-1)
CASSPGVITEAFF

SEQ ID NO: 673637 - protein, 11 aa, Homo sapiens
  CDR3 for alpha chain variable domain of TCR clone 336819 (TRAV1-1, TRAJ16)
CAAGDCQKLLF

SEQ ID NO: 673638 - protein, 15 aa, Homo sapiens
  CDR3 for beta chain variable domain of TCR clone 336819 (TRBV28, TRBJ1-2)
CASIPQGSDEYGYTF

SEQ ID NO: 673639 - protein, 13 aa, Homo sapiens
  CDR3 for alpha chain variable domain of TCR clone 336820 (TRAV13-1, TRAJ37)
CAARSCNTGQLIF

SEQ ID NO: 673640 - protein, 14 aa, Homo sapiens
  CDR3 for beta chain variable domain of TCR clone 336820 (TRBV12-4, TRBJ2-3)
CASSLGQGTDTQYF

SEQ ID NO: 673641 - protein, 13 aa, Homo sapiens
  CDR3 for alpha chain variable domain of TCR clone 336821 (TRAV12-3, TRAJ13)
CAMSSGGYQEVTF

SEQ ID NO: 673642 - protein, 13 aa, Homo sapiens
  CDR3 for beta chain variable domain of TCR clone 336821 (TRBV20-1, TRBJ1-1)
CSAPPGGHTEDFF

SEQ ID NO: 673643 - protein, 15 aa, Homo sapiens
  CDR3 for alpha chain variable domain of TCR clone 336822 (TRAV17, TRAJ54)
CATTRSEQGAQELVF

SEQ ID NO: 673644 - protein, 16 aa, Homo sapiens
  CDR3 for beta chain variable domain of TCR clone 336822 (TRBV12-4, TRBJ2-3)
CASSLRLAETTDTQYF

SEQ ID NO: 673645 - protein, 13 aa, Homo sapiens
  CDR3 for alpha chain variable domain of TCR clone 336823 (TRAV2, TRAJ15)
CAVASQAGTALIF

SEQ ID NO: 673646 - protein, 16 aa, Homo sapiens
  CDR3 for beta chain variable domain of TCR clone 336823 (TRBV18, TRBJ1-5)
CASSPYRVEGNQPQHF

SEQ ID NO: 673647 - protein, 14 aa, Homo sapiens
  CDR3 for alpha chain variable domain of TCR clone 336824 (TRAV1-2, TRAJ8)
CAVREDTGFQKLVF

SEQ ID NO: 673648 - protein, 16 aa, Homo sapiens
  CDR3 for beta chain variable domain of TCR clone 336824 (TRBV7-6, TRBJ2-1)
CASSSVVAGTYNERFF

SEQ ID NO: 673649 - protein, 15 aa, Homo sapiens
  CDR3 for alpha chain variable domain of TCR clone 336825 (TRAV26-1, TRAJ29)
CIVRVEGSGNTPLVV

SEQ ID NO: 673650 - protein, 14 aa, Homo sapiens
  CDR3 for beta chain variable domain of TCR clone 336825 (TRBV25-1, TRBJ1-1)
CASTHLGGNTEAFF

SEQ ID NO: 673651 - protein, 14 aa, Homo sapiens
  CDR3 for alpha chain variable domain of TCR clone 336826 (TRAV13-1, TRAJ35)
CAASKGGFGNVLHC

SEQ ID NO: 673652 - protein, 15 aa, Homo sapiens
  CDR3 for beta chain variable domain of TCR clone 336826 (TRBV7-8, TRBJ2-7)
CASSLRHFEAYEQYF

SEQ ID NO: 673653 - protein, 12 aa, Homo sapiens
  CDR3 for alpha chain variable domain of TCR clone 336827 (TRAV23/DV6, TRAJ27)
CAASKSAGKSTF

SEQ ID NO: 673654 - protein, 17 aa, Homo sapiens
  CDR3 for beta chain variable domain of TCR clone 336827 (TRBV24-1, TRBJ1-2)
CATSDPRQGVLSGGYTF

SEQ ID NO: 673655 - protein, 15 aa, Homo sapiens
  CDR3 for alpha chain variable domain of TCR clone 336828 (TRAV27, TRAJ38)
CAARRNAGNNRKLIW

SEQ ID NO: 673656 - protein, 13 aa, Homo sapiens
  CDR3 for beta chain variable domain of TCR clone 336828 (TRBV5-7, TRBJ1-2)
CASSLIRAPGYTF

SEQ ID NO: 673657 - protein, 15 aa, Homo sapiens
  CDR3 for alpha chain variable domain of TCR clone 336829 (TRAV8-3, TRAJ11)
CAVGLLNSGYSTLTF

SEQ ID NO: 673658 - protein, 16 aa, Homo sapiens
  CDR3 for beta chain variable domain of TCR clone 336829 (TRBV7-9, TRBJ1-2)
CASSLSFSSGEDGYTF

SEQ ID NO: 673659 - protein, 13 aa, Homo sapiens
  CDR3 for alpha chain variable domain of TCR clone 336830 (TRAV6, TRAJ20)
CALAVSNDYKLSF

SEQ ID NO: 673660 - protein, 16 aa, Homo sapiens
  CDR3 for beta chain variable domain of TCR clone 336830 (TRBV7-9, TRBJ2-1)
CASSDVAGGSYNEQFS

SEQ ID NO: 673661 - protein, 13 aa, Homo sapiens
  CDR3 for alpha chain variable domain of TCR clone 336831 (TRAV20, TRAJ34)
CAVSSYNTDKLIF

SEQ ID NO: 673662 - protein, 14 aa, Homo sapiens
  CDR3 for beta chain variable domain of TCR clone 336831 (TRBV25-1, TRBJ1-1)
CASTHLGGNTEAFF

SEQ ID NO: 673663 - protein, 17 aa, Homo sapiens
  CDR3 for alpha chain variable domain of TCR clone 336832 (TRAV3, TRAJ6)
CAVRDGPRAGGSYIPTF

SEQ ID NO: 673664 - protein, 11 aa, Homo sapiens
  CDR3 for beta chain variable domain of TCR clone 336832 (TRBV10-3, TRBJ2-1)
CAISDRGLQFF

SEQ ID NO: 673665 - protein, 14 aa, Homo sapiens
  CDR3 for alpha chain variable domain of TCR clone 336833 (TRAV3, TRAJ28)
CAVRRGAVSYQLTF

SEQ ID NO: 673666 - protein, 16 aa, Homo sapiens
  CDR3 for beta chain variable domain of TCR clone 336833 (TRBV4-1, TRBJ2-7)
CASSQEWTSGPLEQYF

SEQ ID NO: 673667 - protein, 17 aa, Homo sapiens
  CDR3 for alpha chain variable domain of TCR clone 336834 (TRAV26-1, TRAJ22)
CIVRVPSHSGSARQLTF

SEQ ID NO: 673668 - protein, 16 aa, Homo sapiens
  CDR3 for beta chain variable domain of TCR clone 336834 (TRBV28, TRBJ2-1)
CASRRSGRVVGNEEFF

SEQ ID NO: 673669 - protein, 15 aa, Homo sapiens
  CDR3 for alpha chain variable domain of TCR clone 336835 (TRAV12-1, TRAJ9)
CVVSFGDTGGFKPIF

SEQ ID NO: 673670 - protein, 19 aa, Homo sapiens
  CDR3 for beta chain variable domain of TCR clone 336835 (TRBV25-1, TRBJ2-2)
CAILVCRVDRGRKTGELFF

SEQ ID NO: 673671 - protein, 14 aa, Homo sapiens
  CDR3 for alpha chain variable domain of TCR clone 336836 (TRAV12-3, TRAJ13)
CAMRNPGGYQKVTF

SEQ ID NO: 673672 - protein, 14 aa, Homo sapiens
  CDR3 for beta chain variable domain of TCR clone 336836 (TRBV4-1, TRBJ1-6)
CASSPGSDSSPLHF

SEQ ID NO: 673673 - protein, 13 aa, Homo sapiens
  CDR3 for alpha chain variable domain of TCR clone 336837 (TRAV35, TRAJ42)
CAGFPGSQGNPIF

SEQ ID NO: 673674 - protein, 13 aa, Homo sapiens
  CDR3 for beta chain variable domain of TCR clone 336837 (TRBV29-1, TRBJ2-1)
CSVEGGRVNEQFL

SEQ ID NO: 673675 - protein, 17 aa, Homo sapiens
  CDR3 for alpha chain variable domain of TCR clone 336838 (TRAV3, TRAJ6)
CAVRDGPRAGGSYVPTF

SEQ ID NO: 673676 - protein, 14 aa, Homo sapiens
  CDR3 for beta chain variable domain of TCR clone 336838 (TRBV7-2, TRBJ2-7)
CASSPKTSFYEQYF

SEQ ID NO: 673677 - protein, 13 aa, Homo sapiens
  CDR3 for alpha chain variable domain of TCR clone 336839 (TRAV21, TRAJ31)
CAPFRNNNARLMF

SEQ ID NO: 673678 - protein, 12 aa, Homo sapiens
  CDR3 for beta chain variable domain of TCR clone 336839 (TRBV5-1, TRBJ1-1)
CASSVGNTEAFF

SEQ ID NO: 673679 - protein, 15 aa, Homo sapiens
  CDR3 for alpha chain variable domain of TCR clone 336840 (TRAV26-1, TRAJ22)
CIVRVSLWFCKATDL

SEQ ID NO: 673680 - protein, 12 aa, Homo sapiens
  CDR3 for beta chain variable domain of TCR clone 336840 (TRBV11-2, TRBJ2-2)
CASSHGGGELFF

SEQ ID NO: 673681 - protein, 15 aa, Homo sapiens
  CDR3 for alpha chain variable domain of TCR clone 336841 (TRAV13-1, TRAJ57)
QVPPLSQGGSEKLVF

SEQ ID NO: 673682 - protein, 17 aa, Homo sapiens
  CDR3 for beta chain variable domain of TCR clone 336841 (TRBV7-3, TRBJ2-3)
CDSSLMKRMRGADTQYF

SEQ ID NO: 673683 - protein, 12 aa, Homo sapiens
  CDR3 for alpha chain variable domain of TCR clone 336842 (TRAV12-3, TRAJ17)
CAMTLTGNKLTF

SEQ ID NO: 673684 - protein, 16 aa, Homo sapiens
  CDR3 for beta chain variable domain of TCR clone 336842 (TRBV29-1, TRBJ1-2)
CSVEANRDIANYGYTF

SEQ ID NO: 673685 - protein, 13 aa, Homo sapiens
  CDR3 for alpha chain variable domain of TCR clone 336843 (TRAV35, TRAJ44)
CAGLFGTASKLTF

SEQ ID NO: 673686 - protein, 17 aa, Homo sapiens
  CDR3 for beta chain variable domain of TCR clone 336843 (TRBV7-8, TRBJ1-2)
CASSLRPLQGHLYGYTF

SEQ ID NO: 673687 - protein, 13 aa, Homo sapiens
  CDR3 for alpha chain variable domain of TCR clone 336844 (TRAV12-1, TRAJ16)
CVVNGPDGQKLLF

SEQ ID NO: 673688 - protein, 15 aa, Homo sapiens
  CDR3 for beta chain variable domain of TCR clone 336844 (TRBV7-2, TRBJ1-2)
CASSPRAGWNYGYTF

SEQ ID NO: 673689 - protein, 14 aa, Homo sapiens
  CDR3 for alpha chain variable domain of TCR clone 336845 (TRAV13-2, TRAJ16)
CAENNWEDGQKLLF

SEQ ID NO: 673690 - protein, 17 aa, Homo sapiens
  CDR3 for beta chain variable domain of TCR clone 336845 (TRBV20-1, TRBJ1-6)
FSARGGYTFSYNSPLHF

SEQ ID NO: 673691 - protein, 16 aa, Homo sapiens
  CDR3 for alpha chain variable domain of TCR clone 336846 (TRAV8-3, TRAJ13)
CAVGAYPSGGYQKVTF

SEQ ID NO: 673692 - protein, 14 aa, Homo sapiens
  CDR3 for beta chain variable domain of TCR clone 336846 (TRBV6-1, TRBJ1-3)
CASVQGGGGNTIYF

SEQ ID NO: 673693 - protein, 14 aa, Homo sapiens
  CDR3 for alpha chain variable domain of TCR clone 336847 (TRAV26-2, TRAJ31)
CILIPGNNNARLMF

SEQ ID NO: 673694 - protein, 17 aa, Homo sapiens
  CDR3 for beta chain variable domain of TCR clone 336847 (TRBV11-2, TRBJ2-1)
CASSLYPPGVEYNEQFF

SEQ ID NO: 673695 - protein, 16 aa, Homo sapiens
  CDR3 for alpha chain variable domain of TCR clone 336848 (TRAV3, TRAJ37)
CAVRGRGSGNTGKLIF

SEQ ID NO: 673696 - protein, 15 aa, Homo sapiens
  CDR3 for beta chain variable domain of TCR clone 336848 (TRBV28, TRBJ2-5)
CASSQTSGSLETQYF

SEQ ID NO: 673697 - protein, 14 aa, Homo sapiens
  CDR3 for alpha chain variable domain of TCR clone 336849 (TRAV23/DV6, TRAJ22)
CAASVSGSARQQTF

SEQ ID NO: 673698 - protein, 16 aa, Homo sapiens
  CDR3 for beta chain variable domain of TCR clone 336849 (TRBV19, TRBJ2-2)
CASSFPGQGLAGELFF

SEQ ID NO: 673699 - protein, 13 aa, Homo sapiens
  CDR3 for alpha chain variable domain of TCR clone 336850 (TRAV35, TRAJ50)
CCHRKTSYDKVIF

SEQ ID NO: 673700 - protein, 15 aa, Homo sapiens
  CDR3 for beta chain variable domain of TCR clone 336850 (TRBV6-3, TRBJ2-7)
CASSSPGTVFYEQYF

SEQ ID NO: 673701 - protein, 12 aa, Homo sapiens
  CDR3 for alpha chain variable domain of TCR clone 336851 (TRAV2, TRAJ31)
CAVEDNNARLMF

SEQ ID NO: 673702 - protein, 16 aa, Homo sapiens
  CDR3 for beta chain variable domain of TCR clone 336851 (TRBV10-3, TRBJ2-1)
CAISGVGDGGGREQFF

SEQ ID NO: 673703 - protein, 14 aa, Homo sapiens
  CDR3 for alpha chain variable domain of TCR clone 336852 (TRAV14/DV4, TRAJ49)
CAFNRYLTGNQFYF

SEQ ID NO: 673704 - protein, 14 aa, Homo sapiens
  CDR3 for beta chain variable domain of TCR clone 336852 (TRBV7-3, TRBJ1-1)
CASSLKGGNTEAFF

SEQ ID NO: 673705 - protein, 16 aa, Homo sapiens
  CDR3 for alpha chain variable domain of TCR clone 336853 (TRAV14/DV4, TRAJ54)
CAMREGRIQVAQKLVF

SEQ ID NO: 673706 - protein, 16 aa, Homo sapiens
  CDR3 for beta chain variable domain of TCR clone 336853 (TRBV10-3, TRBJ2-7)
CAISADFADRPYEQYF

SEQ ID NO: 673707 - protein, 11 aa, Homo sapiens
  CDR3 for alpha chain variable domain of TCR clone 336854 (TRAV3, TRAJ21)
CAVGNFNKFYF

SEQ ID NO: 673708 - protein, 15 aa, Homo sapiens
  CDR3 for beta chain variable domain of TCR clone 336854 (TRBV29-1, TRBJ2-1)
CSVEGDQPPTMSSSS

SEQ ID NO: 673709 - protein, 15 aa, Homo sapiens
  CDR3 for alpha chain variable domain of TCR clone 336855 (TRAV38-2/DV8, TRAJ48)
CAYRSGGFGNEKLTF

SEQ ID NO: 673710 - protein, 16 aa, Homo sapiens
  CDR3 for beta chain variable domain of TCR clone 336855 (TRBV28, TRBJ2-7)
CASSPWVATGDLTQYF

SEQ ID NO: 673711 - protein, 10 aa, Homo sapiens
  CDR3 for alpha chain variable domain of TCR clone 336856 (TRAV12-2, TRAJ48)
CGVTSEKLTF

SEQ ID NO: 673712 - protein, 13 aa, Homo sapiens
  CDR3 for beta chain variable domain of TCR clone 336856 (TRBV7-8, TRBJ2-7)
CASSLTGGREQYF

SEQ ID NO: 673713 - protein, 14 aa, Homo sapiens
  CDR3 for alpha chain variable domain of TCR clone 336857 (TRAV12-3, TRAJ6)
CAMSATGGSYIPTF

SEQ ID NO: 673714 - protein, 16 aa, Homo sapiens
  CDR3 for beta chain variable domain of TCR clone 336857 (TRBV4-3, TRBJ2-1)
WASSPRAVQGANEQFF

SEQ ID NO: 673715 - protein, 13 aa, Homo sapiens
  CDR3 for alpha chain variable domain of TCR clone 336858 (TRAV1-1, TRAJ31)
CASYLNNNARLMF

SEQ ID NO: 673716 - protein, 13 aa, Homo sapiens
  CDR3 for beta chain variable domain of TCR clone 336858 (TRBV15, TRBJ1-6)
CATSGGLNSPLDF

SEQ ID NO: 673717 - protein, 11 aa, Homo sapiens
  CDR3 for alpha chain variable domain of TCR clone 336859 (TRAV14/DV4, TRAJ9)
CAIVGGFKTIF

SEQ ID NO: 673718 - protein, 14 aa, Homo sapiens
  CDR3 for beta chain variable domain of TCR clone 336859 (TRBV7-3, TRBJ2-1)
CASSLAGGTNEQFF

SEQ ID NO: 673719 - protein, 14 aa, Homo sapiens
  CDR3 for alpha chain variable domain of TCR clone 336860 (TRAV8-4, TRAJ9)
CAVRIYTGGFKTNF

SEQ ID NO: 673720 - protein, 15 aa, Homo sapiens
  CDR3 for beta chain variable domain of TCR clone 336860 (TRBV10-2, TRBJ2-6)
CASSEQGTGANVLTF

SEQ ID NO: 673721 - protein, 16 aa, Homo sapiens
  CDR3 for alpha chain variable domain of TCR clone 336861 (TRAV20, TRAJ22)
CAVQASSSGSARQLTF

SEQ ID NO: 673722 - protein, 13 aa, Homo sapiens
  CDR3 for beta chain variable domain of TCR clone 336861 (TRBV7-2, TRBJ2-2)
CASSLAVTGELFF

SEQ ID NO: 673723 - protein, 12 aa, Homo sapiens
  CDR3 for alpha chain variable domain of TCR clone 336862 (TRAV12-3, TRAJ17)
CAMTLTANKPTF

SEQ ID NO: 673724 - protein, 15 aa, Homo sapiens
  CDR3 for beta chain variable domain of TCR clone 336862 (TRBV20-1, TRBJ2-7)
CSARDRVSGMDEQYF

SEQ ID NO: 673725 - protein, 12 aa, Homo sapiens
  CDR3 for alpha chain variable domain of TCR clone 336863 (TRAV2, TRAJ10)
CASTGGGNKLTF

SEQ ID NO: 673726 - protein, 16 aa, Homo sapiens
  CDR3 for beta chain variable domain of TCR clone 336863 (TRBV24-1, TRBJ2-3)
CATSDPGTGATDTQYF

SEQ ID NO: 673727 - protein, 23 aa, Homo sapiens
  CDR3 for alpha chain variable domain of TCR clone 336864 (TRAV8-1, TRAJ36)
CAVNSPTGANNLFLGLERDSPFF

SEQ ID NO: 673728 - protein, 15 aa, Homo sapiens
  CDR3 for beta chain variable domain of TCR clone 336864 (TRBV7-2, TRBJ2-3)
CASSLEQGGTDTQYF

SEQ ID NO: 673729 - protein, 13 aa, Homo sapiens
  CDR3 for alpha chain variable domain of TCR clone 336865 (TRAV12-2, TRAJ39)
CAVNNNAGNMLTF

SEQ ID NO: 673730 - protein, 13 aa, Homo sapiens
  CDR3 for beta chain variable domain of TCR clone 336865 (TRBV2, TRBJ1-5)
CATAGPGNQLQHF

SEQ ID NO: 673731 - protein, 14 aa, Homo sapiens
  CDR3 for alpha chain variable domain of TCR clone 336866 (TRAV12-2, TRAJ39)
SATYLCAVNNMLTF

SEQ ID NO: 673732 - protein, 16 aa, Homo sapiens
  CDR3 for beta chain variable domain of TCR clone 336866 (TRBV9, TRBJ2-7)
CASSAGPDRSPYEQYF

SEQ ID NO: 673733 - protein, 16 aa, Homo sapiens
  CDR3 for alpha chain variable domain of TCR clone 336867 (TRAV4, TRAJ8)
CLVGESGNTGFQKLVF

SEQ ID NO: 673734 - protein, 15 aa, Homo sapiens
  CDR3 for beta chain variable domain of TCR clone 336867 (TRBV15, TRBJ1-2)
CATSRVRASGSGYTF

SEQ ID NO: 673735 - protein, 14 aa, Homo sapiens
  CDR3 for alpha chain variable domain of TCR clone 336868 (TRAV29/DV5, TRAJ44)
CAAFLVGTASKLTF

SEQ ID NO: 673736 - protein, 14 aa, Homo sapiens
  CDR3 for beta chain variable domain of TCR clone 336868 (TRBV7-3, TRBJ2-2)
CQQRDGTGNRELFF

SEQ ID NO: 673737 - protein, 13 aa, Homo sapiens
  CDR3 for alpha chain variable domain of TCR clone 336869 (TRAV12-3, TRAJ13)
CAMTSGGYQKVTF

SEQ ID NO: 673738 - protein, 13 aa, Homo sapiens
  CDR3 for beta chain variable domain of TCR clone 336869 (TRBV11-2, TRBJ2-7)
CASSTLDRYEQYF

SEQ ID NO: 673739 - protein, 14 aa, Homo sapiens
  CDR3 for alpha chain variable domain of TCR clone 336870 (TRAV1-2, TRAJ16)
CAVNRFSDGQKLLF

SEQ ID NO: 673740 - protein, 17 aa, Homo sapiens
  CDR3 for beta chain variable domain of TCR clone 336870 (TRBV28, TRBJ2-5)
CASSTPEGYALQETQYF

SEQ ID NO: 673741 - protein, 14 aa, Homo sapiens
  CDR3 for alpha chain variable domain of TCR clone 336871 (TRAV1-2, TRAJ8)
CAVREDTGFEKLVF

SEQ ID NO: 673742 - protein, 15 aa, Homo sapiens
  CDR3 for beta chain variable domain of TCR clone 336871 (TRBV7-9, TRBJ1-1)
CASSHRGTVNTEAFF

SEQ ID NO: 673743 - protein, 14 aa, Homo sapiens
  CDR3 for alpha chain variable domain of TCR clone 336872 (TRAV1-2, TRAJ8)
CAVREDTGFQKLVF

SEQ ID NO: 673744 - protein, 16 aa, Homo sapiens
  CDR3 for beta chain variable domain of TCR clone 336872 (TRBV6-1, TRBJ2-5)
CASSETLDGGAETQYF

SEQ ID NO: 673745 - protein, 12 aa, Homo sapiens
  CDR3 for alpha chain variable domain of TCR clone 336873 (TRAV8-3, TRAJ40)
CAVTSGTYKYIF

SEQ ID NO: 673746 - protein, 13 aa, Homo sapiens
  CDR3 for beta chain variable domain of TCR clone 336873 (TRBV7-9, TRBJ1-2)
CASSLKQNYGYTF

SEQ ID NO: 673747 - protein, 17 aa, Homo sapiens
  CDR3 for alpha chain variable domain of TCR clone 336874 (TRAV4, TRAJ42)
CLVGVLNYGGSQGNLIF

SEQ ID NO: 673748 - protein, 18 aa, Homo sapiens
  CDR3 for beta chain variable domain of TCR clone 336874 (TRBV4-1, TRBJ1-5)
CASSQDPRGQGLNQPQHF

SEQ ID NO: 673749 - protein, 16 aa, Homo sapiens
  CDR3 for alpha chain variable domain of TCR clone 336875 (TRAV3, TRAJ23)
CAVKIGIYNQGGKLIF

SEQ ID NO: 673750 - protein, 14 aa, Homo sapiens
  CDR3 for beta chain variable domain of TCR clone 336875 (TRBV7-2, TRBJ1-1)
CASSFLTGTTEAFF

SEQ ID NO: 673751 - protein, 18 aa, Homo sapiens
  CDR3 for alpha chain variable domain of TCR clone 336876 (TRAV20, TRAJ4)
CAVQPYYMFSGGYNKLIF

SEQ ID NO: 673752 - protein, 13 aa, Homo sapiens
  CDR3 for beta chain variable domain of TCR clone 336876 (TRBV19, TRBJ2-3)
CATWDNITDTQYF

SEQ ID NO: 673753 - protein, 11 aa, Homo sapiens
  CDR3 for alpha chain variable domain of TCR clone 336877 (TRAV8-4, TRAJ20)
CAVTNVLTTTS

SEQ ID NO: 673754 - protein, 17 aa, Homo sapiens
  CDR3 for beta chain variable domain of TCR clone 336877 (TRBV13, TRBJ2-3)
CASSLSRVAGGRNTQYF

SEQ ID NO: 673755 - protein, 12 aa, Homo sapiens
  CDR3 for alpha chain variable domain of TCR clone 336878 (TRAV1-2, TRAJ33)
CAALDSNYQLIW

SEQ ID NO: 673756 - protein, 14 aa, Homo sapiens
  CDR3 for beta chain variable domain of TCR clone 336878 (TRBV20-1, TRBJ2-1)
FSAQIGGSANEQFF

SEQ ID NO: 673757 - protein, 14 aa, Homo sapiens
  CDR3 for alpha chain variable domain of TCR clone 336879 (TRAV9-2, TRAJ39)
CALYIYNAGNMLTF

SEQ ID NO: 673758 - protein, 15 aa, Homo sapiens
  CDR3 for beta chain variable domain of TCR clone 336879 (TRBV7-9, TRBJ1-4)
CASSARTGGNEELFF

SEQ ID NO: 673759 - protein, 15 aa, Homo sapiens
  CDR3 for alpha chain variable domain of TCR clone 336880 (TRAV12-2, TRAJ43)
CSFDMRFGAGTRLTV

SEQ ID NO: 673760 - protein, 13 aa, Homo sapiens
  CDR3 for beta chain variable domain of TCR clone 336880 (TRBV4-2, TRBJ1-1)
CASSQAGNTEAFF

SEQ ID NO: 673761 - protein, 14 aa, Homo sapiens
  CDR3 for alpha chain variable domain of TCR clone 336881 (TRAV34, TRAJ22)
CGADTSGSARQLTF

SEQ ID NO: 673762 - protein, 16 aa, Homo sapiens
  CDR3 for beta chain variable domain of TCR clone 336881 (TRBV24-1, TRBJ2-3)
CATSDPGTGATDTQYF

SEQ ID NO: 673763 - protein, 16 aa, Homo sapiens
  CDR3 for alpha chain variable domain of TCR clone 336882 (TRAV12-3, TRAJ53)
CAMSPGSGGSNFKLTF

SEQ ID NO: 673764 - protein, 17 aa, Homo sapiens
  CDR3 for beta chain variable domain of TCR clone 336882 (TRBV28, TRBJ2-5)
CASSTPEGEALQETQYF

SEQ ID NO: 673765 - protein, 11 aa, Homo sapiens
  CDR3 for alpha chain variable domain of TCR clone 336883 (TRAV4, TRAJ31)
CLVGDNARLMF

SEQ ID NO: 673766 - protein, 14 aa, Homo sapiens
  CDR3 for beta chain variable domain of TCR clone 336883 (TRBV25-1, TRBJ1-1)
CASTHLGGNTEAFF

SEQ ID NO: 673767 - protein, 12 aa, Homo sapiens
  CDR3 for alpha chain variable domain of TCR clone 336884 (TRAV30, TRAJ43)
CGTEERGNDMRY

SEQ ID NO: 673768 - protein, 13 aa, Homo sapiens
  CDR3 for beta chain variable domain of TCR clone 336884 (TRBV27, TRBJ2-7)
CASSFSQGYEQYF

SEQ ID NO: 673769 - protein, 14 aa, Homo sapiens
  CDR3 for alpha chain variable domain of TCR clone 336885 (TRAV21, TRAJ35)
CAAMPIGVGNVLHC

SEQ ID NO: 673770 - protein, 12 aa, Homo sapiens
  CDR3 for beta chain variable domain of TCR clone 336885 (TRBV7-9, TRBJ2-7)
CASSIKREEQYF

SEQ ID NO: 673771 - protein, 14 aa, Homo sapiens
  CDR3 for alpha chain variable domain of TCR clone 336886 (TRAV17, TRAJ57)
CSTDPQGGSEKLVC

SEQ ID NO: 673772 - protein, 16 aa, Homo sapiens
  CDR3 for beta chain variable domain of TCR clone 336886 (TRBV13, TRBJ2-2)
CASSPRTGEHTGELFF

SEQ ID NO: 673773 - protein, 13 aa, Homo sapiens
  CDR3 for alpha chain variable domain of TCR clone 336887 (TRAV35, TRAJ57)
CAGSQGGSEKLVF

SEQ ID NO: 673774 - protein, 14 aa, Homo sapiens
  CDR3 for beta chain variable domain of TCR clone 336887 (TRBV12-4, TRBJ1-6)
CASNLQGKGSPLHF

SEQ ID NO: 673775 - protein, 13 aa, Homo sapiens
  CDR3 for alpha chain variable domain of TCR clone 336888 (TRAV8-2, TRAJ47)
CVVSEREGNKLVF

SEQ ID NO: 673776 - protein, 15 aa, Homo sapiens
  CDR3 for beta chain variable domain of TCR clone 336888 (TRBV20-1, TRBJ2-7)
CSARDRVSGMDEQYF

SEQ ID NO: 673777 - protein, 15 aa, Homo sapiens
  CDR3 for alpha chain variable domain of TCR clone 336889 (TRAV3, TRAJ22)
CAVRDRGGSARQLTF

SEQ ID NO: 673778 - protein, 16 aa, Homo sapiens
  CDR3 for beta chain variable domain of TCR clone 336889 (TRBV5-4, TRBJ2-3)
CASQQPGAGGADTKHF

SEQ ID NO: 673779 - protein, 13 aa, Homo sapiens
  CDR3 for alpha chain variable domain of TCR clone 336890 (TRAV17, TRAJ22)
CAGRGGSARQLTF

SEQ ID NO: 673780 - protein, 14 aa, Homo sapiens
  CDR3 for beta chain variable domain of TCR clone 336890 (TRBV19, TRBJ1-1)
CASSITGWETEAFF

SEQ ID NO: 673781 - protein, 13 aa, Homo sapiens
  CDR3 for alpha chain variable domain of TCR clone 336891 (TRAV1-2, TRAJ9)
CPALNTGGFKTIF

SEQ ID NO: 673782 - protein, 13 aa, Homo sapiens
  CDR3 for beta chain variable domain of TCR clone 336891 (TRBV7-3, TRBJ2-5)
CASSFRGGETQYF

SEQ ID NO: 673783 - protein, 16 aa, Homo sapiens
  CDR3 for alpha chain variable domain of TCR clone 336892 (TRAV30, TRAJ24)
CGTEIVDADSWGKFQF

SEQ ID NO: 673784 - protein, 16 aa, Homo sapiens
  CDR3 for beta chain variable domain of TCR clone 336892 (TRBV7-9, TRBJ2-5)
CASSPSGQGVKGTQYF

SEQ ID NO: 673785 - protein, 13 aa, Homo sapiens
  CDR3 for alpha chain variable domain of TCR clone 336893 (TRAV8-4, TRAJ48)
CAVSLFGNEKLTF

SEQ ID NO: 673786 - protein, 15 aa, Homo sapiens
  CDR3 for beta chain variable domain of TCR clone 336893 (TRBV20-1, TRBJ2-7)
CSARKGLAESYKQYF

SEQ ID NO: 673787 - protein, 15 aa, Homo sapiens
  CDR3 for alpha chain variable domain of TCR clone 336894 (TRAV17, TRAJ56)
CATDANTGANSKLIF

SEQ ID NO: 673788 - protein, 12 aa, Homo sapiens
  CDR3 for beta chain variable domain of TCR clone 336894 (TRBV7-8, TRBJ2-7)
CASSLGDREQYF

SEQ ID NO: 673789 - protein, 14 aa, Homo sapiens
  CDR3 for alpha chain variable domain of TCR clone 336895 (TRAV16, TRAJ17)
CAPRIKAAGNKLTF

SEQ ID NO: 673790 - protein, 13 aa, Homo sapiens
  CDR3 for beta chain variable domain of TCR clone 336895 (TRBV7-2, TRBJ2-7)
CASSSPSGSEQYF

SEQ ID NO: 673791 - protein, 16 aa, Homo sapiens
  CDR3 for alpha chain variable domain of TCR clone 336896 (TRAV26-1, TRAJ37)
CIVRGDGSGNTGKLIF

SEQ ID NO: 673792 - protein, 17 aa, Homo sapiens
  CDR3 for beta chain variable domain of TCR clone 336896 (TRBV4-1, TRBJ2-7)
CASSRDPVGVRGGEQYF

SEQ ID NO: 673793 - protein, 15 aa, Homo sapiens
  CDR3 for alpha chain variable domain of TCR clone 336897 (TRAV12-3, TRAJ6)
CAMSATTGGSYIPTF

SEQ ID NO: 673794 - protein, 13 aa, Homo sapiens
  CDR3 for beta chain variable domain of TCR clone 336897 (TRBV7-9, TRBJ1-2)
CASRLRQNYGYTF

SEQ ID NO: 673795 - protein, 13 aa, Homo sapiens
  CDR3 for alpha chain variable domain of TCR clone 336898 (TRAV2, TRAJ29)
CAAGNSGYTPLVF

SEQ ID NO: 673796 - protein, 16 aa, Homo sapiens
  CDR3 for beta chain variable domain of TCR clone 336898 (TRBV7-9, TRBJ1-2)
CASSPGGGAINYGYTF

SEQ ID NO: 673797 - protein, 13 aa, Homo sapiens
  CDR3 for alpha chain variable domain of TCR clone 336899 (TRAV17, TRAJ54)
CATSWGGAQTLVF

SEQ ID NO: 673798 - protein, 15 aa, Homo sapiens
  CDR3 for beta chain variable domain of TCR clone 336899 (TRBV4-3, TRBJ2-3)
CASSPSLLSTDTQYF

SEQ ID NO: 673799 - protein, 13 aa, Homo sapiens
  CDR3 for alpha chain variable domain of TCR clone 336900 (TRAV3, TRAJ21)
CAVREPDFNKFYF

SEQ ID NO: 673800 - protein, 14 aa, Homo sapiens
  CDR3 for beta chain variable domain of TCR clone 336900 (TRBV7-9, TRBJ2-7)
CASSIGQGAGEQYF

SEQ ID NO: 673801 - protein, 13 aa, Homo sapiens
  CDR3 for alpha chain variable domain of TCR clone 336901 (TRAV21, TRAJ20)
CAVGLRVDYKLSF

SEQ ID NO: 673802 - protein, 13 aa, Homo sapiens
  CDR3 for beta chain variable domain of TCR clone 336901 (TRBV2, TRBJ1-4)
CASSERAGEKLFF

SEQ ID NO: 673803 - protein, 12 aa, Homo sapiens
  CDR3 for alpha chain variable domain of TCR clone 336902 (TRAV1-1, TRAJ20)
CAVREDDYKLSF

SEQ ID NO: 673804 - protein, 20 aa, Homo sapiens
  CDR3 for beta chain variable domain of TCR clone 336902 (TRBV28, TRBJ2-1)
CASTPIGRSPGLAGGNEQFF

SEQ ID NO: 673805 - protein, 13 aa, Homo sapiens
  CDR3 for alpha chain variable domain of TCR clone 336903 (TRAV13-2, TRAJ48)
FVEMDFGNEKLTF

SEQ ID NO: 673806 - protein, 15 aa, Homo sapiens
  CDR3 for beta chain variable domain of TCR clone 336903 (TRBV7-9, TRBJ1-6)
CASSSPGRGNSPLHF

SEQ ID NO: 673807 - protein, 15 aa, Homo sapiens
  CDR3 for alpha chain variable domain of TCR clone 336904 (TRAV40, TRAJ53)
CLLANSGGSNYRLTF

SEQ ID NO: 673808 - protein, 15 aa, Homo sapiens
  CDR3 for beta chain variable domain of TCR clone 336904 (TRBV7-6, TRBJ2-2)
CASRRTSGNTGELFF

SEQ ID NO: 673809 - protein, 13 aa, Homo sapiens
  CDR3 for alpha chain variable domain of TCR clone 336905 (TRAV27, TRAJ49)
CAPRPYTGNQFYF

SEQ ID NO: 673810 - protein, 18 aa, Homo sapiens
  CDR3 for beta chain variable domain of TCR clone 336905 (TRBV7-3, TRBJ2-5)
CASSLGGAAQGRWDTQYL

SEQ ID NO: 673811 - protein, 13 aa, Homo sapiens
  CDR3 for alpha chain variable domain of TCR clone 336906 (TRAV13-1, TRAJ43)
CAASKNNNNDMRF

SEQ ID NO: 673812 - protein, 17 aa, Homo sapiens
  CDR3 for beta chain variable domain of TCR clone 336906 (TRBV11-2, TRBJ2-1)
CASSLYPPGVEYNEQFF

SEQ ID NO: 673813 - protein, 14 aa, Homo sapiens
  CDR3 for alpha chain variable domain of TCR clone 336907 (TRAV26-1, TRAJ38)
CIADNAGNNRKLIL

SEQ ID NO: 673814 - protein, 17 aa, Homo sapiens
  CDR3 for beta chain variable domain of TCR clone 336907 (TRBV13, TRBJ2-3)
CASSISRVAGGRNTQYF

SEQ ID NO: 673815 - protein, 10 aa, Homo sapiens
  CDR3 for alpha chain variable domain of TCR clone 336908 (TRAV12-2, TRAJ52)
RSTSYGKLTF

SEQ ID NO: 673816 - protein, 16 aa, Homo sapiens
  CDR3 for beta chain variable domain of TCR clone 336908 (TRBV27, TRBJ2-2)
CASSFRGLVRTGELFF

SEQ ID NO: 673817 - protein, 15 aa, Homo sapiens
  CDR3 for alpha chain variable domain of TCR clone 336909 (TRAV3, TRAJ3)
CAVRDRRSSASKIIF

SEQ ID NO: 673818 - protein, 12 aa, Homo sapiens
  CDR3 for beta chain variable domain of TCR clone 336909 (TRBV9, TRBJ2-2)
CASSLVTGELFF

SEQ ID NO: 673819 - protein, 18 aa, Homo sapiens
  CDR3 for alpha chain variable domain of TCR clone 336910 (TRAV29/DV5, TRAJ26)
CSVLLCSKRKPEGQNLVF

SEQ ID NO: 673820 - protein, 17 aa, Homo sapiens
  CDR3 for beta chain variable domain of TCR clone 336910 (TRBV20-1, TRBJ2-2)
CSASGSGQGGLTGELFF

SEQ ID NO: 673821 - protein, 14 aa, Homo sapiens
  CDR3 for alpha chain variable domain of TCR clone 336911 (TRAV12-1, TRAJ21)
CVVNGEYNFNKFYF

SEQ ID NO: 673822 - protein, 14 aa, Homo sapiens
  CDR3 for beta chain variable domain of TCR clone 336911 (TRBV7-2, TRBJ2-7)
CASRSQGAAYEQYF

SEQ ID NO: 673823 - protein, 13 aa, Homo sapiens
  CDR3 for alpha chain variable domain of TCR clone 336912 (TRAV2, TRAJ40)
CAVVTSGTYKYIF

SEQ ID NO: 673824 - protein, 10 aa, Homo sapiens
  CDR3 for beta chain variable domain of TCR clone 336912 (TRBV28, TRBJ1-2)
CASSSDRAVF

SEQ ID NO: 673825 - protein, 15 aa, Homo sapiens
  CDR3 for alpha chain variable domain of TCR clone 336913 (TRAV8-3, TRAJ7)
CAVGSISYGNNRLAF

SEQ ID NO: 673826 - protein, 16 aa, Homo sapiens
  CDR3 for beta chain variable domain of TCR clone 336913 (TRBV7-2, TRBJ2-1)
CASSLVGGPELNEQFF

SEQ ID NO: 673827 - protein, 15 aa, Homo sapiens
  CDR3 for alpha chain variable domain of TCR clone 336914 (TRAV35, TRAJ20)
CAGQLVGSNDYKLIF

SEQ ID NO: 673828 - protein, 13 aa, Homo sapiens
  CDR3 for beta chain variable domain of TCR clone 336914 (TRBV19, TRBJ2-7)
CASSKTGTHEQYF

SEQ ID NO: 673829 - protein, 14 aa, Homo sapiens
  CDR3 for alpha chain variable domain of TCR clone 336915 (TRAV35, TRAJ38)
CAGSNAGNNRKLIW

SEQ ID NO: 673830 - protein, 15 aa, Homo sapiens
  CDR3 for beta chain variable domain of TCR clone 336915 (TRBV12-4, TRBJ2-5)
CASSPPTGLQETQYF

SEQ ID NO: 673831 - protein, 15 aa, Homo sapiens
  CDR3 for alpha chain variable domain of TCR clone 336916 (TRAV29/DV5, TRAJ53)
WAASASGGSNYKLTF

SEQ ID NO: 673832 - protein, 19 aa, Homo sapiens
  CDR3 for beta chain variable domain of TCR clone 336916 (TRBV5-1, TRBJ2-3)
CASSLWLAGGITTTDTQYF

SEQ ID NO: 673833 - protein, 13 aa, Homo sapiens
  CDR3 for alpha chain variable domain of TCR clone 336917 (TRAV27, TRAJ6)
CAGGTRGSYIPTF

SEQ ID NO: 673834 - protein, 14 aa, Homo sapiens
  CDR3 for beta chain variable domain of TCR clone 336917 (TRBV13, TRBJ2-5)
CASSLERVGETQYF

SEQ ID NO: 673835 - protein, 14 aa, Homo sapiens
  CDR3 for alpha chain variable domain of TCR clone 336918 (TRAV26-1, TRAJ38)
CIADNAGNNRKLIW

SEQ ID NO: 673836 - protein, 12 aa, Homo sapiens
  CDR3 for beta chain variable domain of TCR clone 336918 (TRBV28, TRBJ2-3)
CASSLYRDTQYF

SEQ ID NO: 673837 - protein, 14 aa, Homo sapiens
  CDR3 for alpha chain variable domain of TCR clone 336919 (TRAV1-2, TRAJ8)
FAVREDTGFQKLVF

SEQ ID NO: 673838 - protein, 16 aa, Homo sapiens
  CDR3 for beta chain variable domain of TCR clone 336919 (TRBV12-4, TRBJ1-5)
CASSRPVGGSNQPQHF

SEQ ID NO: 673839 - protein, 16 aa, Homo sapiens
  CDR3 for alpha chain variable domain of TCR clone 336920 (TRAV8-3, TRAJ52)
CSVQPAGGTSYGKLTF

SEQ ID NO: 673840 - protein, 15 aa, Homo sapiens
  CDR3 for beta chain variable domain of TCR clone 336920 (TRBV11-2, TRBJ2-7)
CASSLAGGVATEQYF

SEQ ID NO: 673841 - protein, 14 aa, Homo sapiens
  CDR3 for alpha chain variable domain of TCR clone 336921 (TRAV14/DV4, TRAJ15)
CAMRRDQAGTALIF

SEQ ID NO: 673842 - protein, 16 aa, Homo sapiens
  CDR3 for beta chain variable domain of TCR clone 336921 (TRBV15, TRBJ2-3)
CATSRDLGSVADTQYF

SEQ ID NO: 673843 - protein, 14 aa, Homo sapiens
  CDR3 for alpha chain variable domain of TCR clone 336922 (TRAV38-1, TRAJ30)
CAFMPMNRDDKIIF

SEQ ID NO: 673844 - protein, 15 aa, Homo sapiens
  CDR3 for beta chain variable domain of TCR clone 336922 (TRBV7-9, TRBJ2-7)
CAISLDLQGPYEQYF

SEQ ID NO: 673845 - protein, 16 aa, Homo sapiens
  CDR3 for alpha chain variable domain of TCR clone 336923 (TRAV26-1, )
CIYIQNPDPAVYQLRD

SEQ ID NO: 673846 - protein, 19 aa, Homo sapiens
  CDR3 for beta chain variable domain of TCR clone 336923 (TRBV19, TRBJ2-5)
CASSIGQVTDFFLGETQYF

SEQ ID NO: 673847 - protein, 14 aa, Homo sapiens
  CDR3 for alpha chain variable domain of TCR clone 336924 (TRAV35, TRAJ24)
CAGPRRDSWGKLQF

SEQ ID NO: 673848 - protein, 12 aa, Homo sapiens
  CDR3 for beta chain variable domain of TCR clone 336924 (TRBV12-4, TRBJ2-3)
CARSLGQDTQYF

SEQ ID NO: 673849 - protein, 18 aa, Homo sapiens
  CDR3 for alpha chain variable domain of TCR clone 336925 (TRAV13-1, TRAJ52)
CAAKNPNAGGTSYGKLTF

SEQ ID NO: 673850 - protein, 18 aa, Homo sapiens
  CDR3 for beta chain variable domain of TCR clone 336925 (TRBV5-5, TRBJ1-5)
CASSLRQVKGSSNQPQHF

SEQ ID NO: 673851 - protein, 17 aa, Homo sapiens
  CDR3 for alpha chain variable domain of TCR clone 336926 (TRAV3, TRAJ6)
CAVRDGPRAGGSYIPTF

SEQ ID NO: 673852 - protein, 15 aa, Homo sapiens
  CDR3 for beta chain variable domain of TCR clone 336926 (TRBV23-1, TRBJ2-1)
CASSQWPQLTMSSSS

SEQ ID NO: 673853 - protein, 15 aa, Homo sapiens
  CDR3 for alpha chain variable domain of TCR clone 336927 (TRAV3, TRAJ12)
CAVRDIRDSSYKLIF

SEQ ID NO: 673854 - protein, 14 aa, Homo sapiens
  CDR3 for beta chain variable domain of TCR clone 336927 (TRBV7-2, TRBJ2-7)
CASSPKTSFYEQYF

SEQ ID NO: 673855 - protein, 14 aa, Homo sapiens
  CDR3 for alpha chain variable domain of TCR clone 336928 (TRAV1-2, TRAJ8)
CAVREATGFQKLVF

SEQ ID NO: 673856 - protein, 15 aa, Homo sapiens
  CDR3 for beta chain variable domain of TCR clone 336928 (TRBV6-3, TRBJ2-7)
CASSSPGTVFCEQYF

SEQ ID NO: 673857 - protein, 14 aa, Homo sapiens
  CDR3 for alpha chain variable domain of TCR clone 336929 (TRAV2, TRAJ3)
CAVPPYSSASKIIF

SEQ ID NO: 673858 - protein, 13 aa, Homo sapiens
  CDR3 for beta chain variable domain of TCR clone 336929 (TRBV7-3, TRBJ2-5)
CASSSDREETQYF

SEQ ID NO: 673859 - protein, 15 aa, Homo sapiens
  CDR3 for alpha chain variable domain of TCR clone 336930 (TRAV26-1, TRAJ37)
CIVRVATGNPGKLIF

SEQ ID NO: 673860 - protein, 12 aa, Homo sapiens
  CDR3 for beta chain variable domain of TCR clone 336930 (TRBV12-4, TRBJ1-1)
CASSLVDTEAFF

SEQ ID NO: 673861 - protein, 13 aa, Homo sapiens
  CDR3 for alpha chain variable domain of TCR clone 336931 (TRAV8-6, TRAJ49)
CAFITNTGNQFYF

SEQ ID NO: 673862 - protein, 14 aa, Homo sapiens
  CDR3 for beta chain variable domain of TCR clone 336931 (TRBV5-1, TRBJ2-7)
CASSRGESLYEQYF

SEQ ID NO: 673863 - protein, 15 aa, Homo sapiens
  CDR3 for alpha chain variable domain of TCR clone 336932 (TRAV3, TRAJ17)
CAVRDTGAAANKLTF

SEQ ID NO: 673864 - protein, 14 aa, Homo sapiens
  CDR3 for beta chain variable domain of TCR clone 336932 (TRBV6-3, TRBJ1-1)
CASSNLLPGAEAFF

SEQ ID NO: 673865 - protein, 14 aa, Homo sapiens
  CDR3 for alpha chain variable domain of TCR clone 336933 (TRAV3, TRAJ33)
CAVRDMDSYYQLIW

SEQ ID NO: 673866 - protein, 13 aa, Homo sapiens
  CDR3 for beta chain variable domain of TCR clone 336933 (TRBV2, TRBJ2-5)
CASSGQGEQTQYF

SEQ ID NO: 673867 - protein, 14 aa, Homo sapiens
  CDR3 for alpha chain variable domain of TCR clone 336934 (TRAV8-6, TRAJ4)
CAVTASGGYNKLIF

SEQ ID NO: 673868 - protein, 13 aa, Homo sapiens
  CDR3 for beta chain variable domain of TCR clone 336934 (TRBV20-1, TRBJ1-1)
CSARGGGNTEAFF

SEQ ID NO: 673869 - protein, 13 aa, Homo sapiens
  CDR3 for alpha chain variable domain of TCR clone 336935 (TRAV1-2, TRAJ26)
CAVRHNYGQKFVF

SEQ ID NO: 673870 - protein, 14 aa, Homo sapiens
  CDR3 for beta chain variable domain of TCR clone 336935 (TRBV4-1, TRBJ2-5)
CASSQDLALEAQYF

SEQ ID NO: 673871 - protein, 12 aa, Homo sapiens
  CDR3 for alpha chain variable domain of TCR clone 336936 (TRAV12-3, TRAJ21)
CAMFNNFSKFYF

SEQ ID NO: 673872 - protein, 16 aa, Homo sapiens
  CDR3 for beta chain variable domain of TCR clone 336936 (TRBV7-9, TRBJ1-2)
CASSLAPLRAAYGYTF

SEQ ID NO: 673873 - protein, 14 aa, Homo sapiens
  CDR3 for alpha chain variable domain of TCR clone 336937 (TRAV36/DV7, TRAJ53)
CAVVDGGSNYKLTF

SEQ ID NO: 673874 - protein, 15 aa, Homo sapiens
  CDR3 for beta chain variable domain of TCR clone 336937 (TRBV5-1, TRBJ1-1)
CASSSTTGTNTEAFF

SEQ ID NO: 673875 - protein, 14 aa, Homo sapiens
  CDR3 for alpha chain variable domain of TCR clone 336938 (TRAV30, TRAJ33)
CGSLIMDSNYQLIW

SEQ ID NO: 673876 - protein, 16 aa, Homo sapiens
  CDR3 for beta chain variable domain of TCR clone 336938 (TRBV19, TRBJ1-2)
CASSSPGQGLFYGYTF

SEQ ID NO: 673877 - protein, 14 aa, Homo sapiens
  CDR3 for alpha chain variable domain of TCR clone 336939 (TRAV23/DV6, TRAJ4)
SAAPSSGGYNKLIF

SEQ ID NO: 673878 - protein, 16 aa, Homo sapiens
  CDR3 for beta chain variable domain of TCR clone 336939 (TRBV19, TRBJ1-1)
CASRFGGPVTGTEAFF

SEQ ID NO: 673879 - protein, 14 aa, Homo sapiens
  CDR3 for alpha chain variable domain of TCR clone 336940 (TRAV12-2, TRAJ13)
CAVKKTGGYQKVTF

SEQ ID NO: 673880 - protein, 12 aa, Homo sapiens
  CDR3 for beta chain variable domain of TCR clone 336940 (TRBV7-6, TRBJ2-5)
RASSLSQETQYF

SEQ ID NO: 673881 - protein, 14 aa, Homo sapiens
  CDR3 for alpha chain variable domain of TCR clone 336941 (TRAV27, TRAJ40)
RARSLLRGTYKYIF

SEQ ID NO: 673882 - protein, 15 aa, Homo sapiens
  CDR3 for beta chain variable domain of TCR clone 336941 (TRBV6-3, TRBJ1-4)
CASSSPGQENEKLFF

SEQ ID NO: 673883 - protein, 17 aa, Homo sapiens
  CDR3 for alpha chain variable domain of TCR clone 336942 (TRAV1-1, TRAJ30)
CAVRERGVRTEMTRSSL

SEQ ID NO: 673884 - protein, 12 aa, Homo sapiens
  CDR3 for beta chain variable domain of TCR clone 336942 (TRBV12-4, TRBJ2-7)
CASSLGGYEQYF

SEQ ID NO: 673885 - protein, 18 aa, Homo sapiens
  CDR3 for alpha chain variable domain of TCR clone 336943 (TRAV13-1, TRAJ52)
CAAKNPNAGGTSYGKLTF

SEQ ID NO: 673886 - protein, 14 aa, Homo sapiens
  CDR3 for beta chain variable domain of TCR clone 336943 (TRBV7-8, TRBJ2-3)
CASSLEAETDTQYF

SEQ ID NO: 673887 - protein, 18 aa, Homo sapiens
  CDR3 for alpha chain variable domain of TCR clone 336944 (TRAV21, TRAJ52)
CAVRPSPAGGTSYGKLTY

SEQ ID NO: 673888 - protein, 14 aa, Homo sapiens
  CDR3 for beta chain variable domain of TCR clone 336944 (TRBV4-1, TRBJ2-2)
CASSQAVNTGELFF

SEQ ID NO: 673889 - protein, 12 aa, Homo sapiens
  CDR3 for alpha chain variable domain of TCR clone 336945 (TRAV13-1, TRAJ15)
CAASKPGTALIF

SEQ ID NO: 673890 - protein, 16 aa, Homo sapiens
  CDR3 for beta chain variable domain of TCR clone 336945 (TRBV18, TRBJ2-7)
CASSPRVLGTDYEQYF

SEQ ID NO: 673891 - protein, 16 aa, Homo sapiens
  CDR3 for alpha chain variable domain of TCR clone 336946 (TRAV17, TRAJ52)
CATDPMCGTSYGKLTF

SEQ ID NO: 673892 - protein, 16 aa, Homo sapiens
  CDR3 for beta chain variable domain of TCR clone 336946 (TRBV6-6, TRBJ2-3)
CASSYLKATSTDTQYF

SEQ ID NO: 673893 - protein, 17 aa, Homo sapiens
  CDR3 for alpha chain variable domain of TCR clone 336947 (TRAV8-6, TRAJ42)
CAVSETVRGGSQGNLIF

SEQ ID NO: 673894 - protein, 14 aa, Homo sapiens
  CDR3 for beta chain variable domain of TCR clone 336947 (TRBV11-2, TRBJ2-7)
CASSLGAGAYEQYF

SEQ ID NO: 673895 - protein, 14 aa, Homo sapiens
  CDR3 for alpha chain variable domain of TCR clone 336948 (TRAV27, TRAJ12)
CAGARMDSSYKLIF

SEQ ID NO: 673896 - protein, 20 aa, Homo sapiens
  CDR3 for beta chain variable domain of TCR clone 336948 (TRBV10-3, TRBJ2-7)
CTSVPSVNPEDSGGRVEQYF

SEQ ID NO: 673897 - protein, 14 aa, Homo sapiens
  CDR3 for alpha chain variable domain of TCR clone 336949 (TRAV13-1, TRAJ35)
CAASKGGFGNVLHC

SEQ ID NO: 673898 - protein, 13 aa, Homo sapiens
  CDR3 for beta chain variable domain of TCR clone 336949 (TRBV7-3, TRBJ1-1)
CGSSQDWGAEAFF

SEQ ID NO: 673899 - protein, 15 aa, Homo sapiens
  CDR3 for alpha chain variable domain of TCR clone 336950 (TRAV1-1, TRAJ23)
CAVRGGDNQGGKLIF

SEQ ID NO: 673900 - protein, 12 aa, Homo sapiens
  CDR3 for beta chain variable domain of TCR clone 336950 (TRBV7-3, TRBJ2-1)
CASSFINNEQFF

SEQ ID NO: 673901 - protein, 13 aa, Homo sapiens
  CDR3 for alpha chain variable domain of TCR clone 336951 (TRAV3, TRAJ27)
FAVRPLGAGKSTF

SEQ ID NO: 673902 - protein, 12 aa, Homo sapiens
  CDR3 for beta chain variable domain of TCR clone 336951 (TRBV7-9, TRBJ2-7)
CATRTDAYEQYF

SEQ ID NO: 673903 - protein, 12 aa, Homo sapiens
  CDR3 for alpha chain variable domain of TCR clone 336952 (TRAV8-3, TRAJ20)
CAVGADDYKLSF

SEQ ID NO: 673904 - protein, 16 aa, Homo sapiens
  CDR3 for beta chain variable domain of TCR clone 336952 (TRBV19, TRBJ2-2)
CASRSPWTGATGELFF

SEQ ID NO: 673905 - protein, 15 aa, Homo sapiens
  CDR3 for alpha chain variable domain of TCR clone 336953 (TRAV29/DV5, TRAJ29)
CAASERGSGNTPLVF

SEQ ID NO: 673906 - protein, 12 aa, Homo sapiens
  CDR3 for beta chain variable domain of TCR clone 336953 (TRBV7-9, TRBJ1-4)
CASSTDREKLFF

SEQ ID NO: 673907 - protein, 14 aa, Homo sapiens
  CDR3 for alpha chain variable domain of TCR clone 336954 (TRAV23/DV6, TRAJ4)
CAAPSSGGYNKLIF

SEQ ID NO: 673908 - protein, 15 aa, Homo sapiens
  CDR3 for beta chain variable domain of TCR clone 336954 (TRBV10-3, TRBJ2-3)
CAIILTSGGTDTQYF

SEQ ID NO: 673909 - protein, 11 aa, Homo sapiens
  CDR3 for alpha chain variable domain of TCR clone 336955 (TRAV21, TRAJ34)
CAHCNTDKLIL

SEQ ID NO: 673910 - protein, 13 aa, Homo sapiens
  CDR3 for beta chain variable domain of TCR clone 336955 (TRBV7-6, TRBJ1-2)
CASSLVADYGYTF

SEQ ID NO: 673911 - protein, 14 aa, Homo sapiens
  CDR3 for alpha chain variable domain of TCR clone 336956 (TRAV9-2, TRAJ39)
CALYIYNAGNMLTF

SEQ ID NO: 673912 - protein, 16 aa, Homo sapiens
  CDR3 for beta chain variable domain of TCR clone 336956 (TRBV20-1, TRBJ2-1)
CSARSTSESSYNEQFF

SEQ ID NO: 673913 - protein, 18 aa, Homo sapiens
  CDR3 for alpha chain variable domain of TCR clone 336957 (TRAV29/DV5, TRAJ52)
CSAGFRGAGGTSYGKLTF

SEQ ID NO: 673914 - protein, 16 aa, Homo sapiens
  CDR3 for beta chain variable domain of TCR clone 336957 (TRBV11-1, TRBJ1-1)
CASSPRGAHMNSEAFF

SEQ ID NO: 673915 - protein, 15 aa, Homo sapiens
  CDR3 for alpha chain variable domain of TCR clone 336958 (TRAV26-1, TRAJ24)
CIVREDTDSWGKLQF

SEQ ID NO: 673916 - protein, 15 aa, Homo sapiens
  CDR3 for beta chain variable domain of TCR clone 336958 (TRBV12-4, TRBJ1-1)
CASSLAVSRGAEAFF

SEQ ID NO: 673917 - protein, 14 aa, Homo sapiens
  CDR3 for alpha chain variable domain of TCR clone 336959 (TRAV26-1, TRAJ58)
CIVRVPTSGSRLTF

SEQ ID NO: 673918 - protein, 17 aa, Homo sapiens
  CDR3 for beta chain variable domain of TCR clone 336959 (TRBV13, TRBJ2-3)
CASSLSRVAGGRNTQYF

SEQ ID NO: 673919 - protein, 14 aa, Homo sapiens
  CDR3 for alpha chain variable domain of TCR clone 336960 (TRAV12-3, TRAJ43)
CAMILGGAGTRLTV

SEQ ID NO: 673920 - protein, 13 aa, Homo sapiens
  CDR3 for beta chain variable domain of TCR clone 336960 (TRBV7-9, TRBJ1-2)
CASSLKQNYGYTF

SEQ ID NO: 673921 - protein, 13 aa, Homo sapiens
  CDR3 for alpha chain variable domain of TCR clone 336961 (TRAV27, TRAJ41)
CAGEGNSGYALNF

SEQ ID NO: 673922 - protein, 14 aa, Homo sapiens
  CDR3 for beta chain variable domain of TCR clone 336961 (TRBV11-2, TRBJ2-7)
CASSLRAGAYEQYF

SEQ ID NO: 673923 - protein, 12 aa, Homo sapiens
  CDR3 for alpha chain variable domain of TCR clone 336962 (TRAV3, TRAJ20)
CAVRDGDYKLSF

SEQ ID NO: 673924 - protein, 14 aa, Homo sapiens
  CDR3 for beta chain variable domain of TCR clone 336962 (TRBV5-4, TRBJ2-7)
CASSRVGGSYEQYF

SEQ ID NO: 673925 - protein, 15 aa, Homo sapiens
  CDR3 for alpha chain variable domain of TCR clone 336963 (TRAV20, TRAJ43)
CAVQAGKSSNNDMRF

SEQ ID NO: 673926 - protein, 15 aa, Homo sapiens
  CDR3 for beta chain variable domain of TCR clone 336963 (TRBV5-1, TRBJ2-3)
CASSVTSGSTDTQYF

SEQ ID NO: 673927 - protein, 16 aa, Homo sapiens
  CDR3 for alpha chain variable domain of TCR clone 336964 (TRAV3, TRAJ37)
CAVRGKGSGNAGKLIF

SEQ ID NO: 673928 - protein, 13 aa, Homo sapiens
  CDR3 for beta chain variable domain of TCR clone 336964 (TRBV19, TRBJ1-2)
CASSVPGQDGYTF

SEQ ID NO: 673929 - protein, 14 aa, Homo sapiens
  CDR3 for alpha chain variable domain of TCR clone 336965 (TRAV2, TRAJ9)
CAVEDRSGGFKTIF

SEQ ID NO: 673930 - protein, 16 aa, Homo sapiens
  CDR3 for beta chain variable domain of TCR clone 336965 (TRBV7-2, TRBJ1-1)
CASSSNGGVMNTEAFF

SEQ ID NO: 673931 - protein, 15 aa, Homo sapiens
  CDR3 for alpha chain variable domain of TCR clone 336966 (TRAV12-3, TRAJ49)
CAMAVTPNPGNQFYL

SEQ ID NO: 673932 - protein, 14 aa, Homo sapiens
  CDR3 for beta chain variable domain of TCR clone 336966 (TRBV7-8, TRBJ2-3)
CASSLEAGTDTQYF

SEQ ID NO: 673933 - protein, 11 aa, Homo sapiens
  CDR3 for alpha chain variable domain of TCR clone 336967 (TRAV2, TRAJ33)
CAVDSNYQLVW

SEQ ID NO: 673934 - protein, 13 aa, Homo sapiens
  CDR3 for beta chain variable domain of TCR clone 336967 (TRBV10-3, TRBJ2-7)
CASKLAVNYEQYF

SEQ ID NO: 673935 - protein, 13 aa, Homo sapiens
  CDR3 for alpha chain variable domain of TCR clone 336968 (TRAV21, TRAJ27)
CAARPGNAGKSTF

SEQ ID NO: 673936 - protein, 14 aa, Homo sapiens
  CDR3 for beta chain variable domain of TCR clone 336968 (TRBV4-1, TRBJ2-2)
CANSQAVNTGELFF

SEQ ID NO: 673937 - protein, 14 aa, Homo sapiens
  CDR3 for alpha chain variable domain of TCR clone 336969 (TRAV16, TRAJ42)
CALLAGGSQGNLIF

SEQ ID NO: 673938 - protein, 13 aa, Homo sapiens
  CDR3 for beta chain variable domain of TCR clone 336969 (TRBV7-9, TRBJ1-2)
RASSLKQNYGYTF

SEQ ID NO: 673939 - protein, 16 aa, Homo sapiens
  CDR3 for alpha chain variable domain of TCR clone 336970 (TRAV3, TRAJ10)
CAVRDMNAGGGNKLTF

SEQ ID NO: 673940 - protein, 20 aa, Homo sapiens
  CDR3 for beta chain variable domain of TCR clone 336970 (TRBV7-8, TRBJ2-2)
CASSHLFPGPTIHITGELFF

SEQ ID NO: 673941 - protein, 15 aa, Homo sapiens
  CDR3 for alpha chain variable domain of TCR clone 336971 (TRAV17, TRAJ45)
CATAELGGGADGLTF

SEQ ID NO: 673942 - protein, 14 aa, Homo sapiens
  CDR3 for beta chain variable domain of TCR clone 336971 (TRBV11-2, TRBJ2-7)
CASSLGAGAYEQYF

SEQ ID NO: 673943 - protein, 12 aa, Homo sapiens
  CDR3 for alpha chain variable domain of TCR clone 336972 (TRAV12-3, TRAJ41)
CALSYSGYALNF

SEQ ID NO: 673944 - protein, 13 aa, Homo sapiens
  CDR3 for beta chain variable domain of TCR clone 336972 (TRBV7-3, TRBJ2-1)
CASSLDSYNEQFF

SEQ ID NO: 673945 - protein, 13 aa, Homo sapiens
  CDR3 for alpha chain variable domain of TCR clone 336973 (TRAV13-1, TRAJ39)
CSKYSNAGNMLTF

SEQ ID NO: 673946 - protein, 16 aa, Homo sapiens
  CDR3 for beta chain variable domain of TCR clone 336973 (TRBV20-1, TRBJ1-4)
CSAPGQGLLTNEKLFF

SEQ ID NO: 673947 - protein, 10 aa, Homo sapiens
  CDR3 for alpha chain variable domain of TCR clone 336974 (TRAV23/DV6, TRAJ57)
CAAGSTLSQG

SEQ ID NO: 673948 - protein, 14 aa, Homo sapiens
  CDR3 for beta chain variable domain of TCR clone 336974 (TRBV25-1, TRBJ1-1)
CDSTHLGGNTEAFF

SEQ ID NO: 673949 - protein, 13 aa, Homo sapiens
  CDR3 for alpha chain variable domain of TCR clone 336975 (TRAV2, TRAJ40)
RAVVTSGTYKYIF

SEQ ID NO: 673950 - protein, 14 aa, Homo sapiens
  CDR3 for beta chain variable domain of TCR clone 336975 (TRBV19, TRBJ2-1)
CASLTFVLSGEQFF

SEQ ID NO: 673951 - protein, 14 aa, Homo sapiens
  CDR3 for alpha chain variable domain of TCR clone 336976 (TRAV17, TRAJ16)
CATADFSDGQKLLF

SEQ ID NO: 673952 - protein, 16 aa, Homo sapiens
  CDR3 for beta chain variable domain of TCR clone 336976 (TRBV20-1, TRBJ2-2)
CSASASGIPGAGELFF

SEQ ID NO: 673953 - protein, 16 aa, Homo sapiens
  CDR3 for alpha chain variable domain of TCR clone 336977 (TRAV30, TRAJ24)
CGTEIVDAESWGKFQF

SEQ ID NO: 673954 - protein, 13 aa, Homo sapiens
  CDR3 for beta chain variable domain of TCR clone 336977 (TRBV11-2, TRBJ2-5)
CASSSTGEETQYF

SEQ ID NO: 673955 - protein, 16 aa, Homo sapiens
  CDR3 for alpha chain variable domain of TCR clone 336978 (TRAV30, TRAJ24)
CGTEIVDADSWGKFQF

SEQ ID NO: 673956 - protein, 15 aa, Homo sapiens
  CDR3 for beta chain variable domain of TCR clone 336978 (TRBV27, TRBJ2-1)
CASSNRGGSSNEQFF

SEQ ID NO: 673957 - protein, 15 aa, Homo sapiens
  CDR3 for alpha chain variable domain of TCR clone 336979 (TRAV3, TRAJ13)
CAVRVYSGGYQKATF

SEQ ID NO: 673958 - protein, 15 aa, Homo sapiens
  CDR3 for beta chain variable domain of TCR clone 336979 (TRBV5-7, TRBJ1-2)
CASSLGVAANYGYTF

SEQ ID NO: 673959 - protein, 12 aa, Homo sapiens
  CDR3 for alpha chain variable domain of TCR clone 336980 (TRAV1-2, TRAJ24)
CAVGGSRGKFQF

SEQ ID NO: 673960 - protein, 13 aa, Homo sapiens
  CDR3 for beta chain variable domain of TCR clone 336980 (TRBV20-1, TRBJ1-1)
CSASKRGLTEAFF

SEQ ID NO: 673961 - protein, 14 aa, Homo sapiens
  CDR3 for alpha chain variable domain of TCR clone 336981 (TRAV13-1, TRAJ44)
CAAKATGTASKLTF

SEQ ID NO: 673962 - protein, 16 aa, Homo sapiens
  CDR3 for beta chain variable domain of TCR clone 336981 (TRBV4-1, TRBJ1-2)
CASSQDAGQVLYGYTF

SEQ ID NO: 673963 - protein, 14 aa, Homo sapiens
  CDR3 for alpha chain variable domain of TCR clone 336982 (TRAV26-1, TRAJ34)
CIVRVAYNTANLIF

SEQ ID NO: 673964 - protein, 15 aa, Homo sapiens
  CDR3 for beta chain variable domain of TCR clone 336982 (TRBV20-1, TRBJ2-7)
CSARVPAAYFYEQYF

SEQ ID NO: 673965 - protein, 15 aa, Homo sapiens
  CDR3 for alpha chain variable domain of TCR clone 336983 (TRAV3, TRAJ20)
CAVRDSRSTDYTLSF

SEQ ID NO: 673966 - protein, 14 aa, Homo sapiens
  CDR3 for beta chain variable domain of TCR clone 336983 (TRBV20-1, TRBJ2-7)
CSARRGNGIYEQYF

SEQ ID NO: 673967 - protein, 13 aa, Homo sapiens
  CDR3 for alpha chain variable domain of TCR clone 336984 (TRAV13-1, TRAJ39)
CAASIWAGNMLTF

SEQ ID NO: 673968 - protein, 15 aa, Homo sapiens
  CDR3 for beta chain variable domain of TCR clone 336984 (TRBV7-3, TRBJ2-1)
CASSPTGGGEVEQFF

SEQ ID NO: 673969 - protein, 13 aa, Homo sapiens
  CDR3 for alpha chain variable domain of TCR clone 336985 (TRAV13-2, TRAJ53)
CAENMGSNYKLTF

SEQ ID NO: 673970 - protein, 13 aa, Homo sapiens
  CDR3 for beta chain variable domain of TCR clone 336985 (TRBV7-2, TRBJ2-1)
CASSLALGGEQFF

SEQ ID NO: 673971 - protein, 11 aa, Homo sapiens
  CDR3 for alpha chain variable domain of TCR clone 336986 (TRAV3, TRAJ21)
CAVGNFSKFYF

SEQ ID NO: 673972 - protein, 15 aa, Homo sapiens
  CDR3 for beta chain variable domain of TCR clone 336986 (TRBV6-6, TRBJ2-7)
CASSYSYGGSYEQYF

SEQ ID NO: 673973 - protein, 12 aa, Homo sapiens
  CDR3 for alpha chain variable domain of TCR clone 336987 (TRAV30, TRAJ39)
CGRGNAGNMLTF

SEQ ID NO: 673974 - protein, 13 aa, Homo sapiens
  CDR3 for beta chain variable domain of TCR clone 336987 (TRBV20-1, TRBJ1-1)
CSARVGGNTEAFF

SEQ ID NO: 673975 - protein, 12 aa, Homo sapiens
  CDR3 for alpha chain variable domain of TCR clone 336988 (TRAV12-2, TRAJ10)
WGVTGGGNKLTF

SEQ ID NO: 673976 - protein, 14 aa, Homo sapiens
  CDR3 for beta chain variable domain of TCR clone 336988 (TRBV6-1, TRBJ1-3)
CASVQGGGGNTIYF

SEQ ID NO: 673977 - protein, 16 aa, Homo sapiens
  CDR3 for alpha chain variable domain of TCR clone 336989 (TRAV30, TRAJ24)
CGTEIVDADSWGKFRF

SEQ ID NO: 673978 - protein, 18 aa, Homo sapiens
  CDR3 for beta chain variable domain of TCR clone 336989 (TRBV11-2, TRBJ2-6)
CASSLNPFLGTGANVLTF

SEQ ID NO: 673979 - protein, 15 aa, Homo sapiens
  CDR3 for alpha chain variable domain of TCR clone 336990 (TRAV12-1, TRAJ44)
CAADLPTGTASKLTF

SEQ ID NO: 673980 - protein, 13 aa, Homo sapiens
  CDR3 for beta chain variable domain of TCR clone 336990 (TRBV6-5, TRBJ2-5)
CASSPQGGETQYF

SEQ ID NO: 673981 - protein, 15 aa, Homo sapiens
  CDR3 for alpha chain variable domain of TCR clone 336991 (TRAV3, TRAJ20)
CAARDIKLSDYKPSF

SEQ ID NO: 673982 - protein, 15 aa, Homo sapiens
  CDR3 for beta chain variable domain of TCR clone 336991 (TRBV7-9, TRBJ1-6)
CASSSPGRGNSPLHF

SEQ ID NO: 673983 - protein, 15 aa, Homo sapiens
  CDR3 for alpha chain variable domain of TCR clone 336992 (TRAV3, TRAJ3)
CAVGDRDSSASKIIF

SEQ ID NO: 673984 - protein, 15 aa, Homo sapiens
  CDR3 for beta chain variable domain of TCR clone 336992 (TRBV29-1, TRBJ2-7)
CSVEFFDRGSYEQYF

SEQ ID NO: 673985 - protein, 18 aa, Homo sapiens
  CDR3 for alpha chain variable domain of TCR clone 336993 (TRAV13-1, TRAJ52)
CAASKRSAGGTSYGKLTC

SEQ ID NO: 673986 - protein, 13 aa, Homo sapiens
  CDR3 for beta chain variable domain of TCR clone 336993 (TRBV7-3, TRBJ2-7)
CASSSGANYEQYF

SEQ ID NO: 673987 - protein, 16 aa, Homo sapiens
  CDR3 for alpha chain variable domain of TCR clone 336994 (TRAV21, TRAJ45)
CAVSWGSGGGAYGLTF

SEQ ID NO: 673988 - protein, 13 aa, Homo sapiens
  CDR3 for beta chain variable domain of TCR clone 336994 (TRBV7-3, TRBJ1-1)
CASSQDWGAEAFF

SEQ ID NO: 673989 - protein, 14 aa, Homo sapiens
  CDR3 for alpha chain variable domain of TCR clone 336995 (TRAV36/DV7, TRAJ40)
CAVETTSGTYNYIF

SEQ ID NO: 673990 - protein, 13 aa, Homo sapiens
  CDR3 for beta chain variable domain of TCR clone 336995 (TRBV10-3, TRBJ2-5)
CAMTSGAGETQYF

SEQ ID NO: 673991 - protein, 11 aa, Homo sapiens
  CDR3 for alpha chain variable domain of TCR clone 336996 (TRAV3, TRAJ21)
CAVGHFNKFYF

SEQ ID NO: 673992 - protein, 16 aa, Homo sapiens
  CDR3 for beta chain variable domain of TCR clone 336996 (TRBV19, TRBJ2-1)
CASSKAGPSSHNEQFF

SEQ ID NO: 673993 - protein, 18 aa, Homo sapiens
  CDR3 for alpha chain variable domain of TCR clone 336997 (TRAV26-2, TRAJ33)
CCVLLHPEEPASNYQLIW

SEQ ID NO: 673994 - protein, 13 aa, Homo sapiens
  CDR3 for beta chain variable domain of TCR clone 336997 (TRBV24-1, TRBJ2-2)
CATSDWSTGGLFF

SEQ ID NO: 673995 - protein, 13 aa, Homo sapiens
  CDR3 for alpha chain variable domain of TCR clone 336998 (TRAV12-1, TRAJ6)
CVVYPGGSYIPTL

SEQ ID NO: 673996 - protein, 13 aa, Homo sapiens
  CDR3 for beta chain variable domain of TCR clone 336998 (TRBV4-2, TRBJ1-1)
CASSQAGNTEAFF

SEQ ID NO: 673997 - protein, 11 aa, Homo sapiens
  CDR3 for alpha chain variable domain of TCR clone 336999 (TRAV2, TRAJ33)
CAVESNYQLIW

SEQ ID NO: 673998 - protein, 13 aa, Homo sapiens
  CDR3 for beta chain variable domain of TCR clone 336999 (TRBV27, TRBJ1-4)
CAISLMGDEKLFF

SEQ ID NO: 673999 - protein, 14 aa, Homo sapiens
  CDR3 for alpha chain variable domain of TCR clone 337000 (TRAV17, TRAJ22)
RATSPSGSARQLTF

SEQ ID NO: 674000 - protein, 14 aa, Homo sapiens
  CDR3 for beta chain variable domain of TCR clone 337000 (TRBV25-1, TRBJ1-1)
CASTHLGGNTEAFF

SEQ ID NO: 674001 - protein, 12 aa, Homo sapiens
  CDR3 for alpha chain variable domain of TCR clone 337001 (TRAV27, TRAJ21)
CAGVRQLQQILL

SEQ ID NO: 674002 - protein, 17 aa, Homo sapiens
  CDR3 for beta chain variable domain of TCR clone 337001 (TRBV24-1, TRBJ2-1)
CATSDVSTSGTYNEQFF

SEQ ID NO: 674003 - protein, 17 aa, Homo sapiens
  CDR3 for alpha chain variable domain of TCR clone 337002 (TRAV3, TRAJ6)
CAVRDGPRAGGSYISTF

SEQ ID NO: 674004 - protein, 13 aa, Homo sapiens
  CDR3 for beta chain variable domain of TCR clone 337002 (TRBV4-2, TRBJ1-1)
CASSQAGNTEAFF

SEQ ID NO: 674005 - protein, 12 aa, Homo sapiens
  CDR3 for alpha chain variable domain of TCR clone 337003 (TRAV13-1, TRAJ9)
CASHTGGFKTIF

SEQ ID NO: 674006 - protein, 13 aa, Homo sapiens
  CDR3 for beta chain variable domain of TCR clone 337003 (TRBV12-4, TRBJ1-2)
CASSSWSKDGYTF

SEQ ID NO: 674007 - protein, 16 aa, Homo sapiens
  CDR3 for alpha chain variable domain of TCR clone 337004 (TRAV30, TRAJ24)
CGTEIVDADSWGKFQF

SEQ ID NO: 674008 - protein, 16 aa, Homo sapiens
  CDR3 for beta chain variable domain of TCR clone 337004 (TRBV11-1, TRBJ2-7)
CASSAQTGTLSYEQYF

SEQ ID NO: 674009 - protein, 14 aa, Homo sapiens
  CDR3 for alpha chain variable domain of TCR clone 337005 (TRAV22, TRAJ28)
CAVYSGAGSYQLTF

SEQ ID NO: 674010 - protein, 14 aa, Homo sapiens
  CDR3 for beta chain variable domain of TCR clone 337005 (TRBV12-4, TRBJ1-3)
CASTLTGAGNTIYF

SEQ ID NO: 674011 - protein, 17 aa, Homo sapiens
  CDR3 for alpha chain variable domain of TCR clone 337006 (TRAV8-6, TRAJ58)
CAVSSWVGETSGSRLTF

SEQ ID NO: 674012 - protein, 15 aa, Homo sapiens
  CDR3 for beta chain variable domain of TCR clone 337006 (TRBV20-1, TRBJ2-7)
CSSRDRVSGMDEQYF

SEQ ID NO: 674013 - protein, 13 aa, Homo sapiens
  CDR3 for alpha chain variable domain of TCR clone 337007 (TRAV14/DV4, TRAJ4)
CAMKAGGYNKLIF

SEQ ID NO: 674014 - protein, 13 aa, Homo sapiens
  CDR3 for beta chain variable domain of TCR clone 337007 (TRBV10-3, TRBJ2-7)
CASKLAVNYEQYF

SEQ ID NO: 674015 - protein, 16 aa, Homo sapiens
  CDR3 for alpha chain variable domain of TCR clone 337008 (TRAV12-3, TRAJ4)
CAMARLFSGGYNKLIF

SEQ ID NO: 674016 - protein, 16 aa, Homo sapiens
  CDR3 for beta chain variable domain of TCR clone 337008 (TRBV27, TRBJ2-1)
CASSARLAGVYNEQFF

SEQ ID NO: 674017 - protein, 14 aa, Homo sapiens
  CDR3 for alpha chain variable domain of TCR clone 337009 (TRAV12-3, TRAJ57)
CAMSAWGGSERLVF

SEQ ID NO: 674018 - protein, 16 aa, Homo sapiens
  CDR3 for beta chain variable domain of TCR clone 337009 (TRBV7-3, TRBJ2-2)
CASSLKRGTLSGELFF

SEQ ID NO: 674019 - protein, 13 aa, Homo sapiens
  CDR3 for alpha chain variable domain of TCR clone 337010 (TRAV20, TRAJ31)
CAVHEIGGARLMF

SEQ ID NO: 674020 - protein, 14 aa, Homo sapiens
  CDR3 for beta chain variable domain of TCR clone 337010 (TRBV2, TRBJ1-5)
CASSGTVSNQPQHF

SEQ ID NO: 674021 - protein, 13 aa, Homo sapiens
  CDR3 for alpha chain variable domain of TCR clone 337011 (TRAV8-6, TRAJ41)
CAVSENSGYALNF

SEQ ID NO: 674022 - protein, 13 aa, Homo sapiens
  CDR3 for beta chain variable domain of TCR clone 337011 (TRBV7-9, TRBJ2-3)
CASSPGSTDTQYF

SEQ ID NO: 674023 - protein, 16 aa, Homo sapiens
  CDR3 for alpha chain variable domain of TCR clone 337012 (TRAV38-1, TRAJ37)
CASKGDGSSNTGKLIF

SEQ ID NO: 674024 - protein, 13 aa, Homo sapiens
  CDR3 for beta chain variable domain of TCR clone 337012 (TRBV12-4, TRBJ2-5)
CASSLFRRETQYF

SEQ ID NO: 674025 - protein, 15 aa, Homo sapiens
  CDR3 for alpha chain variable domain of TCR clone 337013 (TRAV8-6, TRAJ11)
CAANFMNSGYSTLTF

SEQ ID NO: 674026 - protein, 15 aa, Homo sapiens
  CDR3 for beta chain variable domain of TCR clone 337013 (TRBV5-1, TRBJ2-7)
CASSLNGGPAREQYF

SEQ ID NO: 674027 - protein, 14 aa, Homo sapiens
  CDR3 for alpha chain variable domain of TCR clone 337014 (TRAV9-2, TRAJ39)
CALYIYNAGNMLTF

SEQ ID NO: 674028 - protein, 13 aa, Homo sapiens
  CDR3 for beta chain variable domain of TCR clone 337014 (TRBV13, TRBJ1-1)
CASSPRMNTEAFF

SEQ ID NO: 674029 - protein, 16 aa, Homo sapiens
  CDR3 for alpha chain variable domain of TCR clone 337015 (TRAV30, TRAJ24)
CGTEIVDADSWGKFQF

SEQ ID NO: 674030 - protein, 14 aa, Homo sapiens
  CDR3 for beta chain variable domain of TCR clone 337015 (TRBV11-2, TRBJ2-3)
CASSLLAGTDTQYF

SEQ ID NO: 674031 - protein, 13 aa, Homo sapiens
  CDR3 for alpha chain variable domain of TCR clone 337016 (TRAV12-2, TRAJ4)
CAGFSGGYDKLIF

SEQ ID NO: 674032 - protein, 13 aa, Homo sapiens
  CDR3 for beta chain variable domain of TCR clone 337016 (TRBV7-9, TRBJ1-2)
CASSLKQNYGYTF

SEQ ID NO: 674033 - protein, 14 aa, Homo sapiens
  CDR3 for alpha chain variable domain of TCR clone 337017 (TRAV12-1, TRAJ23)
CVVIVYNQGGKLIF

SEQ ID NO: 674034 - protein, 16 aa, Homo sapiens
  CDR3 for beta chain variable domain of TCR clone 337017 (TRBV19, TRBJ2-1)
CASSKAGPSSYNEQFF

SEQ ID NO: 674035 - protein, 12 aa, Homo sapiens
  CDR3 for alpha chain variable domain of TCR clone 337018 (TRAV12-2, TRAJ43)
CAVNVNNNDLRF

SEQ ID NO: 674036 - protein, 14 aa, Homo sapiens
  CDR3 for beta chain variable domain of TCR clone 337018 (TRBV12-5, TRBJ2-5)
CASGSRTHQETQYF

SEQ ID NO: 674037 - protein, 17 aa, Homo sapiens
  CDR3 for alpha chain variable domain of TCR clone 337019 (TRAV26-1, TRAJ53)
CIVRVDDSGGSNYKLTF

SEQ ID NO: 674038 - protein, 14 aa, Homo sapiens
  CDR3 for beta chain variable domain of TCR clone 337019 (TRBV12-4, TRBJ1-2)
CASSPLGTVGGYTF

SEQ ID NO: 674039 - protein, 14 aa, Homo sapiens
  CDR3 for alpha chain variable domain of TCR clone 337020 (TRAV12-1, TRAJ30)
CLVNIGGRDDKIIF

SEQ ID NO: 674040 - protein, 13 aa, Homo sapiens
  CDR3 for beta chain variable domain of TCR clone 337020 (TRBV12-5, TRBJ2-1)
CASGLGRGNEQFF

SEQ ID NO: 674041 - protein, 13 aa, Homo sapiens
  CDR3 for alpha chain variable domain of TCR clone 337021 (TRAV13-1, TRAJ12)
CVASPDSSYKLIF

SEQ ID NO: 674042 - protein, 15 aa, Homo sapiens
  CDR3 for beta chain variable domain of TCR clone 337021 (TRBV18, TRBJ2-1)
CASSPPSASYNEQFF

SEQ ID NO: 674043 - protein, 12 aa, Homo sapiens
  CDR3 for alpha chain variable domain of TCR clone 337022 (TRAV10, TRAJ43)
CVVVRVGNDMRF

SEQ ID NO: 674044 - protein, 15 aa, Homo sapiens
  CDR3 for beta chain variable domain of TCR clone 337022 (TRBV7-2, TRBJ2-2)
CASSFQRGETGELFL

SEQ ID NO: 674045 - protein, 23 aa, Homo sapiens
  CDR3 for alpha chain variable domain of TCR clone 337023 (TRAV8-3, TRAJ6)
CAVGGEEATYLHLEEEPAFLFIR

SEQ ID NO: 674046 - protein, 17 aa, Homo sapiens
  CDR3 for beta chain variable domain of TCR clone 337023 (TRBV7-2, TRBJ2-3)
CASSLAGGLAGTAGQYF

SEQ ID NO: 674047 - protein, 16 aa, Homo sapiens
  CDR3 for alpha chain variable domain of TCR clone 337024 (TRAV17, TRAJ52)
CATGIIGGTSYGKLTF

SEQ ID NO: 674048 - protein, 12 aa, Homo sapiens
  CDR3 for beta chain variable domain of TCR clone 337024 (TRBV7-3, TRBJ2-1)
CASSFINNVQFF

SEQ ID NO: 674049 - protein, 15 aa, Homo sapiens
  CDR3 for alpha chain variable domain of TCR clone 337025 (TRAV34, TRAJ38)
CGADLTPGNNRKLIW

SEQ ID NO: 674050 - protein, 14 aa, Homo sapiens
  CDR3 for beta chain variable domain of TCR clone 337025 (TRBV20-1, TRBJ2-1)
CSAQIGGSANEQFF

SEQ ID NO: 674051 - protein, 13 aa, Homo sapiens
  CDR3 for alpha chain variable domain of TCR clone 337026 (TRAV12-3, TRAJ13)
CAMSPWGYQKVTF

SEQ ID NO: 674052 - protein, 13 aa, Homo sapiens
  CDR3 for beta chain variable domain of TCR clone 337026 (TRBV20-1, TRBJ1-1)
CSAPPGGHTEAFF

SEQ ID NO: 674053 - protein, 14 aa, Homo sapiens
  CDR3 for alpha chain variable domain of TCR clone 337027 (TRAV26-1, TRAJ38)
CIADNAGKNRKLIW

SEQ ID NO: 674054 - protein, 16 aa, Homo sapiens
  CDR3 for beta chain variable domain of TCR clone 337027 (TRBV19, TRBJ2-1)
CASSKAGPSSYNEQFF

SEQ ID NO: 674055 - protein, 17 aa, Homo sapiens
  CDR3 for alpha chain variable domain of TCR clone 337028 (TRAV3, TRAJ13)
CAVRDMRRTGGYQKVTF

SEQ ID NO: 674056 - protein, 14 aa, Homo sapiens
  CDR3 for beta chain variable domain of TCR clone 337028 (TRBV5-1, TRBJ2-7)
CASSLTGGGYEQYF

SEQ ID NO: 674057 - protein, 12 aa, Homo sapiens
  CDR3 for alpha chain variable domain of TCR clone 337029 (TRAV21, TRAJ23)
CAVGPQGGKLIF

SEQ ID NO: 674058 - protein, 13 aa, Homo sapiens
  CDR3 for beta chain variable domain of TCR clone 337029 (TRBV20-1, TRBJ2-7)
CSARTGAGYERYF

SEQ ID NO: 674059 - protein, 14 aa, Homo sapiens
  CDR3 for alpha chain variable domain of TCR clone 337030 (TRAV21, TRAJ52)
CGRAGGTSCGKLTF

SEQ ID NO: 674060 - protein, 14 aa, Homo sapiens
  CDR3 for beta chain variable domain of TCR clone 337030 (TRBV19, TRBJ1-2)
CASSVLGYNYGYTF

SEQ ID NO: 674061 - protein, 11 aa, Homo sapiens
  CDR3 for alpha chain variable domain of TCR clone 337031 (TRAV3, TRAJ21)
CAVGNCNKFYF

SEQ ID NO: 674062 - protein, 16 aa, Homo sapiens
  CDR3 for beta chain variable domain of TCR clone 337031 (TRBV19, TRBJ2-1)
CASSKAGPSSYDEQFF

SEQ ID NO: 674063 - protein, 15 aa, Homo sapiens
  CDR3 for alpha chain variable domain of TCR clone 337032 (TRAV4, TRAJ39)
CLVGPNNNAGNLLTF

SEQ ID NO: 674064 - protein, 14 aa, Homo sapiens
  CDR3 for beta chain variable domain of TCR clone 337032 (TRBV19, TRBJ2-7)
CASNFRDTFTGMYF

SEQ ID NO: 674065 - protein, 14 aa, Homo sapiens
  CDR3 for alpha chain variable domain of TCR clone 337033 (TRAV9-2, TRAJ39)
CALYIYNAGNMLTF

SEQ ID NO: 674066 - protein, 16 aa, Homo sapiens
  CDR3 for beta chain variable domain of TCR clone 337033 (TRBV28, TRBJ2-7)
CASSLFFETGGPEQYF

SEQ ID NO: 674067 - protein, 11 aa, Homo sapiens
  CDR3 for alpha chain variable domain of TCR clone 337034 (TRAV16, TRAJ26)
CALTRWSEFCL

SEQ ID NO: 674068 - protein, 13 aa, Homo sapiens
  CDR3 for beta chain variable domain of TCR clone 337034 (TRBV15, TRBJ2-7)
CATSTTGHYEQYF

SEQ ID NO: 674069 - protein, 14 aa, Homo sapiens
  CDR3 for alpha chain variable domain of TCR clone 337035 (TRAV8-4, TRAJ9)
CAVRINTGGFKTIF

SEQ ID NO: 674070 - protein, 15 aa, Homo sapiens
  CDR3 for beta chain variable domain of TCR clone 337035 (TRBV10-2, TRBJ2-6)
CATSEQGTGANVLTF

SEQ ID NO: 674071 - protein, 14 aa, Homo sapiens
  CDR3 for alpha chain variable domain of TCR clone 337036 (TRAV1-2, TRAJ8)
CAVREDTGFQKLVF

SEQ ID NO: 674072 - protein, 15 aa, Homo sapiens
  CDR3 for beta chain variable domain of TCR clone 337036 (TRBV12-4, TRBJ1-1)
CQQQDRVVANTEAFF

SEQ ID NO: 674073 - protein, 16 aa, Homo sapiens
  CDR3 for alpha chain variable domain of TCR clone 337037 (TRAV1-2, TRAJ10)
CAVRGVLTGGGNKLTF

SEQ ID NO: 674074 - protein, 13 aa, Homo sapiens
  CDR3 for beta chain variable domain of TCR clone 337037 (TRBV18, TRBJ1-1)
CASSGGRNTEALF

SEQ ID NO: 674075 - protein, 14 aa, Homo sapiens
  CDR3 for alpha chain variable domain of TCR clone 337038 (TRAV1-1, TRAJ28)
CAAPSGAGSYQLTF

SEQ ID NO: 674076 - protein, 12 aa, Homo sapiens
  CDR3 for beta chain variable domain of TCR clone 337038 (TRBV7-3, TRBJ2-1)
CASSLINNEQFF

SEQ ID NO: 674077 - protein, 14 aa, Homo sapiens
  CDR3 for alpha chain variable domain of TCR clone 337039 (TRAV13-1, TRAJ40)
CAASMTSGTYKYIP

SEQ ID NO: 674078 - protein, 13 aa, Homo sapiens
  CDR3 for beta chain variable domain of TCR clone 337039 (TRBV20-1, TRBJ1-1)
CSARGGGNTEAFF

SEQ ID NO: 674079 - protein, 12 aa, Homo sapiens
  CDR3 for alpha chain variable domain of TCR clone 337040 (TRAV17, TRAJ26)
CATVGYGQNFVF

SEQ ID NO: 674080 - protein, 13 aa, Homo sapiens
  CDR3 for beta chain variable domain of TCR clone 337040 (TRBV20-1, TRBJ2-7)
CSATHTSGYEQYF

SEQ ID NO: 674081 - protein, 10 aa, Homo sapiens
  CDR3 for alpha chain variable domain of TCR clone 337041 (TRAV39, TRAJ49)
CAVAGNQLYF

SEQ ID NO: 674082 - protein, 14 aa, Homo sapiens
  CDR3 for beta chain variable domain of TCR clone 337041 (TRBV7-8, TRBJ2-7)
CASSPRDRVHEQYF

SEQ ID NO: 674083 - protein, 12 aa, Homo sapiens
  CDR3 for alpha chain variable domain of TCR clone 337042 (TRAV17, TRAJ4)
CATDGGYNKLIF

SEQ ID NO: 674084 - protein, 17 aa, Homo sapiens
  CDR3 for beta chain variable domain of TCR clone 337042 (TRBV5-5, TRBJ1-2)
CASSLGSLDGQSEGYTF

SEQ ID NO: 674085 - protein, 15 aa, Homo sapiens
  CDR3 for alpha chain variable domain of TCR clone 337043 (TRAV26-1, TRAJ29)
CIARVEGSGNTPLVC

SEQ ID NO: 674086 - protein, 14 aa, Homo sapiens
  CDR3 for beta chain variable domain of TCR clone 337043 (TRBV18, TRBJ2-5)
CASSPGVSQETQYF

SEQ ID NO: 674087 - protein, 14 aa, Homo sapiens
  CDR3 for alpha chain variable domain of TCR clone 337044 (TRAV17, TRAJ31)
CATVLRNNNARLMF

SEQ ID NO: 674088 - protein, 15 aa, Homo sapiens
  CDR3 for beta chain variable domain of TCR clone 337044 (TRBV13, TRBJ2-1)
CASSLLSGLNNEQFF

SEQ ID NO: 674089 - protein, 11 aa, Homo sapiens
  CDR3 for alpha chain variable domain of TCR clone 337045 (TRAV16, TRAJ31)
CALFNNARLMF

SEQ ID NO: 674090 - protein, 11 aa, Homo sapiens
  CDR3 for beta chain variable domain of TCR clone 337045 (TRBV11-2, TRBJ1-1)
CASSINTEAFF

SEQ ID NO: 674091 - protein, 14 aa, Homo sapiens
  CDR3 for alpha chain variable domain of TCR clone 337046 (TRAV12-1, TRAJ10)
CVAILTGGGNKLTF

SEQ ID NO: 674092 - protein, 15 aa, Homo sapiens
  CDR3 for beta chain variable domain of TCR clone 337046 (TRBV20-1, TRBJ2-7)
CSARGFRPQTDEQYF

SEQ ID NO: 674093 - protein, 15 aa, Homo sapiens
  CDR3 for alpha chain variable domain of TCR clone 337047 (TRAV26-1, TRAJ29)
CIVRVEGSGNTPLVF

SEQ ID NO: 674094 - protein, 15 aa, Homo sapiens
  CDR3 for beta chain variable domain of TCR clone 337047 (TRBV7-3, TRBJ2-2)
CASSETGQGTGELFF

SEQ ID NO: 674095 - protein, 13 aa, Homo sapiens
  CDR3 for alpha chain variable domain of TCR clone 337048 (TRAV3, TRAJ36)
CAVKDTGANNPFF

SEQ ID NO: 674096 - protein, 15 aa, Homo sapiens
  CDR3 for beta chain variable domain of TCR clone 337048 (TRBV24-1, TRBJ2-1)
CATSGSGGFYNEQFF

SEQ ID NO: 674097 - protein, 15 aa, Homo sapiens
  CDR3 for alpha chain variable domain of TCR clone 337049 (TRAV12-1, TRAJ52)
CVGNAGGTSYGKLTF

SEQ ID NO: 674098 - protein, 14 aa, Homo sapiens
  CDR3 for beta chain variable domain of TCR clone 337049 (TRBV7-3, TRBJ2-2)
CASSPDPSGRELFC

SEQ ID NO: 674099 - protein, 15 aa, Homo sapiens
  CDR3 for alpha chain variable domain of TCR clone 337050 (TRAV12-3, TRAJ6)
CAMSATTGGSYIPTF

SEQ ID NO: 674100 - protein, 15 aa, Homo sapiens
  CDR3 for beta chain variable domain of TCR clone 337050 (TRBV12-4, TRBJ2-5)
CASSPSTGLQETQYF

SEQ ID NO: 674101 - protein, 16 aa, Homo sapiens
  CDR3 for alpha chain variable domain of TCR clone 337051 (TRAV14/DV4, TRAJ20)
CAMREGRSRDDYKLSF

SEQ ID NO: 674102 - protein, 15 aa, Homo sapiens
  CDR3 for beta chain variable domain of TCR clone 337051 (TRBV19, TRBJ1-2)
CASSVGQVLNYGYTF

SEQ ID NO: 674103 - protein, 14 aa, Homo sapiens
  CDR3 for alpha chain variable domain of TCR clone 337052 (TRAV35, TRAJ33)
CAGSSQDSNYQLIW

SEQ ID NO: 674104 - protein, 21 aa, Homo sapiens
  CDR3 for beta chain variable domain of TCR clone 337052 (TRBV5-1, TRBJ1-4)
GTRPFIFAPAAWKDGNEELFF

SEQ ID NO: 674105 - protein, 16 aa, Homo sapiens
  CDR3 for alpha chain variable domain of TCR clone 337053 (TRAV30, TRAJ24)
CGTEIVDADSWGKFPF

SEQ ID NO: 674106 - protein, 15 aa, Homo sapiens
  CDR3 for beta chain variable domain of TCR clone 337053 (TRBV9, TRBJ1-6)
CASSVAGTGDSPLHF

SEQ ID NO: 674107 - protein, 14 aa, Homo sapiens
  CDR3 for alpha chain variable domain of TCR clone 337054 (TRAV3, TRAJ22)
CVVIDYGSARQLTF

SEQ ID NO: 674108 - protein, 13 aa, Homo sapiens
  CDR3 for beta chain variable domain of TCR clone 337054 (TRBV11-2, TRBJ2-5)
CASGHGAKETQYF

SEQ ID NO: 674109 - protein, 14 aa, Homo sapiens
  CDR3 for alpha chain variable domain of TCR clone 337055 (TRAV1-2, TRAJ8)
CAVRDPPGFQKLVF

SEQ ID NO: 674110 - protein, 14 aa, Homo sapiens
  CDR3 for beta chain variable domain of TCR clone 337055 (TRBV7-2, TRBJ2-7)
CASSPKTSFYEQYF

SEQ ID NO: 674111 - protein, 13 aa, Homo sapiens
  CDR3 for alpha chain variable domain of TCR clone 337056 (TRAV8-6, TRAJ7)
CAVSDYGNNRLAF

SEQ ID NO: 674112 - protein, 15 aa, Homo sapiens
  CDR3 for beta chain variable domain of TCR clone 337056 (TRBV6-1, TRBJ2-5)
CASGLTSGGAETQYF

SEQ ID NO: 674113 - protein, 12 aa, Homo sapiens
  CDR3 for alpha chain variable domain of TCR clone 337057 (TRAV22, TRAJ22)
CAPGGSARQLTF

SEQ ID NO: 674114 - protein, 13 aa, Homo sapiens
  CDR3 for beta chain variable domain of TCR clone 337057 (TRBV10-3, TRBJ2-7)
CASKLAVNYEQYF

SEQ ID NO: 674115 - protein, 14 aa, Homo sapiens
  CDR3 for alpha chain variable domain of TCR clone 337058 (TRAV12-2, TRAJ44)
CAVNPAGTASKLTF

SEQ ID NO: 674116 - protein, 16 aa, Homo sapiens
  CDR3 for beta chain variable domain of TCR clone 337058 (TRBV7-2, TRBJ2-5)
CASSPFPTGGEETQYF

SEQ ID NO: 674117 - protein, 12 aa, Homo sapiens
  CDR3 for alpha chain variable domain of TCR clone 337059 (TRAV20, TRAJ56)
CAVTGANSKLTF

SEQ ID NO: 674118 - protein, 15 aa, Homo sapiens
  CDR3 for beta chain variable domain of TCR clone 337059 (TRBV7-2, TRBJ2-1)
CASSSGLAGGNEQFF

SEQ ID NO: 674119 - protein, 14 aa, Homo sapiens
  CDR3 for alpha chain variable domain of TCR clone 337060 (TRAV1-2, TRAJ8)
CAVREDTGFQKLVF

SEQ ID NO: 674120 - protein, 15 aa, Homo sapiens
  CDR3 for beta chain variable domain of TCR clone 337060 (TRBV7-9, TRBJ1-1)
CASSPELGGGTEAFF

SEQ ID NO: 674121 - protein, 13 aa, Homo sapiens
  CDR3 for alpha chain variable domain of TCR clone 337061 (TRAV9-2, TRAJ17)
CAPFKAAGNKLTF

SEQ ID NO: 674122 - protein, 11 aa, Homo sapiens
  CDR3 for beta chain variable domain of TCR clone 337061 (TRBV13, TRBJ2-1)
CQQLRRPEQFF

SEQ ID NO: 674123 - protein, 15 aa, Homo sapiens
  CDR3 for alpha chain variable domain of TCR clone 337062 (TRAV13-1, TRAJ17)
CAASIERAAGNKLTF

SEQ ID NO: 674124 - protein, 14 aa, Homo sapiens
  CDR3 for beta chain variable domain of TCR clone 337062 (TRBV4-1, TRBJ2-2)
RASSQAVNTGELFF

SEQ ID NO: 674125 - protein, 14 aa, Homo sapiens
  CDR3 for alpha chain variable domain of TCR clone 337063 (TRAV8-3, TRAJ31)
CALGRGLNNARLMF

SEQ ID NO: 674126 - protein, 15 aa, Homo sapiens
  CDR3 for beta chain variable domain of TCR clone 337063 (TRBV7-2, TRBJ2-2)
CASSLAGGLTGELFF

SEQ ID NO: 674127 - protein, 11 aa, Homo sapiens
  CDR3 for alpha chain variable domain of TCR clone 337064 (TRAV1-1, TRAJ23)
CAVRQGGKLIF

SEQ ID NO: 674128 - protein, 15 aa, Homo sapiens
  CDR3 for beta chain variable domain of TCR clone 337064 (TRBV7-2, TRBJ1-2)
CASSLVSGGDYGYTF

SEQ ID NO: 674129 - protein, 11 aa, Homo sapiens
  CDR3 for alpha chain variable domain of TCR clone 337065 (TRAV21, TRAJ48)
CAVDGNEKLTF

SEQ ID NO: 674130 - protein, 16 aa, Homo sapiens
  CDR3 for beta chain variable domain of TCR clone 337065 (TRBV12-4, TRBJ1-5)
CASSSVPRGSNQPQHF

SEQ ID NO: 674131 - protein, 14 aa, Homo sapiens
  CDR3 for alpha chain variable domain of TCR clone 337066 (TRAV12-2, TRAJ17)
CAVLFKAAGNKLTF

SEQ ID NO: 674132 - protein, 17 aa, Homo sapiens
  CDR3 for beta chain variable domain of TCR clone 337066 (TRBV5-1, TRBJ2-1)
CASSLGQISFSYNEQFF

SEQ ID NO: 674133 - protein, 15 aa, Homo sapiens
  CDR3 for alpha chain variable domain of TCR clone 337067 (TRAV12-1, TRAJ4)
CVVNPFSGGYNKLIF

SEQ ID NO: 674134 - protein, 16 aa, Homo sapiens
  CDR3 for beta chain variable domain of TCR clone 337067 (TRBV5-1, TRBJ1-1)
CASSKTGTEVGNEAFF

SEQ ID NO: 674135 - protein, 13 aa, Homo sapiens
  CDR3 for alpha chain variable domain of TCR clone 337068 (TRAV12-3, TRAJ53)
CAMRGGSNYKLTF

SEQ ID NO: 674136 - protein, 14 aa, Homo sapiens
  CDR3 for beta chain variable domain of TCR clone 337068 (TRBV7-2, TRBJ1-1)
CASIFLTGTTEAFF

SEQ ID NO: 674137 - protein, 16 aa, Homo sapiens
  CDR3 for alpha chain variable domain of TCR clone 337069 (TRAV27, TRAJ45)
CPPRGRRGGGADGLTF

SEQ ID NO: 674138 - protein, 15 aa, Homo sapiens
  CDR3 for beta chain variable domain of TCR clone 337069 (TRBV20-1, TRBJ1-1)
CSASRGVTGNTEAFF

SEQ ID NO: 674139 - protein, 15 aa, Homo sapiens
  CDR3 for alpha chain variable domain of TCR clone 337070 (TRAV27, TRAJ38)
CAARRNAGNNRKLIW

SEQ ID NO: 674140 - protein, 16 aa, Homo sapiens
  CDR3 for beta chain variable domain of TCR clone 337070 (TRBV5-4, TRBJ2-3)
CASSWGTSGGTDTQYF

SEQ ID NO: 674141 - protein, 14 aa, Homo sapiens
  CDR3 for alpha chain variable domain of TCR clone 337071 (TRAV36/DV7, TRAJ44)
CCGANTGTASKLTF

SEQ ID NO: 674142 - protein, 14 aa, Homo sapiens
  CDR3 for beta chain variable domain of TCR clone 337071 (TRBV9, TRBJ2-7)
CASSVGVGSYEQYF

SEQ ID NO: 674143 - protein, 14 aa, Homo sapiens
  CDR3 for alpha chain variable domain of TCR clone 337072 (TRAV13-1, TRAJ44)
CEAKATGTASKLTF

SEQ ID NO: 674144 - protein, 17 aa, Homo sapiens
  CDR3 for beta chain variable domain of TCR clone 337072 (TRBV7-3, TRBJ2-3)
RASSLMKRMRGADTQYF

SEQ ID NO: 674145 - protein, 10 aa, Homo sapiens
  CDR3 for alpha chain variable domain of TCR clone 337073 (TRAV16, TRAJ26)
CALSGSEFCL

SEQ ID NO: 674146 - protein, 12 aa, Homo sapiens
  CDR3 for beta chain variable domain of TCR clone 337073 (TRBV11-2, TRBJ2-2)
CASSLGGGELFF

SEQ ID NO: 674147 - protein, 11 aa, Homo sapiens
  CDR3 for alpha chain variable domain of TCR clone 337074 (TRAV35, TRAJ30)
CAPGGEDKIIF

SEQ ID NO: 674148 - protein, 11 aa, Homo sapiens
  CDR3 for beta chain variable domain of TCR clone 337074 (TRBV7-6, TRBJ2-1)
CASSLGGGQMS

SEQ ID NO: 674149 - protein, 15 aa, Homo sapiens
  CDR3 for alpha chain variable domain of TCR clone 337075 (TRAV12-3, TRAJ6)
CAMSASTGESYIPTF

SEQ ID NO: 674150 - protein, 16 aa, Homo sapiens
  CDR3 for beta chain variable domain of TCR clone 337075 (TRBV20-1, TRBJ1-2)
CSASMGQGVANYGYTF

SEQ ID NO: 674151 - protein, 15 aa, Homo sapiens
  CDR3 for alpha chain variable domain of TCR clone 337076 (TRAV3, TRAJ5)
CAVRDRKTGRRALTF

SEQ ID NO: 674152 - protein, 16 aa, Homo sapiens
  CDR3 for beta chain variable domain of TCR clone 337076 (TRBV6-1, TRBJ2-5)
CASSETLDRGAETQYF

SEQ ID NO: 674153 - protein, 14 aa, Homo sapiens
  CDR3 for alpha chain variable domain of TCR clone 337077 (TRAV13-1, TRAJ26)
CAASSAHSGQNFVF

SEQ ID NO: 674154 - protein, 17 aa, Homo sapiens
  CDR3 for beta chain variable domain of TCR clone 337077 (TRBV25-1, TRBJ2-5)
CASSRRGGRRGQETHYF

SEQ ID NO: 674155 - protein, 11 aa, Homo sapiens
  CDR3 for alpha chain variable domain of TCR clone 337078 (TRAV12-1, TRAJ30)
CVVHGQDKIIF

SEQ ID NO: 674156 - protein, 16 aa, Homo sapiens
  CDR3 for beta chain variable domain of TCR clone 337078 (TRBV24-1, TRBJ2-3)
CATSDAISGITDTQYF

SEQ ID NO: 674157 - protein, 12 aa, Homo sapiens
  CDR3 for alpha chain variable domain of TCR clone 337079 (TRAV20, TRAJ54)
CAVQEGAQKLVF

SEQ ID NO: 674158 - protein, 17 aa, Homo sapiens
  CDR3 for beta chain variable domain of TCR clone 337079 (TRBV13, TRBJ2-3)
CDSSLSRVAGGRNTQYF

SEQ ID NO: 674159 - protein, 14 aa, Homo sapiens
  CDR3 for alpha chain variable domain of TCR clone 337080 (TRAV27, TRAJ22)
CAGLPSGSARQLTF

SEQ ID NO: 674160 - protein, 14 aa, Homo sapiens
  CDR3 for beta chain variable domain of TCR clone 337080 (TRBV19, TRBJ2-7)
CASTVQGRPYEQYF

SEQ ID NO: 674161 - protein, 14 aa, Homo sapiens
  CDR3 for alpha chain variable domain of TCR clone 337081 (TRAV23/DV6, TRAJ8)
CAASKNTGFQKLVF

SEQ ID NO: 674162 - protein, 14 aa, Homo sapiens
  CDR3 for beta chain variable domain of TCR clone 337081 (TRBV20-1, TRBJ2-7)
CSAKTGTGGYEQYF

SEQ ID NO: 674163 - protein, 15 aa, Homo sapiens
  CDR3 for alpha chain variable domain of TCR clone 337082 (TRAV12-3, TRAJ6)
CAMSATTGGSYIPTF

SEQ ID NO: 674164 - protein, 12 aa, Homo sapiens
  CDR3 for beta chain variable domain of TCR clone 337082 (TRBV6-5, TRBJ2-7)
CASSDRQNEQYF

SEQ ID NO: 674165 - protein, 13 aa, Homo sapiens
  CDR3 for alpha chain variable domain of TCR clone 337083 (TRAV12-1, TRAJ43)
CVVSHHNNNDMRF

SEQ ID NO: 674166 - protein, 13 aa, Homo sapiens
  CDR3 for beta chain variable domain of TCR clone 337083 (TRBV4-2, TRBJ1-1)
CASSQAGNTEAFF

SEQ ID NO: 674167 - protein, 16 aa, Homo sapiens
  CDR3 for alpha chain variable domain of TCR clone 337084 (TRAV26-1, TRAJ31)
CIVRPPVLNNNARLMF

SEQ ID NO: 674168 - protein, 20 aa, Homo sapiens
  CDR3 for beta chain variable domain of TCR clone 337084 (TRBV7-8, TRBJ2-2)
CASSHLFPGPTIHITGELFF

SEQ ID NO: 674169 - protein, 13 aa, Homo sapiens
  CDR3 for alpha chain variable domain of TCR clone 337085 (TRAV2, TRAJ40)
CAVVPSGTYKYIF

SEQ ID NO: 674170 - protein, 17 aa, Homo sapiens
  CDR3 for beta chain variable domain of TCR clone 337085 (TRBV7-3, TRBJ2-3)
CASSLMKRMRGADTQYF

SEQ ID NO: 674171 - protein, 17 aa, Homo sapiens
  CDR3 for alpha chain variable domain of TCR clone 337086 (TRAV3, TRAJ42)
CAVRDRDYGGSLGNLIF

SEQ ID NO: 674172 - protein, 14 aa, Homo sapiens
  CDR3 for beta chain variable domain of TCR clone 337086 (TRBV7-2, TRBJ2-5)
CASSPRGSSETQYF

SEQ ID NO: 674173 - protein, 13 aa, Homo sapiens
  CDR3 for alpha chain variable domain of TCR clone 337087 (TRAV2, TRAJ26)
CAVVSNYGQNFVF

SEQ ID NO: 674174 - protein, 15 aa, Homo sapiens
  CDR3 for beta chain variable domain of TCR clone 337087 (TRBV27, TRBJ2-1)
CASSNGGGSSNEQFF

SEQ ID NO: 674175 - protein, 11 aa, Homo sapiens
  CDR3 for alpha chain variable domain of TCR clone 337088 (TRAV12-1, TRAJ30)
CVVNGQDKIIF

SEQ ID NO: 674176 - protein, 16 aa, Homo sapiens
  CDR3 for beta chain variable domain of TCR clone 337088 (TRBV27, TRBJ2-2)
CASSSSGVSNTGELFF

SEQ ID NO: 674177 - protein, 16 aa, Homo sapiens
  CDR3 for alpha chain variable domain of TCR clone 337089 (TRAV16, TRAJ4)
CALSRMFSGGYNKLIF

SEQ ID NO: 674178 - protein, 14 aa, Homo sapiens
  CDR3 for beta chain variable domain of TCR clone 337089 (TRBV5-5, TRBJ1-2)
CASSLDPYNYGYTF

SEQ ID NO: 674179 - protein, 11 aa, Homo sapiens
  CDR3 for alpha chain variable domain of TCR clone 337090 (TRAV3, TRAJ21)
CAVGNFNKFYF

SEQ ID NO: 674180 - protein, 14 aa, Homo sapiens
  CDR3 for beta chain variable domain of TCR clone 337090 (TRBV6-3, TRBJ1-1)
CASSYHSKNTEAFF

SEQ ID NO: 674181 - protein, 13 aa, Homo sapiens
  CDR3 for alpha chain variable domain of TCR clone 337091 (TRAV13-1, TRAJ9)
CAASGTGGFKTIF

SEQ ID NO: 674182 - protein, 15 aa, Homo sapiens
  CDR3 for beta chain variable domain of TCR clone 337091 (TRBV20-1, TRBJ2-1)
CSARGGTRYYNEQFF

SEQ ID NO: 674183 - protein, 12 aa, Homo sapiens
  CDR3 for alpha chain variable domain of TCR clone 337092 (TRAV13-1, TRAJ27)
CAAHTNAGKSTF

SEQ ID NO: 674184 - protein, 14 aa, Homo sapiens
  CDR3 for beta chain variable domain of TCR clone 337092 (TRBV19, TRBJ2-2)
CASSGQGIAGELFY

SEQ ID NO: 674185 - protein, 11 aa, Homo sapiens
  CDR3 for alpha chain variable domain of TCR clone 337093 (TRAV1-2, TRAJ34)
CAGYNTDKLIF

SEQ ID NO: 674186 - protein, 16 aa, Homo sapiens
  CDR3 for beta chain variable domain of TCR clone 337093 (TRBV10-3, TRBJ2-1)
CAISGGGDGGGGEQFF

SEQ ID NO: 674187 - protein, 16 aa, Homo sapiens
  CDR3 for alpha chain variable domain of TCR clone 337094 (TRAV30, TRAJ24)
CGTEIVDADSWGKFHF

SEQ ID NO: 674188 - protein, 14 aa, Homo sapiens
  CDR3 for beta chain variable domain of TCR clone 337094 (TRBV12-5, TRBJ2-5)
CASGSRTQQETQYF

SEQ ID NO: 674189 - protein, 18 aa, Homo sapiens
  CDR3 for alpha chain variable domain of TCR clone 337095 (TRAV26-1, TRAJ52)
CIVRDEGAGGTSYGKLTF

SEQ ID NO: 674190 - protein, 13 aa, Homo sapiens
  CDR3 for beta chain variable domain of TCR clone 337095 (TRBV7-3, TRBJ1-2)
CASSLKRGYGYTF

SEQ ID NO: 674191 - protein, 20 aa, Homo sapiens
  CDR3 for alpha chain variable domain of TCR clone 337096 (TRAV12-1, TRAJ42)
SSVIQPPTSVNGGSQGNLIF

SEQ ID NO: 674192 - protein, 18 aa, Homo sapiens
  CDR3 for beta chain variable domain of TCR clone 337096 (TRBV11-2, TRBJ2-3)
CASSLGWASRGAPNTQYF

SEQ ID NO: 674193 - protein, 15 aa, Homo sapiens
  CDR3 for alpha chain variable domain of TCR clone 337097 (TRAV12-3, TRAJ6)
CAMSATTGGSYIPTF

SEQ ID NO: 674194 - protein, 16 aa, Homo sapiens
  CDR3 for beta chain variable domain of TCR clone 337097 (TRBV20-1, TRBJ1-2)
CSASMGQGVANYGDNF

SEQ ID NO: 674195 - protein, 13 aa, Homo sapiens
  CDR3 for alpha chain variable domain of TCR clone 337098 (TRAV8-1, TRAJ28)
CAVSGAGSYQLTF

SEQ ID NO: 674196 - protein, 15 aa, Homo sapiens
  CDR3 for beta chain variable domain of TCR clone 337098 (TRBV20-1, TRBJ2-7)
CSARDRVSGMDEQYF

SEQ ID NO: 674197 - protein, 13 aa, Homo sapiens
  CDR3 for alpha chain variable domain of TCR clone 337099 (TRAV26-1, TRAJ29)
CIVRRSGNTPLVF

SEQ ID NO: 674198 - protein, 16 aa, Homo sapiens
  CDR3 for beta chain variable domain of TCR clone 337099 (TRBV11-2, TRBJ2-7)
CASSLAPTVVNYEQYF

SEQ ID NO: 674199 - protein, 13 aa, Homo sapiens
  CDR3 for alpha chain variable domain of TCR clone 337100 (TRAV8-3, TRAJ36)
CAVGATGANNLFF

SEQ ID NO: 674200 - protein, 15 aa, Homo sapiens
  CDR3 for beta chain variable domain of TCR clone 337100 (TRBV7-2, TRBJ1-2)
CASSPRAGWNYGHIF

SEQ ID NO: 674201 - protein, 12 aa, Homo sapiens
  CDR3 for alpha chain variable domain of TCR clone 337101 (TRAV3, TRAJ20)
CAVRDGGYKLSF

SEQ ID NO: 674202 - protein, 14 aa, Homo sapiens
  CDR3 for beta chain variable domain of TCR clone 337101 (TRBV7-2, TRBJ2-7)
CASRSQGAAYEQYF

SEQ ID NO: 674203 - protein, 14 aa, Homo sapiens
  CDR3 for alpha chain variable domain of TCR clone 337102 (TRAV8-1, TRAJ34)
CAVNPSYNTDKLIF

SEQ ID NO: 674204 - protein, 14 aa, Homo sapiens
  CDR3 for beta chain variable domain of TCR clone 337102 (TRBV5-4, TRBJ1-1)
CASSLDSRRDEAFF

SEQ ID NO: 674205 - protein, 14 aa, Homo sapiens
  CDR3 for alpha chain variable domain of TCR clone 337103 (TRAV1-2, TRAJ8)
CAVREDTGFRKLVF

SEQ ID NO: 674206 - protein, 13 aa, Homo sapiens
  CDR3 for beta chain variable domain of TCR clone 337103 (TRBV23-1, TRBJ1-4)
CASRGKFNEKLFF

SEQ ID NO: 674207 - protein, 11 aa, Homo sapiens
  CDR3 for alpha chain variable domain of TCR clone 337104 (TRAV12-2, TRAJ10)
PLTGGGNKLTF

SEQ ID NO: 674208 - protein, 14 aa, Homo sapiens
  CDR3 for beta chain variable domain of TCR clone 337104 (TRBV5-5, TRBJ1-5)
CASSGQGVDQPQHF

SEQ ID NO: 674209 - protein, 12 aa, Homo sapiens
  CDR3 for alpha chain variable domain of TCR clone 337105 (TRAV12-3, TRAJ17)
CAMTLTGNKLTF

SEQ ID NO: 674210 - protein, 15 aa, Homo sapiens
  CDR3 for beta chain variable domain of TCR clone 337105 (TRBV19, TRBJ2-1)
CASSILGEGGNEQFF

SEQ ID NO: 674211 - protein, 17 aa, Homo sapiens
  CDR3 for alpha chain variable domain of TCR clone 337106 (TRAV12-1, TRAJ42)
FVVMRMNYGGSQGNLIF

SEQ ID NO: 674212 - protein, 13 aa, Homo sapiens
  CDR3 for beta chain variable domain of TCR clone 337106 (TRBV7-2, TRBJ1-1)
CASSLARPAEAFF

SEQ ID NO: 674213 - protein, 17 aa, Homo sapiens
  CDR3 for alpha chain variable domain of TCR clone 337107 (TRAV23/DV6, TRAJ28)
CAALLAYPGAGSYQLTF

SEQ ID NO: 674214 - protein, 13 aa, Homo sapiens
  CDR3 for beta chain variable domain of TCR clone 337107 (TRBV4-2, TRBJ2-3)
CASSQGNTDTQYF

SEQ ID NO: 674215 - protein, 15 aa, Homo sapiens
  CDR3 for alpha chain variable domain of TCR clone 337108 (TRAV3, TRAJ27)
CAVRDPLTNAGKSTF

SEQ ID NO: 674216 - protein, 15 aa, Homo sapiens
  CDR3 for beta chain variable domain of TCR clone 337108 (TRBV28, TRBJ2-1)
CASSIIAGGRSEQLF

SEQ ID NO: 674217 - protein, 14 aa, Homo sapiens
  CDR3 for alpha chain variable domain of TCR clone 337109 (TRAV8-4, TRAJ8)
CAVSEDTGFQKLVF

SEQ ID NO: 674218 - protein, 14 aa, Homo sapiens
  CDR3 for beta chain variable domain of TCR clone 337109 (TRBV7-8, TRBJ1-2)
CASSPDSLSYGYTF

SEQ ID NO: 674219 - protein, 12 aa, Homo sapiens
  CDR3 for alpha chain variable domain of TCR clone 337110 (TRAV13-1, TRAJ21)
CAAEEGFNKFYF

SEQ ID NO: 674220 - protein, 19 aa, Homo sapiens
  CDR3 for beta chain variable domain of TCR clone 337110 (TRBV2, TRBJ2-7)
CASSDDETSGRANDYEQYF

SEQ ID NO: 674221 - protein, 16 aa, Homo sapiens
  CDR3 for alpha chain variable domain of TCR clone 337111 (TRAV12-2, TRAJ28)
CAVIRGSGAGSYQLTF

SEQ ID NO: 674222 - protein, 15 aa, Homo sapiens
  CDR3 for beta chain variable domain of TCR clone 337111 (TRBV20-1, TRBJ2-7)
CSARDRVSGMDEQYF

SEQ ID NO: 674223 - protein, 12 aa, Homo sapiens
  CDR3 for alpha chain variable domain of TCR clone 337112 (TRAV13-2, TRAJ23)
CAERHRGGKLIF

SEQ ID NO: 674224 - protein, 15 aa, Homo sapiens
  CDR3 for beta chain variable domain of TCR clone 337112 (TRBV4-2, TRBJ1-1)
CASSQRSSGRTEAFF

SEQ ID NO: 674225 - protein, 19 aa, Homo sapiens
  CDR3 for alpha chain variable domain of TCR clone 337113 (TRAV29/DV5, TRAJ56)
CSVLLCSKRGPGANSKLTF

SEQ ID NO: 674226 - protein, 20 aa, Homo sapiens
  CDR3 for beta chain variable domain of TCR clone 337113 (TRBV28, TRBJ2-1)
CASTPIGRSPGLAGGNEQFF

SEQ ID NO: 674227 - protein, 13 aa, Homo sapiens
  CDR3 for alpha chain variable domain of TCR clone 337114 (TRAV8-3, TRAJ43)
CAVGPDNNNDMRF

SEQ ID NO: 674228 - protein, 16 aa, Homo sapiens
  CDR3 for beta chain variable domain of TCR clone 337114 (TRBV4-2, TRBJ2-3)
CASSQELAGDTDTQYF

SEQ ID NO: 674229 - protein, 14 aa, Homo sapiens
  CDR3 for alpha chain variable domain of TCR clone 337115 (TRAV14/DV4, TRAJ54)
CAMREAPAAKKLGF

SEQ ID NO: 674230 - protein, 15 aa, Homo sapiens
  CDR3 for beta chain variable domain of TCR clone 337115 (TRBV5-1, TRBJ2-7)
CASSWNGGPAREQYF

SEQ ID NO: 674231 - protein, 12 aa, Homo sapiens
  CDR3 for alpha chain variable domain of TCR clone 337116 (TRAV17, TRAJ39)
CATCAAGNMLTF

SEQ ID NO: 674232 - protein, 13 aa, Homo sapiens
  CDR3 for beta chain variable domain of TCR clone 337116 (TRBV7-9, TRBJ1-2)
CASSLKQNHGYTF

SEQ ID NO: 674233 - protein, 13 aa, Homo sapiens
  CDR3 for alpha chain variable domain of TCR clone 337117 (TRAV21, TRAJ20)
CAVSRLGDYQLSF

SEQ ID NO: 674234 - protein, 13 aa, Homo sapiens
  CDR3 for beta chain variable domain of TCR clone 337117 (TRBV7-9, TRBJ1-2)
CASSLKQNYGYTF

SEQ ID NO: 674235 - protein, 16 aa, Homo sapiens
  CDR3 for alpha chain variable domain of TCR clone 337118 (TRAV26-1, TRAJ37)
CIVRGDGSGNTGKLIF

SEQ ID NO: 674236 - protein, 17 aa, Homo sapiens
  CDR3 for beta chain variable domain of TCR clone 337118 (TRBV2, TRBJ2-4)
CASSDDPDRVDKNIQYF

SEQ ID NO: 674237 - protein, 20 aa, Homo sapiens
  CDR3 for alpha chain variable domain of TCR clone 337119 (TRAV12-3, TRAJ37)
CALVRVLQHRQTNLWARDNF

SEQ ID NO: 674238 - protein, 18 aa, Homo sapiens
  CDR3 for beta chain variable domain of TCR clone 337119 (TRBV7-8, TRBJ2-1)
CASSPAEGLAGGLNEQFF

SEQ ID NO: 674239 - protein, 14 aa, Homo sapiens
  CDR3 for alpha chain variable domain of TCR clone 337120 (TRAV20, TRAJ40)
CAVSLTSGTYNYIF

SEQ ID NO: 674240 - protein, 14 aa, Homo sapiens
  CDR3 for beta chain variable domain of TCR clone 337120 (TRBV5-1, TRBJ1-2)
CASSLGERNYGYTF

SEQ ID NO: 674241 - protein, 14 aa, Homo sapiens
  CDR3 for alpha chain variable domain of TCR clone 337121 (TRAV1-2, TRAJ16)
CAVNRFSDGQKLLF

SEQ ID NO: 674242 - protein, 16 aa, Homo sapiens
  CDR3 for beta chain variable domain of TCR clone 337121 (TRBV2, TRBJ2-3)
CASSGGGLTSTDTQYF

SEQ ID NO: 674243 - protein, 15 aa, Homo sapiens
  CDR3 for alpha chain variable domain of TCR clone 337122 (TRAV12-3, TRAJ6)
CAMSATTGGSYIPTS

SEQ ID NO: 674244 - protein, 15 aa, Homo sapiens
  CDR3 for beta chain variable domain of TCR clone 337122 (TRBV7-9, TRBJ2-1)
CASSLGWGRANEQFF

SEQ ID NO: 674245 - protein, 12 aa, Homo sapiens
  CDR3 for alpha chain variable domain of TCR clone 337123 (TRAV12-3, TRAJ17)
CAMTLTGNKLNF

SEQ ID NO: 674246 - protein, 17 aa, Homo sapiens
  CDR3 for beta chain variable domain of TCR clone 337123 (TRBV7-3, TRBJ2-3)
CASSLMKRMRGADTQYF

SEQ ID NO: 674247 - protein, 16 aa, Homo sapiens
  CDR3 for alpha chain variable domain of TCR clone 337124 (TRAV23/DV6, TRAJ9)
CAASIGGNTGGFKTIF

SEQ ID NO: 674248 - protein, 13 aa, Homo sapiens
  CDR3 for beta chain variable domain of TCR clone 337124 (TRBV7-2, TRBJ2-5)
CASSQTSVETQYF

SEQ ID NO: 674249 - protein, 12 aa, Homo sapiens
  CDR3 for alpha chain variable domain of TCR clone 337125 (TRAV1-1, TRAJ39)
CAVRVVGNMLTF

SEQ ID NO: 674250 - protein, 15 aa, Homo sapiens
  CDR3 for beta chain variable domain of TCR clone 337125 (TRBV19, TRBJ1-6)
CASSTQGAVGSPLHF

SEQ ID NO: 674251 - protein, 13 aa, Homo sapiens
  CDR3 for alpha chain variable domain of TCR clone 337126 (TRAV1-2, TRAJ9)
CAVLNTGGFNTIF

SEQ ID NO: 674252 - protein, 13 aa, Homo sapiens
  CDR3 for beta chain variable domain of TCR clone 337126 (TRBV19, TRBJ2-7)
CASRKAGGSEQYF

SEQ ID NO: 674253 - protein, 14 aa, Homo sapiens
  CDR3 for alpha chain variable domain of TCR clone 337127 (TRAV12-2, TRAJ13)
CAVKKTGGYQKVTF

SEQ ID NO: 674254 - protein, 14 aa, Homo sapiens
  CDR3 for beta chain variable domain of TCR clone 337127 (TRBV19, TRBJ2-1)
CASPTFVLSGEHFF

SEQ ID NO: 674255 - protein, 12 aa, Homo sapiens
  CDR3 for alpha chain variable domain of TCR clone 337128 (TRAV3, TRAJ9)
CAVLPAGFKTIF

SEQ ID NO: 674256 - protein, 13 aa, Homo sapiens
  CDR3 for beta chain variable domain of TCR clone 337128 (TRBV11-2, TRBJ2-1)
CASSSEAYNEQFF

SEQ ID NO: 674257 - protein, 14 aa, Homo sapiens
  CDR3 for alpha chain variable domain of TCR clone 337129 (TRAV1-1, TRAJ8)
CAVVTNTGFQKLVF

SEQ ID NO: 674258 - protein, 14 aa, Homo sapiens
  CDR3 for beta chain variable domain of TCR clone 337129 (TRBV6-1, TRBJ1-3)
CGSVQGGGGNTMYF

SEQ ID NO: 674259 - protein, 12 aa, Homo sapiens
  CDR3 for alpha chain variable domain of TCR clone 337130 (TRAV12-1, TRAJ31)
CVVNRNNARLMF

SEQ ID NO: 674260 - protein, 12 aa, Homo sapiens
  CDR3 for beta chain variable domain of TCR clone 337130 (TRBV11-2, TRBJ2-2)
CASSLGGGELFF

SEQ ID NO: 674261 - protein, 14 aa, Homo sapiens
  CDR3 for alpha chain variable domain of TCR clone 337131 (TRAV12-2, TRAJ17)
CAVLFKAAGNKLTF

SEQ ID NO: 674262 - protein, 18 aa, Homo sapiens
  CDR3 for beta chain variable domain of TCR clone 337131 (TRBV4-1, TRBJ1-5)
CASSQDPRGQGLNQPQHL

SEQ ID NO: 674263 - protein, 13 aa, Homo sapiens
  CDR3 for alpha chain variable domain of TCR clone 337132 (TRAV36/DV7, TRAJ37)
CAVFSSNTGKLIF

SEQ ID NO: 674264 - protein, 15 aa, Homo sapiens
  CDR3 for beta chain variable domain of TCR clone 337132 (TRBV6-3, TRBJ2-7)
CASSSPGTVFYEQYF

SEQ ID NO: 674265 - protein, 14 aa, Homo sapiens
  CDR3 for alpha chain variable domain of TCR clone 337133 (TRAV26-1, TRAJ38)
CIADNAGNNRKLIW

SEQ ID NO: 674266 - protein, 14 aa, Homo sapiens
  CDR3 for beta chain variable domain of TCR clone 337133 (TRBV20-1, TRBJ1-3)
CSASPTGAGNTIYF

SEQ ID NO: 674267 - protein, 14 aa, Homo sapiens
  CDR3 for alpha chain variable domain of TCR clone 337134 (TRAV17, TRAJ57)
CATDPQGASEKLVF

SEQ ID NO: 674268 - protein, 13 aa, Homo sapiens
  CDR3 for beta chain variable domain of TCR clone 337134 (TRBV10-3, TRBJ2-7)
CASKLAVNYEQYF

SEQ ID NO: 674269 - protein, 15 aa, Homo sapiens
  CDR3 for alpha chain variable domain of TCR clone 337135 (TRAV8-3, TRAJ44)
CAVVAGAGTASKLTF

SEQ ID NO: 674270 - protein, 12 aa, Homo sapiens
  CDR3 for beta chain variable domain of TCR clone 337135 (TRBV7-8, TRBJ2-4)
CASSLGGNIQYF

SEQ ID NO: 674271 - protein, 12 aa, Homo sapiens
  CDR3 for alpha chain variable domain of TCR clone 337136 (TRAV13-2, TRAJ39)
CAENNAGNMLTF

SEQ ID NO: 674272 - protein, 12 aa, Homo sapiens
  CDR3 for beta chain variable domain of TCR clone 337136 (TRBV11-2, TRBJ2-2)
SASSLGGGELFF

SEQ ID NO: 674273 - protein, 13 aa, Homo sapiens
  CDR3 for alpha chain variable domain of TCR clone 337137 (TRAV2, TRAJ40)
CAVVTSGTYKYIF

SEQ ID NO: 674274 - protein, 14 aa, Homo sapiens
  CDR3 for beta chain variable domain of TCR clone 337137 (TRBV7-8, TRBJ2-3)
CASSSEAGTDTQYF

SEQ ID NO: 674275 - protein, 17 aa, Homo sapiens
  CDR3 for alpha chain variable domain of TCR clone 337138 (TRAV4, TRAJ18)
CLVGERSVGLTLGRLYF

SEQ ID NO: 674276 - protein, 16 aa, Homo sapiens
  CDR3 for beta chain variable domain of TCR clone 337138 (TRBV15, TRBJ1-4)
CATSRDSPPGREKLFF

SEQ ID NO: 674277 - protein, 18 aa, Homo sapiens
  CDR3 for alpha chain variable domain of TCR clone 337139 (TRAV21, TRAJ52)
CAVKPSPAGGTSYGKLTF

SEQ ID NO: 674278 - protein, 15 aa, Homo sapiens
  CDR3 for beta chain variable domain of TCR clone 337139 (TRBV2, TRBJ2-1)
CASSELAGSYNEQFF

SEQ ID NO: 674279 - protein, 12 aa, Homo sapiens
  CDR3 for alpha chain variable domain of TCR clone 337140 (TRAV12-3, TRAJ17)
CAMTLTGIKLTF

SEQ ID NO: 674280 - protein, 13 aa, Homo sapiens
  CDR3 for beta chain variable domain of TCR clone 337140 (TRBV27, TRBJ2-1)
CASRTLGVGEQFL

SEQ ID NO: 674281 - protein, 14 aa, Homo sapiens
  CDR3 for alpha chain variable domain of TCR clone 337141 (TRAV12-1, TRAJ6)
CVVPTSGGSYIPKF

SEQ ID NO: 674282 - protein, 17 aa, Homo sapiens
  CDR3 for beta chain variable domain of TCR clone 337141 (TRBV14, TRBJ2-3)
CASSQEPSGLSTDTQYF

SEQ ID NO: 674283 - protein, 14 aa, Homo sapiens
  CDR3 for alpha chain variable domain of TCR clone 337142 (TRAV35, TRAJ38)
CAGSNAGNNRKLIG

SEQ ID NO: 674284 - protein, 12 aa, Homo sapiens
  CDR3 for beta chain variable domain of TCR clone 337142 (TRBV19, TRBJ2-7)
CASTDRGYEQYF

SEQ ID NO: 674285 - protein, 14 aa, Homo sapiens
  CDR3 for alpha chain variable domain of TCR clone 337143 (TRAV35, TRAJ13)
CAGRSPGGYQKVTF

SEQ ID NO: 674286 - protein, 14 aa, Homo sapiens
  CDR3 for beta chain variable domain of TCR clone 337143 (TRBV19, TRBJ2-2)
CASIMVGLSGELFF

SEQ ID NO: 674287 - protein, 13 aa, Homo sapiens
  CDR3 for alpha chain variable domain of TCR clone 337144 (TRAV2, TRAJ40)
CAVVTSGTYKYIF

SEQ ID NO: 674288 - protein, 16 aa, Homo sapiens
  CDR3 for beta chain variable domain of TCR clone 337144 (TRBV7-9, TRBJ1-3)
CTSSLGAGSSGNTIYF

SEQ ID NO: 674289 - protein, 11 aa, Homo sapiens
  CDR3 for alpha chain variable domain of TCR clone 337145 (TRAV12-3, TRAJ27)
CAMANAGKSTF

SEQ ID NO: 674290 - protein, 15 aa, Homo sapiens
  CDR3 for beta chain variable domain of TCR clone 337145 (TRBV7-9, TRBJ1-2)
CASSLDREPNYGYTF

SEQ ID NO: 674291 - protein, 13 aa, Homo sapiens
  CDR3 for alpha chain variable domain of TCR clone 337146 (TRAV35, TRAJ33)
CAGLMASNYQLIW

SEQ ID NO: 674292 - protein, 13 aa, Homo sapiens
  CDR3 for beta chain variable domain of TCR clone 337146 (TRBV10-3, TRBJ2-1)
CAISEFSGREQFF

SEQ ID NO: 674293 - protein, 15 aa, Homo sapiens
  CDR3 for alpha chain variable domain of TCR clone 337147 (TRAV3, TRAJ32)
CAVSAYGGATNKLIF

SEQ ID NO: 674294 - protein, 13 aa, Homo sapiens
  CDR3 for beta chain variable domain of TCR clone 337147 (TRBV20-1, TRBJ2-7)
CSARPSTNYEQYF

SEQ ID NO: 674295 - protein, 14 aa, Homo sapiens
  CDR3 for alpha chain variable domain of TCR clone 337148 (TRAV1-2, TRAJ16)
CAVNRFSDGQKLLF

SEQ ID NO: 674296 - protein, 15 aa, Homo sapiens
  CDR3 for beta chain variable domain of TCR clone 337148 (TRBV20-1, TRBJ2-6)
CSARDRGPGANVLIF

SEQ ID NO: 674297 - protein, 15 aa, Homo sapiens
  CDR3 for alpha chain variable domain of TCR clone 337149 (TRAV38-2/DV8, TRAJ28)
CAYRSRGAGSYQLTF

SEQ ID NO: 674298 - protein, 17 aa, Homo sapiens
  CDR3 for beta chain variable domain of TCR clone 337149 (TRBV11-2, TRBJ2-1)
CASSLYPPGVEYNEQFF

SEQ ID NO: 674299 - protein, 16 aa, Homo sapiens
  CDR3 for alpha chain variable domain of TCR clone 337150 (TRAV3, TRAJ37)
CAVRGKGSGNPGKLIF

SEQ ID NO: 674300 - protein, 15 aa, Homo sapiens
  CDR3 for beta chain variable domain of TCR clone 337150 (TRBV7-3, TRBJ2-2)
CASSETGQGTGELFF

SEQ ID NO: 674301 - protein, 13 aa, Homo sapiens
  CDR3 for alpha chain variable domain of TCR clone 337151 (TRAV35, TRAJ48)
CAGHEFGNEKLTF

SEQ ID NO: 674302 - protein, 13 aa, Homo sapiens
  CDR3 for beta chain variable domain of TCR clone 337151 (TRBV7-2, TRBJ1-6)
CASSLVGSSHLHF

SEQ ID NO: 674303 - protein, 15 aa, Homo sapiens
  CDR3 for alpha chain variable domain of TCR clone 337152 (TRAV12-2, TRAJ53)
CAVNGGGGSNYELTF

SEQ ID NO: 674304 - protein, 14 aa, Homo sapiens
  CDR3 for beta chain variable domain of TCR clone 337152 (TRBV6-1, TRBJ2-1)
CASAKDGFYNEQFF

SEQ ID NO: 674305 - protein, 15 aa, Homo sapiens
  CDR3 for alpha chain variable domain of TCR clone 337153 (TRAV12-3, TRAJ45)
CAMSWGGGGADGLTF

SEQ ID NO: 674306 - protein, 15 aa, Homo sapiens
  CDR3 for beta chain variable domain of TCR clone 337153 (TRBV2, TRBJ2-1)
CASSELAGSYNEQFF

SEQ ID NO: 674307 - protein, 14 aa, Homo sapiens
  CDR3 for alpha chain variable domain of TCR clone 337154 (TRAV26-1, TRAJ57)
CIVGTQGGSEKLVF

SEQ ID NO: 674308 - protein, 13 aa, Homo sapiens
  CDR3 for beta chain variable domain of TCR clone 337154 (TRBV19, TRBJ1-3)
CASRLSLGNTIYF

SEQ ID NO: 674309 - protein, 14 aa, Homo sapiens
  CDR3 for alpha chain variable domain of TCR clone 337155 (TRAV29/DV5, TRAJ44)
CAAFLVGTASKLTF

SEQ ID NO: 674310 - protein, 15 aa, Homo sapiens
  CDR3 for beta chain variable domain of TCR clone 337155 (TRBV7-3, TRBJ2-2)
GASSETGQGTGELFF

SEQ ID NO: 674311 - protein, 13 aa, Homo sapiens
  CDR3 for alpha chain variable domain of TCR clone 337156 (TRAV20, TRAJ31)
CAVQAIGGARLMF

SEQ ID NO: 674312 - protein, 13 aa, Homo sapiens
  CDR3 for beta chain variable domain of TCR clone 337156 (TRBV11-3, TRBJ2-3)
CASSHDTKDTQYF

SEQ ID NO: 674313 - protein, 18 aa, Homo sapiens
  CDR3 for alpha chain variable domain of TCR clone 337157 (TRAV1-1, TRAJ12)
CLLLLRCERGDSSYKLIF

SEQ ID NO: 674314 - protein, 14 aa, Homo sapiens
  CDR3 for beta chain variable domain of TCR clone 337157 (TRBV18, TRBJ2-5)
CQHRQGPRQETQYF

SEQ ID NO: 674315 - protein, 23 aa, Homo sapiens
  CDR3 for alpha chain variable domain of TCR clone 337158 (TRAV12-2, TRAJ43)
SLLIRDSQPSDSATYLCAFDTRF

SEQ ID NO: 674316 - protein, 18 aa, Homo sapiens
  CDR3 for beta chain variable domain of TCR clone 337158 (TRBV20-1, TRBJ2-3)
CSASGLAGGPGTTDTQYF

SEQ ID NO: 674317 - protein, 14 aa, Homo sapiens
  CDR3 for alpha chain variable domain of TCR clone 337159 (TRAV13-1, TRAJ47)
CAAPIMEYGNKLVF

SEQ ID NO: 674318 - protein, 12 aa, Homo sapiens
  CDR3 for beta chain variable domain of TCR clone 337159 (TRBV11-2, TRBJ2-2)
CASSLGGGELFF

SEQ ID NO: 674319 - protein, 14 aa, Homo sapiens
  CDR3 for alpha chain variable domain of TCR clone 337160 (TRAV1-2, TRAJ16)
CAVNRFSDGQKLLF

SEQ ID NO: 674320 - protein, 15 aa, Homo sapiens
  CDR3 for beta chain variable domain of TCR clone 337160 (TRBV10-3, TRBJ2-7)
CATREQGLRSYEQYF

SEQ ID NO: 674321 - protein, 14 aa, Homo sapiens
  CDR3 for alpha chain variable domain of TCR clone 337161 (TRAV21, TRAJ45)
CAVSSGGGADGLTF

SEQ ID NO: 674322 - protein, 13 aa, Homo sapiens
  CDR3 for beta chain variable domain of TCR clone 337161 (TRBV7-2, TRBJ2-2)
CASSSVRAGELFF

SEQ ID NO: 674323 - protein, 14 aa, Homo sapiens
  CDR3 for alpha chain variable domain of TCR clone 337162 (TRAV23/DV6, TRAJ6)
FAASRSGGSYITTF

SEQ ID NO: 674324 - protein, 17 aa, Homo sapiens
  CDR3 for beta chain variable domain of TCR clone 337162 (TRBV20-1, TRBJ2-1)
CSASASGLAGSYNEQFF

SEQ ID NO: 674325 - protein, 18 aa, Homo sapiens
  CDR3 for alpha chain variable domain of TCR clone 337163 (TRAV13-1, TRAJ52)
CAAKNPNAGGTSYGKLTF

SEQ ID NO: 674326 - protein, 18 aa, Homo sapiens
  CDR3 for beta chain variable domain of TCR clone 337163 (TRBV7-3, TRBJ2-1)
CASSLTLASGRAMVSSSS

SEQ ID NO: 674327 - protein, 14 aa, Homo sapiens
  CDR3 for alpha chain variable domain of TCR clone 337164 (TRAV26-1, TRAJ38)
CIADNAGNNSKLIW

SEQ ID NO: 674328 - protein, 15 aa, Homo sapiens
  CDR3 for beta chain variable domain of TCR clone 337164 (TRBV7-6, TRBJ1-4)
CASSLGAGAGEKLFF

SEQ ID NO: 674329 - protein, 15 aa, Homo sapiens
  CDR3 for alpha chain variable domain of TCR clone 337165 (TRAV4, TRAJ39)
CLVGPNNNTGNMLTF

SEQ ID NO: 674330 - protein, 13 aa, Homo sapiens
  CDR3 for beta chain variable domain of TCR clone 337165 (TRBV11-2, TRBJ2-5)
CASSSTGEETQYF

SEQ ID NO: 674331 - protein, 12 aa, Homo sapiens
  CDR3 for alpha chain variable domain of TCR clone 337166 (TRAV12-1, TRAJ48)
CVARRGNEKLTF

SEQ ID NO: 674332 - protein, 16 aa, Homo sapiens
  CDR3 for beta chain variable domain of TCR clone 337166 (TRBV12-5, TRBJ2-5)
CASGPRTSGNQETQYF

SEQ ID NO: 674333 - protein, 11 aa, Homo sapiens
  CDR3 for alpha chain variable domain of TCR clone 337167 (TRAV2, TRAJ13)
CASGGYQKVTF

SEQ ID NO: 674334 - protein, 12 aa, Homo sapiens
  CDR3 for beta chain variable domain of TCR clone 337167 (TRBV19, TRBJ1-4)
CASKDWPGGLSF

SEQ ID NO: 674335 - protein, 12 aa, Homo sapiens
  CDR3 for alpha chain variable domain of TCR clone 337168 (TRAV35, TRAJ28)
GVEGAGSYQLTF

SEQ ID NO: 674336 - protein, 14 aa, Homo sapiens
  CDR3 for beta chain variable domain of TCR clone 337168 (TRBV7-2, TRBJ2-5)
CASSFTQGQETQYF

SEQ ID NO: 674337 - protein, 17 aa, Homo sapiens
  CDR3 for alpha chain variable domain of TCR clone 337169 (TRAV3, TRAJ6)
CAVRDGPRAGGSYIPTS

SEQ ID NO: 674338 - protein, 12 aa, Homo sapiens
  CDR3 for beta chain variable domain of TCR clone 337169 (TRBV7-2, TRBJ2-1)
CASSPGNNEQFF

SEQ ID NO: 674339 - protein, 12 aa, Homo sapiens
  CDR3 for alpha chain variable domain of TCR clone 337170 (TRAV29/DV5, TRAJ49)
CAASAIGNQFYF

SEQ ID NO: 674340 - protein, 14 aa, Homo sapiens
  CDR3 for beta chain variable domain of TCR clone 337170 (TRBV6-1, TRBJ1-3)
CASVQGGGGNTIYF

SEQ ID NO: 674341 - protein, 15 aa, Homo sapiens
  CDR3 for alpha chain variable domain of TCR clone 337171 (TRAV3, TRAJ4)
CAVRDGTGGHNKLIF

SEQ ID NO: 674342 - protein, 15 aa, Homo sapiens
  CDR3 for beta chain variable domain of TCR clone 337171 (TRBV27, TRBJ2-7)
CASSPDQGRLYEQYF

SEQ ID NO: 674343 - protein, 19 aa, Homo sapiens
  CDR3 for alpha chain variable domain of TCR clone 337172 (TRAV1-2, TRAJ26)
CLLPLCCERPDNYGQNFVF

SEQ ID NO: 674344 - protein, 14 aa, Homo sapiens
  CDR3 for beta chain variable domain of TCR clone 337172 (TRBV6-6, TRBJ1-5)
CASVDSGFNQPQHF

SEQ ID NO: 674345 - protein, 15 aa, Homo sapiens
  CDR3 for alpha chain variable domain of TCR clone 337173 (TRAV12-2, TRAJ20)
CAVKGGFGAGTTVTV

SEQ ID NO: 674346 - protein, 13 aa, Homo sapiens
  CDR3 for beta chain variable domain of TCR clone 337173 (TRBV12-4, TRBJ2-7)
CASCPGQLYEQYF

SEQ ID NO: 674347 - protein, 14 aa, Homo sapiens
  CDR3 for alpha chain variable domain of TCR clone 337174 (TRAV26-1, TRAJ48)
CIVRVPFGNEKLTF

SEQ ID NO: 674348 - protein, 15 aa, Homo sapiens
  CDR3 for beta chain variable domain of TCR clone 337174 (TRBV6-6, TRBJ2-7)
CASSYSYGGSYEQYF

SEQ ID NO: 674349 - protein, 15 aa, Homo sapiens
  CDR3 for alpha chain variable domain of TCR clone 337175 (TRAV27, TRAJ38)
CAARRNAGNNRKLIW

SEQ ID NO: 674350 - protein, 12 aa, Homo sapiens
  CDR3 for beta chain variable domain of TCR clone 337175 (TRBV5-1, TRBJ1-1)
CASSFGNTEAFF

SEQ ID NO: 674351 - protein, 10 aa, Homo sapiens
  CDR3 for alpha chain variable domain of TCR clone 337176 (TRAV12-2, TRAJ52)
RSTSYGKLTF

SEQ ID NO: 674352 - protein, 17 aa, Homo sapiens
  CDR3 for beta chain variable domain of TCR clone 337176 (TRBV15, TRBJ1-4)
CATSRYGTGDPNEKLFF

SEQ ID NO: 674353 - protein, 13 aa, Homo sapiens
  CDR3 for alpha chain variable domain of TCR clone 337177 (TRAV21, TRAJ27)
CAARPGNAAQSTF

SEQ ID NO: 674354 - protein, 11 aa, Homo sapiens
  CDR3 for beta chain variable domain of TCR clone 337177 (TRBV11-2, TRBJ2-2)
CASSLPGELFF

SEQ ID NO: 674355 - protein, 12 aa, Homo sapiens
  CDR3 for alpha chain variable domain of TCR clone 337178 (TRAV13-2, TRAJ23)
CAERHRGGKLIF

SEQ ID NO: 674356 - protein, 16 aa, Homo sapiens
  CDR3 for beta chain variable domain of TCR clone 337178 (TRBV7-2, TRBJ2-6)
CAILRGVSSGANVLTF

SEQ ID NO: 674357 - protein, 14 aa, Homo sapiens
  CDR3 for alpha chain variable domain of TCR clone 337179 (TRAV20, TRAJ16)
CAVRFFSDGQKLLF

SEQ ID NO: 674358 - protein, 13 aa, Homo sapiens
  CDR3 for beta chain variable domain of TCR clone 337179 (TRBV20-1, TRBJ1-1)
CSARGGGNTEAFF

SEQ ID NO: 674359 - protein, 15 aa, Homo sapiens
  CDR3 for alpha chain variable domain of TCR clone 337180 (TRAV26-1, TRAJ44)
CIVRANTGTASKLTF

SEQ ID NO: 674360 - protein, 16 aa, Homo sapiens
  CDR3 for beta chain variable domain of TCR clone 337180 (TRBV11-3, TRBJ2-5)
CASSSVVAGSTETQYF

SEQ ID NO: 674361 - protein, 13 aa, Homo sapiens
  CDR3 for alpha chain variable domain of TCR clone 337181 (TRAV12-2, TRAJ4)
CAVRSGGYNKLIF

SEQ ID NO: 674362 - protein, 15 aa, Homo sapiens
  CDR3 for beta chain variable domain of TCR clone 337181 (TRBV10-3, TRBJ2-1)
CAISDVHDRAYEQFF

SEQ ID NO: 674363 - protein, 14 aa, Homo sapiens
  CDR3 for alpha chain variable domain of TCR clone 337182 (TRAV13-1, TRAJ44)
CAAKATGTASKLTF

SEQ ID NO: 674364 - protein, 20 aa, Homo sapiens
  CDR3 for beta chain variable domain of TCR clone 337182 (TRBV28, TRBJ2-1)
CASTPIGRSPGLAGGNEQFF

SEQ ID NO: 674365 - protein, 15 aa, Homo sapiens
  CDR3 for alpha chain variable domain of TCR clone 337183 (TRAV12-1, TRAJ44)
CVADLPTGTASKLTF

SEQ ID NO: 674366 - protein, 13 aa, Homo sapiens
  CDR3 for beta chain variable domain of TCR clone 337183 (TRBV6-4, TRBJ2-3)
CASRDSGTDTQYF

SEQ ID NO: 674367 - protein, 15 aa, Homo sapiens
  CDR3 for alpha chain variable domain of TCR clone 337184 (TRAV8-2, TRAJ15)
CVVTMGNQAGTALIF

SEQ ID NO: 674368 - protein, 16 aa, Homo sapiens
  CDR3 for beta chain variable domain of TCR clone 337184 (TRBV12-5, TRBJ2-5)
CASGPRTSGNQETQYF

SEQ ID NO: 674369 - protein, 13 aa, Homo sapiens
  CDR3 for alpha chain variable domain of TCR clone 337185 (TRAV12-3, TRAJ5)
CAMIYTGRRALTF

SEQ ID NO: 674370 - protein, 12 aa, Homo sapiens
  CDR3 for beta chain variable domain of TCR clone 337185 (TRBV18, TRBJ1-4)
CASSPSREKLYF

SEQ ID NO: 674371 - protein, 15 aa, Homo sapiens
  CDR3 for alpha chain variable domain of TCR clone 337186 (TRAV2, TRAJ9)
CAVAALNTGGFKTIF

SEQ ID NO: 674372 - protein, 15 aa, Homo sapiens
  CDR3 for beta chain variable domain of TCR clone 337186 (TRBV7-2, TRBJ1-2)
CASSLVSGGDYGYTF

SEQ ID NO: 674373 - protein, 11 aa, Homo sapiens
  CDR3 for alpha chain variable domain of TCR clone 337187 (TRAV12-3, TRAJ27)
CAMANAGKSTF

SEQ ID NO: 674374 - protein, 18 aa, Homo sapiens
  CDR3 for beta chain variable domain of TCR clone 337187 (TRBV4-2, TRBJ1-5)
CASSQGDRVEWGNKPQHF

SEQ ID NO: 674375 - protein, 13 aa, Homo sapiens
  CDR3 for alpha chain variable domain of TCR clone 337188 (TRAV17, TRAJ4)
CATKSGGYNKLIV

SEQ ID NO: 674376 - protein, 14 aa, Homo sapiens
  CDR3 for beta chain variable domain of TCR clone 337188 (TRBV20-1, TRBJ1-5)
CSARDDRGNQPQHF

SEQ ID NO: 674377 - protein, 15 aa, Homo sapiens
  CDR3 for alpha chain variable domain of TCR clone 337189 (TRAV12-3, TRAJ6)
CAMSATTGGSYIPTF

SEQ ID NO: 674378 - protein, 17 aa, Homo sapiens
  CDR3 for beta chain variable domain of TCR clone 337189 (TRBV20-1, TRBJ2-7)
CSARDRVSGWTSSTSGR

SEQ ID NO: 674379 - protein, 11 aa, Homo sapiens
  CDR3 for alpha chain variable domain of TCR clone 337190 (TRAV12-1, TRAJ43)
CVEYDNNDMRF

SEQ ID NO: 674380 - protein, 16 aa, Homo sapiens
  CDR3 for beta chain variable domain of TCR clone 337190 (TRBV29-1, TRBJ2-7)
CSVEDAEDGTAYEQYF

SEQ ID NO: 674381 - protein, 14 aa, Homo sapiens
  CDR3 for alpha chain variable domain of TCR clone 337191 (TRAV35, TRAJ33)
CAGSSQDCNYQLIW

SEQ ID NO: 674382 - protein, 15 aa, Homo sapiens
  CDR3 for beta chain variable domain of TCR clone 337191 (TRBV29-1, TRBJ2-7)
CSVEFFDRGSYEQYF

SEQ ID NO: 674383 - protein, 14 aa, Homo sapiens
  CDR3 for alpha chain variable domain of TCR clone 337192 (TRAV1-2, TRAJ16)
CAVNRFSDGQKLLF

SEQ ID NO: 674384 - protein, 14 aa, Homo sapiens
  CDR3 for beta chain variable domain of TCR clone 337192 (TRBV7-2, TRBJ2-7)
CASSLYPGRYEQYV

SEQ ID NO: 674385 - protein, 13 aa, Homo sapiens
  CDR3 for alpha chain variable domain of TCR clone 337193 (TRAV12-1, TRAJ13)
CVVSLSGYQKVTF

SEQ ID NO: 674386 - protein, 13 aa, Homo sapiens
  CDR3 for beta chain variable domain of TCR clone 337193 (TRBV20-1, TRBJ2-5)
CSAILTGQETQYF

SEQ ID NO: 674387 - protein, 13 aa, Homo sapiens
  CDR3 for alpha chain variable domain of TCR clone 337194 (TRAV8-3, TRAJ44)
CAVVPGTASKLTF

SEQ ID NO: 674388 - protein, 14 aa, Homo sapiens
  CDR3 for beta chain variable domain of TCR clone 337194 (TRBV19, TRBJ2-5)
CASSLTGGEETQYF

SEQ ID NO: 674389 - protein, 16 aa, Homo sapiens
  CDR3 for alpha chain variable domain of TCR clone 337195 (TRAV4, TRAJ37)
CLVGWFGSSNTGKLIF

SEQ ID NO: 674390 - protein, 15 aa, Homo sapiens
  CDR3 for beta chain variable domain of TCR clone 337195 (TRBV12-4, TRBJ2-3)
CASSLAERPTDTQYF

SEQ ID NO: 674391 - protein, 11 aa, Homo sapiens
  CDR3 for alpha chain variable domain of TCR clone 337196 (TRAV1-2, TRAJ40)
CAVPGTYKYIF

SEQ ID NO: 674392 - protein, 14 aa, Homo sapiens
  CDR3 for beta chain variable domain of TCR clone 337196 (TRBV19, TRBJ2-1)
CASPTFVLSGGQFF

SEQ ID NO: 674393 - protein, 13 aa, Homo sapiens
  CDR3 for alpha chain variable domain of TCR clone 337197 (TRAV8-3, TRAJ43)
CAVGPDNNNDIRF

SEQ ID NO: 674394 - protein, 19 aa, Homo sapiens
  CDR3 for beta chain variable domain of TCR clone 337197 (TRBV7-2, TRBJ2-3)
CASSFLSRNWGGGTDTQYF

SEQ ID NO: 674395 - protein, 14 aa, Homo sapiens
  CDR3 for alpha chain variable domain of TCR clone 337198 (TRAV4, TRAJ9)
CLVGSGTGGFKTIF

SEQ ID NO: 674396 - protein, 15 aa, Homo sapiens
  CDR3 for beta chain variable domain of TCR clone 337198 (TRBV19, TRBJ1-1)
CASTSGQIQNTEAFF

SEQ ID NO: 674397 - protein, 14 aa, Homo sapiens
  CDR3 for alpha chain variable domain of TCR clone 337199 (TRAV1-2, TRAJ16)
CAVNRFSDGQKVLF

SEQ ID NO: 674398 - protein, 14 aa, Homo sapiens
  CDR3 for beta chain variable domain of TCR clone 337199 (TRBV7-6, TRBJ2-3)
CASSLGTVTDTQYF

SEQ ID NO: 674399 - protein, 15 aa, Homo sapiens
  CDR3 for alpha chain variable domain of TCR clone 337200 (TRAV12-3, TRAJ27)
CAMRAYNTNAGKSTF

SEQ ID NO: 674400 - protein, 13 aa, Homo sapiens
  CDR3 for beta chain variable domain of TCR clone 337200 (TRBV11-2, TRBJ2-5)
CARGRGPSETQYF

SEQ ID NO: 674401 - protein, 14 aa, Homo sapiens
  CDR3 for alpha chain variable domain of TCR clone 337201 (TRAV30, TRAJ33)
CGTVAPRSNYQLIW

SEQ ID NO: 674402 - protein, 21 aa, Homo sapiens
  CDR3 for beta chain variable domain of TCR clone 337201 (TRBV12-4, TRBJ2-5)
CASSFFCQGAPRDPVLRARHA

SEQ ID NO: 674403 - protein, 13 aa, Homo sapiens
  CDR3 for alpha chain variable domain of TCR clone 337202 (TRAV12-3, TRAJ9)
CAMSGGGGFKTIF

SEQ ID NO: 674404 - protein, 15 aa, Homo sapiens
  CDR3 for beta chain variable domain of TCR clone 337202 (TRBV4-1, TRBJ2-5)
CASSQWDLYQETQYF

SEQ ID NO: 674405 - protein, 16 aa, Homo sapiens
  CDR3 for alpha chain variable domain of TCR clone 337203 (TRAV30, TRAJ24)
CGTEIVDADSWGKFQF

SEQ ID NO: 674406 - protein, 12 aa, Homo sapiens
  CDR3 for beta chain variable domain of TCR clone 337203 (TRBV14, TRBJ2-7)
CASSSLEGEQYF

SEQ ID NO: 674407 - protein, 14 aa, Homo sapiens
  CDR3 for alpha chain variable domain of TCR clone 337204 (TRAV8-1, TRAJ31)
CAVTSWNNNARLMF

SEQ ID NO: 674408 - protein, 13 aa, Homo sapiens
  CDR3 for beta chain variable domain of TCR clone 337204 (TRBV10-3, TRBJ2-7)
CASKLAVNYEQYF

SEQ ID NO: 674409 - protein, 11 aa, Homo sapiens
  CDR3 for alpha chain variable domain of TCR clone 337205 (TRAV1-2, TRAJ20)
CAVSNDSKPSF

SEQ ID NO: 674410 - protein, 16 aa, Homo sapiens
  CDR3 for beta chain variable domain of TCR clone 337205 (TRBV29-1, TRBJ2-6)
CSVEDITYSGANVLTF

SEQ ID NO: 674411 - protein, 13 aa, Homo sapiens
  CDR3 for alpha chain variable domain of TCR clone 337206 (TRAV12-3, TRAJ43)
CAMIRPNNNDMRF

SEQ ID NO: 674412 - protein, 12 aa, Homo sapiens
  CDR3 for beta chain variable domain of TCR clone 337206 (TRBV11-2, TRBJ2-5)
CASSLWQETQYF

SEQ ID NO: 674413 - protein, 12 aa, Homo sapiens
  CDR3 for alpha chain variable domain of TCR clone 337207 (TRAV1-1, TRAJ8)
CAGGTGFQKLVF

SEQ ID NO: 674414 - protein, 14 aa, Homo sapiens
  CDR3 for beta chain variable domain of TCR clone 337207 (TRBV5-5, TRBJ1-2)
CASSLDPYNYGYTF

SEQ ID NO: 674415 - protein, 11 aa, Homo sapiens
  CDR3 for alpha chain variable domain of TCR clone 337208 (TRAV12-2, TRAJ29)
CAVTLRSPLVY

SEQ ID NO: 674416 - protein, 16 aa, Homo sapiens
  CDR3 for beta chain variable domain of TCR clone 337208 (TRBV29-1, TRBJ2-2)
CSVETRASGNTGELFF

SEQ ID NO: 674417 - protein, 14 aa, Homo sapiens
  CDR3 for alpha chain variable domain of TCR clone 337209 (TRAV1-2, TRAJ16)
CAVNRFSDGHKLLF

SEQ ID NO: 674418 - protein, 15 aa, Homo sapiens
  CDR3 for beta chain variable domain of TCR clone 337209 (TRBV4-1, TRBJ1-4)
CASSDTGGTNEKLFF

SEQ ID NO: 674419 - protein, 13 aa, Homo sapiens
  CDR3 for alpha chain variable domain of TCR clone 337210 (TRAV27, TRAJ6)
CAGGPRGSYIPTF

SEQ ID NO: 674420 - protein, 15 aa, Homo sapiens
  CDR3 for beta chain variable domain of TCR clone 337210 (TRBV5-5, TRBJ2-7)
CASSLAAPLSYEQYF

SEQ ID NO: 674421 - protein, 16 aa, Homo sapiens
  CDR3 for alpha chain variable domain of TCR clone 337211 (TRAV3, TRAJ37)
CAVRPHGSGNTGKLIF

SEQ ID NO: 674422 - protein, 15 aa, Homo sapiens
  CDR3 for beta chain variable domain of TCR clone 337211 (TRBV5-1, TRBJ2-5)
CASSFKGGDQETQYF

SEQ ID NO: 674423 - protein, 16 aa, Homo sapiens
  CDR3 for alpha chain variable domain of TCR clone 337212 (TRAV30, TRAJ24)
CGTEIVDADSWGKFLF

SEQ ID NO: 674424 - protein, 12 aa, Homo sapiens
  CDR3 for beta chain variable domain of TCR clone 337212 (TRBV12-4, TRBJ2-3)
CASSSTTDTQYF

SEQ ID NO: 674425 - protein, 16 aa, Homo sapiens
  CDR3 for alpha chain variable domain of TCR clone 337213 (TRAV3, TRAJ10)
CAVRDMRAGGGNKLTF

SEQ ID NO: 674426 - protein, 15 aa, Homo sapiens
  CDR3 for beta chain variable domain of TCR clone 337213 (TRBV7-6, TRBJ1-5)
CASSQSSGINQPQHF

SEQ ID NO: 674427 - protein, 14 aa, Homo sapiens
  CDR3 for alpha chain variable domain of TCR clone 337214 (TRAV1-2, TRAJ8)
CAVREDTGFQKLVF

SEQ ID NO: 674428 - protein, 16 aa, Homo sapiens
  CDR3 for beta chain variable domain of TCR clone 337214 (TRBV28, TRBJ2-6)
CASSNRRGSGANVLTF

SEQ ID NO: 674429 - protein, 13 aa, Homo sapiens
  CDR3 for alpha chain variable domain of TCR clone 337215 (TRAV16, TRAJ10)
CAPAREEETNTPL

SEQ ID NO: 674430 - protein, 19 aa, Homo sapiens
  CDR3 for beta chain variable domain of TCR clone 337215 (TRBV28, TRBJ2-1)
CASSFSIRGSGRTRYEQFF

SEQ ID NO: 674431 - protein, 12 aa, Homo sapiens
  CDR3 for alpha chain variable domain of TCR clone 337216 (TRAV8-3, TRAJ26)
CAGENYGQNFVF

SEQ ID NO: 674432 - protein, 12 aa, Homo sapiens
  CDR3 for beta chain variable domain of TCR clone 337216 (TRBV11-2, TRBJ2-1)
CASSPGNNEQFF

SEQ ID NO: 674433 - protein, 15 aa, Homo sapiens
  CDR3 for alpha chain variable domain of TCR clone 337217 (TRAV26-1, TRAJ29)
CVVRVEGSGNTPRVF

SEQ ID NO: 674434 - protein, 15 aa, Homo sapiens
  CDR3 for beta chain variable domain of TCR clone 337217 (TRBV7-9, TRBJ1-5)
CASSQGHQPNQPQHF

SEQ ID NO: 674435 - protein, 15 aa, Homo sapiens
  CDR3 for alpha chain variable domain of TCR clone 337218 (TRAV3, TRAJ22)
CAVRDRGGSARQLTF

SEQ ID NO: 674436 - protein, 13 aa, Homo sapiens
  CDR3 for beta chain variable domain of TCR clone 337218 (TRBV7-3, TRBJ2-1)
CASSPVAYNEQFC

SEQ ID NO: 674437 - protein, 15 aa, Homo sapiens
  CDR3 for alpha chain variable domain of TCR clone 337219 (TRAV12-1, TRAJ44)
CVVDTPQGTASKLTF

SEQ ID NO: 674438 - protein, 14 aa, Homo sapiens
  CDR3 for beta chain variable domain of TCR clone 337219 (TRBV7-9, TRBJ2-1)
CASSPQDSLYEQFF

SEQ ID NO: 674439 - protein, 17 aa, Homo sapiens
  CDR3 for alpha chain variable domain of TCR clone 337220 (TRAV3, TRAJ42)
CAVRDRDYGGSQGNRIF

SEQ ID NO: 674440 - protein, 12 aa, Homo sapiens
  CDR3 for beta chain variable domain of TCR clone 337220 (TRBV29-1, TRBJ2-2)
CSVDKYTGEPFF

SEQ ID NO: 674441 - protein, 12 aa, Homo sapiens
  CDR3 for alpha chain variable domain of TCR clone 337221 (TRAV36/DV7, TRAJ54)
CAVVRGAQKLVF

SEQ ID NO: 674442 - protein, 15 aa, Homo sapiens
  CDR3 for beta chain variable domain of TCR clone 337221 (TRBV7-2, TRBJ2-3)
CASSSTGLETDTQYF

SEQ ID NO: 674443 - protein, 14 aa, Homo sapiens
  CDR3 for alpha chain variable domain of TCR clone 337222 (TRAV8-4, TRAJ9)
CAVRINTGGFKTIF

SEQ ID NO: 674444 - protein, 15 aa, Homo sapiens
  CDR3 for beta chain variable domain of TCR clone 337222 (TRBV2, TRBJ2-1)
CASSELAGSYNEQFF

SEQ ID NO: 674445 - protein, 13 aa, Homo sapiens
  CDR3 for alpha chain variable domain of TCR clone 337223 (TRAV8-3, TRAJ9)
CAVGITGGFKTIF

SEQ ID NO: 674446 - protein, 14 aa, Homo sapiens
  CDR3 for beta chain variable domain of TCR clone 337223 (TRBV7-9, TRBJ2-1)
CASSPRDSLYEQFF

SEQ ID NO: 674447 - protein, 13 aa, Homo sapiens
  CDR3 for alpha chain variable domain of TCR clone 337224 (TRAV21, TRAJ20)
CAVGVFADYKLSF

SEQ ID NO: 674448 - protein, 20 aa, Homo sapiens
  CDR3 for beta chain variable domain of TCR clone 337224 (TRBV7-8, TRBJ2-2)
CASSHLFPGPTIHITGELFF

SEQ ID NO: 674449 - protein, 11 aa, Homo sapiens
  CDR3 for alpha chain variable domain of TCR clone 337225 (TRAV23/DV6, TRAJ47)
CAAGYGNKLVF

SEQ ID NO: 674450 - protein, 14 aa, Homo sapiens
  CDR3 for beta chain variable domain of TCR clone 337225 (TRBV18, TRBJ2-5)
CASSPGVSQETQYF

SEQ ID NO: 674451 - protein, 15 aa, Homo sapiens
  CDR3 for alpha chain variable domain of TCR clone 337226 (TRAV2, TRAJ13)
CATPSYPGGYQKVTL

SEQ ID NO: 674452 - protein, 14 aa, Homo sapiens
  CDR3 for beta chain variable domain of TCR clone 337226 (TRBV11-2, TRBJ2-3)
CASSRLARTDTQYF

SEQ ID NO: 674453 - protein, 17 aa, Homo sapiens
  CDR3 for alpha chain variable domain of TCR clone 337227 (TRAV3, TRAJ6)
CAVRDGPRAGGSYIPLF

SEQ ID NO: 674454 - protein, 14 aa, Homo sapiens
  CDR3 for beta chain variable domain of TCR clone 337227 (TRBV7-2, TRBJ2-7)
CASSPKTSFYEQYF

SEQ ID NO: 674455 - protein, 11 aa, Homo sapiens
  CDR3 for alpha chain variable domain of TCR clone 337228 (TRAV3, TRAJ32)
CAVSPKGMVVL

SEQ ID NO: 674456 - protein, 13 aa, Homo sapiens
  CDR3 for beta chain variable domain of TCR clone 337228 (TRBV7-2, TRBJ2-2)
CASSLAVTGELFF

SEQ ID NO: 674457 - protein, 12 aa, Homo sapiens
  CDR3 for alpha chain variable domain of TCR clone 337229 (TRAV12-3, TRAJ29)
CSAREGNTPLVF

SEQ ID NO: 674458 - protein, 17 aa, Homo sapiens
  CDR3 for beta chain variable domain of TCR clone 337229 (TRBV18, TRBJ2-1)
CASSPLAAGAGDDEQFF

SEQ ID NO: 674459 - protein, 14 aa, Homo sapiens
  CDR3 for alpha chain variable domain of TCR clone 337230 (TRAV26-1, TRAJ38)
CIADNAGNNRKLMW

SEQ ID NO: 674460 - protein, 15 aa, Homo sapiens
  CDR3 for beta chain variable domain of TCR clone 337230 (TRBV27, TRBJ2-7)
CASSTAGTGSYEQYF

SEQ ID NO: 674461 - protein, 12 aa, Homo sapiens
  CDR3 for alpha chain variable domain of TCR clone 337231 (TRAV13-1, TRAJ21)
CAAKEGFNKFYF

SEQ ID NO: 674462 - protein, 13 aa, Homo sapiens
  CDR3 for beta chain variable domain of TCR clone 337231 (TRBV12-4, TRBJ1-2)
CASSSGPNYGYTF

SEQ ID NO: 674463 - protein, 14 aa, Homo sapiens
  CDR3 for alpha chain variable domain of TCR clone 337232 (TRAV29/DV5, TRAJ49)
CAASLSNTGNQFYF

SEQ ID NO: 674464 - protein, 15 aa, Homo sapiens
  CDR3 for beta chain variable domain of TCR clone 337232 (TRBV6-3, TRBJ2-7)
CASSSPGTVFYEQYF

SEQ ID NO: 674465 - protein, 11 aa, Homo sapiens
  CDR3 for alpha chain variable domain of TCR clone 337233 (TRAV3, TRAJ21)
CAVGNFNKFYF

SEQ ID NO: 674466 - protein, 16 aa, Homo sapiens
  CDR3 for beta chain variable domain of TCR clone 337233 (TRBV2, TRBJ2-7)
CASSEPWTGPSYEQYF

SEQ ID NO: 674467 - protein, 14 aa, Homo sapiens
  CDR3 for alpha chain variable domain of TCR clone 337234 (TRAV35, TRAJ13)
CAGSPSGGYQKVTF

SEQ ID NO: 674468 - protein, 15 aa, Homo sapiens
  CDR3 for beta chain variable domain of TCR clone 337234 (TRBV5-7, TRBJ1-5)
CAGSYGKLWDQPQHF

SEQ ID NO: 674469 - protein, 12 aa, Homo sapiens
  CDR3 for alpha chain variable domain of TCR clone 337235 (TRAV6, TRAJ20)
CALDRGDYKLSF

SEQ ID NO: 674470 - protein, 14 aa, Homo sapiens
  CDR3 for beta chain variable domain of TCR clone 337235 (TRBV7-9, TRBJ2-1)
CASSPRDSLYEQFF

SEQ ID NO: 674471 - protein, 13 aa, Homo sapiens
  CDR3 for alpha chain variable domain of TCR clone 337236 (TRAV17, TRAJ40)
CAGALGGTYNYIF

SEQ ID NO: 674472 - protein, 16 aa, Homo sapiens
  CDR3 for beta chain variable domain of TCR clone 337236 (TRBV11-2, TRBJ1-2)
CASSLDTGGADYGYTF

SEQ ID NO: 674473 - protein, 16 aa, Homo sapiens
  CDR3 for alpha chain variable domain of TCR clone 337237 (TRAV13-1, TRAJ10)
CAASSHFTGGGSKLTF

SEQ ID NO: 674474 - protein, 15 aa, Homo sapiens
  CDR3 for beta chain variable domain of TCR clone 337237 (TRBV7-9, TRBJ1-6)
CASSSPGRGNSPLHF

SEQ ID NO: 674475 - protein, 15 aa, Homo sapiens
  CDR3 for alpha chain variable domain of TCR clone 337238 (TRAV3, TRAJ22)
CAVRDRGGSARQMAF

SEQ ID NO: 674476 - protein, 13 aa, Homo sapiens
  CDR3 for beta chain variable domain of TCR clone 337238 (TRBV20-1, TRBJ1-1)
CSARGGGNTEAFF

SEQ ID NO: 674477 - protein, 14 aa, Homo sapiens
  CDR3 for alpha chain variable domain of TCR clone 337239 (TRAV17, TRAJ22)
CATVLSGSARQLTF

SEQ ID NO: 674478 - protein, 17 aa, Homo sapiens
  CDR3 for beta chain variable domain of TCR clone 337239 (TRBV4-1, TRBJ1-4)
CASSQEGPRGVEEKLFF

SEQ ID NO: 674479 - protein, 17 aa, Homo sapiens
  CDR3 for alpha chain variable domain of TCR clone 337240 (TRAV3, TRAJ6)
CAVRDGHRAGRSYIPTF

SEQ ID NO: 674480 - protein, 14 aa, Homo sapiens
  CDR3 for beta chain variable domain of TCR clone 337240 (TRBV7-2, TRBJ2-7)
CASSPKTSFYEQYF

SEQ ID NO: 674481 - protein, 13 aa, Homo sapiens
  CDR3 for alpha chain variable domain of TCR clone 337241 (TRAV13-2, TRAJ53)
CAENMGSNYKLTC

SEQ ID NO: 674482 - protein, 13 aa, Homo sapiens
  CDR3 for beta chain variable domain of TCR clone 337241 (TRBV4-1, TRBJ2-2)
CASSQENTGELFF

SEQ ID NO: 674483 - protein, 16 aa, Homo sapiens
  CDR3 for alpha chain variable domain of TCR clone 337242 (TRAV12-2, TRAJ45)
CAVIFLSGGVADGLTF

SEQ ID NO: 674484 - protein, 19 aa, Homo sapiens
  CDR3 for beta chain variable domain of TCR clone 337242 (TRBV28, TRBJ2-4)
CASSFQPGGPAHSKNMQYF

SEQ ID NO: 674485 - protein, 15 aa, Homo sapiens
  CDR3 for alpha chain variable domain of TCR clone 337243 (TRAV21, TRAJ53)
CATLNSGGSNYKLTF

SEQ ID NO: 674486 - protein, 14 aa, Homo sapiens
  CDR3 for beta chain variable domain of TCR clone 337243 (TRBV5-1, TRBJ2-7)
CASSRGESLYEQYF

SEQ ID NO: 674487 - protein, 14 aa, Homo sapiens
  CDR3 for alpha chain variable domain of TCR clone 337244 (TRAV8-3, TRAJ10)
CAVGNAGGGNKLTF

SEQ ID NO: 674488 - protein, 16 aa, Homo sapiens
  CDR3 for beta chain variable domain of TCR clone 337244 (TRBV11-2, TRBJ1-2)
CASGLDTGGADYGYTF

SEQ ID NO: 674489 - protein, 15 aa, Homo sapiens
  CDR3 for alpha chain variable domain of TCR clone 337245 (TRAV3, TRAJ12)
CAVRDIRDSSYKLIF

SEQ ID NO: 674490 - protein, 14 aa, Homo sapiens
  CDR3 for beta chain variable domain of TCR clone 337245 (TRBV12-4, TRBJ1-6)
CASNLQGKGSPLHF

SEQ ID NO: 674491 - protein, 14 aa, Homo sapiens
  CDR3 for alpha chain variable domain of TCR clone 337246 (TRAV12-3, TRAJ10)
SHLPLTGGGNKLTF

SEQ ID NO: 674492 - protein, 18 aa, Homo sapiens
  CDR3 for beta chain variable domain of TCR clone 337246 (TRBV12-4, TRBJ1-5)
CASSLFLVGVGAYQPQHF

SEQ ID NO: 674493 - protein, 15 aa, Homo sapiens
  CDR3 for alpha chain variable domain of TCR clone 337247 (TRAV3, TRAJ45)
CAVRTPWGVADGLTF

SEQ ID NO: 674494 - protein, 16 aa, Homo sapiens
  CDR3 for beta chain variable domain of TCR clone 337247 (TRBV6-1, TRBJ2-2)
CASSFGQGANTGELFF

SEQ ID NO: 674495 - protein, 13 aa, Homo sapiens
  CDR3 for alpha chain variable domain of TCR clone 337248 (TRAV21, TRAJ27)
CAARPGNAGKSTF

SEQ ID NO: 674496 - protein, 14 aa, Homo sapiens
  CDR3 for beta chain variable domain of TCR clone 337248 (TRBV11-2, TRBJ2-1)
CASSLSGPYNEQFF

SEQ ID NO: 674497 - protein, 12 aa, Homo sapiens
  CDR3 for alpha chain variable domain of TCR clone 337249 (TRAV17, TRAJ31)
CATEQGNARLMF

SEQ ID NO: 674498 - protein, 13 aa, Homo sapiens
  CDR3 for beta chain variable domain of TCR clone 337249 (TRBV20-1, TRBJ1-1)
CSARVGGNTEAFF

SEQ ID NO: 674499 - protein, 17 aa, Homo sapiens
  CDR3 for alpha chain variable domain of TCR clone 337250 (TRAV12-2, TRAJ6)
CAPQGPPRAGGSYIPTF

SEQ ID NO: 674500 - protein, 16 aa, Homo sapiens
  CDR3 for beta chain variable domain of TCR clone 337250 (TRBV19, TRBJ2-2)
CASSTARSSNTGELFF

SEQ ID NO: 674501 - protein, 17 aa, Homo sapiens
  CDR3 for alpha chain variable domain of TCR clone 337251 (TRAV26-1, TRAJ58)
CIVRVGAEETSGPRLTC

SEQ ID NO: 674502 - protein, 18 aa, Homo sapiens
  CDR3 for beta chain variable domain of TCR clone 337251 (TRBV7-9, TRBJ2-7)
CASSLTTSGSRTWYEQYF

SEQ ID NO: 674503 - protein, 16 aa, Homo sapiens
  CDR3 for alpha chain variable domain of TCR clone 337252 (TRAV35, TRAJ28)
CAGQKYSGAGSYQLTL

SEQ ID NO: 674504 - protein, 13 aa, Homo sapiens
  CDR3 for beta chain variable domain of TCR clone 337252 (TRBV19, TRBJ1-2)
CASSQGQVYGYTF

SEQ ID NO: 674505 - protein, 15 aa, Homo sapiens
  CDR3 for alpha chain variable domain of TCR clone 337253 (TRAV8-3, TRAJ45)
CASSYSRGGADGLTF

SEQ ID NO: 674506 - protein, 13 aa, Homo sapiens
  CDR3 for beta chain variable domain of TCR clone 337253 (TRBV10-3, TRBJ2-7)
FASKLAVNYEQYF

SEQ ID NO: 674507 - protein, 14 aa, Homo sapiens
  CDR3 for alpha chain variable domain of TCR clone 337254 (TRAV12-3, TRAJ42)
CAMNYGGSQGNLIF

SEQ ID NO: 674508 - protein, 14 aa, Homo sapiens
  CDR3 for beta chain variable domain of TCR clone 337254 (TRBV27, TRBJ2-2)
CASSLSVVDGRMFF

SEQ ID NO: 674509 - protein, 16 aa, Homo sapiens
  CDR3 for alpha chain variable domain of TCR clone 337255 (TRAV3, TRAJ18)
CAVRDGRGSTLGRRYF

SEQ ID NO: 674510 - protein, 15 aa, Homo sapiens
  CDR3 for beta chain variable domain of TCR clone 337255 (TRBV7-9, TRBJ1-6)
CASSYPGRGNSPLHF

SEQ ID NO: 674511 - protein, 13 aa, Homo sapiens
  CDR3 for alpha chain variable domain of TCR clone 337256 (TRAV8-3, TRAJ40)
CAVGAQYLRNLQI

SEQ ID NO: 674512 - protein, 17 aa, Homo sapiens
  CDR3 for beta chain variable domain of TCR clone 337256 (TRBV28, TRBJ2-7)
CASSPLHRASGVYEQYF

SEQ ID NO: 674513 - protein, 11 aa, Homo sapiens
  CDR3 for alpha chain variable domain of TCR clone 337257 (TRAV17, TRAJ29)
CYVATDTPLVF

SEQ ID NO: 674514 - protein, 15 aa, Homo sapiens
  CDR3 for beta chain variable domain of TCR clone 337257 (TRBV7-2, TRBJ1-2)
CDSSPRAGWNYGYTF

SEQ ID NO: 674515 - protein, 16 aa, Homo sapiens
  CDR3 for alpha chain variable domain of TCR clone 337258 (TRAV30, TRAJ24)
CGTEIVDAESWGKFQF

SEQ ID NO: 674516 - protein, 14 aa, Homo sapiens
  CDR3 for beta chain variable domain of TCR clone 337258 (TRBV11-2, TRBJ2-5)
CASSRTGGIETQYF

SEQ ID NO: 674517 - protein, 13 aa, Homo sapiens
  CDR3 for alpha chain variable domain of TCR clone 337259 (TRAV2, TRAJ40)
CAVVASGTYKYIF

SEQ ID NO: 674518 - protein, 14 aa, Homo sapiens
  CDR3 for beta chain variable domain of TCR clone 337259 (TRBV7-2, TRBJ2-7)
CASSPKTSFYEQYF

SEQ ID NO: 674519 - protein, 13 aa, Homo sapiens
  CDR3 for alpha chain variable domain of TCR clone 337260 (TRAV24, TRAJ15)
CAFTDQAGTALIF

SEQ ID NO: 674520 - protein, 14 aa, Homo sapiens
  CDR3 for beta chain variable domain of TCR clone 337260 (TRBV2, TRBJ2-1)
CASSLSGSQGEQFF

SEQ ID NO: 674521 - protein, 16 aa, Homo sapiens
  CDR3 for alpha chain variable domain of TCR clone 337261 (TRAV21, TRAJ37)
CAVRPRGSSNTGQLIF

SEQ ID NO: 674522 - protein, 13 aa, Homo sapiens
  CDR3 for beta chain variable domain of TCR clone 337261 (TRBV7-9, TRBJ2-5)
CASLSPGQETQYF

SEQ ID NO: 674523 - protein, 16 aa, Homo sapiens
  CDR3 for alpha chain variable domain of TCR clone 337262 (TRAV12-2, TRAJ39)
CAVNRGPNNTGNMLTF

SEQ ID NO: 674524 - protein, 10 aa, Homo sapiens
  CDR3 for beta chain variable domain of TCR clone 337262 (TRBV2, TRBJ2-4)
CASRGSIQFF

SEQ ID NO: 674525 - protein, 10 aa, Homo sapiens
  CDR3 for alpha chain variable domain of TCR clone 337263 (TRAV23/DV6, TRAJ43)
CAAAVAALEQ

SEQ ID NO: 674526 - protein, 16 aa, Homo sapiens
  CDR3 for beta chain variable domain of TCR clone 337263 (TRBV19, TRBJ2-3)
CASSPGAASRTDTQYF

SEQ ID NO: 674527 - protein, 12 aa, Homo sapiens
  CDR3 for alpha chain variable domain of TCR clone 337264 (TRAV3, TRAJ27)
CAVRDGAGKSNF

SEQ ID NO: 674528 - protein, 15 aa, Homo sapiens
  CDR3 for beta chain variable domain of TCR clone 337264 (TRBV13, TRBJ2-2)
CASGYRGRRTGELFF

SEQ ID NO: 674529 - protein, 14 aa, Homo sapiens
  CDR3 for alpha chain variable domain of TCR clone 337265 (TRAV2, TRAJ21)
CAVEDLDNFNKFYF

SEQ ID NO: 674530 - protein, 11 aa, Homo sapiens
  CDR3 for beta chain variable domain of TCR clone 337265 (TRBV10-3, TRBJ2-1)
CAISDRGLQFF

SEQ ID NO: 674531 - protein, 14 aa, Homo sapiens
  CDR3 for alpha chain variable domain of TCR clone 337266 (TRAV20, TRAJ56)
CAVQFGGANSKLTF

SEQ ID NO: 674532 - protein, 15 aa, Homo sapiens
  CDR3 for beta chain variable domain of TCR clone 337266 (TRBV6-1, TRBJ1-3)
CASSDFGFSVNTMYF

SEQ ID NO: 674533 - protein, 15 aa, Homo sapiens
  CDR3 for alpha chain variable domain of TCR clone 337267 (TRAV13-1, TRAJ17)
CAASIERAAGNKLTF

SEQ ID NO: 674534 - protein, 17 aa, Homo sapiens
  CDR3 for beta chain variable domain of TCR clone 337267 (TRBV13, TRBJ2-3)
CASSLSRVAGGGNTQYF

SEQ ID NO: 674535 - protein, 14 aa, Homo sapiens
  CDR3 for alpha chain variable domain of TCR clone 337268 (TRAV20, TRAJ9)
CAVQATTGGFKTIF

SEQ ID NO: 674536 - protein, 14 aa, Homo sapiens
  CDR3 for beta chain variable domain of TCR clone 337268 (TRBV12-5, TRBJ1-6)
CASRVGQINSPLHF

SEQ ID NO: 674537 - protein, 15 aa, Homo sapiens
  CDR3 for alpha chain variable domain of TCR clone 337269 (TRAV12-2, TRAJ43)
CAFDMRFGAGTRLTV

SEQ ID NO: 674538 - protein, 14 aa, Homo sapiens
  CDR3 for beta chain variable domain of TCR clone 337269 (TRBV11-1, TRBJ2-7)
CASSFRQGSYEQYF

SEQ ID NO: 674539 - protein, 14 aa, Homo sapiens
  CDR3 for alpha chain variable domain of TCR clone 337270 (TRAV4, TRAJ17)
CLVCDMAAGNKLTF

SEQ ID NO: 674540 - protein, 13 aa, Homo sapiens
  CDR3 for beta chain variable domain of TCR clone 337270 (TRBV18, TRBJ2-7)
CASQSGGGYEQYF

SEQ ID NO: 674541 - protein, 17 aa, Homo sapiens
  CDR3 for alpha chain variable domain of TCR clone 337271 (TRAV3, TRAJ6)
CAVRDGPRAGGSYIPTI

SEQ ID NO: 674542 - protein, 18 aa, Homo sapiens
  CDR3 for beta chain variable domain of TCR clone 337271 (TRBV7-9, TRBJ2-7)
CASSLTTSGSRTWYEQYF

SEQ ID NO: 674543 - protein, 14 aa, Homo sapiens
  CDR3 for alpha chain variable domain of TCR clone 337272 (TRAV1-2, TRAJ16)
CAVNRFSDGQQLLF

SEQ ID NO: 674544 - protein, 12 aa, Homo sapiens
  CDR3 for beta chain variable domain of TCR clone 337272 (TRBV24-1, TRBJ1-1)
CATLYPDTEAFF

SEQ ID NO: 674545 - protein, 12 aa, Homo sapiens
  CDR3 for alpha chain variable domain of TCR clone 337273 (TRAV1-2, TRAJ33)
CSALDSNYQLIW

SEQ ID NO: 674546 - protein, 14 aa, Homo sapiens
  CDR3 for beta chain variable domain of TCR clone 337273 (TRBV19, TRBJ2-3)
CASSAPRGTDTQYF

SEQ ID NO: 674547 - protein, 14 aa, Homo sapiens
  CDR3 for alpha chain variable domain of TCR clone 337274 (TRAV12-3, TRAJ56)
CAMSVTGANSKLTF

SEQ ID NO: 674548 - protein, 13 aa, Homo sapiens
  CDR3 for beta chain variable domain of TCR clone 337274 (TRBV27, TRBJ1-4)
CASSLMGDEKLFF

SEQ ID NO: 674549 - protein, 15 aa, Homo sapiens
  CDR3 for alpha chain variable domain of TCR clone 337275 (TRAV23/DV6, TRAJ30)
CAASSQERRDGKIIF

SEQ ID NO: 674550 - protein, 17 aa, Homo sapiens
  CDR3 for beta chain variable domain of TCR clone 337275 (TRBV4-3, TRBJ2-1)
CASSQFSSGRASGEQFF

SEQ ID NO: 674551 - protein, 15 aa, Homo sapiens
  CDR3 for alpha chain variable domain of TCR clone 337276 (TRAV3, TRAJ17)
CALRDTGAAGNKLTF

SEQ ID NO: 674552 - protein, 16 aa, Homo sapiens
  CDR3 for beta chain variable domain of TCR clone 337276 (TRBV7-3, TRBJ2-2)
CASSLKRGTLSGELFF

SEQ ID NO: 674553 - protein, 15 aa, Homo sapiens
  CDR3 for alpha chain variable domain of TCR clone 337277 (TRAV12-2, TRAJ53)
CAVNGGGGSNYKLTF

SEQ ID NO: 674554 - protein, 16 aa, Homo sapiens
  CDR3 for beta chain variable domain of TCR clone 337277 (TRBV18, TRBJ1-1)
CASSPGVGGRGGEAFF

SEQ ID NO: 674555 - protein, 16 aa, Homo sapiens
  CDR3 for alpha chain variable domain of TCR clone 337278 (TRAV3, TRAJ10)
CALRDMRAGGGNKLTF

SEQ ID NO: 674556 - protein, 16 aa, Homo sapiens
  CDR3 for beta chain variable domain of TCR clone 337278 (TRBV19, TRBJ2-2)
CASSFPGQGLAGELFF

SEQ ID NO: 674557 - protein, 16 aa, Homo sapiens
  CDR3 for alpha chain variable domain of TCR clone 337279 (TRAV12-2, TRAJ32)
CAVNLGQGGATNKLII

SEQ ID NO: 674558 - protein, 15 aa, Homo sapiens
  CDR3 for beta chain variable domain of TCR clone 337279 (TRBV20-1, TRBJ2-7)
CSARGPLAGGREQYF

SEQ ID NO: 674559 - protein, 23 aa, Homo sapiens
  CDR3 for alpha chain variable domain of TCR clone 337280 (TRAV8-3, TRAJ38)
CAVGASNAGNNHIQNPDPPVYQL

SEQ ID NO: 674560 - protein, 15 aa, Homo sapiens
  CDR3 for beta chain variable domain of TCR clone 337280 (TRBV11-3, TRBJ1-3)
CASSLFGPSGNTIYF

SEQ ID NO: 674561 - protein, 11 aa, Homo sapiens
  CDR3 for alpha chain variable domain of TCR clone 337281 (TRAV2, TRAJ13)
CASGGYQKVSF

SEQ ID NO: 674562 - protein, 13 aa, Homo sapiens
  CDR3 for beta chain variable domain of TCR clone 337281 (TRBV7-9, TRBJ1-2)
CASSLKQNYGYTF

SEQ ID NO: 674563 - protein, 12 aa, Homo sapiens
  CDR3 for alpha chain variable domain of TCR clone 337282 (TRAV35, TRAJ28)
GVEGAGSYQLTF

SEQ ID NO: 674564 - protein, 13 aa, Homo sapiens
  CDR3 for beta chain variable domain of TCR clone 337282 (TRBV10-3, TRBJ2-7)
CASKLAVNYEQYF

SEQ ID NO: 674565 - protein, 14 aa, Homo sapiens
  CDR3 for alpha chain variable domain of TCR clone 337283 (TRAV1-2, TRAJ16)
CAVNRFSDGQKLLF

SEQ ID NO: 674566 - protein, 17 aa, Homo sapiens
  CDR3 for beta chain variable domain of TCR clone 337283 (TRBV5-1, TRBJ2-2)
CASSLAVLSGGTGELFF

SEQ ID NO: 674567 - protein, 10 aa, Homo sapiens
  CDR3 for alpha chain variable domain of TCR clone 337284 (TRAV12-1, TRAJ43)
CVVHNKDMRF

SEQ ID NO: 674568 - protein, 13 aa, Homo sapiens
  CDR3 for beta chain variable domain of TCR clone 337284 (TRBV12-4, TRBJ1-2)
CASSSGLTVISTF

SEQ ID NO: 674569 - protein, 13 aa, Homo sapiens
  CDR3 for alpha chain variable domain of TCR clone 337285 (TRAV26-2, TRAJ43)
CILRAVNNNDMRF

SEQ ID NO: 674570 - protein, 13 aa, Homo sapiens
  CDR3 for beta chain variable domain of TCR clone 337285 (TRBV24-1, TRBJ2-2)
CATSGWSTGELFF

SEQ ID NO: 674571 - protein, 14 aa, Homo sapiens
  CDR3 for alpha chain variable domain of TCR clone 337286 (TRAV29/DV5, TRAJ36)
CAARRKTGSNNLFF

SEQ ID NO: 674572 - protein, 15 aa, Homo sapiens
  CDR3 for beta chain variable domain of TCR clone 337286 (TRBV7-3, TRBJ2-1)
CASSLSSGSFDEQFF

SEQ ID NO: 674573 - protein, 13 aa, Homo sapiens
  CDR3 for alpha chain variable domain of TCR clone 337287 (TRAV2, TRAJ24)
CDLQLTAGGNSSL

SEQ ID NO: 674574 - protein, 14 aa, Homo sapiens
  CDR3 for beta chain variable domain of TCR clone 337287 (TRBV12-5, TRBJ2-5)
CASGSRTHQETQYF

SEQ ID NO: 674575 - protein, 14 aa, Homo sapiens
  CDR3 for alpha chain variable domain of TCR clone 337288 (TRAV3, TRAJ9)
CAVRGNTEGFKTIF

SEQ ID NO: 674576 - protein, 13 aa, Homo sapiens
  CDR3 for beta chain variable domain of TCR clone 337288 (TRBV7-9, TRBJ1-2)
CASSLKQNYGYTF

SEQ ID NO: 674577 - protein, 13 aa, Homo sapiens
  CDR3 for alpha chain variable domain of TCR clone 337289 (TRAV23/DV6, TRAJ16)
CAASISDGQKLLF

SEQ ID NO: 674578 - protein, 14 aa, Homo sapiens
  CDR3 for beta chain variable domain of TCR clone 337289 (TRBV12-5, TRBJ2-5)
CASGSRTHQETQYF

SEQ ID NO: 674579 - protein, 14 aa, Homo sapiens
  CDR3 for alpha chain variable domain of TCR clone 337290 (TRAV1-2, TRAJ8)
CAVIEDTGFQKLVF

SEQ ID NO: 674580 - protein, 14 aa, Homo sapiens
  CDR3 for beta chain variable domain of TCR clone 337290 (TRBV5-4, TRBJ1-1)
CASSLDSRRDEAFF

SEQ ID NO: 674581 - protein, 15 aa, Homo sapiens
  CDR3 for alpha chain variable domain of TCR clone 337291 (TRAV12-1, TRAJ5)
CVVNMLETGRRALTF

SEQ ID NO: 674582 - protein, 14 aa, Homo sapiens
  CDR3 for beta chain variable domain of TCR clone 337291 (TRBV9, TRBJ2-1)
CASSVAGTFDEQFF

SEQ ID NO: 674583 - protein, 14 aa, Homo sapiens
  CDR3 for alpha chain variable domain of TCR clone 337292 (TRAV12-1, TRAJ17)
FVVNYKAAGNKLTF

SEQ ID NO: 674584 - protein, 15 aa, Homo sapiens
  CDR3 for beta chain variable domain of TCR clone 337292 (TRBV7-2, TRBJ2-1)
CASTHGTGIYNEQFF

SEQ ID NO: 674585 - protein, 13 aa, Homo sapiens
  CDR3 for alpha chain variable domain of TCR clone 337293 (TRAV13-1, TRAJ39)
CAASIWAGNMLTF

SEQ ID NO: 674586 - protein, 17 aa, Homo sapiens
  CDR3 for beta chain variable domain of TCR clone 337293 (TRBV7-8, TRBJ2-6)
CASSAGTGGAGANVLTF

SEQ ID NO: 674587 - protein, 15 aa, Homo sapiens
  CDR3 for alpha chain variable domain of TCR clone 337294 (TRAV13-1, TRAJ5)
CAASPRGHGQESTYF

SEQ ID NO: 674588 - protein, 17 aa, Homo sapiens
  CDR3 for beta chain variable domain of TCR clone 337294 (TRBV3-1, TRBJ2-2)
CASSQFMDKVDTGELFF

SEQ ID NO: 674589 - protein, 12 aa, Homo sapiens
  CDR3 for alpha chain variable domain of TCR clone 337295 (TRAV13-1, TRAJ21)
CAAKEGFNKFYF

SEQ ID NO: 674590 - protein, 19 aa, Homo sapiens
  CDR3 for beta chain variable domain of TCR clone 337295 (TRBV7-2, TRBJ2-5)
CASSLAGGGGDPVLRARHA

SEQ ID NO: 674591 - protein, 14 aa, Homo sapiens
  CDR3 for alpha chain variable domain of TCR clone 337296 (TRAV12-2, TRAJ4)
CAEDLCGGYNKLIF

SEQ ID NO: 674592 - protein, 13 aa, Homo sapiens
  CDR3 for beta chain variable domain of TCR clone 337296 (TRBV7-9, TRBJ1-2)
CASSLKQNYGYTF

SEQ ID NO: 674593 - protein, 16 aa, Homo sapiens
  CDR3 for alpha chain variable domain of TCR clone 337297 (TRAV3, TRAJ21)
CAVRDIERGNFNKFYL

SEQ ID NO: 674594 - protein, 16 aa, Homo sapiens
  CDR3 for beta chain variable domain of TCR clone 337297 (TRBV20-1, TRBJ1-4)
CSAPGQGLLTNEKLFF

SEQ ID NO: 674595 - protein, 13 aa, Homo sapiens
  CDR3 for alpha chain variable domain of TCR clone 337298 (TRAV20, TRAJ31)
CAAQAWNNARLMF

SEQ ID NO: 674596 - protein, 12 aa, Homo sapiens
  CDR3 for beta chain variable domain of TCR clone 337298 (TRBV11-2, TRBJ2-2)
CASSLGGGELFF

SEQ ID NO: 674597 - protein, 14 aa, Homo sapiens
  CDR3 for alpha chain variable domain of TCR clone 337299 (TRAV17, TRAJ57)
CATDPQGGSEKLVF

SEQ ID NO: 674598 - protein, 14 aa, Homo sapiens
  CDR3 for beta chain variable domain of TCR clone 337299 (TRBV5-4, TRBJ1-1)
CASSLDSRRDEAFF

SEQ ID NO: 674599 - protein, 11 aa, Homo sapiens
  CDR3 for alpha chain variable domain of TCR clone 337300 (TRAV27, TRAJ20)
CAGLNDYKLSF

SEQ ID NO: 674600 - protein, 19 aa, Homo sapiens
  CDR3 for beta chain variable domain of TCR clone 337300 (TRBV23-1, TRBJ2-3)
TVSLREQPRSTGSTDTQYF

SEQ ID NO: 674601 - protein, 14 aa, Homo sapiens
  CDR3 for alpha chain variable domain of TCR clone 337301 (TRAV20, TRAJ32)
CCGRYGGARNKLIF

SEQ ID NO: 674602 - protein, 16 aa, Homo sapiens
  CDR3 for beta chain variable domain of TCR clone 337301 (TRBV19, TRBJ2-2)
CASRSPGTGATGELFF

SEQ ID NO: 674603 - protein, 12 aa, Homo sapiens
  CDR3 for alpha chain variable domain of TCR clone 337302 (TRAV2, TRAJ9)
CAVGSGGFKTIF

SEQ ID NO: 674604 - protein, 14 aa, Homo sapiens
  CDR3 for beta chain variable domain of TCR clone 337302 (TRBV6-1, TRBJ1-3)
CASVQGGGGNTIYF

SEQ ID NO: 674605 - protein, 15 aa, Homo sapiens
  CDR3 for alpha chain variable domain of TCR clone 337303 (TRAV14/DV4, TRAJ33)
CAMREGQDSNYQLIW

SEQ ID NO: 674606 - protein, 16 aa, Homo sapiens
  CDR3 for beta chain variable domain of TCR clone 337303 (TRBV12-5, TRBJ2-5)
CASGPRTSGNQETQYF

SEQ ID NO: 674607 - protein, 15 aa, Homo sapiens
  CDR3 for alpha chain variable domain of TCR clone 337304 (TRAV29/DV5, TRAJ29)
CAASARSSGNTPLVF

SEQ ID NO: 674608 - protein, 17 aa, Homo sapiens
  CDR3 for beta chain variable domain of TCR clone 337304 (TRBV4-1, TRBJ1-4)
CASSQEGPRGVEEKLFF

SEQ ID NO: 674609 - protein, 10 aa, Homo sapiens
  CDR3 for alpha chain variable domain of TCR clone 337305 (TRAV26-1, TRAJ23)
CIVRVGLEVW

SEQ ID NO: 674610 - protein, 15 aa, Homo sapiens
  CDR3 for beta chain variable domain of TCR clone 337305 (TRBV10-3, TRBJ2-3)
CAISDWDRDTDTQYF

SEQ ID NO: 674611 - protein, 15 aa, Homo sapiens
  CDR3 for alpha chain variable domain of TCR clone 337306 (TRAV27, TRAJ38)
CAARRNAGNNRKLIW

SEQ ID NO: 674612 - protein, 15 aa, Homo sapiens
  CDR3 for beta chain variable domain of TCR clone 337306 (TRBV5-1, TRBJ2-1)
CASSPPSAPYNEQFF

SEQ ID NO: 674613 - protein, 14 aa, Homo sapiens
  CDR3 for alpha chain variable domain of TCR clone 337307 (TRAV20, TRAJ56)
CAVQFGGANSKLTF

SEQ ID NO: 674614 - protein, 16 aa, Homo sapiens
  CDR3 for beta chain variable domain of TCR clone 337307 (TRBV19, TRBJ2-7)
CASSISAGGALYEQYF

SEQ ID NO: 674615 - protein, 13 aa, Homo sapiens
  CDR3 for alpha chain variable domain of TCR clone 337308 (TRAV20, TRAJ37)
CAVYSGNTGKLIF

SEQ ID NO: 674616 - protein, 13 aa, Homo sapiens
  CDR3 for beta chain variable domain of TCR clone 337308 (TRBV7-9, TRBJ1-2)
CASSPSNFWGYTF

SEQ ID NO: 674617 - protein, 11 aa, Homo sapiens
  CDR3 for alpha chain variable domain of TCR clone 337309 (TRAV23/DV6, TRAJ58)
CAARLLRGETS

SEQ ID NO: 674618 - protein, 14 aa, Homo sapiens
  CDR3 for beta chain variable domain of TCR clone 337309 (TRBV12-4, TRBJ2-3)
CASSLSGATDTQYF

SEQ ID NO: 674619 - protein, 15 aa, Homo sapiens
  CDR3 for alpha chain variable domain of TCR clone 337310 (TRAV9-2, TRAJ8)
CALRGLNTGFQKLVF

SEQ ID NO: 674620 - protein, 14 aa, Homo sapiens
  CDR3 for beta chain variable domain of TCR clone 337310 (TRBV4-1, TRBJ2-2)
CASSQAVNTGELFF

SEQ ID NO: 674621 - protein, 13 aa, Homo sapiens
  CDR3 for alpha chain variable domain of TCR clone 337311 (TRAV2, TRAJ40)
CAVVTSGTYKYIF

SEQ ID NO: 674622 - protein, 13 aa, Homo sapiens
  CDR3 for beta chain variable domain of TCR clone 337311 (TRBV23-1, TRBJ1-4)
CASRGKFNEKLFF

SEQ ID NO: 674623 - protein, 12 aa, Homo sapiens
  CDR3 for alpha chain variable domain of TCR clone 337312 (TRAV2, TRAJ30)
CAVEVEDDKIIF

SEQ ID NO: 674624 - protein, 14 aa, Homo sapiens
  CDR3 for beta chain variable domain of TCR clone 337312 (TRBV6-5, TRBJ2-5)
CASSYYPDQETQYF

SEQ ID NO: 674625 - protein, 12 aa, Homo sapiens
  CDR3 for alpha chain variable domain of TCR clone 337313 (TRAV12-3, TRAJ54)
CGADRGAQKLVF

SEQ ID NO: 674626 - protein, 15 aa, Homo sapiens
  CDR3 for beta chain variable domain of TCR clone 337313 (TRBV27, TRBJ2-1)
CASSLAWGPFNEQFF

SEQ ID NO: 674627 - protein, 16 aa, Homo sapiens
  CDR3 for alpha chain variable domain of TCR clone 337314 (TRAV30, TRAJ24)
CGTEIVDADSWGKFQF

SEQ ID NO: 674628 - protein, 15 aa, Homo sapiens
  CDR3 for beta chain variable domain of TCR clone 337314 (TRBV11-2, TRBJ2-1)
CASSKNRGLIYEQFF

SEQ ID NO: 674629 - protein, 13 aa, Homo sapiens
  CDR3 for alpha chain variable domain of TCR clone 337315 (TRAV8-3, TRAJ40)
CAVVVSGTYKYIF

SEQ ID NO: 674630 - protein, 12 aa, Homo sapiens
  CDR3 for beta chain variable domain of TCR clone 337315 (TRBV18, TRBJ1-1)
CASSPGGTEAFF

SEQ ID NO: 674631 - protein, 12 aa, Homo sapiens
  CDR3 for alpha chain variable domain of TCR clone 337316 (TRAV8-3, TRAJ43)
CAVGAGNNDMRF

SEQ ID NO: 674632 - protein, 16 aa, Homo sapiens
  CDR3 for beta chain variable domain of TCR clone 337316 (TRBV6-1, TRBJ2-5)
CASSETLDRGAETQYF

SEQ ID NO: 674633 - protein, 12 aa, Homo sapiens
  CDR3 for alpha chain variable domain of TCR clone 337317 (TRAV8-3, TRAJ26)
CAGDNYGQNFCF

SEQ ID NO: 674634 - protein, 13 aa, Homo sapiens
  CDR3 for beta chain variable domain of TCR clone 337317 (TRBV10-3, TRBJ2-7)
CASKLAVNYEQYF

SEQ ID NO: 674635 - protein, 14 aa, Homo sapiens
  CDR3 for alpha chain variable domain of TCR clone 337318 (TRAV1-2, TRAJ28)
CVARSGAGSYQLTF

SEQ ID NO: 674636 - protein, 13 aa, Homo sapiens
  CDR3 for beta chain variable domain of TCR clone 337318 (TRBV7-9, TRBJ1-2)
CASSLKQNYGYTF

SEQ ID NO: 674637 - protein, 14 aa, Homo sapiens
  CDR3 for alpha chain variable domain of TCR clone 337319 (TRAV12-1, TRAJ12)
CVVTQMDRSYKLIF

SEQ ID NO: 674638 - protein, 13 aa, Homo sapiens
  CDR3 for beta chain variable domain of TCR clone 337319 (TRBV20-1, TRBJ1-1)
CSARGGGNTEAFF

SEQ ID NO: 674639 - protein, 15 aa, Homo sapiens
  CDR3 for alpha chain variable domain of TCR clone 337320 (TRAV26-1, TRAJ29)
CIVRVEGSGNTPLVP

SEQ ID NO: 674640 - protein, 14 aa, Homo sapiens
  CDR3 for beta chain variable domain of TCR clone 337320 (TRBV18, TRBJ2-5)
CASSPGVSQETQYF

SEQ ID NO: 674641 - protein, 11 aa, Homo sapiens
  CDR3 for alpha chain variable domain of TCR clone 337321 (TRAV12-2, TRAJ31)
CAVTRWARLMF

SEQ ID NO: 674642 - protein, 15 aa, Homo sapiens
  CDR3 for beta chain variable domain of TCR clone 337321 (TRBV19, TRBJ2-7)
CGSSIGGGLVNEQYF

SEQ ID NO: 674643 - protein, 14 aa, Homo sapiens
  CDR3 for alpha chain variable domain of TCR clone 337322 (TRAV1-2, TRAJ8)
CAVREDTGFQKLVF

SEQ ID NO: 674644 - protein, 15 aa, Homo sapiens
  CDR3 for beta chain variable domain of TCR clone 337322 (TRBV6-1, TRBJ1-3)
CASGQGGGGGNTIYF

SEQ ID NO: 674645 - protein, 15 aa, Homo sapiens
  CDR3 for alpha chain variable domain of TCR clone 337323 (TRAV12-3, TRAJ6)
CAMSAASGGSYIPTF

SEQ ID NO: 674646 - protein, 14 aa, Homo sapiens
  CDR3 for beta chain variable domain of TCR clone 337323 (TRBV6-1, TRBJ1-3)
CASVQGGGGNTIYF

SEQ ID NO: 674647 - protein, 14 aa, Homo sapiens
  CDR3 for alpha chain variable domain of TCR clone 337324 (TRAV26-1, TRAJ21)
FIVRFVYNFNKFYF

SEQ ID NO: 674648 - protein, 17 aa, Homo sapiens
  CDR3 for beta chain variable domain of TCR clone 337324 (TRBV11-2, TRBJ2-1)
CASSLYPPGVEYNEQFF

SEQ ID NO: 674649 - protein, 14 aa, Homo sapiens
  CDR3 for alpha chain variable domain of TCR clone 337325 (TRAV9-2, TRAJ39)
CALYIYNAGNMFTF

SEQ ID NO: 674650 - protein, 19 aa, Homo sapiens
  CDR3 for beta chain variable domain of TCR clone 337325 (TRBV7-2, TRBJ2-3)
CASSFLSRNWGGGTDTQYF

SEQ ID NO: 674651 - protein, 11 aa, Homo sapiens
  CDR3 for alpha chain variable domain of TCR clone 337326 (TRAV17, TRAJ43)
CATPRSNDMRF

SEQ ID NO: 674652 - protein, 15 aa, Homo sapiens
  CDR3 for beta chain variable domain of TCR clone 337326 (TRBV11-2, TRBJ2-1)
CVSSLGTSGLNEQFF

SEQ ID NO: 674653 - protein, 13 aa, Homo sapiens
  CDR3 for alpha chain variable domain of TCR clone 337327 (TRAV13-1, TRAJ5)
CAAEHTGRRALTF

SEQ ID NO: 674654 - protein, 15 aa, Homo sapiens
  CDR3 for beta chain variable domain of TCR clone 337327 (TRBV6-1, TRBJ2-1)
CASSELRWQYNEQFF

SEQ ID NO: 674655 - protein, 16 aa, Homo sapiens
  CDR3 for alpha chain variable domain of TCR clone 337328 (TRAV1-2, TRAJ18)
CAVRVERGSTLGRLYF

SEQ ID NO: 674656 - protein, 15 aa, Homo sapiens
  CDR3 for beta chain variable domain of TCR clone 337328 (TRBV4-3, TRBJ1-1)
CASSQELGRGTEAFF

SEQ ID NO: 674657 - protein, 13 aa, Homo sapiens
  CDR3 for alpha chain variable domain of TCR clone 337329 (TRAV12-1, TRAJ6)
CVVYPGGSYLPTF

SEQ ID NO: 674658 - protein, 13 aa, Homo sapiens
  CDR3 for beta chain variable domain of TCR clone 337329 (TRBV20-1, TRBJ1-3)
CSAGAYSGNTIYF

SEQ ID NO: 674659 - protein, 15 aa, Homo sapiens
  CDR3 for alpha chain variable domain of TCR clone 337330 (TRAV26-1, TRAJ53)
CIVRVDGGSNYKLTF

SEQ ID NO: 674660 - protein, 14 aa, Homo sapiens
  CDR3 for beta chain variable domain of TCR clone 337330 (TRBV4-3, TRBJ2-1)
CASSQDRWRGEQFF

SEQ ID NO: 674661 - protein, 12 aa, Homo sapiens
  CDR3 for alpha chain variable domain of TCR clone 337331 (TRAV16, TRAJ10)
CSRTGGGNKLTF

SEQ ID NO: 674662 - protein, 13 aa, Homo sapiens
  CDR3 for beta chain variable domain of TCR clone 337331 (TRBV28, TRBJ1-1)
CASSKQGWTEAFF

SEQ ID NO: 674663 - protein, 13 aa, Homo sapiens
  CDR3 for alpha chain variable domain of TCR clone 337332 (TRAV13-1, TRAJ39)
CAASIVMQATCTP

SEQ ID NO: 674664 - protein, 16 aa, Homo sapiens
  CDR3 for beta chain variable domain of TCR clone 337332 (TRBV20-1, TRBJ1-4)
CSAPGQGLLTNEKLFF

SEQ ID NO: 674665 - protein, 15 aa, Homo sapiens
  CDR3 for alpha chain variable domain of TCR clone 337333 (TRAV25, TRAJ53)
CAATGGGGSNYKLTF

SEQ ID NO: 674666 - protein, 12 aa, Homo sapiens
  CDR3 for beta chain variable domain of TCR clone 337333 (TRBV2, TRBJ2-1)
CAYGPPGNEQFF

SEQ ID NO: 674667 - protein, 14 aa, Homo sapiens
  CDR3 for alpha chain variable domain of TCR clone 337334 (TRAV20, TRAJ42)
CAVQAGGSQGNLIF

SEQ ID NO: 674668 - protein, 14 aa, Homo sapiens
  CDR3 for beta chain variable domain of TCR clone 337334 (TRBV28, TRBJ1-2)
CASTIQGANYGYTF

SEQ ID NO: 674669 - protein, 17 aa, Homo sapiens
  CDR3 for alpha chain variable domain of TCR clone 337335 (TRAV8-6, TRAJ4)
CAVSEKMVFGAVTRLAV

SEQ ID NO: 674670 - protein, 14 aa, Homo sapiens
  CDR3 for beta chain variable domain of TCR clone 337335 (TRBV20-1, TRBJ1-1)
CSAQTRIGGTEAFF

SEQ ID NO: 674671 - protein, 13 aa, Homo sapiens
  CDR3 for alpha chain variable domain of TCR clone 337336 (TRAV8-4, TRAJ10)
CAAFTGGGNKLTF

SEQ ID NO: 674672 - protein, 15 aa, Homo sapiens
  CDR3 for beta chain variable domain of TCR clone 337336 (TRBV4-1, TRBJ1-4)
CASSDTGGTNEKLFF

SEQ ID NO: 674673 - protein, 15 aa, Homo sapiens
  CDR3 for alpha chain variable domain of TCR clone 337337 (TRAV12-2, TRAJ50)
CAVNGLETSYDKVIF

SEQ ID NO: 674674 - protein, 13 aa, Homo sapiens
  CDR3 for beta chain variable domain of TCR clone 337337 (TRBV19, TRBJ1-3)
CASRLSLGNTIYF

SEQ ID NO: 674675 - protein, 11 aa, Homo sapiens
  CDR3 for alpha chain variable domain of TCR clone 337338 (TRAV35, TRAJ22)
CAGPGVGQLTF

SEQ ID NO: 674676 - protein, 14 aa, Homo sapiens
  CDR3 for beta chain variable domain of TCR clone 337338 (TRBV5-1, TRBJ1-1)
CASSFTGRNTEAFF

SEQ ID NO: 674677 - protein, 11 aa, Homo sapiens
  CDR3 for alpha chain variable domain of TCR clone 337339 (TRAV16, TRAJ33)
CALHSNYQLIW

SEQ ID NO: 674678 - protein, 16 aa, Homo sapiens
  CDR3 for beta chain variable domain of TCR clone 337339 (TRBV19, TRBJ1-5)
CASSIDRGGPRQPQHF

SEQ ID NO: 674679 - protein, 13 aa, Homo sapiens
  CDR3 for alpha chain variable domain of TCR clone 337340 (TRAV20, TRAJ37)
CAGCSSNTGKLIF

SEQ ID NO: 674680 - protein, 12 aa, Homo sapiens
  CDR3 for beta chain variable domain of TCR clone 337340 (TRBV19, TRBJ2-3)
CASSLGGDTQYF

SEQ ID NO: 674681 - protein, 13 aa, Homo sapiens
  CDR3 for alpha chain variable domain of TCR clone 337341 (TRAV3, TRAJ30)
CAVRDRGDDKIIF

SEQ ID NO: 674682 - protein, 16 aa, Homo sapiens
  CDR3 for beta chain variable domain of TCR clone 337341 (TRBV7-3, TRBJ2-2)
CACSLKRGTLSGELFF

SEQ ID NO: 674683 - protein, 14 aa, Homo sapiens
  CDR3 for alpha chain variable domain of TCR clone 337342 (TRAV29/DV5, TRAJ36)
CAARRKTGANNLFF

SEQ ID NO: 674684 - protein, 12 aa, Homo sapiens
  CDR3 for beta chain variable domain of TCR clone 337342 (TRBV12-4, TRBJ2-7)
RASSLGGYEQYF

SEQ ID NO: 674685 - protein, 14 aa, Homo sapiens
  CDR3 for alpha chain variable domain of TCR clone 337343 (TRAV3, TRAJ16)
CCERLISDGQKLLF

SEQ ID NO: 674686 - protein, 15 aa, Homo sapiens
  CDR3 for beta chain variable domain of TCR clone 337343 (TRBV28, TRBJ2-7)
CASSPGGRGFYEQYF

SEQ ID NO: 674687 - protein, 10 aa, Homo sapiens
  CDR3 for alpha chain variable domain of TCR clone 337344 (TRAV16, TRAJ22)
SAMYLRQLTF

SEQ ID NO: 674688 - protein, 15 aa, Homo sapiens
  CDR3 for beta chain variable domain of TCR clone 337344 (TRBV7-9, TRBJ1-6)
CASSSAGRGNSPLHF

SEQ ID NO: 674689 - protein, 15 aa, Homo sapiens
  CDR3 for alpha chain variable domain of TCR clone 337345 (TRAV3, TRAJ36)
CAVRASQTGANNLFF

SEQ ID NO: 674690 - protein, 15 aa, Homo sapiens
  CDR3 for beta chain variable domain of TCR clone 337345 (TRBV3-1, TRBJ2-1)
CGSSQDYTPRGEQFF

SEQ ID NO: 674691 - protein, 15 aa, Homo sapiens
  CDR3 for alpha chain variable domain of TCR clone 337346 (TRAV26-2, TRAJ28)
CILVESGAGSYQLTF

SEQ ID NO: 674692 - protein, 16 aa, Homo sapiens
  CDR3 for beta chain variable domain of TCR clone 337346 (TRBV4-2, TRBJ1-2)
CASSREIGVASYGYTF

SEQ ID NO: 674693 - protein, 14 aa, Homo sapiens
  CDR3 for alpha chain variable domain of TCR clone 337347 (TRAV38-1, TRAJ40)
CALRPTSGTYKYIF

SEQ ID NO: 674694 - protein, 14 aa, Homo sapiens
  CDR3 for beta chain variable domain of TCR clone 337347 (TRBV25-1, TRBJ1-1)
CASTHLGGNTEPFF

SEQ ID NO: 674695 - protein, 14 aa, Homo sapiens
  CDR3 for alpha chain variable domain of TCR clone 337348 (TRAV12-3, TRAJ22)
CAMSLFGSARQLTF

SEQ ID NO: 674696 - protein, 12 aa, Homo sapiens
  CDR3 for beta chain variable domain of TCR clone 337348 (TRBV7-8, TRBJ2-7)
CASSLGDREQYF

SEQ ID NO: 674697 - protein, 18 aa, Homo sapiens
  CDR3 for alpha chain variable domain of TCR clone 337349 (TRAV26-1, TRAJ22)
CIVRVSFWFCKATDILIW

SEQ ID NO: 674698 - protein, 13 aa, Homo sapiens
  CDR3 for beta chain variable domain of TCR clone 337349 (TRBV7-9, TRBJ1-2)
CASSLKQNYGYTF

SEQ ID NO: 674699 - protein, 17 aa, Homo sapiens
  CDR3 for alpha chain variable domain of TCR clone 337350 (TRAV29/DV5, TRAJ52)
CAATSTADGTSYGKLSF

SEQ ID NO: 674700 - protein, 13 aa, Homo sapiens
  CDR3 for beta chain variable domain of TCR clone 337350 (TRBV20-1, TRBJ1-1)
CSARGGGNTEAFF

SEQ ID NO: 674701 - protein, 16 aa, Homo sapiens
  CDR3 for alpha chain variable domain of TCR clone 337351 (TRAV17, TRAJ12)
CFLLLCWGYSSYKLIF

SEQ ID NO: 674702 - protein, 12 aa, Homo sapiens
  CDR3 for beta chain variable domain of TCR clone 337351 (TRBV29-1, TRBJ1-1)
CSESDGNTEAFF

SEQ ID NO: 674703 - protein, 14 aa, Homo sapiens
  CDR3 for alpha chain variable domain of TCR clone 337352 (TRAV3, TRAJ20)
CAVPPAPNDYKLSF

SEQ ID NO: 674704 - protein, 15 aa, Homo sapiens
  CDR3 for beta chain variable domain of TCR clone 337352 (TRBV28, TRBJ2-1)
CASSIIAGGRSEQFF

SEQ ID NO: 674705 - protein, 14 aa, Homo sapiens
  CDR3 for alpha chain variable domain of TCR clone 337353 (TRAV1-1, TRAJ35)
CAVRSIGFGNVLHC

SEQ ID NO: 674706 - protein, 14 aa, Homo sapiens
  CDR3 for beta chain variable domain of TCR clone 337353 (TRBV7-2, TRBJ1-1)
CASSFLTGTTEAFF

SEQ ID NO: 674707 - protein, 12 aa, Homo sapiens
  CDR3 for alpha chain variable domain of TCR clone 337354 (TRAV12-1, TRAJ4)
TKGSGGYNKLIF

SEQ ID NO: 674708 - protein, 15 aa, Homo sapiens
  CDR3 for beta chain variable domain of TCR clone 337354 (TRBV7-2, TRBJ1-2)
CASSLVSGGDYGYTF

SEQ ID NO: 674709 - protein, 16 aa, Homo sapiens
  CDR3 for alpha chain variable domain of TCR clone 337355 (TRAV30, TRAJ24)
CGTEIVDADSWRKFQF

SEQ ID NO: 674710 - protein, 14 aa, Homo sapiens
  CDR3 for beta chain variable domain of TCR clone 337355 (TRBV12-5, TRBJ2-5)
CASGSRTHQETQYL

SEQ ID NO: 674711 - protein, 17 aa, Homo sapiens
  CDR3 for alpha chain variable domain of TCR clone 337356 (TRAV20, TRAJ42)
CAVQARGYGGSQGNLIF

SEQ ID NO: 674712 - protein, 16 aa, Homo sapiens
  CDR3 for beta chain variable domain of TCR clone 337356 (TRBV29-1, TRBJ2-5)
CSVEGLAGDYQETQYF

SEQ ID NO: 674713 - protein, 13 aa, Homo sapiens
  CDR3 for alpha chain variable domain of TCR clone 337357 (TRAV21, TRAJ49)
CAVRQSTGNQVYF

SEQ ID NO: 674714 - protein, 13 aa, Homo sapiens
  CDR3 for beta chain variable domain of TCR clone 337357 (TRBV6-6, TRBJ1-5)
CASRAYQDQPQHF

SEQ ID NO: 674715 - protein, 18 aa, Homo sapiens
  CDR3 for alpha chain variable domain of TCR clone 337358 (TRAV3, TRAJ42)
CAVRDEGTGGGSPGNLIF

SEQ ID NO: 674716 - protein, 16 aa, Homo sapiens
  CDR3 for beta chain variable domain of TCR clone 337358 (TRBV9, TRBJ1-2)
CASSVAKGRVDYGYTF

SEQ ID NO: 674717 - protein, 14 aa, Homo sapiens
  CDR3 for alpha chain variable domain of TCR clone 337359 (TRAV3, TRAJ33)
CAVRDMDSNYQLIW

SEQ ID NO: 674718 - protein, 17 aa, Homo sapiens
  CDR3 for beta chain variable domain of TCR clone 337359 (TRBV7-2, TRBJ2-3)
CASSARSSGSPTDTQYF

SEQ ID NO: 674719 - protein, 18 aa, Homo sapiens
  CDR3 for alpha chain variable domain of TCR clone 337360 (TRAV12-3, TRAJ52)
CAMSVGGAGGTSYGKLTF

SEQ ID NO: 674720 - protein, 15 aa, Homo sapiens
  CDR3 for beta chain variable domain of TCR clone 337360 (TRBV4-1, TRBJ1-2)
CASSQGQGAAYGYTF

SEQ ID NO: 674721 - protein, 14 aa, Homo sapiens
  CDR3 for alpha chain variable domain of TCR clone 337361 (TRAV12-2, TRAJ17)
CAVLFKAAGNKLTF

SEQ ID NO: 674722 - protein, 13 aa, Homo sapiens
  CDR3 for beta chain variable domain of TCR clone 337361 (TRBV12-4, TRBJ2-5)
CASRLAVQETQYF

SEQ ID NO: 674723 - protein, 12 aa, Homo sapiens
  CDR3 for alpha chain variable domain of TCR clone 337362 (TRAV8-3, TRAJ20)
CAAGANDYKLSL

SEQ ID NO: 674724 - protein, 16 aa, Homo sapiens
  CDR3 for beta chain variable domain of TCR clone 337362 (TRBV19, TRBJ2-2)
CASRSPGTGATGELFF

SEQ ID NO: 674725 - protein, 13 aa, Homo sapiens
  CDR3 for alpha chain variable domain of TCR clone 337363 (TRAV12-1, TRAJ31)
CVVIPNNNARLMF

SEQ ID NO: 674726 - protein, 12 aa, Homo sapiens
  CDR3 for beta chain variable domain of TCR clone 337363 (TRBV12-4, TRBJ2-7)
CASSLGGYEQYF

SEQ ID NO: 674727 - protein, 10 aa, Homo sapiens
  CDR3 for alpha chain variable domain of TCR clone 337364 (TRAV38-2/DV8, TRAJ40)
CASGTYKYIF

SEQ ID NO: 674728 - protein, 17 aa, Homo sapiens
  CDR3 for beta chain variable domain of TCR clone 337364 (TRBV11-2, TRBJ2-1)
CASSLYPPGVEYNEQFF

SEQ ID NO: 674729 - protein, 14 aa, Homo sapiens
  CDR3 for alpha chain variable domain of TCR clone 337365 (TRAV3, TRAJ37)
CAVKESGNTGKLIF

SEQ ID NO: 674730 - protein, 14 aa, Homo sapiens
  CDR3 for beta chain variable domain of TCR clone 337365 (TRBV2, TRBJ1-5)
CGSSENRGGQPQHF

SEQ ID NO: 674731 - protein, 14 aa, Homo sapiens
  CDR3 for alpha chain variable domain of TCR clone 337366 (TRAV13-1, TRAJ26)
CAASRGNYGQNFVF

SEQ ID NO: 674732 - protein, 20 aa, Homo sapiens
  CDR3 for beta chain variable domain of TCR clone 337366 (TRBV7-8, TRBJ2-2)
CASSHLFPGPTIHITGELFF

SEQ ID NO: 674733 - protein, 15 aa, Homo sapiens
  CDR3 for alpha chain variable domain of TCR clone 337367 (TRAV17, TRAJ53)
CATDDSGGSNYKLTF

SEQ ID NO: 674734 - protein, 12 aa, Homo sapiens
  CDR3 for beta chain variable domain of TCR clone 337367 (TRBV12-4, TRBJ1-3)
CASSFSGNTMYF

SEQ ID NO: 674735 - protein, 11 aa, Homo sapiens
  CDR3 for alpha chain variable domain of TCR clone 337368 (TRAV3, TRAJ21)
CAGGNFNKFYF

SEQ ID NO: 674736 - protein, 17 aa, Homo sapiens
  CDR3 for beta chain variable domain of TCR clone 337368 (TRBV24-1, TRBJ2-1)
CATSDVSTSGTYNEQFF

SEQ ID NO: 674737 - protein, 23 aa, Homo sapiens
  CDR3 for alpha chain variable domain of TCR clone 337369 (TRAV12-2, TRAJ22)
CAVSFRVHPGPLIVSGSARQLTF

SEQ ID NO: 674738 - protein, 13 aa, Homo sapiens
  CDR3 for beta chain variable domain of TCR clone 337369 (TRBV12-4, TRBJ1-2)
CASSLDSNYGYAF

SEQ ID NO: 674739 - protein, 14 aa, Homo sapiens
  CDR3 for alpha chain variable domain of TCR clone 337370 (TRAV35, TRAJ22)
CAGLRPGSARQLTF

SEQ ID NO: 674740 - protein, 13 aa, Homo sapiens
  CDR3 for beta chain variable domain of TCR clone 337370 (TRBV20-1, TRBJ2-7)
CSAAHTSGYEQYF

SEQ ID NO: 674741 - protein, 14 aa, Homo sapiens
  CDR3 for alpha chain variable domain of TCR clone 337371 (TRAV12-3, TRAJ10)
SHLPLTGGGNKLTF

SEQ ID NO: 674742 - protein, 15 aa, Homo sapiens
  CDR3 for beta chain variable domain of TCR clone 337371 (TRBV19, TRBJ2-1)
CASNAQGLAGREQFF

SEQ ID NO: 674743 - protein, 18 aa, Homo sapiens
  CDR3 for alpha chain variable domain of TCR clone 337372 (TRAV13-1, TRAJ52)
CAASKRSAGGTSYGKLTF

SEQ ID NO: 674744 - protein, 15 aa, Homo sapiens
  CDR3 for beta chain variable domain of TCR clone 337372 (TRBV10-3, TRBJ2-3)
CAISEALSSTDTQYF

SEQ ID NO: 674745 - protein, 15 aa, Homo sapiens
  CDR3 for alpha chain variable domain of TCR clone 337373 (TRAV3, TRAJ5)
CAVRDLDTGRRELTF

SEQ ID NO: 674746 - protein, 16 aa, Homo sapiens
  CDR3 for beta chain variable domain of TCR clone 337373 (TRBV12-4, TRBJ1-5)
CASSRPVGGSNQPQHF

SEQ ID NO: 674747 - protein, 17 aa, Homo sapiens
  CDR3 for alpha chain variable domain of TCR clone 337374 (TRAV12-3, TRAJ6)
CAMSARGGAGGSYIPTF

SEQ ID NO: 674748 - protein, 11 aa, Homo sapiens
  CDR3 for beta chain variable domain of TCR clone 337374 (TRBV12-4, TRBJ2-3)
CQQHAPHTQYF

SEQ ID NO: 674749 - protein, 13 aa, Homo sapiens
  CDR3 for alpha chain variable domain of TCR clone 337375 (TRAV27, TRAJ45)
CRSSGGGDDGLTF

SEQ ID NO: 674750 - protein, 11 aa, Homo sapiens
  CDR3 for beta chain variable domain of TCR clone 337375 (TRBV19, TRBJ1-1)
CASSIGSEAFF

SEQ ID NO: 674751 - protein, 12 aa, Homo sapiens
  CDR3 for alpha chain variable domain of TCR clone 337376 (TRAV2, TRAJ33)
CAVEDSNYQLIW

SEQ ID NO: 674752 - protein, 14 aa, Homo sapiens
  CDR3 for beta chain variable domain of TCR clone 337376 (TRBV19, TRBJ1-4)
CASSINRGGDKLFF

SEQ ID NO: 674753 - protein, 14 aa, Homo sapiens
  CDR3 for alpha chain variable domain of TCR clone 337377 (TRAV17, TRAJ56)
CATVPAGANSKLTF

SEQ ID NO: 674754 - protein, 13 aa, Homo sapiens
  CDR3 for beta chain variable domain of TCR clone 337377 (TRBV12-4, TRBJ2-2)
RASSITGSGELFF

SEQ ID NO: 674755 - protein, 14 aa, Homo sapiens
  CDR3 for alpha chain variable domain of TCR clone 337378 (TRAV12-2, TRAJ13)
CAVKKTGGYRKVTF

SEQ ID NO: 674756 - protein, 15 aa, Homo sapiens
  CDR3 for beta chain variable domain of TCR clone 337378 (TRBV9, TRBJ1-6)
CASSVAGTGDSPLHF

SEQ ID NO: 674757 - protein, 16 aa, Homo sapiens
  CDR3 for alpha chain variable domain of TCR clone 337379 (TRAV1-2, TRAJ16)
CAVNRFQMARSCFLQG

SEQ ID NO: 674758 - protein, 15 aa, Homo sapiens
  CDR3 for beta chain variable domain of TCR clone 337379 (TRBV9, TRBJ1-6)
CASSVAGTGDSPLHF

SEQ ID NO: 674759 - protein, 15 aa, Homo sapiens
  CDR3 for alpha chain variable domain of TCR clone 337380 (TRAV12-3, TRAJ11)
CAMSKENSGYSTLTF

SEQ ID NO: 674760 - protein, 16 aa, Homo sapiens
  CDR3 for beta chain variable domain of TCR clone 337380 (TRBV5-1, TRBJ2-7)
CASSLEGLAGLYEQYF

SEQ ID NO: 674761 - protein, 14 aa, Homo sapiens
  CDR3 for alpha chain variable domain of TCR clone 337381 (TRAV25, TRAJ27)
CAGSGNTNAGKSTF

SEQ ID NO: 674762 - protein, 16 aa, Homo sapiens
  CDR3 for beta chain variable domain of TCR clone 337381 (TRBV4-1, TRBJ2-6)
CASSQDGGPGANVLTF

SEQ ID NO: 674763 - protein, 11 aa, Homo sapiens
  CDR3 for alpha chain variable domain of TCR clone 337382 (TRAV35, TRAJ41)
CWALSSYALNF

SEQ ID NO: 674764 - protein, 12 aa, Homo sapiens
  CDR3 for beta chain variable domain of TCR clone 337382 (TRBV7-9, TRBJ1-6)
CASSLMTSPLHF

SEQ ID NO: 674765 - protein, 13 aa, Homo sapiens
  CDR3 for alpha chain variable domain of TCR clone 337383 (TRAV2, TRAJ40)
CAVVTSGTYRYIF

SEQ ID NO: 674766 - protein, 16 aa, Homo sapiens
  CDR3 for beta chain variable domain of TCR clone 337383 (TRBV2, TRBJ2-1)
CASSVGGSLSYNEQYF

SEQ ID NO: 674767 - protein, 13 aa, Homo sapiens
  CDR3 for alpha chain variable domain of TCR clone 337384 (TRAV8-3, TRAJ28)
CAVGAVGSYQLTF

SEQ ID NO: 674768 - protein, 14 aa, Homo sapiens
  CDR3 for beta chain variable domain of TCR clone 337384 (TRBV7-2, TRBJ2-7)
CASRSQGAVYEQYF

SEQ ID NO: 674769 - protein, 14 aa, Homo sapiens
  CDR3 for alpha chain variable domain of TCR clone 337385 (TRAV8-6, TRAJ5)
CAVSVDTGKRALTF

SEQ ID NO: 674770 - protein, 20 aa, Homo sapiens
  CDR3 for beta chain variable domain of TCR clone 337385 (TRBV7-8, TRBJ2-2)
CASSHLFPGPTIHITGELFF

SEQ ID NO: 674771 - protein, 13 aa, Homo sapiens
  CDR3 for alpha chain variable domain of TCR clone 337386 (TRAV12-2, TRAJ52)
CNAGGTSYGKLTF

SEQ ID NO: 674772 - protein, 14 aa, Homo sapiens
  CDR3 for beta chain variable domain of TCR clone 337386 (TRBV19, TRBJ2-1)
CASPTFVLSGEQFF

SEQ ID NO: 674773 - protein, 13 aa, Homo sapiens
  CDR3 for alpha chain variable domain of TCR clone 337387 (TRAV20, TRAJ54)
CALTFEEAQKLVF

SEQ ID NO: 674774 - protein, 15 aa, Homo sapiens
  CDR3 for beta chain variable domain of TCR clone 337387 (TRBV20-1, TRBJ1-1)
CSASRGVTGNTEAFF

SEQ ID NO: 674775 - protein, 13 aa, Homo sapiens
  CDR3 for alpha chain variable domain of TCR clone 337388 (TRAV13-2, TRAJ8)
CAFMNTVFQKLVF

SEQ ID NO: 674776 - protein, 15 aa, Homo sapiens
  CDR3 for beta chain variable domain of TCR clone 337388 (TRBV19, TRBJ2-3)
CAAGDTNAPNDTQYF

SEQ ID NO: 674777 - protein, 15 aa, Homo sapiens
  CDR3 for alpha chain variable domain of TCR clone 337389 (TRAV26-1, TRAJ29)
CIVRVEGSGNTPLVS

SEQ ID NO: 674778 - protein, 14 aa, Homo sapiens
  CDR3 for beta chain variable domain of TCR clone 337389 (TRBV18, TRBJ2-5)
CASSPGVSQKTQYF

SEQ ID NO: 674779 - protein, 12 aa, Homo sapiens
  CDR3 for alpha chain variable domain of TCR clone 337390 (TRAV13-1, TRAJ27)
CAAHTNAGKSTF

SEQ ID NO: 674780 - protein, 14 aa, Homo sapiens
  CDR3 for beta chain variable domain of TCR clone 337390 (TRBV19, TRBJ2-2)
CASSEQGIAGELFF

SEQ ID NO: 674781 - protein, 14 aa, Homo sapiens
  CDR3 for alpha chain variable domain of TCR clone 337391 (TRAV1-2, TRAJ16)
CAVKRFSDGQKLLF

SEQ ID NO: 674782 - protein, 14 aa, Homo sapiens
  CDR3 for beta chain variable domain of TCR clone 337391 (TRBV7-2, TRBJ1-2)
CASSQTGSTYGYTF

SEQ ID NO: 674783 - protein, 15 aa, Homo sapiens
  CDR3 for alpha chain variable domain of TCR clone 337392 (TRAV17, TRAJ57)
CATGPSQGGYEKLVF

SEQ ID NO: 674784 - protein, 16 aa, Homo sapiens
  CDR3 for beta chain variable domain of TCR clone 337392 (TRBV12-4, TRBJ1-5)
CASSRPVGGSTQPQHF

SEQ ID NO: 674785 - protein, 14 aa, Homo sapiens
  CDR3 for alpha chain variable domain of TCR clone 337393 (TRAV35, TRAJ53)
CAGNSGGSNYKLTF

SEQ ID NO: 674786 - protein, 15 aa, Homo sapiens
  CDR3 for beta chain variable domain of TCR clone 337393 (TRBV7-9, TRBJ2-1)
CASSLGWGSANEQFF

SEQ ID NO: 674787 - protein, 11 aa, Homo sapiens
  CDR3 for alpha chain variable domain of TCR clone 337394 (TRAV13-1, TRAJ40)
CAVSGTYKYIF

SEQ ID NO: 674788 - protein, 13 aa, Homo sapiens
  CDR3 for beta chain variable domain of TCR clone 337394 (TRBV19, TRBJ1-5)
CASSIGGNQPQHF

SEQ ID NO: 674789 - protein, 15 aa, Homo sapiens
  CDR3 for alpha chain variable domain of TCR clone 337395 (TRAV3, TRAJ20)
CSVSDIKLSDYKLSF

SEQ ID NO: 674790 - protein, 15 aa, Homo sapiens
  CDR3 for beta chain variable domain of TCR clone 337395 (TRBV7-9, TRBJ1-6)
CASSSPGRGNSPLHY

SEQ ID NO: 674791 - protein, 16 aa, Homo sapiens
  CDR3 for alpha chain variable domain of TCR clone 337396 (TRAV30, TRAJ24)
CGTEIVDADSWGKFQF

SEQ ID NO: 674792 - protein, 15 aa, Homo sapiens
  CDR3 for beta chain variable domain of TCR clone 337396 (TRBV19, TRBJ1-1)
CASSIRSGVRTEAFF

SEQ ID NO: 674793 - protein, 15 aa, Homo sapiens
  CDR3 for alpha chain variable domain of TCR clone 337397 (TRAV12-2, TRAJ9)
CAVNNDRTGGFKTIF

SEQ ID NO: 674794 - protein, 14 aa, Homo sapiens
  CDR3 for beta chain variable domain of TCR clone 337397 (TRBV4-1, TRBJ1-4)
CASSQERKNEKLFF

SEQ ID NO: 674795 - protein, 12 aa, Homo sapiens
  CDR3 for alpha chain variable domain of TCR clone 337398 (TRAV12-3, TRAJ39)
CAMTQAGNMLTF

SEQ ID NO: 674796 - protein, 13 aa, Homo sapiens
  CDR3 for beta chain variable domain of TCR clone 337398 (TRBV20-1, TRBJ1-1)
CSALEGGNTEAFF

SEQ ID NO: 674797 - protein, 14 aa, Homo sapiens
  CDR3 for alpha chain variable domain of TCR clone 337399 (TRAV10, TRAJ34)
CVVSGKHRQAHLWY

SEQ ID NO: 674798 - protein, 17 aa, Homo sapiens
  CDR3 for beta chain variable domain of TCR clone 337399 (TRBV20-1, TRBJ1-5)
CSASLSPGQGGNQPQHF

SEQ ID NO: 674799 - protein, 20 aa, Homo sapiens
  CDR3 for alpha chain variable domain of TCR clone 337400 (TRAV12-3, TRAJ41)
SLFIRDSQPSDSATPEALNF

SEQ ID NO: 674800 - protein, 13 aa, Homo sapiens
  CDR3 for beta chain variable domain of TCR clone 337400 (TRBV5-1, TRBJ1-2)
CASSLQGNYGYTF

SEQ ID NO: 674801 - protein, 11 aa, Homo sapiens
  CDR3 for alpha chain variable domain of TCR clone 337401 (TRAV12-1, TRAJ21)
CVVNNSNKFYF

SEQ ID NO: 674802 - protein, 14 aa, Homo sapiens
  CDR3 for beta chain variable domain of TCR clone 337401 (TRBV7-8, TRBJ2-3)
CASSLEAGTDTQYF

SEQ ID NO: 674803 - protein, 15 aa, Homo sapiens
  CDR3 for alpha chain variable domain of TCR clone 337402 (TRAV12-3, TRAJ6)
CAMSATSGGSYIPTF

SEQ ID NO: 674804 - protein, 15 aa, Homo sapiens
  CDR3 for beta chain variable domain of TCR clone 337402 (TRBV15, TRBJ2-7)
CATSSGTTTTYEQYF

SEQ ID NO: 674805 - protein, 14 aa, Homo sapiens
  CDR3 for alpha chain variable domain of TCR clone 337403 (TRAV12-2, TRAJ13)
CAVKKTGGYQKVTF

SEQ ID NO: 674806 - protein, 14 aa, Homo sapiens
  CDR3 for beta chain variable domain of TCR clone 337403 (TRBV19, TRBJ2-1)
CAIPTFVLSSEQFF

SEQ ID NO: 674807 - protein, 16 aa, Homo sapiens
  CDR3 for alpha chain variable domain of TCR clone 337404 (TRAV17, TRAJ35)
CATAEGGIGFGDVLHC

SEQ ID NO: 674808 - protein, 12 aa, Homo sapiens
  CDR3 for beta chain variable domain of TCR clone 337404 (TRBV11-2, TRBJ2-2)
CASSLGGGELFC

SEQ ID NO: 674809 - protein, 15 aa, Homo sapiens
  CDR3 for alpha chain variable domain of TCR clone 337405 (TRAV21, TRAJ53)
CATLNSGGGNYKLTF

SEQ ID NO: 674810 - protein, 16 aa, Homo sapiens
  CDR3 for beta chain variable domain of TCR clone 337405 (TRBV24-1, TRBJ2-3)
CATSDPGTGATDTQYF

SEQ ID NO: 674811 - protein, 13 aa, Homo sapiens
  CDR3 for alpha chain variable domain of TCR clone 337406 (TRAV17, TRAJ9)
CATDYTGGFKTIF

SEQ ID NO: 674812 - protein, 16 aa, Homo sapiens
  CDR3 for beta chain variable domain of TCR clone 337406 (TRBV7-7, TRBJ2-1)
CASSLASGTSYNEQVF

SEQ ID NO: 674813 - protein, 12 aa, Homo sapiens
  CDR3 for alpha chain variable domain of TCR clone 337407 (TRAV1-2, TRAJ33)
CAALDSNYQLIW

SEQ ID NO: 674814 - protein, 14 aa, Homo sapiens
  CDR3 for beta chain variable domain of TCR clone 337407 (TRBV7-6, TRBJ2-3)
CASSLGTVTDTQYF

SEQ ID NO: 674815 - protein, 14 aa, Homo sapiens
  CDR3 for alpha chain variable domain of TCR clone 337408 (TRAV20, TRAJ42)
CAVQAGGSQGNLIF

SEQ ID NO: 674816 - protein, 14 aa, Homo sapiens
  CDR3 for beta chain variable domain of TCR clone 337408 (TRBV28, TRBJ1-2)
CASRIQGANYGYAC

SEQ ID NO: 674817 - protein, 15 aa, Homo sapiens
  CDR3 for alpha chain variable domain of TCR clone 337409 (TRAV3, TRAJ8)
CAVRDNETGFQKLVF

SEQ ID NO: 674818 - protein, 14 aa, Homo sapiens
  CDR3 for beta chain variable domain of TCR clone 337409 (TRBV5-5, TRBJ2-7)
CASSLGQGTYEQYL

SEQ ID NO: 674819 - protein, 13 aa, Homo sapiens
  CDR3 for alpha chain variable domain of TCR clone 337410 (TRAV12-3, TRAJ36)
CAMRRPGANNLFF

SEQ ID NO: 674820 - protein, 18 aa, Homo sapiens
  CDR3 for beta chain variable domain of TCR clone 337410 (TRBV11-2, TRBJ2-3)
CASSLGGASRGAPNTQYF

SEQ ID NO: 674821 - protein, 15 aa, Homo sapiens
  CDR3 for alpha chain variable domain of TCR clone 337411 (TRAV21, TRAJ53)
CATLNSGGSNYKLTF

SEQ ID NO: 674822 - protein, 14 aa, Homo sapiens
  CDR3 for beta chain variable domain of TCR clone 337411 (TRBV7-8, TRBJ2-3)
CASSLEAGTDTQYF

SEQ ID NO: 674823 - protein, 12 aa, Homo sapiens
  CDR3 for alpha chain variable domain of TCR clone 337412 (TRAV12-3, TRAJ17)
CAMTLTGNKLTF

SEQ ID NO: 674824 - protein, 12 aa, Homo sapiens
  CDR3 for beta chain variable domain of TCR clone 337412 (TRBV20-1, TRBJ1-5)
CSAAGWDQPQHF

SEQ ID NO: 674825 - protein, 16 aa, Homo sapiens
  CDR3 for alpha chain variable domain of TCR clone 337413 (TRAV3, TRAJ10)
CAVRDMRAGGGNKLTF

SEQ ID NO: 674826 - protein, 13 aa, Homo sapiens
  CDR3 for beta chain variable domain of TCR clone 337413 (TRBV29-1, TRBJ2-2)
CSTTGVNTGELFF

SEQ ID NO: 674827 - protein, 15 aa, Homo sapiens
  CDR3 for alpha chain variable domain of TCR clone 337414 (TRAV8-3, TRAJ41)
CAVGSNSNSGYSLNF

SEQ ID NO: 674828 - protein, 13 aa, Homo sapiens
  CDR3 for beta chain variable domain of TCR clone 337414 (TRBV4-2, TRBJ1-2)
CASSQERGLGYTF

SEQ ID NO: 674829 - protein, 16 aa, Homo sapiens
  CDR3 for alpha chain variable domain of TCR clone 337415 (TRAV25, TRAJ52)
CAGPRAGGTSYGKLKF

SEQ ID NO: 674830 - protein, 15 aa, Homo sapiens
  CDR3 for beta chain variable domain of TCR clone 337415 (TRBV10-3, TRBJ2-2)
CAIYTGGTGTGELFF

SEQ ID NO: 674831 - protein, 15 aa, Homo sapiens
  CDR3 for alpha chain variable domain of TCR clone 337416 (TRAV8-3, TRAJ45)
CDSSYSGGGADGLTF

SEQ ID NO: 674832 - protein, 14 aa, Homo sapiens
  CDR3 for beta chain variable domain of TCR clone 337416 (TRBV19, TRBJ2-1)
CASPTFVLSGEQFF

SEQ ID NO: 674833 - protein, 16 aa, Homo sapiens
  CDR3 for alpha chain variable domain of TCR clone 337417 (TRAV3, TRAJ10)
CAVRDMRAGGGNKLNF

SEQ ID NO: 674834 - protein, 20 aa, Homo sapiens
  CDR3 for beta chain variable domain of TCR clone 337417 (TRBV11-3, TRBJ2-7)
CASSQRTSGSLRAVLRAGHQ

SEQ ID NO: 674835 - protein, 13 aa, Homo sapiens
  CDR3 for alpha chain variable domain of TCR clone 337418 (TRAV12-2, TRAJ30)
CAVNLNRDDKIIF

SEQ ID NO: 674836 - protein, 15 aa, Homo sapiens
  CDR3 for beta chain variable domain of TCR clone 337418 (TRBV11-2, TRBJ2-1)
CASSLAPRAHNEQFF

SEQ ID NO: 674837 - protein, 16 aa, Homo sapiens
  CDR3 for alpha chain variable domain of TCR clone 337419 (TRAV12-2, TRAJ36)
CGTNNLFFGTGTRLTV

SEQ ID NO: 674838 - protein, 13 aa, Homo sapiens
  CDR3 for beta chain variable domain of TCR clone 337419 (TRBV19, TRBJ1-2)
CASSVPGQDGYTF

SEQ ID NO: 674839 - protein, 12 aa, Homo sapiens
  CDR3 for alpha chain variable domain of TCR clone 337420 (TRAV21, TRAJ13)
PGPSGGYQKVTF

SEQ ID NO: 674840 - protein, 14 aa, Homo sapiens
  CDR3 for beta chain variable domain of TCR clone 337420 (TRBV13, TRBJ2-7)
CASSLKGASYEQYF

SEQ ID NO: 674841 - protein, 13 aa, Homo sapiens
  CDR3 for alpha chain variable domain of TCR clone 337421 (TRAV21, TRAJ27)
CAARPGNAGNSTF

SEQ ID NO: 674842 - protein, 14 aa, Homo sapiens
  CDR3 for beta chain variable domain of TCR clone 337421 (TRBV7-6, TRBJ2-3)
CASSLGSVTDTQYF

SEQ ID NO: 674843 - protein, 16 aa, Homo sapiens
  CDR3 for alpha chain variable domain of TCR clone 337422 (TRAV30, TRAJ24)
CGTEIVDAESGGKFQF

SEQ ID NO: 674844 - protein, 14 aa, Homo sapiens
  CDR3 for beta chain variable domain of TCR clone 337422 (TRBV12-5, TRBJ2-5)
CASGSRTHQETQYF

SEQ ID NO: 674845 - protein, 13 aa, Homo sapiens
  CDR3 for alpha chain variable domain of TCR clone 337423 (TRAV12-2, TRAJ42)
CAVKRGSQGNLIF

SEQ ID NO: 674846 - protein, 16 aa, Homo sapiens
  CDR3 for beta chain variable domain of TCR clone 337423 (TRBV27, TRBJ2-2)
CASSFRGLVRTGELFF

SEQ ID NO: 674847 - protein, 14 aa, Homo sapiens
  CDR3 for alpha chain variable domain of TCR clone 337424 (TRAV12-3, TRAJ9)
GAMSPNTGGFKTIF

SEQ ID NO: 674848 - protein, 12 aa, Homo sapiens
  CDR3 for beta chain variable domain of TCR clone 337424 (TRBV19, TRBJ1-5)
CASSIAQQPQHF

SEQ ID NO: 674849 - protein, 11 aa, Homo sapiens
  CDR3 for alpha chain variable domain of TCR clone 337425 (TRAV2, TRAJ33)
CAVESNYQLIW

SEQ ID NO: 674850 - protein, 15 aa, Homo sapiens
  CDR3 for beta chain variable domain of TCR clone 337425 (TRBV28, TRBJ2-3)
CASSQELGGTDTQYF

SEQ ID NO: 674851 - protein, 14 aa, Homo sapiens
  CDR3 for alpha chain variable domain of TCR clone 337426 (TRAV38-1, TRAJ40)
CALRPTSGTYKSIF

SEQ ID NO: 674852 - protein, 14 aa, Homo sapiens
  CDR3 for beta chain variable domain of TCR clone 337426 (TRBV5-4, TRBJ1-1)
CASSLDSRRDEAFF

SEQ ID NO: 674853 - protein, 17 aa, Homo sapiens
  CDR3 for alpha chain variable domain of TCR clone 337427 (TRAV8-2, )
CVVNIQNPDPAVYQLRA

SEQ ID NO: 674854 - protein, 14 aa, Homo sapiens
  CDR3 for beta chain variable domain of TCR clone 337427 (TRBV7-9, TRBJ2-5)
CASSLVGGEETQYF

SEQ ID NO: 674855 - protein, 13 aa, Homo sapiens
  CDR3 for alpha chain variable domain of TCR clone 337428 (TRAV12-3, TRAJ7)
CAMTLYGNNRLAF

SEQ ID NO: 674856 - protein, 16 aa, Homo sapiens
  CDR3 for beta chain variable domain of TCR clone 337428 (TRBV20-1, TRBJ1-4)
CSARPYGGELNEKLFF

SEQ ID NO: 674857 - protein, 18 aa, Homo sapiens
  CDR3 for alpha chain variable domain of TCR clone 337429 (TRAV13-1, TRAJ52)
CAAKNPNAGGTSYGKLTF

SEQ ID NO: 674858 - protein, 17 aa, Homo sapiens
  CDR3 for beta chain variable domain of TCR clone 337429 (TRBV5-1, TRBJ2-5)
CASSLLGLAANQETQYF

SEQ ID NO: 674859 - protein, 11 aa, Homo sapiens
  CDR3 for alpha chain variable domain of TCR clone 337430 (TRAV12-2, TRAJ49)
CAVHTGNQFYF

SEQ ID NO: 674860 - protein, 16 aa, Homo sapiens
  CDR3 for beta chain variable domain of TCR clone 337430 (TRBV12-4, TRBJ1-5)
CASSRPVGGSNQPQHF

SEQ ID NO: 674861 - protein, 13 aa, Homo sapiens
  CDR3 for alpha chain variable domain of TCR clone 337431 (TRAV12-2, TRAJ37)
CAGGSGNTRKLIF

SEQ ID NO: 674862 - protein, 14 aa, Homo sapiens
  CDR3 for beta chain variable domain of TCR clone 337431 (TRBV6-1, TRBJ2-6)
CASQQGAGANVLTF

SEQ ID NO: 674863 - protein, 12 aa, Homo sapiens
  CDR3 for alpha chain variable domain of TCR clone 337432 (TRAV1-1, TRAJ30)
CAVRGGDDKIIF

SEQ ID NO: 674864 - protein, 13 aa, Homo sapiens
  CDR3 for beta chain variable domain of TCR clone 337432 (TRBV11-3, TRBJ2-7)
CASSLDKLYEQYF

SEQ ID NO: 674865 - protein, 13 aa, Homo sapiens
  CDR3 for alpha chain variable domain of TCR clone 337433 (TRAV16, TRAJ11)
CALTQSGYSTLTF

SEQ ID NO: 674866 - protein, 14 aa, Homo sapiens
  CDR3 for beta chain variable domain of TCR clone 337433 (TRBV19, TRBJ2-7)
CASITTRSSYEQYF

SEQ ID NO: 674867 - protein, 14 aa, Homo sapiens
  CDR3 for alpha chain variable domain of TCR clone 337434 (TRAV1-2, TRAJ16)
CAVNRVSDGQKLLF

SEQ ID NO: 674868 - protein, 13 aa, Homo sapiens
  CDR3 for beta chain variable domain of TCR clone 337434 (TRBV20-1, TRBJ1-1)
CSARAGGNTEAFF

SEQ ID NO: 674869 - protein, 14 aa, Homo sapiens
  CDR3 for alpha chain variable domain of TCR clone 337435 (TRAV8-6, TRAJ5)
CAVSVDTGRRELTF

SEQ ID NO: 674870 - protein, 11 aa, Homo sapiens
  CDR3 for beta chain variable domain of TCR clone 337435 (TRBV7-3, TRBJ2-5)
CASSLSETQYF

SEQ ID NO: 674871 - protein, 14 aa, Homo sapiens
  CDR3 for alpha chain variable domain of TCR clone 337436 (TRAV27, TRAJ36)
CAGPPKRGANKLFF

SEQ ID NO: 674872 - protein, 15 aa, Homo sapiens
  CDR3 for beta chain variable domain of TCR clone 337436 (TRBV18, TRBJ2-7)
CASAPASTPNYEQYF

SEQ ID NO: 674873 - protein, 13 aa, Homo sapiens
  CDR3 for alpha chain variable domain of TCR clone 337437 (TRAV27, TRAJ6)
CAGGTRRSYIPTF

SEQ ID NO: 674874 - protein, 15 aa, Homo sapiens
  CDR3 for beta chain variable domain of TCR clone 337437 (TRBV5-5, TRBJ2-7)
CASSLAAPLSYEQYF

SEQ ID NO: 674875 - protein, 14 aa, Homo sapiens
  CDR3 for alpha chain variable domain of TCR clone 337438 (TRAV34, TRAJ22)
CGADTSGSARQLTF

SEQ ID NO: 674876 - protein, 14 aa, Homo sapiens
  CDR3 for beta chain variable domain of TCR clone 337438 (TRBV7-2, TRBJ2-7)
CASSPKTSFYEQYF

SEQ ID NO: 674877 - protein, 14 aa, Homo sapiens
  CDR3 for alpha chain variable domain of TCR clone 337439 (TRAV1-2, TRAJ16)
CAVNRFSDGQKLRF

SEQ ID NO: 674878 - protein, 16 aa, Homo sapiens
  CDR3 for beta chain variable domain of TCR clone 337439 (TRBV19, TRBJ2-1)
CASSKAGPSSYNEQFF

SEQ ID NO: 674879 - protein, 18 aa, Homo sapiens
  CDR3 for alpha chain variable domain of TCR clone 337440 (TRAV9-2, TRAJ52)
CALSRHNAGGTSYGKLTF

SEQ ID NO: 674880 - protein, 16 aa, Homo sapiens
  CDR3 for beta chain variable domain of TCR clone 337440 (TRBV28, TRBJ1-4)
CASSPPYRGRSEKLFF

SEQ ID NO: 674881 - protein, 17 aa, Homo sapiens
  CDR3 for alpha chain variable domain of TCR clone 337441 (TRAV13-1, TRAJ52)
CAAGRNAGGTIYGKLTF

SEQ ID NO: 674882 - protein, 15 aa, Homo sapiens
  CDR3 for beta chain variable domain of TCR clone 337441 (TRBV6-3, TRBJ2-7)
CASSSPGTVFYEQYF

SEQ ID NO: 674883 - protein, 14 aa, Homo sapiens
  CDR3 for alpha chain variable domain of TCR clone 337442 (TRAV8-4, TRAJ16)
CAVSPVGRWPEAAL

SEQ ID NO: 674884 - protein, 15 aa, Homo sapiens
  CDR3 for beta chain variable domain of TCR clone 337442 (TRBV25-1, TRBJ1-4)
CASSPGDSTNEKLFF

SEQ ID NO: 674885 - protein, 13 aa, Homo sapiens
  CDR3 for alpha chain variable domain of TCR clone 337443 (TRAV12-3, TRAJ4)
CNEQAGGYNQLIF

SEQ ID NO: 674886 - protein, 15 aa, Homo sapiens
  CDR3 for beta chain variable domain of TCR clone 337443 (TRBV5-1, TRBJ1-1)
CASSLSDLGGTEAFF

SEQ ID NO: 674887 - protein, 12 aa, Homo sapiens
  CDR3 for alpha chain variable domain of TCR clone 337444 (TRAV21, TRAJ11)
CAATSGYSTLTF

SEQ ID NO: 674888 - protein, 16 aa, Homo sapiens
  CDR3 for beta chain variable domain of TCR clone 337444 (TRBV28, TRBJ2-2)
CASSLEGGSNTGELFF

SEQ ID NO: 674889 - protein, 10 aa, Homo sapiens
  CDR3 for alpha chain variable domain of TCR clone 337445 (TRAV30, TRAJ24)
WMLTAGKFQF

SEQ ID NO: 674890 - protein, 13 aa, Homo sapiens
  CDR3 for beta chain variable domain of TCR clone 337445 (TRBV7-2, TRBJ1-4)
CASSLAGLEKLFF

SEQ ID NO: 674891 - protein, 11 aa, Homo sapiens
  CDR3 for alpha chain variable domain of TCR clone 337446 (TRAV12-1, TRAJ8)
FVVTGFQKLVF

SEQ ID NO: 674892 - protein, 14 aa, Homo sapiens
  CDR3 for beta chain variable domain of TCR clone 337446 (TRBV19, TRBJ2-1)
CASGKSTQYNEQFF

SEQ ID NO: 674893 - protein, 14 aa, Homo sapiens
  CDR3 for alpha chain variable domain of TCR clone 337447 (TRAV17, TRAJ22)
CATSPSGSARQLTF

SEQ ID NO: 674894 - protein, 13 aa, Homo sapiens
  CDR3 for beta chain variable domain of TCR clone 337447 (TRBV7-3, TRBJ1-1)
CASSQDRGAEAFF

SEQ ID NO: 674895 - protein, 11 aa, Homo sapiens
  CDR3 for alpha chain variable domain of TCR clone 337448 (TRAV17, TRAJ9)
CATTGGFKTIF

SEQ ID NO: 674896 - protein, 17 aa, Homo sapiens
  CDR3 for beta chain variable domain of TCR clone 337448 (TRBV25-1, TRBJ2-7)
CASSDARVVFSSYEQYF

SEQ ID NO: 674897 - protein, 13 aa, Homo sapiens
  CDR3 for alpha chain variable domain of TCR clone 337449 (TRAV1-2, TRAJ9)
CAALNTGGFKTIF

SEQ ID NO: 674898 - protein, 14 aa, Homo sapiens
  CDR3 for beta chain variable domain of TCR clone 337449 (TRBV7-3, TRBJ1-1)
CASSLKGGNTEAFF

SEQ ID NO: 674899 - protein, 14 aa, Homo sapiens
  CDR3 for alpha chain variable domain of TCR clone 337450 (TRAV17, TRAJ53)
CATDAGGSNYRLTF

SEQ ID NO: 674900 - protein, 16 aa, Homo sapiens
  CDR3 for beta chain variable domain of TCR clone 337450 (TRBV4-1, TRBJ1-1)
CASSQDAGMGNTEAFF

SEQ ID NO: 674901 - protein, 13 aa, Homo sapiens
  CDR3 for alpha chain variable domain of TCR clone 337451 (TRAV2, TRAJ24)
CAVPTDSWGKLQF

SEQ ID NO: 674902 - protein, 14 aa, Homo sapiens
  CDR3 for beta chain variable domain of TCR clone 337451 (TRBV20-1, TRBJ2-3)
CSARGGTSTDTQYF

SEQ ID NO: 674903 - protein, 13 aa, Homo sapiens
  CDR3 for alpha chain variable domain of TCR clone 337452 (TRAV27, TRAJ41)
CAGEGNSGYALNF

SEQ ID NO: 674904 - protein, 13 aa, Homo sapiens
  CDR3 for beta chain variable domain of TCR clone 337452 (TRBV19, TRBJ2-3)
CATWDKITDTQYF

SEQ ID NO: 674905 - protein, 16 aa, Homo sapiens
  CDR3 for alpha chain variable domain of TCR clone 337453 (TRAV27, TRAJ52)
CAGAPAGGTSYGKLTF

SEQ ID NO: 674906 - protein, 12 aa, Homo sapiens
  CDR3 for beta chain variable domain of TCR clone 337453 (TRBV27, TRBJ2-1)
CASRGFHNEQFF

SEQ ID NO: 674907 - protein, 12 aa, Homo sapiens
  CDR3 for alpha chain variable domain of TCR clone 337454 (TRAV12-3, TRAJ29)
CAAREGNTPLVF

SEQ ID NO: 674908 - protein, 17 aa, Homo sapiens
  CDR3 for beta chain variable domain of TCR clone 337454 (TRBV18, TRBJ2-1)
CASSPLDAGAGDNEQFF

SEQ ID NO: 674909 - protein, 15 aa, Homo sapiens
  CDR3 for alpha chain variable domain of TCR clone 337455 (TRAV26-1, TRAJ40)
CIVRAVLSGTYKYIF

SEQ ID NO: 674910 - protein, 14 aa, Homo sapiens
  CDR3 for beta chain variable domain of TCR clone 337455 (TRBV19, TRBJ2-1)
CASKDPGLANEQFF

SEQ ID NO: 674911 - protein, 18 aa, Homo sapiens
  CDR3 for alpha chain variable domain of TCR clone 337456 (TRAV21, TRAJ52)
CAVRPSPAGGTSYGKLTF

SEQ ID NO: 674912 - protein, 17 aa, Homo sapiens
  CDR3 for beta chain variable domain of TCR clone 337456 (TRBV13, TRBJ2-3)
CASSLLRVAGGRNTQYF

SEQ ID NO: 674913 - protein, 12 aa, Homo sapiens
  CDR3 for alpha chain variable domain of TCR clone 337457 (TRAV12-3, TRAJ17)
CAMTLTGNKLTF

SEQ ID NO: 674914 - protein, 17 aa, Homo sapiens
  CDR3 for beta chain variable domain of TCR clone 337457 (TRBV4-1, TRBJ2-3)
CASNQWGESYRPDTQYF

SEQ ID NO: 674915 - protein, 17 aa, Homo sapiens
  CDR3 for alpha chain variable domain of TCR clone 337458 (TRAV21, TRAJ52)
SVRPSPAGGTSYGKLTF

SEQ ID NO: 674916 - protein, 17 aa, Homo sapiens
  CDR3 for beta chain variable domain of TCR clone 337458 (TRBV13, TRBJ2-3)
CASSLSRVAGGRNTQYF

SEQ ID NO: 674917 - protein, 16 aa, Homo sapiens
  CDR3 for alpha chain variable domain of TCR clone 337459 (TRAV21, TRAJ52)
CAVTNAGGTSYGKLTF

SEQ ID NO: 674918 - protein, 11 aa, Homo sapiens
  CDR3 for beta chain variable domain of TCR clone 337459 (TRBV2, TRBJ1-1)
CASREGTEALF

SEQ ID NO: 674919 - protein, 16 aa, Homo sapiens
  CDR3 for alpha chain variable domain of TCR clone 337460 (TRAV3, TRAJ42)
SAVRDIEGGSQGNLIF

SEQ ID NO: 674920 - protein, 14 aa, Homo sapiens
  CDR3 for beta chain variable domain of TCR clone 337460 (TRBV18, TRBJ1-1)
CASSPPTGRTEAFF

SEQ ID NO: 674921 - protein, 16 aa, Homo sapiens
  CDR3 for alpha chain variable domain of TCR clone 337461 (TRAV17, TRAJ9)
CATGEWGGSGGFKTIF

SEQ ID NO: 674922 - protein, 15 aa, Homo sapiens
  CDR3 for beta chain variable domain of TCR clone 337461 (TRBV20-1, TRBJ1-2)
CSARDSRGRNYGYTF

SEQ ID NO: 674923 - protein, 12 aa, Homo sapiens
  CDR3 for alpha chain variable domain of TCR clone 337462 (TRAV12-2, TRAJ17)
CRGRAAGNKLTF

SEQ ID NO: 674924 - protein, 14 aa, Homo sapiens
  CDR3 for beta chain variable domain of TCR clone 337462 (TRBV12-4, TRBJ2-5)
CASSFGASGGTQYF

SEQ ID NO: 674925 - protein, 14 aa, Homo sapiens
  CDR3 for alpha chain variable domain of TCR clone 337463 (TRAV12-2, TRAJ17)
CAVLFKAAGNKLTF

SEQ ID NO: 674926 - protein, 17 aa, Homo sapiens
  CDR3 for beta chain variable domain of TCR clone 337463 (TRBV13, TRBJ2-3)
CASSRSRVAGGRNTQYF

SEQ ID NO: 674927 - protein, 13 aa, Homo sapiens
  CDR3 for alpha chain variable domain of TCR clone 337464 (TRAV12-2, TRAJ52)
CAVGGTSYGKLTF

SEQ ID NO: 674928 - protein, 16 aa, Homo sapiens
  CDR3 for beta chain variable domain of TCR clone 337464 (TRBV12-5, TRBJ2-5)
CASGPRTSGNQETQYF

SEQ ID NO: 674929 - protein, 10 aa, Homo sapiens
  CDR3 for alpha chain variable domain of TCR clone 337465 (TRAV21, TRAJ49)
CAVTGNQFYF

SEQ ID NO: 674930 - protein, 15 aa, Homo sapiens
  CDR3 for beta chain variable domain of TCR clone 337465 (TRBV6-1, TRBJ2-3)
CGSTTLAGHTDTQYF

SEQ ID NO: 674931 - protein, 10 aa, Homo sapiens
  CDR3 for alpha chain variable domain of TCR clone 337466 (TRAV36/DV7, TRAJ48)
CAVGNEKLTF

SEQ ID NO: 674932 - protein, 10 aa, Homo sapiens
  CDR3 for beta chain variable domain of TCR clone 337466 (TRBV2, TRBJ2-4)
CASRGSIQYF

SEQ ID NO: 674933 - protein, 13 aa, Homo sapiens
  CDR3 for alpha chain variable domain of TCR clone 337467 (TRAV25, TRAJ17)
CAGLRAAGNKLTF

SEQ ID NO: 674934 - protein, 13 aa, Homo sapiens
  CDR3 for beta chain variable domain of TCR clone 337467 (TRBV7-9, TRBJ1-2)
CASSLKQNYGYTF

SEQ ID NO: 674935 - protein, 12 aa, Homo sapiens
  CDR3 for alpha chain variable domain of TCR clone 337468 (TRAV21, TRAJ31)
CAVWGNNDRLMF

SEQ ID NO: 674936 - protein, 16 aa, Homo sapiens
  CDR3 for beta chain variable domain of TCR clone 337468 (TRBV27, TRBJ2-5)
FASSYGPGGQKETQYF

SEQ ID NO: 674937 - protein, 15 aa, Homo sapiens
  CDR3 for alpha chain variable domain of TCR clone 337469 (TRAV4, TRAJ10)
CLVGDGSGGGNKLTF

SEQ ID NO: 674938 - protein, 15 aa, Homo sapiens
  CDR3 for beta chain variable domain of TCR clone 337469 (TRBV27, TRBJ2-3)
CASSSLAGVIDTQYV

SEQ ID NO: 674939 - protein, 18 aa, Homo sapiens
  CDR3 for alpha chain variable domain of TCR clone 337470 (TRAV21, TRAJ52)
CAVRPSPAGCTSYGKLTF

SEQ ID NO: 674940 - protein, 17 aa, Homo sapiens
  CDR3 for beta chain variable domain of TCR clone 337470 (TRBV25-1, TRBJ2-1)
CASSAYGQGRGVYEQFF

SEQ ID NO: 674941 - protein, 16 aa, Homo sapiens
  CDR3 for alpha chain variable domain of TCR clone 337471 (TRAV3, TRAJ18)
CAVRDGRGSALGRLYF

SEQ ID NO: 674942 - protein, 17 aa, Homo sapiens
  CDR3 for beta chain variable domain of TCR clone 337471 (TRBV5-1, TRBJ2-3)
CASSKSGLVDRTDTQYF

SEQ ID NO: 674943 - protein, 14 aa, Homo sapiens
  CDR3 for alpha chain variable domain of TCR clone 337472 (TRAV12-3, TRAJ57)
CAMSAWGGSEKRVF

SEQ ID NO: 674944 - protein, 14 aa, Homo sapiens
  CDR3 for beta chain variable domain of TCR clone 337472 (TRBV7-8, TRBJ2-7)
CASSPRDRVYEQYF

SEQ ID NO: 674945 - protein, 14 aa, Homo sapiens
  CDR3 for alpha chain variable domain of TCR clone 337473 (TRAV23/DV6, TRAJ22)
CAASVSGSARQLTF

SEQ ID NO: 674946 - protein, 16 aa, Homo sapiens
  CDR3 for beta chain variable domain of TCR clone 337473 (TRBV19, TRBJ2-2)
CASSFPGQGLAGELYF

SEQ ID NO: 674947 - protein, 14 aa, Homo sapiens
  CDR3 for alpha chain variable domain of TCR clone 337474 (TRAV8-6, TRAJ48)
CAVSESFGNEKLTF

SEQ ID NO: 674948 - protein, 16 aa, Homo sapiens
  CDR3 for beta chain variable domain of TCR clone 337474 (TRBV13, TRBJ2-2)
CASSPRTGEHTGELFF

SEQ ID NO: 674949 - protein, 12 aa, Homo sapiens
  CDR3 for alpha chain variable domain of TCR clone 337475 (TRAV21, TRAJ11)
CAATSGYSTLTF

SEQ ID NO: 674950 - protein, 15 aa, Homo sapiens
  CDR3 for beta chain variable domain of TCR clone 337475 (TRBV10-3, TRBJ2-1)
CAIRNGTSGHNGQFF

SEQ ID NO: 674951 - protein, 16 aa, Homo sapiens
  CDR3 for alpha chain variable domain of TCR clone 337476 (TRAV14/DV4, TRAJ12)
CAMREVLVDSSYKLIF

SEQ ID NO: 674952 - protein, 14 aa, Homo sapiens
  CDR3 for beta chain variable domain of TCR clone 337476 (TRBV7-2, TRBJ2-5)
CASSFTQGQETQYF

SEQ ID NO: 674953 - protein, 13 aa, Homo sapiens
  CDR3 for alpha chain variable domain of TCR clone 337477 (TRAV3, TRAJ33)
CAVRDRSNYQLIW

SEQ ID NO: 674954 - protein, 16 aa, Homo sapiens
  CDR3 for beta chain variable domain of TCR clone 337477 (TRBV4-2, TRBJ2-7)
CGSSQDRGTSSYEQYF

SEQ ID NO: 674955 - protein, 15 aa, Homo sapiens
  CDR3 for alpha chain variable domain of TCR clone 337478 (TRAV20, TRAJ52)
CAVQAGGTSYGELTF

SEQ ID NO: 674956 - protein, 17 aa, Homo sapiens
  CDR3 for beta chain variable domain of TCR clone 337478 (TRBV13, TRBJ2-3)
CASSRSRVAGGRNTQYF

SEQ ID NO: 674957 - protein, 16 aa, Homo sapiens
  CDR3 for alpha chain variable domain of TCR clone 337479 (TRAV26-1, TRAJ41)
CIVRVAVANSGNALNF

SEQ ID NO: 674958 - protein, 15 aa, Homo sapiens
  CDR3 for beta chain variable domain of TCR clone 337479 (TRBV6-1, TRBJ1-1)
CASSEYPRMNTEAFF

SEQ ID NO: 674959 - protein, 13 aa, Homo sapiens
  CDR3 for alpha chain variable domain of TCR clone 337480 (TRAV27, TRAJ17)
CAGAATAGNKLTF

SEQ ID NO: 674960 - protein, 15 aa, Homo sapiens
  CDR3 for beta chain variable domain of TCR clone 337480 (TRBV5-1, TRBJ2-3)
CASRNQAGSTDTQCF

SEQ ID NO: 674961 - protein, 13 aa, Homo sapiens
  CDR3 for alpha chain variable domain of TCR clone 337481 (TRAV8-4, TRAJ9)
CAVSETGGFKTIF

SEQ ID NO: 674962 - protein, 16 aa, Homo sapiens
  CDR3 for beta chain variable domain of TCR clone 337481 (TRBV7-6, TRBJ2-3)
CASSARTSRGTDTQYF

SEQ ID NO: 674963 - protein, 23 aa, Homo sapiens
  CDR3 for alpha chain variable domain of TCR clone 337482 (TRAV26-1, TRAJ38)
CIADNAGNNHIQNPDPAVFQLRG

SEQ ID NO: 674964 - protein, 13 aa, Homo sapiens
  CDR3 for beta chain variable domain of TCR clone 337482 (TRBV20-1, TRBJ1-1)
CSARGGGNTEAFF

SEQ ID NO: 674965 - protein, 12 aa, Homo sapiens
  CDR3 for alpha chain variable domain of TCR clone 337483 (TRAV12-3, TRAJ17)
CAMTLTGNKLTF

SEQ ID NO: 674966 - protein, 11 aa, Homo sapiens
  CDR3 for beta chain variable domain of TCR clone 337483 (TRBV11-2, TRBJ2-2)
CASSLPGGLFF

SEQ ID NO: 674967 - protein, 13 aa, Homo sapiens
  CDR3 for alpha chain variable domain of TCR clone 337484 (TRAV13-2, TRAJ5)
CAVMDTGRRAITF

SEQ ID NO: 674968 - protein, 12 aa, Homo sapiens
  CDR3 for beta chain variable domain of TCR clone 337484 (TRBV28, TRBJ2-7)
CASSFSSYEQYF

SEQ ID NO: 674969 - protein, 15 aa, Homo sapiens
  CDR3 for alpha chain variable domain of TCR clone 337485 (TRAV8-3, TRAJ40)
CAVGPYTSGTYKSIF

SEQ ID NO: 674970 - protein, 18 aa, Homo sapiens
  CDR3 for beta chain variable domain of TCR clone 337485 (TRBV7-2, TRBJ2-7)
CASSLDPGVDRASSTSGR

SEQ ID NO: 674971 - protein, 18 aa, Homo sapiens
  CDR3 for alpha chain variable domain of TCR clone 337486 (TRAV29/DV5, TRAJ52)
CAAGFRGAVGTSYGKLTF

SEQ ID NO: 674972 - protein, 16 aa, Homo sapiens
  CDR3 for beta chain variable domain of TCR clone 337486 (TRBV7-3, TRBJ2-2)
YASSLKRGTLSGELFF

SEQ ID NO: 674973 - protein, 14 aa, Homo sapiens
  CDR3 for alpha chain variable domain of TCR clone 337487 (TRAV2, TRAJ20)
CAVDLRKHDYKLSF

SEQ ID NO: 674974 - protein, 14 aa, Homo sapiens
  CDR3 for beta chain variable domain of TCR clone 337487 (TRBV7-2, TRBJ2-7)
CASSPKTSFYEQYF

SEQ ID NO: 674975 - protein, 16 aa, Homo sapiens
  CDR3 for alpha chain variable domain of TCR clone 337488 (TRAV30, TRAJ24)
CGTEIVDADSWGKFQF

SEQ ID NO: 674976 - protein, 18 aa, Homo sapiens
  CDR3 for beta chain variable domain of TCR clone 337488 (TRBV7-9, TRBJ2-7)
RASSLTTSGSRTWYEQYF

SEQ ID NO: 674977 - protein, 12 aa, Homo sapiens
  CDR3 for alpha chain variable domain of TCR clone 337489 (TRAV3, TRAJ13)
CAVSGGYQKVTF

SEQ ID NO: 674978 - protein, 13 aa, Homo sapiens
  CDR3 for beta chain variable domain of TCR clone 337489 (TRBV10-3, TRBJ2-7)
CASKLAVNYEQYF

SEQ ID NO: 674979 - protein, 17 aa, Homo sapiens
  CDR3 for alpha chain variable domain of TCR clone 337490 (TRAV8-6, TRAJ58)
CAVSSWVGETSGSRLTF

SEQ ID NO: 674980 - protein, 17 aa, Homo sapiens
  CDR3 for beta chain variable domain of TCR clone 337490 (TRBV4-3, TRBJ1-2)
CASSSSLQAGGSVGYTF

SEQ ID NO: 674981 - protein, 11 aa, Homo sapiens
  CDR3 for alpha chain variable domain of TCR clone 337491 (TRAV8-2, TRAJ26)
CGVTLLLGSEF

SEQ ID NO: 674982 - protein, 15 aa, Homo sapiens
  CDR3 for beta chain variable domain of TCR clone 337491 (TRBV11-2, TRBJ2-2)
CASSSDRVNAGELFF

SEQ ID NO: 674983 - protein, 12 aa, Homo sapiens
  CDR3 for alpha chain variable domain of TCR clone 337492 (TRAV12-2, TRAJ16)
CAVAPDGQKLLF

SEQ ID NO: 674984 - protein, 15 aa, Homo sapiens
  CDR3 for beta chain variable domain of TCR clone 337492 (TRBV6-1, TRBJ1-3)
CASSDFGFSGNTIYF

SEQ ID NO: 674985 - protein, 14 aa, Homo sapiens
  CDR3 for alpha chain variable domain of TCR clone 337493 (TRAV3, TRAJ33)
CAVRDMGSNHQLIW

SEQ ID NO: 674986 - protein, 17 aa, Homo sapiens
  CDR3 for beta chain variable domain of TCR clone 337493 (TRBV19, TRBJ2-1)
CASSIWSAQPTHNEQFF

SEQ ID NO: 674987 - protein, 16 aa, Homo sapiens
  CDR3 for alpha chain variable domain of TCR clone 337494 (TRAV17, TRAJ35)
CATAAGGIGFGNVLHC

SEQ ID NO: 674988 - protein, 15 aa, Homo sapiens
  CDR3 for beta chain variable domain of TCR clone 337494 (TRBV5-1, TRBJ2-1)
CASTGSGRNYNEQFF

SEQ ID NO: 674989 - protein, 12 aa, Homo sapiens
  CDR3 for alpha chain variable domain of TCR clone 337495 (TRAV8-3, TRAJ20)
CAVDFNDYKLSF

SEQ ID NO: 674990 - protein, 13 aa, Homo sapiens
  CDR3 for beta chain variable domain of TCR clone 337495 (TRBV7-6, TRBJ1-2)
CASSLVADYGYTF

SEQ ID NO: 674991 - protein, 11 aa, Homo sapiens
  CDR3 for alpha chain variable domain of TCR clone 337496 (TRAV2, TRAJ33)
CAVECNYQLIW

SEQ ID NO: 674992 - protein, 15 aa, Homo sapiens
  CDR3 for beta chain variable domain of TCR clone 337496 (TRBV19, TRBJ1-1)
CASTSGQIQYTEAFF

SEQ ID NO: 674993 - protein, 14 aa, Homo sapiens
  CDR3 for alpha chain variable domain of TCR clone 337497 (TRAV1-2, TRAJ16)
CAVNRFSDGQKLFF

SEQ ID NO: 674994 - protein, 13 aa, Homo sapiens
  CDR3 for beta chain variable domain of TCR clone 337497 (TRBV10-2, TRBJ2-7)
CASGASGGYEHYF

SEQ ID NO: 674995 - protein, 15 aa, Homo sapiens
  CDR3 for alpha chain variable domain of TCR clone 337498 (TRAV25, TRAJ52)
CAGRPGGTSYGKLTF

SEQ ID NO: 674996 - protein, 13 aa, Homo sapiens
  CDR3 for beta chain variable domain of TCR clone 337498 (TRBV14, TRBJ2-7)
CASSQDRRYEQYF

SEQ ID NO: 674997 - protein, 17 aa, Homo sapiens
  CDR3 for alpha chain variable domain of TCR clone 337499 (TRAV13-1, TRAJ31)
CVPRDRLMFGDGTQLVV

SEQ ID NO: 674998 - protein, 14 aa, Homo sapiens
  CDR3 for beta chain variable domain of TCR clone 337499 (TRBV10-3, TRBJ2-1)
CAISSDLAYNEQFF

SEQ ID NO: 674999 - protein, 12 aa, Homo sapiens
  CDR3 for alpha chain variable domain of TCR clone 337500 (TRAV21, TRAJ23)
CAVMLQGGKLIF

SEQ ID NO: 675000 - protein, 14 aa, Homo sapiens
  CDR3 for beta chain variable domain of TCR clone 337500 (TRBV7-9, TRBJ1-4)
CAITAGEANEKLFF

SEQ ID NO: 675001 - protein, 15 aa, Homo sapiens
  CDR3 for alpha chain variable domain of TCR clone 337501 (TRAV12-2, TRAJ43)
CAFDMRFGAGTGLTV

SEQ ID NO: 675002 - protein, 18 aa, Homo sapiens
  CDR3 for beta chain variable domain of TCR clone 337501 (TRBV20-1, TRBJ2-3)
CSASGLAGGTGTTDTQYL

SEQ ID NO: 675003 - protein, 13 aa, Homo sapiens
  CDR3 for alpha chain variable domain of TCR clone 337502 (TRAV12-1, TRAJ21)
CVVTLYNFNKFYF

SEQ ID NO: 675004 - protein, 20 aa, Homo sapiens
  CDR3 for beta chain variable domain of TCR clone 337502 (TRBV7-8, TRBJ2-1)
CASSLAHRLAGVRSYNDQFF

SEQ ID NO: 675005 - protein, 16 aa, Homo sapiens
  CDR3 for alpha chain variable domain of TCR clone 337503 (TRAV13-1, TRAJ48)
CAASILGNFGNEKLTF

SEQ ID NO: 675006 - protein, 14 aa, Homo sapiens
  CDR3 for beta chain variable domain of TCR clone 337503 (TRBV7-3, TRBJ1-1)
CASSLKGGNTEAFF

SEQ ID NO: 675007 - protein, 12 aa, Homo sapiens
  CDR3 for alpha chain variable domain of TCR clone 337504 (TRAV2, TRAJ10)
CASTGGGNKLTF

SEQ ID NO: 675008 - protein, 12 aa, Homo sapiens
  CDR3 for beta chain variable domain of TCR clone 337504 (TRBV14, TRBJ2-5)
CASSQLKETQYF

SEQ ID NO: 675009 - protein, 13 aa, Homo sapiens
  CDR3 for alpha chain variable domain of TCR clone 337505 (TRAV8-6, TRAJ21)
CAVSPSSLNKFYF

SEQ ID NO: 675010 - protein, 14 aa, Homo sapiens
  CDR3 for beta chain variable domain of TCR clone 337505 (TRBV7-9, TRBJ2-3)
CASSLGTVTDTQYF

SEQ ID NO: 675011 - protein, 15 aa, Homo sapiens
  CDR3 for alpha chain variable domain of TCR clone 337506 (TRAV35, TRAJ58)
CAGRREETSGSRLTF

SEQ ID NO: 675012 - protein, 12 aa, Homo sapiens
  CDR3 for beta chain variable domain of TCR clone 337506 (TRBV7-8, TRBJ2-7)
CASSLGDREQYF

SEQ ID NO: 675013 - protein, 16 aa, Homo sapiens
  CDR3 for alpha chain variable domain of TCR clone 337507 (TRAV3, TRAJ10)
CAVRDMRAGGGNKLTF

SEQ ID NO: 675014 - protein, 20 aa, Homo sapiens
  CDR3 for beta chain variable domain of TCR clone 337507 (TRBV11-3, TRBJ2-7)
CASSKRTSGSLRAVLRAGHQ

SEQ ID NO: 675015 - protein, 12 aa, Homo sapiens
  CDR3 for alpha chain variable domain of TCR clone 337508 (TRAV21, TRAJ3)
CCFYSSASKIIY

SEQ ID NO: 675016 - protein, 16 aa, Homo sapiens
  CDR3 for beta chain variable domain of TCR clone 337508 (TRBV19, TRBJ2-1)
CASSKAGPSSYNEQFF

SEQ ID NO: 675017 - protein, 18 aa, Homo sapiens
  CDR3 for alpha chain variable domain of TCR clone 337509 (TRAV21, TRAJ53)
CAVKGGENSGGSNYKLTF

SEQ ID NO: 675018 - protein, 18 aa, Homo sapiens
  CDR3 for beta chain variable domain of TCR clone 337509 (TRBV25-1, TRBJ1-2)
CASSGLQNGQGLIFGYTF

SEQ ID NO: 675019 - protein, 15 aa, Homo sapiens
  CDR3 for alpha chain variable domain of TCR clone 337510 (TRAV2, TRAJ24)
CAVEVLTDSWGKFQF

SEQ ID NO: 675020 - protein, 13 aa, Homo sapiens
  CDR3 for beta chain variable domain of TCR clone 337510 (TRBV7-9, TRBJ1-2)
CASSLKQNYGYTF

SEQ ID NO: 675021 - protein, 13 aa, Homo sapiens
  CDR3 for alpha chain variable domain of TCR clone 337511 (TRAV38-1, TRAJ57)
CAPVQGGSEKLVF

SEQ ID NO: 675022 - protein, 17 aa, Homo sapiens
  CDR3 for beta chain variable domain of TCR clone 337511 (TRBV29-1, TRBJ2-3)
CSVDSPPRGARTDTQYF

SEQ ID NO: 675023 - protein, 13 aa, Homo sapiens
  CDR3 for alpha chain variable domain of TCR clone 337512 (TRAV13-1, TRAJ43)
CAASIPNNNDMRF

SEQ ID NO: 675024 - protein, 14 aa, Homo sapiens
  CDR3 for beta chain variable domain of TCR clone 337512 (TRBV7-3, TRBJ2-1)
CASSLAGGTNEQFF

SEQ ID NO: 675025 - protein, 14 aa, Homo sapiens
  CDR3 for alpha chain variable domain of TCR clone 337513 (TRAV12-2, TRAJ17)
CAALFKAAGNKLTF

SEQ ID NO: 675026 - protein, 16 aa, Homo sapiens
  CDR3 for beta chain variable domain of TCR clone 337513 (TRBV7-9, TRBJ2-3)
CASSPWREVGTDTQYF

SEQ ID NO: 675027 - protein, 14 aa, Homo sapiens
  CDR3 for alpha chain variable domain of TCR clone 337514 (TRAV17, TRAJ9)
CATVTLGGGFKTIF

SEQ ID NO: 675028 - protein, 16 aa, Homo sapiens
  CDR3 for beta chain variable domain of TCR clone 337514 (TRBV20-1, TRBJ1-4)
CSAPGQGLLTNEKLFF

SEQ ID NO: 675029 - protein, 17 aa, Homo sapiens
  CDR3 for alpha chain variable domain of TCR clone 337515 (TRAV17, TRAJ28)
CATDPRRGGAGSYQLPF

SEQ ID NO: 675030 - protein, 16 aa, Homo sapiens
  CDR3 for beta chain variable domain of TCR clone 337515 (TRBV25-1, TRBJ1-1)
CASSGDRDKGRIEAFF

SEQ ID NO: 675031 - protein, 14 aa, Homo sapiens
  CDR3 for alpha chain variable domain of TCR clone 337516 (TRAV12-3, TRAJ50)
FAMSPKTSYDKVIF

SEQ ID NO: 675032 - protein, 14 aa, Homo sapiens
  CDR3 for beta chain variable domain of TCR clone 337516 (TRBV19, TRBJ1-1)
CASSMGRNAFEAFF

SEQ ID NO: 675033 - protein, 14 aa, Homo sapiens
  CDR3 for alpha chain variable domain of TCR clone 337517 (TRAV38-1, TRAJ29)
CAFITPSGNTPLVF

SEQ ID NO: 675034 - protein, 16 aa, Homo sapiens
  CDR3 for beta chain variable domain of TCR clone 337517 (TRBV5-1, TRBJ2-3)
CASSSVGRRSTDTQYF

SEQ ID NO: 675035 - protein, 14 aa, Homo sapiens
  CDR3 for alpha chain variable domain of TCR clone 337518 (TRAV12-2, TRAJ17)
CAVNIKAAGNKLTF

SEQ ID NO: 675036 - protein, 16 aa, Homo sapiens
  CDR3 for beta chain variable domain of TCR clone 337518 (TRBV20-1, TRBJ2-6)
CSASSQGYDGANVLTF

SEQ ID NO: 675037 - protein, 13 aa, Homo sapiens
  CDR3 for alpha chain variable domain of TCR clone 337519 (TRAV4, TRAJ15)
CLVGPEAGTALIF

SEQ ID NO: 675038 - protein, 17 aa, Homo sapiens
  CDR3 for beta chain variable domain of TCR clone 337519 (TRBV11-2, TRBJ2-1)
CASSLYPPGVEYNEQFF

SEQ ID NO: 675039 - protein, 19 aa, Homo sapiens
  CDR3 for alpha chain variable domain of TCR clone 337520 (TRAV2, TRAJ20)
ILQVREADAAVYRDCKLSF

SEQ ID NO: 675040 - protein, 11 aa, Homo sapiens
  CDR3 for beta chain variable domain of TCR clone 337520 (TRBV7-2, TRBJ2-3)
CASSSSDTQYF

SEQ ID NO: 675041 - protein, 14 aa, Homo sapiens
  CDR3 for alpha chain variable domain of TCR clone 337521 (TRAV12-1, TRAJ15)
CLPPANQSGTALIF

SEQ ID NO: 675042 - protein, 13 aa, Homo sapiens
  CDR3 for beta chain variable domain of TCR clone 337521 (TRBV7-2, TRBJ2-4)
CASSREHANIQYF

SEQ ID NO: 675043 - protein, 13 aa, Homo sapiens
  CDR3 for alpha chain variable domain of TCR clone 337522 (TRAV27, TRAJ49)
CAPRPYTGNQFYF

SEQ ID NO: 675044 - protein, 18 aa, Homo sapiens
  CDR3 for beta chain variable domain of TCR clone 337522 (TRBV7-3, TRBJ2-5)
CSSSLGGAAQGRWETQYF

SEQ ID NO: 675045 - protein, 11 aa, Homo sapiens
  CDR3 for alpha chain variable domain of TCR clone 337523 (TRAV21, TRAJ34)
CAHYNTDKIIF

SEQ ID NO: 675046 - protein, 12 aa, Homo sapiens
  CDR3 for beta chain variable domain of TCR clone 337523 (TRBV7-3, TRBJ2-1)
CASSFINNEQFF

SEQ ID NO: 675047 - protein, 12 aa, Homo sapiens
  CDR3 for alpha chain variable domain of TCR clone 337524 (TRAV3, TRAJ27)
CAVRDKAGKSTF

SEQ ID NO: 675048 - protein, 14 aa, Homo sapiens
  CDR3 for beta chain variable domain of TCR clone 337524 (TRBV5-1, TRBJ1-2)
CTSSVDSTNYGYTF

SEQ ID NO: 675049 - protein, 18 aa, Homo sapiens
  CDR3 for alpha chain variable domain of TCR clone 337525 (TRAV26-2, TRAJ54)
CILRDVEVGIQGAQKLVF

SEQ ID NO: 675050 - protein, 16 aa, Homo sapiens
  CDR3 for beta chain variable domain of TCR clone 337525 (TRBV6-1, TRBJ2-5)
CASSETLDMGAETQYF

SEQ ID NO: 675051 - protein, 13 aa, Homo sapiens
  CDR3 for alpha chain variable domain of TCR clone 337526 (TRAV13-1, TRAJ13)
CAASKGGYQKVTF

SEQ ID NO: 675052 - protein, 16 aa, Homo sapiens
  CDR3 for beta chain variable domain of TCR clone 337526 (TRBV18, TRBJ1-2)
CASSPTERVTIYGYTF

SEQ ID NO: 675053 - protein, 15 aa, Homo sapiens
  CDR3 for alpha chain variable domain of TCR clone 337527 (TRAV3, TRAJ13)
CAVRDIGGGYPKVTF

SEQ ID NO: 675054 - protein, 15 aa, Homo sapiens
  CDR3 for beta chain variable domain of TCR clone 337527 (TRBV11-2, TRBJ2-1)
CASSLGTSGLNEQFF

SEQ ID NO: 675055 - protein, 17 aa, Homo sapiens
  CDR3 for alpha chain variable domain of TCR clone 337528 (TRAV13-1, TRAJ3)
CAASKAGRGSSASKIIF

SEQ ID NO: 675056 - protein, 15 aa, Homo sapiens
  CDR3 for beta chain variable domain of TCR clone 337528 (TRBV20-1, TRBJ1-5)
CSAREGGHSNQTQHF

SEQ ID NO: 675057 - protein, 14 aa, Homo sapiens
  CDR3 for alpha chain variable domain of TCR clone 337529 (TRAV1-2, TRAJ16)
CAVNRFSDGHKLLF

SEQ ID NO: 675058 - protein, 15 aa, Homo sapiens
  CDR3 for beta chain variable domain of TCR clone 337529 (TRBV6-5, TRBJ2-7)
CASSASGRWSYEQYF

SEQ ID NO: 675059 - protein, 11 aa, Homo sapiens
  CDR3 for alpha chain variable domain of TCR clone 337530 (TRAV2, TRAJ13)
CASVGDQRVTF

SEQ ID NO: 675060 - protein, 13 aa, Homo sapiens
  CDR3 for beta chain variable domain of TCR clone 337530 (TRBV7-2, TRBJ2-2)
CASSSVRAGELFF

SEQ ID NO: 675061 - protein, 17 aa, Homo sapiens
  CDR3 for alpha chain variable domain of TCR clone 337531 (TRAV26-1, TRAJ37)
CIVRVITVSSNTGKLIF

SEQ ID NO: 675062 - protein, 14 aa, Homo sapiens
  CDR3 for beta chain variable domain of TCR clone 337531 (TRBV20-1, TRBJ2-3)
CSARGGTSTDTQYF

SEQ ID NO: 675063 - protein, 13 aa, Homo sapiens
  CDR3 for alpha chain variable domain of TCR clone 337532 (TRAV12-3, TRAJ13)
CAMGTGGYQKVTF

SEQ ID NO: 675064 - protein, 20 aa, Homo sapiens
  CDR3 for beta chain variable domain of TCR clone 337532 (TRBV7-8, TRBJ2-2)
CASSHLFPGPTIHITGELFF

SEQ ID NO: 675065 - protein, 17 aa, Homo sapiens
  CDR3 for alpha chain variable domain of TCR clone 337533 (TRAV1-1, TRAJ28)
CAVDPAYSGAGSYQLPF

SEQ ID NO: 675066 - protein, 14 aa, Homo sapiens
  CDR3 for beta chain variable domain of TCR clone 337533 (TRBV19, TRBJ2-1)
CASPTFVLSGKQFF

SEQ ID NO: 675067 - protein, 15 aa, Homo sapiens
  CDR3 for alpha chain variable domain of TCR clone 337534 (TRAV12-3, TRAJ27)
CAMRAYNTNAGKSTF

SEQ ID NO: 675068 - protein, 14 aa, Homo sapiens
  CDR3 for beta chain variable domain of TCR clone 337534 (TRBV7-3, TRBJ2-1)
CASSLAGGTNEQFF

SEQ ID NO: 675069 - protein, 16 aa, Homo sapiens
  CDR3 for alpha chain variable domain of TCR clone 337535 (TRAV26-1, TRAJ23)
CIVRPHGNNQGVKLIF

SEQ ID NO: 675070 - protein, 14 aa, Homo sapiens
  CDR3 for beta chain variable domain of TCR clone 337535 (TRBV19, TRBJ2-1)
CASPTFVLSGEQFF

SEQ ID NO: 675071 - protein, 14 aa, Homo sapiens
  CDR3 for alpha chain variable domain of TCR clone 337536 (TRAV16, TRAJ37)
CALDISGTTGNLIF

SEQ ID NO: 675072 - protein, 14 aa, Homo sapiens
  CDR3 for beta chain variable domain of TCR clone 337536 (TRBV7-6, TRBJ2-7)
CASSFRQGADEQYF

SEQ ID NO: 675073 - protein, 23 aa, Homo sapiens
  CDR3 for alpha chain variable domain of TCR clone 337537 (TRAV26-1, TRAJ38)
CIADNAGNNHIQNPDPAVYQLRD

SEQ ID NO: 675074 - protein, 13 aa, Homo sapiens
  CDR3 for beta chain variable domain of TCR clone 337537 (TRBV10-3, TRBJ2-7)
CASKLAVKYEQYF

SEQ ID NO: 675075 - protein, 16 aa, Homo sapiens
  CDR3 for alpha chain variable domain of TCR clone 337538 (TRAV8-3, TRAJ8)
CAVPRDGNTGFQKLVF

SEQ ID NO: 675076 - protein, 14 aa, Homo sapiens
  CDR3 for beta chain variable domain of TCR clone 337538 (TRBV4-1, TRBJ1-2)
CASSQDPLPYGYTF

SEQ ID NO: 675077 - protein, 13 aa, Homo sapiens
  CDR3 for alpha chain variable domain of TCR clone 337539 (TRAV12-1, TRAJ26)
CVVRRNYGQNFVF

SEQ ID NO: 675078 - protein, 17 aa, Homo sapiens
  CDR3 for beta chain variable domain of TCR clone 337539 (TRBV5-7, TRBJ2-4)
CASSPGTGHLAKNIQYF

SEQ ID NO: 675079 - protein, 15 aa, Homo sapiens
  CDR3 for alpha chain variable domain of TCR clone 337540 (TRAV4, TRAJ26)
RLVGGLDNYGQNFVF

SEQ ID NO: 675080 - protein, 13 aa, Homo sapiens
  CDR3 for beta chain variable domain of TCR clone 337540 (TRBV20-1, TRBJ2-5)
CSASLTGLETQYF

SEQ ID NO: 675081 - protein, 12 aa, Homo sapiens
  CDR3 for alpha chain variable domain of TCR clone 337541 (TRAV16, TRAJ10)
CSRTGGGNKLTF

SEQ ID NO: 675082 - protein, 15 aa, Homo sapiens
  CDR3 for beta chain variable domain of TCR clone 337541 (TRBV25-1, TRBJ1-2)
CASSETGGPSYGYTF

SEQ ID NO: 675083 - protein, 13 aa, Homo sapiens
  CDR3 for alpha chain variable domain of TCR clone 337542 (TRAV27, TRAJ49)
CAPRPYTGNHVYF

SEQ ID NO: 675084 - protein, 18 aa, Homo sapiens
  CDR3 for beta chain variable domain of TCR clone 337542 (TRBV7-3, TRBJ2-5)
CASSLGGAAQGRWETQYF

SEQ ID NO: 675085 - protein, 12 aa, Homo sapiens
  CDR3 for alpha chain variable domain of TCR clone 337543 (TRAV3, TRAJ43)
CSVRDPNNDMRF

SEQ ID NO: 675086 - protein, 16 aa, Homo sapiens
  CDR3 for beta chain variable domain of TCR clone 337543 (TRBV18, TRBJ1-5)
CASSPSTGNSNQPQHF

SEQ ID NO: 675087 - protein, 17 aa, Homo sapiens
  CDR3 for alpha chain variable domain of TCR clone 337544 (TRAV3, TRAJ42)
CAVRGRDYGGSQGNLIF

SEQ ID NO: 675088 - protein, 15 aa, Homo sapiens
  CDR3 for beta chain variable domain of TCR clone 337544 (TRBV6-5, TRBJ2-1)
CASSYDAGAGNEQFF

SEQ ID NO: 675089 - protein, 12 aa, Homo sapiens
  CDR3 for alpha chain variable domain of TCR clone 337545 (TRAV36/DV7, TRAJ17)
CAVEAAGNKLTF

SEQ ID NO: 675090 - protein, 16 aa, Homo sapiens
  CDR3 for beta chain variable domain of TCR clone 337545 (TRBV4-1, TRBJ1-4)
CASSQDLRRGGEKLFF

SEQ ID NO: 675091 - protein, 13 aa, Homo sapiens
  CDR3 for alpha chain variable domain of TCR clone 337546 (TRAV3, TRAJ40)
CAVRGSGAYKYIF

SEQ ID NO: 675092 - protein, 15 aa, Homo sapiens
  CDR3 for beta chain variable domain of TCR clone 337546 (TRBV27, TRBJ1-5)
CASSSSATGNQPQHF

SEQ ID NO: 675093 - protein, 12 aa, Homo sapiens
  CDR3 for alpha chain variable domain of TCR clone 337547 (TRAV3, TRAJ43)
CAVRDPNNDMRF

SEQ ID NO: 675094 - protein, 15 aa, Homo sapiens
  CDR3 for beta chain variable domain of TCR clone 337547 (TRBV27, TRBJ1-5)
CASSLGAGFDQPQHV

SEQ ID NO: 675095 - protein, 17 aa, Homo sapiens
  CDR3 for alpha chain variable domain of TCR clone 337548 (TRAV12-3, TRAJ18)
CAMIRADRGSTLGRLYF

SEQ ID NO: 675096 - protein, 14 aa, Homo sapiens
  CDR3 for beta chain variable domain of TCR clone 337548 (TRBV5-7, TRBJ1-6)
CASTPWPADAPLHF

SEQ ID NO: 675097 - protein, 15 aa, Homo sapiens
  CDR3 for alpha chain variable domain of TCR clone 337549 (TRAV12-1, TRAJ52)
CVGNTGGTSYGKLTF

SEQ ID NO: 675098 - protein, 14 aa, Homo sapiens
  CDR3 for beta chain variable domain of TCR clone 337549 (TRBV7-3, TRBJ2-2)
CASSPDPSGRELFF

SEQ ID NO: 675099 - protein, 17 aa, Homo sapiens
  CDR3 for alpha chain variable domain of TCR clone 337550 (TRAV3, TRAJ6)
CAVRDGPRAGGSYIPTF

SEQ ID NO: 675100 - protein, 14 aa, Homo sapiens
  CDR3 for beta chain variable domain of TCR clone 337550 (TRBV19, TRBJ2-7)
CASSIVAGPTEQYF

SEQ ID NO: 675101 - protein, 15 aa, Homo sapiens
  CDR3 for alpha chain variable domain of TCR clone 337551 (TRAV26-1, TRAJ29)
CIVRVEGSGNKPLVF

SEQ ID NO: 675102 - protein, 14 aa, Homo sapiens
  CDR3 for beta chain variable domain of TCR clone 337551 (TRBV18, TRBJ2-5)
CASSPEVSQETQYF

SEQ ID NO: 675103 - protein, 15 aa, Homo sapiens
  CDR3 for alpha chain variable domain of TCR clone 337552 (TRAV13-1, TRAJ32)
CAASNGWWCYKQANL

SEQ ID NO: 675104 - protein, 17 aa, Homo sapiens
  CDR3 for beta chain variable domain of TCR clone 337552 (TRBV15, TRBJ1-2)
CATSGREIDVVNYGYTF

SEQ ID NO: 675105 - protein, 14 aa, Homo sapiens
  CDR3 for alpha chain variable domain of TCR clone 337553 (TRAV8-3, TRAJ4)
CAVGASGGYNKLIF

SEQ ID NO: 675106 - protein, 13 aa, Homo sapiens
  CDR3 for beta chain variable domain of TCR clone 337553 (TRBV27, TRBJ2-7)
CASGRGGTYEQYF

SEQ ID NO: 675107 - protein, 16 aa, Homo sapiens
  CDR3 for alpha chain variable domain of TCR clone 337554 (TRAV3, TRAJ37)
CAVRPHGSVNTGKLIF

SEQ ID NO: 675108 - protein, 14 aa, Homo sapiens
  CDR3 for beta chain variable domain of TCR clone 337554 (TRBV20-1, TRBJ2-1)
CSARGGSSYNEQSF

SEQ ID NO: 675109 - protein, 11 aa, Homo sapiens
  CDR3 for alpha chain variable domain of TCR clone 337555 (TRAV12-1, TRAJ21)
CVVNNFNTFYF

SEQ ID NO: 675110 - protein, 17 aa, Homo sapiens
  CDR3 for beta chain variable domain of TCR clone 337555 (TRBV7-8, TRBJ2-1)
CASSPPTGTLAYNEQFF

SEQ ID NO: 675111 - protein, 13 aa, Homo sapiens
  CDR3 for alpha chain variable domain of TCR clone 337556 (TRAV3, TRAJ21)
CAVREPDFNKSYF

SEQ ID NO: 675112 - protein, 15 aa, Homo sapiens
  CDR3 for beta chain variable domain of TCR clone 337556 (TRBV2, TRBJ2-1)
CASSELAGGYNEQFF

SEQ ID NO: 675113 - protein, 16 aa, Homo sapiens
  CDR3 for alpha chain variable domain of TCR clone 337557 (TRAV1-2, TRAJ10)
CAVRWVLTGGGNKLTV

SEQ ID NO: 675114 - protein, 12 aa, Homo sapiens
  CDR3 for beta chain variable domain of TCR clone 337557 (TRBV7-8, TRBJ2-7)
CASSLGDREQYF

SEQ ID NO: 675115 - protein, 14 aa, Homo sapiens
  CDR3 for alpha chain variable domain of TCR clone 337558 (TRAV12-1, TRAJ9)
WVVNRRTGGFKTIV

SEQ ID NO: 675116 - protein, 16 aa, Homo sapiens
  CDR3 for beta chain variable domain of TCR clone 337558 (TRBV4-1, TRBJ2-3)
CASSQSTSGAEDTQYF

SEQ ID NO: 675117 - protein, 15 aa, Homo sapiens
  CDR3 for alpha chain variable domain of TCR clone 337559 (TRAV26-1, TRAJ29)
CIVIVEGSGNTPLVF

SEQ ID NO: 675118 - protein, 15 aa, Homo sapiens
  CDR3 for beta chain variable domain of TCR clone 337559 (TRBV28, TRBJ2-5)
CASSPGQGSIETQYF

SEQ ID NO: 675119 - protein, 13 aa, Homo sapiens
  CDR3 for alpha chain variable domain of TCR clone 337560 (TRAV38-1, TRAJ42)
CSRWGGSQGNLIF

SEQ ID NO: 675120 - protein, 10 aa, Homo sapiens
  CDR3 for beta chain variable domain of TCR clone 337560 (TRBV2, TRBJ2-5)
CASSAATQYF

SEQ ID NO: 675121 - protein, 13 aa, Homo sapiens
  CDR3 for alpha chain variable domain of TCR clone 337561 (TRAV12-3, TRAJ13)
CPMTSGGYHKVTF

SEQ ID NO: 675122 - protein, 13 aa, Homo sapiens
  CDR3 for beta chain variable domain of TCR clone 337561 (TRBV20-1, TRBJ2-2)
CSALSVGAGELFF

SEQ ID NO: 675123 - protein, 14 aa, Homo sapiens
  CDR3 for alpha chain variable domain of TCR clone 337562 (TRAV34, TRAJ44)
CGADGTGTASKLTF

SEQ ID NO: 675124 - protein, 16 aa, Homo sapiens
  CDR3 for beta chain variable domain of TCR clone 337562 (TRBV7-9, TRBJ2-1)
CASSDVAGGSYNEQFF

SEQ ID NO: 675125 - protein, 13 aa, Homo sapiens
  CDR3 for alpha chain variable domain of TCR clone 337563 (TRAV30, TRAJ13)
CGTPSGGYQKVTF

SEQ ID NO: 675126 - protein, 12 aa, Homo sapiens
  CDR3 for beta chain variable domain of TCR clone 337563 (TRBV28, TRBJ2-3)
CASSLYRDTQYF

SEQ ID NO: 675127 - protein, 13 aa, Homo sapiens
  CDR3 for alpha chain variable domain of TCR clone 337564 (TRAV22, TRAJ29)
CAVGGSGNTPLVF

SEQ ID NO: 675128 - protein, 13 aa, Homo sapiens
  CDR3 for beta chain variable domain of TCR clone 337564 (TRBV4-2, TRBJ1-1)
CASSQAGNTQAFF

SEQ ID NO: 675129 - protein, 12 aa, Homo sapiens
  CDR3 for alpha chain variable domain of TCR clone 337565 (TRAV12-3, TRAJ17)
CAMTLTGNKLTF

SEQ ID NO: 675130 - protein, 13 aa, Homo sapiens
  CDR3 for beta chain variable domain of TCR clone 337565 (TRBV7-9, TRBJ1-2)
CASSVKQKYGYTF

SEQ ID NO: 675131 - protein, 14 aa, Homo sapiens
  CDR3 for alpha chain variable domain of TCR clone 337566 (TRAV27, TRAJ22)
CAGLPAGSARQLTF

SEQ ID NO: 675132 - protein, 16 aa, Homo sapiens
  CDR3 for beta chain variable domain of TCR clone 337566 (TRBV7-3, TRBJ2-2)
CASSLKRGTLSGELFF

SEQ ID NO: 675133 - protein, 16 aa, Homo sapiens
  CDR3 for alpha chain variable domain of TCR clone 337567 (TRAV12-2, TRAJ32)
CAVNLGQGGATNKLTF

SEQ ID NO: 675134 - protein, 14 aa, Homo sapiens
  CDR3 for beta chain variable domain of TCR clone 337567 (TRBV25-1, TRBJ1-1)
CASTHLGGNTEAFF

SEQ ID NO: 675135 - protein, 15 aa, Homo sapiens
  CDR3 for alpha chain variable domain of TCR clone 337568 (TRAV12-2, TRAJ43)
CAFDMRFGAGTSLTV

SEQ ID NO: 675136 - protein, 18 aa, Homo sapiens
  CDR3 for beta chain variable domain of TCR clone 337568 (TRBV20-1, TRBJ2-3)
CSASGLAGGPGTTETQYF

SEQ ID NO: 675137 - protein, 15 aa, Homo sapiens
  CDR3 for alpha chain variable domain of TCR clone 337569 (TRAV17, TRAJ57)
CATGPSQVGSEKLVF

SEQ ID NO: 675138 - protein, 16 aa, Homo sapiens
  CDR3 for beta chain variable domain of TCR clone 337569 (TRBV12-4, TRBJ1-5)
CASSRPVGGSNQTQHF

SEQ ID NO: 675139 - protein, 12 aa, Homo sapiens
  CDR3 for alpha chain variable domain of TCR clone 337570 (TRAV36/DV7, TRAJ54)
CAVVRGAQQLVF

SEQ ID NO: 675140 - protein, 14 aa, Homo sapiens
  CDR3 for beta chain variable domain of TCR clone 337570 (TRBV7-3, TRBJ1-1)
CASSLKAGNTEAFF

SEQ ID NO: 675141 - protein, 17 aa, Homo sapiens
  CDR3 for alpha chain variable domain of TCR clone 337571 (TRAV23/DV6, TRAJ57)
CAASPTLSQGGSEKLAS

SEQ ID NO: 675142 - protein, 14 aa, Homo sapiens
  CDR3 for beta chain variable domain of TCR clone 337571 (TRBV25-1, TRBJ1-1)
CVSTHLGGNTEAFF

SEQ ID NO: 675143 - protein, 15 aa, Homo sapiens
  CDR3 for alpha chain variable domain of TCR clone 337572 (TRAV21, TRAJ37)
CAVRPTLSNTGKLIF

SEQ ID NO: 675144 - protein, 14 aa, Homo sapiens
  CDR3 for beta chain variable domain of TCR clone 337572 (TRBV12-5, TRBJ2-5)
CASGSRTHQETQYF

SEQ ID NO: 675145 - protein, 11 aa, Homo sapiens
  CDR3 for alpha chain variable domain of TCR clone 337573 (TRAV23/DV6, TRAJ48)
CAPRWGEKLTF

SEQ ID NO: 675146 - protein, 15 aa, Homo sapiens
  CDR3 for beta chain variable domain of TCR clone 337573 (TRBV6-6, TRBJ2-7)
CASSYSYGGSYEQYF

SEQ ID NO: 675147 - protein, 15 aa, Homo sapiens
  CDR3 for alpha chain variable domain of TCR clone 337574 (TRAV8-4, TRAJ11)
CAGSRALSGYSTLTF

SEQ ID NO: 675148 - protein, 13 aa, Homo sapiens
  CDR3 for beta chain variable domain of TCR clone 337574 (TRBV10-3, TRBJ2-7)
CASKLAVNYEQYF

SEQ ID NO: 675149 - protein, 13 aa, Homo sapiens
  CDR3 for alpha chain variable domain of TCR clone 337575 (TRAV8-3, TRAJ47)
CAVSMEYGNKLGF

SEQ ID NO: 675150 - protein, 14 aa, Homo sapiens
  CDR3 for beta chain variable domain of TCR clone 337575 (TRBV2, TRBJ1-5)
CASSGTGFNQPQHF

SEQ ID NO: 675151 - protein, 12 aa, Homo sapiens
  CDR3 for alpha chain variable domain of TCR clone 337576 (TRAV1-2, TRAJ7)
CAVAYGNNRLAF

SEQ ID NO: 675152 - protein, 15 aa, Homo sapiens
  CDR3 for beta chain variable domain of TCR clone 337576 (TRBV5-1, TRBJ1-5)
CASSLAQGADQPQHF

SEQ ID NO: 675153 - protein, 14 aa, Homo sapiens
  CDR3 for alpha chain variable domain of TCR clone 337577 (TRAV35, TRAJ33)
CAASSQDSNYQLIW

SEQ ID NO: 675154 - protein, 15 aa, Homo sapiens
  CDR3 for beta chain variable domain of TCR clone 337577 (TRBV20-1, TRBJ2-7)
CSAESGTSGAYEQYF

SEQ ID NO: 675155 - protein, 13 aa, Homo sapiens
  CDR3 for alpha chain variable domain of TCR clone 337578 (TRAV35, TRAJ37)
CAGSSGNTVKLIF

SEQ ID NO: 675156 - protein, 16 aa, Homo sapiens
  CDR3 for beta chain variable domain of TCR clone 337578 (TRBV10-3, TRBJ2-1)
CAISLTSGNSYNEQFF

SEQ ID NO: 675157 - protein, 18 aa, Homo sapiens
  CDR3 for alpha chain variable domain of TCR clone 337579 (TRAV3, TRAJ42)
CAVRDEGTGGGSQGNLIF

SEQ ID NO: 675158 - protein, 16 aa, Homo sapiens
  CDR3 for beta chain variable domain of TCR clone 337579 (TRBV9, TRBJ1-2)
CASSVAKGRVDYGDTF

SEQ ID NO: 675159 - protein, 12 aa, Homo sapiens
  CDR3 for alpha chain variable domain of TCR clone 337580 (TRAV3, TRAJ43)
CAVRDPNNDMRF

SEQ ID NO: 675160 - protein, 13 aa, Homo sapiens
  CDR3 for beta chain variable domain of TCR clone 337580 (TRBV7-8, TRBJ2-7)
CASSLTGGREQYF

SEQ ID NO: 675161 - protein, 14 aa, Homo sapiens
  CDR3 for alpha chain variable domain of TCR clone 337581 (TRAV14/DV4, TRAJ20)
CEMRESLNDYKLSF

SEQ ID NO: 675162 - protein, 15 aa, Homo sapiens
  CDR3 for beta chain variable domain of TCR clone 337581 (TRBV7-9, TRBJ2-7)
CASSLALAEAYEQYF

SEQ ID NO: 675163 - protein, 14 aa, Homo sapiens
  CDR3 for alpha chain variable domain of TCR clone 337582 (TRAV13-1, TRAJ44)
CAAKATGTASKLTF

SEQ ID NO: 675164 - protein, 15 aa, Homo sapiens
  CDR3 for beta chain variable domain of TCR clone 337582 (TRBV7-2, TRBJ1-2)
CASSFTQGAKYGYTF

SEQ ID NO: 675165 - protein, 14 aa, Homo sapiens
  CDR3 for alpha chain variable domain of TCR clone 337583 (TRAV23/DV6, TRAJ8)
CAASKATGFPKLVF

SEQ ID NO: 675166 - protein, 13 aa, Homo sapiens
  CDR3 for beta chain variable domain of TCR clone 337583 (TRBV11-3, TRBJ2-5)
CASSSGLQETQYF

SEQ ID NO: 675167 - protein, 12 aa, Homo sapiens
  CDR3 for alpha chain variable domain of TCR clone 337584 (TRAV13-2, TRAJ58)
CAERRLDSRLTF

SEQ ID NO: 675168 - protein, 15 aa, Homo sapiens
  CDR3 for beta chain variable domain of TCR clone 337584 (TRBV5-1, TRBJ2-5)
CASRSGRALVETQYL

SEQ ID NO: 675169 - protein, 14 aa, Homo sapiens
  CDR3 for alpha chain variable domain of TCR clone 337585 (TRAV26-1, TRAJ49)
CIVRLPYTGNQFYF

SEQ ID NO: 675170 - protein, 15 aa, Homo sapiens
  CDR3 for beta chain variable domain of TCR clone 337585 (TRBV4-1, TRBJ2-7)
CASSQNTGRLYEQYF

SEQ ID NO: 675171 - protein, 12 aa, Homo sapiens
  CDR3 for alpha chain variable domain of TCR clone 337586 (TRAV13-2, TRAJ8)
CAPWLGFRKLVF

SEQ ID NO: 675172 - protein, 14 aa, Homo sapiens
  CDR3 for beta chain variable domain of TCR clone 337586 (TRBV18, TRBJ1-5)
CASSRQQRNRPQHF

SEQ ID NO: 675173 - protein, 14 aa, Homo sapiens
  CDR3 for alpha chain variable domain of TCR clone 337587 (TRAV29/DV5, TRAJ36)
CAARRKTGANNPSF

SEQ ID NO: 675174 - protein, 14 aa, Homo sapiens
  CDR3 for beta chain variable domain of TCR clone 337587 (TRBV12-5, TRBJ2-5)
CASGSRTHQETQYF

SEQ ID NO: 675175 - protein, 14 aa, Homo sapiens
  CDR3 for alpha chain variable domain of TCR clone 337588 (TRAV8-2, TRAJ4)
CVVSLSGGYNNLIF

SEQ ID NO: 675176 - protein, 15 aa, Homo sapiens
  CDR3 for beta chain variable domain of TCR clone 337588 (TRBV4-1, TRBJ1-4)
CASSDTGGTNEKLFF

SEQ ID NO: 675177 - protein, 15 aa, Homo sapiens
  CDR3 for alpha chain variable domain of TCR clone 337589 (TRAV12-3, TRAJ11)
CAMSEENSVYSTLTF

SEQ ID NO: 675178 - protein, 13 aa, Homo sapiens
  CDR3 for beta chain variable domain of TCR clone 337589 (TRBV12-4, TRBJ2-1)
CASSFHSGSEQFF

SEQ ID NO: 675179 - protein, 15 aa, Homo sapiens
  CDR3 for alpha chain variable domain of TCR clone 337590 (TRAV14/DV4, TRAJ46)
CAMREKKSSGDKMTF

SEQ ID NO: 675180 - protein, 13 aa, Homo sapiens
  CDR3 for beta chain variable domain of TCR clone 337590 (TRBV20-1, TRBJ2-5)
CSAREAFQETQYF

SEQ ID NO: 675181 - protein, 15 aa, Homo sapiens
  CDR3 for alpha chain variable domain of TCR clone 337591 (TRAV40, TRAJ48)
CLLFISNFGNETLTF

SEQ ID NO: 675182 - protein, 13 aa, Homo sapiens
  CDR3 for beta chain variable domain of TCR clone 337591 (TRBV19, TRBJ1-5)
CASSINFNQPQHF

SEQ ID NO: 675183 - protein, 14 aa, Homo sapiens
  CDR3 for alpha chain variable domain of TCR clone 337592 (TRAV1-2, TRAJ16)
CAFNRFSDGQKLLF

SEQ ID NO: 675184 - protein, 14 aa, Homo sapiens
  CDR3 for beta chain variable domain of TCR clone 337592 (TRBV13, TRBJ2-5)
CASSLGRGQETQYF

SEQ ID NO: 675185 - protein, 22 aa, Homo sapiens
  CDR3 for alpha chain variable domain of TCR clone 337593 (TRAV34, TRAJ52)
STSVEQTRRSNAGGTSYGKLTF

SEQ ID NO: 675186 - protein, 18 aa, Homo sapiens
  CDR3 for beta chain variable domain of TCR clone 337593 (TRBV11-2, TRBJ2-3)
CASSSGGASRGAPNTQYF

SEQ ID NO: 675187 - protein, 16 aa, Homo sapiens
  CDR3 for alpha chain variable domain of TCR clone 337594 (TRAV30, TRAJ24)
CGTEIVDADSWGKFQF

SEQ ID NO: 675188 - protein, 12 aa, Homo sapiens
  CDR3 for beta chain variable domain of TCR clone 337594 (TRBV11-2, TRBJ2-2)
CATSLPTGELFF

SEQ ID NO: 675189 - protein, 15 aa, Homo sapiens
  CDR3 for alpha chain variable domain of TCR clone 337595 (TRAV8-3, TRAJ23)
CAVGDRYNQGVKLIF

SEQ ID NO: 675190 - protein, 13 aa, Homo sapiens
  CDR3 for beta chain variable domain of TCR clone 337595 (TRBV20-1, TRBJ2-1)
CSARPPPGNEQFF

SEQ ID NO: 675191 - protein, 11 aa, Homo sapiens
  CDR3 for alpha chain variable domain of TCR clone 337596 (TRAV13-1, TRAJ30)
GAASRDDKIIF

SEQ ID NO: 675192 - protein, 15 aa, Homo sapiens
  CDR3 for beta chain variable domain of TCR clone 337596 (TRBV18, TRBJ1-1)
CASSPSSWVNSEAFF

SEQ ID NO: 675193 - protein, 14 aa, Homo sapiens
  CDR3 for alpha chain variable domain of TCR clone 337597 (TRAV20, TRAJ4)
CAVRLGGGYNKLIF

SEQ ID NO: 675194 - protein, 14 aa, Homo sapiens
  CDR3 for beta chain variable domain of TCR clone 337597 (TRBV7-3, TRBJ2-3)
CASRHGASRDTQYC

SEQ ID NO: 675195 - protein, 12 aa, Homo sapiens
  CDR3 for alpha chain variable domain of TCR clone 337598 (TRAV13-1, TRAJ21)
CAAKEGFNKFYF

SEQ ID NO: 675196 - protein, 18 aa, Homo sapiens
  CDR3 for beta chain variable domain of TCR clone 337598 (TRBV4-1, TRBJ1-5)
CASSQDPRGQGLNQPQHF

SEQ ID NO: 675197 - protein, 13 aa, Homo sapiens
  CDR3 for alpha chain variable domain of TCR clone 337599 (TRAV13-2, TRAJ48)
CAEMDFGNEKLTF

SEQ ID NO: 675198 - protein, 14 aa, Homo sapiens
  CDR3 for beta chain variable domain of TCR clone 337599 (TRBV12-4, TRBJ1-1)
CASSLGTGGTEAFF

SEQ ID NO: 675199 - protein, 12 aa, Homo sapiens
  CDR3 for alpha chain variable domain of TCR clone 337600 (TRAV12-2, TRAJ21)
CAVLYNFNKFYF

SEQ ID NO: 675200 - protein, 14 aa, Homo sapiens
  CDR3 for beta chain variable domain of TCR clone 337600 (TRBV28, TRBJ2-1)
CASSYYTAYNEQFF

SEQ ID NO: 675201 - protein, 15 aa, Homo sapiens
  CDR3 for alpha chain variable domain of TCR clone 337601 (TRAV4, TRAJ10)
CLVGGEEGGGNKLTF

SEQ ID NO: 675202 - protein, 15 aa, Homo sapiens
  CDR3 for beta chain variable domain of TCR clone 337601 (TRBV7-2, TRBJ2-7)
CASSLTGQGTYEQYF

SEQ ID NO: 675203 - protein, 14 aa, Homo sapiens
  CDR3 for alpha chain variable domain of TCR clone 337602 (TRAV12-2, TRAJ13)
CAVKKTGGYQKVTF

SEQ ID NO: 675204 - protein, 12 aa, Homo sapiens
  CDR3 for beta chain variable domain of TCR clone 337602 (TRBV14, TRBJ2-4)
CASSNLKSMQYF

SEQ ID NO: 675205 - protein, 15 aa, Homo sapiens
  CDR3 for alpha chain variable domain of TCR clone 337603 (TRAV25, TRAJ52)
CAGRPGGTSYGKLTF

SEQ ID NO: 675206 - protein, 12 aa, Homo sapiens
  CDR3 for beta chain variable domain of TCR clone 337603 (TRBV7-9, TRBJ2-7)
CASSLEGYEQYF

SEQ ID NO: 675207 - protein, 14 aa, Homo sapiens
  CDR3 for alpha chain variable domain of TCR clone 337604 (TRAV1-2, TRAJ16)
CAVNRFADGQKLLF

SEQ ID NO: 675208 - protein, 14 aa, Homo sapiens
  CDR3 for beta chain variable domain of TCR clone 337604 (TRBV7-9, TRBJ2-3)
CASSLEDGTDTQYF

SEQ ID NO: 675209 - protein, 16 aa, Homo sapiens
  CDR3 for alpha chain variable domain of TCR clone 337605 (TRAV1-2, TRAJ10)
CAVRGVPTGGGNKPTF

SEQ ID NO: 675210 - protein, 12 aa, Homo sapiens
  CDR3 for beta chain variable domain of TCR clone 337605 (TRBV7-8, TRBJ2-7)
CASSLGDREQYF

SEQ ID NO: 675211 - protein, 12 aa, Homo sapiens
  CDR3 for alpha chain variable domain of TCR clone 337606 (TRAV29/DV5, TRAJ15)
CASNQAGTALIF

SEQ ID NO: 675212 - protein, 11 aa, Homo sapiens
  CDR3 for beta chain variable domain of TCR clone 337606 (TRBV7-8, TRBJ2-7)
CASSLSLEQYY

SEQ ID NO: 675213 - protein, 16 aa, Homo sapiens
  CDR3 for alpha chain variable domain of TCR clone 337607 (TRAV30, TRAJ24)
CGTEIVDADSWGNFQF

SEQ ID NO: 675214 - protein, 15 aa, Homo sapiens
  CDR3 for beta chain variable domain of TCR clone 337607 (TRBV6-3, TRBJ2-7)
CASSSPGTVFYEQYF

SEQ ID NO: 675215 - protein, 14 aa, Homo sapiens
  CDR3 for alpha chain variable domain of TCR clone 337608 (TRAV3, TRAJ21)
CAVESQANFNKFYF

SEQ ID NO: 675216 - protein, 15 aa, Homo sapiens
  CDR3 for beta chain variable domain of TCR clone 337608 (TRBV7-3, TRBJ2-1)
CASSLSSGSFDEQFF

SEQ ID NO: 675217 - protein, 12 aa, Homo sapiens
  CDR3 for alpha chain variable domain of TCR clone 337609 (TRAV12-2, TRAJ17)
CAMTLTGNKLTF

SEQ ID NO: 675218 - protein, 13 aa, Homo sapiens
  CDR3 for beta chain variable domain of TCR clone 337609 (TRBV19, TRBJ1-2)
CASSQGQVYGYTF

SEQ ID NO: 675219 - protein, 15 aa, Homo sapiens
  CDR3 for alpha chain variable domain of TCR clone 337610 (TRAV8-3, TRAJ45)
CASSYSGGGADGLTF

SEQ ID NO: 675220 - protein, 17 aa, Homo sapiens
  CDR3 for beta chain variable domain of TCR clone 337610 (TRBV5-7, TRBJ2-4)
CASSPGTGHLAKNIQYF

SEQ ID NO: 675221 - protein, 13 aa, Homo sapiens
  CDR3 for alpha chain variable domain of TCR clone 337611 (TRAV3, TRAJ27)
CAVRPLGAGKSTF

SEQ ID NO: 675222 - protein, 16 aa, Homo sapiens
  CDR3 for beta chain variable domain of TCR clone 337611 (TRBV4-2, TRBJ1-1)
CASRPLDGGGDTEAFF

SEQ ID NO: 675223 - protein, 13 aa, Homo sapiens
  CDR3 for alpha chain variable domain of TCR clone 337612 (TRAV1-2, TRAJ9)
CAALNTGGFKTIF

SEQ ID NO: 675224 - protein, 12 aa, Homo sapiens
  CDR3 for beta chain variable domain of TCR clone 337612 (TRBV20-1, TRBJ2-1)
CSARLEVNEQFF

SEQ ID NO: 675225 - protein, 12 aa, Homo sapiens
  CDR3 for alpha chain variable domain of TCR clone 337613 (TRAV21, TRAJ3)
CCFYSSSSKIIF

SEQ ID NO: 675226 - protein, 13 aa, Homo sapiens
  CDR3 for beta chain variable domain of TCR clone 337613 (TRBV28, TRBJ2-7)
CAGAQQGLDEQYF

SEQ ID NO: 675227 - protein, 12 aa, Homo sapiens
  CDR3 for alpha chain variable domain of TCR clone 337614 (TRAV13-1, TRAJ9)
CASHTGGFTTIF

SEQ ID NO: 675228 - protein, 18 aa, Homo sapiens
  CDR3 for beta chain variable domain of TCR clone 337614 (TRBV11-2, TRBJ2-3)
CASSLGGASRGAPNTQYF

SEQ ID NO: 675229 - protein, 13 aa, Homo sapiens
  CDR3 for alpha chain variable domain of TCR clone 337615 (TRAV38-2/DV8, TRAJ56)
CAYQSRANSKLTF

SEQ ID NO: 675230 - protein, 16 aa, Homo sapiens
  CDR3 for beta chain variable domain of TCR clone 337615 (TRBV28, TRBJ1-1)
CASSSGGQQVATEAFF

SEQ ID NO: 675231 - protein, 12 aa, Homo sapiens
  CDR3 for alpha chain variable domain of TCR clone 337616 (TRAV25, TRAJ7)
CAGSYGNNRLAF

SEQ ID NO: 675232 - protein, 15 aa, Homo sapiens
  CDR3 for beta chain variable domain of TCR clone 337616 (TRBV7-9, TRBJ2-2)
CASGPLDTFPGELFF

SEQ ID NO: 675233 - protein, 22 aa, Homo sapiens
  CDR3 for alpha chain variable domain of TCR clone 337617 (TRAV8-6, TRAJ21)
HLMKPSVHISDTAEYFWHKFYF

SEQ ID NO: 675234 - protein, 14 aa, Homo sapiens
  CDR3 for beta chain variable domain of TCR clone 337617 (TRBV13, TRBJ2-7)
CASSLKGASYEQYF

SEQ ID NO: 675235 - protein, 15 aa, Homo sapiens
  CDR3 for alpha chain variable domain of TCR clone 337618 (TRAV17, TRAJ22)
CATVAPSGSARQLTF

SEQ ID NO: 675236 - protein, 16 aa, Homo sapiens
  CDR3 for beta chain variable domain of TCR clone 337618 (TRBV10-3, TRBJ2-7)
CAISAVFADRPYEQYF

SEQ ID NO: 675237 - protein, 13 aa, Homo sapiens
  CDR3 for alpha chain variable domain of TCR clone 337619 (TRAV12-1, TRAJ13)
CVVTSGGYQKVTF

SEQ ID NO: 675238 - protein, 14 aa, Homo sapiens
  CDR3 for beta chain variable domain of TCR clone 337619 (TRBV27, TRBJ2-7)
CASSLAGLYYEQYF

SEQ ID NO: 675239 - protein, 19 aa, Homo sapiens
  CDR3 for alpha chain variable domain of TCR clone 337620 (TRAV17, TRAJ17)
YATDGRPGVIKAAGNKLTF

SEQ ID NO: 675240 - protein, 17 aa, Homo sapiens
  CDR3 for beta chain variable domain of TCR clone 337620 (TRBV12-4, TRBJ1-1)
CASSLSGFRTMNTEAFF

SEQ ID NO: 675241 - protein, 14 aa, Homo sapiens
  CDR3 for alpha chain variable domain of TCR clone 337621 (TRAV8-2, TRAJ37)
CVVSISGNTGKLIF

SEQ ID NO: 675242 - protein, 15 aa, Homo sapiens
  CDR3 for beta chain variable domain of TCR clone 337621 (TRBV7-2, TRBJ2-7)
CASSLVSSGSYEQYF

SEQ ID NO: 675243 - protein, 12 aa, Homo sapiens
  CDR3 for alpha chain variable domain of TCR clone 337622 (TRAV12-3, TRAJ29)
CAAAKGNTPLVF

SEQ ID NO: 675244 - protein, 15 aa, Homo sapiens
  CDR3 for beta chain variable domain of TCR clone 337622 (TRBV7-9, TRBJ1-5)
CASSQGHQPNQPQHF

SEQ ID NO: 675245 - protein, 14 aa, Homo sapiens
  CDR3 for alpha chain variable domain of TCR clone 337623 (TRAV2, TRAJ37)
CVVDFTSNTGKLIF

SEQ ID NO: 675246 - protein, 14 aa, Homo sapiens
  CDR3 for beta chain variable domain of TCR clone 337623 (TRBV7-3, TRBJ1-1)
CASSLKGGNTEAFF

SEQ ID NO: 675247 - protein, 13 aa, Homo sapiens
  CDR3 for alpha chain variable domain of TCR clone 337624 (TRAV13-1, TRAJ39)
CAASIWSGNMLTF

SEQ ID NO: 675248 - protein, 13 aa, Homo sapiens
  CDR3 for beta chain variable domain of TCR clone 337624 (TRBV12-4, TRBJ1-3)
CASSLASGNTIYF

SEQ ID NO: 675249 - protein, 14 aa, Homo sapiens
  CDR3 for alpha chain variable domain of TCR clone 337625 (TRAV1-2, TRAJ8)
CAVREDTGFQKLVF

SEQ ID NO: 675250 - protein, 11 aa, Homo sapiens
  CDR3 for beta chain variable domain of TCR clone 337625 (TRBV6-1, TRBJ2-7)
CASSDLYEQYF

SEQ ID NO: 675251 - protein, 15 aa, Homo sapiens
  CDR3 for alpha chain variable domain of TCR clone 337626 (TRAV8-4, TRAJ29)
CAVSEDFRGNTPLVF

SEQ ID NO: 675252 - protein, 18 aa, Homo sapiens
  CDR3 for beta chain variable domain of TCR clone 337626 (TRBV20-1, TRBJ2-6)
CRARTLAGGPSGANVLTF

SEQ ID NO: 675253 - protein, 14 aa, Homo sapiens
  CDR3 for alpha chain variable domain of TCR clone 337627 (TRAV9-2, TRAJ39)
CALYIYNASNMLTF

SEQ ID NO: 675254 - protein, 14 aa, Homo sapiens
  CDR3 for beta chain variable domain of TCR clone 337627 (TRBV6-1, TRBJ1-3)
CASVQGGGGNTIYF

SEQ ID NO: 675255 - protein, 12 aa, Homo sapiens
  CDR3 for alpha chain variable domain of TCR clone 337628 (TRAV20, TRAJ54)
CAVQEGAQKLVV

SEQ ID NO: 675256 - protein, 17 aa, Homo sapiens
  CDR3 for beta chain variable domain of TCR clone 337628 (TRBV13, TRBJ2-3)
CASSLSRVAGGRNTQYF

SEQ ID NO: 675257 - protein, 11 aa, Homo sapiens
  CDR3 for alpha chain variable domain of TCR clone 337629 (TRAV1-1, TRAJ23)
CAVRQGGKLIF

SEQ ID NO: 675258 - protein, 15 aa, Homo sapiens
  CDR3 for beta chain variable domain of TCR clone 337629 (TRBV7-8, TRBJ2-2)
CASRRPGQNTGELFF

SEQ ID NO: 675259 - protein, 15 aa, Homo sapiens
  CDR3 for alpha chain variable domain of TCR clone 337630 (TRAV27, TRAJ38)
CAGRFNAGNNRKLIW

SEQ ID NO: 675260 - protein, 12 aa, Homo sapiens
  CDR3 for beta chain variable domain of TCR clone 337630 (TRBV7-8, TRBJ2-7)
CASSLGDREQYF

SEQ ID NO: 675261 - protein, 13 aa, Homo sapiens
  CDR3 for alpha chain variable domain of TCR clone 337631 (TRAV21, TRAJ27)
CAARPGNPGKSTL

SEQ ID NO: 675262 - protein, 14 aa, Homo sapiens
  CDR3 for beta chain variable domain of TCR clone 337631 (TRBV7-6, TRBJ2-3)
CASSLGTVTDTQYF

SEQ ID NO: 675263 - protein, 13 aa, Homo sapiens
  CDR3 for alpha chain variable domain of TCR clone 337632 (TRAV2, TRAJ40)
CAVVTSGTYKYLF

SEQ ID NO: 675264 - protein, 14 aa, Homo sapiens
  CDR3 for beta chain variable domain of TCR clone 337632 (TRBV19, TRBJ2-1)
CASPTFVLSGEQFV

SEQ ID NO: 675265 - protein, 13 aa, Homo sapiens
  CDR3 for alpha chain variable domain of TCR clone 337633 (TRAV2, TRAJ40)
CAVVTSGTYKYIL

SEQ ID NO: 675266 - protein, 15 aa, Homo sapiens
  CDR3 for beta chain variable domain of TCR clone 337633 (TRBV6-3, TRBJ2-7)
CASSSPGTVFYEQYF

SEQ ID NO: 675267 - protein, 12 aa, Homo sapiens
  CDR3 for alpha chain variable domain of TCR clone 337634 (TRAV2, TRAJ9)
CAVGAGGFKTIF

SEQ ID NO: 675268 - protein, 15 aa, Homo sapiens
  CDR3 for beta chain variable domain of TCR clone 337634 (TRBV5-1, TRBJ2-5)
CASSLGLAEQETQYF

SEQ ID NO: 675269 - protein, 14 aa, Homo sapiens
  CDR3 for alpha chain variable domain of TCR clone 337635 (TRAV16, TRAJ42)
CALLAGGSQGDLIF

SEQ ID NO: 675270 - protein, 15 aa, Homo sapiens
  CDR3 for beta chain variable domain of TCR clone 337635 (TRBV2, TRBJ2-7)
CASSEGLARSYEQYF

SEQ ID NO: 675271 - protein, 14 aa, Homo sapiens
  CDR3 for alpha chain variable domain of TCR clone 337636 (TRAV26-1, TRAJ34)
CIVRVAYNTDKLIF

SEQ ID NO: 675272 - protein, 17 aa, Homo sapiens
  CDR3 for beta chain variable domain of TCR clone 337636 (TRBV20-1, TRBJ2-1)
CSASSSGLAGSYNEQFF

SEQ ID NO: 675273 - protein, 13 aa, Homo sapiens
  CDR3 for alpha chain variable domain of TCR clone 337637 (TRAV3, TRAJ20)
CCEAFCNDYKLSF

SEQ ID NO: 675274 - protein, 14 aa, Homo sapiens
  CDR3 for beta chain variable domain of TCR clone 337637 (TRBV4-1, TRBJ2-2)
CASSQAVNTGELFF

SEQ ID NO: 675275 - protein, 12 aa, Homo sapiens
  CDR3 for alpha chain variable domain of TCR clone 337638 (TRAV12-3, TRAJ17)
CAMTLTGNKLTF

SEQ ID NO: 675276 - protein, 15 aa, Homo sapiens
  CDR3 for beta chain variable domain of TCR clone 337638 (TRBV20-1, TRBJ2-7)
CSARDGVPGMDEQYF

SEQ ID NO: 675277 - protein, 15 aa, Homo sapiens
  CDR3 for alpha chain variable domain of TCR clone 337639 (TRAV3, TRAJ5)
CAVGDLDTGRRALTF

SEQ ID NO: 675278 - protein, 14 aa, Homo sapiens
  CDR3 for beta chain variable domain of TCR clone 337639 (TRBV25-1, TRBJ1-1)
CASTHLGGNTEAFF

SEQ ID NO: 675279 - protein, 15 aa, Homo sapiens
  CDR3 for alpha chain variable domain of TCR clone 337640 (TRAV12-3, TRAJ27)
CAMSRLNTNAGKSTF

SEQ ID NO: 675280 - protein, 17 aa, Homo sapiens
  CDR3 for beta chain variable domain of TCR clone 337640 (TRBV7-3, TRBJ2-3)
RASSLMKRMRGADTQYF

SEQ ID NO: 675281 - protein, 12 aa, Homo sapiens
  CDR3 for alpha chain variable domain of TCR clone 337641 (TRAV8-4, TRAJ31)
CAVSGSNARLMF

SEQ ID NO: 675282 - protein, 15 aa, Homo sapiens
  CDR3 for beta chain variable domain of TCR clone 337641 (TRBV27, TRBJ2-7)
CASRFWGQGADEQYF

SEQ ID NO: 675283 - protein, 11 aa, Homo sapiens
  CDR3 for alpha chain variable domain of TCR clone 337642 (TRAV17, TRAJ49)
CATDAGNQLYF

SEQ ID NO: 675284 - protein, 14 aa, Homo sapiens
  CDR3 for beta chain variable domain of TCR clone 337642 (TRBV7-2, TRBJ2-7)
CASRSQGAAYEQYF

SEQ ID NO: 675285 - protein, 13 aa, Homo sapiens
  CDR3 for alpha chain variable domain of TCR clone 337643 (TRAV21, TRAJ20)
CAVGLRVDYKLSF

SEQ ID NO: 675286 - protein, 14 aa, Homo sapiens
  CDR3 for beta chain variable domain of TCR clone 337643 (TRBV19, TRBJ1-2)
CASSVLGYNYGYTF

SEQ ID NO: 675287 - protein, 16 aa, Homo sapiens
  CDR3 for alpha chain variable domain of TCR clone 337644 (TRAV3, TRAJ37)
CAVRGKGSGNQGKLIF

SEQ ID NO: 675288 - protein, 16 aa, Homo sapiens
  CDR3 for beta chain variable domain of TCR clone 337644 (TRBV12-5, TRBJ2-5)
CASGPRTSGNQETQYF

SEQ ID NO: 675289 - protein, 15 aa, Homo sapiens
  CDR3 for alpha chain variable domain of TCR clone 337645 (TRAV34, TRAJ38)
CGADFTPGNNRKLIG

SEQ ID NO: 675290 - protein, 14 aa, Homo sapiens
  CDR3 for beta chain variable domain of TCR clone 337645 (TRBV25-1, TRBJ1-1)
CASTHLGGNTEAFF

SEQ ID NO: 675291 - protein, 11 aa, Homo sapiens
  CDR3 for alpha chain variable domain of TCR clone 337646 (TRAV1-1, TRAJ23)
CAVRQGGKLIF

SEQ ID NO: 675292 - protein, 17 aa, Homo sapiens
  CDR3 for beta chain variable domain of TCR clone 337646 (TRBV7-6, TRBJ2-5)
CASSPGLADPWGETQYF

SEQ ID NO: 675293 - protein, 17 aa, Homo sapiens
  CDR3 for alpha chain variable domain of TCR clone 337647 (TRAV1-2, TRAJ23)
CAVRPHSIYNQGGKLIF

SEQ ID NO: 675294 - protein, 15 aa, Homo sapiens
  CDR3 for beta chain variable domain of TCR clone 337647 (TRBV7-2, TRBJ2-3)
CASSSTGLETDTQYF

SEQ ID NO: 675295 - protein, 11 aa, Homo sapiens
  CDR3 for alpha chain variable domain of TCR clone 337648 (TRAV12-1, TRAJ43)
CVVIRNNDMRF

SEQ ID NO: 675296 - protein, 15 aa, Homo sapiens
  CDR3 for beta chain variable domain of TCR clone 337648 (TRBV11-2, TRBJ2-1)
CASSLGTSGLNEQFF

SEQ ID NO: 675297 - protein, 16 aa, Homo sapiens
  CDR3 for alpha chain variable domain of TCR clone 337649 (TRAV30, TRAJ24)
CGTEIVDADSWAKFQF

SEQ ID NO: 675298 - protein, 14 aa, Homo sapiens
  CDR3 for beta chain variable domain of TCR clone 337649 (TRBV19, TRBJ2-1)
CASPTFVLSGEQFF

SEQ ID NO: 675299 - protein, 14 aa, Homo sapiens
  CDR3 for alpha chain variable domain of TCR clone 337650 (TRAV23/DV6, TRAJ12)
CAASRMDSSYKLIF

SEQ ID NO: 675300 - protein, 12 aa, Homo sapiens
  CDR3 for beta chain variable domain of TCR clone 337650 (TRBV2, TRBJ2-1)
GRGLPSYNEQFF

SEQ ID NO: 675301 - protein, 16 aa, Homo sapiens
  CDR3 for alpha chain variable domain of TCR clone 337651 (TRAV8-3, TRAJ13)
CAVGAYPSGGYQKVTF

SEQ ID NO: 675302 - protein, 17 aa, Homo sapiens
  CDR3 for beta chain variable domain of TCR clone 337651 (TRBV20-1, TRBJ2-1)
CSARDPRQGVSYNEQFF

SEQ ID NO: 675303 - protein, 18 aa, Homo sapiens
  CDR3 for alpha chain variable domain of TCR clone 337652 (TRAV26-1, TRAJ37)
CIVRVDMHGSSNTGKLNF

SEQ ID NO: 675304 - protein, 15 aa, Homo sapiens
  CDR3 for beta chain variable domain of TCR clone 337652 (TRBV20-1, TRBJ2-7)
CSARVLASPLYEQYF

SEQ ID NO: 675305 - protein, 11 aa, Homo sapiens
  CDR3 for alpha chain variable domain of TCR clone 337653 (TRAV12-2, TRAJ30)
CAVGRDDKFIF

SEQ ID NO: 675306 - protein, 14 aa, Homo sapiens
  CDR3 for beta chain variable domain of TCR clone 337653 (TRBV6-1, TRBJ1-3)
CASVQGGGGNTIYF

SEQ ID NO: 675307 - protein, 14 aa, Homo sapiens
  CDR3 for alpha chain variable domain of TCR clone 337654 (TRAV1-2, TRAJ8)
CAVREDTGFQKLVF

SEQ ID NO: 675308 - protein, 13 aa, Homo sapiens
  CDR3 for beta chain variable domain of TCR clone 337654 (TRBV2, TRBJ2-5)
CASGTPYQETQYF

SEQ ID NO: 675309 - protein, 15 aa, Homo sapiens
  CDR3 for alpha chain variable domain of TCR clone 337655 (TRAV17, TRAJ54)
CATEKLGQGAQKLVF

SEQ ID NO: 675310 - protein, 13 aa, Homo sapiens
  CDR3 for beta chain variable domain of TCR clone 337655 (TRBV12-4, TRBJ1-2)
CASSLRQGKGYTF

SEQ ID NO: 675311 - protein, 14 aa, Homo sapiens
  CDR3 for alpha chain variable domain of TCR clone 337656 (TRAV12-2, TRAJ33)
CAVKRARSDYQLIW

SEQ ID NO: 675312 - protein, 12 aa, Homo sapiens
  CDR3 for beta chain variable domain of TCR clone 337656 (TRBV24-1, TRBJ2-3)
CATSDSTDTQYF

SEQ ID NO: 675313 - protein, 16 aa, Homo sapiens
  CDR3 for alpha chain variable domain of TCR clone 337657 (TRAV30, TRAJ24)
CGTEIVDAESWGKFQF

SEQ ID NO: 675314 - protein, 13 aa, Homo sapiens
  CDR3 for beta chain variable domain of TCR clone 337657 (TRBV7-3, TRBJ1-1)
CASSQDWGAEAFF

SEQ ID NO: 675315 - protein, 15 aa, Homo sapiens
  CDR3 for alpha chain variable domain of TCR clone 337658 (TRAV30, TRAJ57)
CGTAIPQGGSEKLVF

SEQ ID NO: 675316 - protein, 16 aa, Homo sapiens
  CDR3 for beta chain variable domain of TCR clone 337658 (TRBV7-3, TRBJ2-2)
CASSLKRGTLSGELFF

SEQ ID NO: 675317 - protein, 17 aa, Homo sapiens
  CDR3 for alpha chain variable domain of TCR clone 337659 (TRAV26-1, TRAJ37)
CIVRVITGSSNTGKLIF

SEQ ID NO: 675318 - protein, 17 aa, Homo sapiens
  CDR3 for beta chain variable domain of TCR clone 337659 (TRBV7-8, TRBJ2-6)
CASSAGTGGAGANVLTF

SEQ ID NO: 675319 - protein, 16 aa, Homo sapiens
  CDR3 for alpha chain variable domain of TCR clone 337660 (TRAV25, TRAJ24)
CAQRRGTTDSWGKLEF

SEQ ID NO: 675320 - protein, 14 aa, Homo sapiens
  CDR3 for beta chain variable domain of TCR clone 337660 (TRBV6-6, TRBJ1-5)
CASSYGPANQPQHF

SEQ ID NO: 675321 - protein, 15 aa, Homo sapiens
  CDR3 for alpha chain variable domain of TCR clone 337661 (TRAV12-3, TRAJ10)
CASYILTGGGNKLTF

SEQ ID NO: 675322 - protein, 15 aa, Homo sapiens
  CDR3 for beta chain variable domain of TCR clone 337661 (TRBV7-2, TRBJ1-6)
CASSLGPDRGMPIHF

SEQ ID NO: 675323 - protein, 17 aa, Homo sapiens
  CDR3 for alpha chain variable domain of TCR clone 337662 (TRAV26-2, TRAJ42)
SILRDVGYGGSQGNLIF

SEQ ID NO: 675324 - protein, 16 aa, Homo sapiens
  CDR3 for beta chain variable domain of TCR clone 337662 (TRBV12-4, TRBJ2-7)
CASSLIGGTGTYEQYF

SEQ ID NO: 675325 - protein, 15 aa, Homo sapiens
  CDR3 for alpha chain variable domain of TCR clone 337663 (TRAV10, TRAJ10)
CVVRGLTGGGNKLTF

SEQ ID NO: 675326 - protein, 15 aa, Homo sapiens
  CDR3 for beta chain variable domain of TCR clone 337663 (TRBV6-1, TRBJ2-2)
CAILTWTRDTGELFF

SEQ ID NO: 675327 - protein, 14 aa, Homo sapiens
  CDR3 for alpha chain variable domain of TCR clone 337664 (TRAV8-4, TRAJ13)
FAVTLSGGYQKFTF

SEQ ID NO: 675328 - protein, 14 aa, Homo sapiens
  CDR3 for beta chain variable domain of TCR clone 337664 (TRBV7-2, TRBJ1-2)
CASSQTGSTYGYTF

SEQ ID NO: 675329 - protein, 12 aa, Homo sapiens
  CDR3 for alpha chain variable domain of TCR clone 337665 (TRAV12-1, TRAJ20)
CVVNSDDYKLSF

SEQ ID NO: 675330 - protein, 12 aa, Homo sapiens
  CDR3 for beta chain variable domain of TCR clone 337665 (TRBV11-2, TRBJ2-2)
CASSLGGGELFF

SEQ ID NO: 675331 - protein, 13 aa, Homo sapiens
  CDR3 for alpha chain variable domain of TCR clone 337666 (TRAV13-1, TRAJ9)
CAARGTGGFKTIF

SEQ ID NO: 675332 - protein, 13 aa, Homo sapiens
  CDR3 for beta chain variable domain of TCR clone 337666 (TRBV4-1, TRBJ2-2)
CASSQENTGELFF

SEQ ID NO: 675333 - protein, 13 aa, Homo sapiens
  CDR3 for alpha chain variable domain of TCR clone 337667 (TRAV1-2, TRAJ31)
CAVRPNNNARLMF

SEQ ID NO: 675334 - protein, 21 aa, Homo sapiens
  CDR3 for beta chain variable domain of TCR clone 337667 (TRBV4-2, TRBJ2-3)
PCSQKTRPCISVPAAQDTQYF

SEQ ID NO: 675335 - protein, 12 aa, Homo sapiens
  CDR3 for alpha chain variable domain of TCR clone 337668 (TRAV13-2, TRAJ23)
CAERHRGGRLIF

SEQ ID NO: 675336 - protein, 14 aa, Homo sapiens
  CDR3 for beta chain variable domain of TCR clone 337668 (TRBV6-1, TRBJ1-3)
CASVQGGGGNTIYF

SEQ ID NO: 675337 - protein, 15 aa, Homo sapiens
  CDR3 for alpha chain variable domain of TCR clone 337669 (TRAV2, TRAJ11)
CAVEDPNSGYSTLPF

SEQ ID NO: 675338 - protein, 15 aa, Homo sapiens
  CDR3 for beta chain variable domain of TCR clone 337669 (TRBV20-1, TRBJ2-7)
CSARDRVSGMDEQYF

SEQ ID NO: 675339 - protein, 14 aa, Homo sapiens
  CDR3 for alpha chain variable domain of TCR clone 337670 (TRAV3, TRAJ8)
CAVSLNTGFQKLVF

SEQ ID NO: 675340 - protein, 14 aa, Homo sapiens
  CDR3 for beta chain variable domain of TCR clone 337670 (TRBV6-6, TRBJ1-5)
CASVDIGFNQPQHF

SEQ ID NO: 675341 - protein, 11 aa, Homo sapiens
  CDR3 for alpha chain variable domain of TCR clone 337671 (TRAV12-3, TRAJ49)
CAANTGNQFYF

SEQ ID NO: 675342 - protein, 14 aa, Homo sapiens
  CDR3 for beta chain variable domain of TCR clone 337671 (TRBV12-5, TRBJ2-5)
CASGSRTHQETQYF

SEQ ID NO: 675343 - protein, 17 aa, Homo sapiens
  CDR3 for alpha chain variable domain of TCR clone 337672 (TRAV3, TRAJ6)
CAVRDGPRAGGSYIPTS

SEQ ID NO: 675344 - protein, 12 aa, Homo sapiens
  CDR3 for beta chain variable domain of TCR clone 337672 (TRBV11-2, TRBJ2-1)
CASSPGNNEQFF

SEQ ID NO: 675345 - protein, 22 aa, Homo sapiens
  CDR3 for alpha chain variable domain of TCR clone 337673 (TRAV13-2, )
CAEILSIPDIQNPDPAVSPLRD

SEQ ID NO: 675346 - protein, 11 aa, Homo sapiens
  CDR3 for beta chain variable domain of TCR clone 337673 (TRBV20-1, TRBJ2-7)
CSARLSYEQYF

SEQ ID NO: 675347 - protein, 16 aa, Homo sapiens
  CDR3 for alpha chain variable domain of TCR clone 337674 (TRAV13-1, TRAJ18)
CAASRMRGSTLGRLYL

SEQ ID NO: 675348 - protein, 16 aa, Homo sapiens
  CDR3 for beta chain variable domain of TCR clone 337674 (TRBV27, TRBJ1-1)
CASSSRGRTGYTEAFF

SEQ ID NO: 675349 - protein, 15 aa, Homo sapiens
  CDR3 for alpha chain variable domain of TCR clone 337675 (TRAV12-3, TRAJ48)
CAMNAKNFGNEKLTF

SEQ ID NO: 675350 - protein, 17 aa, Homo sapiens
  CDR3 for beta chain variable domain of TCR clone 337675 (TRBV4-1, TRBJ2-5)
CASSQDPSGGPQETQYF

SEQ ID NO: 675351 - protein, 11 aa, Homo sapiens
  CDR3 for alpha chain variable domain of TCR clone 337676 (TRAV12-1, TRAJ30)
CVVNGQDKIIF

SEQ ID NO: 675352 - protein, 15 aa, Homo sapiens
  CDR3 for beta chain variable domain of TCR clone 337676 (TRBV11-2, TRBJ2-1)
CASSLTSGGYNEQFF

SEQ ID NO: 675353 - protein, 12 aa, Homo sapiens
  CDR3 for alpha chain variable domain of TCR clone 337677 (TRAV1-1, TRAJ39)
CAVPVVGNMPTF

SEQ ID NO: 675354 - protein, 13 aa, Homo sapiens
  CDR3 for beta chain variable domain of TCR clone 337677 (TRBV19, TRBJ2-7)
CASSIDRTYEQYF

SEQ ID NO: 675355 - protein, 12 aa, Homo sapiens
  CDR3 for alpha chain variable domain of TCR clone 337678 (TRAV1-2, TRAJ24)
CAVGGSWGKFQF

SEQ ID NO: 675356 - protein, 12 aa, Homo sapiens
  CDR3 for beta chain variable domain of TCR clone 337678 (TRBV11-2, TRBJ2-2)
CASSLPTGELFF

SEQ ID NO: 675357 - protein, 10 aa, Homo sapiens
  CDR3 for alpha chain variable domain of TCR clone 337679 (TRAV8-4, TRAJ43)
CAVSADDMRF

SEQ ID NO: 675358 - protein, 15 aa, Homo sapiens
  CDR3 for beta chain variable domain of TCR clone 337679 (TRBV5-1, TRBJ2-3)
CASSVISGSTDTQYF

SEQ ID NO: 675359 - protein, 13 aa, Homo sapiens
  CDR3 for alpha chain variable domain of TCR clone 337680 (TRAV3, TRAJ27)
CAVRPLGAGKSTF

SEQ ID NO: 675360 - protein, 13 aa, Homo sapiens
  CDR3 for beta chain variable domain of TCR clone 337680 (TRBV2, TRBJ1-5)
CATAGPGNQPQHF

SEQ ID NO: 675361 - protein, 18 aa, Homo sapiens
  CDR3 for alpha chain variable domain of TCR clone 337681 (TRAV21, TRAJ52)
CAVSPSPAGGTSYGKLTF

SEQ ID NO: 675362 - protein, 13 aa, Homo sapiens
  CDR3 for beta chain variable domain of TCR clone 337681 (TRBV7-3, TRBJ1-1)
CASSQDWGDEAFF

SEQ ID NO: 675363 - protein, 23 aa, Homo sapiens
  CDR3 for alpha chain variable domain of TCR clone 337682 (TRAV8-3, TRAJ38)
CAVGASNAGNNHIQNPDPAVYQM

SEQ ID NO: 675364 - protein, 15 aa, Homo sapiens
  CDR3 for beta chain variable domain of TCR clone 337682 (TRBV11-3, TRBJ1-3)
CASSLFGPSGNTIYF

SEQ ID NO: 675365 - protein, 15 aa, Homo sapiens
  CDR3 for alpha chain variable domain of TCR clone 337683 (TRAV4, TRAJ39)
CLVGPNNNAGNMLTF

SEQ ID NO: 675366 - protein, 14 aa, Homo sapiens
  CDR3 for beta chain variable domain of TCR clone 337683 (TRBV11-2, TRBJ2-5)
CASRRTGGIETQYF

SEQ ID NO: 675367 - protein, 13 aa, Homo sapiens
  CDR3 for alpha chain variable domain of TCR clone 337684 (TRAV21, TRAJ20)
CAVGVFADYKLRF

SEQ ID NO: 675368 - protein, 14 aa, Homo sapiens
  CDR3 for beta chain variable domain of TCR clone 337684 (TRBV4-2, TRBJ1-4)
CASSPSSGNGKLFF

SEQ ID NO: 675369 - protein, 13 aa, Homo sapiens
  CDR3 for alpha chain variable domain of TCR clone 337685 (TRAV12-3, TRAJ7)
CAMSASGNNRLAF

SEQ ID NO: 675370 - protein, 16 aa, Homo sapiens
  CDR3 for beta chain variable domain of TCR clone 337685 (TRBV7-7, TRBJ2-1)
CASSLASGTSYNEQFF

SEQ ID NO: 675371 - protein, 14 aa, Homo sapiens
  CDR3 for alpha chain variable domain of TCR clone 337686 (TRAV12-3, TRAJ57)
CAISAWGGSEKLVF

SEQ ID NO: 675372 - protein, 15 aa, Homo sapiens
  CDR3 for beta chain variable domain of TCR clone 337686 (TRBV20-1, TRBJ2-7)
CSARDRVSGMDEQYF

SEQ ID NO: 675373 - protein, 15 aa, Homo sapiens
  CDR3 for alpha chain variable domain of TCR clone 337687 (TRAV8-3, TRAJ45)
CASSYSGGGAEGLTF

SEQ ID NO: 675374 - protein, 13 aa, Homo sapiens
  CDR3 for beta chain variable domain of TCR clone 337687 (TRBV10-3, TRBJ2-7)
CASKLAVKYEQYF

SEQ ID NO: 675375 - protein, 15 aa, Homo sapiens
  CDR3 for alpha chain variable domain of TCR clone 337688 (TRAV13-2, TRAJ5)
CAENPHWTGRRALTF

SEQ ID NO: 675376 - protein, 16 aa, Homo sapiens
  CDR3 for beta chain variable domain of TCR clone 337688 (TRBV7-9, TRBJ1-3)
CDSSQTSGLRMGTIYF

SEQ ID NO: 675377 - protein, 14 aa, Homo sapiens
  CDR3 for alpha chain variable domain of TCR clone 337689 (TRAV3, TRAJ40)
CAVRDRRGTYKYIF

SEQ ID NO: 675378 - protein, 15 aa, Homo sapiens
  CDR3 for beta chain variable domain of TCR clone 337689 (TRBV20-1, TRBJ2-7)
CSARDRVSGMDEQYF

SEQ ID NO: 675379 - protein, 14 aa, Homo sapiens
  CDR3 for alpha chain variable domain of TCR clone 337690 (TRAV8-3, TRAJ4)
CAVGAAVGDNKLIL

SEQ ID NO: 675380 - protein, 15 aa, Homo sapiens
  CDR3 for beta chain variable domain of TCR clone 337690 (TRBV6-5, TRBJ2-1)
CASSYDAGAGNEQFF

SEQ ID NO: 675381 - protein, 14 aa, Homo sapiens
  CDR3 for alpha chain variable domain of TCR clone 337691 (TRAV23/DV6, TRAJ57)
CAASNQGGSEKLVF

SEQ ID NO: 675382 - protein, 17 aa, Homo sapiens
  CDR3 for beta chain variable domain of TCR clone 337691 (TRBV13, TRBJ2-3)
CASSLSRVAGGRNTQYF

SEQ ID NO: 675383 - protein, 20 aa, Homo sapiens
  CDR3 for alpha chain variable domain of TCR clone 337692 (TRAV1-2, TRAJ27)
CLLPLCCERTPNTNVGKSTF

SEQ ID NO: 675384 - protein, 13 aa, Homo sapiens
  CDR3 for beta chain variable domain of TCR clone 337692 (TRBV6-1, TRBJ1-2)
CASSAREGYGYAF

SEQ ID NO: 675385 - protein, 15 aa, Homo sapiens
  CDR3 for alpha chain variable domain of TCR clone 337693 (TRAV8-4, TRAJ6)
CAVSAPSGGRYIPTF

SEQ ID NO: 675386 - protein, 15 aa, Homo sapiens
  CDR3 for beta chain variable domain of TCR clone 337693 (TRBV7-3, TRBJ2-2)
CASKANGANTGELFF

SEQ ID NO: 675387 - protein, 11 aa, Homo sapiens
  CDR3 for alpha chain variable domain of TCR clone 337694 (TRAV1-1, TRAJ23)
CAVRQGGKLIF

SEQ ID NO: 675388 - protein, 13 aa, Homo sapiens
  CDR3 for beta chain variable domain of TCR clone 337694 (TRBV7-3, TRBJ2-7)
CASSSGANYEQYF

SEQ ID NO: 675389 - protein, 13 aa, Homo sapiens
  CDR3 for alpha chain variable domain of TCR clone 337695 (TRAV23/DV6, TRAJ15)
CAALPAGRNCSAL

SEQ ID NO: 675390 - protein, 14 aa, Homo sapiens
  CDR3 for beta chain variable domain of TCR clone 337695 (TRBV7-9, TRBJ1-2)
CASSRQGSNYGYTF

SEQ ID NO: 675391 - protein, 12 aa, Homo sapiens
  CDR3 for alpha chain variable domain of TCR clone 337696 (TRAV26-2, TRAJ21)
CILKGNFNKFYF

SEQ ID NO: 675392 - protein, 15 aa, Homo sapiens
  CDR3 for beta chain variable domain of TCR clone 337696 (TRBV4-3, TRBJ2-3)
CASSPSFLSTDTQYF

SEQ ID NO: 675393 - protein, 16 aa, Homo sapiens
  CDR3 for alpha chain variable domain of TCR clone 337697 (TRAV30, TRAJ24)
CGTEIVDADSWGKFQF

SEQ ID NO: 675394 - protein, 15 aa, Homo sapiens
  CDR3 for beta chain variable domain of TCR clone 337697 (TRBV20-1, TRBJ2-6)
CSARDRGAGANVLTF

SEQ ID NO: 675395 - protein, 13 aa, Homo sapiens
  CDR3 for alpha chain variable domain of TCR clone 337698 (TRAV13-2, TRAJ48)
CAEMDFGNEKLTF

SEQ ID NO: 675396 - protein, 15 aa, Homo sapiens
  CDR3 for beta chain variable domain of TCR clone 337698 (TRBV7-9, TRBJ1-6)
CATSSPGRGNSPLHF

SEQ ID NO: 675397 - protein, 16 aa, Homo sapiens
  CDR3 for alpha chain variable domain of TCR clone 337699 (TRAV12-3, TRAJ53)
FAMSVGSGGSNYKLTF

SEQ ID NO: 675398 - protein, 16 aa, Homo sapiens
  CDR3 for beta chain variable domain of TCR clone 337699 (TRBV12-5, TRBJ2-5)
CASGPRTSGNQETQYF

SEQ ID NO: 675399 - protein, 10 aa, Homo sapiens
  CDR3 for alpha chain variable domain of TCR clone 337700 (TRAV23/DV6, TRAJ57)
CAASSTLSQG

SEQ ID NO: 675400 - protein, 14 aa, Homo sapiens
  CDR3 for beta chain variable domain of TCR clone 337700 (TRBV25-1, TRBJ1-1)
CPSTHLGGNTEAFS

SEQ ID NO: 675401 - protein, 15 aa, Homo sapiens
  CDR3 for alpha chain variable domain of TCR clone 337701 (TRAV21, TRAJ24)
CAARSSTDSWGKLQC

SEQ ID NO: 675402 - protein, 11 aa, Homo sapiens
  CDR3 for beta chain variable domain of TCR clone 337701 (TRBV11-2, TRBJ2-2)
CASSLPGELFF

SEQ ID NO: 675403 - protein, 12 aa, Homo sapiens
  CDR3 for alpha chain variable domain of TCR clone 337702 (TRAV12-3, TRAJ17)
YVMTLTGNKLTF

SEQ ID NO: 675404 - protein, 15 aa, Homo sapiens
  CDR3 for beta chain variable domain of TCR clone 337702 (TRBV20-1, TRBJ2-7)
CSARDRVSGMDEQYF

SEQ ID NO: 675405 - protein, 14 aa, Homo sapiens
  CDR3 for alpha chain variable domain of TCR clone 337703 (TRAV13-1, TRAJ44)
CAAKATGTASKLTL

SEQ ID NO: 675406 - protein, 15 aa, Homo sapiens
  CDR3 for beta chain variable domain of TCR clone 337703 (TRBV4-3, TRBJ1-1)
CASSQELGRGTEAFL

SEQ ID NO: 675407 - protein, 14 aa, Homo sapiens
  CDR3 for alpha chain variable domain of TCR clone 337704 (TRAV38-1, TRAJ29)
CAFITPSGNTPLVF

SEQ ID NO: 675408 - protein, 15 aa, Homo sapiens
  CDR3 for beta chain variable domain of TCR clone 337704 (TRBV7-2, TRBJ2-1)
CASSSGLAGGNEQFF

SEQ ID NO: 675409 - protein, 11 aa, Homo sapiens
  CDR3 for alpha chain variable domain of TCR clone 337705 (TRAV12-2, TRAJ33)
CAVGSNYQLIW

SEQ ID NO: 675410 - protein, 14 aa, Homo sapiens
  CDR3 for beta chain variable domain of TCR clone 337705 (TRBV6-1, TRBJ2-2)
CASVEHIEAGELFF

SEQ ID NO: 675411 - protein, 16 aa, Homo sapiens
  CDR3 for alpha chain variable domain of TCR clone 337706 (TRAV3, TRAJ10)
CAVRDMRAGGGNKLTF

SEQ ID NO: 675412 - protein, 14 aa, Homo sapiens
  CDR3 for beta chain variable domain of TCR clone 337706 (TRBV7-2, TRBJ1-1)
CASSFLTGKTEAFF

SEQ ID NO: 675413 - protein, 14 aa, Homo sapiens
  CDR3 for alpha chain variable domain of TCR clone 337707 (TRAV1-2, TRAJ8)
CAVREDTCFQKLVF

SEQ ID NO: 675414 - protein, 16 aa, Homo sapiens
  CDR3 for beta chain variable domain of TCR clone 337707 (TRBV29-1, TRBJ2-7)
CSVEVVGTSGSYEQYF

SEQ ID NO: 675415 - protein, 12 aa, Homo sapiens
  CDR3 for alpha chain variable domain of TCR clone 337708 (TRAV26-2, TRAJ21)
CILKGNFNKFYF

SEQ ID NO: 675416 - protein, 14 aa, Homo sapiens
  CDR3 for beta chain variable domain of TCR clone 337708 (TRBV12-4, TRBJ1-1)
CASSLGTGGSEAFF

SEQ ID NO: 675417 - protein, 17 aa, Homo sapiens
  CDR3 for alpha chain variable domain of TCR clone 337709 (TRAV3, TRAJ12)
CAVRDGGRMYSSYKLIF

SEQ ID NO: 675418 - protein, 12 aa, Homo sapiens
  CDR3 for beta chain variable domain of TCR clone 337709 (TRBV11-2, TRBJ2-2)
CASSLGGGELFF

SEQ ID NO: 675419 - protein, 16 aa, Homo sapiens
  CDR3 for alpha chain variable domain of TCR clone 337710 (TRAV14/DV4, TRAJ54)
CAMREGGIQGAQKLVF

SEQ ID NO: 675420 - protein, 18 aa, Homo sapiens
  CDR3 for beta chain variable domain of TCR clone 337710 (TRBV18, TRBJ1-3)
CASSPRGGAGPSGNTMYF

SEQ ID NO: 675421 - protein, 14 aa, Homo sapiens
  CDR3 for alpha chain variable domain of TCR clone 337711 (TRAV26-2, TRAJ38)
CILYNAGNNRKLIW

SEQ ID NO: 675422 - protein, 14 aa, Homo sapiens
  CDR3 for beta chain variable domain of TCR clone 337711 (TRBV19, TRBJ2-1)
CPSPTFVLSGEQFF

SEQ ID NO: 675423 - protein, 16 aa, Homo sapiens
  CDR3 for alpha chain variable domain of TCR clone 337712 (TRAV12-1, TRAJ4)
CLVNPGISGGYNKLIF

SEQ ID NO: 675424 - protein, 14 aa, Homo sapiens
  CDR3 for beta chain variable domain of TCR clone 337712 (TRBV5-6, TRBJ2-3)
CASRTSGGTDTQYF

SEQ ID NO: 675425 - protein, 13 aa, Homo sapiens
  CDR3 for alpha chain variable domain of TCR clone 337713 (TRAV13-2, TRAJ15)
CAEKNPAGTALIF

SEQ ID NO: 675426 - protein, 15 aa, Homo sapiens
  CDR3 for beta chain variable domain of TCR clone 337713 (TRBV29-1, TRBJ2-5)
CSVAPGQGARETQYF

SEQ ID NO: 675427 - protein, 13 aa, Homo sapiens
  CDR3 for alpha chain variable domain of TCR clone 337714 (TRAV12-1, TRAJ39)
CVALNNAGNMLNF

SEQ ID NO: 675428 - protein, 15 aa, Homo sapiens
  CDR3 for beta chain variable domain of TCR clone 337714 (TRBV14, TRBJ2-5)
CASSRRGGVQETQYF

SEQ ID NO: 675429 - protein, 15 aa, Homo sapiens
  CDR3 for alpha chain variable domain of TCR clone 337715 (TRAV8-4, TRAJ36)
CAVRKSWTGVNNLFF

SEQ ID NO: 675430 - protein, 17 aa, Homo sapiens
  CDR3 for beta chain variable domain of TCR clone 337715 (TRBV3-1, TRBJ2-2)
CASSQDSQGPNTGELFF

SEQ ID NO: 675431 - protein, 21 aa, Homo sapiens
  CDR3 for alpha chain variable domain of TCR clone 337716 (TRAV6, TRAJ36)
CARQTTSSLVLERDSPLFPIS

SEQ ID NO: 675432 - protein, 14 aa, Homo sapiens
  CDR3 for beta chain variable domain of TCR clone 337716 (TRBV10-2, TRBJ1-5)
CASSSTGRNQPQHF

SEQ ID NO: 675433 - protein, 11 aa, Homo sapiens
  CDR3 for alpha chain variable domain of TCR clone 337717 (TRAV1-2, TRAJ40)
CAVPGTYKYIF

SEQ ID NO: 675434 - protein, 16 aa, Homo sapiens
  CDR3 for beta chain variable domain of TCR clone 337717 (TRBV29-1, TRBJ2-7)
CSVEVVGTSGSYEQYI

SEQ ID NO: 675435 - protein, 13 aa, Homo sapiens
  CDR3 for alpha chain variable domain of TCR clone 337718 (TRAV30, TRAJ49)
CGTQPNTGNQFYF

SEQ ID NO: 675436 - protein, 14 aa, Homo sapiens
  CDR3 for beta chain variable domain of TCR clone 337718 (TRBV29-1, TRBJ2-1)
CSVEFRGIPFEQFF

SEQ ID NO: 675437 - protein, 16 aa, Homo sapiens
  CDR3 for alpha chain variable domain of TCR clone 337719 (TRAV4, TRAJ18)
CCVLLIGGSTLGRLYF

SEQ ID NO: 675438 - protein, 14 aa, Homo sapiens
  CDR3 for beta chain variable domain of TCR clone 337719 (TRBV7-2, TRBJ2-3)
CASSVAGGTDTQYF

SEQ ID NO: 675439 - protein, 15 aa, Homo sapiens
  CDR3 for alpha chain variable domain of TCR clone 337720 (TRAV3, TRAJ36)
CAVRASQTGANNLFF

SEQ ID NO: 675440 - protein, 15 aa, Homo sapiens
  CDR3 for beta chain variable domain of TCR clone 337720 (TRBV28, TRBJ2-1)
CASRVGLDEYNEQFF

SEQ ID NO: 675441 - protein, 18 aa, Homo sapiens
  CDR3 for alpha chain variable domain of TCR clone 337721 (TRAV12-1, TRAJ52)
CVVKLINAGGTSYGKLTF

SEQ ID NO: 675442 - protein, 13 aa, Homo sapiens
  CDR3 for beta chain variable domain of TCR clone 337721 (TRBV12-4, TRBJ1-2)
CASSLRQGKGYTF

SEQ ID NO: 675443 - protein, 13 aa, Homo sapiens
  CDR3 for alpha chain variable domain of TCR clone 337722 (TRAV21, TRAJ27)
CAARPGNAGKSTF

SEQ ID NO: 675444 - protein, 19 aa, Homo sapiens
  CDR3 for beta chain variable domain of TCR clone 337722 (TRBV11-2, TRBJ2-7)
CASSLGGGGLRAVLRAGHQ

SEQ ID NO: 675445 - protein, 15 aa, Homo sapiens
  CDR3 for alpha chain variable domain of TCR clone 337723 (TRAV4, TRAJ39)
CLVGPNNNAVNMLTF

SEQ ID NO: 675446 - protein, 13 aa, Homo sapiens
  CDR3 for beta chain variable domain of TCR clone 337723 (TRBV20-1, TRBJ1-1)
CSARGGGNTEAFF

SEQ ID NO: 675447 - protein, 11 aa, Homo sapiens
  CDR3 for alpha chain variable domain of TCR clone 337724 (TRAV13-2, TRAJ20)
CADSNDYKLSF

SEQ ID NO: 675448 - protein, 13 aa, Homo sapiens
  CDR3 for beta chain variable domain of TCR clone 337724 (TRBV7-9, TRBJ1-2)
CASSLKQNYGYTF

SEQ ID NO: 675449 - protein, 13 aa, Homo sapiens
  CDR3 for alpha chain variable domain of TCR clone 337725 (TRAV3, TRAJ15)
CAVRDQAGTALIF

SEQ ID NO: 675450 - protein, 15 aa, Homo sapiens
  CDR3 for beta chain variable domain of TCR clone 337725 (TRBV4-1, TRBJ2-7)
CASSQQGQGFDEQYF

SEQ ID NO: 675451 - protein, 14 aa, Homo sapiens
  CDR3 for alpha chain variable domain of TCR clone 337726 (TRAV21, TRAJ45)
CAVHSGGGAEGLTF

SEQ ID NO: 675452 - protein, 14 aa, Homo sapiens
  CDR3 for beta chain variable domain of TCR clone 337726 (TRBV20-1, TRBJ2-1)
CSARRLAEANEQFF

SEQ ID NO: 675453 - protein, 14 aa, Homo sapiens
  CDR3 for alpha chain variable domain of TCR clone 337727 (TRAV8-3, TRAJ4)
CAVGAAGGYNKLIF

SEQ ID NO: 675454 - protein, 13 aa, Homo sapiens
  CDR3 for beta chain variable domain of TCR clone 337727 (TRBV7-3, TRBJ1-1)
CASRQDWGAEAFF

SEQ ID NO: 675455 - protein, 19 aa, Homo sapiens
  CDR3 for alpha chain variable domain of TCR clone 337728 (TRAV29/DV5, TRAJ49)
CSVLLCSKVTVDTVNQFYF

SEQ ID NO: 675456 - protein, 17 aa, Homo sapiens
  CDR3 for beta chain variable domain of TCR clone 337728 (TRBV13, TRBJ2-3)
CASSLSRVAGGRNTQYF

SEQ ID NO: 675457 - protein, 12 aa, Homo sapiens
  CDR3 for alpha chain variable domain of TCR clone 337729 (TRAV8-3, TRAJ41)
CAVALSGYALNF

SEQ ID NO: 675458 - protein, 18 aa, Homo sapiens
  CDR3 for beta chain variable domain of TCR clone 337729 (TRBV20-1, TRBJ2-6)
CSAETTPTHGSGANVLSF

SEQ ID NO: 675459 - protein, 15 aa, Homo sapiens
  CDR3 for alpha chain variable domain of TCR clone 337730 (TRAV17, TRAJ57)
CGTGPSQGGSEKLVF

SEQ ID NO: 675460 - protein, 16 aa, Homo sapiens
  CDR3 for beta chain variable domain of TCR clone 337730 (TRBV12-4, TRBJ1-5)
CASSRPVGGSNQPQHF

SEQ ID NO: 675461 - protein, 12 aa, Homo sapiens
  CDR3 for alpha chain variable domain of TCR clone 337731 (TRAV3, TRAJ9)
CAVRDPNNDMRF

SEQ ID NO: 675462 - protein, 13 aa, Homo sapiens
  CDR3 for beta chain variable domain of TCR clone 337731 (TRBV19, TRBJ1-2)
CASSVPGQDGYTF

SEQ ID NO: 675463 - protein, 12 aa, Homo sapiens
  CDR3 for alpha chain variable domain of TCR clone 337732 (TRAV27, TRAJ40)
CAMSSGTYKYIF

SEQ ID NO: 675464 - protein, 15 aa, Homo sapiens
  CDR3 for beta chain variable domain of TCR clone 337732 (TRBV7-3, TRBJ2-2)
CASSETGQGTGELFF

SEQ ID NO: 675465 - protein, 15 aa, Homo sapiens
  CDR3 for alpha chain variable domain of TCR clone 337733 (TRAV26-2, TRAJ29)
CILRERISGNTPLVF

SEQ ID NO: 675466 - protein, 15 aa, Homo sapiens
  CDR3 for beta chain variable domain of TCR clone 337733 (TRBV6-3, TRBJ1-5)
CASSRGLGSNQPQHF

SEQ ID NO: 675467 - protein, 14 aa, Homo sapiens
  CDR3 for alpha chain variable domain of TCR clone 337734 (TRAV26-1, TRAJ21)
CIVRVVYNFNKFYF

SEQ ID NO: 675468 - protein, 13 aa, Homo sapiens
  CDR3 for beta chain variable domain of TCR clone 337734 (TRBV18, TRBJ2-7)
CASQSGGGYEQYF

SEQ ID NO: 675469 - protein, 16 aa, Homo sapiens
  CDR3 for alpha chain variable domain of TCR clone 337735 (TRAV30, TRAJ24)
CGTEIGDADSWGKFQF

SEQ ID NO: 675470 - protein, 13 aa, Homo sapiens
  CDR3 for beta chain variable domain of TCR clone 337735 (TRBV12-4, TRBJ1-5)
CASSPDRAQPQHF

SEQ ID NO: 675471 - protein, 14 aa, Homo sapiens
  CDR3 for alpha chain variable domain of TCR clone 337736 (TRAV13-2, TRAJ17)
CAENSKAAGNKLTF

SEQ ID NO: 675472 - protein, 14 aa, Homo sapiens
  CDR3 for beta chain variable domain of TCR clone 337736 (TRBV27, TRBJ2-2)
CASRPGVNTGELFF

SEQ ID NO: 675473 - protein, 20 aa, Homo sapiens
  CDR3 for alpha chain variable domain of TCR clone 337737 (TRAV21, TRAJ4)
AASQPGDSATLAGGYNKLIF

SEQ ID NO: 675474 - protein, 19 aa, Homo sapiens
  CDR3 for beta chain variable domain of TCR clone 337737 (TRBV18, TRBJ1-3)
CASSPLSRSGMSSGNTIYF

SEQ ID NO: 675475 - protein, 14 aa, Homo sapiens
  CDR3 for alpha chain variable domain of TCR clone 337738 (TRAV12-3, TRAJ53)
CAMRSGGSKYKLTF

SEQ ID NO: 675476 - protein, 14 aa, Homo sapiens
  CDR3 for beta chain variable domain of TCR clone 337738 (TRBV18, TRBJ2-7)
CASSPPAGAPEQYF

SEQ ID NO: 675477 - protein, 23 aa, Homo sapiens
  CDR3 for alpha chain variable domain of TCR clone 337739 (TRAV26-1, TRAJ38)
CIADNAGNNHIQNPDPAGHQLRD

SEQ ID NO: 675478 - protein, 13 aa, Homo sapiens
  CDR3 for beta chain variable domain of TCR clone 337739 (TRBV20-1, TRBJ1-1)
CSARGGGNTEAFF

SEQ ID NO: 675479 - protein, 13 aa, Homo sapiens
  CDR3 for alpha chain variable domain of TCR clone 337740 (TRAV12-2, TRAJ8)
CREREHRLSKLVF

SEQ ID NO: 675480 - protein, 13 aa, Homo sapiens
  CDR3 for beta chain variable domain of TCR clone 337740 (TRBV18, TRBJ1-2)
CASSASATEGYTF

SEQ ID NO: 675481 - protein, 12 aa, Homo sapiens
  CDR3 for alpha chain variable domain of TCR clone 337741 (TRAV12-3, TRAJ13)
CNELWGYQKVTF

SEQ ID NO: 675482 - protein, 16 aa, Homo sapiens
  CDR3 for beta chain variable domain of TCR clone 337741 (TRBV4-1, TRBJ2-7)
CASSRGDILNSYEQYF

SEQ ID NO: 675483 - protein, 18 aa, Homo sapiens
  CDR3 for alpha chain variable domain of TCR clone 337742 (TRAV21, TRAJ52)
CAVRPSPAGGTSYGKLQF

SEQ ID NO: 675484 - protein, 13 aa, Homo sapiens
  CDR3 for beta chain variable domain of TCR clone 337742 (TRBV19, TRBJ1-2)
CASSVPGQDGYTF

SEQ ID NO: 675485 - protein, 13 aa, Homo sapiens
  CDR3 for alpha chain variable domain of TCR clone 337743 (TRAV2, TRAJ29)
CAVEPTGNTPLVF

SEQ ID NO: 675486 - protein, 15 aa, Homo sapiens
  CDR3 for beta chain variable domain of TCR clone 337743 (TRBV2, TRBJ2-1)
CQQRGGVPGYNEQFF

SEQ ID NO: 675487 - protein, 13 aa, Homo sapiens
  CDR3 for alpha chain variable domain of TCR clone 337744 (TRAV1-2, TRAJ12)
CAVSMDSSYKLIF

SEQ ID NO: 675488 - protein, 17 aa, Homo sapiens
  CDR3 for beta chain variable domain of TCR clone 337744 (TRBV11-2, TRBJ2-1)
CASSLYPPGVEYNEQLF

SEQ ID NO: 675489 - protein, 16 aa, Homo sapiens
  CDR3 for alpha chain variable domain of TCR clone 337745 (TRAV3, TRAJ37)
CDVRGKGSGNTGKLIF

SEQ ID NO: 675490 - protein, 21 aa, Homo sapiens
  CDR3 for beta chain variable domain of TCR clone 337745 (TRBV15, TRBJ2-1)
AWRTQPCTCVQPAEVDTARFF

SEQ ID NO: 675491 - protein, 12 aa, Homo sapiens
  CDR3 for alpha chain variable domain of TCR clone 337746 (TRAV12-3, TRAJ34)
CAMGYNTDKLIF

SEQ ID NO: 675492 - protein, 14 aa, Homo sapiens
  CDR3 for beta chain variable domain of TCR clone 337746 (TRBV25-1, TRBJ1-1)
CASTHLGGNTEAFF

SEQ ID NO: 675493 - protein, 11 aa, Homo sapiens
  CDR3 for alpha chain variable domain of TCR clone 337747 (TRAV12-1, TRAJ21)
CVVSNFNKFYF

SEQ ID NO: 675494 - protein, 16 aa, Homo sapiens
  CDR3 for beta chain variable domain of TCR clone 337747 (TRBV6-5, TRBJ2-7)
CASSYFRVGISDEQYF

SEQ ID NO: 675495 - protein, 12 aa, Homo sapiens
  CDR3 for alpha chain variable domain of TCR clone 337748 (TRAV12-3, TRAJ4)
CAMTGAGTRLAV

SEQ ID NO: 675496 - protein, 15 aa, Homo sapiens
  CDR3 for beta chain variable domain of TCR clone 337748 (TRBV7-2, TRBJ2-1)
CASSFQADEYNEQFF

SEQ ID NO: 675497 - protein, 12 aa, Homo sapiens
  CDR3 for alpha chain variable domain of TCR clone 337749 (TRAV8-6, TRAJ47)
CAVSEDGNKLVF

SEQ ID NO: 675498 - protein, 17 aa, Homo sapiens
  CDR3 for beta chain variable domain of TCR clone 337749 (TRBV20-1, TRBJ2-2)
CSASGSGQGGLTGELFF

SEQ ID NO: 675499 - protein, 13 aa, Homo sapiens
  CDR3 for alpha chain variable domain of TCR clone 337750 (TRAV21, TRAJ56)
CAVRTGANSKLTF

SEQ ID NO: 675500 - protein, 15 aa, Homo sapiens
  CDR3 for beta chain variable domain of TCR clone 337750 (TRBV7-9, TRBJ1-1)
CASSHRGTVNNEAFF

SEQ ID NO: 675501 - protein, 15 aa, Homo sapiens
  CDR3 for alpha chain variable domain of TCR clone 337751 (TRAV26-1, TRAJ56)
CIVRVATGANSKLKF

SEQ ID NO: 675502 - protein, 16 aa, Homo sapiens
  CDR3 for beta chain variable domain of TCR clone 337751 (TRBV12-5, TRBJ2-5)
CASGPRTSGNQETQYF

SEQ ID NO: 675503 - protein, 17 aa, Homo sapiens
  CDR3 for alpha chain variable domain of TCR clone 337752 (TRAV13-1, TRAJ52)
CAASSGAGGTIYGKLTF

SEQ ID NO: 675504 - protein, 17 aa, Homo sapiens
  CDR3 for beta chain variable domain of TCR clone 337752 (TRBV11-2, TRBJ2-1)
CASSLYPPGVEYNEQFF

SEQ ID NO: 675505 - protein, 18 aa, Homo sapiens
  CDR3 for alpha chain variable domain of TCR clone 337753 (TRAV12-2, )
CAVEDIQNPDPAVYQLRD

SEQ ID NO: 675506 - protein, 16 aa, Homo sapiens
  CDR3 for beta chain variable domain of TCR clone 337753 (TRBV6-1, TRBJ1-2)
CASSGAWKGRSHGYTF

SEQ ID NO: 675507 - protein, 14 aa, Homo sapiens
  CDR3 for alpha chain variable domain of TCR clone 337754 (TRAV12-2, TRAJ17)
CAVLFKAAGDKLTF

SEQ ID NO: 675508 - protein, 15 aa, Homo sapiens
  CDR3 for beta chain variable domain of TCR clone 337754 (TRBV19, TRBJ1-2)
CASSVGQVLNYGYTF

SEQ ID NO: 675509 - protein, 19 aa, Homo sapiens
  CDR3 for alpha chain variable domain of TCR clone 337755 (TRAV26-1, TRAJ28)
CIVRVAHAYSGAGSYQLTF

SEQ ID NO: 675510 - protein, 17 aa, Homo sapiens
  CDR3 for beta chain variable domain of TCR clone 337755 (TRBV9, TRBJ2-2)
CASSVGGQGTDTGELCF

SEQ ID NO: 675511 - protein, 17 aa, Homo sapiens
  CDR3 for alpha chain variable domain of TCR clone 337756 (TRAV3, TRAJ6)
CAVRDGPRAGGSYIPTF

SEQ ID NO: 675512 - protein, 14 aa, Homo sapiens
  CDR3 for beta chain variable domain of TCR clone 337756 (TRBV19, TRBJ1-5)
CASSQGYSNQPQHF

SEQ ID NO: 675513 - protein, 18 aa, Homo sapiens
  CDR3 for alpha chain variable domain of TCR clone 337757 (TRAV26-1, TRAJ27)
CIVRPSFNYHTNAGKSTF

SEQ ID NO: 675514 - protein, 14 aa, Homo sapiens
  CDR3 for beta chain variable domain of TCR clone 337757 (TRBV10-3, TRBJ1-6)
CAISVDGDESPLHF

SEQ ID NO: 675515 - protein, 18 aa, Homo sapiens
  CDR3 for alpha chain variable domain of TCR clone 337758 (TRAV21, TRAJ52)
CAVRPSPAGGTSYGKRTF

SEQ ID NO: 675516 - protein, 14 aa, Homo sapiens
  CDR3 for beta chain variable domain of TCR clone 337758 (TRBV4-1, TRBJ2-2)
CASSQAVNTGELFF

SEQ ID NO: 675517 - protein, 14 aa, Homo sapiens
  CDR3 for alpha chain variable domain of TCR clone 337759 (TRAV8-3, TRAJ33)
CAVGAPDSNYQLIW

SEQ ID NO: 675518 - protein, 15 aa, Homo sapiens
  CDR3 for beta chain variable domain of TCR clone 337759 (TRBV27, TRBJ2-1)
CASSNGGGSSNEQFF

SEQ ID NO: 675519 - protein, 15 aa, Homo sapiens
  CDR3 for alpha chain variable domain of TCR clone 337760 (TRAV3, TRAJ22)
CAVRDRGGSARQLTF

SEQ ID NO: 675520 - protein, 13 aa, Homo sapiens
  CDR3 for beta chain variable domain of TCR clone 337760 (TRBV7-9, TRBJ1-2)
CASSVKQNYGYSF

SEQ ID NO: 675521 - protein, 14 aa, Homo sapiens
  CDR3 for alpha chain variable domain of TCR clone 337761 (TRAV26-1, TRAJ34)
CIVRESYNTDKLIC

SEQ ID NO: 675522 - protein, 13 aa, Homo sapiens
  CDR3 for beta chain variable domain of TCR clone 337761 (TRBV19, TRBJ2-1)
CATSRGVYNEQFF

SEQ ID NO: 675523 - protein, 14 aa, Homo sapiens
  CDR3 for alpha chain variable domain of TCR clone 337762 (TRAV12-2, TRAJ13)
CAVKKTGGYQKVTF

SEQ ID NO: 675524 - protein, 14 aa, Homo sapiens
  CDR3 for beta chain variable domain of TCR clone 337762 (TRBV25-1, TRBJ1-1)
CASTHLGGNTEACF

SEQ ID NO: 675525 - protein, 12 aa, Homo sapiens
  CDR3 for alpha chain variable domain of TCR clone 337763 (TRAV8-3, TRAJ26)
CAGDNYGQNFFF

SEQ ID NO: 675526 - protein, 11 aa, Homo sapiens
  CDR3 for beta chain variable domain of TCR clone 337763 (TRBV19, TRBJ1-1)
CASSIGSEAFF

SEQ ID NO: 675527 - protein, 15 aa, Homo sapiens
  CDR3 for alpha chain variable domain of TCR clone 337764 (TRAV12-3, TRAJ6)
CAMSPASGGSYLPTF

SEQ ID NO: 675528 - protein, 16 aa, Homo sapiens
  CDR3 for beta chain variable domain of TCR clone 337764 (TRBV10-3, TRBJ1-2)
CAISDKVSGPFYGYTF

SEQ ID NO: 675529 - protein, 15 aa, Homo sapiens
  CDR3 for alpha chain variable domain of TCR clone 337765 (TRAV8-6, TRAJ6)
CAVSGESGGSYIPTF

SEQ ID NO: 675530 - protein, 14 aa, Homo sapiens
  CDR3 for beta chain variable domain of TCR clone 337765 (TRBV7-9, TRBJ2-1)
CASSSMVGFGEQFS

SEQ ID NO: 675531 - protein, 14 aa, Homo sapiens
  CDR3 for alpha chain variable domain of TCR clone 337766 (TRAV12-2, TRAJ13)
CAVKKTGGYQKVTF

SEQ ID NO: 675532 - protein, 13 aa, Homo sapiens
  CDR3 for beta chain variable domain of TCR clone 337766 (TRBV19, TRBJ2-1)
CASTNSDVGEQFF

SEQ ID NO: 675533 - protein, 16 aa, Homo sapiens
  CDR3 for alpha chain variable domain of TCR clone 337767 (TRAV3, TRAJ27)
CAVGDPQGPNAGKSTF

SEQ ID NO: 675534 - protein, 15 aa, Homo sapiens
  CDR3 for beta chain variable domain of TCR clone 337767 (TRBV20-1, TRBJ2-7)
CSARDRVSGMDEQYF

SEQ ID NO: 675535 - protein, 14 aa, Homo sapiens
  CDR3 for alpha chain variable domain of TCR clone 337768 (TRAV12-1, TRAJ9)
CVVNRRTGGFKTIF

SEQ ID NO: 675536 - protein, 14 aa, Homo sapiens
  CDR3 for beta chain variable domain of TCR clone 337768 (TRBV7-3, TRBJ2-1)
CASSLAGGTNEQFF

SEQ ID NO: 675537 - protein, 11 aa, Homo sapiens
  CDR3 for alpha chain variable domain of TCR clone 337769 (TRAV16, TRAJ34)
CALYNTDKLIF

SEQ ID NO: 675538 - protein, 13 aa, Homo sapiens
  CDR3 for beta chain variable domain of TCR clone 337769 (TRBV25-1, TRBJ1-1)
CASSRQVRAEAFF

SEQ ID NO: 675539 - protein, 13 aa, Homo sapiens
  CDR3 for alpha chain variable domain of TCR clone 337770 (TRAV8-3, TRAJ48)
CAVVPFGIEELTF

SEQ ID NO: 675540 - protein, 15 aa, Homo sapiens
  CDR3 for beta chain variable domain of TCR clone 337770 (TRBV11-2, TRBJ2-1)
CASSSPSTRYNEQFF

SEQ ID NO: 675541 - protein, 15 aa, Homo sapiens
  CDR3 for alpha chain variable domain of TCR clone 337771 (TRAV4, TRAJ39)
CLVGPNNNAGNMLTF

SEQ ID NO: 675542 - protein, 16 aa, Homo sapiens
  CDR3 for beta chain variable domain of TCR clone 337771 (TRBV7-3, TRBJ2-2)
CASSLKRGTLSGELFF

SEQ ID NO: 675543 - protein, 11 aa, Homo sapiens
  CDR3 for alpha chain variable domain of TCR clone 337772 (TRAV10, TRAJ11)
CGERERSTITF

SEQ ID NO: 675544 - protein, 15 aa, Homo sapiens
  CDR3 for beta chain variable domain of TCR clone 337772 (TRBV7-2, TRBJ2-1)
CASSFQADEYNEQFF

SEQ ID NO: 675545 - protein, 15 aa, Homo sapiens
  CDR3 for alpha chain variable domain of TCR clone 337773 (TRAV29/DV5, TRAJ24)
CAASGATDSWGKVQF

SEQ ID NO: 675546 - protein, 12 aa, Homo sapiens
  CDR3 for beta chain variable domain of TCR clone 337773 (TRBV11-2, TRBJ2-2)
CASSLPTGELFF

SEQ ID NO: 675547 - protein, 18 aa, Homo sapiens
  CDR3 for alpha chain variable domain of TCR clone 337774 (TRAV12-3, TRAJ52)
CAMSVGGAGGTSYGKLTF

SEQ ID NO: 675548 - protein, 16 aa, Homo sapiens
  CDR3 for beta chain variable domain of TCR clone 337774 (TRBV7-9, TRBJ1-2)
CASSISSDRGGYGYTF

SEQ ID NO: 675549 - protein, 14 aa, Homo sapiens
  CDR3 for alpha chain variable domain of TCR clone 337775 (TRAV1-2, TRAJ13)
CAVLNSGGYQKVTF

SEQ ID NO: 675550 - protein, 15 aa, Homo sapiens
  CDR3 for beta chain variable domain of TCR clone 337775 (TRBV5-1, TRBJ2-1)
CASSPPRAPYNEQFF

SEQ ID NO: 675551 - protein, 15 aa, Homo sapiens
  CDR3 for alpha chain variable domain of TCR clone 337776 (TRAV25, TRAJ10)
CAGPLLTGGGDKLTF

SEQ ID NO: 675552 - protein, 15 aa, Homo sapiens
  CDR3 for beta chain variable domain of TCR clone 337776 (TRBV12-5, TRBJ2-2)
CASGRLGGNTGELFF

SEQ ID NO: 675553 - protein, 16 aa, Homo sapiens
  CDR3 for alpha chain variable domain of TCR clone 337777 (TRAV8-2, TRAJ7)
CVVSEGPYYGNNRLAF

SEQ ID NO: 675554 - protein, 15 aa, Homo sapiens
  CDR3 for beta chain variable domain of TCR clone 337777 (TRBV27, TRBJ2-3)
CASSLGLADTDTQYF

SEQ ID NO: 675555 - protein, 13 aa, Homo sapiens
  CDR3 for alpha chain variable domain of TCR clone 337778 (TRAV3, TRAJ29)
CAVRDIKGTPLVF

SEQ ID NO: 675556 - protein, 14 aa, Homo sapiens
  CDR3 for beta chain variable domain of TCR clone 337778 (TRBV27, TRBJ2-1)
CASSATGGYNEQFF

SEQ ID NO: 675557 - protein, 13 aa, Homo sapiens
  CDR3 for alpha chain variable domain of TCR clone 337779 (TRAV2, TRAJ40)
CAVVTSGTYEYIF

SEQ ID NO: 675558 - protein, 14 aa, Homo sapiens
  CDR3 for beta chain variable domain of TCR clone 337779 (TRBV19, TRBJ2-1)
CASPTFVLRGEQFF

SEQ ID NO: 675559 - protein, 15 aa, Homo sapiens
  CDR3 for alpha chain variable domain of TCR clone 337780 (TRAV13-1, TRAJ11)
CAASNRNSGYSTLTF

SEQ ID NO: 675560 - protein, 13 aa, Homo sapiens
  CDR3 for beta chain variable domain of TCR clone 337780 (TRBV4-3, TRBJ1-1)
CASSQAGNTEAFF

SEQ ID NO: 675561 - protein, 15 aa, Homo sapiens
  CDR3 for alpha chain variable domain of TCR clone 337781 (TRAV8-3, TRAJ23)
CAVGDRYNQGGKLIF

SEQ ID NO: 675562 - protein, 22 aa, Homo sapiens
  CDR3 for beta chain variable domain of TCR clone 337781 (TRBV29-1, TRBJ2-5)
TVSNMSPEDSSMYLCSAGTQYF

SEQ ID NO: 675563 - protein, 15 aa, Homo sapiens
  CDR3 for alpha chain variable domain of TCR clone 337782 (TRAV29/DV5, TRAJ29)
CASSERSSGNTPLVF

SEQ ID NO: 675564 - protein, 17 aa, Homo sapiens
  CDR3 for beta chain variable domain of TCR clone 337782 (TRBV4-1, TRBJ1-4)
CASSQEGPRGVEEKLFF

SEQ ID NO: 675565 - protein, 16 aa, Homo sapiens
  CDR3 for alpha chain variable domain of TCR clone 337783 (TRAV23/DV6, TRAJ9)
CAASIGGYTGGFKTIF

SEQ ID NO: 675566 - protein, 14 aa, Homo sapiens
  CDR3 for beta chain variable domain of TCR clone 337783 (TRBV9, TRBJ2-7)
CASSVGVGSYEQYF

SEQ ID NO: 675567 - protein, 15 aa, Homo sapiens
  CDR3 for alpha chain variable domain of TCR clone 337784 (TRAV8-2, TRAJ16)
CVVSDGFSDGPKLLF

SEQ ID NO: 675568 - protein, 14 aa, Homo sapiens
  CDR3 for beta chain variable domain of TCR clone 337784 (TRBV7-3, TRBJ1-1)
CASSLGTGYTEAFF

SEQ ID NO: 675569 - protein, 11 aa, Homo sapiens
  CDR3 for alpha chain variable domain of TCR clone 337785 (TRAV27, TRAJ43)
CRINQGNKLVF

SEQ ID NO: 675570 - protein, 14 aa, Homo sapiens
  CDR3 for beta chain variable domain of TCR clone 337785 (TRBV11-2, TRBJ1-2)
CASSLGTANYGYTF

SEQ ID NO: 675571 - protein, 16 aa, Homo sapiens
  CDR3 for alpha chain variable domain of TCR clone 337786 (TRAV3, TRAJ4)
CAVRPSPSGGYNKLIF

SEQ ID NO: 675572 - protein, 12 aa, Homo sapiens
  CDR3 for beta chain variable domain of TCR clone 337786 (TRBV7-9, TRBJ2-7)
CASSQGVCEQYF

SEQ ID NO: 675573 - protein, 14 aa, Homo sapiens
  CDR3 for alpha chain variable domain of TCR clone 337787 (TRAV36/DV7, TRAJ21)
CAVYTTSTNFTLDL

SEQ ID NO: 675574 - protein, 14 aa, Homo sapiens
  CDR3 for beta chain variable domain of TCR clone 337787 (TRBV12-5, TRBJ2-5)
CASGSRTHQETQYF

SEQ ID NO: 675575 - protein, 13 aa, Homo sapiens
  CDR3 for alpha chain variable domain of TCR clone 337788 (TRAV27, TRAJ6)
CAGGTRGSYIPTF

SEQ ID NO: 675576 - protein, 15 aa, Homo sapiens
  CDR3 for beta chain variable domain of TCR clone 337788 (TRBV5-5, TRBJ2-7)
CASSLAAPLSYKQYF

SEQ ID NO: 675577 - protein, 15 aa, Homo sapiens
  CDR3 for alpha chain variable domain of TCR clone 337789 (TRAV17, TRAJ45)
TSVLRTGGGADGLTF

SEQ ID NO: 675578 - protein, 15 aa, Homo sapiens
  CDR3 for beta chain variable domain of TCR clone 337789 (TRBV5-7, TRBJ1-5)
CASSYGELWDQPQHF

SEQ ID NO: 675579 - protein, 16 aa, Homo sapiens
  CDR3 for alpha chain variable domain of TCR clone 337790 (TRAV30, TRAJ24)
CGAEIVDADSWGKFQF

SEQ ID NO: 675580 - protein, 15 aa, Homo sapiens
  CDR3 for beta chain variable domain of TCR clone 337790 (TRBV20-1, TRBJ2-6)
CSARDRGPGANVLTF

SEQ ID NO: 675581 - protein, 10 aa, Homo sapiens
  CDR3 for alpha chain variable domain of TCR clone 337791 (TRAV25, TRAJ34)
CAYSTDKLIF

SEQ ID NO: 675582 - protein, 14 aa, Homo sapiens
  CDR3 for beta chain variable domain of TCR clone 337791 (TRBV12-5, TRBJ2-5)
CASGSRTHQETQYF

SEQ ID NO: 675583 - protein, 17 aa, Homo sapiens
  CDR3 for alpha chain variable domain of TCR clone 337792 (TRAV35, TRAJ47)
GLLDCRTHTEYGNKLVF

SEQ ID NO: 675584 - protein, 16 aa, Homo sapiens
  CDR3 for beta chain variable domain of TCR clone 337792 (TRBV11-2, TRBJ1-2)
CASSPSGREANYGYTF

SEQ ID NO: 675585 - protein, 13 aa, Homo sapiens
  CDR3 for alpha chain variable domain of TCR clone 337793 (TRAV12-2, TRAJ39)
CAVNNNAGNMHTF

SEQ ID NO: 675586 - protein, 13 aa, Homo sapiens
  CDR3 for beta chain variable domain of TCR clone 337793 (TRBV2, TRBJ1-5)
CATAGPGNQTQHF

SEQ ID NO: 675587 - protein, 12 aa, Homo sapiens
  CDR3 for alpha chain variable domain of TCR clone 337794 (TRAV12-2, TRAJ20)
CAVRPSDYKLSF

SEQ ID NO: 675588 - protein, 14 aa, Homo sapiens
  CDR3 for beta chain variable domain of TCR clone 337794 (TRBV7-9, TRBJ2-2)
CASSLVQDTGELFF

SEQ ID NO: 675589 - protein, 16 aa, Homo sapiens
  CDR3 for alpha chain variable domain of TCR clone 337795 (TRAV3, TRAJ10)
CAVRDMRAGGGNKLTF

SEQ ID NO: 675590 - protein, 16 aa, Homo sapiens
  CDR3 for beta chain variable domain of TCR clone 337795 (TRBV18, TRBJ1-3)
CASSLGILNGENTIYF

SEQ ID NO: 675591 - protein, 15 aa, Homo sapiens
  CDR3 for alpha chain variable domain of TCR clone 337796 (TRAV3, TRAJ3)
CAVRDRDSSASKIIF

SEQ ID NO: 675592 - protein, 11 aa, Homo sapiens
  CDR3 for beta chain variable domain of TCR clone 337796 (TRBV5-1, TRBJ2-1)
CASSIGQEQFF

SEQ ID NO: 675593 - protein, 13 aa, Homo sapiens
  CDR3 for alpha chain variable domain of TCR clone 337797 (TRAV12-3, TRAJ53)
CAMRGGSNYKLTF

SEQ ID NO: 675594 - protein, 13 aa, Homo sapiens
  CDR3 for beta chain variable domain of TCR clone 337797 (TRBV10-3, TRBJ2-7)
CASKLAVNYEQYF

SEQ ID NO: 675595 - protein, 19 aa, Homo sapiens
  CDR3 for alpha chain variable domain of TCR clone 337798 (TRAV3, TRAJ37)
CAVRDIVGCYPSNTGKLIF

SEQ ID NO: 675596 - protein, 14 aa, Homo sapiens
  CDR3 for beta chain variable domain of TCR clone 337798 (TRBV7-8, TRBJ2-3)
CASSLEAGTDTQYF

SEQ ID NO: 675597 - protein, 11 aa, Homo sapiens
  CDR3 for alpha chain variable domain of TCR clone 337799 (TRAV12-1, TRAJ8)
CVVTGFQKLVF

SEQ ID NO: 675598 - protein, 12 aa, Homo sapiens
  CDR3 for beta chain variable domain of TCR clone 337799 (TRBV19, TRBJ2-1)
CASSTGQGEQFF

SEQ ID NO: 675599 - protein, 13 aa, Homo sapiens
  CDR3 for alpha chain variable domain of TCR clone 337800 (TRAV12-2, TRAJ9)
CAVLENGGFKTIF

SEQ ID NO: 675600 - protein, 15 aa, Homo sapiens
  CDR3 for beta chain variable domain of TCR clone 337800 (TRBV6-3, TRBJ2-7)
CASSRTGVNLYEQYF

SEQ ID NO: 675601 - protein, 14 aa, Homo sapiens
  CDR3 for alpha chain variable domain of TCR clone 337801 (TRAV1-2, TRAJ16)
CAVNRCSDGQKLLF

SEQ ID NO: 675602 - protein, 15 aa, Homo sapiens
  CDR3 for beta chain variable domain of TCR clone 337801 (TRBV4-2, TRBJ1-1)
CASSQQGAGDTEAFF

SEQ ID NO: 675603 - protein, 11 aa, Homo sapiens
  CDR3 for alpha chain variable domain of TCR clone 337802 (TRAV17, TRAJ43)
CATDLHNDMRF

SEQ ID NO: 675604 - protein, 16 aa, Homo sapiens
  CDR3 for beta chain variable domain of TCR clone 337802 (TRBV27, TRBJ2-2)
CASSFRGLVRTGELFF

SEQ ID NO: 675605 - protein, 12 aa, Homo sapiens
  CDR3 for alpha chain variable domain of TCR clone 337803 (TRAV12-1, TRAJ11)
CVVKAGYSTLTF

SEQ ID NO: 675606 - protein, 14 aa, Homo sapiens
  CDR3 for beta chain variable domain of TCR clone 337803 (TRBV19, TRBJ2-5)
CASSIILDMETQYF

SEQ ID NO: 675607 - protein, 17 aa, Homo sapiens
  CDR3 for alpha chain variable domain of TCR clone 337804 (TRAV3, TRAJ6)
CAVSDGPRAGGSYIPTF

SEQ ID NO: 675608 - protein, 15 aa, Homo sapiens
  CDR3 for beta chain variable domain of TCR clone 337804 (TRBV7-9, TRBJ1-6)
CASSSPGRGNSPLHF

SEQ ID NO: 675609 - protein, 15 aa, Homo sapiens
  CDR3 for alpha chain variable domain of TCR clone 337805 (TRAV12-1, TRAJ44)
CVVFVNTGTASKLTF

SEQ ID NO: 675610 - protein, 16 aa, Homo sapiens
  CDR3 for beta chain variable domain of TCR clone 337805 (TRBV20-1, TRBJ2-7)
CSARAPGLALSYEQYF

SEQ ID NO: 675611 - protein, 15 aa, Homo sapiens
  CDR3 for alpha chain variable domain of TCR clone 337806 (TRAV8-3, TRAJ45)
CASSYSGGGADGLTF

SEQ ID NO: 675612 - protein, 17 aa, Homo sapiens
  CDR3 for beta chain variable domain of TCR clone 337806 (TRBV11-2, TRBJ2-1)
CASSLYPPGVEYNEQFV

SEQ ID NO: 675613 - protein, 14 aa, Homo sapiens
  CDR3 for alpha chain variable domain of TCR clone 337807 (TRAV17, TRAJ16)
CATADFSDGQKLLF

SEQ ID NO: 675614 - protein, 12 aa, Homo sapiens
  CDR3 for beta chain variable domain of TCR clone 337807 (TRBV5-1, TRBJ1-2)
CASSQDTYGYTF

SEQ ID NO: 675615 - protein, 11 aa, Homo sapiens
  CDR3 for alpha chain variable domain of TCR clone 337808 (TRAV12-1, TRAJ30)
CVVNGQDKIIF

SEQ ID NO: 675616 - protein, 12 aa, Homo sapiens
  CDR3 for beta chain variable domain of TCR clone 337808 (TRBV12-5, TRBJ2-5)
CASGQGVETQYF

SEQ ID NO: 675617 - protein, 14 aa, Homo sapiens
  CDR3 for alpha chain variable domain of TCR clone 337809 (TRAV27, TRAJ44)
CAASFTGTASKLTF

SEQ ID NO: 675618 - protein, 16 aa, Homo sapiens
  CDR3 for beta chain variable domain of TCR clone 337809 (TRBV7-9, TRBJ1-2)
CASSLGFSSGEDGYTF

SEQ ID NO: 675619 - protein, 13 aa, Homo sapiens
  CDR3 for alpha chain variable domain of TCR clone 337810 (TRAV3, TRAJ20)
CAVRSLNDYKLSF

SEQ ID NO: 675620 - protein, 13 aa, Homo sapiens
  CDR3 for beta chain variable domain of TCR clone 337810 (TRBV6-1, TRBJ2-1)
CAGMDPTNNEQFL

SEQ ID NO: 675621 - protein, 12 aa, Homo sapiens
  CDR3 for alpha chain variable domain of TCR clone 337811 (TRAV4, TRAJ26)
CLMGDYGQNFVF

SEQ ID NO: 675622 - protein, 14 aa, Homo sapiens
  CDR3 for beta chain variable domain of TCR clone 337811 (TRBV3-1, TRBJ2-5)
CASSQGPDQETQYF

SEQ ID NO: 675623 - protein, 11 aa, Homo sapiens
  CDR3 for alpha chain variable domain of TCR clone 337812 (TRAV13-2, TRAJ54)
RAVQGAQKLVF

SEQ ID NO: 675624 - protein, 15 aa, Homo sapiens
  CDR3 for beta chain variable domain of TCR clone 337812 (TRBV20-1, TRBJ2-7)
CSAESGTSGAYKQYF

SEQ ID NO: 675625 - protein, 12 aa, Homo sapiens
  CDR3 for alpha chain variable domain of TCR clone 337813 (TRAV3, TRAJ43)
CAVRDPNNDMRF

SEQ ID NO: 675626 - protein, 15 aa, Homo sapiens
  CDR3 for beta chain variable domain of TCR clone 337813 (TRBV4-3, TRBJ2-7)
CASSQGDWVDYEQYF

SEQ ID NO: 675627 - protein, 14 aa, Homo sapiens
  CDR3 for alpha chain variable domain of TCR clone 337814 (TRAV12-3, TRAJ57)
CAMSAWGGSEKLVF

SEQ ID NO: 675628 - protein, 15 aa, Homo sapiens
  CDR3 for beta chain variable domain of TCR clone 337814 (TRBV2, TRBJ2-1)
CASSVVGSSGNEQFF

SEQ ID NO: 675629 - protein, 23 aa, Homo sapiens
  CDR3 for alpha chain variable domain of TCR clone 337815 (TRAV26-1, TRAJ38)
CIADNAGNNHIQNPDPAVDQLSD

SEQ ID NO: 675630 - protein, 13 aa, Homo sapiens
  CDR3 for beta chain variable domain of TCR clone 337815 (TRBV20-1, TRBJ1-1)
CSARGGGNNEAFF

SEQ ID NO: 675631 - protein, 13 aa, Homo sapiens
  CDR3 for alpha chain variable domain of TCR clone 337816 (TRAV27, TRAJ3)
ASLRGSSASKIIF

SEQ ID NO: 675632 - protein, 15 aa, Homo sapiens
  CDR3 for beta chain variable domain of TCR clone 337816 (TRBV28, TRBJ1-3)
CASSMGWASGITIYF

SEQ ID NO: 675633 - protein, 14 aa, Homo sapiens
  CDR3 for alpha chain variable domain of TCR clone 337817 (TRAV35, TRAJ40)
CAGSTTSGTYKYIF

SEQ ID NO: 675634 - protein, 16 aa, Homo sapiens
  CDR3 for beta chain variable domain of TCR clone 337817 (TRBV5-7, TRBJ2-7)
PAADEGGGRGSYEQYF

SEQ ID NO: 675635 - protein, 13 aa, Homo sapiens
  CDR3 for alpha chain variable domain of TCR clone 337818 (TRAV8-3, TRAJ6)
CAVGSVGSYIPTF

SEQ ID NO: 675636 - protein, 14 aa, Homo sapiens
  CDR3 for beta chain variable domain of TCR clone 337818 (TRBV11-2, TRBJ1-1)
CASSTQRGRTEAFF

SEQ ID NO: 675637 - protein, 14 aa, Homo sapiens
  CDR3 for alpha chain variable domain of TCR clone 337819 (TRAV17, TRAJ54)
CATDANQGAQKLAF

SEQ ID NO: 675638 - protein, 14 aa, Homo sapiens
  CDR3 for beta chain variable domain of TCR clone 337819 (TRBV7-8, TRBJ2-7)
CASSPRDRVYEQYF

SEQ ID NO: 675639 - protein, 17 aa, Homo sapiens
  CDR3 for alpha chain variable domain of TCR clone 337820 (TRAV16, TRAJ4)
CITVLEDPSGGYNKLIF

SEQ ID NO: 675640 - protein, 13 aa, Homo sapiens
  CDR3 for beta chain variable domain of TCR clone 337820 (TRBV7-3, TRBJ2-7)
CASSQAGGYEQYF

SEQ ID NO: 675641 - protein, 13 aa, Homo sapiens
  CDR3 for alpha chain variable domain of TCR clone 337821 (TRAV1-2, TRAJ9)
CAVLNTGGFKTIF

SEQ ID NO: 675642 - protein, 15 aa, Homo sapiens
  CDR3 for beta chain variable domain of TCR clone 337821 (TRBV9, TRBJ1-6)
CASSVAGTGDSPLHF

SEQ ID NO: 675643 - protein, 17 aa, Homo sapiens
  CDR3 for alpha chain variable domain of TCR clone 337822 (TRAV3, TRAJ6)
CAVRDGPRAGGSYIPTF

SEQ ID NO: 675644 - protein, 14 aa, Homo sapiens
  CDR3 for beta chain variable domain of TCR clone 337822 (TRBV7-2, TRBJ2-7)
CASSPKTSVYEQYL

SEQ ID NO: 675645 - protein, 13 aa, Homo sapiens
  CDR3 for alpha chain variable domain of TCR clone 337823 (TRAV27, TRAJ57)
CRKHQGGSEKLVF

SEQ ID NO: 675646 - protein, 13 aa, Homo sapiens
  CDR3 for beta chain variable domain of TCR clone 337823 (TRBV4-2, TRBJ1-1)
CASSQAGNTEAFF

SEQ ID NO: 675647 - protein, 14 aa, Homo sapiens
  CDR3 for alpha chain variable domain of TCR clone 337824 (TRAV1-2, TRAJ16)
CAVNRFSDGQKLPF

SEQ ID NO: 675648 - protein, 15 aa, Homo sapiens
  CDR3 for beta chain variable domain of TCR clone 337824 (TRBV28, TRBJ1-3)
CASGATGNSGNTIYF

SEQ ID NO: 675649 - protein, 16 aa, Homo sapiens
  CDR3 for alpha chain variable domain of TCR clone 337825 (TRAV20, TRAJ10)
CAVLRGLTGGGNKLTF

SEQ ID NO: 675650 - protein, 15 aa, Homo sapiens
  CDR3 for beta chain variable domain of TCR clone 337825 (TRBV2, TRBJ2-1)
CASSELAGSYNEQFF

SEQ ID NO: 675651 - protein, 11 aa, Homo sapiens
  CDR3 for alpha chain variable domain of TCR clone 337826 (TRAV21, TRAJ34)
CAPLDTDKLIF

SEQ ID NO: 675652 - protein, 16 aa, Homo sapiens
  CDR3 for beta chain variable domain of TCR clone 337826 (TRBV5-1, TRBJ2-3)
CASSLAGDRGTETQYF

SEQ ID NO: 675653 - protein, 11 aa, Homo sapiens
  CDR3 for alpha chain variable domain of TCR clone 337827 (TRAV21, TRAJ49)
CAVITGNQFYF

SEQ ID NO: 675654 - protein, 13 aa, Homo sapiens
  CDR3 for beta chain variable domain of TCR clone 337827 (TRBV7-2, TRBJ1-2)
CASSFLGSYGYTF

SEQ ID NO: 675655 - protein, 11 aa, Homo sapiens
  CDR3 for alpha chain variable domain of TCR clone 337828 (TRAV21, TRAJ34)
CAHYNTDKLIF

SEQ ID NO: 675656 - protein, 11 aa, Homo sapiens
  CDR3 for beta chain variable domain of TCR clone 337828 (TRBV29-1, TRBJ2-5)
CSEDRSGTQYF

SEQ ID NO: 675657 - protein, 17 aa, Homo sapiens
  CDR3 for alpha chain variable domain of TCR clone 337829 (TRAV25, TRAJ45)
CAGPFWRSGGGADGLTF

SEQ ID NO: 675658 - protein, 11 aa, Homo sapiens
  CDR3 for beta chain variable domain of TCR clone 337829 (TRBV29-1, TRBJ2-5)
CSEDRTGTQYF

SEQ ID NO: 675659 - protein, 16 aa, Homo sapiens
  CDR3 for alpha chain variable domain of TCR clone 337830 (TRAV27, TRAJ53)
CAVPEGSGGSNYKLTF

SEQ ID NO: 675660 - protein, 15 aa, Homo sapiens
  CDR3 for beta chain variable domain of TCR clone 337830 (TRBV20-1, TRBJ1-1)
CSASRGVTGNTEAFF

SEQ ID NO: 675661 - protein, 23 aa, Homo sapiens
  CDR3 for alpha chain variable domain of TCR clone 337831 (TRAV26-1, TRAJ38)
CIADNAGNNHIQNPDPPVYQLRD

SEQ ID NO: 675662 - protein, 12 aa, Homo sapiens
  CDR3 for beta chain variable domain of TCR clone 337831 (TRBV11-2, TRBJ2-2)
CASSRGGGELFF

SEQ ID NO: 675663 - protein, 17 aa, Homo sapiens
  CDR3 for alpha chain variable domain of TCR clone 337832 (TRAV12-3, TRAJ18)
CAMIRADRGSTLGRLYF

SEQ ID NO: 675664 - protein, 14 aa, Homo sapiens
  CDR3 for beta chain variable domain of TCR clone 337832 (TRBV5-7, TRBJ1-6)
CASTPWPADSTLHF

SEQ ID NO: 675665 - protein, 14 aa, Homo sapiens
  CDR3 for alpha chain variable domain of TCR clone 337833 (TRAV8-2, TRAJ45)
CVVSAGGGADGLTF

SEQ ID NO: 675666 - protein, 12 aa, Homo sapiens
  CDR3 for beta chain variable domain of TCR clone 337833 (TRBV12-4, TRBJ2-1)
CATSLVRVEQFF

SEQ ID NO: 675667 - protein, 13 aa, Homo sapiens
  CDR3 for alpha chain variable domain of TCR clone 337834 (TRAV35, TRAJ42)
RAGFPGSQGNLIS

SEQ ID NO: 675668 - protein, 13 aa, Homo sapiens
  CDR3 for beta chain variable domain of TCR clone 337834 (TRBV29-1, TRBJ2-1)
CSVEGGRVNEQFF

SEQ ID NO: 675669 - protein, 13 aa, Homo sapiens
  CDR3 for alpha chain variable domain of TCR clone 337835 (TRAV3, TRAJ20)
CAVRDIGDYKLSF

SEQ ID NO: 675670 - protein, 12 aa, Homo sapiens
  CDR3 for beta chain variable domain of TCR clone 337835 (TRBV3-1, TRBJ1-2)
CASTSGPYGCTF

SEQ ID NO: 675671 - protein, 14 aa, Homo sapiens
  CDR3 for alpha chain variable domain of TCR clone 337836 (TRAV30, TRAJ33)
CGTERRFSNYQLIW

SEQ ID NO: 675672 - protein, 12 aa, Homo sapiens
  CDR3 for beta chain variable domain of TCR clone 337836 (TRBV19, TRBJ2-7)
CASTDRDYEQYF

SEQ ID NO: 675673 - protein, 11 aa, Homo sapiens
  CDR3 for alpha chain variable domain of TCR clone 337837 (TRAV13-2, TRAJ20)
CAENMSYKLSF

SEQ ID NO: 675674 - protein, 17 aa, Homo sapiens
  CDR3 for beta chain variable domain of TCR clone 337837 (TRBV13, TRBJ2-3)
CASSLSRVAGGRNTQYF

SEQ ID NO: 675675 - protein, 14 aa, Homo sapiens
  CDR3 for alpha chain variable domain of TCR clone 337838 (TRAV17, TRAJ32)
CATDPGGATNKPIF

SEQ ID NO: 675676 - protein, 14 aa, Homo sapiens
  CDR3 for beta chain variable domain of TCR clone 337838 (TRBV7-9, TRBJ2-7)
CASSIGQGAGEQYF

SEQ ID NO: 675677 - protein, 13 aa, Homo sapiens
  CDR3 for alpha chain variable domain of TCR clone 337839 (TRAV3, TRAJ21)
CAVREPDFNKFYF

SEQ ID NO: 675678 - protein, 14 aa, Homo sapiens
  CDR3 for beta chain variable domain of TCR clone 337839 (TRBV13, TRBJ2-5)
CASSLERVGETQYF

SEQ ID NO: 675679 - protein, 15 aa, Homo sapiens
  CDR3 for alpha chain variable domain of TCR clone 337840 (TRAV13-2, TRAJ10)
CAENRDTGGGNKLTF

SEQ ID NO: 675680 - protein, 15 aa, Homo sapiens
  CDR3 for beta chain variable domain of TCR clone 337840 (TRBV19, TRBJ1-1)
CASTSRQVQNTEAFF

SEQ ID NO: 675681 - protein, 15 aa, Homo sapiens
  CDR3 for alpha chain variable domain of TCR clone 337841 (TRAV23/DV6, TRAJ13)
CAAWPGGGGLQKVTF

SEQ ID NO: 675682 - protein, 14 aa, Homo sapiens
  CDR3 for beta chain variable domain of TCR clone 337841 (TRBV7-2, TRBJ1-1)
CASSFLTGTTEAFF

SEQ ID NO: 675683 - protein, 15 aa, Homo sapiens
  CDR3 for alpha chain variable domain of TCR clone 337842 (TRAV3, TRAJ47)
CAVRGNMEYGNKLVF

SEQ ID NO: 675684 - protein, 15 aa, Homo sapiens
  CDR3 for beta chain variable domain of TCR clone 337842 (TRBV20-1, TRBJ2-7)
CSARDRVSGMDEQYF

SEQ ID NO: 675685 - protein, 13 aa, Homo sapiens
  CDR3 for alpha chain variable domain of TCR clone 337843 (TRAV21, TRAJ10)
CAVPTGGGNKLTF

SEQ ID NO: 675686 - protein, 11 aa, Homo sapiens
  CDR3 for beta chain variable domain of TCR clone 337843 (TRBV29-1, TRBJ2-5)
CSEDRTGTQYF

SEQ ID NO: 675687 - protein, 17 aa, Homo sapiens
  CDR3 for alpha chain variable domain of TCR clone 337844 (TRAV17, TRAJ28)
CATDPRRGGAGSYQLTF

SEQ ID NO: 675688 - protein, 16 aa, Homo sapiens
  CDR3 for beta chain variable domain of TCR clone 337844 (TRBV25-1, TRBJ1-1)
CASSGDRDRGRIEAFI

SEQ ID NO: 675689 - protein, 17 aa, Homo sapiens
  CDR3 for alpha chain variable domain of TCR clone 337845 (TRAV13-1, TRAJ52)
CAASPGAGGTSYGKRTF

SEQ ID NO: 675690 - protein, 15 aa, Homo sapiens
  CDR3 for beta chain variable domain of TCR clone 337845 (TRBV2, TRBJ2-1)
CASSELAGSYNEQFF

SEQ ID NO: 675691 - protein, 16 aa, Homo sapiens
  CDR3 for alpha chain variable domain of TCR clone 337846 (TRAV27, TRAJ53)
CAAPEGSGGSNYKLRF

SEQ ID NO: 675692 - protein, 14 aa, Homo sapiens
  CDR3 for beta chain variable domain of TCR clone 337846 (TRBV4-3, TRBJ1-5)
CASSQGGQGWPQHF

SEQ ID NO: 675693 - protein, 17 aa, Homo sapiens
  CDR3 for alpha chain variable domain of TCR clone 337847 (TRAV3, TRAJ6)
CAVRDGPMAGGSYIPTF

SEQ ID NO: 675694 - protein, 13 aa, Homo sapiens
  CDR3 for beta chain variable domain of TCR clone 337847 (TRBV27, TRBJ2-1)
CASRTLGVGEQFF

SEQ ID NO: 675695 - protein, 12 aa, Homo sapiens
  CDR3 for alpha chain variable domain of TCR clone 337848 (TRAV29/DV5, TRAJ43)
CAAPYNNNAMRF

SEQ ID NO: 675696 - protein, 17 aa, Homo sapiens
  CDR3 for beta chain variable domain of TCR clone 337848 (TRBV19, TRBJ2-6)
CASSTGQVFSGANVLTF

SEQ ID NO: 675697 - protein, 14 aa, Homo sapiens
  CDR3 for alpha chain variable domain of TCR clone 337849 (TRAV2, TRAJ37)
CAADFTSNTGKLIF

SEQ ID NO: 675698 - protein, 15 aa, Homo sapiens
  CDR3 for beta chain variable domain of TCR clone 337849 (TRBV20-1, TRBJ1-1)
CSASRGATGNTEAFF

SEQ ID NO: 675699 - protein, 14 aa, Homo sapiens
  CDR3 for alpha chain variable domain of TCR clone 337850 (TRAV13-1, TRAJ5)
CAAHPDTGRRAFTF

SEQ ID NO: 675700 - protein, 14 aa, Homo sapiens
  CDR3 for beta chain variable domain of TCR clone 337850 (TRBV7-2, TRBJ2-7)
CASSLYPGRYEQYF

SEQ ID NO: 675701 - protein, 16 aa, Homo sapiens
  CDR3 for alpha chain variable domain of TCR clone 337851 (TRAV3, TRAJ28)
CPVRPRSGAGSYQLTF

SEQ ID NO: 675702 - protein, 18 aa, Homo sapiens
  CDR3 for beta chain variable domain of TCR clone 337851 (TRBV23-1, TRBJ2-7)
CASSQYRRTDATSSTSGR

SEQ ID NO: 675703 - protein, 15 aa, Homo sapiens
  CDR3 for alpha chain variable domain of TCR clone 337852 (TRAV38-1, TRAJ45)
CAFMKGGGGADGPTF

SEQ ID NO: 675704 - protein, 13 aa, Homo sapiens
  CDR3 for beta chain variable domain of TCR clone 337852 (TRBV7-9, TRBJ1-2)
CASSLKQNYGYTF

SEQ ID NO: 675705 - protein, 14 aa, Homo sapiens
  CDR3 for alpha chain variable domain of TCR clone 337853 (TRAV13-2, TRAJ6)
CAERGSGGSDIPTF

SEQ ID NO: 675706 - protein, 13 aa, Homo sapiens
  CDR3 for beta chain variable domain of TCR clone 337853 (TRBV19, TRBJ1-2)
CASSQGQVYGYTF

SEQ ID NO: 675707 - protein, 16 aa, Homo sapiens
  CDR3 for alpha chain variable domain of TCR clone 337854 (TRAV12-2, TRAJ40)
CAVIRGGTSGTYKYIF

SEQ ID NO: 675708 - protein, 15 aa, Homo sapiens
  CDR3 for beta chain variable domain of TCR clone 337854 (TRBV18, TRBJ2-6)
CASSPSYAGANALTF

SEQ ID NO: 675709 - protein, 12 aa, Homo sapiens
  CDR3 for alpha chain variable domain of TCR clone 337855 (TRAV25, TRAJ38)
CAGTGNNRKLIW

SEQ ID NO: 675710 - protein, 14 aa, Homo sapiens
  CDR3 for beta chain variable domain of TCR clone 337855 (TRBV19, TRBJ1-5)
CASSKMTGPQPQHV

SEQ ID NO: 675711 - protein, 17 aa, Homo sapiens
  CDR3 for alpha chain variable domain of TCR clone 337856 (TRAV3, TRAJ38)
CAVRDCLNAGNNRKLIW

SEQ ID NO: 675712 - protein, 15 aa, Homo sapiens
  CDR3 for beta chain variable domain of TCR clone 337856 (TRBV11-3, TRBJ2-3)
FASLKDGREGDTQYF

SEQ ID NO: 675713 - protein, 12 aa, Homo sapiens
  CDR3 for alpha chain variable domain of TCR clone 337857 (TRAV12-2, TRAJ52)
IGGGTSYGKLTF

SEQ ID NO: 675714 - protein, 13 aa, Homo sapiens
  CDR3 for beta chain variable domain of TCR clone 337857 (TRBV2, TRBJ2-5)
CASGTPYQETQYF

SEQ ID NO: 675715 - protein, 15 aa, Homo sapiens
  CDR3 for alpha chain variable domain of TCR clone 337858 (TRAV21, TRAJ40)
CAVRPQTSGTYKYIF

SEQ ID NO: 675716 - protein, 13 aa, Homo sapiens
  CDR3 for beta chain variable domain of TCR clone 337858 (TRBV7-2, TRBJ2-2)
CASSSVQAGELFF

SEQ ID NO: 675717 - protein, 18 aa, Homo sapiens
  CDR3 for alpha chain variable domain of TCR clone 337859 (TRAV26-1, TRAJ22)
CIVRVALISSGSARQLTF

SEQ ID NO: 675718 - protein, 13 aa, Homo sapiens
  CDR3 for beta chain variable domain of TCR clone 337859 (TRBV13, TRBJ2-1)
CASSPEVGETQYF

SEQ ID NO: 675719 - protein, 13 aa, Homo sapiens
  CDR3 for alpha chain variable domain of TCR clone 337860 (TRAV13-1, TRAJ20)
CAARVTNDYKLSF

SEQ ID NO: 675720 - protein, 16 aa, Homo sapiens
  CDR3 for beta chain variable domain of TCR clone 337860 (TRBV11-1, TRBJ1-1)
CATNPRDRAFNTEAFF

SEQ ID NO: 675721 - protein, 10 aa, Homo sapiens
  CDR3 for alpha chain variable domain of TCR clone 337861 (TRAV16, TRAJ22)
SAMYLRQLTF

SEQ ID NO: 675722 - protein, 15 aa, Homo sapiens
  CDR3 for beta chain variable domain of TCR clone 337861 (TRBV7-9, TRBJ1-6)
CASSSPGRGNSPLNF

SEQ ID NO: 675723 - protein, 11 aa, Homo sapiens
  CDR3 for alpha chain variable domain of TCR clone 337862 (TRAV2, TRAJ23)
CVVETRGKLIF

SEQ ID NO: 675724 - protein, 14 aa, Homo sapiens
  CDR3 for beta chain variable domain of TCR clone 337862 (TRBV2, TRBJ2-3)
CASSEGQNTDTQYF

SEQ ID NO: 675725 - protein, 13 aa, Homo sapiens
  CDR3 for alpha chain variable domain of TCR clone 337863 (TRAV2, TRAJ15)
CAVASQAGTALIF

SEQ ID NO: 675726 - protein, 16 aa, Homo sapiens
  CDR3 for beta chain variable domain of TCR clone 337863 (TRBV5-5, TRBJ1-4)
CASSLVAALLGEKLFF

SEQ ID NO: 675727 - protein, 12 aa, Homo sapiens
  CDR3 for alpha chain variable domain of TCR clone 337864 (TRAV3, TRAJ43)
CAVGDPNNDMRF

SEQ ID NO: 675728 - protein, 15 aa, Homo sapiens
  CDR3 for beta chain variable domain of TCR clone 337864 (TRBV4-1, TRBJ1-4)
CASSDTGGTNEKLFF

SEQ ID NO: 675729 - protein, 13 aa, Homo sapiens
  CDR3 for alpha chain variable domain of TCR clone 337865 (TRAV8-3, TRAJ6)
CAAQRGGSYIPTF

SEQ ID NO: 675730 - protein, 15 aa, Homo sapiens
  CDR3 for beta chain variable domain of TCR clone 337865 (TRBV4-1, TRBJ2-3)
CASSNLAGGRDTQYF

SEQ ID NO: 675731 - protein, 11 aa, Homo sapiens
  CDR3 for alpha chain variable domain of TCR clone 337866 (TRAV3, TRAJ21)
CAVGSFNKFYF

SEQ ID NO: 675732 - protein, 16 aa, Homo sapiens
  CDR3 for beta chain variable domain of TCR clone 337866 (TRBV19, TRBJ2-1)
CAWSVAGPSSYNEQFF

SEQ ID NO: 675733 - protein, 12 aa, Homo sapiens
  CDR3 for alpha chain variable domain of TCR clone 337867 (TRAV8-2, TRAJ30)
CVVSDRDDKIIF

SEQ ID NO: 675734 - protein, 16 aa, Homo sapiens
  CDR3 for beta chain variable domain of TCR clone 337867 (TRBV19, TRBJ2-1)
CASSKAGPSSYNEQFF

SEQ ID NO: 675735 - protein, 14 aa, Homo sapiens
  CDR3 for alpha chain variable domain of TCR clone 337868 (TRAV26-2, TRAJ27)
CILRDISDAGKSTF

SEQ ID NO: 675736 - protein, 11 aa, Homo sapiens
  CDR3 for beta chain variable domain of TCR clone 337868 (TRBV12-4, TRBJ2-3)
CASTATDAQYF

SEQ ID NO: 675737 - protein, 15 aa, Homo sapiens
  CDR3 for alpha chain variable domain of TCR clone 337869 (TRAV4, TRAJ39)
CLVGPNNHAGNMLTF

SEQ ID NO: 675738 - protein, 13 aa, Homo sapiens
  CDR3 for beta chain variable domain of TCR clone 337869 (TRBV11-2, TRBJ2-5)
RASSSTGEETQYF

SEQ ID NO: 675739 - protein, 19 aa, Homo sapiens
  CDR3 for alpha chain variable domain of TCR clone 337870 (TRAV8-4, TRAJ3)
CAVTGENLVQQCFQDNLCI

SEQ ID NO: 675740 - protein, 16 aa, Homo sapiens
  CDR3 for beta chain variable domain of TCR clone 337870 (TRBV4-2, TRBJ1-1)
CASSKAGFGMNTEAFF

SEQ ID NO: 675741 - protein, 15 aa, Homo sapiens
  CDR3 for alpha chain variable domain of TCR clone 337871 (TRAV8-3, TRAJ27)
CAVGPSKTNAGKSTC

SEQ ID NO: 675742 - protein, 15 aa, Homo sapiens
  CDR3 for beta chain variable domain of TCR clone 337871 (TRBV7-2, TRBJ2-1)
CASSFGLAGGNEQFF

SEQ ID NO: 675743 - protein, 13 aa, Homo sapiens
  CDR3 for alpha chain variable domain of TCR clone 337872 (TRAV8-1, TRAJ28)
CAVSGAGSYQLTF

SEQ ID NO: 675744 - protein, 14 aa, Homo sapiens
  CDR3 for beta chain variable domain of TCR clone 337872 (TRBV19, TRBJ2-5)
CASSMTGQEETQYF

SEQ ID NO: 675745 - protein, 18 aa, Homo sapiens
  CDR3 for alpha chain variable domain of TCR clone 337873 (TRAV1-1, TRAJ8)
CAGGTGFETCIWNWHPTS

SEQ ID NO: 675746 - protein, 15 aa, Homo sapiens
  CDR3 for beta chain variable domain of TCR clone 337873 (TRBV7-9, TRBJ1-4)
CASSRTGGFNEKLFF

SEQ ID NO: 675747 - protein, 16 aa, Homo sapiens
  CDR3 for alpha chain variable domain of TCR clone 337874 (TRAV21, TRAJ5)
CAVRGPGDTGRRALTF

SEQ ID NO: 675748 - protein, 14 aa, Homo sapiens
  CDR3 for beta chain variable domain of TCR clone 337874 (TRBV7-2, TRBJ2-7)
CASSPKTSFYEQYF

SEQ ID NO: 675749 - protein, 14 aa, Homo sapiens
  CDR3 for alpha chain variable domain of TCR clone 337875 (TRAV1-2, TRAJ16)
CAVNRFSDGGKLLF

SEQ ID NO: 675750 - protein, 15 aa, Homo sapiens
  CDR3 for beta chain variable domain of TCR clone 337875 (TRBV7-9, TRBJ1-6)
CASSSPGRGNSPLHF

SEQ ID NO: 675751 - protein, 15 aa, Homo sapiens
  CDR3 for alpha chain variable domain of TCR clone 337876 (TRAV13-1, TRAJ52)
SYYNAGGTSYGKLTF

SEQ ID NO: 675752 - protein, 11 aa, Homo sapiens
  CDR3 for beta chain variable domain of TCR clone 337876 (TRBV12-4, TRBJ2-2)
CPSSSAGELFF

SEQ ID NO: 675753 - protein, 12 aa, Homo sapiens
  CDR3 for alpha chain variable domain of TCR clone 337877 (TRAV3, TRAJ7)
CADLLWEQQTRF

SEQ ID NO: 675754 - protein, 18 aa, Homo sapiens
  CDR3 for beta chain variable domain of TCR clone 337877 (TRBV7-3, TRBJ2-5)
CASRFRGGGDPVLRARHA

SEQ ID NO: 675755 - protein, 13 aa, Homo sapiens
  CDR3 for alpha chain variable domain of TCR clone 337878 (TRAV16, TRAJ31)
CALSAHNNARLMF

SEQ ID NO: 675756 - protein, 17 aa, Homo sapiens
  CDR3 for beta chain variable domain of TCR clone 337878 (TRBV12-4, TRBJ2-1)
CASSPWLAGGHINEQFF

SEQ ID NO: 675757 - protein, 13 aa, Homo sapiens
  CDR3 for alpha chain variable domain of TCR clone 337879 (TRAV17, TRAJ26)
CATVDNYGQNFVF

SEQ ID NO: 675758 - protein, 16 aa, Homo sapiens
  CDR3 for beta chain variable domain of TCR clone 337879 (TRBV2, TRBJ2-1)
CGSSVGGSLSYNEQFF

SEQ ID NO: 675759 - protein, 14 aa, Homo sapiens
  CDR3 for alpha chain variable domain of TCR clone 337880 (TRAV8-4, TRAJ4)
CAVSPLGGYNKLIF

SEQ ID NO: 675760 - protein, 17 aa, Homo sapiens
  CDR3 for beta chain variable domain of TCR clone 337880 (TRBV11-2, TRBJ2-1)
CASSLYPPGVEYNEQFF

SEQ ID NO: 675761 - protein, 14 aa, Homo sapiens
  CDR3 for alpha chain variable domain of TCR clone 337881 (TRAV13-1, TRAJ35)
CAASKGGFGNALHC

SEQ ID NO: 675762 - protein, 15 aa, Homo sapiens
  CDR3 for beta chain variable domain of TCR clone 337881 (TRBV28, TRBJ2-1)
CASSGLAEVDNEQFF

SEQ ID NO: 675763 - protein, 15 aa, Homo sapiens
  CDR3 for alpha chain variable domain of TCR clone 337882 (TRAV8-3, TRAJ45)
CASSYSGGGADGLTF

SEQ ID NO: 675764 - protein, 15 aa, Homo sapiens
  CDR3 for beta chain variable domain of TCR clone 337882 (TRBV28, TRBJ2-5)
CASSPGQGSIETQYF

SEQ ID NO: 675765 - protein, 16 aa, Homo sapiens
  CDR3 for alpha chain variable domain of TCR clone 337883 (TRAV30, TRAJ24)
CGTEMVDADSWGKFQF

SEQ ID NO: 675766 - protein, 14 aa, Homo sapiens
  CDR3 for beta chain variable domain of TCR clone 337883 (TRBV5-5, TRBJ1-2)
CASSLDPYNYGYTF

SEQ ID NO: 675767 - protein, 13 aa, Homo sapiens
  CDR3 for alpha chain variable domain of TCR clone 337884 (TRAV27, TRAJ53)
CAGQGGSNYKLTF

SEQ ID NO: 675768 - protein, 13 aa, Homo sapiens
  CDR3 for beta chain variable domain of TCR clone 337884 (TRBV29-1, TRBJ1-1)
CSVESGFGTEAFF

SEQ ID NO: 675769 - protein, 14 aa, Homo sapiens
  CDR3 for alpha chain variable domain of TCR clone 337885 (TRAV8-4, TRAJ9)
CAVRINTGGFKTIF

SEQ ID NO: 675770 - protein, 13 aa, Homo sapiens
  CDR3 for beta chain variable domain of TCR clone 337885 (TRBV2, TRBJ2-7)
CASSGAAAYEQYF

SEQ ID NO: 675771 - protein, 23 aa, Homo sapiens
  CDR3 for alpha chain variable domain of TCR clone 337886 (TRAV26-1, TRAJ38)
CIADNAGNNHIQNPDPVVYQLRD

SEQ ID NO: 675772 - protein, 17 aa, Homo sapiens
  CDR3 for beta chain variable domain of TCR clone 337886 (TRBV11-2, TRBJ2-6)
CASSQRDIFSGANVLTF

SEQ ID NO: 675773 - protein, 14 aa, Homo sapiens
  CDR3 for alpha chain variable domain of TCR clone 337887 (TRAV23/DV6, TRAJ17)
CAARGRDAGNKLTF

SEQ ID NO: 675774 - protein, 13 aa, Homo sapiens
  CDR3 for beta chain variable domain of TCR clone 337887 (TRBV7-6, TRBJ1-2)
CASSLVADYGYTF

SEQ ID NO: 675775 - protein, 15 aa, Homo sapiens
  CDR3 for alpha chain variable domain of TCR clone 337888 (TRAV8-1, TRAJ6)
CAVNTPPGGSYIPTF

SEQ ID NO: 675776 - protein, 17 aa, Homo sapiens
  CDR3 for beta chain variable domain of TCR clone 337888 (TRBV20-1, TRBJ2-1)
CSAPPRLAGTRYNEQFF

SEQ ID NO: 675777 - protein, 18 aa, Homo sapiens
  CDR3 for alpha chain variable domain of TCR clone 337889 (TRAV21, TRAJ52)
CAVRPSLAGGTSYGKPTF

SEQ ID NO: 675778 - protein, 12 aa, Homo sapiens
  CDR3 for beta chain variable domain of TCR clone 337889 (TRBV11-2, TRBJ2-2)
CASSLGGGELFF

SEQ ID NO: 675779 - protein, 15 aa, Homo sapiens
  CDR3 for alpha chain variable domain of TCR clone 337890 (TRAV17, TRAJ16)
CATALRFSDGPKLLF

SEQ ID NO: 675780 - protein, 15 aa, Homo sapiens
  CDR3 for beta chain variable domain of TCR clone 337890 (TRBV20-1, TRBJ1-1)
CSASRGVTGNTEAFF

SEQ ID NO: 675781 - protein, 18 aa, Homo sapiens
  CDR3 for alpha chain variable domain of TCR clone 337891 (TRAV26-1, TRAJ23)
CIVSVGLEVWNQGGKLIF

SEQ ID NO: 675782 - protein, 14 aa, Homo sapiens
  CDR3 for beta chain variable domain of TCR clone 337891 (TRBV7-6, TRBJ2-3)
CASSLGTVTDTQYF

SEQ ID NO: 675783 - protein, 12 aa, Homo sapiens
  CDR3 for alpha chain variable domain of TCR clone 337892 (TRAV12-1, TRAJ34)
CVVAGATDKLIF

SEQ ID NO: 675784 - protein, 11 aa, Homo sapiens
  CDR3 for beta chain variable domain of TCR clone 337892 (TRBV7-2, TRBJ2-7)
CASSSGLWQYF

SEQ ID NO: 675785 - protein, 15 aa, Homo sapiens
  CDR3 for alpha chain variable domain of TCR clone 337893 (TRAV2, TRAJ9)
CAVEHRGTGGFKTIF

SEQ ID NO: 675786 - protein, 14 aa, Homo sapiens
  CDR3 for beta chain variable domain of TCR clone 337893 (TRBV25-1, TRBJ1-1)
CASTHLGGNTEAFF

SEQ ID NO: 675787 - protein, 10 aa, Homo sapiens
  CDR3 for alpha chain variable domain of TCR clone 337894 (TRAV23/DV6, TRAJ22)
CEASSRGSRF

SEQ ID NO: 675788 - protein, 15 aa, Homo sapiens
  CDR3 for beta chain variable domain of TCR clone 337894 (TRBV10-3, TRBJ2-3)
CAIDTSGRRTDTQYF

SEQ ID NO: 675789 - protein, 17 aa, Homo sapiens
  CDR3 for alpha chain variable domain of TCR clone 337895 (TRAV26-1, TRAJ46)
IASSESEKKSSGDKLTF

SEQ ID NO: 675790 - protein, 14 aa, Homo sapiens
  CDR3 for beta chain variable domain of TCR clone 337895 (TRBV20-1, TRBJ2-5)
CSAPGGSYQETQYF

SEQ ID NO: 675791 - protein, 14 aa, Homo sapiens
  CDR3 for alpha chain variable domain of TCR clone 337896 (TRAV13-1, TRAJ5)
CAAPLGTGRRALTF

SEQ ID NO: 675792 - protein, 14 aa, Homo sapiens
  CDR3 for beta chain variable domain of TCR clone 337896 (TRBV4-1, TRBJ2-2)
CASSQAVNTGELFF

SEQ ID NO: 675793 - protein, 13 aa, Homo sapiens
  CDR3 for alpha chain variable domain of TCR clone 337897 (TRAV20, TRAJ34)
CAVGTYNTDKLIF

SEQ ID NO: 675794 - protein, 13 aa, Homo sapiens
  CDR3 for beta chain variable domain of TCR clone 337897 (TRBV7-2, TRBJ2-2)
CASSSVRAGELFF

SEQ ID NO: 675795 - protein, 11 aa, Homo sapiens
  CDR3 for alpha chain variable domain of TCR clone 337898 (TRAV12-3, TRAJ43)
CAMSVSNDMRF

SEQ ID NO: 675796 - protein, 13 aa, Homo sapiens
  CDR3 for beta chain variable domain of TCR clone 337898 (TRBV7-8, TRBJ2-7)
RRVRLTEMGEQYF

SEQ ID NO: 675797 - protein, 15 aa, Homo sapiens
  CDR3 for alpha chain variable domain of TCR clone 337899 (TRAV3, TRAJ12)
CAVRDIRDSSYKLIF

SEQ ID NO: 675798 - protein, 17 aa, Homo sapiens
  CDR3 for beta chain variable domain of TCR clone 337899 (TRBV4-1, TRBJ1-4)
CASSQEGPRGVEEKLFF

SEQ ID NO: 675799 - protein, 13 aa, Homo sapiens
  CDR3 for alpha chain variable domain of TCR clone 337900 (TRAV2, TRAJ40)
CAVVTSGTYKYIF

SEQ ID NO: 675800 - protein, 15 aa, Homo sapiens
  CDR3 for beta chain variable domain of TCR clone 337900 (TRBV18, TRBJ1-1)
CASSPSSQLNTEAFF

SEQ ID NO: 675801 - protein, 17 aa, Homo sapiens
  CDR3 for alpha chain variable domain of TCR clone 337901 (TRAV4, TRAJ13)
CLVGVQGSSGGYQKVTF

SEQ ID NO: 675802 - protein, 16 aa, Homo sapiens
  CDR3 for beta chain variable domain of TCR clone 337901 (TRBV28, TRBJ2-7)
CASSLFFETGGTEQYF

SEQ ID NO: 675803 - protein, 15 aa, Homo sapiens
  CDR3 for alpha chain variable domain of TCR clone 337902 (TRAV3, TRAJ9)
FAVRARNTGGFKTIF

SEQ ID NO: 675804 - protein, 15 aa, Homo sapiens
  CDR3 for beta chain variable domain of TCR clone 337902 (TRBV27, TRBJ1-1)
CASSPYADPYTEAFF

SEQ ID NO: 675805 - protein, 13 aa, Homo sapiens
  CDR3 for alpha chain variable domain of TCR clone 337903 (TRAV8-6, TRAJ8)
CAVSNTGFQKLVV

SEQ ID NO: 675806 - protein, 15 aa, Homo sapiens
  CDR3 for beta chain variable domain of TCR clone 337903 (TRBV28, TRBJ2-5)
CASSSGRTIQETQYF

SEQ ID NO: 675807 - protein, 14 aa, Homo sapiens
  CDR3 for alpha chain variable domain of TCR clone 337904 (TRAV27, TRAJ37)
CRSQGSSNTGKLIF

SEQ ID NO: 675808 - protein, 12 aa, Homo sapiens
  CDR3 for beta chain variable domain of TCR clone 337904 (TRBV5-1, TRBJ2-7)
CASSFRGYEQYF

SEQ ID NO: 675809 - protein, 19 aa, Homo sapiens
  CDR3 for alpha chain variable domain of TCR clone 337905 (TRAV25, TRAJ20)
TATQTTDVGILPHDYKLSF

SEQ ID NO: 675810 - protein, 12 aa, Homo sapiens
  CDR3 for beta chain variable domain of TCR clone 337905 (TRBV7-8, TRBJ2-7)
CASSLGDREQYF

SEQ ID NO: 675811 - protein, 13 aa, Homo sapiens
  CDR3 for alpha chain variable domain of TCR clone 337906 (TRAV3, TRAJ20)
CAVRSLNDYKLSF

SEQ ID NO: 675812 - protein, 13 aa, Homo sapiens
  CDR3 for beta chain variable domain of TCR clone 337906 (TRBV7-3, TRBJ1-1)
CASSQDWGAEPFF

SEQ ID NO: 675813 - protein, 11 aa, Homo sapiens
  CDR3 for alpha chain variable domain of TCR clone 337907 (TRAV35, TRAJ30)
CAGERDDKIIF

SEQ ID NO: 675814 - protein, 16 aa, Homo sapiens
  CDR3 for beta chain variable domain of TCR clone 337907 (TRBV2, TRBJ2-2)
CASSAFGDANTGELFF

SEQ ID NO: 675815 - protein, 15 aa, Homo sapiens
  CDR3 for alpha chain variable domain of TCR clone 337908 (TRAV3, TRAJ27)
CAVRVFTPMQANQPL

SEQ ID NO: 675816 - protein, 12 aa, Homo sapiens
  CDR3 for beta chain variable domain of TCR clone 337908 (TRBV11-2, TRBJ2-2)
CASSLGGGELFF

SEQ ID NO: 675817 - protein, 16 aa, Homo sapiens
  CDR3 for alpha chain variable domain of TCR clone 337909 (TRAV3, TRAJ21)
CAVRDIERGNFNKFYF

SEQ ID NO: 675818 - protein, 13 aa, Homo sapiens
  CDR3 for beta chain variable domain of TCR clone 337909 (TRBV27, TRBJ2-7)
CASSLTTGYEEYF

SEQ ID NO: 675819 - protein, 19 aa, Homo sapiens
  CDR3 for alpha chain variable domain of TCR clone 337910 (TRAV1-2, TRAJ26)
CLLPRCCERPDNYGQNFVF

SEQ ID NO: 675820 - protein, 11 aa, Homo sapiens
  CDR3 for beta chain variable domain of TCR clone 337910 (TRBV29-1, TRBJ2-5)
CSEDRTGTQYF

SEQ ID NO: 675821 - protein, 15 aa, Homo sapiens
  CDR3 for alpha chain variable domain of TCR clone 337911 (TRAV25, TRAJ53)
CPTSNSGGSNYKLTF

SEQ ID NO: 675822 - protein, 12 aa, Homo sapiens
  CDR3 for beta chain variable domain of TCR clone 337911 (TRBV7-8, TRBJ2-7)
CASSLGDREQYF

SEQ ID NO: 675823 - protein, 14 aa, Homo sapiens
  CDR3 for alpha chain variable domain of TCR clone 337912 (TRAV1-2, TRAJ8)
CAVREDTGLQKLVF

SEQ ID NO: 675824 - protein, 13 aa, Homo sapiens
  CDR3 for beta chain variable domain of TCR clone 337912 (TRBV29-1, TRBJ1-1)
CSVGDSRNTEAFF

SEQ ID NO: 675825 - protein, 17 aa, Homo sapiens
  CDR3 for alpha chain variable domain of TCR clone 337913 (TRAV3, TRAJ6)
CAVRDGPRAGGNYRPTF

SEQ ID NO: 675826 - protein, 14 aa, Homo sapiens
  CDR3 for beta chain variable domain of TCR clone 337913 (TRBV7-2, TRBJ2-7)
CASSPKTSFYEQYF

SEQ ID NO: 675827 - protein, 14 aa, Homo sapiens
  CDR3 for alpha chain variable domain of TCR clone 337914 (TRAV29/DV5, TRAJ36)
CAARRKTGANNLFF

SEQ ID NO: 675828 - protein, 14 aa, Homo sapiens
  CDR3 for beta chain variable domain of TCR clone 337914 (TRBV5-1, TRBJ1-1)
CASSLERVGTEAFF

SEQ ID NO: 675829 - protein, 14 aa, Homo sapiens
  CDR3 for alpha chain variable domain of TCR clone 337915 (TRAV13-2, TRAJ11)
CAETGNLGYSTLTF

SEQ ID NO: 675830 - protein, 11 aa, Homo sapiens
  CDR3 for beta chain variable domain of TCR clone 337915 (TRBV10-3, TRBJ2-7)
CAISEGLEQYF

SEQ ID NO: 675831 - protein, 16 aa, Homo sapiens
  CDR3 for alpha chain variable domain of TCR clone 337916 (TRAV17, TRAJ52)
CATSNAGGTSYGKLTF

SEQ ID NO: 675832 - protein, 13 aa, Homo sapiens
  CDR3 for beta chain variable domain of TCR clone 337916 (TRBV29-1, TRBJ1-1)
CSVGDSRNTEAFF

SEQ ID NO: 675833 - protein, 12 aa, Homo sapiens
  CDR3 for alpha chain variable domain of TCR clone 337917 (TRAV26-1, TRAJ23)
CIVTPQGGKLIF

SEQ ID NO: 675834 - protein, 13 aa, Homo sapiens
  CDR3 for beta chain variable domain of TCR clone 337917 (TRBV6-6, TRBJ1-5)
CASSRGRNQHQHF

SEQ ID NO: 675835 - protein, 12 aa, Homo sapiens
  CDR3 for alpha chain variable domain of TCR clone 337918 (TRAV23/DV6, TRAJ18)
CAASMNHRGSTL

SEQ ID NO: 675836 - protein, 12 aa, Homo sapiens
  CDR3 for beta chain variable domain of TCR clone 337918 (TRBV11-2, TRBJ2-2)
CASSLGGGELFF

SEQ ID NO: 675837 - protein, 13 aa, Homo sapiens
  CDR3 for alpha chain variable domain of TCR clone 337919 (TRAV12-3, TRAJ13)
CAMTSGGYQKVTF

SEQ ID NO: 675838 - protein, 16 aa, Homo sapiens
  CDR3 for beta chain variable domain of TCR clone 337919 (TRBV20-1, TRBJ2-1)
CSASASGYSSYNEQFF

SEQ ID NO: 675839 - protein, 15 aa, Homo sapiens
  CDR3 for alpha chain variable domain of TCR clone 337920 (TRAV17, TRAJ16)
CATALRFSVGQKLLF

SEQ ID NO: 675840 - protein, 12 aa, Homo sapiens
  CDR3 for beta chain variable domain of TCR clone 337920 (TRBV2, TRBJ2-7)
CASSDPDYEQYF

SEQ ID NO: 675841 - protein, 12 aa, Homo sapiens
  CDR3 for alpha chain variable domain of TCR clone 337921 (TRAV17, TRAJ20)
CATDGDDYKLSF

SEQ ID NO: 675842 - protein, 18 aa, Homo sapiens
  CDR3 for beta chain variable domain of TCR clone 337921 (TRBV6-5, TRBJ2-5)
CASSYSQAGGSYQETQYL

SEQ ID NO: 675843 - protein, 21 aa, Homo sapiens
  CDR3 for alpha chain variable domain of TCR clone 337922 (TRAV1-2, TRAJ37)
CLLPLCCERFHGSGNTGKLIF

SEQ ID NO: 675844 - protein, 14 aa, Homo sapiens
  CDR3 for beta chain variable domain of TCR clone 337922 (TRBV2, TRBJ2-5)
CASSEVLAQQTQYF

SEQ ID NO: 675845 - protein, 12 aa, Homo sapiens
  CDR3 for alpha chain variable domain of TCR clone 337923 (TRAV17, TRAJ49)
CATASTGNQFYF

SEQ ID NO: 675846 - protein, 15 aa, Homo sapiens
  CDR3 for beta chain variable domain of TCR clone 337923 (TRBV15, TRBJ2-1)
CATSRDLCTYNEQFF

SEQ ID NO: 675847 - protein, 11 aa, Homo sapiens
  CDR3 for alpha chain variable domain of TCR clone 337924 (TRAV12-1, TRAJ30)
CVVNGQDKIIF

SEQ ID NO: 675848 - protein, 16 aa, Homo sapiens
  CDR3 for beta chain variable domain of TCR clone 337924 (TRBV24-1, TRBJ2-3)
CATSDAISGITNTQYF

SEQ ID NO: 675849 - protein, 15 aa, Homo sapiens
  CDR3 for alpha chain variable domain of TCR clone 337925 (TRAV12-1, TRAJ9)
CVVSFGDTGGFKTIF

SEQ ID NO: 675850 - protein, 13 aa, Homo sapiens
  CDR3 for beta chain variable domain of TCR clone 337925 (TRBV2, TRBJ1-4)
CASSERAGERLFF

SEQ ID NO: 675851 - protein, 11 aa, Homo sapiens
  CDR3 for alpha chain variable domain of TCR clone 337926 (TRAV1-1, TRAJ23)
CAVRQGGKLIF

SEQ ID NO: 675852 - protein, 12 aa, Homo sapiens
  CDR3 for beta chain variable domain of TCR clone 337926 (TRBV12-4, TRBJ1-5)
CASSLGRQPQHF

SEQ ID NO: 675853 - protein, 17 aa, Homo sapiens
  CDR3 for alpha chain variable domain of TCR clone 337927 (TRAV8-6, TRAJ58)
CAVSSWVGETSGSRLTF

SEQ ID NO: 675854 - protein, 11 aa, Homo sapiens
  CDR3 for beta chain variable domain of TCR clone 337927 (TRBV6-5, TRBJ1-6)
CASSPRDPQFT

SEQ ID NO: 675855 - protein, 13 aa, Homo sapiens
  CDR3 for alpha chain variable domain of TCR clone 337928 (TRAV1-1, TRAJ10)
CAVNSGGYQKVTF

SEQ ID NO: 675856 - protein, 12 aa, Homo sapiens
  CDR3 for beta chain variable domain of TCR clone 337928 (TRBV2, TRBJ2-1)
CAYGPPGNEQFF

SEQ ID NO: 675857 - protein, 14 aa, Homo sapiens
  CDR3 for alpha chain variable domain of TCR clone 337929 (TRAV12-1, TRAJ17)
CVVNYKAAGNKLTF

SEQ ID NO: 675858 - protein, 17 aa, Homo sapiens
  CDR3 for beta chain variable domain of TCR clone 337929 (TRBV20-1, TRBJ2-1)
GSASSSGLAGCYNEQFF

SEQ ID NO: 675859 - protein, 17 aa, Homo sapiens
  CDR3 for alpha chain variable domain of TCR clone 337930 (TRAV13-1, TRAJ52)
CAASSGAGGTSYGKLTF

SEQ ID NO: 675860 - protein, 18 aa, Homo sapiens
  CDR3 for beta chain variable domain of TCR clone 337930 (TRBV7-9, TRBJ2-7)
CASSLTTSGSRTWYEQYF

SEQ ID NO: 675861 - protein, 14 aa, Homo sapiens
  CDR3 for alpha chain variable domain of TCR clone 337931 (TRAV3, TRAJ7)
FAVREEEREQQTRF

SEQ ID NO: 675862 - protein, 12 aa, Homo sapiens
  CDR3 for beta chain variable domain of TCR clone 337931 (TRBV7-8, TRBJ2-7)
CASSLGDREQYL

SEQ ID NO: 675863 - protein, 11 aa, Homo sapiens
  CDR3 for alpha chain variable domain of TCR clone 337932 (TRAV1-1, TRAJ9)
CAVAGGFKTIF

SEQ ID NO: 675864 - protein, 14 aa, Homo sapiens
  CDR3 for beta chain variable domain of TCR clone 337932 (TRBV7-2, TRBJ2-7)
CASSPKTSFYEQYF

SEQ ID NO: 675865 - protein, 13 aa, Homo sapiens
  CDR3 for alpha chain variable domain of TCR clone 337933 (TRAV16, TRAJ52)
CALRGTSYGKLTF

SEQ ID NO: 675866 - protein, 13 aa, Homo sapiens
  CDR3 for beta chain variable domain of TCR clone 337933 (TRBV20-1, TRBJ1-1)
CSARGGGNTEAFF

SEQ ID NO: 675867 - protein, 19 aa, Homo sapiens
  CDR3 for alpha chain variable domain of TCR clone 337934 (TRAV1-2, TRAJ26)
CLLPLRCERPDNYGQNFVF

SEQ ID NO: 675868 - protein, 15 aa, Homo sapiens
  CDR3 for beta chain variable domain of TCR clone 337934 (TRBV9, TRBJ1-6)
CASSVAGTGDSPLHF

SEQ ID NO: 675869 - protein, 14 aa, Homo sapiens
  CDR3 for alpha chain variable domain of TCR clone 337935 (TRAV12-2, TRAJ15)
CAPHTGQAGTALSF

SEQ ID NO: 675870 - protein, 13 aa, Homo sapiens
  CDR3 for beta chain variable domain of TCR clone 337935 (TRBV12-4, TRBJ2-7)
CQQRFGVWYEQYF

SEQ ID NO: 675871 - protein, 18 aa, Homo sapiens
  CDR3 for alpha chain variable domain of TCR clone 337936 (TRAV12-3, TRAJ52)
CAMSVGGAGGTSYGKLTS

SEQ ID NO: 675872 - protein, 15 aa, Homo sapiens
  CDR3 for beta chain variable domain of TCR clone 337936 (TRBV27, TRBJ1-6)
CARNFDRGLGSPLHF

SEQ ID NO: 675873 - protein, 14 aa, Homo sapiens
  CDR3 for alpha chain variable domain of TCR clone 337937 (TRAV8-2, TRAJ11)
CVVSEKSGYSTLTF

SEQ ID NO: 675874 - protein, 16 aa, Homo sapiens
  CDR3 for beta chain variable domain of TCR clone 337937 (TRBV28, TRBJ2-1)
CDSSSPEYPRDNEQFF

SEQ ID NO: 675875 - protein, 16 aa, Homo sapiens
  CDR3 for alpha chain variable domain of TCR clone 337938 (TRAV4, TRAJ9)
CLVGDPIRPGGFKTIF

SEQ ID NO: 675876 - protein, 16 aa, Homo sapiens
  CDR3 for beta chain variable domain of TCR clone 337938 (TRBV28, TRBJ1-4)
CASSPPYRGRSEKLFL

SEQ ID NO: 675877 - protein, 12 aa, Homo sapiens
  CDR3 for alpha chain variable domain of TCR clone 337939 (TRAV2, TRAJ9)
CAVGAGGFKTIF

SEQ ID NO: 675878 - protein, 16 aa, Homo sapiens
  CDR3 for beta chain variable domain of TCR clone 337939 (TRBV13, TRBJ2-2)
CASSPRAGEHTGEMFF

SEQ ID NO: 675879 - protein, 18 aa, Homo sapiens
  CDR3 for alpha chain variable domain of TCR clone 337940 (TRAV21, TRAJ52)
CAVRPSPAGGTSYGKLTF

SEQ ID NO: 675880 - protein, 13 aa, Homo sapiens
  CDR3 for beta chain variable domain of TCR clone 337940 (TRBV29-1, TRBJ2-2)
CSVYREDTGELFV

SEQ ID NO: 675881 - protein, 10 aa, Homo sapiens
  CDR3 for alpha chain variable domain of TCR clone 337941 (TRAV23/DV6, TRAJ4)
CAARDFWIRD

SEQ ID NO: 675882 - protein, 13 aa, Homo sapiens
  CDR3 for beta chain variable domain of TCR clone 337941 (TRBV7-2, TRBJ1-1)
CASSRNTNTEAFF

SEQ ID NO: 675883 - protein, 15 aa, Homo sapiens
  CDR3 for alpha chain variable domain of TCR clone 337942 (TRAV3, TRAJ5)
CAVRDLDTGRRALTF

SEQ ID NO: 675884 - protein, 14 aa, Homo sapiens
  CDR3 for beta chain variable domain of TCR clone 337942 (TRBV6-1, TRBJ1-3)
CASVRGGGGNTIYF

SEQ ID NO: 675885 - protein, 15 aa, Homo sapiens
  CDR3 for alpha chain variable domain of TCR clone 337943 (TRAV12-3, TRAJ54)
CAMSPPFQGAQKLVF

SEQ ID NO: 675886 - protein, 15 aa, Homo sapiens
  CDR3 for beta chain variable domain of TCR clone 337943 (TRBV20-1, TRBJ2-7)
CSARDRVSGMDDQYF

SEQ ID NO: 675887 - protein, 12 aa, Homo sapiens
  CDR3 for alpha chain variable domain of TCR clone 337944 (TRAV27, TRAJ42)
YAGGGSQGNLIF

SEQ ID NO: 675888 - protein, 13 aa, Homo sapiens
  CDR3 for beta chain variable domain of TCR clone 337944 (TRBV19, TRBJ2-7)
CASSIRSSYEQYF

SEQ ID NO: 675889 - protein, 11 aa, Homo sapiens
  CDR3 for alpha chain variable domain of TCR clone 337945 (TRAV35, TRAJ34)
CWARNTDKLIF

SEQ ID NO: 675890 - protein, 13 aa, Homo sapiens
  CDR3 for beta chain variable domain of TCR clone 337945 (TRBV19, TRBJ2-7)
CASSIDGTYEQYF

SEQ ID NO: 675891 - protein, 11 aa, Homo sapiens
  CDR3 for alpha chain variable domain of TCR clone 337946 (TRAV13-1, TRAJ6)
CATLGSYIPTF

SEQ ID NO: 675892 - protein, 11 aa, Homo sapiens
  CDR3 for beta chain variable domain of TCR clone 337946 (TRBV12-4, TRBJ2-2)
CASSSAGELFF

SEQ ID NO: 675893 - protein, 10 aa, Homo sapiens
  CDR3 for alpha chain variable domain of TCR clone 337947 (TRAV1-2, TRAJ20)
CACNDYKLSF

SEQ ID NO: 675894 - protein, 16 aa, Homo sapiens
  CDR3 for beta chain variable domain of TCR clone 337947 (TRBV20-1, TRBJ2-1)
CSARDRKQGMNNEQFF

SEQ ID NO: 675895 - protein, 12 aa, Homo sapiens
  CDR3 for alpha chain variable domain of TCR clone 337948 (TRAV22, TRAJ29)
CAPPSGNTPLVF

SEQ ID NO: 675896 - protein, 14 aa, Homo sapiens
  CDR3 for beta chain variable domain of TCR clone 337948 (TRBV11-2, TRBJ2-7)
CASGLGAGTYEQYF

SEQ ID NO: 675897 - protein, 15 aa, Homo sapiens
  CDR3 for alpha chain variable domain of TCR clone 337949 (TRAV13-1, TRAJ10)
CAAEEVTGGGNKLTF

SEQ ID NO: 675898 - protein, 13 aa, Homo sapiens
  CDR3 for beta chain variable domain of TCR clone 337949 (TRBV28, TRBJ2-5)
CAGVSRGEETQYF

SEQ ID NO: 675899 - protein, 14 aa, Homo sapiens
  CDR3 for alpha chain variable domain of TCR clone 337950 (TRAV12-3, TRAJ10)
SHLPLTGGGNKLTF

SEQ ID NO: 675900 - protein, 14 aa, Homo sapiens
  CDR3 for beta chain variable domain of TCR clone 337950 (TRBV7-9, TRBJ2-5)
CASSPRPSGETQYF

SEQ ID NO: 675901 - protein, 15 aa, Homo sapiens
  CDR3 for alpha chain variable domain of TCR clone 337951 (TRAV20, TRAJ58)
CAVQDLETSGSRLTF

SEQ ID NO: 675902 - protein, 12 aa, Homo sapiens
  CDR3 for beta chain variable domain of TCR clone 337951 (TRBV9, TRBJ2-2)
CASSARTRELFC

SEQ ID NO: 675903 - protein, 13 aa, Homo sapiens
  CDR3 for alpha chain variable domain of TCR clone 337952 (TRAV23/DV6, TRAJ22)
CAPYSGSARQLTF

SEQ ID NO: 675904 - protein, 14 aa, Homo sapiens
  CDR3 for beta chain variable domain of TCR clone 337952 (TRBV13, TRBJ2-5)
CASSLERVGETQYF

SEQ ID NO: 675905 - protein, 15 aa, Homo sapiens
  CDR3 for alpha chain variable domain of TCR clone 337953 (TRAV17, TRAJ35)
CATAFVIGFGHVLHC

SEQ ID NO: 675906 - protein, 16 aa, Homo sapiens
  CDR3 for beta chain variable domain of TCR clone 337953 (TRBV11-2, TRBJ2-7)
CASSPLAGGPRYEQYF

SEQ ID NO: 675907 - protein, 14 aa, Homo sapiens
  CDR3 for alpha chain variable domain of TCR clone 337954 (TRAV3, TRAJ9)
CAVRLNTGGFKTIF

SEQ ID NO: 675908 - protein, 13 aa, Homo sapiens
  CDR3 for beta chain variable domain of TCR clone 337954 (TRBV4-2, TRBJ1-1)
CASSQAGNTEAFF

SEQ ID NO: 675909 - protein, 13 aa, Homo sapiens
  CDR3 for alpha chain variable domain of TCR clone 337955 (TRAV21, TRAJ47)
CAVSGLYGNKMVF

SEQ ID NO: 675910 - protein, 17 aa, Homo sapiens
  CDR3 for beta chain variable domain of TCR clone 337955 (TRBV15, TRBJ2-3)
CATSGTTSEEGTDTQYF

SEQ ID NO: 675911 - protein, 12 aa, Homo sapiens
  CDR3 for alpha chain variable domain of TCR clone 337956 (TRAV21, TRAJ3)
CCFYSSASKIIF

SEQ ID NO: 675912 - protein, 16 aa, Homo sapiens
  CDR3 for beta chain variable domain of TCR clone 337956 (TRBV19, TRBJ2-1)
CASSTAGPSSYNEQFF

SEQ ID NO: 675913 - protein, 16 aa, Homo sapiens
  CDR3 for alpha chain variable domain of TCR clone 337957 (TRAV30, TRAJ24)
CGTEIVDADSWGKFQF

SEQ ID NO: 675914 - protein, 18 aa, Homo sapiens
  CDR3 for beta chain variable domain of TCR clone 337957 (TRBV20-1, TRBJ2-6)
CSAETTPTNGYGANGLTF

SEQ ID NO: 675915 - protein, 15 aa, Homo sapiens
  CDR3 for alpha chain variable domain of TCR clone 337958 (TRAV35, TRAJ23)
CAGQRGYNQVGKLIF

SEQ ID NO: 675916 - protein, 16 aa, Homo sapiens
  CDR3 for beta chain variable domain of TCR clone 337958 (TRBV27, TRBJ2-1)
CASSSRLAGNYNEQFF

SEQ ID NO: 675917 - protein, 11 aa, Homo sapiens
  CDR3 for alpha chain variable domain of TCR clone 337959 (TRAV21, TRAJ33)
CAVLSNYQLIW

SEQ ID NO: 675918 - protein, 15 aa, Homo sapiens
  CDR3 for beta chain variable domain of TCR clone 337959 (TRBV10-2, TRBJ1-4)
CASTPIDRGNEKLFF

SEQ ID NO: 675919 - protein, 22 aa, Homo sapiens
  CDR3 for alpha chain variable domain of TCR clone 337960 (TRAV12-3, TRAJ44)
SPVIQPPTSVHPFRGTASKLTF

SEQ ID NO: 675920 - protein, 13 aa, Homo sapiens
  CDR3 for beta chain variable domain of TCR clone 337960 (TRBV7-9, TRBJ1-2)
CASSLKQNYGYTF

SEQ ID NO: 675921 - protein, 14 aa, Homo sapiens
  CDR3 for alpha chain variable domain of TCR clone 337961 (TRAV1-2, TRAJ4)
CALLVSGGYNELIF

SEQ ID NO: 675922 - protein, 11 aa, Homo sapiens
  CDR3 for beta chain variable domain of TCR clone 337961 (TRBV19, TRBJ1-1)
CASSIGSEAFF

SEQ ID NO: 675923 - protein, 14 aa, Homo sapiens
  CDR3 for alpha chain variable domain of TCR clone 337962 (TRAV26-1, TRAJ38)
CIADNAGNNRKLIW

SEQ ID NO: 675924 - protein, 16 aa, Homo sapiens
  CDR3 for beta chain variable domain of TCR clone 337962 (TRBV5-4, TRBJ2-1)
CASSLVGSGQDNEQFF

SEQ ID NO: 675925 - protein, 15 aa, Homo sapiens
  CDR3 for alpha chain variable domain of TCR clone 337963 (TRAV26-2, TRAJ39)
CSLRENNNAGNMLNF

SEQ ID NO: 675926 - protein, 15 aa, Homo sapiens
  CDR3 for beta chain variable domain of TCR clone 337963 (TRBV5-4, TRBJ1-1)
CASSSLGWANTEAFF

SEQ ID NO: 675927 - protein, 17 aa, Homo sapiens
  CDR3 for alpha chain variable domain of TCR clone 337964 (TRAV3, TRAJ12)
CAGREIGGMDSSYKLIF

SEQ ID NO: 675928 - protein, 14 aa, Homo sapiens
  CDR3 for beta chain variable domain of TCR clone 337964 (TRBV12-4, TRBJ1-1)
CASSFQSFGTEAFF

SEQ ID NO: 675929 - protein, 14 aa, Homo sapiens
  CDR3 for alpha chain variable domain of TCR clone 337965 (TRAV26-1, TRAJ45)
CIEVTGGGADGLTF

SEQ ID NO: 675930 - protein, 13 aa, Homo sapiens
  CDR3 for beta chain variable domain of TCR clone 337965 (TRBV12-5, TRBJ2-3)
CASGDRQSDTQYF

SEQ ID NO: 675931 - protein, 13 aa, Homo sapiens
  CDR3 for alpha chain variable domain of TCR clone 337966 (TRAV27, TRAJ56)
CAGKPGANSKLTF

SEQ ID NO: 675932 - protein, 15 aa, Homo sapiens
  CDR3 for beta chain variable domain of TCR clone 337966 (TRBV11-3, TRBJ2-7)
CASSPGPASSYEQYF

SEQ ID NO: 675933 - protein, 13 aa, Homo sapiens
  CDR3 for alpha chain variable domain of TCR clone 337967 (TRAV27, TRAJ27)
CAGGITNAGKSTF

SEQ ID NO: 675934 - protein, 12 aa, Homo sapiens
  CDR3 for beta chain variable domain of TCR clone 337967 (TRBV12-4, TRBJ2-7)
CASSLGGYEQYF

SEQ ID NO: 675935 - protein, 13 aa, Homo sapiens
  CDR3 for alpha chain variable domain of TCR clone 337968 (TRAV21, TRAJ27)
CAARPGNAGKSTF

SEQ ID NO: 675936 - protein, 15 aa, Homo sapiens
  CDR3 for beta chain variable domain of TCR clone 337968 (TRBV11-2, TRBJ2-2)
CASSPSGGGTGELFF

SEQ ID NO: 675937 - protein, 11 aa, Homo sapiens
  CDR3 for alpha chain variable domain of TCR clone 337969 (TRAV3, TRAJ21)
CAVVNFNKFCF

SEQ ID NO: 675938 - protein, 16 aa, Homo sapiens
  CDR3 for beta chain variable domain of TCR clone 337969 (TRBV19, TRBJ2-1)
CASSKAGPSSYNEQFF

SEQ ID NO: 675939 - protein, 14 aa, Homo sapiens
  CDR3 for alpha chain variable domain of TCR clone 337970 (TRAV3, TRAJ7)
CAVREEEREQQTRF

SEQ ID NO: 675940 - protein, 12 aa, Homo sapiens
  CDR3 for beta chain variable domain of TCR clone 337970 (TRBV6-3, TRBJ2-7)
CSSSLTPYEQYF

SEQ ID NO: 675941 - protein, 13 aa, Homo sapiens
  CDR3 for alpha chain variable domain of TCR clone 337971 (TRAV27, TRAJ41)
CAGEGNAGYALNF

SEQ ID NO: 675942 - protein, 15 aa, Homo sapiens
  CDR3 for beta chain variable domain of TCR clone 337971 (TRBV6-3, TRBJ2-7)
CASSSPGTVFYEQYF

SEQ ID NO: 675943 - protein, 14 aa, Homo sapiens
  CDR3 for alpha chain variable domain of TCR clone 337972 (TRAV12-1, TRAJ33)
CVVNPEDSNYQLIW

SEQ ID NO: 675944 - protein, 11 aa, Homo sapiens
  CDR3 for beta chain variable domain of TCR clone 337972 (TRBV7-6, TRBJ2-1)
CAGINYGEQFF

SEQ ID NO: 675945 - protein, 17 aa, Homo sapiens
  CDR3 for alpha chain variable domain of TCR clone 337973 (TRAV8-3, TRAJ42)
CCGAGMNDGGSQGNFIF

SEQ ID NO: 675946 - protein, 11 aa, Homo sapiens
  CDR3 for beta chain variable domain of TCR clone 337973 (TRBV7-2, TRBJ2-3)
CASSSSDTQYF

SEQ ID NO: 675947 - protein, 11 aa, Homo sapiens
  CDR3 for alpha chain variable domain of TCR clone 337974 (TRAV3, TRAJ21)
CAVGNFNKFYF

SEQ ID NO: 675948 - protein, 16 aa, Homo sapiens
  CDR3 for beta chain variable domain of TCR clone 337974 (TRBV20-1, TRBJ2-1)
CSARDLKQGMNNEQFF

SEQ ID NO: 675949 - protein, 15 aa, Homo sapiens
  CDR3 for alpha chain variable domain of TCR clone 337975 (TRAV12-2, TRAJ53)
CAVNGGGGSNYTLTF

SEQ ID NO: 675950 - protein, 17 aa, Homo sapiens
  CDR3 for beta chain variable domain of TCR clone 337975 (TRBV7-3, TRBJ2-3)
RASSLMKRMRGAATQYF

SEQ ID NO: 675951 - protein, 13 aa, Homo sapiens
  CDR3 for alpha chain variable domain of TCR clone 337976 (TRAV12-2, TRAJ11)
CAVPNSGYSTLTF

SEQ ID NO: 675952 - protein, 13 aa, Homo sapiens
  CDR3 for beta chain variable domain of TCR clone 337976 (TRBV7-9, TRBJ1-2)
CASSLKQNYGYTF

SEQ ID NO: 675953 - protein, 15 aa, Homo sapiens
  CDR3 for alpha chain variable domain of TCR clone 337977 (TRAV3, TRAJ22)
CAVRDRGCSARQLTF

SEQ ID NO: 675954 - protein, 14 aa, Homo sapiens
  CDR3 for beta chain variable domain of TCR clone 337977 (TRBV20-1, TRBJ1-1)
CSAQTRIGGTEAFL

SEQ ID NO: 675955 - protein, 14 aa, Homo sapiens
  CDR3 for alpha chain variable domain of TCR clone 337978 (TRAV38-1, TRAJ29)
CAFITPSGNTPLVF

SEQ ID NO: 675956 - protein, 14 aa, Homo sapiens
  CDR3 for beta chain variable domain of TCR clone 337978 (TRBV7-2, TRBJ2-7)
CASSSISGFSEQYF

SEQ ID NO: 675957 - protein, 12 aa, Homo sapiens
  CDR3 for alpha chain variable domain of TCR clone 337979 (TRAV12-3, TRAJ17)
CAMTLTGNKPTF

SEQ ID NO: 675958 - protein, 13 aa, Homo sapiens
  CDR3 for beta chain variable domain of TCR clone 337979 (TRBV7-3, TRBJ1-1)
CASSQDWGAEAFF

SEQ ID NO: 675959 - protein, 16 aa, Homo sapiens
  CDR3 for alpha chain variable domain of TCR clone 337980 (TRAV3, TRAJ10)
CAVRDMRAGGGNKLIF

SEQ ID NO: 675960 - protein, 14 aa, Homo sapiens
  CDR3 for beta chain variable domain of TCR clone 337980 (TRBV25-1, TRBJ1-1)
CASTHLGGNTEALF

SEQ ID NO: 675961 - protein, 14 aa, Homo sapiens
  CDR3 for alpha chain variable domain of TCR clone 337981 (TRAV12-1, TRAJ17)
CVVNYKAAGNKLTF

SEQ ID NO: 675962 - protein, 13 aa, Homo sapiens
  CDR3 for beta chain variable domain of TCR clone 337981 (TRBV7-9, TRBJ2-7)
CASSAGLQYEQYF

SEQ ID NO: 675963 - protein, 13 aa, Homo sapiens
  CDR3 for alpha chain variable domain of TCR clone 337982 (TRAV12-2, TRAJ12)
CAVNWDSSYKLIF

SEQ ID NO: 675964 - protein, 14 aa, Homo sapiens
  CDR3 for beta chain variable domain of TCR clone 337982 (TRBV18, TRBJ1-2)
CASSPPGQAYGYTF

SEQ ID NO: 675965 - protein, 13 aa, Homo sapiens
  CDR3 for alpha chain variable domain of TCR clone 337983 (TRAV35, TRAJ21)
CAGQLSNFNKFYF

SEQ ID NO: 675966 - protein, 14 aa, Homo sapiens
  CDR3 for beta chain variable domain of TCR clone 337983 (TRBV5-1, TRBJ2-7)
CARSRGEALYEQYC

SEQ ID NO: 675967 - protein, 12 aa, Homo sapiens
  CDR3 for alpha chain variable domain of TCR clone 337984 (TRAV13-1, TRAJ49)
CAAPNTGNQFSF

SEQ ID NO: 675968 - protein, 15 aa, Homo sapiens
  CDR3 for beta chain variable domain of TCR clone 337984 (TRBV7-9, TRBJ1-6)
CASSSPGRGNSPLHF

SEQ ID NO: 675969 - protein, 15 aa, Homo sapiens
  CDR3 for alpha chain variable domain of TCR clone 337985 (TRAV8-3, TRAJ27)
CAVGPSKTNAGKSTF

SEQ ID NO: 675970 - protein, 16 aa, Homo sapiens
  CDR3 for beta chain variable domain of TCR clone 337985 (TRBV6-6, TRBJ2-1)
RASSLLSDSSYNEQFF

SEQ ID NO: 675971 - protein, 15 aa, Homo sapiens
  CDR3 for alpha chain variable domain of TCR clone 337986 (TRAV12-2, TRAJ43)
CAFDMRFGAGTRLTV

SEQ ID NO: 675972 - protein, 13 aa, Homo sapiens
  CDR3 for beta chain variable domain of TCR clone 337986 (TRBV7-3, TRBJ2-1)
CQQLSGGTNEQFF

SEQ ID NO: 675973 - protein, 16 aa, Homo sapiens
  CDR3 for alpha chain variable domain of TCR clone 337987 (TRAV16, TRAJ52)
CALSAAGGTSYGKLTF

SEQ ID NO: 675974 - protein, 15 aa, Homo sapiens
  CDR3 for beta chain variable domain of TCR clone 337987 (TRBV7-3, TRBJ2-1)
CASSLDGNSYNEQFF

SEQ ID NO: 675975 - protein, 11 aa, Homo sapiens
  CDR3 for alpha chain variable domain of TCR clone 337988 (TRAV2, TRAJ33)
CAIDSNYQLIW

SEQ ID NO: 675976 - protein, 12 aa, Homo sapiens
  CDR3 for beta chain variable domain of TCR clone 337988 (TRBV11-2, TRBJ2-2)
CASSLGGGELFF

SEQ ID NO: 675977 - protein, 18 aa, Homo sapiens
  CDR3 for alpha chain variable domain of TCR clone 337989 (TRAV8-4, TRAJ52)
CAVTRANAGGTSYGTLKF

SEQ ID NO: 675978 - protein, 20 aa, Homo sapiens
  CDR3 for beta chain variable domain of TCR clone 337989 (TRBV28, TRBJ2-1)
CASTPIGRSPGLAGGNEQFF

SEQ ID NO: 675979 - protein, 14 aa, Homo sapiens
  CDR3 for alpha chain variable domain of TCR clone 337990 (TRAV3, TRAJ40)
CAVRDMTGTYKYNF

SEQ ID NO: 675980 - protein, 16 aa, Homo sapiens
  CDR3 for beta chain variable domain of TCR clone 337990 (TRBV7-9, TRBJ2-3)
CASSPWREVGTDTQYF

SEQ ID NO: 675981 - protein, 13 aa, Homo sapiens
  CDR3 for alpha chain variable domain of TCR clone 337991 (TRAV17, TRAJ9)
CATDYTGGFKTIF

SEQ ID NO: 675982 - protein, 14 aa, Homo sapiens
  CDR3 for beta chain variable domain of TCR clone 337991 (TRBV19, TRBJ2-5)
CASSMTGRQETQCF

SEQ ID NO: 675983 - protein, 14 aa, Homo sapiens
  CDR3 for alpha chain variable domain of TCR clone 337992 (TRAV27, TRAJ15)
CAGFDNQAGTALIF

SEQ ID NO: 675984 - protein, 14 aa, Homo sapiens
  CDR3 for beta chain variable domain of TCR clone 337992 (TRBV12-5, TRBJ2-5)
CASGSRTHQETQYF

SEQ ID NO: 675985 - protein, 16 aa, Homo sapiens
  CDR3 for alpha chain variable domain of TCR clone 337993 (TRAV1-2, TRAJ10)
CAVGGVLTGGGNKLDF

SEQ ID NO: 675986 - protein, 12 aa, Homo sapiens
  CDR3 for beta chain variable domain of TCR clone 337993 (TRBV7-8, TRBJ2-7)
CASSLGDREQYF

SEQ ID NO: 675987 - protein, 14 aa, Homo sapiens
  CDR3 for alpha chain variable domain of TCR clone 337994 (TRAV12-2, TRAJ13)
CAVKKTGGYQRVTF

SEQ ID NO: 675988 - protein, 13 aa, Homo sapiens
  CDR3 for beta chain variable domain of TCR clone 337994 (TRBV15, TRBJ1-6)
CATSGGLNSPLHF

SEQ ID NO: 675989 - protein, 23 aa, Homo sapiens
  CDR3 for alpha chain variable domain of TCR clone 337995 (TRAV26-1, TRAJ38)
CIADNAGNNHIQNPDPAVYQLRD

SEQ ID NO: 675990 - protein, 15 aa, Homo sapiens
  CDR3 for beta chain variable domain of TCR clone 337995 (TRBV11-2, TRBJ2-1)
CASSKNRGLIYEQFF

SEQ ID NO: 675991 - protein, 15 aa, Homo sapiens
  CDR3 for alpha chain variable domain of TCR clone 337996 (TRAV3, TRAJ20)
CAVRDIKLSDYKLSF

SEQ ID NO: 675992 - protein, 14 aa, Homo sapiens
  CDR3 for beta chain variable domain of TCR clone 337996 (TRBV5-1, TRBJ2-7)
CASSRGESLYEQHF

SEQ ID NO: 675993 - protein, 17 aa, Homo sapiens
  CDR3 for alpha chain variable domain of TCR clone 337997 (TRAV3, TRAJ6)
CAVSRRTDTGGSYIPTF

SEQ ID NO: 675994 - protein, 16 aa, Homo sapiens
  CDR3 for beta chain variable domain of TCR clone 337997 (TRBV2, TRBJ2-1)
CASSVVGSLSYNEQFF

SEQ ID NO: 675995 - protein, 16 aa, Homo sapiens
  CDR3 for alpha chain variable domain of TCR clone 337998 (TRAV14/DV4, TRAJ21)
CAMREGPENNFNKFYF

SEQ ID NO: 675996 - protein, 11 aa, Homo sapiens
  CDR3 for beta chain variable domain of TCR clone 337998 (TRBV29-1, TRBJ2-5)
CSEDRTGTQYF

SEQ ID NO: 675997 - protein, 12 aa, Homo sapiens
  CDR3 for alpha chain variable domain of TCR clone 337999 (TRAV21, TRAJ12)
CAVMDSSYKLIF

SEQ ID NO: 675998 - protein, 16 aa, Homo sapiens
  CDR3 for beta chain variable domain of TCR clone 337999 (TRBV7-9, TRBJ2-5)
CASRLEIGTRKETQYC

SEQ ID NO: 675999 - protein, 10 aa, Homo sapiens
  CDR3 for alpha chain variable domain of TCR clone 338000 (TRAV30, TRAJ24)
YADSWGKFQF

SEQ ID NO: 676000 - protein, 14 aa, Homo sapiens
  CDR3 for beta chain variable domain of TCR clone 338000 (TRBV7-2, TRBJ2-7)
CASSPKTSFYEQYF

SEQ ID NO: 676001 - protein, 15 aa, Homo sapiens
  CDR3 for alpha chain variable domain of TCR clone 338001 (TRAV21, TRAJ18)
CAVRDRGSTLGRLYF

SEQ ID NO: 676002 - protein, 17 aa, Homo sapiens
  CDR3 for beta chain variable domain of TCR clone 338001 (TRBV10-3, TRBJ2-6)
CAISESTAPSGANVLTF

SEQ ID NO: 676003 - protein, 15 aa, Homo sapiens
  CDR3 for alpha chain variable domain of TCR clone 338002 (TRAV27, TRAJ38)
CAARRNDGNNRKLMW

SEQ ID NO: 676004 - protein, 13 aa, Homo sapiens
  CDR3 for beta chain variable domain of TCR clone 338002 (TRBV12-5, TRBJ2-3)
CASGDRQSDTQYF

SEQ ID NO: 676005 - protein, 14 aa, Homo sapiens
  CDR3 for alpha chain variable domain of TCR clone 338003 (TRAV8-3, TRAJ4)
CAVGASGGYNKLIF

SEQ ID NO: 676006 - protein, 12 aa, Homo sapiens
  CDR3 for beta chain variable domain of TCR clone 338003 (TRBV25-1, TRBJ2-7)
CASKRGTGEQYF

SEQ ID NO: 676007 - protein, 15 aa, Homo sapiens
  CDR3 for alpha chain variable domain of TCR clone 338004 (TRAV21, TRAJ53)
CATLNSGGSNYKLTF

SEQ ID NO: 676008 - protein, 12 aa, Homo sapiens
  CDR3 for beta chain variable domain of TCR clone 338004 (TRBV14, TRBJ2-4)
CASSKLKSMQYF

SEQ ID NO: 676009 - protein, 13 aa, Homo sapiens
  CDR3 for alpha chain variable domain of TCR clone 338005 (TRAV17, TRAJ9)
CATDYTGGFKTIF

SEQ ID NO: 676010 - protein, 15 aa, Homo sapiens
  CDR3 for beta chain variable domain of TCR clone 338005 (TRBV20-1, TRBJ2-7)
CSARREAGAPREQYF

SEQ ID NO: 676011 - protein, 14 aa, Homo sapiens
  CDR3 for alpha chain variable domain of TCR clone 338006 (TRAV8-2, TRAJ4)
WVVSPSGGYNELIF

SEQ ID NO: 676012 - protein, 14 aa, Homo sapiens
  CDR3 for beta chain variable domain of TCR clone 338006 (TRBV10-3, TRBJ2-2)
CAISEVSHSGELFF

SEQ ID NO: 676013 - protein, 13 aa, Homo sapiens
  CDR3 for alpha chain variable domain of TCR clone 338007 (TRAV1-1, TRAJ9)
CPAKNTRGFKTIF

SEQ ID NO: 676014 - protein, 14 aa, Homo sapiens
  CDR3 for beta chain variable domain of TCR clone 338007 (TRBV20-1, TRBJ2-1)
CSAQIGGSANEQFF

SEQ ID NO: 676015 - protein, 13 aa, Homo sapiens
  CDR3 for alpha chain variable domain of TCR clone 338008 (TRAV13-1, TRAJ6)
CAARRGGEYKPTF

SEQ ID NO: 676016 - protein, 16 aa, Homo sapiens
  CDR3 for beta chain variable domain of TCR clone 338008 (TRBV7-9, TRBJ2-2)
CASSLATGVGTGELFF

SEQ ID NO: 676017 - protein, 14 aa, Homo sapiens
  CDR3 for alpha chain variable domain of TCR clone 338009 (TRAV12-1, TRAJ38)
CVVNDAGNNRKLIW

SEQ ID NO: 676018 - protein, 14 aa, Homo sapiens
  CDR3 for beta chain variable domain of TCR clone 338009 (TRBV19, TRBJ1-5)
RASSIVQGIQPQHF

SEQ ID NO: 676019 - protein, 14 aa, Homo sapiens
  CDR3 for alpha chain variable domain of TCR clone 338010 (TRAV17, TRAJ32)
CATDPGGATNKLIF

SEQ ID NO: 676020 - protein, 14 aa, Homo sapiens
  CDR3 for beta chain variable domain of TCR clone 338010 (TRBV2, TRBJ1-5)
CDSSENRGGQPQHF

SEQ ID NO: 676021 - protein, 15 aa, Homo sapiens
  CDR3 for alpha chain variable domain of TCR clone 338011 (TRAV21, TRAJ53)
CATLISGGSNYKLTF

SEQ ID NO: 676022 - protein, 16 aa, Homo sapiens
  CDR3 for beta chain variable domain of TCR clone 338011 (TRBV9, TRBJ2-1)
CASSVGGGGNYNEQFF

SEQ ID NO: 676023 - protein, 16 aa, Homo sapiens
  CDR3 for alpha chain variable domain of TCR clone 338012 (TRAV8-3, TRAJ44)
CAVGPLNTGTASKLTF

SEQ ID NO: 676024 - protein, 13 aa, Homo sapiens
  CDR3 for beta chain variable domain of TCR clone 338012 (TRBV19, TRBJ1-1)
CASSPSNGGEAFF

SEQ ID NO: 676025 - protein, 14 aa, Homo sapiens
  CDR3 for alpha chain variable domain of TCR clone 338013 (TRAV12-3, TRAJ10)
SHLPLTGGGNKLTF

SEQ ID NO: 676026 - protein, 13 aa, Homo sapiens
  CDR3 for beta chain variable domain of TCR clone 338013 (TRBV12-4, TRBJ1-1)
CASSLSIGAEAFF

SEQ ID NO: 676027 - protein, 14 aa, Homo sapiens
  CDR3 for alpha chain variable domain of TCR clone 338014 (TRAV26-1, TRAJ38)
CIADNAGNNRKLIL

SEQ ID NO: 676028 - protein, 13 aa, Homo sapiens
  CDR3 for beta chain variable domain of TCR clone 338014 (TRBV20-1, TRBJ1-1)
CSARGGGNTVAFF

SEQ ID NO: 676029 - protein, 12 aa, Homo sapiens
  CDR3 for alpha chain variable domain of TCR clone 338015 (TRAV35, TRAJ49)
CAGWNTGNQFYF

SEQ ID NO: 676030 - protein, 15 aa, Homo sapiens
  CDR3 for beta chain variable domain of TCR clone 338015 (TRBV7-3, TRBJ2-1)
CASSPTGGGEVEQFF

SEQ ID NO: 676031 - protein, 18 aa, Homo sapiens
  CDR3 for alpha chain variable domain of TCR clone 338016 (TRAV21, TRAJ52)
CAVRPSPAGGTSYGKLPF

SEQ ID NO: 676032 - protein, 17 aa, Homo sapiens
  CDR3 for beta chain variable domain of TCR clone 338016 (TRBV13, TRBJ2-3)
CASILSRVAGGRNTQYF

SEQ ID NO: 676033 - protein, 14 aa, Homo sapiens
  CDR3 for alpha chain variable domain of TCR clone 338017 (TRAV26-2, TRAJ23)
CSRTLYNQGGRLIF

SEQ ID NO: 676034 - protein, 16 aa, Homo sapiens
  CDR3 for beta chain variable domain of TCR clone 338017 (TRBV29-1, TRBJ2-7)
CSVEDAEDGTAYEQYF

SEQ ID NO: 676035 - protein, 14 aa, Homo sapiens
  CDR3 for alpha chain variable domain of TCR clone 338018 (TRAV26-2, TRAJ32)
CCVGYGGATNKLIF

SEQ ID NO: 676036 - protein, 14 aa, Homo sapiens
  CDR3 for beta chain variable domain of TCR clone 338018 (TRBV4-2, TRBJ2-1)
CASGLDRAYNEQFC

SEQ ID NO: 676037 - protein, 12 aa, Homo sapiens
  CDR3 for alpha chain variable domain of TCR clone 338019 (TRAV12-2, TRAJ43)
CAVNVNNNDMRF

SEQ ID NO: 676038 - protein, 17 aa, Homo sapiens
  CDR3 for beta chain variable domain of TCR clone 338019 (TRBV3-1, TRBJ2-2)
CASSHFRDKVDTGELFF

SEQ ID NO: 676039 - protein, 12 aa, Homo sapiens
  CDR3 for alpha chain variable domain of TCR clone 338020 (TRAV21, TRAJ33)
CAKMDSNYPLIW

SEQ ID NO: 676040 - protein, 17 aa, Homo sapiens
  CDR3 for beta chain variable domain of TCR clone 338020 (TRBV20-1, TRBJ2-2)
CSASGSGQGGLTGELFF

SEQ ID NO: 676041 - protein, 13 aa, Homo sapiens
  CDR3 for alpha chain variable domain of TCR clone 338021 (TRAV8-6, TRAJ8)
CAVSNTGFQKLVF

SEQ ID NO: 676042 - protein, 12 aa, Homo sapiens
  CDR3 for beta chain variable domain of TCR clone 338021 (TRBV19, TRBJ1-5)
CASSIAQQPQHF

SEQ ID NO: 676043 - protein, 15 aa, Homo sapiens
  CDR3 for alpha chain variable domain of TCR clone 338022 (TRAV26-1, TRAJ40)
CIVRGTTSGTDKYIF

SEQ ID NO: 676044 - protein, 12 aa, Homo sapiens
  CDR3 for beta chain variable domain of TCR clone 338022 (TRBV7-9, TRBJ1-4)
CASSTDREKLFF

SEQ ID NO: 676045 - protein, 11 aa, Homo sapiens
  CDR3 for alpha chain variable domain of TCR clone 338023 (TRAV12-2, TRAJ39)
CAVNNMPTFGG

SEQ ID NO: 676046 - protein, 15 aa, Homo sapiens
  CDR3 for beta chain variable domain of TCR clone 338023 (TRBV12-4, TRBJ2-5)
CASSPPTGLQETQYF

SEQ ID NO: 676047 - protein, 13 aa, Homo sapiens
  CDR3 for alpha chain variable domain of TCR clone 338024 (TRAV27, TRAJ41)
CAGEGNSGYALNS

SEQ ID NO: 676048 - protein, 14 aa, Homo sapiens
  CDR3 for beta chain variable domain of TCR clone 338024 (TRBV7-2, TRBJ1-1)
CASSFLTGATEAFF

SEQ ID NO: 676049 - protein, 12 aa, Homo sapiens
  CDR3 for alpha chain variable domain of TCR clone 338025 (TRAV12-3, TRAJ20)
CTMVRGDYKLSF

SEQ ID NO: 676050 - protein, 13 aa, Homo sapiens
  CDR3 for beta chain variable domain of TCR clone 338025 (TRBV23-1, TRBJ1-4)
CASRGKFNEKLFF

SEQ ID NO: 676051 - protein, 11 aa, Homo sapiens
  CDR3 for alpha chain variable domain of TCR clone 338026 (TRAV12-1, TRAJ43)
CVEYDNNDMRF

SEQ ID NO: 676052 - protein, 16 aa, Homo sapiens
  CDR3 for beta chain variable domain of TCR clone 338026 (TRBV5-4, TRBJ2-1)
CASSLLGSGQDNEQFF

SEQ ID NO: 676053 - protein, 15 aa, Homo sapiens
  CDR3 for alpha chain variable domain of TCR clone 338027 (TRAV3, TRAJ22)
CAVRDRGGSARQLTF

SEQ ID NO: 676054 - protein, 13 aa, Homo sapiens
  CDR3 for beta chain variable domain of TCR clone 338027 (TRBV2, TRBJ1-5)
CAPAGPGNQPQHF

SEQ ID NO: 676055 - protein, 14 aa, Homo sapiens
  CDR3 for alpha chain variable domain of TCR clone 338028 (TRAV1-2, TRAJ16)
CAVNRSSDGQKLLF

SEQ ID NO: 676056 - protein, 13 aa, Homo sapiens
  CDR3 for beta chain variable domain of TCR clone 338028 (TRBV12-4, TRBJ1-2)
CASSLRQGKGYTF

SEQ ID NO: 676057 - protein, 12 aa, Homo sapiens
  CDR3 for alpha chain variable domain of TCR clone 338029 (TRAV16, TRAJ10)
CSRTGGGNKLTF

SEQ ID NO: 676058 - protein, 18 aa, Homo sapiens
  CDR3 for beta chain variable domain of TCR clone 338029 (TRBV12-4, TRBJ2-2)
CASSRSGGAIPNTGELFF

SEQ ID NO: 676059 - protein, 12 aa, Homo sapiens
  CDR3 for alpha chain variable domain of TCR clone 338030 (TRAV21, TRAJ33)
CAKMDSNYQLIW

SEQ ID NO: 676060 - protein, 18 aa, Homo sapiens
  CDR3 for beta chain variable domain of TCR clone 338030 (TRBV2, TRBJ2-7)
CASSLTSGLRAVLRAGHQ

SEQ ID NO: 676061 - protein, 13 aa, Homo sapiens
  CDR3 for alpha chain variable domain of TCR clone 338031 (TRAV12-3, TRAJ33)
CAMSVNSNYQLIW

SEQ ID NO: 676062 - protein, 19 aa, Homo sapiens
  CDR3 for beta chain variable domain of TCR clone 338031 (TRBV7-2, TRBJ2-3)
CASSFLSRNWGGGTDTQYF

SEQ ID NO: 676063 - protein, 13 aa, Homo sapiens
  CDR3 for alpha chain variable domain of TCR clone 338032 (TRAV8-2, TRAJ49)
CVVAPNTGNQFYF

SEQ ID NO: 676064 - protein, 15 aa, Homo sapiens
  CDR3 for beta chain variable domain of TCR clone 338032 (TRBV11-2, TRBJ2-1)
CASSLTSGWYNEQFF

SEQ ID NO: 676065 - protein, 16 aa, Homo sapiens
  CDR3 for alpha chain variable domain of TCR clone 338033 (TRAV3, TRAJ37)
CAVRPHGSGNTGKQIF

SEQ ID NO: 676066 - protein, 14 aa, Homo sapiens
  CDR3 for beta chain variable domain of TCR clone 338033 (TRBV2, TRBJ2-1)
CASSDRAYYNEQFF

SEQ ID NO: 676067 - protein, 12 aa, Homo sapiens
  CDR3 for alpha chain variable domain of TCR clone 338034 (TRAV3, TRAJ43)
CAVRDPNNDMRF

SEQ ID NO: 676068 - protein, 15 aa, Homo sapiens
  CDR3 for beta chain variable domain of TCR clone 338034 (TRBV27, TRBJ1-5)
CASRLWTGFDQPQHF

SEQ ID NO: 676069 - protein, 15 aa, Homo sapiens
  CDR3 for alpha chain variable domain of TCR clone 338035 (TRAV12-3, TRAJ48)
CAMNSKNFGNEKLTF

SEQ ID NO: 676070 - protein, 14 aa, Homo sapiens
  CDR3 for beta chain variable domain of TCR clone 338035 (TRBV2, TRBJ1-6)
CASSESRNNSPLHF

SEQ ID NO: 676071 - protein, 14 aa, Homo sapiens
  CDR3 for alpha chain variable domain of TCR clone 338036 (TRAV26-1, TRAJ49)
CIVRPSNTGNQFYF

SEQ ID NO: 676072 - protein, 16 aa, Homo sapiens
  CDR3 for beta chain variable domain of TCR clone 338036 (TRBV7-2, TRBJ1-6)
CASSSFESSYNSPLHF

SEQ ID NO: 676073 - protein, 14 aa, Homo sapiens
  CDR3 for alpha chain variable domain of TCR clone 338037 (TRAV12-2, TRAJ17)
CAVLFKAAGNKLTF

SEQ ID NO: 676074 - protein, 13 aa, Homo sapiens
  CDR3 for beta chain variable domain of TCR clone 338037 (TRBV15, TRBJ1-6)
CATSGGLNSPLHF

SEQ ID NO: 676075 - protein, 16 aa, Homo sapiens
  CDR3 for alpha chain variable domain of TCR clone 338038 (TRAV20, TRAJ28)
CAVRDPSVAGSYQLTF

SEQ ID NO: 676076 - protein, 13 aa, Homo sapiens
  CDR3 for beta chain variable domain of TCR clone 338038 (TRBV4-1, TRBJ2-1)
CASSQEVQYEQFF

SEQ ID NO: 676077 - protein, 12 aa, Homo sapiens
  CDR3 for alpha chain variable domain of TCR clone 338039 (TRAV3, TRAJ31)
CAVRDVNARLMF

SEQ ID NO: 676078 - protein, 18 aa, Homo sapiens
  CDR3 for beta chain variable domain of TCR clone 338039 (TRBV7-2, TRBJ2-3)
CASSLKREGSGITDTQHF

SEQ ID NO: 676079 - protein, 15 aa, Homo sapiens
  CDR3 for alpha chain variable domain of TCR clone 338040 (TRAV12-1, TRAJ45)
CVVLSGGGGADGLTF

SEQ ID NO: 676080 - protein, 15 aa, Homo sapiens
  CDR3 for beta chain variable domain of TCR clone 338040 (TRBV7-2, TRBJ2-1)
CASSSGLAGGNEQFF

SEQ ID NO: 676081 - protein, 15 aa, Homo sapiens
  CDR3 for alpha chain variable domain of TCR clone 338041 (TRAV1-1, TRAJ23)
CAVRVCYNQGGKLIF

SEQ ID NO: 676082 - protein, 16 aa, Homo sapiens
  CDR3 for beta chain variable domain of TCR clone 338041 (TRBV28, TRBJ2-1)
CASSSPEYPRDNEQFF

SEQ ID NO: 676083 - protein, 14 aa, Homo sapiens
  CDR3 for alpha chain variable domain of TCR clone 338042 (TRAV12-2, TRAJ13)
CAVKKTGGYQKVTF

SEQ ID NO: 676084 - protein, 16 aa, Homo sapiens
  CDR3 for beta chain variable domain of TCR clone 338042 (TRBV11-3, TRBJ2-3)
CASSSGSGGGTDTQYF

SEQ ID NO: 676085 - protein, 15 aa, Homo sapiens
  CDR3 for alpha chain variable domain of TCR clone 338043 (TRAV2, TRAJ22)
CAVPSRGGSARQLTF

SEQ ID NO: 676086 - protein, 16 aa, Homo sapiens
  CDR3 for beta chain variable domain of TCR clone 338043 (TRBV20-1, TRBJ1-4)
CSAPGQGLLTNEKLFF

SEQ ID NO: 676087 - protein, 15 aa, Homo sapiens
  CDR3 for alpha chain variable domain of TCR clone 338044 (TRAV8-3, TRAJ11)
CAVGLSNSGYSTLTF

SEQ ID NO: 676088 - protein, 16 aa, Homo sapiens
  CDR3 for beta chain variable domain of TCR clone 338044 (TRBV12-4, TRBJ1-5)
CASSRPVGGSNQPQHF

SEQ ID NO: 676089 - protein, 15 aa, Homo sapiens
  CDR3 for alpha chain variable domain of TCR clone 338045 (TRAV13-1, TRAJ44)
CAASRGGGTASKLTF

SEQ ID NO: 676090 - protein, 14 aa, Homo sapiens
  CDR3 for beta chain variable domain of TCR clone 338045 (TRBV7-2, TRBJ2-5)
GASSPRGSSETQYF

SEQ ID NO: 676091 - protein, 13 aa, Homo sapiens
  CDR3 for alpha chain variable domain of TCR clone 338046 (TRAV8-3, TRAJ37)
CAVPSSNTGKLIF

SEQ ID NO: 676092 - protein, 12 aa, Homo sapiens
  CDR3 for beta chain variable domain of TCR clone 338046 (TRBV11-2, TRBJ2-1)
CASSPGNNEQSF

SEQ ID NO: 676093 - protein, 14 aa, Homo sapiens
  CDR3 for alpha chain variable domain of TCR clone 338047 (TRAV12-2, TRAJ5)
CAVNRSTGRRALTF

SEQ ID NO: 676094 - protein, 15 aa, Homo sapiens
  CDR3 for beta chain variable domain of TCR clone 338047 (TRBV28, TRBJ2-5)
CASSSGRVIQETQYF

SEQ ID NO: 676095 - protein, 16 aa, Homo sapiens
  CDR3 for alpha chain variable domain of TCR clone 338048 (TRAV26-2, TRAJ57)
CILSDVGSGGSEKLVF

SEQ ID NO: 676096 - protein, 13 aa, Homo sapiens
  CDR3 for beta chain variable domain of TCR clone 338048 (TRBV18, TRBJ2-3)
CASSPGVTDTQYF

SEQ ID NO: 676097 - protein, 19 aa, Homo sapiens
  CDR3 for alpha chain variable domain of TCR clone 338049 (TRAV2, TRAJ20)
ILQVREADAAVYRDCKLSF

SEQ ID NO: 676098 - protein, 13 aa, Homo sapiens
  CDR3 for beta chain variable domain of TCR clone 338049 (TRBV12-4, TRBJ2-5)
CASSPGTEETQYF

SEQ ID NO: 676099 - protein, 15 aa, Homo sapiens
  CDR3 for alpha chain variable domain of TCR clone 338050 (TRAV17, TRAJ57)
CATGPSQGGSEKLVF

SEQ ID NO: 676100 - protein, 14 aa, Homo sapiens
  CDR3 for beta chain variable domain of TCR clone 338050 (TRBV2, TRBJ2-5)
CASKRDGTTETQYF

SEQ ID NO: 676101 - protein, 15 aa, Homo sapiens
  CDR3 for alpha chain variable domain of TCR clone 338051 (TRAV8-3, TRAJ45)
CASSYSGGGADGLTF

SEQ ID NO: 676102 - protein, 17 aa, Homo sapiens
  CDR3 for beta chain variable domain of TCR clone 338051 (TRBV18, TRBJ1-3)
CQLTARGRGPSGNTIYF

SEQ ID NO: 676103 - protein, 14 aa, Homo sapiens
  CDR3 for alpha chain variable domain of TCR clone 338052 (TRAV2, TRAJ9)
CAVEDRSGGFKTSF

SEQ ID NO: 676104 - protein, 16 aa, Homo sapiens
  CDR3 for beta chain variable domain of TCR clone 338052 (TRBV20-1, TRBJ2-3)
CSAVRDRGPIADTQYF

SEQ ID NO: 676105 - protein, 16 aa, Homo sapiens
  CDR3 for alpha chain variable domain of TCR clone 338053 (TRAV12-2, TRAJ43)
CAGDDMRFGAGTRLTV

SEQ ID NO: 676106 - protein, 16 aa, Homo sapiens
  CDR3 for beta chain variable domain of TCR clone 338053 (TRBV5-1, TRBJ2-3)
CASSSIGAGSTDTQYF

SEQ ID NO: 676107 - protein, 14 aa, Homo sapiens
  CDR3 for alpha chain variable domain of TCR clone 338054 (TRAV8-3, TRAJ33)
CAVAASDSNYQLIW

SEQ ID NO: 676108 - protein, 14 aa, Homo sapiens
  CDR3 for beta chain variable domain of TCR clone 338054 (TRBV19, TRBJ2-1)
CASPTFVLSGEQFF

SEQ ID NO: 676109 - protein, 15 aa, Homo sapiens
  CDR3 for alpha chain variable domain of TCR clone 338055 (TRAV27, TRAJ50)
CAGRERGTSYDKGLF

SEQ ID NO: 676110 - protein, 16 aa, Homo sapiens
  CDR3 for beta chain variable domain of TCR clone 338055 (TRBV10-3, TRBJ1-5)
CAISDQVGAPNQPQHF

SEQ ID NO: 676111 - protein, 14 aa, Homo sapiens
  CDR3 for alpha chain variable domain of TCR clone 338056 (TRAV1-2, TRAJ8)
CAVREDTGCQNLVF

SEQ ID NO: 676112 - protein, 15 aa, Homo sapiens
  CDR3 for beta chain variable domain of TCR clone 338056 (TRBV6-3, TRBJ2-7)
CASSSPWTVFYEQYF

SEQ ID NO: 676113 - protein, 14 aa, Homo sapiens
  CDR3 for alpha chain variable domain of TCR clone 338057 (TRAV13-2, TRAJ29)
CAENIEPGNTPLVF

SEQ ID NO: 676114 - protein, 15 aa, Homo sapiens
  CDR3 for beta chain variable domain of TCR clone 338057 (TRBV20-1, TRBJ2-7)
CSARDRVSGMDEQYF

SEQ ID NO: 676115 - protein, 13 aa, Homo sapiens
  CDR3 for alpha chain variable domain of TCR clone 338058 (TRAV8-2, TRAJ43)
CVVSDQGDNDMRF

SEQ ID NO: 676116 - protein, 12 aa, Homo sapiens
  CDR3 for beta chain variable domain of TCR clone 338058 (TRBV7-9, TRBJ2-7)
CASRTGCDEQYF

SEQ ID NO: 676117 - protein, 14 aa, Homo sapiens
  CDR3 for alpha chain variable domain of TCR clone 338059 (TRAV1-2, TRAJ16)
CAGNRFSDGQKLLF

SEQ ID NO: 676118 - protein, 15 aa, Homo sapiens
  CDR3 for beta chain variable domain of TCR clone 338059 (TRBV6-6, TRBJ2-7)
CASSYSYGGSYEQYF

SEQ ID NO: 676119 - protein, 14 aa, Homo sapiens
  CDR3 for alpha chain variable domain of TCR clone 338060 (TRAV29/DV5, TRAJ20)
CAASAPIEDYKLSF

SEQ ID NO: 676120 - protein, 13 aa, Homo sapiens
  CDR3 for beta chain variable domain of TCR clone 338060 (TRBV7-8, TRBJ2-7)
CASSLTGGREQYF

SEQ ID NO: 676121 - protein, 14 aa, Homo sapiens
  CDR3 for alpha chain variable domain of TCR clone 338061 (TRAV1-2, TRAJ16)
CAVNRFSDGQKLLF

SEQ ID NO: 676122 - protein, 12 aa, Homo sapiens
  CDR3 for beta chain variable domain of TCR clone 338061 (TRBV11-2, TRBJ2-2)
CASSLGGGELCF

SEQ ID NO: 676123 - protein, 14 aa, Homo sapiens
  CDR3 for alpha chain variable domain of TCR clone 338062 (TRAV21, TRAJ23)
CAIMIYNQGGKLIF

SEQ ID NO: 676124 - protein, 14 aa, Homo sapiens
  CDR3 for beta chain variable domain of TCR clone 338062 (TRBV18, TRBJ2-5)
CASSPPSRQETQYF

SEQ ID NO: 676125 - protein, 14 aa, Homo sapiens
  CDR3 for alpha chain variable domain of TCR clone 338063 (TRAV1-2, TRAJ15)
CAVRDRQAGTALIF

SEQ ID NO: 676126 - protein, 16 aa, Homo sapiens
  CDR3 for beta chain variable domain of TCR clone 338063 (TRBV7-2, TRBJ1-1)
CASSLGAGWTNTEAFF

SEQ ID NO: 676127 - protein, 14 aa, Homo sapiens
  CDR3 for alpha chain variable domain of TCR clone 338064 (TRAV13-2, TRAJ17)
CAENSKAAGNKLTF

SEQ ID NO: 676128 - protein, 14 aa, Homo sapiens
  CDR3 for beta chain variable domain of TCR clone 338064 (TRBV7-9, TRBJ2-7)
CASSIGQGAGEQYF

SEQ ID NO: 676129 - protein, 14 aa, Homo sapiens
  CDR3 for alpha chain variable domain of TCR clone 338065 (TRAV12-3, TRAJ10)
SHLPLTGGGNKLTF

SEQ ID NO: 676130 - protein, 15 aa, Homo sapiens
  CDR3 for beta chain variable domain of TCR clone 338065 (TRBV5-7, TRBJ1-5)
CAGSYGKLWDQPQHF

SEQ ID NO: 676131 - protein, 12 aa, Homo sapiens
  CDR3 for alpha chain variable domain of TCR clone 338066 (TRAV13-1, TRAJ11)
CAGPSGYSTLTF

SEQ ID NO: 676132 - protein, 16 aa, Homo sapiens
  CDR3 for beta chain variable domain of TCR clone 338066 (TRBV12-4, TRBJ2-1)
RASSQETATPYNEQFF

SEQ ID NO: 676133 - protein, 14 aa, Homo sapiens
  CDR3 for alpha chain variable domain of TCR clone 338067 (TRAV40, TRAJ41)
CLLGPPNSGYALNV

SEQ ID NO: 676134 - protein, 11 aa, Homo sapiens
  CDR3 for beta chain variable domain of TCR clone 338067 (TRBV19, TRBJ2-7)
CASSILGEQYF

SEQ ID NO: 676135 - protein, 12 aa, Homo sapiens
  CDR3 for alpha chain variable domain of TCR clone 338068 (TRAV16, TRAJ49)
CALNEGGNQVYF

SEQ ID NO: 676136 - protein, 14 aa, Homo sapiens
  CDR3 for beta chain variable domain of TCR clone 338068 (TRBV7-9, TRBJ2-1)
CASRPTGLRNEQFF

SEQ ID NO: 676137 - protein, 14 aa, Homo sapiens
  CDR3 for alpha chain variable domain of TCR clone 338069 (TRAV26-1, TRAJ22)
CIVRVYGSARQLTF

SEQ ID NO: 676138 - protein, 11 aa, Homo sapiens
  CDR3 for beta chain variable domain of TCR clone 338069 (TRBV7-8, TRBJ2-7)
CASSLSLEQYF

SEQ ID NO: 676139 - protein, 14 aa, Homo sapiens
  CDR3 for alpha chain variable domain of TCR clone 338070 (TRAV29/DV5, TRAJ36)
CAARRKTGANNLFF

SEQ ID NO: 676140 - protein, 14 aa, Homo sapiens
  CDR3 for beta chain variable domain of TCR clone 338070 (TRBV3-1, TRBJ2-5)
CASSQGPDQETQYV

SEQ ID NO: 676141 - protein, 13 aa, Homo sapiens
  CDR3 for alpha chain variable domain of TCR clone 338071 (TRAV23/DV6, TRAJ21)
CAASIGNFNKFYF

SEQ ID NO: 676142 - protein, 14 aa, Homo sapiens
  CDR3 for beta chain variable domain of TCR clone 338071 (TRBV4-1, TRBJ2-2)
CASSQAVNTGELFF

SEQ ID NO: 676143 - protein, 13 aa, Homo sapiens
  CDR3 for alpha chain variable domain of TCR clone 338072 (TRAV17, TRAJ11)
CATRNSGYSTLTF

SEQ ID NO: 676144 - protein, 13 aa, Homo sapiens
  CDR3 for beta chain variable domain of TCR clone 338072 (TRBV7-2, TRBJ2-2)
CASSLAVTGELFF

SEQ ID NO: 676145 - protein, 12 aa, Homo sapiens
  CDR3 for alpha chain variable domain of TCR clone 338073 (TRAV35, TRAJ30)
CAGLNRYDKIIF

SEQ ID NO: 676146 - protein, 15 aa, Homo sapiens
  CDR3 for beta chain variable domain of TCR clone 338073 (TRBV18, TRBJ2-3)
CASSPLAGETDTQYF

SEQ ID NO: 676147 - protein, 13 aa, Homo sapiens
  CDR3 for alpha chain variable domain of TCR clone 338074 (TRAV13-2, TRAJ53)
CAENMGSNYKLTF

SEQ ID NO: 676148 - protein, 13 aa, Homo sapiens
  CDR3 for beta chain variable domain of TCR clone 338074 (TRBV4-1, TRBJ2-2)
CASSEESTGELFF

SEQ ID NO: 676149 - protein, 14 aa, Homo sapiens
  CDR3 for alpha chain variable domain of TCR clone 338075 (TRAV12-2, TRAJ40)
CAVKIPSGTYKYIF

SEQ ID NO: 676150 - protein, 18 aa, Homo sapiens
  CDR3 for beta chain variable domain of TCR clone 338075 (TRBV7-2, TRBJ2-5)
CASSRGGVGDPVLRARHA

SEQ ID NO: 676151 - protein, 14 aa, Homo sapiens
  CDR3 for alpha chain variable domain of TCR clone 338076 (TRAV12-1, TRAJ30)
CVVNIGNRDDKIIF

SEQ ID NO: 676152 - protein, 14 aa, Homo sapiens
  CDR3 for beta chain variable domain of TCR clone 338076 (TRBV7-9, TRBJ2-5)
CASSPRPSGENQFF

SEQ ID NO: 676153 - protein, 13 aa, Homo sapiens
  CDR3 for alpha chain variable domain of TCR clone 338077 (TRAV4, TRAJ20)
CLVGSSNDYKLSF

SEQ ID NO: 676154 - protein, 15 aa, Homo sapiens
  CDR3 for beta chain variable domain of TCR clone 338077 (TRBV6-1, TRBJ2-3)
CASSERGGITDTQYF

SEQ ID NO: 676155 - protein, 15 aa, Homo sapiens
  CDR3 for alpha chain variable domain of TCR clone 338078 (TRAV2, TRAJ15)
CAVEDREQAGTALIF

SEQ ID NO: 676156 - protein, 15 aa, Homo sapiens
  CDR3 for beta chain variable domain of TCR clone 338078 (TRBV12-4, TRBJ1-1)
CQQQDRVVANTEAFF

SEQ ID NO: 676157 - protein, 11 aa, Homo sapiens
  CDR3 for alpha chain variable domain of TCR clone 338079 (TRAV1-1, TRAJ23)
CVVRQGGKLIF

SEQ ID NO: 676158 - protein, 14 aa, Homo sapiens
  CDR3 for beta chain variable domain of TCR clone 338079 (TRBV19, TRBJ2-1)
CASPTFVLSGEQFF

SEQ ID NO: 676159 - protein, 18 aa, Homo sapiens
  CDR3 for alpha chain variable domain of TCR clone 338080 (TRAV21, TRAJ52)
CAVRPSPAGGTSYGKLTF

SEQ ID NO: 676160 - protein, 13 aa, Homo sapiens
  CDR3 for beta chain variable domain of TCR clone 338080 (TRBV7-3, TRBJ1-1)
CASSHDWGAEAYF

SEQ ID NO: 676161 - protein, 11 aa, Homo sapiens
  CDR3 for alpha chain variable domain of TCR clone 338081 (TRAV13-1, TRAJ39)
CASHAGNMLTF

SEQ ID NO: 676162 - protein, 14 aa, Homo sapiens
  CDR3 for beta chain variable domain of TCR clone 338081 (TRBV7-2, TRBJ2-7)
CASSSIAGFSEQYF

SEQ ID NO: 676163 - protein, 11 aa, Homo sapiens
  CDR3 for alpha chain variable domain of TCR clone 338082 (TRAV12-2, TRAJ49)
CALPGGNQFYF

SEQ ID NO: 676164 - protein, 13 aa, Homo sapiens
  CDR3 for beta chain variable domain of TCR clone 338082 (TRBV4-1, TRBJ1-1)
CASSQLGTGEAFF

SEQ ID NO: 676165 - protein, 18 aa, Homo sapiens
  CDR3 for alpha chain variable domain of TCR clone 338083 (TRAV3, TRAJ42)
CAVRDPENYGGSQGNLIF

SEQ ID NO: 676166 - protein, 19 aa, Homo sapiens
  CDR3 for beta chain variable domain of TCR clone 338083 (TRBV25-1, TRBJ2-2)
CAILVYRVDRGRKTGELFF

SEQ ID NO: 676167 - protein, 16 aa, Homo sapiens
  CDR3 for alpha chain variable domain of TCR clone 338084 (TRAV30, TRAJ24)
CGTEIVDADSWGKFQF

SEQ ID NO: 676168 - protein, 17 aa, Homo sapiens
  CDR3 for beta chain variable domain of TCR clone 338084 (TRBV20-1, TRBJ2-1)
CSATPRLAGTRYNEQFF

SEQ ID NO: 676169 - protein, 13 aa, Homo sapiens
  CDR3 for alpha chain variable domain of TCR clone 338085 (TRAV8-4, TRAJ39)
STPPSDAGNILTF

SEQ ID NO: 676170 - protein, 13 aa, Homo sapiens
  CDR3 for beta chain variable domain of TCR clone 338085 (TRBV12-4, TRBJ2-7)
CASSPTETYEQYF

SEQ ID NO: 676171 - protein, 12 aa, Homo sapiens
  CDR3 for alpha chain variable domain of TCR clone 338086 (TRAV2, TRAJ33)
CAVPDSNYQLIW

SEQ ID NO: 676172 - protein, 17 aa, Homo sapiens
  CDR3 for beta chain variable domain of TCR clone 338086 (TRBV6-5, TRBJ2-3)
CVSSYGTSLYKSDTQYF

SEQ ID NO: 676173 - protein, 15 aa, Homo sapiens
  CDR3 for alpha chain variable domain of TCR clone 338087 (TRAV3, TRAJ11)
CAVRDRGSGYSTLTF

SEQ ID NO: 676174 - protein, 13 aa, Homo sapiens
  CDR3 for beta chain variable domain of TCR clone 338087 (TRBV7-9, TRBJ2-1)
CASSLKQNYGYTF

SEQ ID NO: 676175 - protein, 16 aa, Homo sapiens
  CDR3 for alpha chain variable domain of TCR clone 338088 (TRAV3, TRAJ37)
CAVRPHGSGNTGKIIF

SEQ ID NO: 676176 - protein, 17 aa, Homo sapiens
  CDR3 for beta chain variable domain of TCR clone 338088 (TRBV5-1, TRBJ2-5)
CASSPVALGQNQETQYF

SEQ ID NO: 676177 - protein, 14 aa, Homo sapiens
  CDR3 for alpha chain variable domain of TCR clone 338089 (TRAV12-3, TRAJ29)
CAMILLSGNTPLVF

SEQ ID NO: 676178 - protein, 15 aa, Homo sapiens
  CDR3 for beta chain variable domain of TCR clone 338089 (TRBV7-2, TRBJ2-1)
CASSPGFISGNEQFF

SEQ ID NO: 676179 - protein, 13 aa, Homo sapiens
  CDR3 for alpha chain variable domain of TCR clone 338090 (TRAV38-1, TRAJ42)
SARWGGSQGNLIF

SEQ ID NO: 676180 - protein, 14 aa, Homo sapiens
  CDR3 for beta chain variable domain of TCR clone 338090 (TRBV6-1, TRBJ1-3)
CASVQGGGGNTIYF

SEQ ID NO: 676181 - protein, 18 aa, Homo sapiens
  CDR3 for alpha chain variable domain of TCR clone 338091 (TRAV13-1, TRAJ52)
CAAKNPNAGGTSYGKLTF

SEQ ID NO: 676182 - protein, 15 aa, Homo sapiens
  CDR3 for beta chain variable domain of TCR clone 338091 (TRBV19, TRBJ2-1)
CASSIQATSYNEQFF

SEQ ID NO: 676183 - protein, 19 aa, Homo sapiens
  CDR3 for alpha chain variable domain of TCR clone 338092 (TRAV8-3, TRAJ8)
LSTSVLWDPMNTGFQKLVF

SEQ ID NO: 676184 - protein, 13 aa, Homo sapiens
  CDR3 for beta chain variable domain of TCR clone 338092 (TRBV10-2, TRBJ2-3)
CASSESGGHTQYF

SEQ ID NO: 676185 - protein, 14 aa, Homo sapiens
  CDR3 for alpha chain variable domain of TCR clone 338093 (TRAV23/DV6, TRAJ24)
CAASLSDSWGKLQF

SEQ ID NO: 676186 - protein, 14 aa, Homo sapiens
  CDR3 for beta chain variable domain of TCR clone 338093 (TRBV6-3, TRBJ1-1)
CASRYTGESTEAFF

SEQ ID NO: 676187 - protein, 15 aa, Homo sapiens
  CDR3 for alpha chain variable domain of TCR clone 338094 (TRAV8-2, TRAJ40)
CVVLGTTSGTYKYIF

SEQ ID NO: 676188 - protein, 15 aa, Homo sapiens
  CDR3 for beta chain variable domain of TCR clone 338094 (TRBV25-1, TRBJ1-4)
CASSKRIATNEKLFF

SEQ ID NO: 676189 - protein, 13 aa, Homo sapiens
  CDR3 for alpha chain variable domain of TCR clone 338095 (TRAV17, TRAJ5)
FAPMDTSRRALTF

SEQ ID NO: 676190 - protein, 14 aa, Homo sapiens
  CDR3 for beta chain variable domain of TCR clone 338095 (TRBV7-3, TRBJ2-1)
CASSLAGGTNEQFF

SEQ ID NO: 676191 - protein, 15 aa, Homo sapiens
  CDR3 for alpha chain variable domain of TCR clone 338096 (TRAV8-3, TRAJ40)
CAAPSLGSGTYKYIF

SEQ ID NO: 676192 - protein, 14 aa, Homo sapiens
  CDR3 for beta chain variable domain of TCR clone 338096 (TRBV19, TRBJ2-1)
CASPTFVLSGEQFF

SEQ ID NO: 676193 - protein, 13 aa, Homo sapiens
  CDR3 for alpha chain variable domain of TCR clone 338097 (TRAV12-2, TRAJ52)
CAAHGTSYGKLTF

SEQ ID NO: 676194 - protein, 12 aa, Homo sapiens
  CDR3 for beta chain variable domain of TCR clone 338097 (TRBV12-5, TRBJ2-3)
CASGGAADTQYF

SEQ ID NO: 676195 - protein, 16 aa, Homo sapiens
  CDR3 for alpha chain variable domain of TCR clone 338098 (TRAV16, TRAJ52)
CALSAAGGTSYGKLTF

SEQ ID NO: 676196 - protein, 14 aa, Homo sapiens
  CDR3 for beta chain variable domain of TCR clone 338098 (TRBV13, TRBJ2-5)
CASSLERVGETQYF

SEQ ID NO: 676197 - protein, 14 aa, Homo sapiens
  CDR3 for alpha chain variable domain of TCR clone 338099 (TRAV6, TRAJ17)
CALDLKAAGNKLTF

SEQ ID NO: 676198 - protein, 15 aa, Homo sapiens
  CDR3 for beta chain variable domain of TCR clone 338099 (TRBV6-3, TRBJ2-2)
CASSFLATLTGELFF

SEQ ID NO: 676199 - protein, 14 aa, Homo sapiens
  CDR3 for alpha chain variable domain of TCR clone 338100 (TRAV12-2, TRAJ52)
CAVPGGTSHGKLTF

SEQ ID NO: 676200 - protein, 12 aa, Homo sapiens
  CDR3 for beta chain variable domain of TCR clone 338100 (TRBV18, TRBJ2-1)
CASSPGTSEGFF

SEQ ID NO: 676201 - protein, 13 aa, Homo sapiens
  CDR3 for alpha chain variable domain of TCR clone 338101 (TRAV29/DV5, TRAJ31)
CAASRNNNARLMF

SEQ ID NO: 676202 - protein, 15 aa, Homo sapiens
  CDR3 for beta chain variable domain of TCR clone 338101 (TRBV7-2, TRBJ2-3)
CASSLAGAFIDTQYF

SEQ ID NO: 676203 - protein, 17 aa, Homo sapiens
  CDR3 for alpha chain variable domain of TCR clone 338102 (TRAV12-1, TRAJ13)
CVVNKRWEFWGLPESYL

SEQ ID NO: 676204 - protein, 17 aa, Homo sapiens
  CDR3 for beta chain variable domain of TCR clone 338102 (TRBV28, TRBJ2-5)
CASSTPEGDALQETQYF

SEQ ID NO: 676205 - protein, 16 aa, Homo sapiens
  CDR3 for alpha chain variable domain of TCR clone 338103 (TRAV3, TRAJ21)
CAVRDNERGNFNKFYF

SEQ ID NO: 676206 - protein, 13 aa, Homo sapiens
  CDR3 for beta chain variable domain of TCR clone 338103 (TRBV27, TRBJ2-7)
CASSLTTGYKQYF

SEQ ID NO: 676207 - protein, 13 aa, Homo sapiens
  CDR3 for alpha chain variable domain of TCR clone 338104 (TRAV17, TRAJ34)
CATDLYNTDKLIF

SEQ ID NO: 676208 - protein, 12 aa, Homo sapiens
  CDR3 for beta chain variable domain of TCR clone 338104 (TRBV11-2, TRBJ2-2)
CASSLGGGELFL

SEQ ID NO: 676209 - protein, 21 aa, Homo sapiens
  CDR3 for alpha chain variable domain of TCR clone 338105 (TRAV2, TRAJ13)
GAGGRCCCSLLCFRGYQKVTF

SEQ ID NO: 676210 - protein, 16 aa, Homo sapiens
  CDR3 for beta chain variable domain of TCR clone 338105 (TRBV6-1, TRBJ2-5)
CASSETLDRGAETQYF

SEQ ID NO: 676211 - protein, 14 aa, Homo sapiens
  CDR3 for alpha chain variable domain of TCR clone 338106 (TRAV12-2, TRAJ5)
CAVNRSTGRRALTF

SEQ ID NO: 676212 - protein, 17 aa, Homo sapiens
  CDR3 for beta chain variable domain of TCR clone 338106 (TRBV7-9, TRBJ2-5)
CASSPGLAGGGRETQYF

SEQ ID NO: 676213 - protein, 12 aa, Homo sapiens
  CDR3 for alpha chain variable domain of TCR clone 338107 (TRAV22, TRAJ22)
CAPGGSARQLTF

SEQ ID NO: 676214 - protein, 15 aa, Homo sapiens
  CDR3 for beta chain variable domain of TCR clone 338107 (TRBV9, TRBJ1-6)
CVSSVAGTGDSPLHF

SEQ ID NO: 676215 - protein, 13 aa, Homo sapiens
  CDR3 for alpha chain variable domain of TCR clone 338108 (TRAV12-2, TRAJ20)
CAVNRFDDYKLSF

SEQ ID NO: 676216 - protein, 12 aa, Homo sapiens
  CDR3 for beta chain variable domain of TCR clone 338108 (TRBV28, TRBJ2-3)
CTSSLYRDTQYF

SEQ ID NO: 676217 - protein, 14 aa, Homo sapiens
  CDR3 for alpha chain variable domain of TCR clone 338109 (TRAV17, TRAJ39)
CATDPVRAGNMLTF

SEQ ID NO: 676218 - protein, 18 aa, Homo sapiens
  CDR3 for beta chain variable domain of TCR clone 338109 (TRBV12-4, TRBJ2-2)
CASSVVAGTRGRTGELFF

SEQ ID NO: 676219 - protein, 13 aa, Homo sapiens
  CDR3 for alpha chain variable domain of TCR clone 338110 (TRAV16, TRAJ10)
CAPAREEETNSPL

SEQ ID NO: 676220 - protein, 14 aa, Homo sapiens
  CDR3 for beta chain variable domain of TCR clone 338110 (TRBV19, TRBJ2-1)
CASPTFVLSGEQFF

SEQ ID NO: 676221 - protein, 15 aa, Homo sapiens
  CDR3 for alpha chain variable domain of TCR clone 338111 (TRAV3, TRAJ36)
CAVRDGTGANNLFFD

SEQ ID NO: 676222 - protein, 16 aa, Homo sapiens
  CDR3 for beta chain variable domain of TCR clone 338111 (TRBV20-1, TRBJ2-6)
CSAREGPGVGANVLTF

SEQ ID NO: 676223 - protein, 14 aa, Homo sapiens
  CDR3 for alpha chain variable domain of TCR clone 338112 (TRAV17, TRAJ23)
CATASYHQGGKLIF

SEQ ID NO: 676224 - protein, 16 aa, Homo sapiens
  CDR3 for beta chain variable domain of TCR clone 338112 (TRBV12-4, TRBJ1-5)
CASSRPVGGSNQPQHF

SEQ ID NO: 676225 - protein, 12 aa, Homo sapiens
  CDR3 for alpha chain variable domain of TCR clone 338113 (TRAV21, TRAJ8)
CAVNTGFQKLVF

SEQ ID NO: 676226 - protein, 16 aa, Homo sapiens
  CDR3 for beta chain variable domain of TCR clone 338113 (TRBV6-1, TRBJ2-5)
CASSETLDRGAETQYF

SEQ ID NO: 676227 - protein, 11 aa, Homo sapiens
  CDR3 for alpha chain variable domain of TCR clone 338114 (TRAV13-2, TRAJ31)
CAENMDARLMF

SEQ ID NO: 676228 - protein, 16 aa, Homo sapiens
  CDR3 for beta chain variable domain of TCR clone 338114 (TRBV19, TRBJ2-1)
CASSKAGPSSYNEQFF

SEQ ID NO: 676229 - protein, 12 aa, Homo sapiens
  CDR3 for alpha chain variable domain of TCR clone 338115 (TRAV25, TRAJ16)
WSGNRDGQKLLF

SEQ ID NO: 676230 - protein, 15 aa, Homo sapiens
  CDR3 for beta chain variable domain of TCR clone 338115 (TRBV5-1, TRBJ2-7)
CASSLYPDGGYEQYF

SEQ ID NO: 676231 - protein, 15 aa, Homo sapiens
  CDR3 for alpha chain variable domain of TCR clone 338116 (TRAV20, TRAJ53)
CAVQASGGSNYKLTF

SEQ ID NO: 676232 - protein, 12 aa, Homo sapiens
  CDR3 for beta chain variable domain of TCR clone 338116 (TRBV7-8, TRBJ2-7)
WASSLSDIGQYF

SEQ ID NO: 676233 - protein, 15 aa, Homo sapiens
  CDR3 for alpha chain variable domain of TCR clone 338117 (TRAV3, TRAJ4)
CAVRDGTGGYNKLIF

SEQ ID NO: 676234 - protein, 13 aa, Homo sapiens
  CDR3 for beta chain variable domain of TCR clone 338117 (TRBV20-1, TRBJ2-7)
CSAQTGLSYEQYF

SEQ ID NO: 676235 - protein, 12 aa, Homo sapiens
  CDR3 for alpha chain variable domain of TCR clone 338118 (TRAV12-1, TRAJ34)
CVVAWATDKPIF

SEQ ID NO: 676236 - protein, 12 aa, Homo sapiens
  CDR3 for beta chain variable domain of TCR clone 338118 (TRBV7-9, TRBJ1-1)
CASSLVRGEAFF

SEQ ID NO: 676237 - protein, 16 aa, Homo sapiens
  CDR3 for alpha chain variable domain of TCR clone 338119 (TRAV29/DV5, TRAJ39)
CAASLLSNNAGNMLTF

SEQ ID NO: 676238 - protein, 16 aa, Homo sapiens
  CDR3 for beta chain variable domain of TCR clone 338119 (TRBV19, TRBJ2-6)
CASSMSGLSGANVLTF

SEQ ID NO: 676239 - protein, 12 aa, Homo sapiens
  CDR3 for alpha chain variable domain of TCR clone 338120 (TRAV17, TRAJ57)
CATGPPRADLQS

SEQ ID NO: 676240 - protein, 16 aa, Homo sapiens
  CDR3 for beta chain variable domain of TCR clone 338120 (TRBV12-4, TRBJ1-5)
CASSRPVGGSNQPQHF

SEQ ID NO: 676241 - protein, 15 aa, Homo sapiens
  CDR3 for alpha chain variable domain of TCR clone 338121 (TRAV27, TRAJ50)
CAGVGRGTSYDKVTF

SEQ ID NO: 676242 - protein, 14 aa, Homo sapiens
  CDR3 for beta chain variable domain of TCR clone 338121 (TRBV7-2, TRBJ1-1)
CASSFYDLNTEAFF

SEQ ID NO: 676243 - protein, 17 aa, Homo sapiens
  CDR3 for alpha chain variable domain of TCR clone 338122 (TRAV26-1, TRAJ53)
CIVRVDDSGGSNYKLTF

SEQ ID NO: 676244 - protein, 15 aa, Homo sapiens
  CDR3 for beta chain variable domain of TCR clone 338122 (TRBV20-1, TRBJ2-7)
YSARDRVSGMDEQYF

SEQ ID NO: 676245 - protein, 15 aa, Homo sapiens
  CDR3 for alpha chain variable domain of TCR clone 338123 (TRAV38-1, TRAJ57)
CAFMDSQGGSEKLVF

SEQ ID NO: 676246 - protein, 14 aa, Homo sapiens
  CDR3 for beta chain variable domain of TCR clone 338123 (TRBV11-2, TRBJ2-7)
CASSSTGEGYEQYF

SEQ ID NO: 676247 - protein, 16 aa, Homo sapiens
  CDR3 for alpha chain variable domain of TCR clone 338124 (TRAV23/DV6, TRAJ9)
CAANIGGNTGGFKTIF

SEQ ID NO: 676248 - protein, 17 aa, Homo sapiens
  CDR3 for beta chain variable domain of TCR clone 338124 (TRBV13, TRBJ2-3)
CASSLSRVAGGRNTQYF

SEQ ID NO: 676249 - protein, 14 aa, Homo sapiens
  CDR3 for alpha chain variable domain of TCR clone 338125 (TRAV1-2, TRAJ16)
CAVNRFSDGQKLLF

SEQ ID NO: 676250 - protein, 17 aa, Homo sapiens
  CDR3 for beta chain variable domain of TCR clone 338125 (TRBV20-1, TRBJ2-7)
CSARDRSLGWTSSTSGR

SEQ ID NO: 676251 - protein, 14 aa, Homo sapiens
  CDR3 for alpha chain variable domain of TCR clone 338126 (TRAV1-1, TRAJ27)
CAVIYNTNPGKSTF

SEQ ID NO: 676252 - protein, 13 aa, Homo sapiens
  CDR3 for beta chain variable domain of TCR clone 338126 (TRBV7-9, TRBJ1-2)
CASSLKQNYGYTF

SEQ ID NO: 676253 - protein, 13 aa, Homo sapiens
  CDR3 for alpha chain variable domain of TCR clone 338127 (TRAV20, TRAJ54)
CAVQAGGAQKLVF

SEQ ID NO: 676254 - protein, 15 aa, Homo sapiens
  CDR3 for beta chain variable domain of TCR clone 338127 (TRBV15, TRBJ2-7)
CATSRDRSPRNEQYF

SEQ ID NO: 676255 - protein, 13 aa, Homo sapiens
  CDR3 for alpha chain variable domain of TCR clone 338128 (TRAV2, TRAJ15)
CAVSSQAGTALIF

SEQ ID NO: 676256 - protein, 15 aa, Homo sapiens
  CDR3 for beta chain variable domain of TCR clone 338128 (TRBV20-1, TRBJ2-7)
CSARDRVSGMDEQYF

SEQ ID NO: 676257 - protein, 12 aa, Homo sapiens
  CDR3 for alpha chain variable domain of TCR clone 338129 (TRAV21, TRAJ3)
CCFYSSASKIIF

SEQ ID NO: 676258 - protein, 11 aa, Homo sapiens
  CDR3 for beta chain variable domain of TCR clone 338129 (TRBV19, TRBJ2-1)
CASRRRYEQFF

SEQ ID NO: 676259 - protein, 15 aa, Homo sapiens
  CDR3 for alpha chain variable domain of TCR clone 338130 (TRAV26-1, TRAJ28)
CIVRVAGAGSYQLTF

SEQ ID NO: 676260 - protein, 19 aa, Homo sapiens
  CDR3 for beta chain variable domain of TCR clone 338130 (TRBV7-3, TRBJ2-7)
CASSLTGVAGGWPSYEQYS

SEQ ID NO: 676261 - protein, 17 aa, Homo sapiens
  CDR3 for alpha chain variable domain of TCR clone 338131 (TRAV8-1, TRAJ42)
CAVKWGHYGGSQGNLIF

SEQ ID NO: 676262 - protein, 15 aa, Homo sapiens
  CDR3 for beta chain variable domain of TCR clone 338131 (TRBV9, TRBJ1-6)
CASSVAGTGDSPLHF

SEQ ID NO: 676263 - protein, 12 aa, Homo sapiens
  CDR3 for alpha chain variable domain of TCR clone 338132 (TRAV13-2, TRAJ23)
CAERHRGGKLIF

SEQ ID NO: 676264 - protein, 15 aa, Homo sapiens
  CDR3 for beta chain variable domain of TCR clone 338132 (TRBV19, TRBJ1-2)
CASSVGQVLNYGYAF

SEQ ID NO: 676265 - protein, 17 aa, Homo sapiens
  CDR3 for alpha chain variable domain of TCR clone 338133 (TRAV3, TRAJ6)
CAVRDGPRVGGSYIPKF

SEQ ID NO: 676266 - protein, 12 aa, Homo sapiens
  CDR3 for beta chain variable domain of TCR clone 338133 (TRBV11-2, TRBJ2-2)
CASSLGGGELFF

SEQ ID NO: 676267 - protein, 15 aa, Homo sapiens
  CDR3 for alpha chain variable domain of TCR clone 338134 (TRAV2, TRAJ24)
CAVVRLKNSWGKLQF

SEQ ID NO: 676268 - protein, 15 aa, Homo sapiens
  CDR3 for beta chain variable domain of TCR clone 338134 (TRBV18, TRBJ2-7)
CASSPLQGRTYEQYF

SEQ ID NO: 676269 - protein, 11 aa, Homo sapiens
  CDR3 for alpha chain variable domain of TCR clone 338135 (TRAV12-1, TRAJ30)
CVVNGQVKIIF

SEQ ID NO: 676270 - protein, 15 aa, Homo sapiens
  CDR3 for beta chain variable domain of TCR clone 338135 (TRBV27, TRBJ2-2)
CTSVPANSSPGSCFF

SEQ ID NO: 676271 - protein, 16 aa, Homo sapiens
  CDR3 for alpha chain variable domain of TCR clone 338136 (TRAV12-3, TRAJ53)
CAMSPGRGGGNYKLTF

SEQ ID NO: 676272 - protein, 11 aa, Homo sapiens
  CDR3 for beta chain variable domain of TCR clone 338136 (TRBV29-1, TRBJ2-5)
CSEDRTGTQYF

SEQ ID NO: 676273 - protein, 17 aa, Homo sapiens
  CDR3 for alpha chain variable domain of TCR clone 338137 (TRAV3, TRAJ6)
CAARDGPRAGGSYLPTF

SEQ ID NO: 676274 - protein, 14 aa, Homo sapiens
  CDR3 for beta chain variable domain of TCR clone 338137 (TRBV7-2, TRBJ2-7)
CASSPKTSFYEQYF

SEQ ID NO: 676275 - protein, 14 aa, Homo sapiens
  CDR3 for alpha chain variable domain of TCR clone 338138 (TRAV29/DV5, TRAJ36)
CAARRKIGANNLFF

SEQ ID NO: 676276 - protein, 12 aa, Homo sapiens
  CDR3 for beta chain variable domain of TCR clone 338138 (TRBV12-4, TRBJ1-2)
CASSFIWLHLRF

SEQ ID NO: 676277 - protein, 12 aa, Homo sapiens
  CDR3 for alpha chain variable domain of TCR clone 338139 (TRAV12-3, TRAJ40)
CAMSSGTYKYIF

SEQ ID NO: 676278 - protein, 10 aa, Homo sapiens
  CDR3 for beta chain variable domain of TCR clone 338139 (TRBV7-3, TRBJ2-2)
CASGETGQGT

SEQ ID NO: 676279 - protein, 21 aa, Homo sapiens
  CDR3 for alpha chain variable domain of TCR clone 338140 (TRAV6, TRAJ36)
CARQTTSSLGLERDSPLFPIS

SEQ ID NO: 676280 - protein, 14 aa, Homo sapiens
  CDR3 for beta chain variable domain of TCR clone 338140 (TRBV10-2, TRBJ1-5)
CASSSTGRNQHQHF

SEQ ID NO: 676281 - protein, 12 aa, Homo sapiens
  CDR3 for alpha chain variable domain of TCR clone 338141 (TRAV23/DV6, TRAJ17)
CARGSCRQQANF

SEQ ID NO: 676282 - protein, 15 aa, Homo sapiens
  CDR3 for beta chain variable domain of TCR clone 338141 (TRBV4-2, TRBJ1-1)
CASSQQGAGDTEAFF

SEQ ID NO: 676283 - protein, 16 aa, Homo sapiens
  CDR3 for alpha chain variable domain of TCR clone 338142 (TRAV38-1, TRAJ32)
CAFMKGGGGDTNKLIF

SEQ ID NO: 676284 - protein, 13 aa, Homo sapiens
  CDR3 for beta chain variable domain of TCR clone 338142 (TRBV20-1, TRBJ2-5)
CSAREAFQETQYF

SEQ ID NO: 676285 - protein, 13 aa, Homo sapiens
  CDR3 for alpha chain variable domain of TCR clone 338143 (TRAV3, TRAJ21)
CAVREPDFNKFYF

SEQ ID NO: 676286 - protein, 15 aa, Homo sapiens
  CDR3 for beta chain variable domain of TCR clone 338143 (TRBV9, TRBJ1-6)
CASSVAGTGDSTLHF

SEQ ID NO: 676287 - protein, 14 aa, Homo sapiens
  CDR3 for alpha chain variable domain of TCR clone 338144 (TRAV1-2, TRAJ8)
CAVREGTGFQKLVF

SEQ ID NO: 676288 - protein, 14 aa, Homo sapiens
  CDR3 for beta chain variable domain of TCR clone 338144 (TRBV7-6, TRBJ2-3)
CASSLGTVTDTQYF

SEQ ID NO: 676289 - protein, 14 aa, Homo sapiens
  CDR3 for alpha chain variable domain of TCR clone 338145 (TRAV1-2, TRAJ16)
CAVNRFSDGQKLLF

SEQ ID NO: 676290 - protein, 16 aa, Homo sapiens
  CDR3 for beta chain variable domain of TCR clone 338145 (TRBV28, TRBJ2-7)
CASSPWVATGDLSQYF

SEQ ID NO: 676291 - protein, 11 aa, Homo sapiens
  CDR3 for alpha chain variable domain of TCR clone 338146 (TRAV12-2, TRAJ47)
CLAEYGNKLVF

SEQ ID NO: 676292 - protein, 14 aa, Homo sapiens
  CDR3 for beta chain variable domain of TCR clone 338146 (TRBV20-1, TRBJ1-1)
CSAMGGTANTEAFF

SEQ ID NO: 676293 - protein, 14 aa, Homo sapiens
  CDR3 for alpha chain variable domain of TCR clone 338147 (TRAV26-1, TRAJ38)
CIADNAGNNRKLMW

SEQ ID NO: 676294 - protein, 13 aa, Homo sapiens
  CDR3 for beta chain variable domain of TCR clone 338147 (TRBV19, TRBJ1-2)
CASSVPGQDGYTF

SEQ ID NO: 676295 - protein, 14 aa, Homo sapiens
  CDR3 for alpha chain variable domain of TCR clone 338148 (TRAV1-1, TRAJ27)
CAVIYNTNAGKSTF

SEQ ID NO: 676296 - protein, 14 aa, Homo sapiens
  CDR3 for beta chain variable domain of TCR clone 338148 (TRBV6-3, TRBJ2-7)
CSSSPGTVFYEQYF

SEQ ID NO: 676297 - protein, 10 aa, Homo sapiens
  CDR3 for alpha chain variable domain of TCR clone 338149 (TRAV12-3, )
CAMIPDRLLS

SEQ ID NO: 676298 - protein, 15 aa, Homo sapiens
  CDR3 for beta chain variable domain of TCR clone 338149 (TRBV5-1, TRBJ2-4)
CASSLGGGGSYIQYF

SEQ ID NO: 676299 - protein, 15 aa, Homo sapiens
  CDR3 for alpha chain variable domain of TCR clone 338150 (TRAV4, TRAJ10)
CLVGDGSGGGNKLTF

SEQ ID NO: 676300 - protein, 15 aa, Homo sapiens
  CDR3 for beta chain variable domain of TCR clone 338150 (TRBV27, TRBJ2-3)
CASSSLAGVIDTHYF

SEQ ID NO: 676301 - protein, 12 aa, Homo sapiens
  CDR3 for alpha chain variable domain of TCR clone 338151 (TRAV12-3, TRAJ17)
CAMTLTGNKLTF

SEQ ID NO: 676302 - protein, 13 aa, Homo sapiens
  CDR3 for beta chain variable domain of TCR clone 338151 (TRBV9, TRBJ2-2)
CASSARPAGELFF

SEQ ID NO: 676303 - protein, 13 aa, Homo sapiens
  CDR3 for alpha chain variable domain of TCR clone 338152 (TRAV36/DV7, TRAJ49)
CAGDSYTGNQFYF

SEQ ID NO: 676304 - protein, 12 aa, Homo sapiens
  CDR3 for beta chain variable domain of TCR clone 338152 (TRBV11-2, TRBJ2-2)
CASSLGGGELFF

SEQ ID NO: 676305 - protein, 12 aa, Homo sapiens
  CDR3 for alpha chain variable domain of TCR clone 338153 (TRAV12-3, TRAJ17)
CAMTLTGNKLTF

SEQ ID NO: 676306 - protein, 13 aa, Homo sapiens
  CDR3 for beta chain variable domain of TCR clone 338153 (TRBV12-4, TRBJ1-2)
CASSSGPNYGYTF

SEQ ID NO: 676307 - protein, 12 aa, Homo sapiens
  CDR3 for alpha chain variable domain of TCR clone 338154 (TRAV12-3, TRAJ17)
CAMTLTVNKLTF

SEQ ID NO: 676308 - protein, 15 aa, Homo sapiens
  CDR3 for beta chain variable domain of TCR clone 338154 (TRBV11-2, TRBJ2-2)
CASSSDRVNAGELFF

SEQ ID NO: 676309 - protein, 14 aa, Homo sapiens
  CDR3 for alpha chain variable domain of TCR clone 338155 (TRAV8-4, TRAJ9)
CAVRINTGGFKTIF

SEQ ID NO: 676310 - protein, 15 aa, Homo sapiens
  CDR3 for beta chain variable domain of TCR clone 338155 (TRBV10-2, TRBJ2-6)
CASSEQGTGAIVLTF

SEQ ID NO: 676311 - protein, 14 aa, Homo sapiens
  CDR3 for alpha chain variable domain of TCR clone 338156 (TRAV2, TRAJ11)
CAVVPNSGYSTLTF

SEQ ID NO: 676312 - protein, 15 aa, Homo sapiens
  CDR3 for beta chain variable domain of TCR clone 338156 (TRBV6-3, TRBJ2-7)
CASSSPGTVFYEQYF

SEQ ID NO: 676313 - protein, 14 aa, Homo sapiens
  CDR3 for alpha chain variable domain of TCR clone 338157 (TRAV1-2, TRAJ16)
CAVSRFSDGQKLLC

SEQ ID NO: 676314 - protein, 14 aa, Homo sapiens
  CDR3 for beta chain variable domain of TCR clone 338157 (TRBV4-1, TRBJ2-2)
CASSQAVNTGELFF

SEQ ID NO: 676315 - protein, 15 aa, Homo sapiens
  CDR3 for alpha chain variable domain of TCR clone 338158 (TRAV3, TRAJ22)
CAVRDRGGSARQLTF

SEQ ID NO: 676316 - protein, 15 aa, Homo sapiens
  CDR3 for beta chain variable domain of TCR clone 338158 (TRBV7-3, TRBJ2-2)
CVSSETGQGTGELFF

SEQ ID NO: 676317 - protein, 13 aa, Homo sapiens
  CDR3 for alpha chain variable domain of TCR clone 338159 (TRAV20, TRAJ31)
CAVLAWNNARLMF

SEQ ID NO: 676318 - protein, 13 aa, Homo sapiens
  CDR3 for beta chain variable domain of TCR clone 338159 (TRBV12-4, TRBJ1-2)
CASSLRQGKGYTF

SEQ ID NO: 676319 - protein, 14 aa, Homo sapiens
  CDR3 for alpha chain variable domain of TCR clone 338160 (TRAV26-1, TRAJ38)
CIANNAGNNRKLIW

SEQ ID NO: 676320 - protein, 11 aa, Homo sapiens
  CDR3 for beta chain variable domain of TCR clone 338160 (TRBV2, TRBJ1-1)
CASREGTEAFF

SEQ ID NO: 676321 - protein, 15 aa, Homo sapiens
  CDR3 for alpha chain variable domain of TCR clone 338161 (TRAV12-2, TRAJ57)
CAVSRGQGGSEKLVF

SEQ ID NO: 676322 - protein, 14 aa, Homo sapiens
  CDR3 for beta chain variable domain of TCR clone 338161 (TRBV7-3, TRBJ2-3)
CASSSTGVADTQYF

SEQ ID NO: 676323 - protein, 15 aa, Homo sapiens
  CDR3 for alpha chain variable domain of TCR clone 338162 (TRAV21, TRAJ24)
CAARSSTDSWGKLQF

SEQ ID NO: 676324 - protein, 15 aa, Homo sapiens
  CDR3 for beta chain variable domain of TCR clone 338162 (TRBV27, TRBJ2-3)
CSSSSLAGVIDTQYF

SEQ ID NO: 676325 - protein, 14 aa, Homo sapiens
  CDR3 for alpha chain variable domain of TCR clone 338163 (TRAV12-3, TRAJ9)
CAMSPNTGGFKTIF

SEQ ID NO: 676326 - protein, 13 aa, Homo sapiens
  CDR3 for beta chain variable domain of TCR clone 338163 (TRBV19, TRBJ2-7)
CASRKAGGSEQYF

SEQ ID NO: 676327 - protein, 13 aa, Homo sapiens
  CDR3 for alpha chain variable domain of TCR clone 338164 (TRAV13-2, TRAJ16)
CADARTDGQKLLF

SEQ ID NO: 676328 - protein, 19 aa, Homo sapiens
  CDR3 for beta chain variable domain of TCR clone 338164 (TRBV5-5, TRBJ2-5)
CASSIGGGWGDPVLRARHE

SEQ ID NO: 676329 - protein, 12 aa, Homo sapiens
  CDR3 for alpha chain variable domain of TCR clone 338165 (TRAV2, TRAJ9)
CAVGAGGFKTIF

SEQ ID NO: 676330 - protein, 15 aa, Homo sapiens
  CDR3 for beta chain variable domain of TCR clone 338165 (TRBV2, TRBJ2-3)
CASSERSGHTDTQYF

SEQ ID NO: 676331 - protein, 14 aa, Homo sapiens
  CDR3 for alpha chain variable domain of TCR clone 338166 (TRAV1-2, TRAJ33)
CTVRAPDSNYQLIW

SEQ ID NO: 676332 - protein, 12 aa, Homo sapiens
  CDR3 for beta chain variable domain of TCR clone 338166 (TRBV7-9, TRBJ1-2)
CASSPRGNGYTF

SEQ ID NO: 676333 - protein, 13 aa, Homo sapiens
  CDR3 for alpha chain variable domain of TCR clone 338167 (TRAV3, TRAJ21)
CAVREPDFNKFYF

SEQ ID NO: 676334 - protein, 13 aa, Homo sapiens
  CDR3 for beta chain variable domain of TCR clone 338167 (TRBV7-2, TRBJ1-3)
CASSVDRGNTIYF

SEQ ID NO: 676335 - protein, 18 aa, Homo sapiens
  CDR3 for alpha chain variable domain of TCR clone 338168 (TRAV26-1, TRAJ23)
CIVRVGLVVWNQGGKLIL

SEQ ID NO: 676336 - protein, 16 aa, Homo sapiens
  CDR3 for beta chain variable domain of TCR clone 338168 (TRBV12-4, TRBJ2-5)
CASSFFVRGRQETQYF

SEQ ID NO: 676337 - protein, 16 aa, Homo sapiens
  CDR3 for alpha chain variable domain of TCR clone 338169 (TRAV1-2, TRAJ10)
CAVRGVLTGGGNKLTF

SEQ ID NO: 676338 - protein, 14 aa, Homo sapiens
  CDR3 for beta chain variable domain of TCR clone 338169 (TRBV29-1, TRBJ2-2)
CSVLAETNTGELFF

SEQ ID NO: 676339 - protein, 12 aa, Homo sapiens
  CDR3 for alpha chain variable domain of TCR clone 338170 (TRAV8-3, TRAJ20)
CAVDFNDYKLSF

SEQ ID NO: 676340 - protein, 12 aa, Homo sapiens
  CDR3 for beta chain variable domain of TCR clone 338170 (TRBV29-1, TRBJ2-3)
CSVTGGADTQYV

SEQ ID NO: 676341 - protein, 14 aa, Homo sapiens
  CDR3 for alpha chain variable domain of TCR clone 338171 (TRAV12-2, TRAJ45)
CALPERRGADGLTF

SEQ ID NO: 676342 - protein, 14 aa, Homo sapiens
  CDR3 for beta chain variable domain of TCR clone 338171 (TRBV18, TRBJ1-5)
CASSPGNSNQPQHF

SEQ ID NO: 676343 - protein, 12 aa, Homo sapiens
  CDR3 for alpha chain variable domain of TCR clone 338172 (TRAV8-1, TRAJ6)
CASSGGSYIPTF

SEQ ID NO: 676344 - protein, 12 aa, Homo sapiens
  CDR3 for beta chain variable domain of TCR clone 338172 (TRBV19, TRBJ1-1)
CASMNRYTEAFY

SEQ ID NO: 676345 - protein, 15 aa, Homo sapiens
  CDR3 for alpha chain variable domain of TCR clone 338173 (TRAV1-2, TRAJ28)
CDVQYSGAGSYQLTF

SEQ ID NO: 676346 - protein, 13 aa, Homo sapiens
  CDR3 for beta chain variable domain of TCR clone 338173 (TRBV20-1, TRBJ2-7)
CSATHTSGYEQYF

SEQ ID NO: 676347 - protein, 10 aa, Homo sapiens
  CDR3 for alpha chain variable domain of TCR clone 338174 (TRAV23/DV6, TRAJ43)
CAAAVAALEQ

SEQ ID NO: 676348 - protein, 16 aa, Homo sapiens
  CDR3 for beta chain variable domain of TCR clone 338174 (TRBV18, TRBJ1-4)
CASSPLVGDRAEKLFF

SEQ ID NO: 676349 - protein, 14 aa, Homo sapiens
  CDR3 for alpha chain variable domain of TCR clone 338175 (TRAV12-1, TRAJ12)
CVVFWMDSSYKLIF

SEQ ID NO: 676350 - protein, 11 aa, Homo sapiens
  CDR3 for beta chain variable domain of TCR clone 338175 (TRBV28, TRBJ1-5)
CASRGGQPQHF

SEQ ID NO: 676351 - protein, 14 aa, Homo sapiens
  CDR3 for alpha chain variable domain of TCR clone 338176 (TRAV25, TRAJ27)
CAGEHLTNAGKPTF

SEQ ID NO: 676352 - protein, 15 aa, Homo sapiens
  CDR3 for beta chain variable domain of TCR clone 338176 (TRBV15, TRBJ1-1)
CATSLQGGRNTEAFF

SEQ ID NO: 676353 - protein, 14 aa, Homo sapiens
  CDR3 for alpha chain variable domain of TCR clone 338177 (TRAV21, TRAJ37)
CAVKGSSNTGKLIF

SEQ ID NO: 676354 - protein, 14 aa, Homo sapiens
  CDR3 for beta chain variable domain of TCR clone 338177 (TRBV7-2, TRBJ2-1)
CASSRGGERNEQFF

SEQ ID NO: 676355 - protein, 12 aa, Homo sapiens
  CDR3 for alpha chain variable domain of TCR clone 338178 (TRAV35, TRAJ49)
CAGWNTGNQFYF

SEQ ID NO: 676356 - protein, 16 aa, Homo sapiens
  CDR3 for beta chain variable domain of TCR clone 338178 (TRBV5-1, TRBJ2-2)
FAPAASDTTNTGELFF

SEQ ID NO: 676357 - protein, 12 aa, Homo sapiens
  CDR3 for alpha chain variable domain of TCR clone 338179 (TRAV12-3, TRAJ17)
CAMTLTGNKLTF

SEQ ID NO: 676358 - protein, 15 aa, Homo sapiens
  CDR3 for beta chain variable domain of TCR clone 338179 (TRBV20-1, TRBJ2-7)
CSARDRVSGRDEQFF

SEQ ID NO: 676359 - protein, 10 aa, Homo sapiens
  CDR3 for alpha chain variable domain of TCR clone 338180 (TRAV13-1, TRAJ8)
CAAPFQKLVF

SEQ ID NO: 676360 - protein, 20 aa, Homo sapiens
  CDR3 for beta chain variable domain of TCR clone 338180 (TRBV3-1, TRBJ2-6)
CANSPRPGLEGGAGANVLTF

SEQ ID NO: 676361 - protein, 16 aa, Homo sapiens
  CDR3 for alpha chain variable domain of TCR clone 338181 (TRAV12-3, TRAJ53)
CAMSPGSGGSNYKLTF

SEQ ID NO: 676362 - protein, 15 aa, Homo sapiens
  CDR3 for beta chain variable domain of TCR clone 338181 (TRBV12-4, TRBJ2-1)
CASSLRDAAYNEQFF

SEQ ID NO: 676363 - protein, 14 aa, Homo sapiens
  CDR3 for alpha chain variable domain of TCR clone 338182 (TRAV13-1, TRAJ35)
CAASKGGFGNVLHC

SEQ ID NO: 676364 - protein, 12 aa, Homo sapiens
  CDR3 for beta chain variable domain of TCR clone 338182 (TRBV7-8, TRBJ2-3)
CASSLYRDTQYF

SEQ ID NO: 676365 - protein, 15 aa, Homo sapiens
  CDR3 for alpha chain variable domain of TCR clone 338183 (TRAV3, TRAJ5)
FAVRDRKTGRRALTF

SEQ ID NO: 676366 - protein, 16 aa, Homo sapiens
  CDR3 for beta chain variable domain of TCR clone 338183 (TRBV5-4, TRBJ2-3)
CASQQPGAGGADTQYF

SEQ ID NO: 676367 - protein, 18 aa, Homo sapiens
  CDR3 for alpha chain variable domain of TCR clone 338184 (TRAV17, TRAJ45)
CATSLDLYSGGGADGLPF

SEQ ID NO: 676368 - protein, 15 aa, Homo sapiens
  CDR3 for beta chain variable domain of TCR clone 338184 (TRBV11-2, TRBJ2-1)
CSSSKNRGLIYEQFF

SEQ ID NO: 676369 - protein, 14 aa, Homo sapiens
  CDR3 for alpha chain variable domain of TCR clone 338185 (TRAV13-1, TRAJ35)
CAASKGGFGNVLHC

SEQ ID NO: 676370 - protein, 14 aa, Homo sapiens
  CDR3 for beta chain variable domain of TCR clone 338185 (TRBV19, TRBJ2-1)
CASKDPSSYNEQFF

SEQ ID NO: 676371 - protein, 18 aa, Homo sapiens
  CDR3 for alpha chain variable domain of TCR clone 338186 (TRAV12-2, )
CAVEDIQNPDPAVYQLRD

SEQ ID NO: 676372 - protein, 15 aa, Homo sapiens
  CDR3 for beta chain variable domain of TCR clone 338186 (TRBV20-1, TRBJ2-7)
CSARDRVSGMDEQYF

SEQ ID NO: 676373 - protein, 13 aa, Homo sapiens
  CDR3 for alpha chain variable domain of TCR clone 338187 (TRAV21, TRAJ20)
CAVGLRVDYKLSF

SEQ ID NO: 676374 - protein, 12 aa, Homo sapiens
  CDR3 for beta chain variable domain of TCR clone 338187 (TRBV11-2, TRBJ2-2)
CASSPGGGELFF

SEQ ID NO: 676375 - protein, 16 aa, Homo sapiens
  CDR3 for alpha chain variable domain of TCR clone 338188 (TRAV26-1, TRAJ53)
CIVRVAMGGSNYKLTF

SEQ ID NO: 676376 - protein, 12 aa, Homo sapiens
  CDR3 for beta chain variable domain of TCR clone 338188 (TRBV5-7, TRBJ1-1)
CASSLGRGKAFF

SEQ ID NO: 676377 - protein, 18 aa, Homo sapiens
  CDR3 for alpha chain variable domain of TCR clone 338189 (TRAV21, TRAJ52)
CAVRPSPAGGTSYGKLTF

SEQ ID NO: 676378 - protein, 13 aa, Homo sapiens
  CDR3 for beta chain variable domain of TCR clone 338189 (TRBV15, TRBJ2-7)
CATSTTGHYEQYF

SEQ ID NO: 676379 - protein, 12 aa, Homo sapiens
  CDR3 for alpha chain variable domain of TCR clone 338190 (TRAV29/DV5, TRAJ49)
CAASAISNQFYF

SEQ ID NO: 676380 - protein, 14 aa, Homo sapiens
  CDR3 for beta chain variable domain of TCR clone 338190 (TRBV7-2, TRBJ1-2)
CASSHTGSTYGYTF

SEQ ID NO: 676381 - protein, 10 aa, Homo sapiens
  CDR3 for alpha chain variable domain of TCR clone 338191 (TRAV21, TRAJ34)
CAADTDKPIF

SEQ ID NO: 676382 - protein, 14 aa, Homo sapiens
  CDR3 for beta chain variable domain of TCR clone 338191 (TRBV5-4, TRBJ1-2)
CASSSSGSYVGYTF

SEQ ID NO: 676383 - protein, 13 aa, Homo sapiens
  CDR3 for alpha chain variable domain of TCR clone 338192 (TRAV38-2/DV8, TRAJ34)
CAYRTRNTDKLIF

SEQ ID NO: 676384 - protein, 14 aa, Homo sapiens
  CDR3 for beta chain variable domain of TCR clone 338192 (TRBV7-2, TRBJ1-5)
CASSTQGAGQPQHF

SEQ ID NO: 676385 - protein, 17 aa, Homo sapiens
  CDR3 for alpha chain variable domain of TCR clone 338193 (TRAV8-6, TRAJ58)
CAASSWVGETSGSRLTF

SEQ ID NO: 676386 - protein, 17 aa, Homo sapiens
  CDR3 for beta chain variable domain of TCR clone 338193 (TRBV4-3, TRBJ1-2)
CASSSRLQAGGSVGYTF

SEQ ID NO: 676387 - protein, 14 aa, Homo sapiens
  CDR3 for alpha chain variable domain of TCR clone 338194 (TRAV1-2, TRAJ24)
FAVLTTDSWGKFQF

SEQ ID NO: 676388 - protein, 13 aa, Homo sapiens
  CDR3 for beta chain variable domain of TCR clone 338194 (TRBV6-5, TRBJ1-2)
CASSSYGTLGYTF

SEQ ID NO: 676389 - protein, 14 aa, Homo sapiens
  CDR3 for alpha chain variable domain of TCR clone 338195 (TRAV12-1, TRAJ8)
CVVNSNTGFEKLVF

SEQ ID NO: 676390 - protein, 16 aa, Homo sapiens
  CDR3 for beta chain variable domain of TCR clone 338195 (TRBV20-1, TRBJ2-2)
CSARDDRVGLTGELFF

SEQ ID NO: 676391 - protein, 12 aa, Homo sapiens
  CDR3 for alpha chain variable domain of TCR clone 338196 (TRAV13-1, TRAJ27)
CAAHTNAGKSAF

SEQ ID NO: 676392 - protein, 15 aa, Homo sapiens
  CDR3 for beta chain variable domain of TCR clone 338196 (TRBV7-9, TRBJ1-6)
CASSSPGRGNSPLHF

SEQ ID NO: 676393 - protein, 17 aa, Homo sapiens
  CDR3 for alpha chain variable domain of TCR clone 338197 (TRAV26-1, TRAJ53)
CIVRVDDSGGSKDKLTF

SEQ ID NO: 676394 - protein, 15 aa, Homo sapiens
  CDR3 for beta chain variable domain of TCR clone 338197 (TRBV20-1, TRBJ2-7)
CSARVPAAYFYEQYF

SEQ ID NO: 676395 - protein, 19 aa, Homo sapiens
  CDR3 for alpha chain variable domain of TCR clone 338198 (TRAV26-1, TRAJ52)
CIVRAHRNAGGTSYGKLTF

SEQ ID NO: 676396 - protein, 15 aa, Homo sapiens
  CDR3 for beta chain variable domain of TCR clone 338198 (TRBV12-4, TRBJ2-5)
CASSPPTGLQEQQYF

SEQ ID NO: 676397 - protein, 12 aa, Homo sapiens
  CDR3 for alpha chain variable domain of TCR clone 338199 (TRAV21, TRAJ40)
CAVRPGTYKYIF

SEQ ID NO: 676398 - protein, 14 aa, Homo sapiens
  CDR3 for beta chain variable domain of TCR clone 338199 (TRBV28, TRBJ2-7)
CASSFRGAGYEQYF

SEQ ID NO: 676399 - protein, 12 aa, Homo sapiens
  CDR3 for alpha chain variable domain of TCR clone 338200 (TRAV12-1, TRAJ40)
CVFYSGTYKYIF

SEQ ID NO: 676400 - protein, 17 aa, Homo sapiens
  CDR3 for beta chain variable domain of TCR clone 338200 (TRBV7-9, TRBJ2-3)
CASSPTVAGDLTDTQYF

SEQ ID NO: 676401 - protein, 12 aa, Homo sapiens
  CDR3 for alpha chain variable domain of TCR clone 338201 (TRAV12-1, TRAJ40)
CAVYSGTYNYIF

SEQ ID NO: 676402 - protein, 15 aa, Homo sapiens
  CDR3 for beta chain variable domain of TCR clone 338201 (TRBV7-9, TRBJ1-6)
CASSSPGRGNSPLHF

SEQ ID NO: 676403 - protein, 14 aa, Homo sapiens
  CDR3 for alpha chain variable domain of TCR clone 338202 (TRAV8-1, TRAJ39)
CAVNASNAGNMLTF

SEQ ID NO: 676404 - protein, 14 aa, Homo sapiens
  CDR3 for beta chain variable domain of TCR clone 338202 (TRBV19, TRBJ2-2)
CASSTLHRSGELFF

SEQ ID NO: 676405 - protein, 16 aa, Homo sapiens
  CDR3 for alpha chain variable domain of TCR clone 338203 (TRAV3, TRAJ3)
CAVRDRVKSSASKIIF

SEQ ID NO: 676406 - protein, 16 aa, Homo sapiens
  CDR3 for beta chain variable domain of TCR clone 338203 (TRBV20-1, TRBJ2-4)
CSATSLAELAKNRQYF

SEQ ID NO: 676407 - protein, 13 aa, Homo sapiens
  CDR3 for alpha chain variable domain of TCR clone 338204 (TRAV35, TRAJ42)
CAGFPGSQGNLIV

SEQ ID NO: 676408 - protein, 13 aa, Homo sapiens
  CDR3 for beta chain variable domain of TCR clone 338204 (TRBV7-8, TRBJ2-3)
CASSLRGPDTQYF

SEQ ID NO: 676409 - protein, 12 aa, Homo sapiens
  CDR3 for alpha chain variable domain of TCR clone 338205 (TRAV4, TRAJ26)
CLVGDYGQNFVF

SEQ ID NO: 676410 - protein, 12 aa, Homo sapiens
  CDR3 for beta chain variable domain of TCR clone 338205 (TRBV7-8, TRBJ2-7)
CASSLGDREQYF

SEQ ID NO: 676411 - protein, 15 aa, Homo sapiens
  CDR3 for alpha chain variable domain of TCR clone 338206 (TRAV9-2, TRAJ56)
CALSDVDGANSKLTF

SEQ ID NO: 676412 - protein, 14 aa, Homo sapiens
  CDR3 for beta chain variable domain of TCR clone 338206 (TRBV7-3, TRBJ2-1)
CASSLAGGTNEQFF

SEQ ID NO: 676413 - protein, 15 aa, Homo sapiens
  CDR3 for alpha chain variable domain of TCR clone 338207 (TRAV29/DV5, TRAJ42)
CAAKTDGGSQGNLIF

SEQ ID NO: 676414 - protein, 15 aa, Homo sapiens
  CDR3 for beta chain variable domain of TCR clone 338207 (TRBV7-3, TRBJ2-1)
CASSQRGGALIEQFF

SEQ ID NO: 676415 - protein, 13 aa, Homo sapiens
  CDR3 for alpha chain variable domain of TCR clone 338208 (TRAV12-2, TRAJ50)
CAVIVTSYDKVIF

SEQ ID NO: 676416 - protein, 17 aa, Homo sapiens
  CDR3 for beta chain variable domain of TCR clone 338208 (TRBV3-1, TRBJ2-7)
CASSQAWGRDYSYEQYF

SEQ ID NO: 676417 - protein, 14 aa, Homo sapiens
  CDR3 for alpha chain variable domain of TCR clone 338209 (TRAV17, TRAJ22)
LATAISGSARQLTL

SEQ ID NO: 676418 - protein, 13 aa, Homo sapiens
  CDR3 for beta chain variable domain of TCR clone 338209 (TRBV6-3, TRBJ1-2)
CASSLDRSSGYTF

SEQ ID NO: 676419 - protein, 12 aa, Homo sapiens
  CDR3 for alpha chain variable domain of TCR clone 338210 (TRAV12-3, TRAJ17)
CAMTLTGNKLTF

SEQ ID NO: 676420 - protein, 14 aa, Homo sapiens
  CDR3 for beta chain variable domain of TCR clone 338210 (TRBV20-1, TRBJ2-7)
CSARDRVAGMEQYF

SEQ ID NO: 676421 - protein, 12 aa, Homo sapiens
  CDR3 for alpha chain variable domain of TCR clone 338211 (TRAV29/DV5, TRAJ34)
CAARHNTGKLIF

SEQ ID NO: 676422 - protein, 15 aa, Homo sapiens
  CDR3 for beta chain variable domain of TCR clone 338211 (TRBV19, TRBJ2-7)
CASSPAGSGEALRYF

SEQ ID NO: 676423 - protein, 14 aa, Homo sapiens
  CDR3 for alpha chain variable domain of TCR clone 338212 (TRAV16, TRAJ15)
CALSFNQAGTALIF

SEQ ID NO: 676424 - protein, 12 aa, Homo sapiens
  CDR3 for beta chain variable domain of TCR clone 338212 (TRBV7-9, TRBJ1-1)
CASSLVRGEAFF

SEQ ID NO: 676425 - protein, 12 aa, Homo sapiens
  CDR3 for alpha chain variable domain of TCR clone 338213 (TRAV25, TRAJ11)
CAGYSGYSSLTF

SEQ ID NO: 676426 - protein, 13 aa, Homo sapiens
  CDR3 for beta chain variable domain of TCR clone 338213 (TRBV7-9, TRBJ1-2)
CASSLKQNYGYTF

SEQ ID NO: 676427 - protein, 12 aa, Homo sapiens
  CDR3 for alpha chain variable domain of TCR clone 338214 (TRAV12-1, TRAJ40)
CVVYSGTYKYIF

SEQ ID NO: 676428 - protein, 12 aa, Homo sapiens
  CDR3 for beta chain variable domain of TCR clone 338214 (TRBV12-4, TRBJ2-1)
CASSPGRNEQFF

SEQ ID NO: 676429 - protein, 16 aa, Homo sapiens
  CDR3 for alpha chain variable domain of TCR clone 338215 (TRAV8-3, TRAJ8)
CAVPRDGNTGFQKLVF

SEQ ID NO: 676430 - protein, 15 aa, Homo sapiens
  CDR3 for beta chain variable domain of TCR clone 338215 (TRBV5-8, TRBJ1-5)
CASSLVRTGNQPQHF

SEQ ID NO: 676431 - protein, 13 aa, Homo sapiens
  CDR3 for alpha chain variable domain of TCR clone 338216 (TRAV23/DV6, TRAJ27)
CAASKPMQANPPL

SEQ ID NO: 676432 - protein, 12 aa, Homo sapiens
  CDR3 for beta chain variable domain of TCR clone 338216 (TRBV12-4, TRBJ2-7)
CASSLGGYEQYF

SEQ ID NO: 676433 - protein, 16 aa, Homo sapiens
  CDR3 for alpha chain variable domain of TCR clone 338217 (TRAV3, TRAJ21)
CAVRDIERGNFNKFYF

SEQ ID NO: 676434 - protein, 14 aa, Homo sapiens
  CDR3 for beta chain variable domain of TCR clone 338217 (TRBV7-2, TRBJ2-7)
CASSGLAGRGEQYF

SEQ ID NO: 676435 - protein, 13 aa, Homo sapiens
  CDR3 for alpha chain variable domain of TCR clone 338218 (TRAV26-1, TRAJ48)
CIVRVVGDEKLTF

SEQ ID NO: 676436 - protein, 18 aa, Homo sapiens
  CDR3 for beta chain variable domain of TCR clone 338218 (TRBV4-3, TRBJ1-6)
CASSHETPASSYNSPLLF

SEQ ID NO: 676437 - protein, 13 aa, Homo sapiens
  CDR3 for alpha chain variable domain of TCR clone 338219 (TRAV3, TRAJ21)
CAVREPDSNKFYF

SEQ ID NO: 676438 - protein, 15 aa, Homo sapiens
  CDR3 for beta chain variable domain of TCR clone 338219 (TRBV19, TRBJ1-2)
CASSVGQVLNCGYTF

SEQ ID NO: 676439 - protein, 15 aa, Homo sapiens
  CDR3 for alpha chain variable domain of TCR clone 338220 (TRAV3, TRAJ4)
CAVRDGTGGYNKLIF

SEQ ID NO: 676440 - protein, 14 aa, Homo sapiens
  CDR3 for beta chain variable domain of TCR clone 338220 (TRBV7-8, TRBJ2-3)
CASSLEAGTDTQYF

SEQ ID NO: 676441 - protein, 19 aa, Homo sapiens
  CDR3 for alpha chain variable domain of TCR clone 338221 (TRAV17, TRAJ40)
TASRAADTASYFCASKYIF

SEQ ID NO: 676442 - protein, 15 aa, Homo sapiens
  CDR3 for beta chain variable domain of TCR clone 338221 (TRBV7-9, TRBJ1-2)
CASSLDREPNYGYTF

SEQ ID NO: 676443 - protein, 16 aa, Homo sapiens
  CDR3 for alpha chain variable domain of TCR clone 338222 (TRAV30, TRAJ24)
CGTEVVDADSWGKFQV

SEQ ID NO: 676444 - protein, 14 aa, Homo sapiens
  CDR3 for beta chain variable domain of TCR clone 338222 (TRBV12-5, TRBJ2-5)
CASGSRTHQETQYL

SEQ ID NO: 676445 - protein, 13 aa, Homo sapiens
  CDR3 for alpha chain variable domain of TCR clone 338223 (TRAV27, TRAJ53)
CAGQGGSNYKLTF

SEQ ID NO: 676446 - protein, 13 aa, Homo sapiens
  CDR3 for beta chain variable domain of TCR clone 338223 (TRBV29-1, TRBJ1-1)
CSLESGFGTEAFF

SEQ ID NO: 676447 - protein, 13 aa, Homo sapiens
  CDR3 for alpha chain variable domain of TCR clone 338224 (TRAV12-3, TRAJ43)
CAMIRPNNSDMRF

SEQ ID NO: 676448 - protein, 12 aa, Homo sapiens
  CDR3 for beta chain variable domain of TCR clone 338224 (TRBV11-2, TRBJ2-5)
CASSLGQETQYL

SEQ ID NO: 676449 - protein, 15 aa, Homo sapiens
  CDR3 for alpha chain variable domain of TCR clone 338225 (TRAV21, TRAJ10)
CSVPLLTGGGNKLTF

SEQ ID NO: 676450 - protein, 14 aa, Homo sapiens
  CDR3 for beta chain variable domain of TCR clone 338225 (TRBV12-4, TRBJ1-1)
CASSLGTGGTEAFF

SEQ ID NO: 676451 - protein, 15 aa, Homo sapiens
  CDR3 for alpha chain variable domain of TCR clone 338226 (TRAV20, TRAJ50)
CAVRQMKTSSDKVIF

SEQ ID NO: 676452 - protein, 15 aa, Homo sapiens
  CDR3 for beta chain variable domain of TCR clone 338226 (TRBV9, TRBJ2-1)
CASSLAGSSYNEQFF

SEQ ID NO: 676453 - protein, 14 aa, Homo sapiens
  CDR3 for alpha chain variable domain of TCR clone 338227 (TRAV8-4, TRAJ9)
CAVRINTGGFKTIF

SEQ ID NO: 676454 - protein, 14 aa, Homo sapiens
  CDR3 for beta chain variable domain of TCR clone 338227 (TRBV7-2, TRBJ1-1)
CASSHRQGRTEAFF

SEQ ID NO: 676455 - protein, 13 aa, Homo sapiens
  CDR3 for alpha chain variable domain of TCR clone 338228 (TRAV1-2, TRAJ36)
CAVDQTGTNNLFF

SEQ ID NO: 676456 - protein, 14 aa, Homo sapiens
  CDR3 for beta chain variable domain of TCR clone 338228 (TRBV20-1, TRBJ2-5)
CSAREMTKQETQYF

SEQ ID NO: 676457 - protein, 13 aa, Homo sapiens
  CDR3 for alpha chain variable domain of TCR clone 338229 (TRAV26-1, TRAJ34)
CIVRPWITDKLIF

SEQ ID NO: 676458 - protein, 12 aa, Homo sapiens
  CDR3 for beta chain variable domain of TCR clone 338229 (TRBV14, TRBJ2-5)
CASSQLKETQYF

SEQ ID NO: 676459 - protein, 16 aa, Homo sapiens
  CDR3 for alpha chain variable domain of TCR clone 338230 (TRAV3, TRAJ5)
CAVRNLMDTGRSALTF

SEQ ID NO: 676460 - protein, 16 aa, Homo sapiens
  CDR3 for beta chain variable domain of TCR clone 338230 (TRBV12-5, TRBJ2-5)
CASGPRTSGNQETQYF

SEQ ID NO: 676461 - protein, 15 aa, Homo sapiens
  CDR3 for alpha chain variable domain of TCR clone 338231 (TRAV12-2, TRAJ53)
CAVNGGGGSNYKLTF

SEQ ID NO: 676462 - protein, 14 aa, Homo sapiens
  CDR3 for beta chain variable domain of TCR clone 338231 (TRBV7-2, TRBJ1-2)
CASSQTGSTYGYTF

SEQ ID NO: 676463 - protein, 15 aa, Homo sapiens
  CDR3 for alpha chain variable domain of TCR clone 338232 (TRAV12-2, TRAJ53)
CAVNGGGGSHYKLTF

SEQ ID NO: 676464 - protein, 17 aa, Homo sapiens
  CDR3 for beta chain variable domain of TCR clone 338232 (TRBV7-3, TRBJ2-3)
CASSLVKRMRGADTQYF

SEQ ID NO: 676465 - protein, 14 aa, Homo sapiens
  CDR3 for alpha chain variable domain of TCR clone 338233 (TRAV9-2, TRAJ39)
WALYIYNAGNMPTF

SEQ ID NO: 676466 - protein, 17 aa, Homo sapiens
  CDR3 for beta chain variable domain of TCR clone 338233 (TRBV25-1, TRBJ2-7)
CASSDARVVFSSYEQYF

SEQ ID NO: 676467 - protein, 11 aa, Homo sapiens
  CDR3 for alpha chain variable domain of TCR clone 338234 (TRAV13-1, TRAJ30)
CAASRDDKIIF

SEQ ID NO: 676468 - protein, 13 aa, Homo sapiens
  CDR3 for beta chain variable domain of TCR clone 338234 (TRBV20-1, TRBJ1-6)
CSAPLGVGSPLHF

SEQ ID NO: 676469 - protein, 12 aa, Homo sapiens
  CDR3 for alpha chain variable domain of TCR clone 338235 (TRAV21, TRAJ23)
CAVMLQGGKLVF

SEQ ID NO: 676470 - protein, 15 aa, Homo sapiens
  CDR3 for beta chain variable domain of TCR clone 338235 (TRBV10-3, TRBJ2-1)
CAISDVQDRAYEQFF

SEQ ID NO: 676471 - protein, 14 aa, Homo sapiens
  CDR3 for alpha chain variable domain of TCR clone 338236 (TRAV26-1, TRAJ15)
CIEAGNQAGTALIF

SEQ ID NO: 676472 - protein, 15 aa, Homo sapiens
  CDR3 for beta chain variable domain of TCR clone 338236 (TRBV5-1, TRBJ2-7)
CASSLNGGPAREQYF

SEQ ID NO: 676473 - protein, 12 aa, Homo sapiens
  CDR3 for alpha chain variable domain of TCR clone 338237 (TRAV13-1, TRAJ12)
SKYMGSSYKLIF

SEQ ID NO: 676474 - protein, 18 aa, Homo sapiens
  CDR3 for beta chain variable domain of TCR clone 338237 (TRBV20-1, TRBJ2-3)
CSASGLAGGPGTTDTQYF

SEQ ID NO: 676475 - protein, 14 aa, Homo sapiens
  CDR3 for alpha chain variable domain of TCR clone 338238 (TRAV12-1, TRAJ17)
CVVNYKAAGNKLTF

SEQ ID NO: 676476 - protein, 15 aa, Homo sapiens
  CDR3 for beta chain variable domain of TCR clone 338238 (TRBV18, TRBJ1-5)
CASSPQARSNQPQHF

SEQ ID NO: 676477 - protein, 14 aa, Homo sapiens
  CDR3 for alpha chain variable domain of TCR clone 338239 (TRAV38-1, TRAJ48)
CAFMANFGNEKLTF

SEQ ID NO: 676478 - protein, 14 aa, Homo sapiens
  CDR3 for beta chain variable domain of TCR clone 338239 (TRBV4-2, TRBJ1-2)
CASSPGGSNYGYTF

SEQ ID NO: 676479 - protein, 16 aa, Homo sapiens
  CDR3 for alpha chain variable domain of TCR clone 338240 (TRAV26-1, TRAJ32)
CIIRTNYGGATNKLIF

SEQ ID NO: 676480 - protein, 14 aa, Homo sapiens
  CDR3 for beta chain variable domain of TCR clone 338240 (TRBV27, TRBJ1-1)
CASSLLSGPSEAFF

SEQ ID NO: 676481 - protein, 13 aa, Homo sapiens
  CDR3 for alpha chain variable domain of TCR clone 338241 (TRAV20, TRAJ54)
CALTFEGAQKLVF

SEQ ID NO: 676482 - protein, 12 aa, Homo sapiens
  CDR3 for beta chain variable domain of TCR clone 338241 (TRBV5-1, TRBJ2-5)
CASTFSWETQYF

SEQ ID NO: 676483 - protein, 14 aa, Homo sapiens
  CDR3 for alpha chain variable domain of TCR clone 338242 (TRAV26-1, TRAJ34)
CIVRESYNTDKLIF

SEQ ID NO: 676484 - protein, 14 aa, Homo sapiens
  CDR3 for beta chain variable domain of TCR clone 338242 (TRBV7-8, TRBJ2-3)
CASSLEAGTDTQYF

SEQ ID NO: 676485 - protein, 13 aa, Homo sapiens
  CDR3 for alpha chain variable domain of TCR clone 338243 (TRAV12-3, TRAJ9)
CAMSGGGGFKTIF

SEQ ID NO: 676486 - protein, 16 aa, Homo sapiens
  CDR3 for beta chain variable domain of TCR clone 338243 (TRBV7-9, TRBJ2-1)
CASSDVAGGSYNEQFF

SEQ ID NO: 676487 - protein, 16 aa, Homo sapiens
  CDR3 for alpha chain variable domain of TCR clone 338244 (TRAV30, TRAJ24)
CGTETVDADSWGKFQF

SEQ ID NO: 676488 - protein, 14 aa, Homo sapiens
  CDR3 for beta chain variable domain of TCR clone 338244 (TRBV12-5, TRBJ2-5)
CASGSRTNQETQYF

SEQ ID NO: 676489 - protein, 16 aa, Homo sapiens
  CDR3 for alpha chain variable domain of TCR clone 338245 (TRAV1-2, TRAJ10)
CAVRDQGGGGGNKLTF

SEQ ID NO: 676490 - protein, 13 aa, Homo sapiens
  CDR3 for beta chain variable domain of TCR clone 338245 (TRBV29-1, TRBJ1-1)
RSVGDSRNTEAFF

SEQ ID NO: 676491 - protein, 13 aa, Homo sapiens
  CDR3 for alpha chain variable domain of TCR clone 338246 (TRAV21, TRAJ20)
CAVGVFADYKLSF

SEQ ID NO: 676492 - protein, 14 aa, Homo sapiens
  CDR3 for beta chain variable domain of TCR clone 338246 (TRBV4-2, TRBJ1-4)
CASSPSSGNEKLFV

SEQ ID NO: 676493 - protein, 15 aa, Homo sapiens
  CDR3 for alpha chain variable domain of TCR clone 338247 (TRAV8-3, TRAJ45)
CASSYSGGGADGLTF

SEQ ID NO: 676494 - protein, 15 aa, Homo sapiens
  CDR3 for beta chain variable domain of TCR clone 338247 (TRBV5-5, TRBJ2-2)
CASSRQASGAGELFF

SEQ ID NO: 676495 - protein, 14 aa, Homo sapiens
  CDR3 for alpha chain variable domain of TCR clone 338248 (TRAV14/DV4, TRAJ15)
CAMRRDQAGTALIF

SEQ ID NO: 676496 - protein, 16 aa, Homo sapiens
  CDR3 for beta chain variable domain of TCR clone 338248 (TRBV12-5, TRBJ2-5)
CASGPQTSGNQETQYF

SEQ ID NO: 676497 - protein, 13 aa, Homo sapiens
  CDR3 for alpha chain variable domain of TCR clone 338249 (TRAV8-4, TRAJ49)
CAVSDPGGNQFYF

SEQ ID NO: 676498 - protein, 12 aa, Homo sapiens
  CDR3 for beta chain variable domain of TCR clone 338249 (TRBV5-1, TRBJ1-2)
CASSQDTYGYTF

SEQ ID NO: 676499 - protein, 16 aa, Homo sapiens
  CDR3 for alpha chain variable domain of TCR clone 338250 (TRAV20, TRAJ17)
CAVQARWESCRQQANF

SEQ ID NO: 676500 - protein, 16 aa, Homo sapiens
  CDR3 for beta chain variable domain of TCR clone 338250 (TRBV20-1, TRBJ1-4)
CSAPGQGLLTNEKLFF

SEQ ID NO: 676501 - protein, 11 aa, Homo sapiens
  CDR3 for alpha chain variable domain of TCR clone 338251 (TRAV1-1, TRAJ23)
CAVRQGGNLIF

SEQ ID NO: 676502 - protein, 17 aa, Homo sapiens
  CDR3 for beta chain variable domain of TCR clone 338251 (TRBV19, TRBJ2-6)
CASSTGQVFSGANVLTF

SEQ ID NO: 676503 - protein, 12 aa, Homo sapiens
  CDR3 for alpha chain variable domain of TCR clone 338252 (TRAV29/DV5, TRAJ15)
CSSNQAGTSLIF

SEQ ID NO: 676504 - protein, 15 aa, Homo sapiens
  CDR3 for beta chain variable domain of TCR clone 338252 (TRBV11-2, TRBJ2-2)
CASSSDRVNAGELFF

SEQ ID NO: 676505 - protein, 12 aa, Homo sapiens
  CDR3 for alpha chain variable domain of TCR clone 338253 (TRAV17, TRAJ39)
CATGAAGNMLTF

SEQ ID NO: 676506 - protein, 16 aa, Homo sapiens
  CDR3 for beta chain variable domain of TCR clone 338253 (TRBV20-1, TRBJ1-4)
CSAPGQGLLTNEKLFF

SEQ ID NO: 676507 - protein, 14 aa, Homo sapiens
  CDR3 for alpha chain variable domain of TCR clone 338254 (TRAV20, TRAJ42)
CAVQAGGSQGKLTF

SEQ ID NO: 676508 - protein, 14 aa, Homo sapiens
  CDR3 for beta chain variable domain of TCR clone 338254 (TRBV28, TRBJ1-2)
CASRIQGANYGYTF

SEQ ID NO: 676509 - protein, 14 aa, Homo sapiens
  CDR3 for alpha chain variable domain of TCR clone 338255 (TRAV12-3, TRAJ9)
CAMSVETGGFKTIF

SEQ ID NO: 676510 - protein, 12 aa, Homo sapiens
  CDR3 for beta chain variable domain of TCR clone 338255 (TRBV11-2, TRBJ2-2)
CASSLGGGELFF

SEQ ID NO: 676511 - protein, 16 aa, Homo sapiens
  CDR3 for alpha chain variable domain of TCR clone 338256 (TRAV30, TRAJ24)
CGTEIVDADSWGQFQF

SEQ ID NO: 676512 - protein, 13 aa, Homo sapiens
  CDR3 for beta chain variable domain of TCR clone 338256 (TRBV4-1, TRBJ2-2)
CASSQENTGELFF

SEQ ID NO: 676513 - protein, 15 aa, Homo sapiens
  CDR3 for alpha chain variable domain of TCR clone 338257 (TRAV3, TRAJ5)
CAVRDRKTGRRAINF

SEQ ID NO: 676514 - protein, 15 aa, Homo sapiens
  CDR3 for beta chain variable domain of TCR clone 338257 (TRBV7-8, TRBJ2-1)
CASSLADSLYNEQFF

SEQ ID NO: 676515 - protein, 18 aa, Homo sapiens
  CDR3 for alpha chain variable domain of TCR clone 338258 (TRAV3, TRAJ32)
CAVRDIRGYGGATNKLIF

SEQ ID NO: 676516 - protein, 15 aa, Homo sapiens
  CDR3 for beta chain variable domain of TCR clone 338258 (TRBV12-4, TRBJ2-2)
CASSLGVRHIGELFF

SEQ ID NO: 676517 - protein, 13 aa, Homo sapiens
  CDR3 for alpha chain variable domain of TCR clone 338259 (TRAV8-6, TRAJ21)
CAVCPSSFNKFYF

SEQ ID NO: 676518 - protein, 14 aa, Homo sapiens
  CDR3 for beta chain variable domain of TCR clone 338259 (TRBV7-9, TRBJ2-5)
CASSLDTAQETQYF

SEQ ID NO: 676519 - protein, 12 aa, Homo sapiens
  CDR3 for alpha chain variable domain of TCR clone 338260 (TRAV21, TRAJ31)
CVLAGNNARLMF

SEQ ID NO: 676520 - protein, 16 aa, Homo sapiens
  CDR3 for beta chain variable domain of TCR clone 338260 (TRBV27, TRBJ2-5)
CASSFGPCGTKETQYF

SEQ ID NO: 676521 - protein, 17 aa, Homo sapiens
  CDR3 for alpha chain variable domain of TCR clone 338261 (TRAV3, TRAJ38)
CAVRDCLNAGNNHKLIW

SEQ ID NO: 676522 - protein, 15 aa, Homo sapiens
  CDR3 for beta chain variable domain of TCR clone 338261 (TRBV7-3, TRBJ2-2)
CASKANGANTGELFF

SEQ ID NO: 676523 - protein, 13 aa, Homo sapiens
  CDR3 for alpha chain variable domain of TCR clone 338262 (TRAV8-3, TRAJ4)
WVFYSGGYNKLIF

SEQ ID NO: 676524 - protein, 14 aa, Homo sapiens
  CDR3 for beta chain variable domain of TCR clone 338262 (TRBV7-9, TRBJ2-3)
GASSLEDGTDTQYF

SEQ ID NO: 676525 - protein, 12 aa, Homo sapiens
  CDR3 for alpha chain variable domain of TCR clone 338263 (TRAV1-2, TRAJ29)
CAVPSGNTPLVF

SEQ ID NO: 676526 - protein, 15 aa, Homo sapiens
  CDR3 for beta chain variable domain of TCR clone 338263 (TRBV6-5, TRBJ2-1)
CASSYDAGAGNEQFF

SEQ ID NO: 676527 - protein, 12 aa, Homo sapiens
  CDR3 for alpha chain variable domain of TCR clone 338264 (TRAV12-3, TRAJ17)
CAMTLTGNKLTF

SEQ ID NO: 676528 - protein, 15 aa, Homo sapiens
  CDR3 for beta chain variable domain of TCR clone 338264 (TRBV20-1, TRBJ2-7)
CSARDRVSERDEQYF

SEQ ID NO: 676529 - protein, 19 aa, Homo sapiens
  CDR3 for alpha chain variable domain of TCR clone 338265 (TRAV26-1, TRAJ15)
CCVLCIVRAANQAGTALIF

SEQ ID NO: 676530 - protein, 15 aa, Homo sapiens
  CDR3 for beta chain variable domain of TCR clone 338265 (TRBV20-1, TRBJ1-1)
CSARSAATSNTEAFF

SEQ ID NO: 676531 - protein, 14 aa, Homo sapiens
  CDR3 for alpha chain variable domain of TCR clone 338266 (TRAV26-1, TRAJ39)
CIVRGSRAGNMLTF

SEQ ID NO: 676532 - protein, 19 aa, Homo sapiens
  CDR3 for beta chain variable domain of TCR clone 338266 (TRBV19, TRBJ2-5)
CASSIGQVTDFFLGETQYF

SEQ ID NO: 676533 - protein, 18 aa, Homo sapiens
  CDR3 for alpha chain variable domain of TCR clone 338267 (TRAV29/DV5, TRAJ52)
CAAGFRGAGGTSYGKLTF

SEQ ID NO: 676534 - protein, 15 aa, Homo sapiens
  CDR3 for beta chain variable domain of TCR clone 338267 (TRBV7-9, TRBJ2-2)
CASGPLDTFPGELFF

SEQ ID NO: 676535 - protein, 13 aa, Homo sapiens
  CDR3 for alpha chain variable domain of TCR clone 338268 (TRAV12-3, TRAJ13)
CAMSSGGYQKVTF

SEQ ID NO: 676536 - protein, 14 aa, Homo sapiens
  CDR3 for beta chain variable domain of TCR clone 338268 (TRBV2, TRBJ2-1)
CARRTGSAYNEQFF

SEQ ID NO: 676537 - protein, 12 aa, Homo sapiens
  CDR3 for alpha chain variable domain of TCR clone 338269 (TRAV12-3, TRAJ17)
YAMTLTGNKLTF

SEQ ID NO: 676538 - protein, 11 aa, Homo sapiens
  CDR3 for beta chain variable domain of TCR clone 338269 (TRBV12-4, TRBJ2-2)
CASSSAGELFF

SEQ ID NO: 676539 - protein, 12 aa, Homo sapiens
  CDR3 for alpha chain variable domain of TCR clone 338270 (TRAV13-1, TRAJ43)
CAASIGDNDMRF

SEQ ID NO: 676540 - protein, 15 aa, Homo sapiens
  CDR3 for beta chain variable domain of TCR clone 338270 (TRBV7-9, TRBJ2-2)
CASSFGQLNTGELFF

SEQ ID NO: 676541 - protein, 14 aa, Homo sapiens
  CDR3 for alpha chain variable domain of TCR clone 338271 (TRAV12-2, TRAJ13)
CAVKKTGGYQKVTF

SEQ ID NO: 676542 - protein, 13 aa, Homo sapiens
  CDR3 for beta chain variable domain of TCR clone 338271 (TRBV4-2, TRBJ1-1)
CASSQAGNTEAFV

SEQ ID NO: 676543 - protein, 14 aa, Homo sapiens
  CDR3 for alpha chain variable domain of TCR clone 338272 (TRAV29/DV5, TRAJ28)
RAARAGAGGYQLTF

SEQ ID NO: 676544 - protein, 13 aa, Homo sapiens
  CDR3 for beta chain variable domain of TCR clone 338272 (TRBV7-2, TRBJ1-5)
CASSFARNQPQHF

SEQ ID NO: 676545 - protein, 18 aa, Homo sapiens
  CDR3 for alpha chain variable domain of TCR clone 338273 (TRAV13-1, TRAJ52)
CAASKRSAGGTSYGKLTF

SEQ ID NO: 676546 - protein, 12 aa, Homo sapiens
  CDR3 for beta chain variable domain of TCR clone 338273 (TRBV12-4, TRBJ1-2)
CQQFTTGKGYSF

SEQ ID NO: 676547 - protein, 13 aa, Homo sapiens
  CDR3 for alpha chain variable domain of TCR clone 338274 (TRAV12-3, TRAJ40)
CAMSDSGTYKYIF

SEQ ID NO: 676548 - protein, 21 aa, Homo sapiens
  CDR3 for beta chain variable domain of TCR clone 338274 (TRBV14, TRBJ1-5)
CQQPRWGYPLLAPYRQSAQHF

SEQ ID NO: 676549 - protein, 13 aa, Homo sapiens
  CDR3 for alpha chain variable domain of TCR clone 338275 (TRAV21, TRAJ45)
CAVMGGGADGLTF

SEQ ID NO: 676550 - protein, 13 aa, Homo sapiens
  CDR3 for beta chain variable domain of TCR clone 338275 (TRBV10-3, TRBJ1-2)
CAISERDSYGYTF

SEQ ID NO: 676551 - protein, 12 aa, Homo sapiens
  CDR3 for alpha chain variable domain of TCR clone 338276 (TRAV17, TRAJ21)
CALRYNFNKFYF

SEQ ID NO: 676552 - protein, 15 aa, Homo sapiens
  CDR3 for beta chain variable domain of TCR clone 338276 (TRBV19, TRBJ2-7)
CASRPTPGLSIEQYF

SEQ ID NO: 676553 - protein, 14 aa, Homo sapiens
  CDR3 for alpha chain variable domain of TCR clone 338277 (TRAV13-2, TRAJ10)
CAETFTGGGDKLTF

SEQ ID NO: 676554 - protein, 16 aa, Homo sapiens
  CDR3 for beta chain variable domain of TCR clone 338277 (TRBV18, TRBJ2-7)
CASSPRSQGISYEQYF

SEQ ID NO: 676555 - protein, 16 aa, Homo sapiens
  CDR3 for alpha chain variable domain of TCR clone 338278 (TRAV8-3, TRAJ4)
CAVGGLFSGGYNKLIF

SEQ ID NO: 676556 - protein, 14 aa, Homo sapiens
  CDR3 for beta chain variable domain of TCR clone 338278 (TRBV7-6, TRBJ2-3)
CASSLGTVTDTQYF

SEQ ID NO: 676557 - protein, 12 aa, Homo sapiens
  CDR3 for alpha chain variable domain of TCR clone 338279 (TRAV12-2, TRAJ21)
CAPADNFNKFYF

SEQ ID NO: 676558 - protein, 13 aa, Homo sapiens
  CDR3 for beta chain variable domain of TCR clone 338279 (TRBV7-3, TRBJ1-1)
CASSQDWGAEAFF

SEQ ID NO: 676559 - protein, 15 aa, Homo sapiens
  CDR3 for alpha chain variable domain of TCR clone 338280 (TRAV14/DV4, TRAJ12)
CARREERDSSYKLIF

SEQ ID NO: 676560 - protein, 16 aa, Homo sapiens
  CDR3 for beta chain variable domain of TCR clone 338280 (TRBV11-2, TRBJ1-2)
CASSLDTGGADYGYTF

SEQ ID NO: 676561 - protein, 11 aa, Homo sapiens
  CDR3 for alpha chain variable domain of TCR clone 338281 (TRAV1-2, TRAJ20)
CAVSNDYKLSF

SEQ ID NO: 676562 - protein, 15 aa, Homo sapiens
  CDR3 for beta chain variable domain of TCR clone 338281 (TRBV10-3, TRBJ2-1)
CAIRNGTSGHNEQFF

SEQ ID NO: 676563 - protein, 15 aa, Homo sapiens
  CDR3 for alpha chain variable domain of TCR clone 338282 (TRAV2, TRAJ9)
CAVAALNTGGFKTIF

SEQ ID NO: 676564 - protein, 14 aa, Homo sapiens
  CDR3 for beta chain variable domain of TCR clone 338282 (TRBV5-1, TRBJ2-7)
CASSRGESLYEQYF

SEQ ID NO: 676565 - protein, 12 aa, Homo sapiens
  CDR3 for alpha chain variable domain of TCR clone 338283 (TRAV17, TRAJ20)
CATDSNDYKLSF

SEQ ID NO: 676566 - protein, 17 aa, Homo sapiens
  CDR3 for beta chain variable domain of TCR clone 338283 (TRBV7-2, TRBJ1-2)
CASSSNQDRRPWLHLRF

SEQ ID NO: 676567 - protein, 12 aa, Homo sapiens
  CDR3 for alpha chain variable domain of TCR clone 338284 (TRAV12-3, TRAJ17)
CAMTLTGNKLTF

SEQ ID NO: 676568 - protein, 13 aa, Homo sapiens
  CDR3 for beta chain variable domain of TCR clone 338284 (TRBV12-5, TRBJ2-3)
CASQNRGTDTQYF

SEQ ID NO: 676569 - protein, 10 aa, Homo sapiens
  CDR3 for alpha chain variable domain of TCR clone 338285 (TRAV8-4, TRAJ43)
CAVSADDMRF

SEQ ID NO: 676570 - protein, 13 aa, Homo sapiens
  CDR3 for beta chain variable domain of TCR clone 338285 (TRBV6-4, TRBJ1-5)
CASSADLNQPQHF

SEQ ID NO: 676571 - protein, 13 aa, Homo sapiens
  CDR3 for alpha chain variable domain of TCR clone 338286 (TRAV29/DV5, TRAJ40)
CAAVWSPGYKYIF

SEQ ID NO: 676572 - protein, 13 aa, Homo sapiens
  CDR3 for beta chain variable domain of TCR clone 338286 (TRBV2, TRBJ1-1)
CARNPTGGFHAFF

SEQ ID NO: 676573 - protein, 13 aa, Homo sapiens
  CDR3 for alpha chain variable domain of TCR clone 338287 (TRAV2, TRAJ40)
CAVVTSETYKYIF

SEQ ID NO: 676574 - protein, 16 aa, Homo sapiens
  CDR3 for beta chain variable domain of TCR clone 338287 (TRBV29-1, TRBJ1-2)
CSVEANRDIANYGYTF

SEQ ID NO: 676575 - protein, 13 aa, Homo sapiens
  CDR3 for alpha chain variable domain of TCR clone 338288 (TRAV27, TRAJ57)
CRSAPGGSEKLVF

SEQ ID NO: 676576 - protein, 11 aa, Homo sapiens
  CDR3 for beta chain variable domain of TCR clone 338288 (TRBV11-2, TRBJ1-1)
CASSINTEAFF

SEQ ID NO: 676577 - protein, 14 aa, Homo sapiens
  CDR3 for alpha chain variable domain of TCR clone 338289 (TRAV1-2, TRAJ16)
CAVKEGSDGQKLLF

SEQ ID NO: 676578 - protein, 13 aa, Homo sapiens
  CDR3 for beta chain variable domain of TCR clone 338289 (TRBV7-2, TRBJ2-1)
CASSLPPDNEQFF

SEQ ID NO: 676579 - protein, 14 aa, Homo sapiens
  CDR3 for alpha chain variable domain of TCR clone 338290 (TRAV29/DV5, TRAJ40)
CAAAVASGTYKYIF

SEQ ID NO: 676580 - protein, 15 aa, Homo sapiens
  CDR3 for beta chain variable domain of TCR clone 338290 (TRBV27, TRBJ1-5)
CASSLGTGFDQPQHF

SEQ ID NO: 676581 - protein, 13 aa, Homo sapiens
  CDR3 for alpha chain variable domain of TCR clone 338291 (TRAV12-2, TRAJ40)
FAVKRTGTYKYIF

SEQ ID NO: 676582 - protein, 15 aa, Homo sapiens
  CDR3 for beta chain variable domain of TCR clone 338291 (TRBV12-4, TRBJ1-2)
CASSPITGGGYGYTF

SEQ ID NO: 676583 - protein, 18 aa, Homo sapiens
  CDR3 for alpha chain variable domain of TCR clone 338292 (TRAV21, TRAJ52)
CAVRPSPAGGTSYGKLTF

SEQ ID NO: 676584 - protein, 16 aa, Homo sapiens
  CDR3 for beta chain variable domain of TCR clone 338292 (TRBV13, TRBJ2-2)
CASSHRTGEHTGELFF

SEQ ID NO: 676585 - protein, 13 aa, Homo sapiens
  CDR3 for alpha chain variable domain of TCR clone 338293 (TRAV17, TRAJ29)
CATDACRKHTSCL

SEQ ID NO: 676586 - protein, 13 aa, Homo sapiens
  CDR3 for beta chain variable domain of TCR clone 338293 (TRBV5-7, TRBJ2-6)
CASTSSGANDLTF

SEQ ID NO: 676587 - protein, 14 aa, Homo sapiens
  CDR3 for alpha chain variable domain of TCR clone 338294 (TRAV8-3, TRAJ4)
CAVGAAGGYNKLSF

SEQ ID NO: 676588 - protein, 15 aa, Homo sapiens
  CDR3 for beta chain variable domain of TCR clone 338294 (TRBV5-1, TRBJ2-1)
CASSPPRAPYNEQFF

SEQ ID NO: 676589 - protein, 14 aa, Homo sapiens
  CDR3 for alpha chain variable domain of TCR clone 338295 (TRAV23/DV6, TRAJ37)
CAASTSSNTGKLIF

SEQ ID NO: 676590 - protein, 13 aa, Homo sapiens
  CDR3 for beta chain variable domain of TCR clone 338295 (TRBV7-7, TRBJ1-1)
CASSFGANTEAFF

SEQ ID NO: 676591 - protein, 14 aa, Homo sapiens
  CDR3 for alpha chain variable domain of TCR clone 338296 (TRAV1-2, TRAJ16)
CAVNRFSDGQKLRF

SEQ ID NO: 676592 - protein, 13 aa, Homo sapiens
  CDR3 for beta chain variable domain of TCR clone 338296 (TRBV10-3, TRBJ2-7)
CASRLAVNYEQYF

SEQ ID NO: 676593 - protein, 15 aa, Homo sapiens
  CDR3 for alpha chain variable domain of TCR clone 338297 (TRAV17, TRAJ52)
CATEAGGTSHGKLTF

SEQ ID NO: 676594 - protein, 14 aa, Homo sapiens
  CDR3 for beta chain variable domain of TCR clone 338297 (TRBV28, TRBJ1-5)
CASSLGVLVKPQHF

SEQ ID NO: 676595 - protein, 15 aa, Homo sapiens
  CDR3 for alpha chain variable domain of TCR clone 338298 (TRAV1-2, TRAJ12)
CAVIPEVDSRYKLIF

SEQ ID NO: 676596 - protein, 12 aa, Homo sapiens
  CDR3 for beta chain variable domain of TCR clone 338298 (TRBV12-4, TRBJ2-7)
CASSLGGYEQYF

SEQ ID NO: 676597 - protein, 14 aa, Homo sapiens
  CDR3 for alpha chain variable domain of TCR clone 338299 (TRAV23/DV6, TRAJ17)
CAARGRAAGNKLTV

SEQ ID NO: 676598 - protein, 13 aa, Homo sapiens
  CDR3 for beta chain variable domain of TCR clone 338299 (TRBV7-6, TRBJ1-2)
CASSLVADYGYTF

SEQ ID NO: 676599 - protein, 21 aa, Homo sapiens
  CDR3 for alpha chain variable domain of TCR clone 338300 (TRAV26-1, TRAJ30)
CIVRVESNDKIIFEKGHDFIF

SEQ ID NO: 676600 - protein, 15 aa, Homo sapiens
  CDR3 for beta chain variable domain of TCR clone 338300 (TRBV6-1, TRBJ2-3)
CASSERGGITDTQYF

SEQ ID NO: 676601 - protein, 11 aa, Homo sapiens
  CDR3 for alpha chain variable domain of TCR clone 338301 (TRAV35, TRAJ22)
CAGPGVGQLTF

SEQ ID NO: 676602 - protein, 13 aa, Homo sapiens
  CDR3 for beta chain variable domain of TCR clone 338301 (TRBV2, TRBJ1-4)
CASSERAGEKLFF

SEQ ID NO: 676603 - protein, 11 aa, Homo sapiens
  CDR3 for alpha chain variable domain of TCR clone 338302 (TRAV13-2, TRAJ20)
CAENMSYKLSF

SEQ ID NO: 676604 - protein, 15 aa, Homo sapiens
  CDR3 for beta chain variable domain of TCR clone 338302 (TRBV25-1, TRBJ1-6)
CASSGDRGLNSPLHF

SEQ ID NO: 676605 - protein, 14 aa, Homo sapiens
  CDR3 for alpha chain variable domain of TCR clone 338303 (TRAV14/DV4, TRAJ34)
CAMREGRPHRHAHL

SEQ ID NO: 676606 - protein, 14 aa, Homo sapiens
  CDR3 for beta chain variable domain of TCR clone 338303 (TRBV19, TRBJ2-1)
CASPTFVLSGEQFF

SEQ ID NO: 676607 - protein, 15 aa, Homo sapiens
  CDR3 for alpha chain variable domain of TCR clone 338304 (TRAV17, TRAJ16)
CATALRFSDVRKLLF

SEQ ID NO: 676608 - protein, 15 aa, Homo sapiens
  CDR3 for beta chain variable domain of TCR clone 338304 (TRBV20-1, TRBJ1-1)
CSASRGVTGNTEAFF

SEQ ID NO: 676609 - protein, 14 aa, Homo sapiens
  CDR3 for alpha chain variable domain of TCR clone 338305 (TRAV3, TRAJ21)
CALGRGSTNFTLDL

SEQ ID NO: 676610 - protein, 14 aa, Homo sapiens
  CDR3 for beta chain variable domain of TCR clone 338305 (TRBV7-9, TRBJ2-4)
CASSLAMVGNIQYF

SEQ ID NO: 676611 - protein, 14 aa, Homo sapiens
  CDR3 for alpha chain variable domain of TCR clone 338306 (TRAV1-2, TRAJ16)
CAANRFSDGQKLLF

SEQ ID NO: 676612 - protein, 14 aa, Homo sapiens
  CDR3 for beta chain variable domain of TCR clone 338306 (TRBV7-9, TRBJ2-3)
CTSSLEDGTDTQYF

SEQ ID NO: 676613 - protein, 14 aa, Homo sapiens
  CDR3 for alpha chain variable domain of TCR clone 338307 (TRAV1-1, TRAJ27)
CAVIYNANAGKSTF

SEQ ID NO: 676614 - protein, 15 aa, Homo sapiens
  CDR3 for beta chain variable domain of TCR clone 338307 (TRBV7-2, TRBJ2-1)
CARSSGLAGGNEQFF

SEQ ID NO: 676615 - protein, 15 aa, Homo sapiens
  CDR3 for alpha chain variable domain of TCR clone 338308 (TRAV3, TRAJ4)
CAVRDGTGGYNKLIF

SEQ ID NO: 676616 - protein, 15 aa, Homo sapiens
  CDR3 for beta chain variable domain of TCR clone 338308 (TRBV7-8, TRBJ2-1)
CASSLHGGPYNEQFF

SEQ ID NO: 676617 - protein, 13 aa, Homo sapiens
  CDR3 for alpha chain variable domain of TCR clone 338309 (TRAV23/DV6, TRAJ34)
CAAIENNTDKLIF

SEQ ID NO: 676618 - protein, 13 aa, Homo sapiens
  CDR3 for beta chain variable domain of TCR clone 338309 (TRBV29-1, TRBJ2-7)
CSVGPGGGYEQYF

SEQ ID NO: 676619 - protein, 18 aa, Homo sapiens
  CDR3 for alpha chain variable domain of TCR clone 338310 (TRAV17, TRAJ45)
CATSLDLYSGGAADGLTF

SEQ ID NO: 676620 - protein, 15 aa, Homo sapiens
  CDR3 for beta chain variable domain of TCR clone 338310 (TRBV11-2, TRBJ2-1)
CASSKNRGLIYEQFF

SEQ ID NO: 676621 - protein, 14 aa, Homo sapiens
  CDR3 for alpha chain variable domain of TCR clone 338311 (TRAV27, TRAJ45)
CAGAQEEVLTASTL

SEQ ID NO: 676622 - protein, 17 aa, Homo sapiens
  CDR3 for beta chain variable domain of TCR clone 338311 (TRBV11-2, TRBJ2-1)
CASSLYPPGVEYNEQFF

SEQ ID NO: 676623 - protein, 10 aa, Homo sapiens
  CDR3 for alpha chain variable domain of TCR clone 338312 (TRAV1-2, TRAJ20)
CAPNDYKLSF

SEQ ID NO: 676624 - protein, 16 aa, Homo sapiens
  CDR3 for beta chain variable domain of TCR clone 338312 (TRBV20-1, TRBJ1-1)
CSARALTQGMNTEAFF

SEQ ID NO: 676625 - protein, 16 aa, Homo sapiens
  CDR3 for alpha chain variable domain of TCR clone 338313 (TRAV16, TRAJ52)
CALSAAGGTSYGKLTF

SEQ ID NO: 676626 - protein, 11 aa, Homo sapiens
  CDR3 for beta chain variable domain of TCR clone 338313 (TRBV18, TRBJ2-5)
CASLPRETQYF

SEQ ID NO: 676627 - protein, 15 aa, Homo sapiens
  CDR3 for alpha chain variable domain of TCR clone 338314 (TRAV21, TRAJ37)
CAVRPTLSNTGKLIF

SEQ ID NO: 676628 - protein, 16 aa, Homo sapiens
  CDR3 for beta chain variable domain of TCR clone 338314 (TRBV24-1, TRBJ2-3)
WATSDRRQDLTDTQYF

SEQ ID NO: 676629 - protein, 14 aa, Homo sapiens
  CDR3 for alpha chain variable domain of TCR clone 338315 (TRAV12-1, TRAJ17)
CVVNNKAAVNKLTF

SEQ ID NO: 676630 - protein, 17 aa, Homo sapiens
  CDR3 for beta chain variable domain of TCR clone 338315 (TRBV20-1, TRBJ2-1)
CSASSSGLAGSYNEQFF

SEQ ID NO: 676631 - protein, 14 aa, Homo sapiens
  CDR3 for alpha chain variable domain of TCR clone 338316 (TRAV16, TRAJ44)
CALSTTGTASKLTF

SEQ ID NO: 676632 - protein, 14 aa, Homo sapiens
  CDR3 for beta chain variable domain of TCR clone 338316 (TRBV4-1, TRBJ2-7)
CASRLTSGSYEQYF

SEQ ID NO: 676633 - protein, 14 aa, Homo sapiens
  CDR3 for alpha chain variable domain of TCR clone 338317 (TRAV8-1, TRAJ23)
CAVGTYNHGGKLIF

SEQ ID NO: 676634 - protein, 16 aa, Homo sapiens
  CDR3 for beta chain variable domain of TCR clone 338317 (TRBV18, TRBJ1-5)
CASSPSTGNSNQPQHF

SEQ ID NO: 676635 - protein, 16 aa, Homo sapiens
  CDR3 for alpha chain variable domain of TCR clone 338318 (TRAV30, TRAJ24)
CGTEIVDADSWGKLKF

SEQ ID NO: 676636 - protein, 14 aa, Homo sapiens
  CDR3 for beta chain variable domain of TCR clone 338318 (TRBV12-5, TRBJ2-5)
CASGSRTHQETQYF

SEQ ID NO: 676637 - protein, 13 aa, Homo sapiens
  CDR3 for alpha chain variable domain of TCR clone 338319 (TRAV12-1, TRAJ6)
CVVFPGGSYIPTF

SEQ ID NO: 676638 - protein, 14 aa, Homo sapiens
  CDR3 for beta chain variable domain of TCR clone 338319 (TRBV20-1, TRBJ1-3)
CSASPTGAGNTINF

SEQ ID NO: 676639 - protein, 15 aa, Homo sapiens
  CDR3 for alpha chain variable domain of TCR clone 338320 (TRAV17, TRAJ42)
FATDHYGGSQGNLIF

SEQ ID NO: 676640 - protein, 14 aa, Homo sapiens
  CDR3 for beta chain variable domain of TCR clone 338320 (TRBV19, TRBJ2-5)
CASSIEHSQETQYF

SEQ ID NO: 676641 - protein, 16 aa, Homo sapiens
  CDR3 for alpha chain variable domain of TCR clone 338321 (TRAV35, TRAJ28)
CAGQRYAGAGRYQLTF

SEQ ID NO: 676642 - protein, 13 aa, Homo sapiens
  CDR3 for beta chain variable domain of TCR clone 338321 (TRBV19, TRBJ1-2)
CASSQGQVYGYTF

SEQ ID NO: 676643 - protein, 14 aa, Homo sapiens
  CDR3 for alpha chain variable domain of TCR clone 338322 (TRAV12-2, TRAJ13)
CAVKKTGGYQKVTF

SEQ ID NO: 676644 - protein, 17 aa, Homo sapiens
  CDR3 for beta chain variable domain of TCR clone 338322 (TRBV20-1, TRBJ2-2)
CSASGSGQGGLTGKLFF

SEQ ID NO: 676645 - protein, 14 aa, Homo sapiens
  CDR3 for alpha chain variable domain of TCR clone 338323 (TRAV4, TRAJ23)
CLVGSDNQGGKLIF

SEQ ID NO: 676646 - protein, 18 aa, Homo sapiens
  CDR3 for beta chain variable domain of TCR clone 338323 (TRBV6-5, TRBJ2-6)
CASRTPGQGKTGANVLTF

SEQ ID NO: 676647 - protein, 16 aa, Homo sapiens
  CDR3 for alpha chain variable domain of TCR clone 338324 (TRAV20, TRAJ4)
CAVAAPFSGGYNKLIF

SEQ ID NO: 676648 - protein, 15 aa, Homo sapiens
  CDR3 for beta chain variable domain of TCR clone 338324 (TRBV18, TRBJ2-7)
CASSPTFMDSYEQYF

SEQ ID NO: 676649 - protein, 15 aa, Homo sapiens
  CDR3 for alpha chain variable domain of TCR clone 338325 (TRAV8-2, TRAJ24)
CVVSDRTDSWGKLQF

SEQ ID NO: 676650 - protein, 14 aa, Homo sapiens
  CDR3 for beta chain variable domain of TCR clone 338325 (TRBV19, TRBJ2-7)
CASNIEASSYEQYF

SEQ ID NO: 676651 - protein, 12 aa, Homo sapiens
  CDR3 for alpha chain variable domain of TCR clone 338326 (TRAV13-1, TRAJ21)
CAAKEGFNKFYF

SEQ ID NO: 676652 - protein, 14 aa, Homo sapiens
  CDR3 for beta chain variable domain of TCR clone 338326 (TRBV20-1, TRBJ2-1)
CSARGGSSYNEQFF

SEQ ID NO: 676653 - protein, 15 aa, Homo sapiens
  CDR3 for alpha chain variable domain of TCR clone 338327 (TRAV12-1, TRAJ15)
CLVTRANQAGTALIF

SEQ ID NO: 676654 - protein, 14 aa, Homo sapiens
  CDR3 for beta chain variable domain of TCR clone 338327 (TRBV5-1, TRBJ1-1)
CASSLVSINTEAFF

SEQ ID NO: 676655 - protein, 14 aa, Homo sapiens
  CDR3 for alpha chain variable domain of TCR clone 338328 (TRAV13-1, TRAJ40)
CAASMTSGTYKYIF

SEQ ID NO: 676656 - protein, 15 aa, Homo sapiens
  CDR3 for beta chain variable domain of TCR clone 338328 (TRBV7-3, TRBJ2-1)
CARRPAGGGEGEQFC

SEQ ID NO: 676657 - protein, 15 aa, Homo sapiens
  CDR3 for alpha chain variable domain of TCR clone 338329 (TRAV21, TRAJ24)
CAARSSTDSWGKLQF

SEQ ID NO: 676658 - protein, 13 aa, Homo sapiens
  CDR3 for beta chain variable domain of TCR clone 338329 (TRBV4-2, TRBJ1-1)
CASSQAGNTEAFF

SEQ ID NO: 676659 - protein, 17 aa, Homo sapiens
  CDR3 for alpha chain variable domain of TCR clone 338330 (TRAV8-1, TRAJ42)
CAVKWGNYGGSPGNLIF

SEQ ID NO: 676660 - protein, 15 aa, Homo sapiens
  CDR3 for beta chain variable domain of TCR clone 338330 (TRBV10-2, TRBJ2-6)
CASSEQGTGANVLTF

SEQ ID NO: 676661 - protein, 11 aa, Homo sapiens
  CDR3 for alpha chain variable domain of TCR clone 338331 (TRAV12-1, TRAJ3)
CVVSSASKIIF

SEQ ID NO: 676662 - protein, 15 aa, Homo sapiens
  CDR3 for beta chain variable domain of TCR clone 338331 (TRBV20-1, TRBJ2-5)
CSASGTRGGGETQYF

SEQ ID NO: 676663 - protein, 17 aa, Homo sapiens
  CDR3 for alpha chain variable domain of TCR clone 338332 (TRAV2, TRAJ36)
CAVEDRGNWGKQPLLWD

SEQ ID NO: 676664 - protein, 16 aa, Homo sapiens
  CDR3 for beta chain variable domain of TCR clone 338332 (TRBV19, TRBJ2-1)
CASSKAGPSSYSEQFF

SEQ ID NO: 676665 - protein, 14 aa, Homo sapiens
  CDR3 for alpha chain variable domain of TCR clone 338333 (TRAV1-2, TRAJ8)
CAVREDTGFQKLVF

SEQ ID NO: 676666 - protein, 14 aa, Homo sapiens
  CDR3 for beta chain variable domain of TCR clone 338333 (TRBV2, TRBJ1-5)
CASSGTVSNQPQHF

SEQ ID NO: 676667 - protein, 14 aa, Homo sapiens
  CDR3 for alpha chain variable domain of TCR clone 338334 (TRAV14/DV4, TRAJ54)
CAMREFQGAQKLVF

SEQ ID NO: 676668 - protein, 14 aa, Homo sapiens
  CDR3 for beta chain variable domain of TCR clone 338334 (TRBV7-2, TRBJ1-1)
CASSFLTGTTEAFF

SEQ ID NO: 676669 - protein, 14 aa, Homo sapiens
  CDR3 for alpha chain variable domain of TCR clone 338335 (TRAV12-3, TRAJ33)
CAMSVPGSNYQLIW

SEQ ID NO: 676670 - protein, 12 aa, Homo sapiens
  CDR3 for beta chain variable domain of TCR clone 338335 (TRBV7-8, TRBJ2-7)
CASSLGDSEQYF

SEQ ID NO: 676671 - protein, 14 aa, Homo sapiens
  CDR3 for alpha chain variable domain of TCR clone 338336 (TRAV12-2, TRAJ17)
CAVLFKAAGTKLTF

SEQ ID NO: 676672 - protein, 14 aa, Homo sapiens
  CDR3 for beta chain variable domain of TCR clone 338336 (TRBV15, TRBJ1-2)
CATSRDFDRVGYTF

SEQ ID NO: 676673 - protein, 15 aa, Homo sapiens
  CDR3 for alpha chain variable domain of TCR clone 338337 (TRAV27, TRAJ38)
FAARRNAGNNRKLIW

SEQ ID NO: 676674 - protein, 13 aa, Homo sapiens
  CDR3 for beta chain variable domain of TCR clone 338337 (TRBV12-5, TRBJ2-3)
CASGDRQSDTQYC

SEQ ID NO: 676675 - protein, 12 aa, Homo sapiens
  CDR3 for alpha chain variable domain of TCR clone 338338 (TRAV12-1, TRAJ40)
CVFYSGTYKSIF

SEQ ID NO: 676676 - protein, 18 aa, Homo sapiens
  CDR3 for beta chain variable domain of TCR clone 338338 (TRBV12-4, TRBJ2-2)
CASSLVAGTRRRTGELFF

SEQ ID NO: 676677 - protein, 14 aa, Homo sapiens
  CDR3 for alpha chain variable domain of TCR clone 338339 (TRAV3, TRAJ9)
CAVRLNTGGFKTIF

SEQ ID NO: 676678 - protein, 15 aa, Homo sapiens
  CDR3 for beta chain variable domain of TCR clone 338339 (TRBV7-2, TRBJ2-1)
CSSSLASGRVNEQFF

SEQ ID NO: 676679 - protein, 16 aa, Homo sapiens
  CDR3 for alpha chain variable domain of TCR clone 338340 (TRAV3, TRAJ28)
CGVLPRSGAGSYQLTF

SEQ ID NO: 676680 - protein, 13 aa, Homo sapiens
  CDR3 for beta chain variable domain of TCR clone 338340 (TRBV12-4, TRBJ2-5)
CASRLAVQETQYF

SEQ ID NO: 676681 - protein, 14 aa, Homo sapiens
  CDR3 for alpha chain variable domain of TCR clone 338341 (TRAV16, TRAJ17)
CALSGRAAGIKRTF

SEQ ID NO: 676682 - protein, 15 aa, Homo sapiens
  CDR3 for beta chain variable domain of TCR clone 338341 (TRBV3-1, TRBJ1-2)
CASSPTRLPEGGYTF

SEQ ID NO: 676683 - protein, 17 aa, Homo sapiens
  CDR3 for alpha chain variable domain of TCR clone 338342 (TRAV23/DV6, TRAJ58)
CAARLLRGETSGSRLTF

SEQ ID NO: 676684 - protein, 16 aa, Homo sapiens
  CDR3 for beta chain variable domain of TCR clone 338342 (TRBV20-1, TRBJ2-3)
CSGEAGLAGGQDTQYF

SEQ ID NO: 676685 - protein, 14 aa, Homo sapiens
  CDR3 for alpha chain variable domain of TCR clone 338343 (TRAV12-1, TRAJ46)
CVVTAKSSGDKLTF

SEQ ID NO: 676686 - protein, 14 aa, Homo sapiens
  CDR3 for beta chain variable domain of TCR clone 338343 (TRBV7-2, TRBJ2-7)
CASRSQGAAYEQYF

SEQ ID NO: 676687 - protein, 15 aa, Homo sapiens
  CDR3 for alpha chain variable domain of TCR clone 338344 (TRAV23/DV6, TRAJ18)
CAARYRGSTLGRLYF

SEQ ID NO: 676688 - protein, 14 aa, Homo sapiens
  CDR3 for beta chain variable domain of TCR clone 338344 (TRBV5-1, TRBJ2-5)
CASSLAGKQETQYF

SEQ ID NO: 676689 - protein, 14 aa, Homo sapiens
  CDR3 for alpha chain variable domain of TCR clone 338345 (TRAV12-3, TRAJ42)
CAMHYGGSQGNLIF

SEQ ID NO: 676690 - protein, 14 aa, Homo sapiens
  CDR3 for beta chain variable domain of TCR clone 338345 (TRBV7-2, TRBJ2-5)
CASSFTQGQETQYF

SEQ ID NO: 676691 - protein, 14 aa, Homo sapiens
  CDR3 for alpha chain variable domain of TCR clone 338346 (TRAV1-2, TRAJ8)
CAGREDTGFQKLVF

SEQ ID NO: 676692 - protein, 13 aa, Homo sapiens
  CDR3 for beta chain variable domain of TCR clone 338346 (TRBV4-2, TRBJ2-2)
CASEDRGTGELFF

SEQ ID NO: 676693 - protein, 14 aa, Homo sapiens
  CDR3 for alpha chain variable domain of TCR clone 338347 (TRAV26-1, TRAJ49)
CIVRLTNTGNQFYF

SEQ ID NO: 676694 - protein, 13 aa, Homo sapiens
  CDR3 for beta chain variable domain of TCR clone 338347 (TRBV4-1, TRBJ2-7)
CASGQGQAYEQYF

SEQ ID NO: 676695 - protein, 13 aa, Homo sapiens
  CDR3 for alpha chain variable domain of TCR clone 338348 (TRAV1-2, TRAJ9)
CSALNTGGFKTIF

SEQ ID NO: 676696 - protein, 13 aa, Homo sapiens
  CDR3 for beta chain variable domain of TCR clone 338348 (TRBV19, TRBJ1-2)
RASSVPGQDGYTF

SEQ ID NO: 676697 - protein, 16 aa, Homo sapiens
  CDR3 for alpha chain variable domain of TCR clone 338349 (TRAV3, TRAJ38)
CAVRDCLNAGNNRKLI

SEQ ID NO: 676698 - protein, 13 aa, Homo sapiens
  CDR3 for beta chain variable domain of TCR clone 338349 (TRBV23-1, TRBJ1-4)
CASRGKFNEKLFF

SEQ ID NO: 676699 - protein, 12 aa, Homo sapiens
  CDR3 for alpha chain variable domain of TCR clone 338350 (TRAV13-1, TRAJ34)
CAASKGTDKLIF

SEQ ID NO: 676700 - protein, 12 aa, Homo sapiens
  CDR3 for beta chain variable domain of TCR clone 338350 (TRBV4-1, TRBJ2-3)
CASSQGTDTQYF

SEQ ID NO: 676701 - protein, 11 aa, Homo sapiens
  CDR3 for alpha chain variable domain of TCR clone 338351 (TRAV1-1, TRAJ23)
CAVRQGGKLIF

SEQ ID NO: 676702 - protein, 15 aa, Homo sapiens
  CDR3 for beta chain variable domain of TCR clone 338351 (TRBV19, TRBJ2-7)
CASSIGGGLVNEQYF

SEQ ID NO: 676703 - protein, 11 aa, Homo sapiens
  CDR3 for alpha chain variable domain of TCR clone 338352 (TRAV12-1, TRAJ26)
CVVAYGQNFVF

SEQ ID NO: 676704 - protein, 15 aa, Homo sapiens
  CDR3 for beta chain variable domain of TCR clone 338352 (TRBV12-4, TRBJ2-5)
CASSGTGQARETQYF

SEQ ID NO: 676705 - protein, 12 aa, Homo sapiens
  CDR3 for alpha chain variable domain of TCR clone 338353 (TRAV27, TRAJ33)
CAGDGSNYQLIW

SEQ ID NO: 676706 - protein, 16 aa, Homo sapiens
  CDR3 for beta chain variable domain of TCR clone 338353 (TRBV7-3, TRBJ2-2)
CASSLKRGTLSGELFF

SEQ ID NO: 676707 - protein, 15 aa, Homo sapiens
  CDR3 for alpha chain variable domain of TCR clone 338354 (TRAV12-1, TRAJ37)
CVVNIMGGNTGNLIF

SEQ ID NO: 676708 - protein, 14 aa, Homo sapiens
  CDR3 for beta chain variable domain of TCR clone 338354 (TRBV12-4, TRBJ1-1)
CASSLGTGGTEAFF

SEQ ID NO: 676709 - protein, 15 aa, Homo sapiens
  CDR3 for alpha chain variable domain of TCR clone 338355 (TRAV35, TRAJ40)
CAGQLSDSGTYKYIF

SEQ ID NO: 676710 - protein, 12 aa, Homo sapiens
  CDR3 for beta chain variable domain of TCR clone 338355 (TRBV7-8, TRBJ2-7)
CASSLAGYEQYF

SEQ ID NO: 676711 - protein, 13 aa, Homo sapiens
  CDR3 for alpha chain variable domain of TCR clone 338356 (TRAV12-1, TRAJ23)
CVVNLMDGGKLIF

SEQ ID NO: 676712 - protein, 16 aa, Homo sapiens
  CDR3 for beta chain variable domain of TCR clone 338356 (TRBV11-2, TRBJ2-7)
CASSPTTGGVSYEQYF

SEQ ID NO: 676713 - protein, 16 aa, Homo sapiens
  CDR3 for alpha chain variable domain of TCR clone 338357 (TRAV38-1, TRAJ42)
CAFMKLGGGSQGNLIF

SEQ ID NO: 676714 - protein, 15 aa, Homo sapiens
  CDR3 for beta chain variable domain of TCR clone 338357 (TRBV2, TRBJ2-7)
CASSEGLARSYERYF

SEQ ID NO: 676715 - protein, 14 aa, Homo sapiens
  CDR3 for alpha chain variable domain of TCR clone 338358 (TRAV16, TRAJ33)
CALSAMDRNYQLIW

SEQ ID NO: 676716 - protein, 13 aa, Homo sapiens
  CDR3 for beta chain variable domain of TCR clone 338358 (TRBV24-1, TRBJ2-2)
CSTSDWSTGELFF

SEQ ID NO: 676717 - protein, 17 aa, Homo sapiens
  CDR3 for alpha chain variable domain of TCR clone 338359 (TRAV36/DV7, TRAJ52)
CAVAQRAGGTSYGKLTS

SEQ ID NO: 676718 - protein, 13 aa, Homo sapiens
  CDR3 for beta chain variable domain of TCR clone 338359 (TRBV2, TRBJ2-7)
CASSVGGSGEQYF

SEQ ID NO: 676719 - protein, 22 aa, Homo sapiens
  CDR3 for alpha chain variable domain of TCR clone 338360 (TRAV27, TRAJ41)
CAVRTQIPDIQNPDPAVYQLRD

SEQ ID NO: 676720 - protein, 16 aa, Homo sapiens
  CDR3 for beta chain variable domain of TCR clone 338360 (TRBV5-1, TRBJ2-3)
CASSLGPAVYTDTQYF

SEQ ID NO: 676721 - protein, 11 aa, Homo sapiens
  CDR3 for alpha chain variable domain of TCR clone 338361 (TRAV21, TRAJ39)
LLVNAGNVLTF

SEQ ID NO: 676722 - protein, 15 aa, Homo sapiens
  CDR3 for beta chain variable domain of TCR clone 338361 (TRBV29-1, TRBJ2-1)
CSGRDRKSSYNEQFF

SEQ ID NO: 676723 - protein, 15 aa, Homo sapiens
  CDR3 for alpha chain variable domain of TCR clone 338362 (TRAV27, TRAJ38)
CAARRNAGNNRTLIL

SEQ ID NO: 676724 - protein, 13 aa, Homo sapiens
  CDR3 for beta chain variable domain of TCR clone 338362 (TRBV12-5, TRBJ2-3)
CASGDRQSDTQYF

SEQ ID NO: 676725 - protein, 13 aa, Homo sapiens
  CDR3 for alpha chain variable domain of TCR clone 338363 (TRAV23/DV6, TRAJ58)
CAARGTSGSRLTF

SEQ ID NO: 676726 - protein, 14 aa, Homo sapiens
  CDR3 for beta chain variable domain of TCR clone 338363 (TRBV11-3, TRBJ2-1)
CASSATTSGSIQFF

SEQ ID NO: 676727 - protein, 14 aa, Homo sapiens
  CDR3 for alpha chain variable domain of TCR clone 338364 (TRAV17, TRAJ23)
CSTALGGQGGKLIF

SEQ ID NO: 676728 - protein, 13 aa, Homo sapiens
  CDR3 for beta chain variable domain of TCR clone 338364 (TRBV3-1, TRBJ2-5)
CASSPPAAETQYF

SEQ ID NO: 676729 - protein, 12 aa, Homo sapiens
  CDR3 for alpha chain variable domain of TCR clone 338365 (TRAV3, TRAJ20)
CAVRDPDYKLSV

SEQ ID NO: 676730 - protein, 15 aa, Homo sapiens
  CDR3 for beta chain variable domain of TCR clone 338365 (TRBV2, TRBJ2-2)
CASSRETVGTGELFF

SEQ ID NO: 676731 - protein, 13 aa, Homo sapiens
  CDR3 for alpha chain variable domain of TCR clone 338366 (TRAV8-1, TRAJ30)
CAVIMNRDDKIIF

SEQ ID NO: 676732 - protein, 14 aa, Homo sapiens
  CDR3 for beta chain variable domain of TCR clone 338366 (TRBV7-6, TRBJ2-3)
CASSLGTVTDTQYF

SEQ ID NO: 676733 - protein, 12 aa, Homo sapiens
  CDR3 for alpha chain variable domain of TCR clone 338367 (TRAV12-3, TRAJ49)
CAMCEGGNQFYF

SEQ ID NO: 676734 - protein, 15 aa, Homo sapiens
  CDR3 for beta chain variable domain of TCR clone 338367 (TRBV20-1, TRBJ2-7)
CSARDRVSGMDEQYF

SEQ ID NO: 676735 - protein, 22 aa, Homo sapiens
  CDR3 for alpha chain variable domain of TCR clone 338368 (TRAV16, )
CALRTQIPAIQNPDPAVYQLRD

SEQ ID NO: 676736 - protein, 16 aa, Homo sapiens
  CDR3 for beta chain variable domain of TCR clone 338368 (TRBV7-2, TRBJ1-2)
CASSSNQDRRGHGYTF

SEQ ID NO: 676737 - protein, 10 aa, Homo sapiens
  CDR3 for alpha chain variable domain of TCR clone 338369 (TRAV12-3, TRAJ49)
CAMNDDQFYF

SEQ ID NO: 676738 - protein, 15 aa, Homo sapiens
  CDR3 for beta chain variable domain of TCR clone 338369 (TRBV19, TRBJ2-7)
CASRTTSGNTYEQYF

SEQ ID NO: 676739 - protein, 14 aa, Homo sapiens
  CDR3 for alpha chain variable domain of TCR clone 338370 (TRAV35, TRAJ22)
CAGLRPGSARQLTF

SEQ ID NO: 676740 - protein, 13 aa, Homo sapiens
  CDR3 for beta chain variable domain of TCR clone 338370 (TRBV27, TRBJ1-1)
CASSLSIGAEAFF

SEQ ID NO: 676741 - protein, 11 aa, Homo sapiens
  CDR3 for alpha chain variable domain of TCR clone 338371 (TRAV3, TRAJ21)
CAVGNFNKFYF

SEQ ID NO: 676742 - protein, 15 aa, Homo sapiens
  CDR3 for beta chain variable domain of TCR clone 338371 (TRBV19, TRBJ2-1)
CSSKAGPSSYNGQFF

SEQ ID NO: 676743 - protein, 10 aa, Homo sapiens
  CDR3 for alpha chain variable domain of TCR clone 338372 (TRAV1-2, TRAJ31)
CVSEDARLMF

SEQ ID NO: 676744 - protein, 17 aa, Homo sapiens
  CDR3 for beta chain variable domain of TCR clone 338372 (TRBV20-1, TRBJ2-1)
CSASSSGLAGSYNEQFF

SEQ ID NO: 676745 - protein, 12 aa, Homo sapiens
  CDR3 for alpha chain variable domain of TCR clone 338373 (TRAV12-1, TRAJ40)
CVFYSGTYKYIF

SEQ ID NO: 676746 - protein, 18 aa, Homo sapiens
  CDR3 for beta chain variable domain of TCR clone 338373 (TRBV12-4, TRBJ2-2)
CASSLVAGTRVRTGELFF

SEQ ID NO: 676747 - protein, 10 aa, Homo sapiens
  CDR3 for alpha chain variable domain of TCR clone 338374 (TRAV9-2, TRAJ49)
CALTGNQFYF

SEQ ID NO: 676748 - protein, 15 aa, Homo sapiens
  CDR3 for beta chain variable domain of TCR clone 338374 (TRBV19, TRBJ2-3)
CSSPGAASRTDTQYF

SEQ ID NO: 676749 - protein, 15 aa, Homo sapiens
  CDR3 for alpha chain variable domain of TCR clone 338375 (TRAV10, TRAJ38)
CVVRINAGNNRKLIW

SEQ ID NO: 676750 - protein, 14 aa, Homo sapiens
  CDR3 for beta chain variable domain of TCR clone 338375 (TRBV7-2, TRBJ1-5)
CASSTQGAGQPQHF

SEQ ID NO: 676751 - protein, 14 aa, Homo sapiens
  CDR3 for alpha chain variable domain of TCR clone 338376 (TRAV1-2, TRAJ8)
CAVREDTGFQKLVF

SEQ ID NO: 676752 - protein, 14 aa, Homo sapiens
  CDR3 for beta chain variable domain of TCR clone 338376 (TRBV5-8, TRBJ2-3)
CASSLGQGTDTQYF

SEQ ID NO: 676753 - protein, 15 aa, Homo sapiens
  CDR3 for alpha chain variable domain of TCR clone 338377 (TRAV8-6, TRAJ6)
CAVSFTSGGSYIPTF

SEQ ID NO: 676754 - protein, 13 aa, Homo sapiens
  CDR3 for beta chain variable domain of TCR clone 338377 (TRBV10-3, TRBJ2-7)
CASKLAVNYEQYF

SEQ ID NO: 676755 - protein, 13 aa, Homo sapiens
  CDR3 for alpha chain variable domain of TCR clone 338378 (TRAV13-1, TRAJ21)
CAASIYNFNKLYF

SEQ ID NO: 676756 - protein, 14 aa, Homo sapiens
  CDR3 for beta chain variable domain of TCR clone 338378 (TRBV5-4, TRBJ2-2)
CASRLDGGTGELFF

SEQ ID NO: 676757 - protein, 13 aa, Homo sapiens
  CDR3 for alpha chain variable domain of TCR clone 338379 (TRAV8-4, TRAJ10)
CAAFTGGGNKLTF

SEQ ID NO: 676758 - protein, 15 aa, Homo sapiens
  CDR3 for beta chain variable domain of TCR clone 338379 (TRBV2, TRBJ2-3)
CASSDFERATDTQYF

SEQ ID NO: 676759 - protein, 13 aa, Homo sapiens
  CDR3 for alpha chain variable domain of TCR clone 338380 (TRAV4, TRAJ22)
CLGGSGSERQLTL

SEQ ID NO: 676760 - protein, 15 aa, Homo sapiens
  CDR3 for beta chain variable domain of TCR clone 338380 (TRBV7-9, TRBJ1-6)
CASSSPGRGNSPLHF

SEQ ID NO: 676761 - protein, 16 aa, Homo sapiens
  CDR3 for alpha chain variable domain of TCR clone 338381 (TRAV12-3, TRAJ53)
CAMSPGSGGRNCKLTF

SEQ ID NO: 676762 - protein, 11 aa, Homo sapiens
  CDR3 for beta chain variable domain of TCR clone 338381 (TRBV29-1, TRBJ2-5)
CSEDRTGNQYF

SEQ ID NO: 676763 - protein, 16 aa, Homo sapiens
  CDR3 for alpha chain variable domain of TCR clone 338382 (TRAV26-2, TRAJ13)
CILRRRGSGGYQKVTF

SEQ ID NO: 676764 - protein, 14 aa, Homo sapiens
  CDR3 for beta chain variable domain of TCR clone 338382 (TRBV7-2, TRBJ2-5)
CASSPRGSSETQYF

SEQ ID NO: 676765 - protein, 16 aa, Homo sapiens
  CDR3 for alpha chain variable domain of TCR clone 338383 (TRAV26-1, TRAJ53)
CIVRVAMGGSNYKLTF

SEQ ID NO: 676766 - protein, 13 aa, Homo sapiens
  CDR3 for beta chain variable domain of TCR clone 338383 (TRBV28, TRBJ2-7)
CASSNSGNYEQYF

SEQ ID NO: 676767 - protein, 14 aa, Homo sapiens
  CDR3 for alpha chain variable domain of TCR clone 338384 (TRAV9-2, TRAJ39)
CALYINNAGNMLTF

SEQ ID NO: 676768 - protein, 16 aa, Homo sapiens
  CDR3 for beta chain variable domain of TCR clone 338384 (TRBV6-1, TRBJ2-3)
CASSEVSGQGTDTQYF

SEQ ID NO: 676769 - protein, 14 aa, Homo sapiens
  CDR3 for alpha chain variable domain of TCR clone 338385 (TRAV13-1, TRAJ44)
CAAKATGTASKLTF

SEQ ID NO: 676770 - protein, 15 aa, Homo sapiens
  CDR3 for beta chain variable domain of TCR clone 338385 (TRBV10-3, TRBJ2-1)
CAISEVQDRAYEQFF

SEQ ID NO: 676771 - protein, 15 aa, Homo sapiens
  CDR3 for alpha chain variable domain of TCR clone 338386 (TRAV3, TRAJ4)
CAGRDGTGGYNNLIF

SEQ ID NO: 676772 - protein, 13 aa, Homo sapiens
  CDR3 for beta chain variable domain of TCR clone 338386 (TRBV12-5, TRBJ1-2)
CASGVRTGNGCTF

SEQ ID NO: 676773 - protein, 14 aa, Homo sapiens
  CDR3 for alpha chain variable domain of TCR clone 338387 (TRAV8-6, TRAJ57)
CAAYTQGGSEKMVF

SEQ ID NO: 676774 - protein, 14 aa, Homo sapiens
  CDR3 for beta chain variable domain of TCR clone 338387 (TRBV7-6, TRBJ1-6)
CASSPNRGDSPLHF

SEQ ID NO: 676775 - protein, 13 aa, Homo sapiens
  CDR3 for alpha chain variable domain of TCR clone 338388 (TRAV13-2, TRAJ13)
CAERPGGYQKVTF

SEQ ID NO: 676776 - protein, 12 aa, Homo sapiens
  CDR3 for beta chain variable domain of TCR clone 338388 (TRBV19, TRBJ2-7)
CASTSVGSEQYF

SEQ ID NO: 676777 - protein, 14 aa, Homo sapiens
  CDR3 for alpha chain variable domain of TCR clone 338389 (TRAV1-2, TRAJ8)
CAVREDTGFQELVF

SEQ ID NO: 676778 - protein, 17 aa, Homo sapiens
  CDR3 for beta chain variable domain of TCR clone 338389 (TRBV11-2, TRBJ2-1)
CASSLYPAGVEYNEQFF

SEQ ID NO: 676779 - protein, 15 aa, Homo sapiens
  CDR3 for alpha chain variable domain of TCR clone 338390 (TRAV26-1, TRAJ29)
CIVRVEGSGNTPLVF

SEQ ID NO: 676780 - protein, 15 aa, Homo sapiens
  CDR3 for beta chain variable domain of TCR clone 338390 (TRBV7-9, TRBJ1-5)
CASSQFHQPNQPQHF

SEQ ID NO: 676781 - protein, 13 aa, Homo sapiens
  CDR3 for alpha chain variable domain of TCR clone 338391 (TRAV2, TRAJ15)
CAVASQAGTALIF

SEQ ID NO: 676782 - protein, 12 aa, Homo sapiens
  CDR3 for beta chain variable domain of TCR clone 338391 (TRBV6-3, TRBJ2-7)
CASSEPGFEQYF

SEQ ID NO: 676783 - protein, 17 aa, Homo sapiens
  CDR3 for alpha chain variable domain of TCR clone 338392 (TRAV3, TRAJ6)
CAVRDGPRAGGSYIPTF

SEQ ID NO: 676784 - protein, 13 aa, Homo sapiens
  CDR3 for beta chain variable domain of TCR clone 338392 (TRBV15, TRBJ2-3)
CATSGTGTDTQYF

SEQ ID NO: 676785 - protein, 10 aa, Homo sapiens
  CDR3 for alpha chain variable domain of TCR clone 338393 (TRAV21, TRAJ43)
CAVRIGDMRF

SEQ ID NO: 676786 - protein, 13 aa, Homo sapiens
  CDR3 for beta chain variable domain of TCR clone 338393 (TRBV4-2, TRBJ1-1)
CASSQAGNTEAFF

SEQ ID NO: 676787 - protein, 11 aa, Homo sapiens
  CDR3 for alpha chain variable domain of TCR clone 338394 (TRAV1-2, TRAJ20)
CAVANDYKLSF

SEQ ID NO: 676788 - protein, 13 aa, Homo sapiens
  CDR3 for beta chain variable domain of TCR clone 338394 (TRBV15, TRBJ1-6)
CATSGGLNSPLHF

SEQ ID NO: 676789 - protein, 11 aa, Homo sapiens
  CDR3 for alpha chain variable domain of TCR clone 338395 (TRAV3, TRAJ21)
CAVGNFNKFYF

SEQ ID NO: 676790 - protein, 13 aa, Homo sapiens
  CDR3 for beta chain variable domain of TCR clone 338395 (TRBV7-3, TRBJ1-1)
CASSQDWGAEDFF

SEQ ID NO: 676791 - protein, 14 aa, Homo sapiens
  CDR3 for alpha chain variable domain of TCR clone 338396 (TRAV12-2, TRAJ13)
CAVKKTGGYQKVTF

SEQ ID NO: 676792 - protein, 14 aa, Homo sapiens
  CDR3 for beta chain variable domain of TCR clone 338396 (TRBV12-5, TRBJ2-5)
CASGSRTHQETQYL

SEQ ID NO: 676793 - protein, 17 aa, Homo sapiens
  CDR3 for alpha chain variable domain of TCR clone 338397 (TRAV3, TRAJ6)
CAVRDGPRAGGSYIPTF

SEQ ID NO: 676794 - protein, 17 aa, Homo sapiens
  CDR3 for beta chain variable domain of TCR clone 338397 (TRBV20-1, TRBJ2-2)
CSASGSGQGGVTGELFF

SEQ ID NO: 676795 - protein, 12 aa, Homo sapiens
  CDR3 for alpha chain variable domain of TCR clone 338398 (TRAV8-3, TRAJ26)
CAGDNYGHNFVF

SEQ ID NO: 676796 - protein, 17 aa, Homo sapiens
  CDR3 for beta chain variable domain of TCR clone 338398 (TRBV7-8, TRBJ2-6)
CASSAGTGGAGANVLTF

SEQ ID NO: 676797 - protein, 13 aa, Homo sapiens
  CDR3 for alpha chain variable domain of TCR clone 338399 (TRAV13-1, TRAJ21)
CAASIYNFNKFYF

SEQ ID NO: 676798 - protein, 13 aa, Homo sapiens
  CDR3 for beta chain variable domain of TCR clone 338399 (TRBV15, TRBJ2-7)
CATSTTGHYEQYF

SEQ ID NO: 676799 - protein, 15 aa, Homo sapiens
  CDR3 for alpha chain variable domain of TCR clone 338400 (TRAV3, TRAJ5)
CAVRDLDTGRRALSF

SEQ ID NO: 676800 - protein, 13 aa, Homo sapiens
  CDR3 for beta chain variable domain of TCR clone 338400 (TRBV12-4, TRBJ2-5)
CASSLGGSRTQYF

SEQ ID NO: 676801 - protein, 14 aa, Homo sapiens
  CDR3 for alpha chain variable domain of TCR clone 338401 (TRAV3, TRAJ8)
CAVSRNTGFQKLVF

SEQ ID NO: 676802 - protein, 15 aa, Homo sapiens
  CDR3 for beta chain variable domain of TCR clone 338401 (TRBV11-3, TRBJ2-3)
CASLKDGREGDTQYF

SEQ ID NO: 676803 - protein, 13 aa, Homo sapiens
  CDR3 for alpha chain variable domain of TCR clone 338402 (TRAV38-2/DV8, TRAJ34)
CAYRNYKTDKLIF

SEQ ID NO: 676804 - protein, 15 aa, Homo sapiens
  CDR3 for beta chain variable domain of TCR clone 338402 (TRBV20-1, TRBJ2-5)
CSAEGTGGLQETQYF

SEQ ID NO: 676805 - protein, 14 aa, Homo sapiens
  CDR3 for alpha chain variable domain of TCR clone 338403 (TRAV2, TRAJ9)
CAVEDRSGGFKTIF

SEQ ID NO: 676806 - protein, 14 aa, Homo sapiens
  CDR3 for beta chain variable domain of TCR clone 338403 (TRBV12-4, TRBJ1-2)
CASSFVGTAYGYTF

SEQ ID NO: 676807 - protein, 17 aa, Homo sapiens
  CDR3 for alpha chain variable domain of TCR clone 338404 (TRAV16, TRAJ37)
CAFWPKNGSSNTGKLIF

SEQ ID NO: 676808 - protein, 15 aa, Homo sapiens
  CDR3 for beta chain variable domain of TCR clone 338404 (TRBV7-2, TRBJ2-1)
CASSLASGRVNEQFF

SEQ ID NO: 676809 - protein, 11 aa, Homo sapiens
  CDR3 for alpha chain variable domain of TCR clone 338405 (TRAV1-1, TRAJ31)
CAFPKQCQTHV

SEQ ID NO: 676810 - protein, 17 aa, Homo sapiens
  CDR3 for beta chain variable domain of TCR clone 338405 (TRBV27, TRBJ2-6)
CASSAGTGFSGANVLTF

SEQ ID NO: 676811 - protein, 13 aa, Homo sapiens
  CDR3 for alpha chain variable domain of TCR clone 338406 (TRAV25, TRAJ30)
CAGRVDRNDKIIF

SEQ ID NO: 676812 - protein, 17 aa, Homo sapiens
  CDR3 for beta chain variable domain of TCR clone 338406 (TRBV7-9, TRBJ2-6)
CASSFGAGYSGANVLTF

SEQ ID NO: 676813 - protein, 15 aa, Homo sapiens
  CDR3 for alpha chain variable domain of TCR clone 338407 (TRAV8-2, TRAJ40)
CVVLGTTSGTYKYIF

SEQ ID NO: 676814 - protein, 13 aa, Homo sapiens
  CDR3 for beta chain variable domain of TCR clone 338407 (TRBV12-4, TRBJ1-1)
CVSSPGTGFEAFF

SEQ ID NO: 676815 - protein, 13 aa, Homo sapiens
  CDR3 for alpha chain variable domain of TCR clone 338408 (TRAV2, TRAJ36)
CAVAQTGANNRFF

SEQ ID NO: 676816 - protein, 12 aa, Homo sapiens
  CDR3 for beta chain variable domain of TCR clone 338408 (TRBV19, TRBJ1-1)
CASMNRYTEAFF

SEQ ID NO: 676817 - protein, 13 aa, Homo sapiens
  CDR3 for alpha chain variable domain of TCR clone 338409 (TRAV3, TRAJ41)
CAASSNSGYALNF

SEQ ID NO: 676818 - protein, 14 aa, Homo sapiens
  CDR3 for beta chain variable domain of TCR clone 338409 (TRBV7-2, TRBJ2-7)
CASSPKTRFYEQYF

SEQ ID NO: 676819 - protein, 20 aa, Homo sapiens
  CDR3 for alpha chain variable domain of TCR clone 338410 (TRAV8-3, TRAJ44)
LSTSVLWVRLYTGTASKLTF

SEQ ID NO: 676820 - protein, 19 aa, Homo sapiens
  CDR3 for beta chain variable domain of TCR clone 338410 (TRBV25-1, TRBJ2-2)
CAILVYRVDRGRKTGELFF

SEQ ID NO: 676821 - protein, 12 aa, Homo sapiens
  CDR3 for alpha chain variable domain of TCR clone 338411 (TRAV12-1, TRAJ40)
CVVYSGTYKYIF

SEQ ID NO: 676822 - protein, 15 aa, Homo sapiens
  CDR3 for beta chain variable domain of TCR clone 338411 (TRBV7-9, TRBJ1-6)
CASSSPGRGNSLLHF

SEQ ID NO: 676823 - protein, 15 aa, Homo sapiens
  CDR3 for alpha chain variable domain of TCR clone 338412 (TRAV25, TRAJ53)
CAATGGGGSNYKLTI

SEQ ID NO: 676824 - protein, 11 aa, Homo sapiens
  CDR3 for beta chain variable domain of TCR clone 338412 (TRBV11-3, TRBJ2-2)
CASSSGGELFF

SEQ ID NO: 676825 - protein, 14 aa, Homo sapiens
  CDR3 for alpha chain variable domain of TCR clone 338413 (TRAV13-1, TRAJ48)
CAASTDFGNEKSTF

SEQ ID NO: 676826 - protein, 15 aa, Homo sapiens
  CDR3 for beta chain variable domain of TCR clone 338413 (TRBV10-2, TRBJ2-5)
CASKPEDRRQETQYF

SEQ ID NO: 676827 - protein, 12 aa, Homo sapiens
  CDR3 for alpha chain variable domain of TCR clone 338414 (TRAV17, TRAJ20)
CATQSNDYKLSF

SEQ ID NO: 676828 - protein, 13 aa, Homo sapiens
  CDR3 for beta chain variable domain of TCR clone 338414 (TRBV10-3, TRBJ1-1)
CAIIPEGGTEAFC

SEQ ID NO: 676829 - protein, 16 aa, Homo sapiens
  CDR3 for alpha chain variable domain of TCR clone 338415 (TRAV4, TRAJ22)
CLVGDLYSGSARQLTF

SEQ ID NO: 676830 - protein, 15 aa, Homo sapiens
  CDR3 for beta chain variable domain of TCR clone 338415 (TRBV7-2, TRBJ2-7)
CASSLSSGRTYEQYF

SEQ ID NO: 676831 - protein, 14 aa, Homo sapiens
  CDR3 for alpha chain variable domain of TCR clone 338416 (TRAV12-2, TRAJ13)
CAVKKTWGYQKVTF

SEQ ID NO: 676832 - protein, 18 aa, Homo sapiens
  CDR3 for beta chain variable domain of TCR clone 338416 (TRBV19, TRBJ1-1)
CASSIDGGDYTGNTEAFF

SEQ ID NO: 676833 - protein, 17 aa, Homo sapiens
  CDR3 for alpha chain variable domain of TCR clone 338417 (TRAV13-1, TRAJ52)
CAAGRNPGGTSYGKLTF

SEQ ID NO: 676834 - protein, 13 aa, Homo sapiens
  CDR3 for beta chain variable domain of TCR clone 338417 (TRBV7-2, TRBJ1-1)
CASNLKGAKVAFF

SEQ ID NO: 676835 - protein, 14 aa, Homo sapiens
  CDR3 for alpha chain variable domain of TCR clone 338418 (TRAV3, TRAJ40)
CAVRDRRGTYKYIF

SEQ ID NO: 676836 - protein, 15 aa, Homo sapiens
  CDR3 for beta chain variable domain of TCR clone 338418 (TRBV6-1, TRBJ2-3)
CASSERGGITDTQYF

SEQ ID NO: 676837 - protein, 12 aa, Homo sapiens
  CDR3 for alpha chain variable domain of TCR clone 338419 (TRAV21, TRAJ11)
CAATSEYSTLTF

SEQ ID NO: 676838 - protein, 14 aa, Homo sapiens
  CDR3 for beta chain variable domain of TCR clone 338419 (TRBV20-1, TRBJ2-7)
CSAPELAGVGEQYC

SEQ ID NO: 676839 - protein, 12 aa, Homo sapiens
  CDR3 for alpha chain variable domain of TCR clone 338420 (TRAV38-2/DV8, TRAJ49)
CAYRSATNQFYF

SEQ ID NO: 676840 - protein, 13 aa, Homo sapiens
  CDR3 for beta chain variable domain of TCR clone 338420 (TRBV7-9, TRBJ1-2)
CASSLKQNYGYTF

SEQ ID NO: 676841 - protein, 15 aa, Homo sapiens
  CDR3 for alpha chain variable domain of TCR clone 338421 (TRAV8-3, TRAJ45)
CASSYSGGGADGLTF

SEQ ID NO: 676842 - protein, 13 aa, Homo sapiens
  CDR3 for beta chain variable domain of TCR clone 338421 (TRBV19, TRBJ2-7)
CASRKAGGSEQYF

SEQ ID NO: 676843 - protein, 17 aa, Homo sapiens
  CDR3 for alpha chain variable domain of TCR clone 338422 (TRAV3, TRAJ6)
CAVRDCPRAGGSYIPTF

SEQ ID NO: 676844 - protein, 16 aa, Homo sapiens
  CDR3 for beta chain variable domain of TCR clone 338422 (TRBV4-1, TRBJ2-3)
CASSQSTSGAEDTQYF

SEQ ID NO: 676845 - protein, 14 aa, Homo sapiens
  CDR3 for alpha chain variable domain of TCR clone 338423 (TRAV8-3, TRAJ10)
CAVRNAGGGNKLTF

SEQ ID NO: 676846 - protein, 16 aa, Homo sapiens
  CDR3 for beta chain variable domain of TCR clone 338423 (TRBV11-2, TRBJ1-2)
CASSLDTGGADYGYTF

SEQ ID NO: 676847 - protein, 11 aa, Homo sapiens
  CDR3 for alpha chain variable domain of TCR clone 338424 (TRAV8-3, TRAJ49)
CAVNTGNQFYV

SEQ ID NO: 676848 - protein, 12 aa, Homo sapiens
  CDR3 for beta chain variable domain of TCR clone 338424 (TRBV11-2, TRBJ2-7)
CASSPPADEQYF

SEQ ID NO: 676849 - protein, 15 aa, Homo sapiens
  CDR3 for alpha chain variable domain of TCR clone 338425 (TRAV3, TRAJ47)
CAVRDIGEYGNKLVF

SEQ ID NO: 676850 - protein, 13 aa, Homo sapiens
  CDR3 for beta chain variable domain of TCR clone 338425 (TRBV13, TRBJ2-5)
CASSPEVGETQYF

SEQ ID NO: 676851 - protein, 16 aa, Homo sapiens
  CDR3 for alpha chain variable domain of TCR clone 338426 (TRAV21, TRAJ37)
CAVRTAGSSNTGKLIF

SEQ ID NO: 676852 - protein, 13 aa, Homo sapiens
  CDR3 for beta chain variable domain of TCR clone 338426 (TRBV7-9, TRBJ2-5)
CASLTSGRENQYF

SEQ ID NO: 676853 - protein, 13 aa, Homo sapiens
  CDR3 for alpha chain variable domain of TCR clone 338427 (TRAV13-1, TRAJ39)
CAASIWAGNMPTF

SEQ ID NO: 676854 - protein, 13 aa, Homo sapiens
  CDR3 for beta chain variable domain of TCR clone 338427 (TRBV7-9, TRBJ1-2)
CASSLKQNYGYTF

SEQ ID NO: 676855 - protein, 11 aa, Homo sapiens
  CDR3 for alpha chain variable domain of TCR clone 338428 (TRAV21, TRAJ34)
CAHYNTDKLIF

SEQ ID NO: 676856 - protein, 15 aa, Homo sapiens
  CDR3 for beta chain variable domain of TCR clone 338428 (TRBV5-1, TRBJ2-3)
CASSYTSGSTDTQYF

SEQ ID NO: 676857 - protein, 14 aa, Homo sapiens
  CDR3 for alpha chain variable domain of TCR clone 338429 (TRAV3, TRAJ21)
CAVRDAYNFNKFYF

SEQ ID NO: 676858 - protein, 17 aa, Homo sapiens
  CDR3 for beta chain variable domain of TCR clone 338429 (TRBV6-5, TRBJ2-1)
CASRKTPRTGGHNEQFF

SEQ ID NO: 676859 - protein, 15 aa, Homo sapiens
  CDR3 for alpha chain variable domain of TCR clone 338430 (TRAV38-1, TRAJ37)
CAFIFGSGNTGKLIF

SEQ ID NO: 676860 - protein, 14 aa, Homo sapiens
  CDR3 for beta chain variable domain of TCR clone 338430 (TRBV7-6, TRBJ2-1)
CASSLGGGADEQFF

SEQ ID NO: 676861 - protein, 14 aa, Homo sapiens
  CDR3 for alpha chain variable domain of TCR clone 338431 (TRAV8-6, TRAJ35)
CAVSEKALGMCCIG

SEQ ID NO: 676862 - protein, 13 aa, Homo sapiens
  CDR3 for beta chain variable domain of TCR clone 338431 (TRBV11-2, TRBJ1-3)
CASSLEPVNTIYF

SEQ ID NO: 676863 - protein, 14 aa, Homo sapiens
  CDR3 for alpha chain variable domain of TCR clone 338432 (TRAV8-4, TRAJ15)
CAVTIRGAGTALIF

SEQ ID NO: 676864 - protein, 13 aa, Homo sapiens
  CDR3 for beta chain variable domain of TCR clone 338432 (TRBV10-3, TRBJ2-7)
CAISEKGGYEQYF

SEQ ID NO: 676865 - protein, 10 aa, Homo sapiens
  CDR3 for alpha chain variable domain of TCR clone 338433 (TRAV8-1, TRAJ21)
CAVNGTKFYL

SEQ ID NO: 676866 - protein, 16 aa, Homo sapiens
  CDR3 for beta chain variable domain of TCR clone 338433 (TRBV7-2, TRBJ1-5)
CASSPWGPEGNQPQHF

SEQ ID NO: 676867 - protein, 14 aa, Homo sapiens
  CDR3 for alpha chain variable domain of TCR clone 338434 (TRAV1-1, TRAJ34)
CAVSPSYNTDKRIF

SEQ ID NO: 676868 - protein, 16 aa, Homo sapiens
  CDR3 for beta chain variable domain of TCR clone 338434 (TRBV19, TRBJ2-1)
CASSSKGTRSYNEQFF

SEQ ID NO: 676869 - protein, 13 aa, Homo sapiens
  CDR3 for alpha chain variable domain of TCR clone 338435 (TRAV27, TRAJ45)
CRSSGGGEDGLTF

SEQ ID NO: 676870 - protein, 17 aa, Homo sapiens
  CDR3 for beta chain variable domain of TCR clone 338435 (TRBV11-2, TRBJ2-1)
CASSLYPPGVEYNEQFF

SEQ ID NO: 676871 - protein, 16 aa, Homo sapiens
  CDR3 for alpha chain variable domain of TCR clone 338436 (TRAV4, TRAJ9)
CLVGDPNRPGGFKTIF

SEQ ID NO: 676872 - protein, 15 aa, Homo sapiens
  CDR3 for beta chain variable domain of TCR clone 338436 (TRBV3-1, TRBJ2-7)
CASSQGVGVKVEQYF

SEQ ID NO: 676873 - protein, 15 aa, Homo sapiens
  CDR3 for alpha chain variable domain of TCR clone 338437 (TRAV8-3, TRAJ41)
CAVGSNSNSGYALNF

SEQ ID NO: 676874 - protein, 17 aa, Homo sapiens
  CDR3 for beta chain variable domain of TCR clone 338437 (TRBV28, TRBJ2-7)
CASSPGLAGGDSSEQYF

SEQ ID NO: 676875 - protein, 12 aa, Homo sapiens
  CDR3 for alpha chain variable domain of TCR clone 338438 (TRAV17, TRAJ12)
CAGGDSSYKLIF

SEQ ID NO: 676876 - protein, 12 aa, Homo sapiens
  CDR3 for beta chain variable domain of TCR clone 338438 (TRBV29-1, TRBJ1-1)
CSESDGNSEAFF

SEQ ID NO: 676877 - protein, 16 aa, Homo sapiens
  CDR3 for alpha chain variable domain of TCR clone 338439 (TRAV12-3, TRAJ53)
CAMSPGSGGSNYKLVF

SEQ ID NO: 676878 - protein, 11 aa, Homo sapiens
  CDR3 for beta chain variable domain of TCR clone 338439 (TRBV29-1, TRBJ2-5)
CSEDRTGTQYF

SEQ ID NO: 676879 - protein, 18 aa, Homo sapiens
  CDR3 for alpha chain variable domain of TCR clone 338440 (TRAV26-1, TRAJ23)
CIVRVGLEVWNQGGTLIF

SEQ ID NO: 676880 - protein, 13 aa, Homo sapiens
  CDR3 for beta chain variable domain of TCR clone 338440 (TRBV7-2, TRBJ2-7)
CASILSGRSGLAG

SEQ ID NO: 676881 - protein, 12 aa, Homo sapiens
  CDR3 for alpha chain variable domain of TCR clone 338441 (TRAV1-1, TRAJ30)
CAVRGRDDKIIF

SEQ ID NO: 676882 - protein, 12 aa, Homo sapiens
  CDR3 for beta chain variable domain of TCR clone 338441 (TRBV14, TRBJ2-7)
CASSLYKDEQYF

SEQ ID NO: 676883 - protein, 11 aa, Homo sapiens
  CDR3 for alpha chain variable domain of TCR clone 338442 (TRAV12-3, TRAJ43)
CAMRVSNDMRF

SEQ ID NO: 676884 - protein, 13 aa, Homo sapiens
  CDR3 for beta chain variable domain of TCR clone 338442 (TRBV20-1, TRBJ1-1)
CSAPLGGGTEAFC

SEQ ID NO: 676885 - protein, 12 aa, Homo sapiens
  CDR3 for alpha chain variable domain of TCR clone 338443 (TRAV38-1, TRAJ36)
CAFETGANNLFF

SEQ ID NO: 676886 - protein, 14 aa, Homo sapiens
  CDR3 for beta chain variable domain of TCR clone 338443 (TRBV7-2, TRBJ1-1)
CASSFLTGTTEAFF

SEQ ID NO: 676887 - protein, 11 aa, Homo sapiens
  CDR3 for alpha chain variable domain of TCR clone 338444 (TRAV12-1, TRAJ30)
CVVNGQDKNIF

SEQ ID NO: 676888 - protein, 15 aa, Homo sapiens
  CDR3 for beta chain variable domain of TCR clone 338444 (TRBV27, TRBJ2-2)
CTSVPANSSPGSCFF

SEQ ID NO: 676889 - protein, 14 aa, Homo sapiens
  CDR3 for alpha chain variable domain of TCR clone 338445 (TRAV17, TRAJ22)
CATSPSGSARQLTF

SEQ ID NO: 676890 - protein, 15 aa, Homo sapiens
  CDR3 for beta chain variable domain of TCR clone 338445 (TRBV2, TRBJ2-1)
CASSELAWSYNEQFF

SEQ ID NO: 676891 - protein, 14 aa, Homo sapiens
  CDR3 for alpha chain variable domain of TCR clone 338446 (TRAV13-1, TRAJ40)
CAASMTPVTYKYIF

SEQ ID NO: 676892 - protein, 13 aa, Homo sapiens
  CDR3 for beta chain variable domain of TCR clone 338446 (TRBV4-1, TRBJ2-5)
CASSQEVQETQYF

SEQ ID NO: 676893 - protein, 14 aa, Homo sapiens
  CDR3 for alpha chain variable domain of TCR clone 338447 (TRAV1-2, TRAJ16)
CAVNRFSDGQKLLF

SEQ ID NO: 676894 - protein, 15 aa, Homo sapiens
  CDR3 for beta chain variable domain of TCR clone 338447 (TRBV9, TRBJ1-6)
CASSVARTGDSPLHC

SEQ ID NO: 676895 - protein, 14 aa, Homo sapiens
  CDR3 for alpha chain variable domain of TCR clone 338448 (TRAV36/DV7, TRAJ32)
CAVGHVGATTKLIF

SEQ ID NO: 676896 - protein, 16 aa, Homo sapiens
  CDR3 for beta chain variable domain of TCR clone 338448 (TRBV12-4, TRBJ1-4)
CASSLKGIGHGEKLFF

SEQ ID NO: 676897 - protein, 16 aa, Homo sapiens
  CDR3 for alpha chain variable domain of TCR clone 338449 (TRAV26-1, TRAJ23)
CIVRVHPYNKGGKLTF

SEQ ID NO: 676898 - protein, 13 aa, Homo sapiens
  CDR3 for beta chain variable domain of TCR clone 338449 (TRBV20-1, TRBJ2-5)
CSARGDYQETQYF

SEQ ID NO: 676899 - protein, 12 aa, Homo sapiens
  CDR3 for alpha chain variable domain of TCR clone 338450 (TRAV12-2, TRAJ43)
CAVNVNNNDMRF

SEQ ID NO: 676900 - protein, 15 aa, Homo sapiens
  CDR3 for beta chain variable domain of TCR clone 338450 (TRBV7-2, TRBJ2-7)
CASSSPGTDFYEQYF

SEQ ID NO: 676901 - protein, 15 aa, Homo sapiens
  CDR3 for alpha chain variable domain of TCR clone 338451 (TRAV21, TRAJ40)
CAVRPRTSGTYKYIL

SEQ ID NO: 676902 - protein, 13 aa, Homo sapiens
  CDR3 for beta chain variable domain of TCR clone 338451 (TRBV7-2, TRBJ2-2)
CASSSVRAGELFF

SEQ ID NO: 676903 - protein, 14 aa, Homo sapiens
  CDR3 for alpha chain variable domain of TCR clone 338452 (TRAV12-2, TRAJ9)
CAVNALEGGFKTIF

SEQ ID NO: 676904 - protein, 15 aa, Homo sapiens
  CDR3 for beta chain variable domain of TCR clone 338452 (TRBV6-3, TRBJ2-7)
CASSSPGTVFYEQYF

SEQ ID NO: 676905 - protein, 13 aa, Homo sapiens
  CDR3 for alpha chain variable domain of TCR clone 338453 (TRAV20, TRAJ37)
CAGCSSNTGKLIF

SEQ ID NO: 676906 - protein, 19 aa, Homo sapiens
  CDR3 for beta chain variable domain of TCR clone 338453 (TRBV28, TRBJ1-6)
CASSLLGVTGRTYNSPLRF

SEQ ID NO: 676907 - protein, 13 aa, Homo sapiens
  CDR3 for alpha chain variable domain of TCR clone 338454 (TRAV27, TRAJ56)
CAGKPGANSKLTF

SEQ ID NO: 676908 - protein, 18 aa, Homo sapiens
  CDR3 for beta chain variable domain of TCR clone 338454 (TRBV11-2, TRBJ2-3)
CASSLGGASRGAPNTQYF

SEQ ID NO: 676909 - protein, 18 aa, Homo sapiens
  CDR3 for alpha chain variable domain of TCR clone 338455 (TRAV21, TRAJ52)
CAVRPSPAGGTSYGKLTF

SEQ ID NO: 676910 - protein, 14 aa, Homo sapiens
  CDR3 for beta chain variable domain of TCR clone 338455 (TRBV10-3, TRBJ2-1)
CAISDRGGVTEQFF

SEQ ID NO: 676911 - protein, 12 aa, Homo sapiens
  CDR3 for alpha chain variable domain of TCR clone 338456 (TRAV12-3, TRAJ17)
CAMTLTGTTLTF

SEQ ID NO: 676912 - protein, 15 aa, Homo sapiens
  CDR3 for beta chain variable domain of TCR clone 338456 (TRBV20-1, TRBJ2-7)
CSARDRVSGMDEQYF

SEQ ID NO: 676913 - protein, 12 aa, Homo sapiens
  CDR3 for alpha chain variable domain of TCR clone 338457 (TRAV3, TRAJ27)
CALRDGAGKSTF

SEQ ID NO: 676914 - protein, 15 aa, Homo sapiens
  CDR3 for beta chain variable domain of TCR clone 338457 (TRBV13, TRBJ2-2)
CASGYRGRRTGELFF

SEQ ID NO: 676915 - protein, 16 aa, Homo sapiens
  CDR3 for alpha chain variable domain of TCR clone 338458 (TRAV12-3, TRAJ53)
CAMSPGSGGSNYTLTF

SEQ ID NO: 676916 - protein, 13 aa, Homo sapiens
  CDR3 for beta chain variable domain of TCR clone 338458 (TRBV7-3, TRBJ1-1)
CASSQDWGAEAFF

SEQ ID NO: 676917 - protein, 17 aa, Homo sapiens
  CDR3 for alpha chain variable domain of TCR clone 338459 (TRAV3, TRAJ42)
CAVRGRGYGGSQGNLIF

SEQ ID NO: 676918 - protein, 14 aa, Homo sapiens
  CDR3 for beta chain variable domain of TCR clone 338459 (TRBV5-4, TRBJ1-1)
CASSLDSRRDEAFF

SEQ ID NO: 676919 - protein, 21 aa, Homo sapiens
  CDR3 for alpha chain variable domain of TCR clone 338460 (TRAV12-1, TRAJ32)
SSVIQPPTSMNYGGATNKLIF

SEQ ID NO: 676920 - protein, 17 aa, Homo sapiens
  CDR3 for beta chain variable domain of TCR clone 338460 (TRBV24-1, TRBJ2-1)
CATSDVSTSGTYNEQFF

SEQ ID NO: 676921 - protein, 14 aa, Homo sapiens
  CDR3 for alpha chain variable domain of TCR clone 338461 (TRAV12-2, TRAJ17)
CAVLFKAAGNKLTF

SEQ ID NO: 676922 - protein, 15 aa, Homo sapiens
  CDR3 for beta chain variable domain of TCR clone 338461 (TRBV4-3, TRBJ1-2)
CASSRGQGRNYGYAF

SEQ ID NO: 676923 - protein, 13 aa, Homo sapiens
  CDR3 for alpha chain variable domain of TCR clone 338462 (TRAV26-2, TRAJ37)
CIRGSSNTGQLIF

SEQ ID NO: 676924 - protein, 16 aa, Homo sapiens
  CDR3 for beta chain variable domain of TCR clone 338462 (TRBV7-2, TRBJ2-5)
CASSPGGARRGETQYF

SEQ ID NO: 676925 - protein, 15 aa, Homo sapiens
  CDR3 for alpha chain variable domain of TCR clone 338463 (TRAV17, TRAJ13)
CATDAGSGGYQKVTF

SEQ ID NO: 676926 - protein, 17 aa, Homo sapiens
  CDR3 for beta chain variable domain of TCR clone 338463 (TRBV11-2, TRBJ2-1)
CASSLYPPGVEYNEQFF

SEQ ID NO: 676927 - protein, 15 aa, Homo sapiens
  CDR3 for alpha chain variable domain of TCR clone 338464 (TRAV8-2, TRAJ16)
CVVSDGFSDGQKLLV

SEQ ID NO: 676928 - protein, 20 aa, Homo sapiens
  CDR3 for beta chain variable domain of TCR clone 338464 (TRBV7-8, TRBJ2-2)
CASSHLFPGPTIHITGELFF

SEQ ID NO: 676929 - protein, 16 aa, Homo sapiens
  CDR3 for alpha chain variable domain of TCR clone 338465 (TRAV3, TRAJ10)
CAVRDMRAGGGNKLTL

SEQ ID NO: 676930 - protein, 15 aa, Homo sapiens
  CDR3 for beta chain variable domain of TCR clone 338465 (TRBV4-1, TRBJ1-4)
CASSDTGGTNEKLFF

SEQ ID NO: 676931 - protein, 17 aa, Homo sapiens
  CDR3 for alpha chain variable domain of TCR clone 338466 (TRAV3, TRAJ13)
CAVRDMRRTGGYQKVTF

SEQ ID NO: 676932 - protein, 14 aa, Homo sapiens
  CDR3 for beta chain variable domain of TCR clone 338466 (TRBV19, TRBJ2-1)
CASPTFVLSGEQFF

SEQ ID NO: 676933 - protein, 14 aa, Homo sapiens
  CDR3 for alpha chain variable domain of TCR clone 338467 (TRAV30, TRAJ33)
CGTERRFSNYQLIW

SEQ ID NO: 676934 - protein, 16 aa, Homo sapiens
  CDR3 for beta chain variable domain of TCR clone 338467 (TRBV7-3, TRBJ2-2)
CASSLKRGTLSEELFF

SEQ ID NO: 676935 - protein, 18 aa, Homo sapiens
  CDR3 for alpha chain variable domain of TCR clone 338468 (TRAV21, TRAJ52)
CAVRPSPAGGTSYGKLTF

SEQ ID NO: 676936 - protein, 14 aa, Homo sapiens
  CDR3 for beta chain variable domain of TCR clone 338468 (TRBV2, TRBJ1-2)
CASSEGGRNYGYTF

SEQ ID NO: 676937 - protein, 16 aa, Homo sapiens
  CDR3 for alpha chain variable domain of TCR clone 338469 (TRAV12-3, TRAJ53)
CAMSLGSGGSHYKLTF

SEQ ID NO: 676938 - protein, 11 aa, Homo sapiens
  CDR3 for beta chain variable domain of TCR clone 338469 (TRBV29-1, TRBJ2-5)
CSEDRTGTQYF

SEQ ID NO: 676939 - protein, 15 aa, Homo sapiens
  CDR3 for alpha chain variable domain of TCR clone 338470 (TRAV4, TRAJ39)
CLVGRNNNAGNMLTF

SEQ ID NO: 676940 - protein, 12 aa, Homo sapiens
  CDR3 for beta chain variable domain of TCR clone 338470 (TRBV12-4, TRBJ2-7)
CASNPGGGEQYF

SEQ ID NO: 676941 - protein, 22 aa, Homo sapiens
  CDR3 for alpha chain variable domain of TCR clone 338471 (TRAV17, TRAJ35)
CATDRPGFGNVLHCVSGPQVIV

SEQ ID NO: 676942 - protein, 15 aa, Homo sapiens
  CDR3 for beta chain variable domain of TCR clone 338471 (TRBV28, TRBJ2-5)
CASSSGRVIQETQYF

SEQ ID NO: 676943 - protein, 16 aa, Homo sapiens
  CDR3 for alpha chain variable domain of TCR clone 338472 (TRAV12-3, TRAJ53)
CAMSVGSGGGNYKLTF

SEQ ID NO: 676944 - protein, 13 aa, Homo sapiens
  CDR3 for beta chain variable domain of TCR clone 338472 (TRBV7-6, TRBJ1-2)
CASSLVADYGYTF

SEQ ID NO: 676945 - protein, 15 aa, Homo sapiens
  CDR3 for alpha chain variable domain of TCR clone 338473 (TRAV27, TRAJ24)
CAGGTSADSWGKLQF

SEQ ID NO: 676946 - protein, 12 aa, Homo sapiens
  CDR3 for beta chain variable domain of TCR clone 338473 (TRBV7-9, TRBJ1-4)
CASSTDREKLFF

SEQ ID NO: 676947 - protein, 16 aa, Homo sapiens
  CDR3 for alpha chain variable domain of TCR clone 338474 (TRAV30, TRAJ26)
CGTESVGDNYGQNFVF

SEQ ID NO: 676948 - protein, 13 aa, Homo sapiens
  CDR3 for beta chain variable domain of TCR clone 338474 (TRBV19, TRBJ1-2)
YASSISEDYGYTF

SEQ ID NO: 676949 - protein, 12 aa, Homo sapiens
  CDR3 for alpha chain variable domain of TCR clone 338475 (TRAV12-3, TRAJ17)
CAMTLTGNKLTF

SEQ ID NO: 676950 - protein, 16 aa, Homo sapiens
  CDR3 for beta chain variable domain of TCR clone 338475 (TRBV7-2, TRBJ2-1)
CASSYPSGGAGDEQFF

SEQ ID NO: 676951 - protein, 12 aa, Homo sapiens
  CDR3 for alpha chain variable domain of TCR clone 338476 (TRAV12-3, TRAJ17)
CALTLTGNKLTF

SEQ ID NO: 676952 - protein, 13 aa, Homo sapiens
  CDR3 for beta chain variable domain of TCR clone 338476 (TRBV6-1, TRBJ1-1)
CASSRQGNTEAFF

SEQ ID NO: 676953 - protein, 15 aa, Homo sapiens
  CDR3 for alpha chain variable domain of TCR clone 338477 (TRAV2, TRAJ15)
CAVEGRGQAGTALIF

SEQ ID NO: 676954 - protein, 17 aa, Homo sapiens
  CDR3 for beta chain variable domain of TCR clone 338477 (TRBV20-1, TRBJ2-3)
CSARGTGGPTGTDTQYF

SEQ ID NO: 676955 - protein, 14 aa, Homo sapiens
  CDR3 for alpha chain variable domain of TCR clone 338478 (TRAV12-2, TRAJ45)
CAVNIGGGADGLTF

SEQ ID NO: 676956 - protein, 12 aa, Homo sapiens
  CDR3 for beta chain variable domain of TCR clone 338478 (TRBV2, TRBJ2-7)
CASTYRTDEQYF

SEQ ID NO: 676957 - protein, 13 aa, Homo sapiens
  CDR3 for alpha chain variable domain of TCR clone 338479 (TRAV29/DV5, TRAJ31)
FAASRNNNARLMF

SEQ ID NO: 676958 - protein, 14 aa, Homo sapiens
  CDR3 for beta chain variable domain of TCR clone 338479 (TRBV7-9, TRBJ2-2)
CASSLVQDTGELFF

SEQ ID NO: 676959 - protein, 14 aa, Homo sapiens
  CDR3 for alpha chain variable domain of TCR clone 338480 (TRAV1-2, TRAJ27)
CAPAEYTNAGKSTF

SEQ ID NO: 676960 - protein, 16 aa, Homo sapiens
  CDR3 for beta chain variable domain of TCR clone 338480 (TRBV4-3, TRBJ2-1)
CASSEGIRDYYNEQFF

SEQ ID NO: 676961 - protein, 16 aa, Homo sapiens
  CDR3 for alpha chain variable domain of TCR clone 338481 (TRAV23/DV6, TRAJ48)
CAAIGVVNFGNEKLTF

SEQ ID NO: 676962 - protein, 15 aa, Homo sapiens
  CDR3 for beta chain variable domain of TCR clone 338481 (TRBV20-1, TRBJ2-5)
CSAGLAGVSQETQYF

SEQ ID NO: 676963 - protein, 17 aa, Homo sapiens
  CDR3 for alpha chain variable domain of TCR clone 338482 (TRAV3, TRAJ6)
CAVRDGPRAGGSYIPAF

SEQ ID NO: 676964 - protein, 14 aa, Homo sapiens
  CDR3 for beta chain variable domain of TCR clone 338482 (TRBV7-2, TRBJ2-7)
CASSPKTSFYEQYV

SEQ ID NO: 676965 - protein, 16 aa, Homo sapiens
  CDR3 for alpha chain variable domain of TCR clone 338483 (TRAV3, TRAJ4)
GAVRAFFSGGYNKLIF

SEQ ID NO: 676966 - protein, 16 aa, Homo sapiens
  CDR3 for beta chain variable domain of TCR clone 338483 (TRBV6-1, TRBJ1-6)
CASSERGGSGNSPLHF

SEQ ID NO: 676967 - protein, 14 aa, Homo sapiens
  CDR3 for alpha chain variable domain of TCR clone 338484 (TRAV17, TRAJ57)
CATDPQGGSEKLVF

SEQ ID NO: 676968 - protein, 13 aa, Homo sapiens
  CDR3 for beta chain variable domain of TCR clone 338484 (TRBV10-3, TRBJ2-7)
CASKLALNYEQYF

SEQ ID NO: 676969 - protein, 13 aa, Homo sapiens
  CDR3 for alpha chain variable domain of TCR clone 338485 (TRAV13-1, TRAJ20)
CAARVSNDYELSF

SEQ ID NO: 676970 - protein, 16 aa, Homo sapiens
  CDR3 for beta chain variable domain of TCR clone 338485 (TRBV11-1, TRBJ1-1)
CATNPRDRAFNTEAFF

SEQ ID NO: 676971 - protein, 13 aa, Homo sapiens
  CDR3 for alpha chain variable domain of TCR clone 338486 (TRAV27, TRAJ41)
CAGEGNSGYALNF

SEQ ID NO: 676972 - protein, 14 aa, Homo sapiens
  CDR3 for beta chain variable domain of TCR clone 338486 (TRBV7-2, TRBJ2-3)
CASSLGTVTDTQYF

SEQ ID NO: 676973 - protein, 14 aa, Homo sapiens
  CDR3 for alpha chain variable domain of TCR clone 338487 (TRAV1-2, TRAJ16)
CAVNRFSDGQKLVF

SEQ ID NO: 676974 - protein, 16 aa, Homo sapiens
  CDR3 for beta chain variable domain of TCR clone 338487 (TRBV19, TRBJ2-1)
CASSKAGPSSYNEQFF

SEQ ID NO: 676975 - protein, 13 aa, Homo sapiens
  CDR3 for alpha chain variable domain of TCR clone 338488 (TRAV29/DV5, TRAJ31)
CAASRNNNARLMF

SEQ ID NO: 676976 - protein, 20 aa, Homo sapiens
  CDR3 for beta chain variable domain of TCR clone 338488 (TRBV19, TRBJ2-1)
CASSISRTVTSTRLINEQFF

SEQ ID NO: 676977 - protein, 15 aa, Homo sapiens
  CDR3 for alpha chain variable domain of TCR clone 338489 (TRAV2, TRAJ9)
CAVEDRGTGGFKTIF

SEQ ID NO: 676978 - protein, 16 aa, Homo sapiens
  CDR3 for beta chain variable domain of TCR clone 338489 (TRBV24-1, TRBJ2-3)
CATSDPGTGATDTQNF

SEQ ID NO: 676979 - protein, 11 aa, Homo sapiens
  CDR3 for alpha chain variable domain of TCR clone 338490 (TRAV1-2, TRAJ20)
CAVSNDYKLSF

SEQ ID NO: 676980 - protein, 19 aa, Homo sapiens
  CDR3 for beta chain variable domain of TCR clone 338490 (TRBV9, TRBJ2-2)
CISVPAAPWEKGTPGSCFF

SEQ ID NO: 676981 - protein, 17 aa, Homo sapiens
  CDR3 for alpha chain variable domain of TCR clone 338491 (TRAV3, TRAJ6)
CAVSDGPRAGGSYIPTF

SEQ ID NO: 676982 - protein, 13 aa, Homo sapiens
  CDR3 for beta chain variable domain of TCR clone 338491 (TRBV19, TRBJ2-7)
CASSSDRTYEQYF

SEQ ID NO: 676983 - protein, 19 aa, Homo sapiens
  CDR3 for alpha chain variable domain of TCR clone 338492 (TRAV13-1, TRAJ52)
CAASPYQNAGGTSYGKLTF

SEQ ID NO: 676984 - protein, 18 aa, Homo sapiens
  CDR3 for beta chain variable domain of TCR clone 338492 (TRBV29-1, TRBJ2-5)
SAALRLVGGDPVLRARHA

SEQ ID NO: 676985 - protein, 14 aa, Homo sapiens
  CDR3 for alpha chain variable domain of TCR clone 338493 (TRAV12-2, TRAJ13)
CAVKKTGGYQKVTF

SEQ ID NO: 676986 - protein, 16 aa, Homo sapiens
  CDR3 for beta chain variable domain of TCR clone 338493 (TRBV12-5, TRBJ2-7)
CASGSQGAPTSSTSSR

SEQ ID NO: 676987 - protein, 20 aa, Homo sapiens
  CDR3 for alpha chain variable domain of TCR clone 338494 (TRAV13-2, TRAJ24)
ETQLSTFVQRTTDSWGKLQF

SEQ ID NO: 676988 - protein, 16 aa, Homo sapiens
  CDR3 for beta chain variable domain of TCR clone 338494 (TRBV19, TRBJ2-2)
CASSFPGQGLAGELFF

SEQ ID NO: 676989 - protein, 14 aa, Homo sapiens
  CDR3 for alpha chain variable domain of TCR clone 338495 (TRAV12-2, TRAJ17)
CDVLFKAAGNKLTF

SEQ ID NO: 676990 - protein, 13 aa, Homo sapiens
  CDR3 for beta chain variable domain of TCR clone 338495 (TRBV19, TRBJ1-2)
CASSQGQVYGYTF

SEQ ID NO: 676991 - protein, 17 aa, Homo sapiens
  CDR3 for alpha chain variable domain of TCR clone 338496 (TRAV12-2, TRAJ36)
CAVKDNLFFGTRTRLTV

SEQ ID NO: 676992 - protein, 15 aa, Homo sapiens
  CDR3 for beta chain variable domain of TCR clone 338496 (TRBV28, TRBJ2-2)
CASTVAGANTGELFF

SEQ ID NO: 676993 - protein, 12 aa, Homo sapiens
  CDR3 for alpha chain variable domain of TCR clone 338497 (TRAV20, TRAJ39)
CAVGNAGNMLTF

SEQ ID NO: 676994 - protein, 17 aa, Homo sapiens
  CDR3 for beta chain variable domain of TCR clone 338497 (TRBV4-1, TRBJ2-3)
CASSQVYVSGGTDTQYF

SEQ ID NO: 676995 - protein, 14 aa, Homo sapiens
  CDR3 for alpha chain variable domain of TCR clone 338498 (TRAV26-1, TRAJ38)
CIADNAGNNRKLIW

SEQ ID NO: 676996 - protein, 15 aa, Homo sapiens
  CDR3 for beta chain variable domain of TCR clone 338498 (TRBV18, TRBJ2-1)
CASSPPSASYNEQLF

SEQ ID NO: 676997 - protein, 12 aa, Homo sapiens
  CDR3 for alpha chain variable domain of TCR clone 338499 (TRAV8-3, TRAJ43)
CAVGAGDNDMRF

SEQ ID NO: 676998 - protein, 14 aa, Homo sapiens
  CDR3 for beta chain variable domain of TCR clone 338499 (TRBV4-2, TRBJ1-5)
CASSRDRGNQPQHF

SEQ ID NO: 676999 - protein, 14 aa, Homo sapiens
  CDR3 for alpha chain variable domain of TCR clone 338500 (TRAV3, TRAJ22)
CAVRDYGSARQLTF

SEQ ID NO: 677000 - protein, 15 aa, Homo sapiens
  CDR3 for beta chain variable domain of TCR clone 338500 (TRBV18, TRBJ1-1)
CASSGRTGEVTEAFF

SEQ ID NO: 677001 - protein, 19 aa, Homo sapiens
  CDR3 for alpha chain variable domain of TCR clone 338501 (TRAV13-1, TRAJ52)
CAASPYQNAGGTSYGKLTF

SEQ ID NO: 677002 - protein, 14 aa, Homo sapiens
  CDR3 for beta chain variable domain of TCR clone 338501 (TRBV19, TRBJ2-7)
CASTVQGRLYEQYF

SEQ ID NO: 677003 - protein, 15 aa, Homo sapiens
  CDR3 for alpha chain variable domain of TCR clone 338502 (TRAV12-3, TRAJ22)
CAMRTISGSARQLTF

SEQ ID NO: 677004 - protein, 16 aa, Homo sapiens
  CDR3 for beta chain variable domain of TCR clone 338502 (TRBV20-1, TRBJ2-2)
CSARSPGTGNTGELFF

SEQ ID NO: 677005 - protein, 14 aa, Homo sapiens
  CDR3 for alpha chain variable domain of TCR clone 338503 (TRAV20, TRAJ56)
CAVQFVGANSKLTF

SEQ ID NO: 677006 - protein, 14 aa, Homo sapiens
  CDR3 for beta chain variable domain of TCR clone 338503 (TRBV20-1, TRBJ2-7)
CSAKRGRSTYEQYF

SEQ ID NO: 677007 - protein, 14 aa, Homo sapiens
  CDR3 for alpha chain variable domain of TCR clone 338504 (TRAV12-1, TRAJ9)
CVVTGDSGGFKTIF

SEQ ID NO: 677008 - protein, 16 aa, Homo sapiens
  CDR3 for beta chain variable domain of TCR clone 338504 (TRBV29-1, TRBJ1-2)
CSVEANRDIANYGYTF

SEQ ID NO: 677009 - protein, 16 aa, Homo sapiens
  CDR3 for alpha chain variable domain of TCR clone 338505 (TRAV3, TRAJ28)
CAVLPRSGAGSYQLTF

SEQ ID NO: 677010 - protein, 16 aa, Homo sapiens
  CDR3 for beta chain variable domain of TCR clone 338505 (TRBV27, TRBJ2-5)
CASSYGPGGQKETQYF

SEQ ID NO: 677011 - protein, 17 aa, Homo sapiens
  CDR3 for alpha chain variable domain of TCR clone 338506 (TRAV36/DV7, TRAJ52)
CAVAQRAGGTSYGKLTF

SEQ ID NO: 677012 - protein, 14 aa, Homo sapiens
  CDR3 for beta chain variable domain of TCR clone 338506 (TRBV7-9, TRBJ2-1)
CASSLASGSNEQFF

SEQ ID NO: 677013 - protein, 16 aa, Homo sapiens
  CDR3 for alpha chain variable domain of TCR clone 338507 (TRAV8-3, TRAJ28)
CAVGATLGLGVTNSLS

SEQ ID NO: 677014 - protein, 14 aa, Homo sapiens
  CDR3 for beta chain variable domain of TCR clone 338507 (TRBV7-2, TRBJ2-1)
CASNLGVGYNEQFF

SEQ ID NO: 677015 - protein, 12 aa, Homo sapiens
  CDR3 for alpha chain variable domain of TCR clone 338508 (TRAV1-1, TRAJ39)
CAVPVIGNMLTF

SEQ ID NO: 677016 - protein, 16 aa, Homo sapiens
  CDR3 for beta chain variable domain of TCR clone 338508 (TRBV2, TRBJ2-1)
CASSVGGSLSYNEQFF

SEQ ID NO: 677017 - protein, 13 aa, Homo sapiens
  CDR3 for alpha chain variable domain of TCR clone 338509 (TRAV38-1, TRAJ42)
CARWGGSQGNLIF

SEQ ID NO: 677018 - protein, 14 aa, Homo sapiens
  CDR3 for beta chain variable domain of TCR clone 338509 (TRBV18, TRBJ2-5)
CASSPGVSQETQYF

SEQ ID NO: 677019 - protein, 13 aa, Homo sapiens
  CDR3 for alpha chain variable domain of TCR clone 338510 (TRAV17, TRAJ26)
CATVDNYGQNFFF

SEQ ID NO: 677020 - protein, 14 aa, Homo sapiens
  CDR3 for beta chain variable domain of TCR clone 338510 (TRBV7-2, TRBJ1-1)
CARSFLTGTTEAFF

SEQ ID NO: 677021 - protein, 16 aa, Homo sapiens
  CDR3 for alpha chain variable domain of TCR clone 338511 (TRAV17, TRAJ17)
CATALQEEAAGNKLTF

SEQ ID NO: 677022 - protein, 13 aa, Homo sapiens
  CDR3 for beta chain variable domain of TCR clone 338511 (TRBV4-1, TRBJ2-2)
CASSQENTGELFF

SEQ ID NO: 677023 - protein, 14 aa, Homo sapiens
  CDR3 for alpha chain variable domain of TCR clone 338512 (TRAV38-2/DV8, TRAJ31)
CAYRSPLVDARLMF

SEQ ID NO: 677024 - protein, 16 aa, Homo sapiens
  CDR3 for beta chain variable domain of TCR clone 338512 (TRBV5-1, TRBJ2-1)
CASSPESGGGSNEQFF

SEQ ID NO: 677025 - protein, 14 aa, Homo sapiens
  CDR3 for alpha chain variable domain of TCR clone 338513 (TRAV12-1, TRAJ17)
CVVNYKAAGNKLTF

SEQ ID NO: 677026 - protein, 15 aa, Homo sapiens
  CDR3 for beta chain variable domain of TCR clone 338513 (TRBV10-1, TRBJ2-3)
CASSATSGGFDTQYF

SEQ ID NO: 677027 - protein, 15 aa, Homo sapiens
  CDR3 for alpha chain variable domain of TCR clone 338514 (TRAV12-1, TRAJ44)
CVADLPTGSASKLTF

SEQ ID NO: 677028 - protein, 13 aa, Homo sapiens
  CDR3 for beta chain variable domain of TCR clone 338514 (TRBV6-5, TRBJ2-5)
CASSPQGGETQYF

SEQ ID NO: 677029 - protein, 13 aa, Homo sapiens
  CDR3 for alpha chain variable domain of TCR clone 338515 (TRAV2, TRAJ15)
CAVASQAGTALIF

SEQ ID NO: 677030 - protein, 16 aa, Homo sapiens
  CDR3 for beta chain variable domain of TCR clone 338515 (TRBV18, TRBJ1-5)
CASSPYRVEGYQPQHF

SEQ ID NO: 677031 - protein, 12 aa, Homo sapiens
  CDR3 for alpha chain variable domain of TCR clone 338516 (TRAV13-1, TRAJ11)
CAADSGYSTLTF

SEQ ID NO: 677032 - protein, 15 aa, Homo sapiens
  CDR3 for beta chain variable domain of TCR clone 338516 (TRBV20-1, TRBJ2-7)
CSARDRVSGMDEQYF

SEQ ID NO: 677033 - protein, 12 aa, Homo sapiens
  CDR3 for alpha chain variable domain of TCR clone 338517 (TRAV13-1, TRAJ21)
CAAKEGFNKFYF

SEQ ID NO: 677034 - protein, 16 aa, Homo sapiens
  CDR3 for beta chain variable domain of TCR clone 338517 (TRBV19, TRBJ1-1)
CASSPTRFWPGTEAFF

SEQ ID NO: 677035 - protein, 15 aa, Homo sapiens
  CDR3 for alpha chain variable domain of TCR clone 338518 (TRAV30, TRAJ32)
CGTEILGGATNKLIF

SEQ ID NO: 677036 - protein, 13 aa, Homo sapiens
  CDR3 for beta chain variable domain of TCR clone 338518 (TRBV6-3, TRBJ2-7)
CASSFSGVYEQYF

SEQ ID NO: 677037 - protein, 13 aa, Homo sapiens
  CDR3 for alpha chain variable domain of TCR clone 338519 (TRAV3, TRAJ21)
CAVREPDFNKFYF

SEQ ID NO: 677038 - protein, 14 aa, Homo sapiens
  CDR3 for beta chain variable domain of TCR clone 338519 (TRBV10-2, TRBJ1-5)
CASSSTGRNQPQHF

SEQ ID NO: 677039 - protein, 17 aa, Homo sapiens
  CDR3 for alpha chain variable domain of TCR clone 338520 (TRAV8-6, TRAJ58)
CAVSSWVGETSGSRLTF

SEQ ID NO: 677040 - protein, 14 aa, Homo sapiens
  CDR3 for beta chain variable domain of TCR clone 338520 (TRBV11-2, TRBJ1-2)
CASSLGTANYGYTF

SEQ ID NO: 677041 - protein, 16 aa, Homo sapiens
  CDR3 for alpha chain variable domain of TCR clone 338521 (TRAV30, TRAJ24)
CGTEIVDADSWGKFQF

SEQ ID NO: 677042 - protein, 13 aa, Homo sapiens
  CDR3 for beta chain variable domain of TCR clone 338521 (TRBV5-6, TRBJ1-2)
CASSLGTGYGYTF

SEQ ID NO: 677043 - protein, 13 aa, Homo sapiens
  CDR3 for alpha chain variable domain of TCR clone 338522 (TRAV17, TRAJ29)
CATDAFMKHTSCL

SEQ ID NO: 677044 - protein, 13 aa, Homo sapiens
  CDR3 for beta chain variable domain of TCR clone 338522 (TRBV5-7, TRBJ2-6)
CASTSSGANVLTF

SEQ ID NO: 677045 - protein, 16 aa, Homo sapiens
  CDR3 for alpha chain variable domain of TCR clone 338523 (TRAV14/DV4, TRAJ53)
CAMREGGGGSNYKLTF

SEQ ID NO: 677046 - protein, 18 aa, Homo sapiens
  CDR3 for beta chain variable domain of TCR clone 338523 (TRBV18, TRBJ1-3)
GASSPRGGAGPSGNTIYF

SEQ ID NO: 677047 - protein, 11 aa, Homo sapiens
  CDR3 for alpha chain variable domain of TCR clone 338524 (TRAV2, TRAJ13)
CASGGYQKVTF

SEQ ID NO: 677048 - protein, 14 aa, Homo sapiens
  CDR3 for beta chain variable domain of TCR clone 338524 (TRBV7-8, TRBJ2-7)
CASSQTQGADEQYF

SEQ ID NO: 677049 - protein, 16 aa, Homo sapiens
  CDR3 for alpha chain variable domain of TCR clone 338525 (TRAV30, TRAJ24)
CGTEIVDADSWGKFQF

SEQ ID NO: 677050 - protein, 11 aa, Homo sapiens
  CDR3 for beta chain variable domain of TCR clone 338525 (TRBV7-8, TRBJ2-5)
CASSPSETQYF

SEQ ID NO: 677051 - protein, 20 aa, Homo sapiens
  CDR3 for alpha chain variable domain of TCR clone 338526 (TRAV21, )
CAVSQDAGNNHIQNPDPTVY

SEQ ID NO: 677052 - protein, 16 aa, Homo sapiens
  CDR3 for beta chain variable domain of TCR clone 338526 (TRBV4-2, TRBJ1-1)
CASRPLDGGGDTEAFF

SEQ ID NO: 677053 - protein, 20 aa, Homo sapiens
  CDR3 for alpha chain variable domain of TCR clone 338527 (TRAV21, TRAJ4)
AASQPGDSATLAGGYNKLIF

SEQ ID NO: 677054 - protein, 19 aa, Homo sapiens
  CDR3 for beta chain variable domain of TCR clone 338527 (TRBV18, TRBJ1-3)
CASSPLSRTGMSSGSTIYF

SEQ ID NO: 677055 - protein, 13 aa, Homo sapiens
  CDR3 for alpha chain variable domain of TCR clone 338528 (TRAV2, TRAJ20)
CAVEDPSEYMLSF

SEQ ID NO: 677056 - protein, 16 aa, Homo sapiens
  CDR3 for beta chain variable domain of TCR clone 338528 (TRBV25-1, TRBJ2-7)
CASSELTGGGIYEQYF

SEQ ID NO: 677057 - protein, 16 aa, Homo sapiens
  CDR3 for alpha chain variable domain of TCR clone 338529 (TRAV26-1, TRAJ53)
CIVRVAMGGSNYKLTF

SEQ ID NO: 677058 - protein, 13 aa, Homo sapiens
  CDR3 for beta chain variable domain of TCR clone 338529 (TRBV4-2, TRBJ1-1)
CASSQAGNTEAFF

SEQ ID NO: 677059 - protein, 16 aa, Homo sapiens
  CDR3 for alpha chain variable domain of TCR clone 338530 (TRAV3, TRAJ21)
CAVRAIERGNFNKFYF

SEQ ID NO: 677060 - protein, 13 aa, Homo sapiens
  CDR3 for beta chain variable domain of TCR clone 338530 (TRBV4-2, TRBJ1-1)
CASSQAGNTEAFF

SEQ ID NO: 677061 - protein, 14 aa, Homo sapiens
  CDR3 for alpha chain variable domain of TCR clone 338531 (TRAV1-2, TRAJ8)
CAVREDTGFQKLIF

SEQ ID NO: 677062 - protein, 16 aa, Homo sapiens
  CDR3 for beta chain variable domain of TCR clone 338531 (TRBV12-4, TRBJ1-5)
CASSRPVGGSNQPQHF

SEQ ID NO: 677063 - protein, 14 aa, Homo sapiens
  CDR3 for alpha chain variable domain of TCR clone 338532 (TRAV13-1, TRAJ9)
FAASALTGGFKTIF

SEQ ID NO: 677064 - protein, 16 aa, Homo sapiens
  CDR3 for beta chain variable domain of TCR clone 338532 (TRBV7-8, TRBJ2-4)
CASSAERTLAKNIQYF

SEQ ID NO: 677065 - protein, 15 aa, Homo sapiens
  CDR3 for alpha chain variable domain of TCR clone 338533 (TRAV3, TRAJ10)
CAVRDGTGGGKQLTF

SEQ ID NO: 677066 - protein, 15 aa, Homo sapiens
  CDR3 for beta chain variable domain of TCR clone 338533 (TRBV4-2, TRBJ1-4)
CASSLVQREVEKLFF

SEQ ID NO: 677067 - protein, 10 aa, Homo sapiens
  CDR3 for alpha chain variable domain of TCR clone 338534 (TRAV2, TRAJ34)
CAVVNDKLIF

SEQ ID NO: 677068 - protein, 20 aa, Homo sapiens
  CDR3 for beta chain variable domain of TCR clone 338534 (TRBV19, TRBJ2-1)
CASSISRTVTSTRLNSEQFF

SEQ ID NO: 677069 - protein, 12 aa, Homo sapiens
  CDR3 for alpha chain variable domain of TCR clone 338535 (TRAV2, TRAJ34)
CAVERNTDKLIF

SEQ ID NO: 677070 - protein, 14 aa, Homo sapiens
  CDR3 for beta chain variable domain of TCR clone 338535 (TRBV12-5, TRBJ2-5)
CASGSRTHQETQYF

SEQ ID NO: 677071 - protein, 16 aa, Homo sapiens
  CDR3 for alpha chain variable domain of TCR clone 338536 (TRAV21, TRAJ37)
CAVRPRGSSNTGKLIF

SEQ ID NO: 677072 - protein, 18 aa, Homo sapiens
  CDR3 for beta chain variable domain of TCR clone 338536 (TRBV15, TRBJ2-3)
CATSRDGARSWDTDTQYF

SEQ ID NO: 677073 - protein, 15 aa, Homo sapiens
  CDR3 for alpha chain variable domain of TCR clone 338537 (TRAV38-1, TRAJ37)
CAFIHGSGNTGKLIC

SEQ ID NO: 677074 - protein, 15 aa, Homo sapiens
  CDR3 for beta chain variable domain of TCR clone 338537 (TRBV9, TRBJ1-6)
CASSVAGTGDSPLHF

SEQ ID NO: 677075 - protein, 11 aa, Homo sapiens
  CDR3 for alpha chain variable domain of TCR clone 338538 (TRAV3, TRAJ21)
CAVGNVNKFYF

SEQ ID NO: 677076 - protein, 14 aa, Homo sapiens
  CDR3 for beta chain variable domain of TCR clone 338538 (TRBV29-1, TRBJ2-2)
CSGRGSGNTGELFF

SEQ ID NO: 677077 - protein, 13 aa, Homo sapiens
  CDR3 for alpha chain variable domain of TCR clone 338539 (TRAV1-1, TRAJ28)
CVTSGAGSYQLTF

SEQ ID NO: 677078 - protein, 12 aa, Homo sapiens
  CDR3 for beta chain variable domain of TCR clone 338539 (TRBV18, TRBJ2-2)
CASSQRSSGGTR

SEQ ID NO: 677079 - protein, 13 aa, Homo sapiens
  CDR3 for alpha chain variable domain of TCR clone 338540 (TRAV23/DV6, TRAJ36)
CAASQPGANNLFF

SEQ ID NO: 677080 - protein, 13 aa, Homo sapiens
  CDR3 for beta chain variable domain of TCR clone 338540 (TRBV5-4, TRBJ1-5)
CASSLGGDQPQHF

SEQ ID NO: 677081 - protein, 16 aa, Homo sapiens
  CDR3 for alpha chain variable domain of TCR clone 338541 (TRAV17, TRAJ36)
CATFSLNWGKQPLLWD

SEQ ID NO: 677082 - protein, 13 aa, Homo sapiens
  CDR3 for beta chain variable domain of TCR clone 338541 (TRBV4-1, TRBJ1-1)
CASSQLGTGEAFL

SEQ ID NO: 677083 - protein, 19 aa, Homo sapiens
  CDR3 for alpha chain variable domain of TCR clone 338542 (TRAV29/DV5, TRAJ53)
CSVLLCSKPDRGSNYKLTF

SEQ ID NO: 677084 - protein, 15 aa, Homo sapiens
  CDR3 for beta chain variable domain of TCR clone 338542 (TRBV19, TRBJ2-4)
CASSIGLAGANMQYF

SEQ ID NO: 677085 - protein, 18 aa, Homo sapiens
  CDR3 for alpha chain variable domain of TCR clone 338543 (TRAV21, TRAJ52)
CAVRPSPAGGTSYGKLTF

SEQ ID NO: 677086 - protein, 13 aa, Homo sapiens
  CDR3 for beta chain variable domain of TCR clone 338543 (TRBV28, TRBJ2-7)
CASSNSGSYEQYF

SEQ ID NO: 677087 - protein, 13 aa, Homo sapiens
  CDR3 for alpha chain variable domain of TCR clone 338544 (TRAV3, TRAJ20)
CAVRDTGDYKLSF

SEQ ID NO: 677088 - protein, 13 aa, Homo sapiens
  CDR3 for beta chain variable domain of TCR clone 338544 (TRBV7-6, TRBJ2-1)
CQQLGGGADEQFF

SEQ ID NO: 677089 - protein, 17 aa, Homo sapiens
  CDR3 for alpha chain variable domain of TCR clone 338545 (TRAV36/DV7, TRAJ52)
CAVAQQAGGTSYGKLTF

SEQ ID NO: 677090 - protein, 14 aa, Homo sapiens
  CDR3 for beta chain variable domain of TCR clone 338545 (TRBV7-8, TRBJ2-5)
CASSATGGQETQYF

SEQ ID NO: 677091 - protein, 17 aa, Homo sapiens
  CDR3 for alpha chain variable domain of TCR clone 338546 (TRAV4, TRAJ42)
CLVGVLNYGGSQGNLIF

SEQ ID NO: 677092 - protein, 14 aa, Homo sapiens
  CDR3 for beta chain variable domain of TCR clone 338546 (TRBV19, TRBJ2-7)
CASSMGQGAIEQYF

SEQ ID NO: 677093 - protein, 15 aa, Homo sapiens
  CDR3 for alpha chain variable domain of TCR clone 338547 (TRAV23/DV6, TRAJ18)
CAARYRGSTLGRLYF

SEQ ID NO: 677094 - protein, 13 aa, Homo sapiens
  CDR3 for beta chain variable domain of TCR clone 338547 (TRBV7-2, TRBJ2-7)
CASSSPGGSEQYF

SEQ ID NO: 677095 - protein, 14 aa, Homo sapiens
  CDR3 for alpha chain variable domain of TCR clone 338548 (TRAV26-1, TRAJ38)
CIADNAGNNRKLIW

SEQ ID NO: 677096 - protein, 15 aa, Homo sapiens
  CDR3 for beta chain variable domain of TCR clone 338548 (TRBV11-2, TRBJ1-6)
CASSLDPWAVSPLHF

SEQ ID NO: 677097 - protein, 12 aa, Homo sapiens
  CDR3 for alpha chain variable domain of TCR clone 338549 (TRAV13-2, TRAJ23)
CAERHRGGKLIF

SEQ ID NO: 677098 - protein, 13 aa, Homo sapiens
  CDR3 for beta chain variable domain of TCR clone 338549 (TRBV7-9, TRBJ1-2)
CASSLKQNYCYTV

SEQ ID NO: 677099 - protein, 12 aa, Homo sapiens
  CDR3 for alpha chain variable domain of TCR clone 338550 (TRAV8-3, TRAJ26)
CAGDNYGLNFVF

SEQ ID NO: 677100 - protein, 11 aa, Homo sapiens
  CDR3 for beta chain variable domain of TCR clone 338550 (TRBV29-1, TRBJ2-5)
CSEDRTGTQYF

SEQ ID NO: 677101 - protein, 14 aa, Homo sapiens
  CDR3 for alpha chain variable domain of TCR clone 338551 (TRAV8-4, TRAJ16)
CAVSPVGRWPEAAL

SEQ ID NO: 677102 - protein, 15 aa, Homo sapiens
  CDR3 for beta chain variable domain of TCR clone 338551 (TRBV7-3, TRBJ1-6)
CASSVGRGAGSPLHF

SEQ ID NO: 677103 - protein, 14 aa, Homo sapiens
  CDR3 for alpha chain variable domain of TCR clone 338552 (TRAV8-4, TRAJ13)
CAVTLSGGSQKVTF

SEQ ID NO: 677104 - protein, 16 aa, Homo sapiens
  CDR3 for beta chain variable domain of TCR clone 338552 (TRBV5-7, TRBJ1-4)
CASSPSGGLKTEKLFF

SEQ ID NO: 677105 - protein, 17 aa, Homo sapiens
  CDR3 for alpha chain variable domain of TCR clone 338553 (TRAV29/DV5, TRAJ52)
CATTSTADGTSYGKLTF

SEQ ID NO: 677106 - protein, 13 aa, Homo sapiens
  CDR3 for beta chain variable domain of TCR clone 338553 (TRBV4-2, TRBJ1-1)
CASSQAGNTEAFF

SEQ ID NO: 677107 - protein, 12 aa, Homo sapiens
  CDR3 for alpha chain variable domain of TCR clone 338554 (TRAV9-2, TRAJ42)
CSAGGSQGNLIF

SEQ ID NO: 677108 - protein, 13 aa, Homo sapiens
  CDR3 for beta chain variable domain of TCR clone 338554 (TRBV24-1, TRBJ2-1)
CATSDLVENEQFF

SEQ ID NO: 677109 - protein, 12 aa, Homo sapiens
  CDR3 for alpha chain variable domain of TCR clone 338555 (TRAV25, TRAJ54)
CRVGQGAQKLVF

SEQ ID NO: 677110 - protein, 12 aa, Homo sapiens
  CDR3 for beta chain variable domain of TCR clone 338555 (TRBV5-1, TRBJ1-2)
CASSLDGKGYTF

SEQ ID NO: 677111 - protein, 10 aa, Homo sapiens
  CDR3 for alpha chain variable domain of TCR clone 338556 (TRAV27, TRAJ58)
PETSGSRLTF

SEQ ID NO: 677112 - protein, 14 aa, Homo sapiens
  CDR3 for beta chain variable domain of TCR clone 338556 (TRBV7-2, TRBJ2-7)
CASSPKTSFYEQYF

SEQ ID NO: 677113 - protein, 12 aa, Homo sapiens
  CDR3 for alpha chain variable domain of TCR clone 338557 (TRAV12-1, TRAJ31)
CVSWNNNARLMF

SEQ ID NO: 677114 - protein, 14 aa, Homo sapiens
  CDR3 for beta chain variable domain of TCR clone 338557 (TRBV7-9, TRBJ2-5)
CASSLVGGEETQYF

SEQ ID NO: 677115 - protein, 17 aa, Homo sapiens
  CDR3 for alpha chain variable domain of TCR clone 338558 (TRAV27, TRAJ32)
CAGGRGNYGGATNKLIF

SEQ ID NO: 677116 - protein, 12 aa, Homo sapiens
  CDR3 for beta chain variable domain of TCR clone 338558 (TRBV3-1, TRBJ2-1)
CASSQGSSGQFF

SEQ ID NO: 677117 - protein, 18 aa, Homo sapiens
  CDR3 for alpha chain variable domain of TCR clone 338559 (TRAV21, TRAJ52)
CAVRPSPAGGTSYGKLTF

SEQ ID NO: 677118 - protein, 16 aa, Homo sapiens
  CDR3 for beta chain variable domain of TCR clone 338559 (TRBV13, TRBJ2-7)
CASSSRESGRTYEQYF

SEQ ID NO: 677119 - protein, 17 aa, Homo sapiens
  CDR3 for alpha chain variable domain of TCR clone 338560 (TRAV23/DV6, TRAJ57)
CAASYTLSQGGSEKLIF

SEQ ID NO: 677120 - protein, 14 aa, Homo sapiens
  CDR3 for beta chain variable domain of TCR clone 338560 (TRBV25-1, TRBJ1-1)
CASTHLGGNTDAFF

SEQ ID NO: 677121 - protein, 11 aa, Homo sapiens
  CDR3 for alpha chain variable domain of TCR clone 338561 (TRAV21, TRAJ39)
LLVNAGNMLTF

SEQ ID NO: 677122 - protein, 17 aa, Homo sapiens
  CDR3 for beta chain variable domain of TCR clone 338561 (TRBV3-1, TRBJ2-7)
CASSQDLTGLSSYEQYF

SEQ ID NO: 677123 - protein, 13 aa, Homo sapiens
  CDR3 for alpha chain variable domain of TCR clone 338562 (TRAV2, TRAJ40)
YAVVPSGTYKYIF

SEQ ID NO: 677124 - protein, 14 aa, Homo sapiens
  CDR3 for beta chain variable domain of TCR clone 338562 (TRBV19, TRBJ2-1)
CASPTFVLSGEQFF

SEQ ID NO: 677125 - protein, 16 aa, Homo sapiens
  CDR3 for alpha chain variable domain of TCR clone 338563 (TRAV3, TRAJ37)
CAVRPHGSGNTGKLIF

SEQ ID NO: 677126 - protein, 13 aa, Homo sapiens
  CDR3 for beta chain variable domain of TCR clone 338563 (TRBV7-9, TRBJ1-2)
CASSVKQNYGYSF

SEQ ID NO: 677127 - protein, 16 aa, Homo sapiens
  CDR3 for alpha chain variable domain of TCR clone 338564 (TRAV23/DV6, TRAJ21)
CAASSGGGTTSTNLTL

SEQ ID NO: 677128 - protein, 11 aa, Homo sapiens
  CDR3 for beta chain variable domain of TCR clone 338564 (TRBV7-8, TRBJ2-7)
CASSLSLEQYF

SEQ ID NO: 677129 - protein, 10 aa, Homo sapiens
  CDR3 for alpha chain variable domain of TCR clone 338565 (TRAV1-2, TRAJ20)
CVPNDYKLSF

SEQ ID NO: 677130 - protein, 16 aa, Homo sapiens
  CDR3 for beta chain variable domain of TCR clone 338565 (TRBV20-1, TRBJ1-1)
CSARGRMGGMNTEAFF

SEQ ID NO: 677131 - protein, 17 aa, Homo sapiens
  CDR3 for alpha chain variable domain of TCR clone 338566 (TRAV12-3, TRAJ6)
CAMSARGGAGGSYIPTF

SEQ ID NO: 677132 - protein, 14 aa, Homo sapiens
  CDR3 for beta chain variable domain of TCR clone 338566 (TRBV7-3, TRBJ1-1)
CASSLKGGNTEAFF

SEQ ID NO: 677133 - protein, 13 aa, Homo sapiens
  CDR3 for alpha chain variable domain of TCR clone 338567 (TRAV12-1, TRAJ13)
CVVTSGGYQKVTF

SEQ ID NO: 677134 - protein, 14 aa, Homo sapiens
  CDR3 for beta chain variable domain of TCR clone 338567 (TRBV27, TRBJ2-7)
CASSLAGLTYEQYF

SEQ ID NO: 677135 - protein, 15 aa, Homo sapiens
  CDR3 for alpha chain variable domain of TCR clone 338568 (TRAV27, TRAJ38)
CAARRNAGNNRKLIC

SEQ ID NO: 677136 - protein, 17 aa, Homo sapiens
  CDR3 for beta chain variable domain of TCR clone 338568 (TRBV13, TRBJ2-3)
CASSLSRVAGGRNTQYF

SEQ ID NO: 677137 - protein, 14 aa, Homo sapiens
  CDR3 for alpha chain variable domain of TCR clone 338569 (TRAV16, TRAJ39)
CALSKNNAGNMLTF

SEQ ID NO: 677138 - protein, 15 aa, Homo sapiens
  CDR3 for beta chain variable domain of TCR clone 338569 (TRBV11-1, TRBJ2-3)
CASSLLAGRTDTQYF

SEQ ID NO: 677139 - protein, 13 aa, Homo sapiens
  CDR3 for alpha chain variable domain of TCR clone 338570 (TRAV30, TRAJ34)
CGTVGYSTDKLIF

SEQ ID NO: 677140 - protein, 16 aa, Homo sapiens
  CDR3 for beta chain variable domain of TCR clone 338570 (TRBV7-9, TRBJ1-2)
CASSLGFSSGEDGYTF

SEQ ID NO: 677141 - protein, 10 aa, Homo sapiens
  CDR3 for alpha chain variable domain of TCR clone 338571 (TRAV5, TRAJ34)
CAEDTDKLIF

SEQ ID NO: 677142 - protein, 12 aa, Homo sapiens
  CDR3 for beta chain variable domain of TCR clone 338571 (TRBV11-2, TRBJ2-2)
CASSLGGGALFF

SEQ ID NO: 677143 - protein, 12 aa, Homo sapiens
  CDR3 for alpha chain variable domain of TCR clone 338572 (TRAV9-2, TRAJ24)
CAHTDSWGKLQF

SEQ ID NO: 677144 - protein, 13 aa, Homo sapiens
  CDR3 for beta chain variable domain of TCR clone 338572 (TRBV12-4, TRBJ2-1)
CASSFQGYNEQFF

SEQ ID NO: 677145 - protein, 15 aa, Homo sapiens
  CDR3 for alpha chain variable domain of TCR clone 338573 (TRAV8-4, TRAJ53)
WAVSDGGGSNYKLTF

SEQ ID NO: 677146 - protein, 15 aa, Homo sapiens
  CDR3 for beta chain variable domain of TCR clone 338573 (TRBV19, TRBJ2-5)
CASHGLAGAQETQYF

SEQ ID NO: 677147 - protein, 18 aa, Homo sapiens
  CDR3 for alpha chain variable domain of TCR clone 338574 (TRAV21, TRAJ52)
CAVRPSPAGGTSYGKLAF

SEQ ID NO: 677148 - protein, 17 aa, Homo sapiens
  CDR3 for beta chain variable domain of TCR clone 338574 (TRBV13, TRBJ2-3)
YASSLSRVAGGRNTQYF

SEQ ID NO: 677149 - protein, 12 aa, Homo sapiens
  CDR3 for alpha chain variable domain of TCR clone 338575 (TRAV12-3, TRAJ17)
CAMTLTGNKLTF

SEQ ID NO: 677150 - protein, 14 aa, Homo sapiens
  CDR3 for beta chain variable domain of TCR clone 338575 (TRBV4-1, TRBJ2-7)
CASSQDREHVEQYY

SEQ ID NO: 677151 - protein, 14 aa, Homo sapiens
  CDR3 for alpha chain variable domain of TCR clone 338576 (TRAV17, TRAJ45)
CATASGGGPDGLTF

SEQ ID NO: 677152 - protein, 15 aa, Homo sapiens
  CDR3 for beta chain variable domain of TCR clone 338576 (TRBV11-2, TRBJ2-1)
CASSRNRGLMYEQFF

SEQ ID NO: 677153 - protein, 14 aa, Homo sapiens
  CDR3 for alpha chain variable domain of TCR clone 338577 (TRAV20, TRAJ22)
CAVALGGSARQLTF

SEQ ID NO: 677154 - protein, 16 aa, Homo sapiens
  CDR3 for beta chain variable domain of TCR clone 338577 (TRBV20-1, TRBJ1-4)
CSAPGQGLLTNEKLFF

SEQ ID NO: 677155 - protein, 15 aa, Homo sapiens
  CDR3 for alpha chain variable domain of TCR clone 338578 (TRAV21, TRAJ24)
CAAQSSTDSWGKLQF

SEQ ID NO: 677156 - protein, 15 aa, Homo sapiens
  CDR3 for beta chain variable domain of TCR clone 338578 (TRBV4-1, TRBJ2-7)
CASSQNTGRLYEQYF

SEQ ID NO: 677157 - protein, 16 aa, Homo sapiens
  CDR3 for alpha chain variable domain of TCR clone 338579 (TRAV12-3, TRAJ53)
CAMSPGSGGSNYKLTF

SEQ ID NO: 677158 - protein, 12 aa, Homo sapiens
  CDR3 for beta chain variable domain of TCR clone 338579 (TRBV7-8, TRBJ2-7)
CASSLGDREQYL

SEQ ID NO: 677159 - protein, 14 aa, Homo sapiens
  CDR3 for alpha chain variable domain of TCR clone 338580 (TRAV12-3, TRAJ15)
CAMIPPQAGPPLIF

SEQ ID NO: 677160 - protein, 12 aa, Homo sapiens
  CDR3 for beta chain variable domain of TCR clone 338580 (TRBV11-2, TRBJ2-2)
CASSFGGGELFF

SEQ ID NO: 677161 - protein, 15 aa, Homo sapiens
  CDR3 for alpha chain variable domain of TCR clone 338581 (TRAV13-2, TRAJ10)
CEENRDTGGGNKLTF

SEQ ID NO: 677162 - protein, 20 aa, Homo sapiens
  CDR3 for beta chain variable domain of TCR clone 338581 (TRBV28, TRBJ2-1)
CASTPIGRSPGLAGGNEQFF

SEQ ID NO: 677163 - protein, 16 aa, Homo sapiens
  CDR3 for alpha chain variable domain of TCR clone 338582 (TRAV16, TRAJ52)
CALSAAGCTSYGKLTF

SEQ ID NO: 677164 - protein, 12 aa, Homo sapiens
  CDR3 for beta chain variable domain of TCR clone 338582 (TRBV11-2, TRBJ2-2)
CASSLGGGELFF

SEQ ID NO: 677165 - protein, 19 aa, Homo sapiens
  CDR3 for alpha chain variable domain of TCR clone 338583 (TRAV40, )
CLPIPDIQNPDPAVYQLRD

SEQ ID NO: 677166 - protein, 15 aa, Homo sapiens
  CDR3 for beta chain variable domain of TCR clone 338583 (TRBV2, TRBJ1-2)
CASSEIGGANYGYIF

SEQ ID NO: 677167 - protein, 11 aa, Homo sapiens
  CDR3 for alpha chain variable domain of TCR clone 338584 (TRAV13-2, TRAJ20)
CTETDDYKLSF

SEQ ID NO: 677168 - protein, 13 aa, Homo sapiens
  CDR3 for beta chain variable domain of TCR clone 338584 (TRBV14, TRBJ2-7)
CASSQDRRYEQYF

SEQ ID NO: 677169 - protein, 12 aa, Homo sapiens
  CDR3 for alpha chain variable domain of TCR clone 338585 (TRAV26-1, TRAJ13)
CIVSRGYQKVTF

SEQ ID NO: 677170 - protein, 16 aa, Homo sapiens
  CDR3 for beta chain variable domain of TCR clone 338585 (TRBV27, TRBJ2-1)
CASSLSKGFGLEEQFF

SEQ ID NO: 677171 - protein, 12 aa, Homo sapiens
  CDR3 for alpha chain variable domain of TCR clone 338586 (TRAV1-1, TRAJ43)
CAPRVSSNDMRF

SEQ ID NO: 677172 - protein, 13 aa, Homo sapiens
  CDR3 for beta chain variable domain of TCR clone 338586 (TRBV20-1, TRBJ1-1)
CSARGGGNTEAFF

SEQ ID NO: 677173 - protein, 14 aa, Homo sapiens
  CDR3 for alpha chain variable domain of TCR clone 338587 (TRAV1-2, TRAJ8)
CAVREDTGFQKLVF

SEQ ID NO: 677174 - protein, 16 aa, Homo sapiens
  CDR3 for beta chain variable domain of TCR clone 338587 (TRBV27, TRBJ2-1)
SMNVEPGTSGDNEQLF

SEQ ID NO: 677175 - protein, 15 aa, Homo sapiens
  CDR3 for alpha chain variable domain of TCR clone 338588 (TRAV3, TRAJ37)
CAVRATSGNTGQLIF

SEQ ID NO: 677176 - protein, 14 aa, Homo sapiens
  CDR3 for beta chain variable domain of TCR clone 338588 (TRBV7-9, TRBJ2-1)
CASSSMVGFGEQFL

SEQ ID NO: 677177 - protein, 14 aa, Homo sapiens
  CDR3 for alpha chain variable domain of TCR clone 338589 (TRAV36/DV7, TRAJ57)
CAVGFPGGSEKLVF

SEQ ID NO: 677178 - protein, 18 aa, Homo sapiens
  CDR3 for beta chain variable domain of TCR clone 338589 (TRBV7-3, TRBJ2-3)
CASSSTGTYPGSTDTQYF

SEQ ID NO: 677179 - protein, 14 aa, Homo sapiens
  CDR3 for alpha chain variable domain of TCR clone 338590 (TRAV35, TRAJ50)
CAGHRKTSYDKVIF

SEQ ID NO: 677180 - protein, 11 aa, Homo sapiens
  CDR3 for beta chain variable domain of TCR clone 338590 (TRBV11-2, TRBJ2-2)
CASSLPGELFF

SEQ ID NO: 677181 - protein, 14 aa, Homo sapiens
  CDR3 for alpha chain variable domain of TCR clone 338591 (TRAV38-1, TRAJ29)
CAFITPSGKTPLVF

SEQ ID NO: 677182 - protein, 14 aa, Homo sapiens
  CDR3 for beta chain variable domain of TCR clone 338591 (TRBV18, TRBJ2-7)
CAGSPRGGAYEQYF

SEQ ID NO: 677183 - protein, 12 aa, Homo sapiens
  CDR3 for alpha chain variable domain of TCR clone 338592 (TRAV8-4, TRAJ43)
CAVSVNNNDMRF

SEQ ID NO: 677184 - protein, 18 aa, Homo sapiens
  CDR3 for beta chain variable domain of TCR clone 338592 (TRBV11-2, TRBJ2-3)
CASSLGGASRGAPNTQYF

SEQ ID NO: 677185 - protein, 15 aa, Homo sapiens
  CDR3 for alpha chain variable domain of TCR clone 338593 (TRAV2, TRAJ15)
CAVEDRGQAGTPLIF

SEQ ID NO: 677186 - protein, 13 aa, Homo sapiens
  CDR3 for beta chain variable domain of TCR clone 338593 (TRBV10-2, TRBJ2-7)
CASGASGGYEQYF

SEQ ID NO: 677187 - protein, 15 aa, Homo sapiens
  CDR3 for alpha chain variable domain of TCR clone 338594 (TRAV3, TRAJ42)
CAVRGGTGSQGNLIF

SEQ ID NO: 677188 - protein, 14 aa, Homo sapiens
  CDR3 for beta chain variable domain of TCR clone 338594 (TRBV19, TRBJ1-2)
CASSSLFDRDVYTF

SEQ ID NO: 677189 - protein, 10 aa, Homo sapiens
  CDR3 for alpha chain variable domain of TCR clone 338595 (TRAV26-1, TRAJ22)
RSGCERQLTF

SEQ ID NO: 677190 - protein, 13 aa, Homo sapiens
  CDR3 for beta chain variable domain of TCR clone 338595 (TRBV7-9, TRBJ1-2)
CASSLKQNYGYTF

SEQ ID NO: 677191 - protein, 14 aa, Homo sapiens
  CDR3 for alpha chain variable domain of TCR clone 338596 (TRAV17, TRAJ22)
FATSPSGSARQLTF

SEQ ID NO: 677192 - protein, 13 aa, Homo sapiens
  CDR3 for beta chain variable domain of TCR clone 338596 (TRBV12-4, TRBJ1-2)
CASSLRQGKGYTF

SEQ ID NO: 677193 - protein, 12 aa, Homo sapiens
  CDR3 for alpha chain variable domain of TCR clone 338597 (TRAV12-3, TRAJ20)
CATVRGDYKLSF

SEQ ID NO: 677194 - protein, 17 aa, Homo sapiens
  CDR3 for beta chain variable domain of TCR clone 338597 (TRBV13, TRBJ2-3)
CASSLSRVAGGRNTQYF

SEQ ID NO: 677195 - protein, 16 aa, Homo sapiens
  CDR3 for alpha chain variable domain of TCR clone 338598 (TRAV12-2, TRAJ43)
CAGDDMRFGAGTRLTV

SEQ ID NO: 677196 - protein, 16 aa, Homo sapiens
  CDR3 for beta chain variable domain of TCR clone 338598 (TRBV7-3, TRBJ2-2)
CASSLKRGTLSGELFF

SEQ ID NO: 677197 - protein, 12 aa, Homo sapiens
  CDR3 for alpha chain variable domain of TCR clone 338599 (TRAV36/DV7, TRAJ26)
CAVDNYGQNFVF

SEQ ID NO: 677198 - protein, 16 aa, Homo sapiens
  CDR3 for beta chain variable domain of TCR clone 338599 (TRBV7-3, TRBJ2-2)
CARSLTGTGTTGELFF

SEQ ID NO: 677199 - protein, 14 aa, Homo sapiens
  CDR3 for alpha chain variable domain of TCR clone 338600 (TRAV16, TRAJ31)
CALSGRNNNARRMF

SEQ ID NO: 677200 - protein, 12 aa, Homo sapiens
  CDR3 for beta chain variable domain of TCR clone 338600 (TRBV11-2, TRBJ1-2)
CASSREGDGDTF

SEQ ID NO: 677201 - protein, 16 aa, Homo sapiens
  CDR3 for alpha chain variable domain of TCR clone 338601 (TRAV3, TRAJ37)
CAVRPPGSGNTGQLIF

SEQ ID NO: 677202 - protein, 17 aa, Homo sapiens
  CDR3 for beta chain variable domain of TCR clone 338601 (TRBV5-1, TRBJ2-5)
CASSPVALGQNQETQYF

SEQ ID NO: 677203 - protein, 17 aa, Homo sapiens
  CDR3 for alpha chain variable domain of TCR clone 338602 (TRAV3, TRAJ6)
CAVRDGPRAGGSYIPTS

SEQ ID NO: 677204 - protein, 14 aa, Homo sapiens
  CDR3 for beta chain variable domain of TCR clone 338602 (TRBV5-4, TRBJ1-1)
CASSLDSRRDEAFF

SEQ ID NO: 677205 - protein, 14 aa, Homo sapiens
  CDR3 for alpha chain variable domain of TCR clone 338603 (TRAV16, TRAJ15)
CALSGPQAGTALIF

SEQ ID NO: 677206 - protein, 12 aa, Homo sapiens
  CDR3 for beta chain variable domain of TCR clone 338603 (TRBV18, TRBJ2-5)
CASSPSKETEYF

SEQ ID NO: 677207 - protein, 12 aa, Homo sapiens
  CDR3 for alpha chain variable domain of TCR clone 338604 (TRAV27, )
CAGALKLATTIS

SEQ ID NO: 677208 - protein, 12 aa, Homo sapiens
  CDR3 for beta chain variable domain of TCR clone 338604 (TRBV6-3, TRBJ2-7)
CASSLTPYEQYF

SEQ ID NO: 677209 - protein, 17 aa, Homo sapiens
  CDR3 for alpha chain variable domain of TCR clone 338605 (TRAV3, TRAJ6)
CAVRDGPRAGGSYIPTL

SEQ ID NO: 677210 - protein, 14 aa, Homo sapiens
  CDR3 for beta chain variable domain of TCR clone 338605 (TRBV20-1, TRBJ1-1)
CSAQTRIGGTEAFF

SEQ ID NO: 677211 - protein, 12 aa, Homo sapiens
  CDR3 for alpha chain variable domain of TCR clone 338606 (TRAV1-2, TRAJ33)
CAALDSNYQLIW

SEQ ID NO: 677212 - protein, 14 aa, Homo sapiens
  CDR3 for beta chain variable domain of TCR clone 338606 (TRBV20-1, TRBJ2-1)
CSAQIGGAANEQLF

SEQ ID NO: 677213 - protein, 12 aa, Homo sapiens
  CDR3 for alpha chain variable domain of TCR clone 338607 (TRAV8-3, TRAJ6)
CAVAGVSYIPTF

SEQ ID NO: 677214 - protein, 14 aa, Homo sapiens
  CDR3 for beta chain variable domain of TCR clone 338607 (TRBV27, TRBJ2-7)
YASATGTERREQYF

SEQ ID NO: 677215 - protein, 15 aa, Homo sapiens
  CDR3 for alpha chain variable domain of TCR clone 338608 (TRAV8-3, TRAJ45)
CASSYLGGGADGLTF

SEQ ID NO: 677216 - protein, 14 aa, Homo sapiens
  CDR3 for beta chain variable domain of TCR clone 338608 (TRBV11-2, TRBJ2-3)
CASSRLARTDTQYF

SEQ ID NO: 677217 - protein, 14 aa, Homo sapiens
  CDR3 for alpha chain variable domain of TCR clone 338609 (TRAV9-2, TRAJ39)
CALSIYNAGNMLTF

SEQ ID NO: 677218 - protein, 14 aa, Homo sapiens
  CDR3 for beta chain variable domain of TCR clone 338609 (TRBV12-5, TRBJ2-5)
CASGSRTHQETQYF

SEQ ID NO: 677219 - protein, 11 aa, Homo sapiens
  CDR3 for alpha chain variable domain of TCR clone 338610 (TRAV3, TRAJ21)
CALGNLNKFYF

SEQ ID NO: 677220 - protein, 16 aa, Homo sapiens
  CDR3 for beta chain variable domain of TCR clone 338610 (TRBV19, TRBJ2-1)
CASSKAGPSSYNEQFF

SEQ ID NO: 677221 - protein, 15 aa, Homo sapiens
  CDR3 for alpha chain variable domain of TCR clone 338611 (TRAV21, TRAJ53)
CAVRQSGGSNYKLTF

SEQ ID NO: 677222 - protein, 14 aa, Homo sapiens
  CDR3 for beta chain variable domain of TCR clone 338611 (TRBV18, TRBJ2-5)
CTSSPGVSQETQYF

SEQ ID NO: 677223 - protein, 14 aa, Homo sapiens
  CDR3 for alpha chain variable domain of TCR clone 338612 (TRAV35, TRAJ22)
CAGLRPGSARQLTF

SEQ ID NO: 677224 - protein, 13 aa, Homo sapiens
  CDR3 for beta chain variable domain of TCR clone 338612 (TRBV11-2, TRBJ2-5)
CASSSTGEETQYF

SEQ ID NO: 677225 - protein, 13 aa, Homo sapiens
  CDR3 for alpha chain variable domain of TCR clone 338613 (TRAV20, TRAJ40)
CAVPFSGTYNHIF

SEQ ID NO: 677226 - protein, 13 aa, Homo sapiens
  CDR3 for beta chain variable domain of TCR clone 338613 (TRBV15, TRBJ2-5)
CATSQIGEETQYF

SEQ ID NO: 677227 - protein, 13 aa, Homo sapiens
  CDR3 for alpha chain variable domain of TCR clone 338614 (TRAV8-3, TRAJ44)
CAVVPGTASKLIF

SEQ ID NO: 677228 - protein, 14 aa, Homo sapiens
  CDR3 for beta chain variable domain of TCR clone 338614 (TRBV11-2, TRBJ2-3)
CASSRLARTDTQYF

SEQ ID NO: 677229 - protein, 14 aa, Homo sapiens
  CDR3 for alpha chain variable domain of TCR clone 338615 (TRAV12-3, TRAJ33)
CNDHGRDSNYQLIW

SEQ ID NO: 677230 - protein, 14 aa, Homo sapiens
  CDR3 for beta chain variable domain of TCR clone 338615 (TRBV25-1, TRBJ1-1)
CASTHLGGNTEAFF

SEQ ID NO: 677231 - protein, 13 aa, Homo sapiens
  CDR3 for alpha chain variable domain of TCR clone 338616 (TRAV8-3, TRAJ36)
CAVGATGANNLFF

SEQ ID NO: 677232 - protein, 17 aa, Homo sapiens
  CDR3 for beta chain variable domain of TCR clone 338616 (TRBV24-1, TRBJ2-1)
CATSDVSTSGTYNEQFF

SEQ ID NO: 677233 - protein, 13 aa, Homo sapiens
  CDR3 for alpha chain variable domain of TCR clone 338617 (TRAV8-4, TRAJ54)
CAVTGGGAQKLVF

SEQ ID NO: 677234 - protein, 16 aa, Homo sapiens
  CDR3 for beta chain variable domain of TCR clone 338617 (TRBV2, TRBJ2-6)
CASSEVGGAGANVLTL

SEQ ID NO: 677235 - protein, 12 aa, Homo sapiens
  CDR3 for alpha chain variable domain of TCR clone 338618 (TRAV12-3, TRAJ17)
CAMTLTGNKLTF

SEQ ID NO: 677236 - protein, 16 aa, Homo sapiens
  CDR3 for beta chain variable domain of TCR clone 338618 (TRBV6-4, TRBJ1-2)
CASSEAVGDPNYGDTF

SEQ ID NO: 677237 - protein, 14 aa, Homo sapiens
  CDR3 for alpha chain variable domain of TCR clone 338619 (TRAV1-2, TRAJ16)
CAVNRFSDGQKLLF

SEQ ID NO: 677238 - protein, 14 aa, Homo sapiens
  CDR3 for beta chain variable domain of TCR clone 338619 (TRBV7-9, TRBJ2-2)
CASSTVRGRGELFF

SEQ ID NO: 677239 - protein, 12 aa, Homo sapiens
  CDR3 for alpha chain variable domain of TCR clone 338620 (TRAV8-1, TRAJ26)
CAVNNYGQNFVF

SEQ ID NO: 677240 - protein, 15 aa, Homo sapiens
  CDR3 for beta chain variable domain of TCR clone 338620 (TRBV20-1, TRBJ1-1)
CSASRDRFLNTEAFF

SEQ ID NO: 677241 - protein, 14 aa, Homo sapiens
  CDR3 for alpha chain variable domain of TCR clone 338621 (TRAV13-1, TRAJ35)
CAASKGGFGNVLHC

SEQ ID NO: 677242 - protein, 15 aa, Homo sapiens
  CDR3 for beta chain variable domain of TCR clone 338621 (TRBV28, TRBJ1-1)
CASTSTRGLNTEAFF

SEQ ID NO: 677243 - protein, 14 aa, Homo sapiens
  CDR3 for alpha chain variable domain of TCR clone 338622 (TRAV26-1, TRAJ38)
CIADNVGNNRNLIW

SEQ ID NO: 677244 - protein, 13 aa, Homo sapiens
  CDR3 for beta chain variable domain of TCR clone 338622 (TRBV20-1, TRBJ1-1)
CSARGGGNTEAFF

SEQ ID NO: 677245 - protein, 14 aa, Homo sapiens
  CDR3 for alpha chain variable domain of TCR clone 338623 (TRAV12-1, TRAJ30)
CVVNIGGRDDKIIF

SEQ ID NO: 677246 - protein, 13 aa, Homo sapiens
  CDR3 for beta chain variable domain of TCR clone 338623 (TRBV12-5, TRBJ2-1)
CASGVGGGNEQFF

SEQ ID NO: 677247 - protein, 17 aa, Homo sapiens
  CDR3 for alpha chain variable domain of TCR clone 338624 (TRAV12-2, TRAJ52)
CAVNKGAGGTSYGKLAF

SEQ ID NO: 677248 - protein, 16 aa, Homo sapiens
  CDR3 for beta chain variable domain of TCR clone 338624 (TRBV2, TRBJ1-5)
CASGSTGSNFGQPQHF

SEQ ID NO: 677249 - protein, 13 aa, Homo sapiens
  CDR3 for alpha chain variable domain of TCR clone 338625 (TRAV30, TRAJ6)
CGTEAGGSYIPTF

SEQ ID NO: 677250 - protein, 11 aa, Homo sapiens
  CDR3 for beta chain variable domain of TCR clone 338625 (TRBV19, TRBJ1-1)
CASSIGSEAFF

SEQ ID NO: 677251 - protein, 14 aa, Homo sapiens
  CDR3 for alpha chain variable domain of TCR clone 338626 (TRAV26-1, TRAJ38)
CIADNAGNNRELIW

SEQ ID NO: 677252 - protein, 13 aa, Homo sapiens
  CDR3 for beta chain variable domain of TCR clone 338626 (TRBV7-9, TRBJ2-3)
CASSPGSTDTQYF

SEQ ID NO: 677253 - protein, 14 aa, Homo sapiens
  CDR3 for alpha chain variable domain of TCR clone 338627 (TRAV1-2, TRAJ8)
CAVREDTGFQKLVF

SEQ ID NO: 677254 - protein, 16 aa, Homo sapiens
  CDR3 for beta chain variable domain of TCR clone 338627 (TRBV25-1, TRBJ2-3)
CASSEFGGGRTDTQYF

SEQ ID NO: 677255 - protein, 13 aa, Homo sapiens
  CDR3 for alpha chain variable domain of TCR clone 338628 (TRAV1-2, TRAJ9)
CAALNTGDFKTIF

SEQ ID NO: 677256 - protein, 15 aa, Homo sapiens
  CDR3 for beta chain variable domain of TCR clone 338628 (TRBV6-3, TRBJ2-7)
CASSSPGTVFYEQYF

SEQ ID NO: 677257 - protein, 13 aa, Homo sapiens
  CDR3 for alpha chain variable domain of TCR clone 338629 (TRAV12-1, TRAJ21)
CVVTLYNFNKFYF

SEQ ID NO: 677258 - protein, 20 aa, Homo sapiens
  CDR3 for beta chain variable domain of TCR clone 338629 (TRBV7-8, TRBJ2-1)
CASSLAHRLAGVRSYDEQFF

SEQ ID NO: 677259 - protein, 18 aa, Homo sapiens
  CDR3 for alpha chain variable domain of TCR clone 338630 (TRAV38-2/DV8, TRAJ42)
CAYRSADLTGGSQGNLNF

SEQ ID NO: 677260 - protein, 12 aa, Homo sapiens
  CDR3 for beta chain variable domain of TCR clone 338630 (TRBV11-2, TRBJ2-2)
CASSLGGGELFF

SEQ ID NO: 677261 - protein, 15 aa, Homo sapiens
  CDR3 for alpha chain variable domain of TCR clone 338631 (TRAV3, TRAJ22)
CAVRDRGGSARQLTF

SEQ ID NO: 677262 - protein, 15 aa, Homo sapiens
  CDR3 for beta chain variable domain of TCR clone 338631 (TRBV15, TRBJ1-1)
CATSLQGGRNTEAFF

SEQ ID NO: 677263 - protein, 21 aa, Homo sapiens
  CDR3 for alpha chain variable domain of TCR clone 338632 (TRAV3, TRAJ42)
CAVRRLEEAKEISSLEKALNF

SEQ ID NO: 677264 - protein, 14 aa, Homo sapiens
  CDR3 for beta chain variable domain of TCR clone 338632 (TRBV19, TRBJ2-5)
CASSSSGIQETQYF

SEQ ID NO: 677265 - protein, 13 aa, Homo sapiens
  CDR3 for alpha chain variable domain of TCR clone 338633 (TRAV26-1, TRAJ40)
CIVRVEGTYKYIF

SEQ ID NO: 677266 - protein, 13 aa, Homo sapiens
  CDR3 for beta chain variable domain of TCR clone 338633 (TRBV19, TRBJ2-5)
CASSETAPETQYF

SEQ ID NO: 677267 - protein, 14 aa, Homo sapiens
  CDR3 for alpha chain variable domain of TCR clone 338634 (TRAV12-3, TRAJ10)
SHLPLTGGANRLTF

SEQ ID NO: 677268 - protein, 20 aa, Homo sapiens
  CDR3 for beta chain variable domain of TCR clone 338634 (TRBV28, TRBJ2-1)
CASTPIGRSPGLAGGNEQFF

SEQ ID NO: 677269 - protein, 16 aa, Homo sapiens
  CDR3 for alpha chain variable domain of TCR clone 338635 (TRAV26-1, TRAJ32)
CFVRTNYGGATNKLIF

SEQ ID NO: 677270 - protein, 14 aa, Homo sapiens
  CDR3 for beta chain variable domain of TCR clone 338635 (TRBV27, TRBJ1-1)
CASSLLSGLSEAFF

SEQ ID NO: 677271 - protein, 14 aa, Homo sapiens
  CDR3 for alpha chain variable domain of TCR clone 338636 (TRAV27, TRAJ23)
CAGLSYNQGGKLIF

SEQ ID NO: 677272 - protein, 15 aa, Homo sapiens
  CDR3 for beta chain variable domain of TCR clone 338636 (TRBV19, TRBJ2-2)
CASSLNRGVTGELFS

SEQ ID NO: 677273 - protein, 13 aa, Homo sapiens
  CDR3 for alpha chain variable domain of TCR clone 338637 (TRAV27, TRAJ6)
CAGGTRGSYIPTF

SEQ ID NO: 677274 - protein, 13 aa, Homo sapiens
  CDR3 for beta chain variable domain of TCR clone 338637 (TRBV10-2, TRBJ2-7)
CASGASGGYEQYF

SEQ ID NO: 677275 - protein, 14 aa, Homo sapiens
  CDR3 for alpha chain variable domain of TCR clone 338638 (TRAV20, TRAJ26)
CAVQAAIYGPNFVF

SEQ ID NO: 677276 - protein, 14 aa, Homo sapiens
  CDR3 for beta chain variable domain of TCR clone 338638 (TRBV27, TRBJ2-2)
CASSLGHTTGELFF

SEQ ID NO: 677277 - protein, 13 aa, Homo sapiens
  CDR3 for alpha chain variable domain of TCR clone 338639 (TRAV12-1, TRAJ31)
CVVNMNNNARLMF

SEQ ID NO: 677278 - protein, 16 aa, Homo sapiens
  CDR3 for beta chain variable domain of TCR clone 338639 (TRBV28, TRBJ1-4)
CASSSRTGAANEKLFF

SEQ ID NO: 677279 - protein, 14 aa, Homo sapiens
  CDR3 for alpha chain variable domain of TCR clone 338640 (TRAV35, TRAJ50)
CAGHRKTSYDKAIF

SEQ ID NO: 677280 - protein, 13 aa, Homo sapiens
  CDR3 for beta chain variable domain of TCR clone 338640 (TRBV7-7, TRBJ2-3)
CASSLSRADTQDF

SEQ ID NO: 677281 - protein, 12 aa, Homo sapiens
  CDR3 for alpha chain variable domain of TCR clone 338641 (TRAV12-3, TRAJ40)
CAMSSGTYKYIF

SEQ ID NO: 677282 - protein, 15 aa, Homo sapiens
  CDR3 for beta chain variable domain of TCR clone 338641 (TRBV12-5, TRBJ2-2)
CASGRLGGNTGELFF

SEQ ID NO: 677283 - protein, 14 aa, Homo sapiens
  CDR3 for alpha chain variable domain of TCR clone 338642 (TRAV1-2, TRAJ8)
CSVREDTGFQKLVF

SEQ ID NO: 677284 - protein, 13 aa, Homo sapiens
  CDR3 for beta chain variable domain of TCR clone 338642 (TRBV20-1, TRBJ1-4)
CSARTPYNEKLFF

SEQ ID NO: 677285 - protein, 14 aa, Homo sapiens
  CDR3 for alpha chain variable domain of TCR clone 338643 (TRAV13-1, TRAJ10)
CAAKEPGGGNKLTF

SEQ ID NO: 677286 - protein, 13 aa, Homo sapiens
  CDR3 for beta chain variable domain of TCR clone 338643 (TRBV7-8, TRBJ2-7)
CASSFAGLYEQYF

SEQ ID NO: 677287 - protein, 12 aa, Homo sapiens
  CDR3 for alpha chain variable domain of TCR clone 338644 (TRAV13-1, TRAJ21)
CAAKEGFIKFYF

SEQ ID NO: 677288 - protein, 16 aa, Homo sapiens
  CDR3 for beta chain variable domain of TCR clone 338644 (TRBV7-8, TRBJ2-4)
CASSAERTLAKNIQYF

SEQ ID NO: 677289 - protein, 14 aa, Homo sapiens
  CDR3 for alpha chain variable domain of TCR clone 338645 (TRAV12-2, TRAJ13)
CAVKKTGGYRKVTF

SEQ ID NO: 677290 - protein, 15 aa, Homo sapiens
  CDR3 for beta chain variable domain of TCR clone 338645 (TRBV27, TRBJ2-1)
CASSDGGGSSNEQFF

SEQ ID NO: 677291 - protein, 13 aa, Homo sapiens
  CDR3 for alpha chain variable domain of TCR clone 338646 (TRAV12-2, TRAJ10)
CAVPTGGGNKLTF

SEQ ID NO: 677292 - protein, 17 aa, Homo sapiens
  CDR3 for beta chain variable domain of TCR clone 338646 (TRBV2, TRBJ2-1)
CASSRNSLLAGGDEQFF

SEQ ID NO: 677293 - protein, 16 aa, Homo sapiens
  CDR3 for alpha chain variable domain of TCR clone 338647 (TRAV30, TRAJ24)
CGTEVVDADSWGKFQF

SEQ ID NO: 677294 - protein, 14 aa, Homo sapiens
  CDR3 for beta chain variable domain of TCR clone 338647 (TRBV12-5, TRBJ2-5)
CDSGSRTHQETQYF

SEQ ID NO: 677295 - protein, 11 aa, Homo sapiens
  CDR3 for alpha chain variable domain of TCR clone 338648 (TRAV35, TRAJ30)
CAGLRDDKIIF

SEQ ID NO: 677296 - protein, 15 aa, Homo sapiens
  CDR3 for beta chain variable domain of TCR clone 338648 (TRBV9, TRBJ1-6)
CASSVAGTGDSPLHF

SEQ ID NO: 677297 - protein, 12 aa, Homo sapiens
  CDR3 for alpha chain variable domain of TCR clone 338649 (TRAV1-1, TRAJ39)
CAVPVVGNMLTF

SEQ ID NO: 677298 - protein, 16 aa, Homo sapiens
  CDR3 for beta chain variable domain of TCR clone 338649 (TRBV12-4, TRBJ1-5)
CASSRPVGGSNQPQHF

SEQ ID NO: 677299 - protein, 16 aa, Homo sapiens
  CDR3 for alpha chain variable domain of TCR clone 338650 (TRAV3, TRAJ10)
CAVRDMRAGGGNKLTF

SEQ ID NO: 677300 - protein, 17 aa, Homo sapiens
  CDR3 for beta chain variable domain of TCR clone 338650 (TRBV4-1, TRBJ2-5)
CASSQDLTGGPIETQYF

SEQ ID NO: 677301 - protein, 19 aa, Homo sapiens
  CDR3 for alpha chain variable domain of TCR clone 338651 (TRAV25, TRAJ20)
TATQTTDVGILHHDYKLSF

SEQ ID NO: 677302 - protein, 17 aa, Homo sapiens
  CDR3 for beta chain variable domain of TCR clone 338651 (TRBV4-3, TRBJ2-1)
CASSQFSSGRASGEQFF

SEQ ID NO: 677303 - protein, 17 aa, Homo sapiens
  CDR3 for alpha chain variable domain of TCR clone 338652 (TRAV38-1, TRAJ28)
CAFMKPTSGAGSYQLTF

SEQ ID NO: 677304 - protein, 15 aa, Homo sapiens
  CDR3 for beta chain variable domain of TCR clone 338652 (TRBV5-1, TRBJ2-4)
CASSLGGEGSYIQYF

SEQ ID NO: 677305 - protein, 17 aa, Homo sapiens
  CDR3 for alpha chain variable domain of TCR clone 338653 (TRAV3, TRAJ42)
CAVRDRDYGGSQGNLIF

SEQ ID NO: 677306 - protein, 15 aa, Homo sapiens
  CDR3 for beta chain variable domain of TCR clone 338653 (TRBV28, TRBJ2-3)
CASSQELGGTDTQYF

SEQ ID NO: 677307 - protein, 16 aa, Homo sapiens
  CDR3 for alpha chain variable domain of TCR clone 338654 (TRAV12-2, TRAJ10)
CAVNRVLTGGGNKLTF

SEQ ID NO: 677308 - protein, 12 aa, Homo sapiens
  CDR3 for beta chain variable domain of TCR clone 338654 (TRBV28, TRBJ2-7)
CDSSFSSYEQYF

SEQ ID NO: 677309 - protein, 12 aa, Homo sapiens
  CDR3 for alpha chain variable domain of TCR clone 338655 (TRAV8-3, TRAJ26)
CAGDNYGKNFVF

SEQ ID NO: 677310 - protein, 17 aa, Homo sapiens
  CDR3 for beta chain variable domain of TCR clone 338655 (TRBV7-9, TRBJ2-3)
CASSPTVAGDPTDTQYF

SEQ ID NO: 677311 - protein, 12 aa, Homo sapiens
  CDR3 for alpha chain variable domain of TCR clone 338656 (TRAV27, TRAJ35)
CAGADFGNVLHC

SEQ ID NO: 677312 - protein, 16 aa, Homo sapiens
  CDR3 for beta chain variable domain of TCR clone 338656 (TRBV6-1, TRBJ2-1)
CASISRQGSAYNEQFF

SEQ ID NO: 677313 - protein, 16 aa, Homo sapiens
  CDR3 for alpha chain variable domain of TCR clone 338657 (TRAV26-1, TRAJ23)
CIVRVHPYNQGGKLIF

SEQ ID NO: 677314 - protein, 14 aa, Homo sapiens
  CDR3 for beta chain variable domain of TCR clone 338657 (TRBV7-2, TRBJ2-5)
CASSFTQGQETQYF

SEQ ID NO: 677315 - protein, 15 aa, Homo sapiens
  CDR3 for alpha chain variable domain of TCR clone 338658 (TRAV13-1, TRAJ16)
CAARYQMARSGSLQG

SEQ ID NO: 677316 - protein, 13 aa, Homo sapiens
  CDR3 for beta chain variable domain of TCR clone 338658 (TRBV4-1, TRBJ2-1)
CASSQAGGDEQFF

SEQ ID NO: 677317 - protein, 12 aa, Homo sapiens
  CDR3 for alpha chain variable domain of TCR clone 338659 (TRAV16, TRAJ9)
CALSSRGFKTIF

SEQ ID NO: 677318 - protein, 14 aa, Homo sapiens
  CDR3 for beta chain variable domain of TCR clone 338659 (TRBV7-9, TRBJ2-1)
CASSLAGPYNEQFF

SEQ ID NO: 677319 - protein, 13 aa, Homo sapiens
  CDR3 for alpha chain variable domain of TCR clone 338660 (TRAV20, TRAJ49)
CAVQARTGNQFYF

SEQ ID NO: 677320 - protein, 13 aa, Homo sapiens
  CDR3 for beta chain variable domain of TCR clone 338660 (TRBV20-1, TRBJ1-1)
CSAPLGGGTEAFF

SEQ ID NO: 677321 - protein, 15 aa, Homo sapiens
  CDR3 for alpha chain variable domain of TCR clone 338661 (TRAV25, TRAJ53)
CAGPRSGGSNYKLTF

SEQ ID NO: 677322 - protein, 15 aa, Homo sapiens
  CDR3 for beta chain variable domain of TCR clone 338661 (TRBV20-1, TRBJ2-7)
CSARDRVSGMDEQYF

SEQ ID NO: 677323 - protein, 14 aa, Homo sapiens
  CDR3 for alpha chain variable domain of TCR clone 338662 (TRAV12-2, TRAJ44)
CAVNPAGTASKLTF

SEQ ID NO: 677324 - protein, 15 aa, Homo sapiens
  CDR3 for beta chain variable domain of TCR clone 338662 (TRBV9, TRBJ2-2)
CISVPAASSPGSCFF

SEQ ID NO: 677325 - protein, 15 aa, Homo sapiens
  CDR3 for alpha chain variable domain of TCR clone 338663 (TRAV8-6, TRAJ26)
CAVSDQSPGGQNFVF

SEQ ID NO: 677326 - protein, 13 aa, Homo sapiens
  CDR3 for beta chain variable domain of TCR clone 338663 (TRBV27, TRBJ2-7)
CAGSLRHRYEQYF

SEQ ID NO: 677327 - protein, 12 aa, Homo sapiens
  CDR3 for alpha chain variable domain of TCR clone 338664 (TRAV8-1, TRAJ31)
CAVINNNARLMF

SEQ ID NO: 677328 - protein, 11 aa, Homo sapiens
  CDR3 for beta chain variable domain of TCR clone 338664 (TRBV25-1, TRBJ2-4)
CQSRDQNIQYF

SEQ ID NO: 677329 - protein, 16 aa, Homo sapiens
  CDR3 for alpha chain variable domain of TCR clone 338665 (TRAV30, TRAJ24)
CGTEIVDADSWGKFQF

SEQ ID NO: 677330 - protein, 14 aa, Homo sapiens
  CDR3 for beta chain variable domain of TCR clone 338665 (TRBV12-5, TRBJ2-5)
CASGSRTHKETQYV

SEQ ID NO: 677331 - protein, 17 aa, Homo sapiens
  CDR3 for alpha chain variable domain of TCR clone 338666 (TRAV4, TRAJ13)
CLVGVQGSSGGYQKVTF

SEQ ID NO: 677332 - protein, 18 aa, Homo sapiens
  CDR3 for beta chain variable domain of TCR clone 338666 (TRBV15, TRBJ2-3)
CATSRDDARSWDTDTQYF

SEQ ID NO: 677333 - protein, 19 aa, Homo sapiens
  CDR3 for alpha chain variable domain of TCR clone 338667 (TRAV26-1, TRAJ50)
CCVLLHRQNPKTSYDTVIF

SEQ ID NO: 677334 - protein, 17 aa, Homo sapiens
  CDR3 for beta chain variable domain of TCR clone 338667 (TRBV4-1, TRBJ1-4)
CASSQEGPRGVEEKLFF

SEQ ID NO: 677335 - protein, 12 aa, Homo sapiens
  CDR3 for alpha chain variable domain of TCR clone 338668 (TRAV21, TRAJ11)
CAATSGYSTLTF

SEQ ID NO: 677336 - protein, 18 aa, Homo sapiens
  CDR3 for beta chain variable domain of TCR clone 338668 (TRBV6-6, TRBJ1-3)
CASSYSKWDSISGNTIYF

SEQ ID NO: 677337 - protein, 13 aa, Homo sapiens
  CDR3 for alpha chain variable domain of TCR clone 338669 (TRAV38-1, TRAJ42)
CARWGGSQGNLIF

SEQ ID NO: 677338 - protein, 13 aa, Homo sapiens
  CDR3 for beta chain variable domain of TCR clone 338669 (TRBV15, TRBJ1-6)
RATSGGLTSPLHF

SEQ ID NO: 677339 - protein, 16 aa, Homo sapiens
  CDR3 for alpha chain variable domain of TCR clone 338670 (TRAV12-3, TRAJ53)
CAMRPGSGGTTYKLTF

SEQ ID NO: 677340 - protein, 11 aa, Homo sapiens
  CDR3 for beta chain variable domain of TCR clone 338670 (TRBV29-1, TRBJ2-5)
CSEDRTGTQYF

SEQ ID NO: 677341 - protein, 16 aa, Homo sapiens
  CDR3 for alpha chain variable domain of TCR clone 338671 (TRAV3, TRAJ10)
CAVRDMRAGGGNKPTF

SEQ ID NO: 677342 - protein, 16 aa, Homo sapiens
  CDR3 for beta chain variable domain of TCR clone 338671 (TRBV12-5, TRBJ2-5)
CASGPRTSGNQETQYF

SEQ ID NO: 677343 - protein, 14 aa, Homo sapiens
  CDR3 for alpha chain variable domain of TCR clone 338672 (TRAV13-1, TRAJ10)
CAAKEPGGGNKLTF

SEQ ID NO: 677344 - protein, 16 aa, Homo sapiens
  CDR3 for beta chain variable domain of TCR clone 338672 (TRBV12-4, TRBJ2-5)
CASSFFVRGRQETQYF

SEQ ID NO: 677345 - protein, 13 aa, Homo sapiens
  CDR3 for alpha chain variable domain of TCR clone 338673 (TRAV8-6, TRAJ33)
CAVSEGSNYQLIW

SEQ ID NO: 677346 - protein, 17 aa, Homo sapiens
  CDR3 for beta chain variable domain of TCR clone 338673 (TRBV18, TRBJ2-1)
CASSKGLSGGADNEQFF

SEQ ID NO: 677347 - protein, 15 aa, Homo sapiens
  CDR3 for alpha chain variable domain of TCR clone 338674 (TRAV23/DV6, TRAJ18)
CAARYRGSTLGWLYF

SEQ ID NO: 677348 - protein, 13 aa, Homo sapiens
  CDR3 for beta chain variable domain of TCR clone 338674 (TRBV7-2, TRBJ2-7)
CASSSPSGSEQYF

SEQ ID NO: 677349 - protein, 12 aa, Homo sapiens
  CDR3 for alpha chain variable domain of TCR clone 338675 (TRAV1-1, TRAJ39)
CAVPVVGNMLTF

SEQ ID NO: 677350 - protein, 11 aa, Homo sapiens
  CDR3 for beta chain variable domain of TCR clone 338675 (TRBV12-4, TRBJ2-3)
CASTATDTQYF

SEQ ID NO: 677351 - protein, 17 aa, Homo sapiens
  CDR3 for alpha chain variable domain of TCR clone 338676 (TRAV21, TRAJ13)
CAVPRSFWGLPESYLWT

SEQ ID NO: 677352 - protein, 14 aa, Homo sapiens
  CDR3 for beta chain variable domain of TCR clone 338676 (TRBV20-1, TRBJ2-7)
CSAKDRKGAYEQYF

SEQ ID NO: 677353 - protein, 12 aa, Homo sapiens
  CDR3 for alpha chain variable domain of TCR clone 338677 (TRAV29/DV5, TRAJ43)
CAAPYNNNDMRF

SEQ ID NO: 677354 - protein, 12 aa, Homo sapiens
  CDR3 for beta chain variable domain of TCR clone 338677 (TRBV7-8, TRBJ2-7)
CASSLGDREQYF

SEQ ID NO: 677355 - protein, 15 aa, Homo sapiens
  CDR3 for alpha chain variable domain of TCR clone 338678 (TRAV23/DV6, TRAJ18)
CAARYRGSALGRLYF

SEQ ID NO: 677356 - protein, 14 aa, Homo sapiens
  CDR3 for beta chain variable domain of TCR clone 338678 (TRBV6-1, TRBJ1-3)
CASVQGGGGNTIYF

SEQ ID NO: 677357 - protein, 13 aa, Homo sapiens
  CDR3 for alpha chain variable domain of TCR clone 338679 (TRAV2, TRAJ40)
CAVVTSGTYKYIF

SEQ ID NO: 677358 - protein, 11 aa, Homo sapiens
  CDR3 for beta chain variable domain of TCR clone 338679 (TRBV19, TRBJ1-1)
CAISIGSEAFF

SEQ ID NO: 677359 - protein, 16 aa, Homo sapiens
  CDR3 for alpha chain variable domain of TCR clone 338680 (TRAV3, TRAJ37)
CAVRPHGYGNTGKLIF

SEQ ID NO: 677360 - protein, 17 aa, Homo sapiens
  CDR3 for beta chain variable domain of TCR clone 338680 (TRBV20-1, TRBJ2-1)
CSASSSGLAGSYNEQFF

SEQ ID NO: 677361 - protein, 13 aa, Homo sapiens
  CDR3 for alpha chain variable domain of TCR clone 338681 (TRAV26-1, TRAJ48)
CIVRVVGDEKLTF

SEQ ID NO: 677362 - protein, 19 aa, Homo sapiens
  CDR3 for beta chain variable domain of TCR clone 338681 (TRBV11-3, TRBJ2-2)
CASSTRPGAKTTNTGKLFF

SEQ ID NO: 677363 - protein, 13 aa, Homo sapiens
  CDR3 for alpha chain variable domain of TCR clone 338682 (TRAV12-1, TRAJ39)
CVVPQRAGNMLTF

SEQ ID NO: 677364 - protein, 15 aa, Homo sapiens
  CDR3 for beta chain variable domain of TCR clone 338682 (TRBV19, TRBJ2-1)
CASSSPGVPLDEQFF

SEQ ID NO: 677365 - protein, 16 aa, Homo sapiens
  CDR3 for alpha chain variable domain of TCR clone 338683 (TRAV23/DV6, TRAJ57)
CAASSTLSQGGSEKLF

SEQ ID NO: 677366 - protein, 14 aa, Homo sapiens
  CDR3 for beta chain variable domain of TCR clone 338683 (TRBV25-1, TRBJ1-1)
CASTHLGGNTEAYF

SEQ ID NO: 677367 - protein, 14 aa, Homo sapiens
  CDR3 for alpha chain variable domain of TCR clone 338684 (TRAV8-3, TRAJ4)
CAVGASDGYNKLIF

SEQ ID NO: 677368 - protein, 16 aa, Homo sapiens
  CDR3 for beta chain variable domain of TCR clone 338684 (TRBV4-3, TRBJ2-2)
CASSHLQGSGTGELFF

SEQ ID NO: 677369 - protein, 12 aa, Homo sapiens
  CDR3 for alpha chain variable domain of TCR clone 338685 (TRAV13-1, TRAJ42)
SALRGSQGNLIF

SEQ ID NO: 677370 - protein, 13 aa, Homo sapiens
  CDR3 for beta chain variable domain of TCR clone 338685 (TRBV2, TRBJ1-4)
CASSELGVEKLFF

SEQ ID NO: 677371 - protein, 14 aa, Homo sapiens
  CDR3 for alpha chain variable domain of TCR clone 338686 (TRAV1-2, TRAJ8)
CAVREDTGFQKLVF

SEQ ID NO: 677372 - protein, 13 aa, Homo sapiens
  CDR3 for beta chain variable domain of TCR clone 338686 (TRBV15, TRBJ1-2)
CATSMTANYGYTF

SEQ ID NO: 677373 - protein, 16 aa, Homo sapiens
  CDR3 for alpha chain variable domain of TCR clone 338687 (TRAV21, TRAJ37)
CAVRTAGSSNTGKLIF

SEQ ID NO: 677374 - protein, 15 aa, Homo sapiens
  CDR3 for beta chain variable domain of TCR clone 338687 (TRBV7-2, TRBJ2-1)
CASSLVAGRYNEQFF

SEQ ID NO: 677375 - protein, 23 aa, Homo sapiens
  CDR3 for alpha chain variable domain of TCR clone 338688 (TRAV10, TRAJ34)
CVVSGKHRQAHLWDWDQITSLSK

SEQ ID NO: 677376 - protein, 14 aa, Homo sapiens
  CDR3 for beta chain variable domain of TCR clone 338688 (TRBV19, TRBJ2-1)
CAGPTFVLSGEQFF

SEQ ID NO: 677377 - protein, 12 aa, Homo sapiens
  CDR3 for alpha chain variable domain of TCR clone 338689 (TRAV8-4, TRAJ9)
SAVRAGGFKTIF

SEQ ID NO: 677378 - protein, 12 aa, Homo sapiens
  CDR3 for beta chain variable domain of TCR clone 338689 (TRBV11-2, TRBJ2-2)
CASSLGGGELFF

SEQ ID NO: 677379 - protein, 12 aa, Homo sapiens
  CDR3 for alpha chain variable domain of TCR clone 338690 (TRAV12-3, TRAJ43)
CAISSNNNDMRF

SEQ ID NO: 677380 - protein, 15 aa, Homo sapiens
  CDR3 for beta chain variable domain of TCR clone 338690 (TRBV27, TRBJ1-4)
CASSPRHATNEILFF

SEQ ID NO: 677381 - protein, 13 aa, Homo sapiens
  CDR3 for alpha chain variable domain of TCR clone 338691 (TRAV30, TRAJ24)
CGTVTDSWGKLQF

SEQ ID NO: 677382 - protein, 12 aa, Homo sapiens
  CDR3 for beta chain variable domain of TCR clone 338691 (TRBV11-2, TRBJ2-7)
CASSPPADEQYV

SEQ ID NO: 677383 - protein, 12 aa, Homo sapiens
  CDR3 for alpha chain variable domain of TCR clone 338692 (TRAV17, TRAJ31)
CAMEQGNARLMF

SEQ ID NO: 677384 - protein, 14 aa, Homo sapiens
  CDR3 for beta chain variable domain of TCR clone 338692 (TRBV28, TRBJ2-7)
CASTTDGDGFVQYF

SEQ ID NO: 677385 - protein, 15 aa, Homo sapiens
  CDR3 for alpha chain variable domain of TCR clone 338693 (TRAV29/DV5, TRAJ53)
CSASASGGSNYKLTF

SEQ ID NO: 677386 - protein, 17 aa, Homo sapiens
  CDR3 for beta chain variable domain of TCR clone 338693 (TRBV7-8, TRBJ2-6)
CASSAGTGGAGANVLTF

SEQ ID NO: 677387 - protein, 15 aa, Homo sapiens
  CDR3 for alpha chain variable domain of TCR clone 338694 (TRAV20, TRAJ43)
CAVQAGKSSNNDMRF

SEQ ID NO: 677388 - protein, 19 aa, Homo sapiens
  CDR3 for beta chain variable domain of TCR clone 338694 (TRBV7-2, TRBJ2-3)
CASSFLSRNWGGGTDTQYF

SEQ ID NO: 677389 - protein, 16 aa, Homo sapiens
  CDR3 for alpha chain variable domain of TCR clone 338695 (TRAV12-3, TRAJ40)
CAMSAMLTSGTYKYIF

SEQ ID NO: 677390 - protein, 14 aa, Homo sapiens
  CDR3 for beta chain variable domain of TCR clone 338695 (TRBV20-1, TRBJ2-1)
CSAHPGLPYNEQFF

SEQ ID NO: 677391 - protein, 13 aa, Homo sapiens
  CDR3 for alpha chain variable domain of TCR clone 338696 (TRAV17, TRAJ29)
CATGPSGNTPLVF

SEQ ID NO: 677392 - protein, 15 aa, Homo sapiens
  CDR3 for beta chain variable domain of TCR clone 338696 (TRBV12-4, TRBJ1-2)
CASSPITGGGYGYTF

SEQ ID NO: 677393 - protein, 16 aa, Homo sapiens
  CDR3 for alpha chain variable domain of TCR clone 338697 (TRAV14/DV4, TRAJ15)
CAMREGPAQAGTALIF

SEQ ID NO: 677394 - protein, 12 aa, Homo sapiens
  CDR3 for beta chain variable domain of TCR clone 338697 (TRBV28, TRBJ2-6)
CAVQAGANVLTF

SEQ ID NO: 677395 - protein, 14 aa, Homo sapiens
  CDR3 for alpha chain variable domain of TCR clone 338698 (TRAV2, TRAJ9)
CAVADRSGGFNTIF

SEQ ID NO: 677396 - protein, 13 aa, Homo sapiens
  CDR3 for beta chain variable domain of TCR clone 338698 (TRBV19, TRBJ1-2)
CASSVPGQDGYTF

SEQ ID NO: 677397 - protein, 11 aa, Homo sapiens
  CDR3 for alpha chain variable domain of TCR clone 338699 (TRAV17, TRAJ9)
CGFTGGFKTIS

SEQ ID NO: 677398 - protein, 14 aa, Homo sapiens
  CDR3 for beta chain variable domain of TCR clone 338699 (TRBV7-9, TRBJ2-2)
CERRFVEENGEMFF

SEQ ID NO: 677399 - protein, 12 aa, Homo sapiens
  CDR3 for alpha chain variable domain of TCR clone 338700 (TRAV21, TRAJ49)
CAVNDGGNQFYF

SEQ ID NO: 677400 - protein, 14 aa, Homo sapiens
  CDR3 for beta chain variable domain of TCR clone 338700 (TRBV7-9, TRBJ2-2)
CASSGLADTGELFF

SEQ ID NO: 677401 - protein, 15 aa, Homo sapiens
  CDR3 for alpha chain variable domain of TCR clone 338701 (TRAV12-1, TRAJ10)
CVVNKLTGGGNKLTY

SEQ ID NO: 677402 - protein, 17 aa, Homo sapiens
  CDR3 for beta chain variable domain of TCR clone 338701 (TRBV5-1, TRBJ1-6)
CASSPSLQGSDNSPLHF

SEQ ID NO: 677403 - protein, 12 aa, Homo sapiens
  CDR3 for alpha chain variable domain of TCR clone 338702 (TRAV8-3, TRAJ26)
CVVDNYGQNFVF

SEQ ID NO: 677404 - protein, 15 aa, Homo sapiens
  CDR3 for beta chain variable domain of TCR clone 338702 (TRBV11-3, TRBJ2-3)
CASLKDGREGDTQYF

SEQ ID NO: 677405 - protein, 12 aa, Homo sapiens
  CDR3 for alpha chain variable domain of TCR clone 338703 (TRAV12-3, TRAJ17)
CAMTLTGNKLTF

SEQ ID NO: 677406 - protein, 16 aa, Homo sapiens
  CDR3 for beta chain variable domain of TCR clone 338703 (TRBV5-1, TRBJ2-2)
CASSLGGTGSTGELFF

SEQ ID NO: 677407 - protein, 15 aa, Homo sapiens
  CDR3 for alpha chain variable domain of TCR clone 338704 (TRAV26-1, TRAJ29)
CIVRVVGSGNTPLSF

SEQ ID NO: 677408 - protein, 14 aa, Homo sapiens
  CDR3 for beta chain variable domain of TCR clone 338704 (TRBV18, TRBJ2-5)
CASSPGVSQETQYF

SEQ ID NO: 677409 - protein, 12 aa, Homo sapiens
  CDR3 for alpha chain variable domain of TCR clone 338705 (TRAV1-1, TRAJ8)
CAGGTGFQKLVF

SEQ ID NO: 677410 - protein, 13 aa, Homo sapiens
  CDR3 for beta chain variable domain of TCR clone 338705 (TRBV10-1, TRBJ2-1)
CASSAGPDNEQFF

SEQ ID NO: 677411 - protein, 14 aa, Homo sapiens
  CDR3 for alpha chain variable domain of TCR clone 338706 (TRAV36/DV7, TRAJ40)
CAVETTSGTYKYFF

SEQ ID NO: 677412 - protein, 13 aa, Homo sapiens
  CDR3 for beta chain variable domain of TCR clone 338706 (TRBV10-3, TRBJ2-5)
CAMTSGAGETQYF

SEQ ID NO: 677413 - protein, 14 aa, Homo sapiens
  CDR3 for alpha chain variable domain of TCR clone 338707 (TRAV17, TRAJ11)
CATDTSRGYSTITF

SEQ ID NO: 677414 - protein, 13 aa, Homo sapiens
  CDR3 for beta chain variable domain of TCR clone 338707 (TRBV19, TRBJ2-5)
CASRDSRRETQYF

SEQ ID NO: 677415 - protein, 17 aa, Homo sapiens
  CDR3 for alpha chain variable domain of TCR clone 338708 (TRAV8-6, TRAJ58)
CAVSSWVRETSGSRLTF

SEQ ID NO: 677416 - protein, 14 aa, Homo sapiens
  CDR3 for beta chain variable domain of TCR clone 338708 (TRBV7-2, TRBJ2-7)
CASSLPPGQGPQYF

SEQ ID NO: 677417 - protein, 15 aa, Homo sapiens
  CDR3 for alpha chain variable domain of TCR clone 338709 (TRAV25, TRAJ53)
CAATGGGGSNYKLTF

SEQ ID NO: 677418 - protein, 19 aa, Homo sapiens
  CDR3 for beta chain variable domain of TCR clone 338709 (TRBV7-2, TRBJ2-3)
CASSFLSRNWGGGTDTQYL

SEQ ID NO: 677419 - protein, 15 aa, Homo sapiens
  CDR3 for alpha chain variable domain of TCR clone 338710 (TRAV26-1, TRAJ22)
CIVRVSFWFCKATDL

SEQ ID NO: 677420 - protein, 15 aa, Homo sapiens
  CDR3 for beta chain variable domain of TCR clone 338710 (TRBV7-9, TRBJ1-3)
CASSFRGSPGNTIYF

SEQ ID NO: 677421 - protein, 15 aa, Homo sapiens
  CDR3 for alpha chain variable domain of TCR clone 338711 (TRAV2, TRAJ9)
CAVEDRGTGGFKTIF

SEQ ID NO: 677422 - protein, 12 aa, Homo sapiens
  CDR3 for beta chain variable domain of TCR clone 338711 (TRBV5-1, TRBJ1-2)
CASSQDTYGYTF

SEQ ID NO: 677423 - protein, 14 aa, Homo sapiens
  CDR3 for alpha chain variable domain of TCR clone 338712 (TRAV1-1, TRAJ23)
CAVSIYNQGGKLIF

SEQ ID NO: 677424 - protein, 15 aa, Homo sapiens
  CDR3 for beta chain variable domain of TCR clone 338712 (TRBV5-8, TRBJ2-2)
CASSLDSGATGELFF

SEQ ID NO: 677425 - protein, 14 aa, Homo sapiens
  CDR3 for alpha chain variable domain of TCR clone 338713 (TRAV12-2, TRAJ33)
CAMKRARSDYQLIW

SEQ ID NO: 677426 - protein, 12 aa, Homo sapiens
  CDR3 for beta chain variable domain of TCR clone 338713 (TRBV24-1, TRBJ2-3)
CATSDSTDTQYF

SEQ ID NO: 677427 - protein, 11 aa, Homo sapiens
  CDR3 for alpha chain variable domain of TCR clone 338714 (TRAV3, TRAJ49)
CAPITGNQFYF

SEQ ID NO: 677428 - protein, 18 aa, Homo sapiens
  CDR3 for beta chain variable domain of TCR clone 338714 (TRBV19, TRBJ2-6)
CASSKNRGTHSGANVLTF

SEQ ID NO: 677429 - protein, 15 aa, Homo sapiens
  CDR3 for alpha chain variable domain of TCR clone 338715 (TRAV35, TRAJ38)
CAGFSNAGNNRKLIW

SEQ ID NO: 677430 - protein, 16 aa, Homo sapiens
  CDR3 for beta chain variable domain of TCR clone 338715 (TRBV7-2, TRBJ2-5)
CASSPRGRGGGETQYF

SEQ ID NO: 677431 - protein, 14 aa, Homo sapiens
  CDR3 for alpha chain variable domain of TCR clone 338716 (TRAV12-3, TRAJ10)
SHLPPTGGGNKLTF

SEQ ID NO: 677432 - protein, 14 aa, Homo sapiens
  CDR3 for beta chain variable domain of TCR clone 338716 (TRBV6-1, TRBJ1-3)
CASVQGGGGTTIYF

SEQ ID NO: 677433 - protein, 14 aa, Homo sapiens
  CDR3 for alpha chain variable domain of TCR clone 338717 (TRAV1-2, TRAJ16)
CAVNRFSDGQKLLF

SEQ ID NO: 677434 - protein, 16 aa, Homo sapiens
  CDR3 for beta chain variable domain of TCR clone 338717 (TRBV19, TRBJ2-3)
YASSPEWDRGTDTQYF

SEQ ID NO: 677435 - protein, 13 aa, Homo sapiens
  CDR3 for alpha chain variable domain of TCR clone 338718 (TRAV23/DV6, TRAJ58)
CAARLIRGSRLTC

SEQ ID NO: 677436 - protein, 13 aa, Homo sapiens
  CDR3 for beta chain variable domain of TCR clone 338718 (TRBV2, TRBJ1-6)
CADSGSYNSPLHF

SEQ ID NO: 677437 - protein, 17 aa, Homo sapiens
  CDR3 for alpha chain variable domain of TCR clone 338719 (TRAV2, TRAJ36)
CAVEDRGNWGKQPLLWD

SEQ ID NO: 677438 - protein, 14 aa, Homo sapiens
  CDR3 for beta chain variable domain of TCR clone 338719 (TRBV7-9, TRBJ2-5)
CARSLDPAQETQYF

SEQ ID NO: 677439 - protein, 12 aa, Homo sapiens
  CDR3 for alpha chain variable domain of TCR clone 338720 (TRAV13-1, TRAJ49)
CASSPMGNQFYF

SEQ ID NO: 677440 - protein, 13 aa, Homo sapiens
  CDR3 for beta chain variable domain of TCR clone 338720 (TRBV20-1, TRBJ2-2)
CSASAAGTGELFF

SEQ ID NO: 677441 - protein, 14 aa, Homo sapiens
  CDR3 for alpha chain variable domain of TCR clone 338721 (TRAV21, TRAJ47)
CAVGVGLYGNKLVF

SEQ ID NO: 677442 - protein, 12 aa, Homo sapiens
  CDR3 for beta chain variable domain of TCR clone 338721 (TRBV11-2, TRBJ2-1)
CASSPGNNEQFF

SEQ ID NO: 677443 - protein, 10 aa, Homo sapiens
  CDR3 for alpha chain variable domain of TCR clone 338722 (TRAV2, TRAJ34)
CAVVNDKLIF

SEQ ID NO: 677444 - protein, 13 aa, Homo sapiens
  CDR3 for beta chain variable domain of TCR clone 338722 (TRBV7-3, TRBJ2-2)
CASSLRGGGELFF

SEQ ID NO: 677445 - protein, 12 aa, Homo sapiens
  CDR3 for alpha chain variable domain of TCR clone 338723 (TRAV21, TRAJ54)
CAVRSGAQKLVF

SEQ ID NO: 677446 - protein, 15 aa, Homo sapiens
  CDR3 for beta chain variable domain of TCR clone 338723 (TRBV9, TRBJ1-1)
CASSVALGQTYEAFF

SEQ ID NO: 677447 - protein, 16 aa, Homo sapiens
  CDR3 for alpha chain variable domain of TCR clone 338724 (TRAV12-3, TRAJ53)
CAMSPGSGGSNYKLTF

SEQ ID NO: 677448 - protein, 13 aa, Homo sapiens
  CDR3 for beta chain variable domain of TCR clone 338724 (TRBV20-1, TRBJ2-7)
CSATPWRRYEQYF

SEQ ID NO: 677449 - protein, 14 aa, Homo sapiens
  CDR3 for alpha chain variable domain of TCR clone 338725 (TRAV12-1, TRAJ13)
GVVIDSGGYQKVTF

SEQ ID NO: 677450 - protein, 12 aa, Homo sapiens
  CDR3 for beta chain variable domain of TCR clone 338725 (TRBV29-1, TRBJ2-3)
CSVTGGADTQYF

SEQ ID NO: 677451 - protein, 18 aa, Homo sapiens
  CDR3 for alpha chain variable domain of TCR clone 338726 (TRAV21, TRAJ52)
CAVRPSPAGGTSYGKLTF

SEQ ID NO: 677452 - protein, 17 aa, Homo sapiens
  CDR3 for beta chain variable domain of TCR clone 338726 (TRBV13, TRBJ2-3)
CASSLSRVAEGSNTQYF

SEQ ID NO: 677453 - protein, 15 aa, Homo sapiens
  CDR3 for alpha chain variable domain of TCR clone 338727 (TRAV27, TRAJ38)
CAARRNAGNNRKLIW

SEQ ID NO: 677454 - protein, 13 aa, Homo sapiens
  CDR3 for beta chain variable domain of TCR clone 338727 (TRBV15, TRBJ2-5)
CATSQIGEETQYF

SEQ ID NO: 677455 - protein, 15 aa, Homo sapiens
  CDR3 for alpha chain variable domain of TCR clone 338728 (TRAV26-1, TRAJ27)
CIVTVLTPMQANQPL

SEQ ID NO: 677456 - protein, 13 aa, Homo sapiens
  CDR3 for beta chain variable domain of TCR clone 338728 (TRBV20-1, TRBJ2-7)
CSATHTSGYEQYF

SEQ ID NO: 677457 - protein, 16 aa, Homo sapiens
  CDR3 for alpha chain variable domain of TCR clone 338729 (TRAV4, TRAJ22)
CLVGDLYSGSARQLTF

SEQ ID NO: 677458 - protein, 16 aa, Homo sapiens
  CDR3 for beta chain variable domain of TCR clone 338729 (TRBV7-9, TRBJ2-1)
CASSDVAGGSYNEQFF

SEQ ID NO: 677459 - protein, 19 aa, Homo sapiens
  CDR3 for alpha chain variable domain of TCR clone 338730 (TRAV13-1, TRAJ52)
CAASPYQNAGGTSYGKLTS

SEQ ID NO: 677460 - protein, 14 aa, Homo sapiens
  CDR3 for beta chain variable domain of TCR clone 338730 (TRBV19, TRBJ2-7)
CASTVQGRPYEQYF

SEQ ID NO: 677461 - protein, 15 aa, Homo sapiens
  CDR3 for alpha chain variable domain of TCR clone 338731 (TRAV12-3, TRAJ10)
CASYTLTGGGNKLTF

SEQ ID NO: 677462 - protein, 15 aa, Homo sapiens
  CDR3 for beta chain variable domain of TCR clone 338731 (TRBV7-2, TRBJ1-6)
CASSLGPDRGMPLHF

SEQ ID NO: 677463 - protein, 17 aa, Homo sapiens
  CDR3 for alpha chain variable domain of TCR clone 338732 (TRAV13-1, TRAJ52)
CAASSGAGGTSYGKLTF

SEQ ID NO: 677464 - protein, 17 aa, Homo sapiens
  CDR3 for beta chain variable domain of TCR clone 338732 (TRBV15, TRBJ1-4)
CATSRYGTGDPNEKLFF

SEQ ID NO: 677465 - protein, 15 aa, Homo sapiens
  CDR3 for alpha chain variable domain of TCR clone 338733 (TRAV3, TRAJ36)
CAVRASQTGANNLFF

SEQ ID NO: 677466 - protein, 16 aa, Homo sapiens
  CDR3 for beta chain variable domain of TCR clone 338733 (TRBV28, TRBJ2-1)
CASSSRVRDSYNEQFF

SEQ ID NO: 677467 - protein, 14 aa, Homo sapiens
  CDR3 for alpha chain variable domain of TCR clone 338734 (TRAV12-3, TRAJ57)
CAMSAWGGSEKLVF

SEQ ID NO: 677468 - protein, 15 aa, Homo sapiens
  CDR3 for beta chain variable domain of TCR clone 338734 (TRBV20-1, TRBJ2-7)
CSARDRVSGMDEQYF

SEQ ID NO: 677469 - protein, 14 aa, Homo sapiens
  CDR3 for alpha chain variable domain of TCR clone 338735 (TRAV13-1, TRAJ28)
CAASKGAGSYQLTF

SEQ ID NO: 677470 - protein, 16 aa, Homo sapiens
  CDR3 for beta chain variable domain of TCR clone 338735 (TRBV4-2, TRBJ2-3)
CASSQGGARGGVKQYF

SEQ ID NO: 677471 - protein, 14 aa, Homo sapiens
  CDR3 for alpha chain variable domain of TCR clone 338736 (TRAV13-1, TRAJ48)
CAASTDFGNEKLTF

SEQ ID NO: 677472 - protein, 15 aa, Homo sapiens
  CDR3 for beta chain variable domain of TCR clone 338736 (TRBV6-3, TRBJ2-7)
CASSSPGTVSYEQYF

SEQ ID NO: 677473 - protein, 13 aa, Homo sapiens
  CDR3 for alpha chain variable domain of TCR clone 338737 (TRAV12-2, TRAJ12)
CAVNGDSSYKLIF

SEQ ID NO: 677474 - protein, 19 aa, Homo sapiens
  CDR3 for beta chain variable domain of TCR clone 338737 (TRBV4-3, TRBJ2-7)
CISAPAAKQPSGTPYEQYF

SEQ ID NO: 677475 - protein, 15 aa, Homo sapiens
  CDR3 for alpha chain variable domain of TCR clone 338738 (TRAV3, TRAJ13)
CSVRVYSGGYQKVTF

SEQ ID NO: 677476 - protein, 15 aa, Homo sapiens
  CDR3 for beta chain variable domain of TCR clone 338738 (TRBV5-7, TRBJ1-2)
CASSLGVAANYGYTF

SEQ ID NO: 677477 - protein, 14 aa, Homo sapiens
  CDR3 for alpha chain variable domain of TCR clone 338739 (TRAV13-1, TRAJ35)
CAASKGGFGNVLHC

SEQ ID NO: 677478 - protein, 17 aa, Homo sapiens
  CDR3 for beta chain variable domain of TCR clone 338739 (TRBV3-1, TRBJ2-7)
CASSQDLTGLSSYEQYF

SEQ ID NO: 677479 - protein, 15 aa, Homo sapiens
  CDR3 for alpha chain variable domain of TCR clone 338740 (TRAV8-4, TRAJ29)
CAGSEDFRGNTPLVF

SEQ ID NO: 677480 - protein, 12 aa, Homo sapiens
  CDR3 for beta chain variable domain of TCR clone 338740 (TRBV14, TRBJ2-7)
CASSSLKGEQYF

SEQ ID NO: 677481 - protein, 12 aa, Homo sapiens
  CDR3 for alpha chain variable domain of TCR clone 338741 (TRAV8-3, TRAJ41)
CAVALSGYALNF

SEQ ID NO: 677482 - protein, 18 aa, Homo sapiens
  CDR3 for beta chain variable domain of TCR clone 338741 (TRBV20-1, TRBJ2-6)
CSAKTTPTHGSGANVLTF

SEQ ID NO: 677483 - protein, 14 aa, Homo sapiens
  CDR3 for alpha chain variable domain of TCR clone 338742 (TRAV12-2, TRAJ10)
CAAPLTGGGNKLTF

SEQ ID NO: 677484 - protein, 13 aa, Homo sapiens
  CDR3 for beta chain variable domain of TCR clone 338742 (TRBV7-3, TRBJ2-3)
CASSYLRGDTQYF

SEQ ID NO: 677485 - protein, 13 aa, Homo sapiens
  CDR3 for alpha chain variable domain of TCR clone 338743 (TRAV35, TRAJ57)
CAGSQGGSEKPVF

SEQ ID NO: 677486 - protein, 14 aa, Homo sapiens
  CDR3 for beta chain variable domain of TCR clone 338743 (TRBV25-1, TRBJ1-1)
CASTHLGGNTEAFF

SEQ ID NO: 677487 - protein, 13 aa, Homo sapiens
  CDR3 for alpha chain variable domain of TCR clone 338744 (TRAV8-3, TRAJ36)
CAVGATGANNLFF

SEQ ID NO: 677488 - protein, 14 aa, Homo sapiens
  CDR3 for beta chain variable domain of TCR clone 338744 (TRBV19, TRBJ2-7)
CASSMGQGAIEQYF

SEQ ID NO: 677489 - protein, 10 aa, Homo sapiens
  CDR3 for alpha chain variable domain of TCR clone 338745 (TRAV12-1, TRAJ15)
CVVNLGALIF

SEQ ID NO: 677490 - protein, 16 aa, Homo sapiens
  CDR3 for beta chain variable domain of TCR clone 338745 (TRBV18, TRBJ1-5)
CASSPSTGNSNQPQHF

SEQ ID NO: 677491 - protein, 16 aa, Homo sapiens
  CDR3 for alpha chain variable domain of TCR clone 338746 (TRAV16, TRAJ4)
CALSRMFSGGYNKLIF

SEQ ID NO: 677492 - protein, 14 aa, Homo sapiens
  CDR3 for beta chain variable domain of TCR clone 338746 (TRBV7-8, TRBJ2-3)
CASSLEAGTDTQYF

SEQ ID NO: 677493 - protein, 11 aa, Homo sapiens
  CDR3 for alpha chain variable domain of TCR clone 338747 (TRAV2, TRAJ23)
CAVETRGKLIF

SEQ ID NO: 677494 - protein, 14 aa, Homo sapiens
  CDR3 for beta chain variable domain of TCR clone 338747 (TRBV2, TRBJ2-3)
CASSEGQNTGTQYF

SEQ ID NO: 677495 - protein, 16 aa, Homo sapiens
  CDR3 for alpha chain variable domain of TCR clone 338748 (TRAV30, TRAJ24)
CSTEIVGADSWGNSSL

SEQ ID NO: 677496 - protein, 15 aa, Homo sapiens
  CDR3 for beta chain variable domain of TCR clone 338748 (TRBV7-9, TRBJ1-4)
CASSARTGGNEKLFF

SEQ ID NO: 677497 - protein, 11 aa, Homo sapiens
  CDR3 for alpha chain variable domain of TCR clone 338749 (TRAV12-3, TRAJ43)
CAMSVSNDMRF

SEQ ID NO: 677498 - protein, 13 aa, Homo sapiens
  CDR3 for beta chain variable domain of TCR clone 338749 (TRBV7-9, TRBJ1-1)
CASSLAGVTEAFF

SEQ ID NO: 677499 - protein, 11 aa, Homo sapiens
  CDR3 for alpha chain variable domain of TCR clone 338750 (TRAV2, TRAJ13)
CASGGCQKVTF

SEQ ID NO: 677500 - protein, 14 aa, Homo sapiens
  CDR3 for beta chain variable domain of TCR clone 338750 (TRBV7-2, TRBJ2-7)
CASSLYPGRYEQYF

SEQ ID NO: 677501 - protein, 13 aa, Homo sapiens
  CDR3 for alpha chain variable domain of TCR clone 338751 (TRAV12-1, TRAJ40)
CVVPTSGTYKYIF

SEQ ID NO: 677502 - protein, 18 aa, Homo sapiens
  CDR3 for beta chain variable domain of TCR clone 338751 (TRBV7-6, TRBJ2-1)
CASSPRTSGMSSSNEQFF

SEQ ID NO: 677503 - protein, 15 aa, Homo sapiens
  CDR3 for alpha chain variable domain of TCR clone 338752 (TRAV13-2, TRAJ10)
CAENKIGGGGNKLTF

SEQ ID NO: 677504 - protein, 14 aa, Homo sapiens
  CDR3 for beta chain variable domain of TCR clone 338752 (TRBV11-2, TRBJ1-5)
CASSLDRGRQPQHF

SEQ ID NO: 677505 - protein, 15 aa, Homo sapiens
  CDR3 for alpha chain variable domain of TCR clone 338753 (TRAV12-3, TRAJ6)
CAMSPASGGSYIPTF

SEQ ID NO: 677506 - protein, 15 aa, Homo sapiens
  CDR3 for beta chain variable domain of TCR clone 338753 (TRBV10-2, TRBJ2-5)
CASKPEDRRQETQYF

SEQ ID NO: 677507 - protein, 16 aa, Homo sapiens
  CDR3 for alpha chain variable domain of TCR clone 338754 (TRAV30, TRAJ24)
CGTGFVDADSWGKFQF

SEQ ID NO: 677508 - protein, 15 aa, Homo sapiens
  CDR3 for beta chain variable domain of TCR clone 338754 (TRBV12-4, TRBJ2-2)
CASSPNDSGTGELFF

SEQ ID NO: 677509 - protein, 14 aa, Homo sapiens
  CDR3 for alpha chain variable domain of TCR clone 338755 (TRAV1-2, TRAJ16)
CAVNRFSDGQKLRF

SEQ ID NO: 677510 - protein, 13 aa, Homo sapiens
  CDR3 for beta chain variable domain of TCR clone 338755 (TRBV29-1, TRBJ1-1)
CSVGDSRNTEAFF

SEQ ID NO: 677511 - protein, 17 aa, Homo sapiens
  CDR3 for alpha chain variable domain of TCR clone 338756 (TRAV13-1, TRAJ52)
CAAGRNAGGTSYGKLTF

SEQ ID NO: 677512 - protein, 15 aa, Homo sapiens
  CDR3 for beta chain variable domain of TCR clone 338756 (TRBV27, TRBJ2-7)
CASSTAGTGSYEQYF

SEQ ID NO: 677513 - protein, 15 aa, Homo sapiens
  CDR3 for alpha chain variable domain of TCR clone 338757 (TRAV38-2/DV8, TRAJ47)
CAYRSAKGYGNKLVF

SEQ ID NO: 677514 - protein, 15 aa, Homo sapiens
  CDR3 for beta chain variable domain of TCR clone 338757 (TRBV6-6, TRBJ2-7)
CASSYSYGGYYEQYF

SEQ ID NO: 677515 - protein, 10 aa, Homo sapiens
  CDR3 for alpha chain variable domain of TCR clone 338758 (TRAV12-2, TRAJ20)
CAVYLYKPSF

SEQ ID NO: 677516 - protein, 14 aa, Homo sapiens
  CDR3 for beta chain variable domain of TCR clone 338758 (TRBV10-3, TRBJ2-2)
CAISEVSHSGGLFF

SEQ ID NO: 677517 - protein, 14 aa, Homo sapiens
  CDR3 for alpha chain variable domain of TCR clone 338759 (TRAV1-2, TRAJ16)
CAVNRFSDGKKLLF

SEQ ID NO: 677518 - protein, 15 aa, Homo sapiens
  CDR3 for beta chain variable domain of TCR clone 338759 (TRBV6-6, TRBJ2-7)
CASSYSYGGSYEQYF

SEQ ID NO: 677519 - protein, 13 aa, Homo sapiens
  CDR3 for alpha chain variable domain of TCR clone 338760 (TRAV3, TRAJ21)
CAVREPDFNKFYF

SEQ ID NO: 677520 - protein, 10 aa, Homo sapiens
  CDR3 for beta chain variable domain of TCR clone 338760 (TRBV6-3, TRBJ1-2)
CASGRVGYTF

SEQ ID NO: 677521 - protein, 14 aa, Homo sapiens
  CDR3 for alpha chain variable domain of TCR clone 338761 (TRAV8-3, TRAJ39)
CAVGANNAGNMLTF

SEQ ID NO: 677522 - protein, 15 aa, Homo sapiens
  CDR3 for beta chain variable domain of TCR clone 338761 (TRBV19, TRBJ1-1)
CASTSGQIQNTEAFF

SEQ ID NO: 677523 - protein, 14 aa, Homo sapiens
  CDR3 for alpha chain variable domain of TCR clone 338762 (TRAV8-1, TRAJ13)
CAVKRSGCYQKVTF

SEQ ID NO: 677524 - protein, 11 aa, Homo sapiens
  CDR3 for beta chain variable domain of TCR clone 338762 (TRBV29-1, TRBJ2-5)
CSEDRTGTQYF

SEQ ID NO: 677525 - protein, 18 aa, Homo sapiens
  CDR3 for alpha chain variable domain of TCR clone 338763 (TRAV26-1, TRAJ27)
CIVRPSFNYNTNAGKSTF

SEQ ID NO: 677526 - protein, 20 aa, Homo sapiens
  CDR3 for beta chain variable domain of TCR clone 338763 (TRBV7-8, TRBJ2-2)
CASSHLFPGPIIHITGELFF

SEQ ID NO: 677527 - protein, 11 aa, Homo sapiens
  CDR3 for alpha chain variable domain of TCR clone 338764 (TRAV21, TRAJ34)
CAVTNTDKLIF

SEQ ID NO: 677528 - protein, 17 aa, Homo sapiens
  CDR3 for beta chain variable domain of TCR clone 338764 (TRBV20-1, TRBJ2-1)
CSARSPSGGPPPMSSSS

SEQ ID NO: 677529 - protein, 14 aa, Homo sapiens
  CDR3 for alpha chain variable domain of TCR clone 338765 (TRAV9-2, TRAJ36)
CALPWRTGENNLFF

SEQ ID NO: 677530 - protein, 14 aa, Homo sapiens
  CDR3 for beta chain variable domain of TCR clone 338765 (TRBV2, TRBJ1-2)
CASSELQVNYGYTF

SEQ ID NO: 677531 - protein, 10 aa, Homo sapiens
  CDR3 for alpha chain variable domain of TCR clone 338766 (TRAV12-3, TRAJ49)
CAMNDDQFYF

SEQ ID NO: 677532 - protein, 14 aa, Homo sapiens
  CDR3 for beta chain variable domain of TCR clone 338766 (TRBV19, TRBJ2-2)
CASTVTANTGELFF

SEQ ID NO: 677533 - protein, 15 aa, Homo sapiens
  CDR3 for alpha chain variable domain of TCR clone 338767 (TRAV26-1, TRAJ29)
CIVRVEGSGNTPLVF

SEQ ID NO: 677534 - protein, 17 aa, Homo sapiens
  CDR3 for beta chain variable domain of TCR clone 338767 (TRBV5-1, TRBJ2-2)
CASSPRTGGMNTGELFF

SEQ ID NO: 677535 - protein, 15 aa, Homo sapiens
  CDR3 for alpha chain variable domain of TCR clone 338768 (TRAV3, TRAJ32)
CAVSSYGGATNKLIF

SEQ ID NO: 677536 - protein, 16 aa, Homo sapiens
  CDR3 for beta chain variable domain of TCR clone 338768 (TRBV5-1, TRBJ2-5)
CASSLSLAGAHETQYF

SEQ ID NO: 677537 - protein, 12 aa, Homo sapiens
  CDR3 for alpha chain variable domain of TCR clone 338769 (TRAV25, TRAJ11)
CAGYSGYSTLTF

SEQ ID NO: 677538 - protein, 13 aa, Homo sapiens
  CDR3 for beta chain variable domain of TCR clone 338769 (TRBV7-9, TRBJ1-2)
CASRLKQNYGYTF

SEQ ID NO: 677539 - protein, 13 aa, Homo sapiens
  CDR3 for alpha chain variable domain of TCR clone 338770 (TRAV30, TRAJ49)
CGTEPNTGNPFYF

SEQ ID NO: 677540 - protein, 14 aa, Homo sapiens
  CDR3 for beta chain variable domain of TCR clone 338770 (TRBV29-1, TRBJ2-1)
CSVEFRGIPFEQFF

SEQ ID NO: 677541 - protein, 10 aa, Homo sapiens
  CDR3 for alpha chain variable domain of TCR clone 338771 (TRAV1-2, TRAJ31)
CAFFDARLMI

SEQ ID NO: 677542 - protein, 14 aa, Homo sapiens
  CDR3 for beta chain variable domain of TCR clone 338771 (TRBV10-3, TRBJ2-7)
CHQCGTSETYEQYF

SEQ ID NO: 677543 - protein, 15 aa, Homo sapiens
  CDR3 for alpha chain variable domain of TCR clone 338772 (TRAV2, TRAJ9)
CAVEDRGTGGFNTIF

SEQ ID NO: 677544 - protein, 17 aa, Homo sapiens
  CDR3 for beta chain variable domain of TCR clone 338772 (TRBV4-3, TRBJ2-1)
CASSQFSSGRASGEQFF

SEQ ID NO: 677545 - protein, 12 aa, Homo sapiens
  CDR3 for alpha chain variable domain of TCR clone 338773 (TRAV12-3, TRAJ17)
CAMTLTGNKLAF

SEQ ID NO: 677546 - protein, 14 aa, Homo sapiens
  CDR3 for beta chain variable domain of TCR clone 338773 (TRBV28, TRBJ2-1)
CASSLNGRNNEQFF

SEQ ID NO: 677547 - protein, 13 aa, Homo sapiens
  CDR3 for alpha chain variable domain of TCR clone 338774 (TRAV8-4, TRAJ49)
CAVSDPGGNQFYF

SEQ ID NO: 677548 - protein, 13 aa, Homo sapiens
  CDR3 for beta chain variable domain of TCR clone 338774 (TRBV7-2, TRBJ2-2)
CASSLAVTGELFF

SEQ ID NO: 677549 - protein, 14 aa, Homo sapiens
  CDR3 for alpha chain variable domain of TCR clone 338775 (TRAV12-2, TRAJ13)
CAVTKTGGYQKVTF

SEQ ID NO: 677550 - protein, 14 aa, Homo sapiens
  CDR3 for beta chain variable domain of TCR clone 338775 (TRBV7-2, TRBJ2-7)
CASSPKTSFYEQYF

SEQ ID NO: 677551 - protein, 13 aa, Homo sapiens
  CDR3 for alpha chain variable domain of TCR clone 338776 (TRAV12-3, TRAJ13)
CAMSSGGYQKVTF

SEQ ID NO: 677552 - protein, 13 aa, Homo sapiens
  CDR3 for beta chain variable domain of TCR clone 338776 (TRBV20-1, TRBJ1-1)
CSAPPGGPTEAFF

SEQ ID NO: 677553 - protein, 11 aa, Homo sapiens
  CDR3 for alpha chain variable domain of TCR clone 338777 (TRAV1-2, TRAJ40)
CAVQGTYKYIF

SEQ ID NO: 677554 - protein, 16 aa, Homo sapiens
  CDR3 for beta chain variable domain of TCR clone 338777 (TRBV12-4, TRBJ2-5)
CASSFFVRGRQETQYF

SEQ ID NO: 677555 - protein, 15 aa, Homo sapiens
  CDR3 for alpha chain variable domain of TCR clone 338778 (TRAV27, TRAJ38)
CAARRNAGNNRKLIW

SEQ ID NO: 677556 - protein, 15 aa, Homo sapiens
  CDR3 for beta chain variable domain of TCR clone 338778 (TRBV7-2, TRBJ1-6)
CASSLGPDRGMPLHF

SEQ ID NO: 677557 - protein, 22 aa, Homo sapiens
  CDR3 for alpha chain variable domain of TCR clone 338779 (TRAV12-1, TRAJ17)
SSVIQPPTSVVNYKAAGNKLTF

SEQ ID NO: 677558 - protein, 15 aa, Homo sapiens
  CDR3 for beta chain variable domain of TCR clone 338779 (TRBV7-2, TRBJ2-1)
CASTHGTGIYNEQFF

SEQ ID NO: 677559 - protein, 16 aa, Homo sapiens
  CDR3 for alpha chain variable domain of TCR clone 338780 (TRAV12-1, TRAJ43)
CVVNPHRFGAGTRLTV

SEQ ID NO: 677560 - protein, 16 aa, Homo sapiens
  CDR3 for beta chain variable domain of TCR clone 338780 (TRBV3-1, TRBJ2-5)
CASSQDWASGQETQYF

SEQ ID NO: 677561 - protein, 13 aa, Homo sapiens
  CDR3 for alpha chain variable domain of TCR clone 338781 (TRAV12-3, TRAJ33)
CAMSVNSNYQLIW

SEQ ID NO: 677562 - protein, 12 aa, Homo sapiens
  CDR3 for beta chain variable domain of TCR clone 338781 (TRBV7-2, TRBJ2-1)
CASSPQDIEQFF

SEQ ID NO: 677563 - protein, 16 aa, Homo sapiens
  CDR3 for alpha chain variable domain of TCR clone 338782 (TRAV12-3, TRAJ53)
CAMSPGSGGSNYKLTF

SEQ ID NO: 677564 - protein, 15 aa, Homo sapiens
  CDR3 for beta chain variable domain of TCR clone 338782 (TRBV15, TRBJ2-3)
CATSRVRARTDTQYF

SEQ ID NO: 677565 - protein, 16 aa, Homo sapiens
  CDR3 for alpha chain variable domain of TCR clone 338783 (TRAV30, TRAJ24)
CGTEIVDADSWGKFQF

SEQ ID NO: 677566 - protein, 14 aa, Homo sapiens
  CDR3 for beta chain variable domain of TCR clone 338783 (TRBV29-1, TRBJ2-3)
CSARAGAGTDTQYF

SEQ ID NO: 677567 - protein, 11 aa, Homo sapiens
  CDR3 for alpha chain variable domain of TCR clone 338784 (TRAV26-1, TRAJ37)
CIVSVGRKLIF

SEQ ID NO: 677568 - protein, 15 aa, Homo sapiens
  CDR3 for beta chain variable domain of TCR clone 338784 (TRBV19, TRBJ2-7)
CASSIGLAVSYEQYF

SEQ ID NO: 677569 - protein, 15 aa, Homo sapiens
  CDR3 for alpha chain variable domain of TCR clone 338785 (TRAV3, TRAJ3)
CAVRDRDSSASKIIF

SEQ ID NO: 677570 - protein, 16 aa, Homo sapiens
  CDR3 for beta chain variable domain of TCR clone 338785 (TRBV7-3, TRBJ2-1)
CASSKPLAGGYNEQFF

SEQ ID NO: 677571 - protein, 12 aa, Homo sapiens
  CDR3 for alpha chain variable domain of TCR clone 338786 (TRAV3, TRAJ20)
CAVRDHDYKLSF

SEQ ID NO: 677572 - protein, 15 aa, Homo sapiens
  CDR3 for beta chain variable domain of TCR clone 338786 (TRBV9, TRBJ2-1)
CASSPPRAPYNEQFF

SEQ ID NO: 677573 - protein, 13 aa, Homo sapiens
  CDR3 for alpha chain variable domain of TCR clone 338787 (TRAV16, TRAJ28)
CAPTGAGSYQLTL

SEQ ID NO: 677574 - protein, 16 aa, Homo sapiens
  CDR3 for beta chain variable domain of TCR clone 338787 (TRBV28, TRBJ1-5)
CASSLTGQGWNQTQHF

SEQ ID NO: 677575 - protein, 14 aa, Homo sapiens
  CDR3 for alpha chain variable domain of TCR clone 338788 (TRAV8-4, TRAJ38)
CAVSYAGNNRKLIR

SEQ ID NO: 677576 - protein, 15 aa, Homo sapiens
  CDR3 for beta chain variable domain of TCR clone 338788 (TRBV12-4, TRBJ2-1)
CASSLLATGNNEQFF

SEQ ID NO: 677577 - protein, 13 aa, Homo sapiens
  CDR3 for alpha chain variable domain of TCR clone 338789 (TRAV27, TRAJ29)
CAGAHSGNTPLVL

SEQ ID NO: 677578 - protein, 18 aa, Homo sapiens
  CDR3 for beta chain variable domain of TCR clone 338789 (TRBV6-6, TRBJ1-3)
CASSYSKWDSISGNTIYF

SEQ ID NO: 677579 - protein, 14 aa, Homo sapiens
  CDR3 for alpha chain variable domain of TCR clone 338790 (TRAV29/DV5, TRAJ6)
CAARVSGGSYIPTF

SEQ ID NO: 677580 - protein, 13 aa, Homo sapiens
  CDR3 for beta chain variable domain of TCR clone 338790 (TRBV7-9, TRBJ1-2)
CASSLKQNYGYTF

SEQ ID NO: 677581 - protein, 16 aa, Homo sapiens
  CDR3 for alpha chain variable domain of TCR clone 338791 (TRAV30, TRAJ57)
CGTGWAPQGGSEKLVF

SEQ ID NO: 677582 - protein, 14 aa, Homo sapiens
  CDR3 for beta chain variable domain of TCR clone 338791 (TRBV18, TRBJ1-1)
CASSPGCQGVEAFF

SEQ ID NO: 677583 - protein, 14 aa, Homo sapiens
  CDR3 for alpha chain variable domain of TCR clone 338792 (TRAV3, TRAJ40)
CAVRDRRGTYKYIF

SEQ ID NO: 677584 - protein, 13 aa, Homo sapiens
  CDR3 for beta chain variable domain of TCR clone 338792 (TRBV6-5, TRBJ2-7)
CASSGGSFYEQYF

SEQ ID NO: 677585 - protein, 15 aa, Homo sapiens
  CDR3 for alpha chain variable domain of TCR clone 338793 (TRAV12-3, TRAJ6)
CAMSATTGGSYIPTF

SEQ ID NO: 677586 - protein, 15 aa, Homo sapiens
  CDR3 for beta chain variable domain of TCR clone 338793 (TRBV7-2, TRBJ1-2)
CASSLVSGGDYGYTF

SEQ ID NO: 677587 - protein, 16 aa, Homo sapiens
  CDR3 for alpha chain variable domain of TCR clone 338794 (TRAV8-1, TRAJ39)
CAVNVPSYNAGNMLTF

SEQ ID NO: 677588 - protein, 12 aa, Homo sapiens
  CDR3 for beta chain variable domain of TCR clone 338794 (TRBV11-2, TRBJ2-2)
CASSLGGGELFF

SEQ ID NO: 677589 - protein, 14 aa, Homo sapiens
  CDR3 for alpha chain variable domain of TCR clone 338795 (TRAV3, TRAJ17)
CAVRDRSCRQQANF

SEQ ID NO: 677590 - protein, 13 aa, Homo sapiens
  CDR3 for beta chain variable domain of TCR clone 338795 (TRBV7-2, TRBJ1-5)
CASSLAEGGANEF

SEQ ID NO: 677591 - protein, 12 aa, Homo sapiens
  CDR3 for alpha chain variable domain of TCR clone 338796 (TRAV12-3, TRAJ40)
CAMSSGTYKYIF

SEQ ID NO: 677592 - protein, 20 aa, Homo sapiens
  CDR3 for beta chain variable domain of TCR clone 338796 (TRBV7-8, TRBJ2-2)
CVSSHLFPGPTIHITGELFF

SEQ ID NO: 677593 - protein, 16 aa, Homo sapiens
  CDR3 for alpha chain variable domain of TCR clone 338797 (TRAV12-2, TRAJ43)
CAGDDMRFGAGTRMTV

SEQ ID NO: 677594 - protein, 16 aa, Homo sapiens
  CDR3 for beta chain variable domain of TCR clone 338797 (TRBV2, TRBJ2-4)
CASSEAPGGEQNIQYF

SEQ ID NO: 677595 - protein, 16 aa, Homo sapiens
  CDR3 for alpha chain variable domain of TCR clone 338798 (TRAV38-1, TRAJ32)
CAFMKGGGGATNKLIF

SEQ ID NO: 677596 - protein, 13 aa, Homo sapiens
  CDR3 for beta chain variable domain of TCR clone 338798 (TRBV20-1, TRBJ2-5)
CSAREACQENQYF

SEQ ID NO: 677597 - protein, 15 aa, Homo sapiens
  CDR3 for alpha chain variable domain of TCR clone 338799 (TRAV35, TRAJ58)
SAGRRQETSGSRLTF

SEQ ID NO: 677598 - protein, 16 aa, Homo sapiens
  CDR3 for beta chain variable domain of TCR clone 338799 (TRBV2, TRBJ2-1)
CASSVGGSLSYNEQFF

SEQ ID NO: 677599 - protein, 23 aa, Homo sapiens
  CDR3 for alpha chain variable domain of TCR clone 338800 (TRAV3, TRAJ38)
CAVRDCLNAGNNHIQNPDPAVHQ

SEQ ID NO: 677600 - protein, 13 aa, Homo sapiens
  CDR3 for beta chain variable domain of TCR clone 338800 (TRBV12-4, TRBJ1-2)
CASSLRQGKGYTF

SEQ ID NO: 677601 - protein, 13 aa, Homo sapiens
  CDR3 for alpha chain variable domain of TCR clone 338801 (TRAV20, TRAJ37)
CAGCSSNTGKLIF

SEQ ID NO: 677602 - protein, 16 aa, Homo sapiens
  CDR3 for beta chain variable domain of TCR clone 338801 (TRBV6-1, TRBJ2-5)
CASSETLDRGAETQYF

SEQ ID NO: 677603 - protein, 13 aa, Homo sapiens
  CDR3 for alpha chain variable domain of TCR clone 338802 (TRAV12-2, TRAJ52)
CAVSGTSYGKLTF

SEQ ID NO: 677604 - protein, 15 aa, Homo sapiens
  CDR3 for beta chain variable domain of TCR clone 338802 (TRBV7-9, TRBJ1-5)
CASSQGHQPNQPQHF

SEQ ID NO: 677605 - protein, 13 aa, Homo sapiens
  CDR3 for alpha chain variable domain of TCR clone 338803 (TRAV35, TRAJ44)
CAGPSGTASKLTF

SEQ ID NO: 677606 - protein, 17 aa, Homo sapiens
  CDR3 for beta chain variable domain of TCR clone 338803 (TRBV7-8, TRBJ1-2)
CASSLRPLQGHLYGYTF

SEQ ID NO: 677607 - protein, 15 aa, Homo sapiens
  CDR3 for alpha chain variable domain of TCR clone 338804 (TRAV8-6, TRAJ38)
CAVSSNAGNNRKLIW

SEQ ID NO: 677608 - protein, 13 aa, Homo sapiens
  CDR3 for beta chain variable domain of TCR clone 338804 (TRBV19, TRBJ1-2)
CASSQGQVYGYTF

SEQ ID NO: 677609 - protein, 13 aa, Homo sapiens
  CDR3 for alpha chain variable domain of TCR clone 338805 (TRAV23/DV6, TRAJ17)
CAARGRAAGNKLT

SEQ ID NO: 677610 - protein, 13 aa, Homo sapiens
  CDR3 for beta chain variable domain of TCR clone 338805 (TRBV7-6, TRBJ1-2)
CASSLVADYGYTF

SEQ ID NO: 677611 - protein, 13 aa, Homo sapiens
  CDR3 for alpha chain variable domain of TCR clone 338806 (TRAV22, TRAJ26)
CAVEHNYGQNFVF
